United States Patent Application Publication US 2019/0290729 A1 - sequence listing, part 2

SEQ ID NO: 7432 - protein, 32 aa, Artificial Sequence
  Non-cyclic GFR-binding peptide
  MOD_RES (14)..(15)..(16)..(17)..(18): Xaa is A or G
  MOD_RES (19)..(20)..(21)..(22): Xaa is A or G or absent
VPTELNAISMLYFXXXXXXXXXLKKYREMVVE

SEQ ID NO: 7433 - protein, 43 aa, Artificial Sequence
  Non-cyclic GFR-binding peptide
  MOD_RES (6)..(7)..(40)..(42): Xaa is C or S
  MOD_RES (21)..(22)..(23)..(24)..(25): Xaa is A or G
  MOD_RES (26)..(27)..(28)..(29): Xaa is A or G or absent
ASASPXXVSQDLNAISILYFXXXXXXXXXLKKYRMIVKSXKXS

SEQ ID NO: 7434 - protein, 39 aa, Artificial Sequence
  Non-cyclic GFR-binding peptide
  MOD_RES (37)..(39): Xaa is C or S
RPTQVQLSPISVLYKEIVRKKPIFLKYHYTLEDHLAXKX

SEQ ID NO: 7435 - protein, 38 aa, Artificial Sequence
  Non-cyclic GFR-binding peptide
  MOD_RES (4)..(5)..(38): Xaa is C or S
GKAXXVPTKLSAISVLYLDDMGVPTLKNYQEGMSVAEX

SEQ ID NO: 7436 - protein, 39 aa, Artificial Sequence
  Non-cyclic GFR-binding peptide
  MOD_RES (5)..(6)..(38): Xaa is C or S
VPKPXXAPTQLSAISVLYLDDSSNVILKNYQNMVVRAXG

SEQ ID NO: 7437 - protein, 41 aa, Artificial Sequence
  Non-cyclic GFR-binding peptide
  MOD_RES (5)..(6)..(40): Xaa is C or S
  MOD_RES (20)..(21)..(22)..(23)..(24): Xaa is A or G
  MOD_RES (25)..(26)..(27)..(28): Xaa is A or G or absent
VPKPXXAPTQLSAISVLYLXXXXXXXXXLKNYQNMVVRAXG

SEQ ID NO: 7438 - protein, 36 aa, Artificial Sequence
  Non-cyclic GFR-binding peptide
  MOD_RES (33)..(35): Xaa is C or S
  MOD_RES (14)..(15)..(16)..(17)..(18): Xaa is A or G
  MOD_RES (19)..(20)..(21)..(22): Xaa is A or G or absent
VPQDLNAISILYFXXXXXXXXXLKKYRMVVKSXKXS

SEQ ID NO: 7439 - protein, 36 aa, Artificial Sequence
  Non-cyclic GFR-binding peptide
  MOD_RES (2)..(3)..(36): Xaa is C or S
  MOD_RES (17)..(18)..(19)..(20)..(21): Xaa is A or G
  MOD_RES (22)..(23)..(24)..(25): Xaa is A or G or absent
PXXVSQDLSATSILYYXXXXXXXXXLRKHRMIVKSX

SEQ ID NO: 7440 - protein, 34 aa, Artificial Sequence
  Non-cyclic GFR-binding peptide
  MOD_RES (1)..(32)..(34): Xaa is C or S
XVSQDLNAISILYFIGKTPKILKKYRMIVKSXKX

SEQ ID NO: 7441 - protein, 34 aa, Artificial Sequence
  Non-cyclic GFR-binding peptide
  MOD_RES (14)..(15)..(16)..(17)..(18): Xaa is A or G
  MOD_RES (19)..(20)..(21)..(22): Xaa is A or G or absent
VPTKLSAISVLYLXXXXXXXXXLKNYQEGMSVAE

SEQ ID NO: 7442 - protein, 40 aa, Artificial Sequence
  Non-cyclic GFR-binding peptide
  MOD_RES (3)..(4)..(37)..(39): Xaa is C or S
  MOD_RES (18)..(19)..(20)..(21)..(22): Xaa is A or G
  MOD_RES (23)..(24)..(25)..(26): Xaa is A or G or absent
SPXXVPQDLSAISILYLXXXXXXXXXLKNYQMVVKSXKXS

SEQ ID NO: 7443 - protein, 35 aa, Artificial Sequence
  Non-cyclic GFR-binding peptide
  MOD_RES (2)..(3)..(35): Xaa is C or S
AXXVPTELSPISMLYKDEYDKVVLKYHYEMVVEGX

SEQ ID NO: 7444 - protein, 44 aa, Artificial Sequence
  Non-cyclic GFR-binding peptide
  MOD_RES (6)..(7)..(41)..(43): Xaa is C or S
  MOD_RES (21)..(22)..(23)..(24)..(25): Xaa is A or G
  MOD_RES (26)..(27)..(28)..(29): Xaa is A or G or absent
YVPKPXXAPTKLSAISVLYLXXXXXXXXXLKNYQNMVVRSXGXH

SEQ ID NO: 7445 - protein, 34 aa, Artificial Sequence
  Non-cyclic GFR-binding peptide
  MOD_RES (14)..(15)..(16)..(17)..(18): Xaa is A or G
  MOD_RES (19)..(20)..(21)..(22): Xaa is A or G or absent
VPTKLSATSVLYYXXXXXXXXXLRKHREGMSVAE

SEQ ID NO: 7446 - protein, 38 aa, Artificial Sequence
  Non-cyclic GFR-binding peptide
  MOD_RES (3)..(4)..(37): Xaa is C or S
  MOD_RES (18)..(19)..(20)..(21)..(22): Xaa is A or G
  MOD_RES (23)..(24)..(25)..(26): Xaa is A or G or absent
SPXXVPQDLNAISILYFXXXXXXXXXLKKYRMVVKSXK

SEQ ID NO: 7447 - protein, 39 aa, Artificial Sequence
  Non-cyclic GFR-binding peptide
  MOD_RES (5)..(6): Xaa is C or S
  MOD_RES (20)..(21)..(22)..(23)..(24): Xaa is A or G
  MOD_RES (25)..(26)..(27)..(28): Xaa is A or G or absent
VPKPXXAPTKLSATSVLYYXXXXXXXXXLRKHRNMVVRS

SEQ ID NO: 7448 - protein, 37 aa, Artificial Sequence
  Non-cyclic GFR-binding peptide
  MOD_RES (3)..(4)..(36): Xaa is C or S
KPXXAPTKLSAISVLYLDDSSNVILKNYQNMVVRSXG

SEQ ID NO: 7449 - protein, 33 aa, Artificial Sequence
  Non-cyclic GFR-binding peptide
  MOD_RES (32)..(32): Xaa is C or S
VPTELSATSMLYYDEYDKVVLRKHREMVVEGXG

SEQ ID NO: 7450 - protein, 40 aa, Artificial Sequence
  Non-cyclic GFR-binding peptide
  MOD_RES (1)..(2)..(37)..(39): Xaa is C or S
  MOD_RES (16)..(17)..(18)..(19)..(20): Xaa is A or G
  MOD_RES (21)..(22)..(23)..(24): Xaa is A or G or absent
XXVPTKLNAISVLYFXXXXXXXXXLKKYREGMSVAEXGXR

SEQ ID NO: 7451 - protein, 39 aa, Artificial Sequence
  Non-cyclic GFR-binding peptide
  MOD_RES (5)..(6)..(39): Xaa is C or S
  MOD_RES (20)..(21)..(22)..(23)..(24): Xaa is A or G
  MOD_RES (25)..(26)..(27)..(28): Xaa is A or G or absent
SASPXXVSQDLSPISILYKXXXXXXXXXLKYHYMIVKSX

SEQ ID NO: 7452 - protein, 36 aa, Artificial Sequence
  Non-cyclic GFR-binding peptide
  MOD_RES (3)..(4): Xaa is C or S
  MOD_RES (18)..(19)..(20)..(21)..(22): Xaa is A or G
  MOD_RES (23)..(24)..(25)..(26): Xaa is A or G or absent
KPXXAPTQLSPISVLYKXXXXXXXXXLKYHYNMVVR

SEQ ID NO: 7453 - protein, 38 aa, Artificial Sequence
  Non-cyclic GFR-binding peptide
  MOD_RES (1)..(35)..(37): Xaa is C or S
  MOD_RES (15)..(16)..(17)..(18)..(19): Xaa is A or G
  MOD_RES (20)..(21)..(22)..(23): Xaa is A or G or absent
XVPTELSPISMLYKXXXXXXXXXLKYHYEMVVEGXGXR

SEQ ID NO: 7454 - protein, 38 aa, Artificial Sequence
  Non-cyclic GFR-binding peptide
  MOD_RES (37)..(37): Xaa is C or S
RPTQVQLSATSVLYYEIVRKKPIFLRKHRTLEDHLAXK

SEQ ID NO: 7455 - protein, 34 aa, Artificial Sequence
  Non-cyclic GFR-binding peptide
  MOD_RES (1)..(2): Xaa is C or S
  MOD_RES (16)..(17)..(18)..(19)..(20): Xaa is A or G
  MOD_RES (21)..(22)..(23)..(24): Xaa is A or G or absent
XXVPQDLSAISILYLXXXXXXXXXLKNYQMVVKS

SEQ ID NO: 7456 - protein, 35 aa, Artificial Sequence
  Non-cyclic GFR-binding peptide
  MOD_RES (4)..(5): Xaa is C or S
ASPXXVPQDLSATSILYYVGRTPKVLRKHRMVVKS

SEQ ID NO: 7457 - protein, 40 aa, Artificial Sequence
  Non-cyclic GFR-binding peptide
  MOD_RES (5)..(6)..(39): Xaa is C or S
  MOD_RES (20)..(21)..(22)..(23)..(24): Xaa is A or G
  MOD_RES (25)..(26)..(27)..(28): Xaa is A or G or absent
SASPXXVSQDLSPISILYKXXXXXXXXXLKYHYMIVKSXK

SEQ ID NO: 7458 - protein, 39 aa, Artificial Sequence
  Non-cyclic GFR-binding peptide
  MOD_RES (5)..(6)..(39): Xaa is C or S
  MOD_RES (20)..(21)..(22)..(23)..(24): Xaa is A or G
  MOD_RES (25)..(26)..(27)..(28): Xaa is A or G or absent
SAAPXXVPQALNAISILYFXXXXXXXXXLKKYRMIVRSX

SEQ ID NO: 7459 - protein, 39 aa, Artificial Sequence
  Non-cyclic GFR-binding peptide
  MOD_RES (6)..(7): Xaa is C or S
  MOD_RES (21)..(22)..(23)..(24)..(25): Xaa is A or G
  MOD_RES (26)..(27)..(28)..(29): Xaa is A or G or absent
ASASPXXVSQDLSPISILYKXXXXXXXXXLKYHYMIVKS

SEQ ID NO: 7460 - protein, 37 aa, Artificial Sequence
  Non-cyclic GFR-binding peptide
  MOD_RES (4)..(5)..(36): Xaa is C or S
ASPXXVSQDLSPISILYKIGKTPKILKYHYMIVKSXK

SEQ ID NO: 7461 - protein, 34 aa, Artificial Sequence
  Non-cyclic GFR-binding peptide
  MOD_RES (1)..(2)..(33): Xaa is C or S
XXVSQDLSAISILYLIGKTPKILKNYQMIVKSXK

SEQ ID NO: 7462 - protein, 36 aa, Artificial Sequence
  Non-cyclic GFR-binding peptide
  MOD_RES (3)..(4): Xaa is C or S
  MOD_RES (18)..(19)..(20)..(21)..(22): Xaa is A or G
  MOD_RES (23)..(24)..(25)..(26): Xaa is A or G or absent
APXXVPQALSATSILYYXXXXXXXXXLRKHRMIVRS

SEQ ID NO: 7463 - protein, 41 aa, Artificial Sequence
  Non-cyclic GFR-binding peptide
  MOD_RES (6)..(7)..(39)..(41): Xaa is C or S
YVPKPXXAPTKLSAISVLYLDDSSNVILKNYQNMVVRSXGX

SEQ ID NO: 7464 - protein, 38 aa, Artificial Sequence
  Non-cyclic GFR-binding peptide
  MOD_RES (6)..(7)..(38): Xaa is C or S
ASASPXXVSQDLSAISILYLIGKTPKILKNYQMIVKSX

SEQ ID NO: 7465 - protein, 35 aa, Artificial Sequence
  Non-cyclic GFR-binding peptide
  MOD_RES (2)..(3)..(35): Xaa is C or S
AXXAPTKLSPISVLYKDSSNNVILKYHYNMVVKAX

SEQ ID NO: 7466 - protein, 32 aa, Artificial Sequence; identical to SEQ ID NO: 818
  Non-cyclic GFR-binding peptide

SEQ ID NO: 7467 - protein, 38 aa, Artificial Sequence
  Non-cyclic GFR-binding peptide
  MOD_RES (4)..(5)..(36)..(38): Xaa is C or S
ASPXXVPQDLSAISILYLVGRTPKVLKNYQMVVKSXKX

SEQ ID NO: 7468 - protein, 41 aa, Artificial Sequence
  Non-cyclic GFR-binding peptide
  MOD_RES (6)..(7)..(39)..(41): Xaa is C or S
YVPKPXXAPTKLSPISVLYKDDSSNVILKYHYNMVVRSXGX

SEQ ID NO: 7469 - protein, 38 aa, Artificial Sequence
  Non-cyclic GFR-binding peptide
  MOD_RES (36)..(38): Xaa is C or S
  MOD_RES (15)..(16)..(17)..(18)..(19): Xaa is A or G
  MOD_RES (20)..(21)..(22)..(23): Xaa is A or G or absent
PTQVQLSAISVLYLXXXXXXXXXLKNYQTLEDHLAXKX

SEQ ID NO: 7470 - protein, 36 aa, Artificial Sequence
  Non-cyclic GFR-binding peptide
  MOD_RES (2)..(3)..(36): Xaa is C or S
  MOD_RES (17)..(18)..(19)..(20)..(21): Xaa is A or G
  MOD_RES (22)..(23)..(24)..(25): Xaa is A or G or absent
PXXVSQDLSAISILYLXXXXXXXXXLKNYQMIVKSX

SEQ ID NO: 7471 - protein, 42 aa, Artificial Sequence
  Non-cyclic GFR-binding peptide
  MOD_RES (6)..(7)..(40)..(42): Xaa is C or S
  MOD_RES (21)..(22)..(23)..(24)..(25): Xaa is A or G
  MOD_RES (26)..(27)..(28)..(29): Xaa is A or G or absent
ASASPXXVPQDLSPISILYKXXXXXXXXXLKYHYMVVKSXKX

SEQ ID NO: 7472 - protein, 40 aa, Artificial Sequence
  Non-cyclic GFR-binding peptide
  MOD_RES (4)..(5)..(39): Xaa is C or S
  MOD_RES (19)..(20)..(21)..(22)..(23): Xaa is A or G
  MOD_RES (24)..(25)..(26)..(27): Xaa is A or G or absent
PKPXXAPTKLSATSVLYYXXXXXXXXXLRKHRNMVVRSXG

SEQ ID NO: 7473 - protein, 40 aa, Artificial Sequence
  Non-cyclic GFR-binding peptide
  MOD_RES (5)..(6)..(39): Xaa is C or S
  MOD_RES (20)..(21)..(22)..(23)..(24): Xaa is A or G
  MOD_RES (25)..(26)..(27)..(28): Xaa is A or G or absent
SASPXXVPQDLSAISILYLXXXXXXXXXLKNYQMVVKSXK

SEQ ID NO: 7474 - protein, 37 aa, Artificial Sequence
  Non-cyclic GFR-binding peptide
  MOD_RES (3)..(4)..(36): Xaa is C or S
KAXXVPTELNAISMLYFDEYDKVVLKKYREMVVEGXG

SEQ ID NO: 7475 - protein, 39 aa, Artificial Sequence
  Non-cyclic GFR-binding peptide
  MOD_RES (5)..(6): Xaa is C or S
  MOD_RES (20)..(21)..(22)..(23)..(24): Xaa is A or G
  MOD_RES (25)..(26)..(27)..(28): Xaa is A or G or absent
IPKAXXVPTELSPISMLYKXXXXXXXXXLKYHYDMVVEG

SEQ ID NO: 7476 - protein, 34 aa, Artificial Sequence
  Non-cyclic GFR-binding peptide
  MOD_RES (33)..(33): Xaa is C or S
  MOD_RES (14)..(15)..(16)..(17)..(18): Xaa is A or G
  MOD_RES (19)..(20)..(21)..(22): Xaa is A or G or absent
VSQDLNAISILYFXXXXXXXXXLKKYRMIVKSXK

SEQ ID NO: 7477 - protein, 39 aa, Artificial Sequence
  Non-cyclic GFR-binding peptide
  MOD_RES (6)..(7)..(39): Xaa is C or S
TVPKPXXAPTQLSATSVLYYDDSSNVILRKHRNMVVRAX

SEQ ID NO: 7478 - protein, 37 aa, Artificial Sequence
  Non-cyclic GFR-binding peptide
  MOD_RES (2)..(3)..(34)..(36): Xaa is C or S
PXXVPQDLSAISILYLVGRTPKVLKNYQMVVKSXKXS

SEQ ID NO: 7479 - protein, 43 aa, Artificial Sequence
  Non-cyclic GFR-binding peptide
  MOD_RES (4)..(5)..(40)..(42): Xaa is C or S
  MOD_RES (19)..(20)..(21)..(22)..(23): Xaa is A or G
  MOD_RES (24)..(25)..(26)..(27): Xaa is A or G or absent
GKAXXVPTKLSAISVLYLXXXXXXXXXLKNYQEGMSVAEXGXR

SEQ ID NO: 7480 - protein, 41 aa, Artificial Sequence
  Non-cyclic GFR-binding peptide
  MOD_RES (6)..(7)..(39)..(41): Xaa is C or S
KIPKAXXVPTELSATSMLYYDENEKVVLRKHRDMVVEGXGX

SEQ ID NO: 7481 - protein, 42 aa, Artificial Sequence
  Non-cyclic GFR-binding peptide
  MOD_RES (5)..(6)..(40)..(42): Xaa is C or S
  MOD_RES (20)..(21)..(22)..(23)..(24): Xaa is A or G
  MOD_RES (25)..(26)..(27)..(28): Xaa is A or G or absent
VPKPXXAPTKLSATSVLYYXXXXXXXXXLRKHRNMVVRSXGX

SEQ ID NO: 7482 - protein, 36 aa, Artificial Sequence
  Non-cyclic GFR-binding peptide
  MOD_RES (2)..(36): Xaa is C or S
  MOD_RES (16)..(17)..(18)..(19)..(20): Xaa is A or G
  MOD_RES (21)..(22)..(23)..(24): Xaa is A or G or absent
TXAPTKLSAISVLYLXXXXXXXXXLKNYQNMVVRSX

SEQ ID NO: 7483 - protein, 41 aa, Artificial Sequence
  Non-cyclic GFR-binding peptide
  MOD_RES (4)..(41): Xaa is C or S
  MOD_RES (20)..(21)..(22)..(23)..(24): Xaa is A or G
  MOD_RES (25)..(26)..(27)..(28): Xaa is A or G or absent
NVQXRPTQVQLSAISVLYLXXXXXXXXXLKNYQTLEDHLAX

SEQ ID NO: 7484 - protein, 37 aa, Artificial Sequence
  Non-cyclic GFR-binding peptide
  MOD_RES (2)..(3)..(36): Xaa is C or S
  MOD_RES (17)..(18)..(19)..(20)..(21): Xaa is A or G
  MOD_RES (22)..(23)..(24)..(25): Xaa is A or G or absent
PXXVSQDLSATSILYYXXXXXXXXXLRKHRMIVKSXK

SEQ ID NO: 7485 - protein, 34 aa, Artificial Sequence
  Non-cyclic GFR-binding peptide
  MOD_RES (34)..(34): Xaa is C or S
  MOD_RES (14)..(15)..(16)..(17)..(18): Xaa is A or G
  MOD_RES (19)..(20)..(21)..(22): Xaa is A or G or absent
APTKLSAISVLYLXXXXXXXXXLKNYQNMVVKAX

SEQ ID NO: 7486 - protein, 35 aa, Artificial Sequence
  Non-cyclic GFR-binding peptide
  MOD_RES (1)..(2): Xaa is C or S
  MOD_RES (16)..(17)..(18)..(19)..(20): Xaa is A or G
  MOD_RES (21)..(22)..(23)..(24): Xaa is A or G or absent
XXVPTELNAISMLYFXXXXXXXXXLKKYREMVVEG

SEQ ID NO: 7487 - protein, 39 aa, Artificial Sequence
  Non-cyclic GFR-binding peptide
  MOD_RES (3)..(4)..(38): Xaa is C or S
  MOD_RES (18)..(19)..(20)..(21)..(22): Xaa is A or G
  MOD_RES (23)..(24)..(25)..(26): Xaa is A or G or absent
KAXXVPTELNAISMLYFXXXXXXXXXLKKYRDMVVEGXG

SEQ ID NO: 7488 - protein, 37 aa, Artificial Sequence
  Non-cyclic GFR-binding peptide
  MOD_RES (4)..(36): Xaa is C or S
KPTXAPTKLSATSVLYYDDSSNVILRKHRNMVVRSXG

SEQ ID NO: 7489 - protein, 37 aa, Artificial Sequence
  Non-cyclic GFR-binding peptide
  MOD_RES (4)..(5): Xaa is C or S
  MOD_RES (19)..(20)..(21)..(22)..(23): Xaa is A or G
  MOD_RES (24)..(25)..(26)..(27): Xaa is A or G or absent
ASPXXVPQDLSATSILYYXXXXXXXXXLRKHRMVVKS

SEQ ID NO: 7490 - protein, 43 aa, Artificial Sequence
  Non-cyclic GFR-binding peptide
  MOD_RES (6)..(40)..(42): Xaa is C or S
  MOD_RES (20)..(21)..(22)..(23)..(24): Xaa is A or G
  MOD_RES (25)..(26)..(27)..(28): Xaa is A or G or absent
VTKPTXAPTKLSATSVLYYXXXXXXXXXLRKHRNMVVRSXGXH

SEQ ID NO: 7491 - protein, 37 aa, Artificial Sequence
  Non-cyclic GFR-binding peptide
  MOD_RES (2)..(3)..(35)..(37): Xaa is C or S
PXXAPTKLSATSVLYYDDSSNVILRKHRNMVVRSXGX

SEQ ID NO: 7492 - protein, 33 aa, Artificial Sequence
  Non-cyclic GFR-binding peptide
  MOD_RES (2)..(3): Xaa is C or S
PXXAPTKLSATSVLYYDDSSNVILRKHRNMVVR

SEQ ID NO: 7493 - protein, 37 aa, Artificial Sequence
  Non-cyclic GFR-binding peptide
  MOD_RES (3)..(4): Xaa is C or S
  MOD_RES (18)..(19)..(20)..(21)..(22): Xaa is A or G
  MOD_RES (23)..(24)..(25)..(26): Xaa is A or G or absent
KPXXAPTQLSATSVLYYXXXXXXXXXLRKHRNMVVRA

SEQ ID NO: 7494 - protein, 36 aa, Artificial Sequence
  Non-cyclic GFR-binding peptide
  MOD_RES (4)..(36): Xaa is C or S
KPTXAPTKLSAISVLYLDDSSNVILKNYQNMVVRSX

SEQ ID NO: 7495 - protein, 35 aa, Artificial Sequence
  Non-cyclic GFR-binding peptide
  MOD_RES (2)..(3): Xaa is C or S
  MOD_RES (17)..(18)..(19)..(20)..(21): Xaa is A or G
  MOD_RES (22)..(23)..(24)..(25): Xaa is A or G or absent
PXXVSQDLNAISILYFXXXXXXXXXLKKYRMIVKS

SEQ ID NO: 7496 - protein, 36 aa, Artificial Sequence
  Non-cyclic GFR-binding peptide
  MOD_RES (34)..(36): Xaa is C or S
  MOD_RES (14)..(15)..(16)..(17)..(18): Xaa is A or G
  MOD_RES (19)..(20)..(21)..(22): Xaa is A or G or absent
APTQLSATSVLYYXXXXXXXXXLRKHRNMVVRAXGX

SEQ ID NO: 7497 - protein, 42 aa, Artificial Sequence
  Non-cyclic GFR-binding peptide
  MOD_RES (7)..(39)..(41): Xaa is C or S
HVTKPTXAPTKLSATSVLYYDDSSNVILRKHRNMVVRSXGXH

SEQ ID NO: 7498 - protein, 34 aa, Artificial Sequence
  Non-cyclic GFR-binding peptide
  MOD_RES (16)..(17)..(18)..(19)..(20): Xaa is A or G
  MOD_RES (21)..(22)..(23)..(24): Xaa is A or G or absent
RPTQVQLNAISVLYFXXXXXXXXXLKKYRTLEDH

SEQ ID NO: 7499 - protein, 35 aa, Artificial Sequence
  Non-cyclic GFR-binding peptide
  MOD_RES (3)..(4): Xaa is C or S
KAXXVPTELSATSMLYYDEYDKVVLRKHREMVVEG

SEQ ID NO: 7500 - protein, 37 aa, Artificial Sequence
  Non-cyclic GFR-binding peptide
  MOD_RES (1)..(35)..(37): Xaa is C or S
  MOD_RES (15)..(16)..(17)..(18)..(19): Xaa is A or G
  MOD_RES (20)..(21)..(22)..(23): Xaa is A or G or absent
XAPTQLSPISVLYKXXXXXXXXXLKYHYNMVVRAXGX

SEQ ID NO: 7501 - protein, 38 aa, Artificial Sequence
  Non-cyclic GFR-binding peptide
  MOD_RES (2)..(3)..(35)..(37): Xaa is C or S
AXXAPTKLSPISVLYKDSSNNVILKYHYNMVVKAXGXH

SEQ ID NO: 7502 - protein, 34 aa, Artificial Sequence
  Non-cyclic GFR-binding peptide
  MOD_RES (31)..(33): Xaa is C or S
VPQALSAISILYLVGRKPKVLKNYQMIVRSXKXS

SEQ ID NO: 7503 - protein, 37 aa, Artificial Sequence
  Non-cyclic GFR-binding peptide
  MOD_RES (5)..(5): Xaa is C or S
  MOD_RES (19)..(20)..(21)..(22)..(23): Xaa is A or G
  MOD_RES (24)..(25)..(26)..(27): Xaa is A or G or absent
TKPTXAPTKLSAISVLYLXXXXXXXXXLKNYQNMVVR

SEQ ID NO: 7504 - protein, 41 aa, Artificial Sequence
  Non-cyclic GFR-binding peptide
  MOD_RES (2)..(3)..(38)..(40): Xaa is C or S
  MOD_RES (17)..(18)..(19)..(20)..(21): Xaa is A or G
  MOD_RES (22)..(23)..(24)..(25): Xaa is A or G or absent
AXXVPTKLSATSVLYYXXXXXXXXXLRKHREGMSVAEXGXR

SEQ ID NO: 7505 - protein, 39 aa, Artificial Sequence
  Non-cyclic GFR-binding peptide
  MOD_RES (4)..(5)..(39): Xaa is C or S
  MOD_RES (19)..(20)..(21)..(22)..(23): Xaa is A or G
  MOD_RES (24)..(25)..(26)..(27): Xaa is A or G or absent
PKAXXVPTELSPISMLYKXXXXXXXXXLKYHYDMVVEGX

SEQ ID NO: 7506 - protein, 38 aa, Artificial Sequence
  Non-cyclic GFR-binding peptide
  MOD_RES (3)..(35)..(37): Xaa is C or S
PTXAPTKLSATSVLYYDDSSNVILRKHRNMVVRSXGXH

SEQ ID NO: 7507 - protein, 43 aa, Artificial Sequence
  Non-cyclic GFR-binding peptide
  MOD_RES (3)..(40)..(42): Xaa is C or S
  MOD_RES (19)..(20)..(21)..(22)..(23): Xaa is A or G
  MOD_RES (24)..(25)..(26)..(27): Xaa is A or G or absent
VQXRPTQVQLSATSVLYYXXXXXXXXXLRKHRTLEDHLAXKXE

SEQ ID NO: 7508 - protein, 35 aa, Artificial Sequence
  Non-cyclic GFR-binding peptide
  MOD_RES (32)..(34): Xaa is C or S
APTKLSPISVLYKDSSNNVILKYHYNMVVKAXGXH

SEQ ID NO: 7509 - protein, 34 aa, Artificial Sequence
  Non-cyclic GFR-binding peptide
  MOD_RES (1)..(2)..(33): Xaa is C or S
XXVSQDLNAISILYFIGKTPKILKKYRMIVKSXK

SEQ ID NO: 7510 - protein, 34 aa, Artificial Sequence
  Non-cyclic GFR-binding peptide
  MOD_RES (2)..(3): Xaa is C or S
AXXAPTKLSPISVLYKDSSNNVILKYHYNMVVKA

SEQ ID NO: 7511 - protein, 34 aa, Artificial Sequence
  Non-cyclic GFR-binding peptide
  MOD_RES (1)..(33): Xaa is C or S
XAPTKLNAISVLYFDSSNNVILKKYRNMVVKAXG

SEQ ID NO: 7512 - protein, 37 aa, Artificial Sequence
  Non-cyclic GFR-binding peptide
  MOD_RES (4)..(4): Xaa is C or S
  MOD_RES (18)..(19)..(20)..(21)..(22): Xaa is A or G
  MOD_RES (23)..(24)..(25)..(26): Xaa is A or G or absent
KPTXAPTKLSATSVLYYXXXXXXXXXLRKHRNMVVRS

SEQ ID NO: 7513 - protein, 38 aa, Artificial Sequence
  Non-cyclic GFR-binding peptide
  MOD_RES (5)..(37): Xaa is C or S
TKPTXAPTKLSAISVLYLDDSSNVILKNYQNMVVRSXG

SEQ ID NO: 7514 - protein, 40 aa, Artificial Sequence
  Non-cyclic GFR-binding peptide
  MOD_RES (6)..(7)..(38)..(40): Xaa is C or S
ASASPXXVSQDLSATSILYYIGKTPKILRKHRMIVKSXKX

SEQ ID NO: 7515 - protein, 39 aa, Artificial Sequence
  Non-cyclic GFR-binding peptide
  MOD_RES (3)..(4)..(36)..(38): Xaa is C or S
KPXXAPTQLSAISVLYLDDSSNVILKNYQNMVVRAXGXH

SEQ ID NO: 7516 - protein, 41 aa, Artificial Sequence
  Non-cyclic GFR-binding peptide
  MOD_RES (3)..(4)..(38)..(40): Xaa is C or S
  MOD_RES (18)..(19)..(20)..(21)..(22): Xaa is A or G
  MOD_RES (23)..(24)..(25)..(26): Xaa is A or G or absent
KPXXAPTKLSATSVLYYXXXXXXXXXLRKHRNMVVRSXGXH

SEQ ID NO: 7517 - protein, 39 aa, Artificial Sequence
  Non-cyclic GFR-binding peptide
  MOD_RES (3)..(3): Xaa is C or S
  MOD_RES (19)..(20)..(21)..(22)..(23): Xaa is A or G
  MOD_RES (24)..(25)..(26)..(27): Xaa is A or G or absent
VQXRPTQVQLSPISVLYKXXXXXXXXXLKYHYTLEDHLA

SEQ ID NO: 7518 - protein, 41 aa, Artificial Sequence
  Non-cyclic GFR-binding peptide
  MOD_RES (7)..(41): Xaa is C or S
  MOD_RES (21)..(22)..(23)..(24)..(25): Xaa is A or G
  MOD_RES (26)..(27)..(28)..(29): Xaa is A or G or absent
HVTKPTXAPTKLSAISVLYLXXXXXXXXXLKNYQNMVVRSX

SEQ ID NO: 7519 - protein, 38 aa, Artificial Sequence
  Non-cyclic GFR-binding peptide
  MOD_RES (3)..(4)..(38): Xaa is C or S
  MOD_RES (18)..(19)..(20)..(21)..(22): Xaa is A or G
  MOD_RES (23)..(24)..(25)..(26): Xaa is A or G or absent
KAXXVPTELSATSMLYYXXXXXXXXXLRKHREMVVEGX

SEQ ID NO: 7520 - protein, 40 aa, Artificial Sequence
  Non-cyclic GFR-binding peptide
  MOD_RES (5)..(6)..(40): Xaa is C or S
  MOD_RES (20)..(21)..(22)..(23)..(24): Xaa is A or G
  MOD_RES (25)..(26)..(27)..(28): Xaa is A or G or absent
IPKAXXVPTELSATSMLYYXXXXXXXXXLRKHREMVVEGX

SEQ ID NO: 7521 - protein, 34 aa, Artificial Sequence
  Non-cyclic GFR-binding peptide
  MOD_RES (3)..(4): Xaa is C or S
KAXXVPTELSPISMLYKDEYDKVVLKYHYEMVVE

SEQ ID NO: 7522 - protein, 40 aa, Artificial Sequence
  Non-cyclic GFR-binding peptide
  MOD_RES (6)..(7): Xaa is C or S
  MOD_RES (21)..(22)..(23)..(24)..(25): Xaa is A or G
  MOD_RES (26)..(27)..(28)..(29): Xaa is A or G or absent
SIPKAXXVPTELNAISMLYFXXXXXXXXXLKKYREMVVEG

SEQ ID NO: 7523 - protein, 33 aa, Artificial Sequence
  Non-cyclic GFR-binding peptide
  MOD_RES (1)..(1): Xaa is C or S
  MOD_RES (15)..(16)..(17)..(18)..(19): Xaa is A or G
  MOD_RES (20)..(21)..(22)..(23): Xaa is A or G or absent
XAPTKLSAISVLYLXXXXXXXXXLKNYQNMVVR

SEQ ID NO: 7524 - protein, 33 aa, Artificial Sequence
  Non-cyclic GFR-binding peptide
  MOD_RES (1)..(1): Xaa is C or S
  MOD_RES (15)..(16)..(17)..(18)..(19): Xaa is A or G
  MOD_RES (20)..(21)..(22)..(23): Xaa is A or G or absent
XAPTKLSAISVLYLXXXXXXXXXLKNYQNMVVK

SEQ ID NO: 7525 - protein, 38 aa, Artificial Sequence
  Non-cyclic GFR-binding peptide
  MOD_RES (2)..(3)..(36)..(38): Xaa is C or S
  MOD_RES (17)..(18)..(19)..(20)..(21): Xaa is A or G
  MOD_RES (22)..(23)..(24)..(25): Xaa is A or G or absent
PXXVPQALSATSILYYXXXXXXXXXLRKHRMIVRSXKX

SEQ ID NO: 7526 - protein, 39 aa, Artificial Sequence
  Non-cyclic GFR-binding peptide
  MOD_RES (2)..(3)..(36)..(38): Xaa is C or S
  MOD_RES (17)..(18)..(19)..(20)..(21): Xaa is A or G
  MOD_RES (22)..(23)..(24)..(25): Xaa is A or G or absent
PXXVPQDLSATSILYYXXXXXXXXXLRKHRMVVKSXKXS

SEQ ID NO: 7527 - protein, 38 aa, Artificial Sequence
  Non-cyclic GFR-binding peptide
  MOD_RES (5)..(6)..(38): Xaa is C or S
VPKPXXAPTKLSATSVLYYDDSSNVILRKHRNMVVRSX

SEQ ID NO: 7528 - protein, 37 aa, Artificial Sequence
  Non-cyclic GFR-binding peptide
  MOD_RES (2)..(3)..(37): Xaa is C or S
  MOD_RES (17)..(18)..(19)..(20)..(21): Xaa is A or G
  MOD_RES (22)..(23)..(24)..(25): Xaa is A or G or absent
AXXAPTKLSPISVLYKXXXXXXXXXLKYHYNMVVKAX

SEQ ID NO: 7529 - protein, 32 aa, Artificial Sequence; identical to SEQ ID NO: 830
  Non-cyclic GFR-binding peptide

SEQ ID NO: 7530 - protein, 33 aa, Artificial Sequence
  Non-cyclic GFR-binding peptide
  MOD_RES (15)..(16)..(17)..(18)..(19): Xaa is A or G
  MOD_RES (20)..(21)..(22)..(23): Xaa is A or G or absent
PTQVQLSATSVLYYXXXXXXXXXLRKHRTLEDH

SEQ ID NO: 7531 - protein, 39 aa, Artificial Sequence
  Non-cyclic GFR-binding peptide
  MOD_RES (37)..(39): Xaa is C or S
RPTQVQLSATSVLYYEIVRKKPIFLRKHRTLEDHLAXKX

SEQ ID NO: 7532 - protein, 36 aa, Artificial Sequence
  Non-cyclic GFR-binding peptide
  MOD_RES (3)..(3): Xaa is C or S
  MOD_RES (17)..(18)..(19)..(20)..(21): Xaa is A or G
  MOD_RES (22)..(23)..(24)..(25): Xaa is A or G or absent
PTXAPTKLSATSVLYYXXXXXXXXXLRKHRNMVVRS

SEQ ID NO: 7533 - protein, 38 aa, Artificial Sequence
  Non-cyclic GFR-binding peptide
  MOD_RES (2)..(3)..(36)..(38): Xaa is C or S
  MOD_RES (17)..(18)..(19)..(20)..(21): Xaa is A or G
  MOD_RES (22)..(23)..(24)..(25): Xaa is A or G or absent
PXXVSQDLNAISILYFXXXXXXXXXLKKYRMIVKSXKX

SEQ ID NO: 7534 - protein, 37 aa, Artificial Sequence
  Non-cyclic GFR-binding peptide
  MOD_RES (1)..(35)..(37): Xaa is C or S
  MOD_RES (15)..(16)..(17)..(18)..(19): Xaa is A or G
  MOD_RES (20)..(21)..(22)..(23): Xaa is A or G or absent
XAPTKLSATSVLYYXXXXXXXXXLRKHRNMVVRSXGX

SEQ ID NO: 7535 - protein, 36 aa, Artificial Sequence
  Non-cyclic GFR-binding peptide
  MOD_RES (3)..(4)..(35): Xaa is C or S
SPXXVSQDLSATSILYYIGKTPKILRKHRMIVKSXK

SEQ ID NO: 7536 - protein, 37 aa, Artificial Sequence
  Non-cyclic GFR-binding peptide
  MOD_RES (36)..(36): Xaa is C or S
  MOD_RES (15)..(16)..(17)..(18)..(19): Xaa is A or G
  MOD_RES (20)..(21)..(22)..(23): Xaa is A or G or absent
PTQVQLSAISVLYLXXXXXXXXXLKNYQTLEDHLAXK

SEQ ID NO: 7537 - protein, 39 aa, Artificial Sequence
  Non-cyclic GFR-binding peptide
  MOD_RES (4)..(5)..(37)..(39): Xaa is C or S
PKAXXVPTELNAISMLYFDEYDKVVLKKYREMVVEGXGX

SEQ ID NO: 7538 - protein, 43 aa, Artificial Sequence
  Non-cyclic GFR-binding peptide
  MOD_RES (5)..(6)..(40)..(42): Xaa is C or S
  MOD_RES (20)..(21)..(22)..(23)..(24): Xaa is A or G
  MOD_RES (25)..(26)..(27)..(28): Xaa is A or G or absent
VPKAXXAPTKLSAISVLYLXXXXXXXXXLKNYQNMVVKAXGXH

SEQ ID NO: 7539 - protein, 37 aa, Artificial Sequence
  Non-cyclic GFR-binding peptide
  MOD_RES (34)..(36): Xaa is C or S
  MOD_RES (14)..(15)..(16)..(17)..(18): Xaa is A or G
  MOD_RES (19)..(20)..(21)..(22): Xaa is A or G or absent
VPTELSPISMLYKXXXXXXXXXLKYHYEMVVEGXGXR

SEQ ID NO: 7540 - protein, 37 aa, Artificial Sequence
  Non-cyclic GFR-binding peptide
  MOD_RES (3)..(4): Xaa is C or S
  MOD_RES (18)..(19)..(20)..(21)..(22): Xaa is A or G
  MOD_RES (23)..(24)..(25)..(26): Xaa is A or G or absent
KPXXAPTKLSATSVLYYXXXXXXXXXLRKHRNMVVRS

SEQ ID NO: 7541 - protein, 41 aa, Artificial Sequence
  Non-cyclic GFR-binding peptide
  MOD_RES (2)..(39)..(41): Xaa is C or S
  MOD_RES (18)..(19)..(20)..(21)..(22): Xaa is A or G
  MOD_RES (23)..(24)..(25)..(26): Xaa is A or G or absent
QXRPTQVQLNAISVLYFXXXXXXXXXLKKYRTLEDHLAXKX

SEQ ID NO: 7542 - protein, 41 aa, Artificial Sequence
  Non-cyclic GFR-binding peptide
  MOD_RES (6)..(7)..(39)..(41): Xaa is C or S
KIPKAXXVPTELSPISMLYKDENEKVVLKYHYDMVVEGXGX

SEQ ID NO: 7543 - protein, 39 aa, Artificial Sequence
  Non-cyclic GFR-binding peptide
  MOD_RES (5)..(5): Xaa is C or S
  MOD_RES (21)..(22)..(23)..(24)..(25): Xaa is A or G
  MOD_RES (26)..(27)..(28)..(29): Xaa is A or G or absent
RNVQXRPTQVQLSATSVLYYXXXXXXXXXLRKHRTLEDH

SEQ ID NO: 7544 - protein, 40 aa, Artificial Sequence
  Non-cyclic GFR-binding peptide
  MOD_RES (4)..(5)..(38)..(40): Xaa is C or S
  MOD_RES (19)..(20)..(21)..(22)..(23): Xaa is A or G
  MOD_RES (24)..(25)..(26)..(27): Xaa is A or G or absent
ASPXXVPQDLSAISILYLXXXXXXXXXLKNYQMVVKSXKX

SEQ ID NO: 7545 - protein, 38 aa, Artificial Sequence
  Non-cyclic GFR-binding peptide
  MOD_RES (6)..(7): Xaa is C or S
KIPKAXXVPTELSPISMLYKDENEKVVLKYHYDMVVEG

SEQ ID NO: 7546 - protein, 32 aa, Artificial Sequence
  Non-cyclic GFR-binding peptide
  MOD_RES (14)..(15)..(16)..(17)..(18): Xaa is A or G
  MOD_RES (19)..(20)..(21)..(22): Xaa is A or G or absent
VPQALSATSILYYXXXXXXXXXLRKHRMIVRS

SEQ ID NO: 7547 - protein, 37 aa, Artificial Sequence
  Non-cyclic GFR-binding peptide
  MOD_RES (2)..(2): Xaa is C or S
  MOD_RES (18)..(19)..(20)..(21)..(22): Xaa is A or G
  MOD_RES (23)..(24)..(25)..(26): Xaa is A or G or absent
QXRPTQVQLSATSVLYYXXXXXXXXXLRKHRTLEDHL

SEQ ID NO: 7548 - protein, 37 aa, Artificial Sequence
  Non-cyclic GFR-binding peptide
  MOD_RES (2)..(3)..(36): Xaa is C or S
  MOD_RES (17)..(18)..(19)..(20)..(21): Xaa is A or G
  MOD_RES (22)..(23)..(24)..(25): Xaa is A or G or absent
PXXVPQALSAISILYLXXXXXXXXXLKNYQMIVRSXK

SEQ ID NO: 7549 - protein, 35 aa, Artificial Sequence
  Non-cyclic GFR-binding peptide
  MOD_RES (34)..(34): Xaa is C or S
  MOD_RES (14)..(15)..(16)..(17)..(18): Xaa is A or G
  MOD_RES (19)..(20)..(21)..(22): Xaa is A or G or absent
APTQLSATSVLYYXXXXXXXXXLRKHRNMVVRAXG

SEQ ID NO: 7550 - protein, 31 aa, Artificial Sequence
  Non-cyclic GFR-binding peptide
APTKLSAISVLYLDDSSNVILKNYQNMVVRS

SEQ ID NO: 7551 - protein, 41 aa, Artificial Sequence
  Non-cyclic GFR-binding peptide
  MOD_RES (5)..(5): Xaa is C or S
RNVQXRPTQVQLNAISVLYFEIVRKKPIFLKKYRTLEDHLA

SEQ ID NO: 7552 - protein, 38 aa, Artificial Sequence
  Non-cyclic GFR-binding peptide
  MOD_RES (1)..(35)..(37): Xaa is C or S
  MOD_RES (15)..(16)..(17)..(18)..(19): Xaa is A or G
  MOD_RES (20)..(21)..(22)..(23): Xaa is A or G or absent
XVPTELSATSMLYYXXXXXXXXXLRKHREMVVEGXGXR

SEQ ID NO: 7553 - protein, 35 aa, Artificial Sequence
  Non-cyclic GFR-binding peptide
  MOD_RES (1)..(34): Xaa is C or S
  MOD_RES (15)..(16)..(17)..(18)..(19): Xaa is A or G
  MOD_RES (20)..(21)..(22)..(23): Xaa is A or G or absent
XVSQDLNAISILYFXXXXXXXXXLKKYRMIVKSXK

SEQ ID NO: 7554 - protein, 37 aa, Artificial Sequence
  Non-cyclic GFR-binding peptide
  MOD_RES (2)..(3)..(37): Xaa is C or S
  MOD_RES (17)..(18)..(19)..(20)..(21): Xaa is A or G
  MOD_RES (22)..(23)..(24)..(25): Xaa is A or G or absent
AXXVPTELNAISMLYFXXXXXXXXXLKKYRDMVVEGX

SEQ ID NO: 7555 - protein, 36 aa, Artificial Sequence
  Non-cyclic GFR-binding peptide
RPTQVQLSPISVLYKEIVRKKPIFLKYHYTLEDHLA

SEQ ID NO: 7556 - protein, 33 aa, Artificial Sequence
  Non-cyclic GFR-binding peptide
  MOD_RES (3)..(3): Xaa is C or S
PTXAPTKLSAISVLYLDDSSNVILKNYQNMVVR

SEQ ID NO: 7557 - protein, 33 aa, Artificial Sequence
  Non-cyclic GFR-binding peptide
  MOD_RES (1)..(2)..(33): Xaa is C or S
XXVPQALSAISILYLVGRKPKVLKNYQMIVRSX

SEQ ID NO: 7558 - protein, 37 aa, Artificial Sequence
  Non-cyclic GFR-binding peptide
  MOD_RES (1)..(2)..(36): Xaa is C or S
  MOD_RES (16)..(17)..(18)..(19)..(20): Xaa is A or G
  MOD_RES (21)..(22)..(23)..(24): Xaa is A or G or absent
XXVPTELSATSMLYYXXXXXXXXXLRKHREMVVEGXG

SEQ ID NO: 7559 - protein, 37 aa, Artificial Sequence
  Non-cyclic GFR-binding peptide
  MOD_RES (2)..(3)..(37): Xaa is C or S
  MOD_RES (17)..(18)..(19)..(20)..(21): Xaa is A or G
  MOD_RES (22)..(23)..(24)..(25): Xaa is A or G or absent
PXXAPTQLSPISVLYKXXXXXXXXXLKYHYNMVVRAX

SEQ ID NO: 7560 - protein, 41 aa, Artificial Sequence
  Non-cyclic GFR-binding peptide
  MOD_RES (6)..(7)..(41): Xaa is C or S
  MOD_RES (21)..(22)..(23)..(24)..(25): Xaa is A or G
  MOD_RES (26)..(27)..(28)..(29): Xaa is A or G or absent
TVPKPXXAPTQLSAISVLYLXXXXXXXXXLKNYQNMVVRAX

SEQ ID NO: 7561 - protein, 36 aa, Artificial Sequence
  Non-cyclic GFR-binding peptide
  MOD_RES (3)..(4)..(36): Xaa is C or S
KPXXAPTQLSAISVLYLDDSSNVILKNYQNMVVRAX

SEQ ID NO: 7562 - protein, 36 aa, Artificial Sequence
  Non-cyclic GFR-binding peptide
  MOD_RES (3)..(4): Xaa is C or S
  MOD_RES (18)..(19)..(20)..(21)..(22): Xaa is A or G
  MOD_RES (23)..(24)..(25)..(26): Xaa is A or G or absent
KAXXAPTKLNAISVLYFXXXXXXXXXLKKYRNMVVK

SEQ ID NO: 7563 - protein, 40 aa, Artificial Sequence
  Non-cyclic GFR-binding peptide
  MOD_RES (5)..(6)..(38)..(40): Xaa is C or S
VPKPXXAPTQLSATSVLYYDDSSNVILRKHRNMVVRAXGX

SEQ ID NO: 7564 - protein, 34 aa, Artificial Sequence
  Non-cyclic GFR-binding peptide
  MOD_RES (1)..(32)..(34): Xaa is C or S
XVPQALSATSILYYVGRKPKVLRKHRMIVRSXKX

SEQ ID NO: 7565 - protein, 34 aa, Artificial Sequence
  Non-cyclic GFR-binding peptide
  MOD_RES (1)..(32)..(34): Xaa is C or S
XVPQDLNAISILYFVGRTPKVLKKYRMVVKSXKX

SEQ ID NO: 7566 - protein, 38 aa, Artificial Sequence
  Non-cyclic GFR-binding peptide
  MOD_RES (3)..(4)..(38): Xaa is C or S
  MOD_RES (18)..(19)..(20)..(21)..(22): Xaa is A or G
  MOD_RES (23)..(24)..(25)..(26): Xaa is A or G or absent
KPXXAPTKLSPISVLYKXXXXXXXXXLKYHYNMVVRSX

SEQ ID NO: 7567 - protein, 36 aa, Artificial Sequence
  Non-cyclic GFR-binding peptide
  MOD_RES (1)..(1): Xaa is C or S
  MOD_RES (17)..(18)..(19)..(20)..(21): Xaa is A or G
  MOD_RES (22)..(23)..(24)..(25): Xaa is A or G or absent
XRPTQVQLSAISVLYLXXXXXXXXXLKNYQTLEDHL

SEQ ID NO: 7568 - protein, 37 aa, Artificial Sequence
  Non-cyclic GFR-binding peptide
  MOD_RES (1)..(1): Xaa is C or S
  MOD_RES (17)..(18)..(19)..(20)..(21): Xaa is A or G
  MOD_RES (22)..(23)..(24)..(25): Xaa is A or G or absent
XRPTQVQLSAISVLYLXXXXXXXXXLKNYQTLEDHLA

SEQ ID NO: 7569 - protein, 42 aa, Artificial Sequence
  Non-cyclic GFR-binding peptide
  MOD_RES (5)..(39)..(41): Xaa is C or S
  MOD_RES (19)..(20)..(21)..(22)..(23): Xaa is A or G
  MOD_RES (24)..(25)..(26)..(27): Xaa is A or G or absent
TKPTXAPTKLSATSVLYYXXXXXXXXXLRKHRNMVVRSXGXH

SEQ ID NO: 7570 - protein, 36 aa, Artificial Sequence
  Non-cyclic GFR-binding peptide
  MOD_RES (1)..(2)..(33)..(35): Xaa is C or S
XXVSQDLSPISILYKIGKTPKILKYHYMIVKSXKXS

SEQ ID NO: 7571 - protein, 38 aa, Artificial Sequence
  Non-cyclic GFR-binding peptide
  MOD_RES (2)..(3)..(38): Xaa is C or S
  MOD_RES (17)..(18)..(19)..(20)..(21): Xaa is A or G
  MOD_RES (22)..(23)..(24)..(25): Xaa is A or G or absent
AXXVPTKLSAISVLYLXXXXXXXXXLKNYQEGMSVAEX

SEQ ID NO: 7572 - protein, 34 aa, Artificial Sequence
  Non-cyclic GFR-binding peptide
  MOD_RES (3)..(4): Xaa is C or S
KAXXAPTKLSPISVLYKDSSNNVILKYHYNMVVK

SEQ ID NO: 7573 - protein, 38 aa, Artificial Sequence
  Non-cyclic GFR-binding peptide
  MOD_RES (3)..(3): Xaa is C or S
VQXRPTQVQLSATSVLYYEIVRKKPIFLRKHRTLEDHL

SEQ ID NO: 7574 - protein, 38 aa, Artificial Sequence
  Non-cyclic GFR-binding peptide
  MOD_RES (36)..(38): Xaa is C or S
PTQVQLNAISVLYFEIVRKKPIFLKKYRTLEDHLAXKX

SEQ ID NO: 7575 - protein, 40 aa, Artificial Sequence
  Non-cyclic GFR-binding peptide
  MOD_RES (6)..(38)..(40): Xaa is C or S
VTKPTXAPTKLSATSVLYYDDSSNVILRKHRNMVVRSXGX

SEQ ID NO: 7576 - protein, 36 aa, Artificial Sequence
  Non-cyclic GFR-binding peptide
  MOD_RES (1)..(2)..(34)..(36): Xaa is C or S
XXAPTKLSAISVLYLDDSSNVILKNYQNMVVRSXGX

SEQ ID NO: 7577 - protein, 43 aa, Artificial Sequence
  Non-cyclic GFR-binding peptide
  MOD_RES (7)..(41)..(43): Xaa is C or S
  MOD_RES (21)..(22)..(23)..(24)..(25): Xaa is A or G
  MOD_RES (26)..(27)..(28)..(29): Xaa is A or G or absent
HVTKPTXAPTKLSPISVLYKXXXXXXXXXLKYHYNMVVRSXGX

SEQ ID NO: 7578 - protein, 37 aa, Artificial Sequence
  Non-cyclic GFR-binding peptide
  MOD_RES (3)..(4)..(36): Xaa is C or S
KAXXAPTKLSAISVLYLDSSNNVILKNYQNMVVKAXG

SEQ ID NO: 7579 - protein, 40 aa, Artificial Sequence
  Non-cyclic GFR-binding peptide
  MOD_RES (5)..(6)..(40): Xaa is C or S
  MOD_RES (20)..(21)..(22)..(23)..(24): Xaa is A or G
  MOD_RES (25)..(26)..(27)..(28): Xaa is A or G or absent
VPKAXXAPTKLSPISVLYKXXXXXXXXXLKYHYNMVVKAX

SEQ ID NO: 7580 - protein, 33 aa, Artificial Sequence
  Non-cyclic GFR-binding peptide
  MOD_RES (1)..(33): Xaa is C or S
XAPTQLSPISVLYKDDSSNVILKYHYNMVVRAX

SEQ ID NO: 7581 - protein, 38 aa, Artificial Sequence
  Non-cyclic GFR-binding peptide
  MOD_RES (2)..(3)..(36)..(38): Xaa is C or S
AXXVPTKLSAISVLYLDDMGVPTLKNYQEGMSVAEXGX

SEQ ID NO: 7582 - protein, 31 aa, Artificial Sequence
  Non-cyclic GFR-binding peptide
  MOD_RES (31)..(31): Xaa is C or S
VSQDLSATSILYYIGKTPKILRKHRMIVKSX

SEQ ID NO: 7583 - protein, 43 aa, Artificial Sequence
  Non-cyclic GFR-binding peptide
  MOD_RES (5)..(42): Xaa is C or S
  MOD_RES (21)..(22)..(23)..(24)..(25): Xaa is A or G
  MOD_RES (26)..(27)..(28)..(29): Xaa is A or G or absent
RNVQXRPTQVQLNAISVLYFXXXXXXXXXLKKYRTLEDHLAXK

SEQ ID NO: 7584 - protein, 41 aa, Artificial Sequence
  Non-cyclic GFR-binding peptide
  MOD_RES (3)..(4)..(38)..(40): Xaa is C or S
  MOD_RES (18)..(19)..(20)..(21)..(22): Xaa is A or G
  MOD_RES (23)..(24)..(25)..(26): Xaa is A or G or absent
KPXXAPTKLSPISVLYKXXXXXXXXXLKYHYNMVVRSXGXH

SEQ ID NO: 7585 - protein, 37 aa, Artificial Sequence
  Non-cyclic GFR-binding peptide
  MOD_RES (3)..(35)..(37): Xaa is C or S
PTXAPTKLSAISVLYLDDSSNVILKNYQNMVVRSXGX

SEQ ID NO: 7586 - protein, 36 aa, Artificial Sequence
  Non-cyclic GFR-binding peptide
  MOD_RES (4)..(5)..(36): Xaa is C or S
AAPXXVPQALSAISILYLVGRKPKVLKNYQMIVRSX

SEQ ID NO: 7587 - protein, 34 aa, Artificial Sequence
  Non-cyclic GFR-binding peptide
  MOD_RES (3)..(4): Xaa is C or S
KAXXAPTKLSAISVLYLDSSNNVILKNYQNMVVK

SEQ ID NO: 7588 - protein, 33 aa, Artificial Sequence
  Non-cyclic GFR-binding peptide
  MOD_RES (31)..(33): Xaa is C or S
VSQDLNAISILYFIGKTPKILKKYRMIVKSXKX

SEQ ID NO: 7589 - protein, 41 aa, Artificial Sequence
  Non-cyclic GFR-binding peptide
  MOD_RES (1)..(38)..(40): Xaa is C or S
  MOD_RES (17)..(18)..(19)..(20)..(21): Xaa is A or G
  MOD_RES (22)..(23)..(24)..(25): Xaa is A or G or absent
XRPTQVQLSATSVLYYXXXXXXXXXLRKHRTLEDHLAXKXE

SEQ ID NO: 7590 - protein, 37 aa, Artificial Sequence
  Non-cyclic GFR-binding peptide
  MOD_RES (3)..(4)..(36): Xaa is C or S
KPXXAPTQLSAISVLYLDDSSNVILKNYQNMVVRAXG

SEQ ID NO: 7591 - protein, 39 aa, Artificial Sequence
  Non-cyclic GFR-binding peptide
  MOD_RES (5)..(6)..(39): Xaa is C or S
  MOD_RES (20)..(21)..(22)..(23)..(24): Xaa is A or G
  MOD_RES (25)..(26)..(27)..(28): Xaa is A or G or absent
SASPXXVPQDLNAISILYFXXXXXXXXXLKKYRMVVKSX

SEQ ID NO: 7592 - protein, 37 aa, Artificial Sequence
  Non-cyclic GFR-binding peptide
  MOD_RES (1)..(35)..(37): Xaa is C or S
  MOD_RES (15)..(16)..(17)..(18)..(19): Xaa is A or G
  MOD_RES (20)..(21)..(22)..(23): Xaa is A or G or absent
XAPTKLSAISVLYLXXXXXXXXXLKNYQNMVVKAXGX

SEQ ID NO: 7593 - protein, 42 aa, Artificial Sequence
  Non-cyclic GFR-binding peptide
  MOD_RES (5)..(6)..(40)..(42): Xaa is C or S
  MOD_RES (20)..(21)..(22)..(23)..(24): Xaa is A or G
  MOD_RES (25)..(26)..(27)..(28): Xaa is A or G or absent
IPKAXXVPTELNAISMLYFXXXXXXXXXLKKYRDMVVEGXGX

SEQ ID NO: 7594 - protein, 38 aa, Artificial Sequence
  Non-cyclic GFR-binding peptide
  MOD_RES (2)..(3)..(35)..(37): Xaa is C or S
PXXAPTKLSAISVLYLDDSSNVILKNYQNMVVRSXGXH

SEQ ID NO: 7595 - protein, 35 aa, Artificial Sequence
  Non-cyclic GFR-binding peptide
  MOD_RES (3)..(4): Xaa is C or S
KPXXAPTKLSPISVLYKDDSSNVILKYHYNMVVRS

SEQ ID NO: 7596 - protein, 38 aa, Artificial Sequence
  Non-cyclic GFR-binding peptide
  MOD_RES (6)..(6): Xaa is C or S
  MOD_RES (20)..(21)..(22)..(23)..(24): Xaa is A or G
  MOD_RES (25)..(26)..(27)..(28): Xaa is A or G or absent
VTKPTXAPTKLSPISVLYKXXXXXXXXXLKYHYNMVVR

SEQ ID NO: 7597 - protein, 34 aa, Artificial Sequence
  Non-cyclic GFR-binding peptide
  MOD_RES (33)..(33): Xaa is C or S
VPTKLSAISVLYLDDMGVPTLKNYQEGMSVAEXG

SEQ ID NO: 7598 - protein, 41 aa, Artificial Sequence
  Non-cyclic GFR-binding peptide
  MOD_RES (5)..(6)..(38)..(40): Xaa is C or S
VPKAXXAPTKLNAISVLYFDSSNNVILKKYRNMVVKAXGXH

SEQ ID NO: 7599 - protein, 33 aa, Artificial Sequence
  Non-cyclic GFR-binding peptide
  MOD_RES (32)..(32): Xaa is C or S
VPTELSPISMLYKDENEKVVLKYHYDMVVEGXG

SEQ ID NO: 7600 - protein, 38 aa, Artificial Sequence
  Non-cyclic GFR-binding peptide
  MOD_RES (4)..(5)..(36)..(38): Xaa is C or S
ASPXXVPQDLNAISILYFVGRTPKVLKKYRMVVKSXKX

SEQ ID NO: 7601 - protein, 39 aa, Artificial Sequence
  Non-cyclic GFR-binding peptide
  MOD_RES (5)..(6): Xaa is C or S
  MOD_RES (20)..(21)..(22)..(23)..(24): Xaa is A or G
  MOD_RES (25)..(26)..(27)..(28): Xaa is A or G or absent
VPKPXXAPTQLSATSVLYYXXXXXXXXXLRKHRNMVVRA

SEQ ID NO: 7602 - protein, 39 aa, Artificial Sequence
  Non-cyclic GFR-binding peptide
  MOD_RES (4)..(5)..(38): Xaa is C or S
  MOD_RES (19)..(20)..(21)..(22)..(23): Xaa is A or G
  MOD_RES (24)..(25)..(26)..(27): Xaa is A or G or absent
ASPXXVSQDLNAISILYFXXXXXXXXXLKKYRMIVKSXK

SEQ ID NO: 7603 - protein, 40 aa, Artificial Sequence
  Non-cyclic GFR-binding peptide
  MOD_RES (5)..(6)..(38)..(40): Xaa is C or S
IPKAXXVPTELSPISMLYKDEYDKVVLKYHYEMVVEGXGX

SEQ ID NO: 7604 - protein, 38 aa, Artificial Sequence
  Non-cyclic GFR-binding peptide
  MOD_RES (4)..(5)..(38): Xaa is C or S
  MOD_RES (19)..(20)..(21)..(22)..(23): Xaa is A or G
  MOD_RES (24)..(25)..(26)..(27): Xaa is A or G or absent
ASPXXVPQDLSAISILYLXXXXXXXXXLKNYQMVVKSX

SEQ ID NO: 7605 - protein, 36 aa, Artificial Sequence
  Non-cyclic GFR-binding peptide
  MOD_RES (3)..(4)..(36): Xaa is C or S
KPXXAPTKLSATSVLYYDDSSNVILRKHRNMVVRSX

SEQ ID NO: 7606 - protein, 43 aa, Artificial Sequence
  Non-cyclic GFR-binding peptide
  MOD_RES (4)..(41)..(43): Xaa is C or S
NVQXRPTQVQLSAISVLYLEIVRKKPIFLKNYQTLEDHLAXKX

SEQ ID NO: 7607 - protein, 41 aa, Artificial Sequence
  Non-cyclic GFR-binding peptide
  MOD_RES (4)..(5)..(38)..(40): Xaa is C or S
  MOD_RES (19)..(20)..(21)..(22)..(23): Xaa is A or G
  MOD_RES (24)..(25)..(26)..(27): Xaa is A or G or absent
ASPXXVSQDLSATSILYYXXXXXXXXXLRKHRMIVKSXKXS

SEQ ID NO: 7608 - protein, 38 aa, Artificial Sequence
  Non-cyclic GFR-binding peptide
  MOD_RES (4)..(5)..(36)..(38): Xaa is C or S
ASPXXVSQDLNAISILYFIGKTPKILKKYRMIVKSXKX

SEQ ID NO: 7609 - protein, 37 aa, Artificial Sequence
  Non-cyclic GFR-binding peptide
  MOD_RES (4)..(5)..(36): Xaa is C or S
AAPXXVPQALSATSILYYVGRKPKVLRKHRMIVRSXK

SEQ ID NO: 7610 - protein, 37 aa, Artificial Sequence
  Non-cyclic GFR-binding peptide
  MOD_RES (6)..(6): Xaa is C or S
VTKPTXAPTKLSPISVLYKDDSSNVILKYHYNMVVRS

SEQ ID NO: 7611 - protein, 39 aa, Artificial Sequence
  Non-cyclic GFR-binding peptide
  MOD_RES (5)..(6)..(37)..(39): Xaa is C or S
SASPXXVPQDLSATSILYYVGRTPKVLRKHRMVVKSXKX

SEQ ID NO: 7612 - protein, 37 aa, Artificial Sequence
  Non-cyclic GFR-binding peptide
  MOD_RES (3)..(35)..(37): Xaa is C or S
PTXAPTKLSPISVLYKDDSSNVILKYHYNMVVRSXGX

SEQ ID NO: 7613 - protein, 31 aa, Artificial Sequence
  Non-cyclic GFR-binding peptide
  MOD_RES (31)..(31): Xaa is C or S
VPQDLSPISILYKVGRTPKVLKYHYMVVKSX

SEQ ID NO: 7614 - protein, 38 aa, Artificial Sequence
  Non-cyclic GFR-binding peptide
  MOD_RES (4)..(5)..(38): Xaa is C or S
  MOD_RES (19)..(20)..(21)..(22)..(23): Xaa is A or G
  MOD_RES (24)..(25)..(26)..(27): Xaa is A or G or absent
ASPXXVPQDLSATSILYYXXXXXXXXXLRKHRMVVKSX

SEQ ID NO: 7615 - protein, 32 aa, Artificial Sequence
  Non-cyclic GFR-binding peptide
  MOD_RES (1)..(1): Xaa is C or S
XVPTELSATSMLYYDENEKVVLRKHRDMVVEG

SEQ ID NO: 7616 - protein, 34 aa, Artificial Sequence
  Non-cyclic GFR-binding peptide
  MOD_RES (1)..(1): Xaa is C or S
  MOD_RES (15)..(16)..(17)..(18)..(19): Xaa is A or G
  MOD_RES (20)..(21)..(22)..(23): Xaa is A or G or absent
XVPTELNAISMLYFXXXXXXXXXLKKYREMVVEG

SEQ ID NO: 7617 - protein, 39 aa, Artificial Sequence
  Non-cyclic GFR-binding peptide
  MOD_RES (2)..(3)..(38): Xaa is C or S
  MOD_RES (17)..(18)..(19)..(20)..(21): Xaa is A or G
  MOD_RES (22)..(23)..(24)..(25): Xaa is A or G or absent
AXXVPTKLNAISVLYFXXXXXXXXXLKKYREGMSVAEXG

SEQ ID NO: 7618 - protein, 38 aa, Artificial Sequence
  Non-cyclic GFR-binding peptide
  MOD_RES (1)..(38): Xaa is C or S
  MOD_RES (17)..(18)..(19)..(20)..(21): Xaa is A or G
  MOD_RES (22)..(23)..(24)..(25): Xaa is A or G or absent
XRPTQVQLSPISVLYKXXXXXXXXXLKYHYTLEDHLAX

SEQ ID NO: 7619 - protein, 43 aa, Artificial Sequence
  Non-cyclic GFR-binding peptide
  MOD_RES (6)..(40)..(42): Xaa is C or S
  MOD_RES (20)..(21)..(22)..(23)..(24): Xaa is A or G
  MOD_RES (25)..(26)..(27)..(28): Xaa is A or G or absent
VTKPTXAPTKLSPISVLYKXXXXXXXXXLKYHYNMVVRSXGXH

SEQ ID NO: 7620 - protein, 31 aa, Artificial Sequence
  Non-cyclic GFR-binding peptide
VPTELNAISMLYFDENEKVVLKKYRDMVVEG

SEQ ID NO: 7621 - protein, 38 aa, Artificial Sequence
  Non-cyclic GFR-binding peptide
  MOD_RES (2)..(3)..(37): Xaa is C or S
  MOD_RES (17)..(18)..(19)..(20)..(21): Xaa is A or G
  MOD_RES (22)..(23)..(24)..(25): Xaa is A or G or absent
AXXAPTKLSPISVLYKXXXXXXXXXLKYHYNMVVKAXG

SEQ ID NO: 7622 - protein, 40 aa, Artificial Sequence
  Non-cyclic GFR-binding peptide
  MOD_RES (6)..(7): Xaa is C or S
  MOD_RES (21)..(22)..(23)..(24)..(25): Xaa is A or G
  MOD_RES (26)..(27)..(28)..(29): Xaa is A or G or absent
TVPKPXXAPTQLSPISVLYKXXXXXXXXXLKYHYNMVVRA

SEQ ID NO: 7623 - protein, 40 aa, Artificial Sequence
  Non-cyclic GFR-binding peptide
  MOD_RES (5)..(6)..(38)..(40): Xaa is C or S
VPKPXXAPTQLSAISVLYLDDSSNVILKNYQNMVVRAXGX

SEQ ID NO: 7624 - protein, 38 aa, Artificial Sequence
  Non-cyclic GFR-binding peptide
  MOD_RES (5)..(6): Xaa is C or S
  MOD_RES (20)..(21)..(22)..(23)..(24): Xaa is A or G
  MOD_RES (25)..(26)..(27)..(28): Xaa is A or G or absent
SASPXXVPQDLNAISILYFXXXXXXXXXLKKYRMVVKS

SEQ ID NO: 7625 - protein, 39 aa, Artificial Sequence
  Non-cyclic GFR-binding peptide
  MOD_RES (5)..(6)..(37)..(39): Xaa is C or S
SASPXXVSQDLSATSILYYIGKTPKILRKHRMIVKSXKX

SEQ ID NO: 7626 - protein, 37 aa, Artificial Sequence
  Non-cyclic GFR-binding peptide
  MOD_RES (5)..(6): Xaa is C or S
VPKPXXAPTQLSATSVLYYDDSSNVILRKHRNMVVRA

SEQ ID NO: 7627 - protein, 37 aa, Artificial Sequence
  Non-cyclic GFR-binding peptide
  MOD_RES (1)..(2)..(36): Xaa is C or S
  MOD_RES (16)..(17)..(18)..(19)..(20): Xaa is A or G
  MOD_RES (21)..(22)..(23)..(24): Xaa is A or G or absent
XXAPTQLSPISVLYKXXXXXXXXXLKYHYNMVVRAXG

SEQ ID NO: 7628 - protein, 32 aa, Artificial Sequence
  Non-cyclic GFR-binding peptide
  MOD_RES (14)..(15)..(16)..(17)..(18): Xaa is A or G
  MOD_RES (19)..(20)..(21)..(22): Xaa is A or G or absent
VPTELSATSMLYYXXXXXXXXXLRKHREMVVE

SEQ ID NO: 7629 - protein, 33 aa, Artificial Sequence
  Non-cyclic GFR-binding peptide
  MOD_RES (33)..(33): Xaa is C or S
  MOD_RES (14)..(15)..(16)..(17)..(18): Xaa is A or G
  MOD_RES (19)..(20)..(21)..(22): Xaa is A or G or absent
VSQDLSAISILYLXXXXXXXXXLKNYQMIVKSX

SEQ ID NO: 7630 - protein, 38 aa, Artificial Sequence
  Non-cyclic GFR-binding peptide
  MOD_RES (4)..(4): Xaa is C or S
  MOD_RES (20)..(21)..(22)..(23)..(24): Xaa is A or G
  MOD_RES (25)..(26)..(27)..(28): Xaa is A or G or absent
NVQXRPTQVQLSATSVLYYXXXXXXXXXLRKHRTLEDH

SEQ ID NO: 7631 - protein, 37 aa, Artificial Sequence
  Non-cyclic GFR-binding peptide
  MOD_RES (1)..(1): Xaa is C or S
  MOD_RES (17)..(18)..(19)..(20)..(21): Xaa is A or G
  MOD_RES (22)..(23)..(24)..(25): Xaa is A or G or absent
XRPTQVQLSATSVLYYXXXXXXXXXLRKHRTLEDHLA

SEQ ID NO: 7632 - protein, 40 aa, Artificial Sequence
  Non-cyclic GFR-binding peptide
  MOD_RES (6)..(7)..(39): Xaa is C or S
YVPKPXXAPTKLSATSVLYYDDSSNVILRKHRNMVVRSXG

SEQ ID NO: 7633 - protein, 40 aa, Artificial Sequence
  Non-cyclic GFR-binding peptide
  MOD_RES (1)..(38)..(40): Xaa is C or S
XRPTQVQLNAISVLYFEIVRKKPIFLKKYRTLEDHLAXKX

SEQ ID NO: 7634 - protein, 37 aa, Artificial Sequence
  Non-cyclic GFR-binding peptide
  MOD_RES (3)..(4)..(35)..(37): Xaa is C or S
APXXVPQALSATSILYYVGRKPKVLRKHRMIVRSXKX

SEQ ID NO: 7635 - protein, 36 aa, Artificial Sequence
  Non-cyclic GFR-binding peptide
  MOD_RES (3)..(4)..(35): Xaa is C or S
SPXXVSQDLNAISILYFIGKTPKILKKYRMIVKSXK

SEQ ID NO: 7636 - protein, 42 aa, Artificial Sequence
  Non-cyclic GFR-binding peptide
  MOD_RES (5)..(42): Xaa is C or S
RNVQXRPTQVQLSATSVLYYEIVRKKPIFLRKHRTLEDHLAX

SEQ ID NO: 7637 - protein, 36 aa, Artificial Sequence
  Non-cyclic GFR-binding peptide
  MOD_RES (35)..(35): Xaa is C or S
TQVQLSPISVLYKEIVRKKPIFLKYHYTLEDHLAXK

SEQ ID NO: 7638 - protein, 32 aa, Artificial Sequence
  Non-cyclic GFR-binding peptide
  MOD_RES (1)..(32): Xaa is C or S
XVPQDLNAISILYFVGRTPKVLKKYRMVVKSX

SEQ ID NO: 7639 - protein, 36 aa, Artificial Sequence
  Non-cyclic GFR-binding peptide
  MOD_RES (1)..(2)..(35): Xaa is C or S
  MOD_RES (16)..(17)..(18)..(19)..(20): Xaa is A or G
  MOD_RES (21)..(22)..(23)..(24): Xaa is A or G or absent
XXVPQDLNAISILYFXXXXXXXXXLKKYRMVVKSXK

SEQ ID NO: 7640 - protein, 38 aa, Artificial Sequence
  Non-cyclic GFR-binding peptide
  MOD_RES (1)..(2)..(36)..(38): Xaa is C or S
  MOD_RES (16)..(17)..(18)..(19)..(20): Xaa is A or G
  MOD_RES (21)..(22)..(23)..(24): Xaa is A or G or absent
XXAPTQLSATSVLYYXXXXXXXXXLRKHRNMVVRAXGX

SEQ ID NO: 7641 - protein, 36 aa, Artificial Sequence
  Non-cyclic GFR-binding peptide
  MOD_RES (1)..(35): Xaa is C or S
  MOD_RES (15)..(16)..(17)..(18)..(19): Xaa is A or G
  MOD_RES (20)..(21)..(22)..(23): Xaa is A or G or absent
XAPTKLSPISVLYKXXXXXXXXXLKYHYNMVVRSXG

SEQ ID NO: 7642 - protein, 34 aa, Artificial Sequence
  Non-cyclic GFR-binding peptide
  MOD_RES (14)..(15)..(16)..(17)..(18): Xaa is A or G
  MOD_RES (19)..(20)..(21)..(22): Xaa is A or G or absent
TQVQLSPISVLYKXXXXXXXXXLKYHYTLEDHLA

SEQ ID NO: 7643 - protein, 41 aa, Artificial Sequence
  Non-cyclic GFR-binding peptide
  MOD_RES (5)..(6)..(40): Xaa is C or S
  MOD_RES (20)..(21)..(22)..(23)..(24): Xaa is A or G
  MOD_RES (25)..(26)..(27)..(28): Xaa is A or G or absent
VPKAXXAPTKLSPISVLYKXXXXXXXXXLKYHYNMVVKAXG

SEQ ID NO: 7644 - protein, 34 aa, Artificial Sequence
  Non-cyclic GFR-binding peptide
  MOD_RES (1)..(2): Xaa is C or S
  MOD_RES (16)..(17)..(18)..(19)..(20): Xaa is A or G
  MOD_RES (21)..(22)..(23)..(24): Xaa is A or G or absent
XXVPQALSATSILYYXXXXXXXXXLRKHRMIVRS

SEQ ID NO: 7645 - protein, 36 aa, Artificial Sequence
  Non-cyclic GFR-binding peptide
  MOD_RES (2)..(3)..(36): Xaa is C or S
  MOD_RES (17)..(18)..(19)..(20)..(21): Xaa is A or G
  MOD_RES (22)..(23)..(24)..(25): Xaa is A or G or absent
PXXVPQALSAISILYLXXXXXXXXXLKNYQMIVRSX

SEQ ID NO: 7646 - protein, 39 aa, Artificial Sequence
  Non-cyclic GFR-binding peptide
  MOD_RES (6)..(7)..(39): Xaa is C or S
AVPKAXXAPTKLNAISVLYFDSSNNVILKKYRNMVVKAX

SEQ ID NO: 7647 - protein, 34 aa, Artificial Sequence
  Non-cyclic GFR-binding peptide
  MOD_RES (1)..(2)..(33): Xaa is C or S
XXVPQDLNAISILYFVGRTPKVLKKYRMVVKSXK

SEQ ID NO: 7648 - protein, 37 aa, Artificial Sequence
  Non-cyclic GFR-binding peptide
  MOD_RES (1)..(2)..(36): Xaa is C or S
  MOD_RES (16)..(17)..(18)..(19)..(20): Xaa is A or G
  MOD_RES (21)..(22)..(23)..(24): Xaa is A or G or absent
XXAPTQLSAISVLYLXXXXXXXXXLKNYQNMVVRAXG

SEQ ID NO: 7649 - protein, 38 aa, Artificial Sequence
  Non-cyclic GFR-binding peptide
  MOD_RES (5)..(6)..(38): Xaa is C or S
VPKPXXAPTQLSAISVLYLDDSSNVILKNYQNMVVRAX

SEQ ID NO: 7650 - protein, 36 aa, Artificial Sequence
  Non-cyclic GFR-binding peptide
  MOD_RES (2)..(3)..(36): Xaa is C or S
  MOD_RES (17)..(18)..(19)..(20)..(21): Xaa is A or G
  MOD_RES (22)..(23)..(24)..(25): Xaa is A or G or absent
PXXVPQALSATSILYYXXXXXXXXXLRKHRMIVRSX

SEQ ID NO: 7651 - protein, 40 aa, Artificial Sequence
  Non-cyclic GFR-binding peptide
  MOD_RES (3)..(37)..(39): Xaa is C or S
  MOD_RES (17)..(18)..(19)..(20)..(21): Xaa is A or G
  MOD_RES (22)..(23)..(24)..(25): Xaa is A or G or absent
PTXAPTKLSATSVLYYXXXXXXXXXLRKHRNMVVRSXGXH

SEQ ID NO: 7652 - protein, 36 aa, Artificial Sequence
  Non-cyclic GFR-binding peptide
  MOD_RES (1)..(2)..(36): Xaa is C or S
  MOD_RES (16)..(17)..(18)..(19)..(20): Xaa is A or G
  MOD_RES (21)..(22)..(23)..(24): Xaa is A or G or absent
XXVPTELNAISMLYFXXXXXXXXXLKKYREMVVEGX

SEQ ID NO: 7653 - protein, 39 aa, Artificial Sequence
  Non-cyclic GFR-binding peptide
  MOD_RES (3)..(4)..(36)..(38): Xaa is C or S
KAXXAPTKLSAISVLYLDSSNNVILKNYQNMVVKAXGXH

SEQ ID NO: 7654 - protein, 35 aa, Artificial Sequence
  Non-cyclic GFR-binding peptide
  MOD_RES (1)..(2)..(33)..(35): Xaa is C or S
XXVPQDLSAISILYLVGRTPKVLKNYQMVVKSXKX

SEQ ID NO: 7655 - protein, 38 aa, Artificial Sequence
  Non-cyclic GFR-binding peptide
  MOD_RES (3)..(4)..(35)..(37): Xaa is C or S
APXXVPQALNAISILYFVGRKPKVLKKYRMIVRSXKXS

SEQ ID NO: 7656 - protein, 34 aa, Artificial Sequence
  Non-cyclic GFR-binding peptide
  MOD_RES (1)..(2)..(34): Xaa is C or S
XXAPTKLNAISVLYFDSSNNVILKKYRNMVVKAX

SEQ ID NO: 7657 - protein, 36 aa, Artificial Sequence
  Non-cyclic GFR-binding peptide
  MOD_RES (35)..(35): Xaa is C or S
  MOD_RES (14)..(15)..(16)..(17)..(18): Xaa is A or G
  MOD_RES (19)..(20)..(21)..(22): Xaa is A or G or absent
TQVQLNAISVLYFXXXXXXXXXLKKYRTLEDHLAXK

SEQ ID NO: 7658 - protein, 39 aa, Artificial Sequence
  Non-cyclic GFR-binding peptide
  MOD_RES (2)..(39): Xaa is C or S
  MOD_RES (18)..(19)..(20)..(21)..(22): Xaa is A or G
  MOD_RES (23)..(24)..(25)..(26): Xaa is A or G or absent
QXRPTQVQLSAISVLYLXXXXXXXXXLKNYQTLEDHLAX

SEQ ID NO: 7659 - protein, 38 aa, Artificial Sequence
  Non-cyclic GFR-binding peptide
  MOD_RES (1)..(2)..(37): Xaa is C or S
  MOD_RES (16)..(17)..(18)..(19)..(20): Xaa is A or G
  MOD_RES (21)..(22)..(23)..(24): Xaa is A or G or absent
XXVPTKLNAISVLYFXXXXXXXXXLKKYREGMSVAEXG

SEQ ID NO: 7660 - protein, 44 aa, Artificial Sequence
  Non-cyclic GFR-binding peptide
  MOD_RES (7)..(41)..(43): Xaa is C or S
  MOD_RES (21)..(22)..(23)..(24)..(25): Xaa is A or G
  MOD_RES (26)..(27)..(28)..(29): Xaa is A or G or absent
HVTKPTXAPTKLSAISVLYLXXXXXXXXXLKNYQNMVVRSXGXH

SEQ ID NO: 7661 - protein, 38 aa, Artificial Sequence
  Non-cyclic GFR-binding peptide
  MOD_RES (2)..(2): Xaa is C or S
  MOD_RES (18)..(19)..(20)..(21)..(22): Xaa is A or G
  MOD_RES (23)..(24)..(25)..(26): Xaa is A or G or absent
QXRPTQVQLSPISVLYKXXXXXXXXXLKYHYTLEDHLA

SEQ ID NO: 7662 - protein, 36 aa, Artificial Sequence
  Non-cyclic GFR-binding peptide
  MOD_RES (1)..(2)..(34)..(36): Xaa is C or S
XXVPTELNAISMLYFDENEKVVLKKYRDMVVEGXGX

SEQ ID NO: 7663 - protein, 41 aa, Artificial Sequence
  Non-cyclic GFR-binding peptide
  MOD_RES (4)..(5)..(39)..(41): Xaa is C or S
  MOD_RES (19)..(20)..(21)..(22)..(23): Xaa is A or G
  MOD_RES (24)..(25)..(26)..(27): Xaa is A or G or absent
PKAXXVPTELNAISMLYFXXXXXXXXXLKKYREMVVEGXGX

SEQ ID NO: 7664 - protein, 40 aa, Artificial Sequence
  Non-cyclic GFR-binding peptide
  MOD_RES (4)..(4): Xaa is C or S
  MOD_RES (20)..(21)..(22)..(23)..(24): Xaa is A or G
  MOD_RES (25)..(26)..(27)..(28): Xaa is A or G or absent
NVQXRPTQVQLSPISVLYKXXXXXXXXXLKYHYTLEDHLA

SEQ ID NO: 7665 - protein, 37 aa, Artificial Sequence
  Non-cyclic GFR-binding peptide
  MOD_RES (5)..(6)..(37): Xaa is C or S
SAAPXXVPQALNAISILYFVGRKPKVLKKYRMIVRSX

SEQ ID NO: 7666 - protein, 33 aa, Artificial Sequence
  Non-cyclic GFR-binding peptide
  MOD_RES (1)..(1): Xaa is C or S
  MOD_RES (15)..(16)..(17)..(18)..(19): Xaa is A or G
  MOD_RES (20)..(21)..(22)..(23): Xaa is A or G or absent
XAPTKLNAISVLYFXXXXXXXXXLKKYRNMVVK

SEQ ID NO: 7667 - protein, 34 aa, Artificial Sequence
  Non-cyclic GFR-binding peptide
  MOD_RES (1)..(2): Xaa is C or S
  MOD_RES (16)..(17)..(18)..(19)..(20): Xaa is A or G
  MOD_RES (21)..(22)..(23)..(24): Xaa is A or G or absent
XXVPTELSATSMLYYXXXXXXXXXLRKHREMVVE

SEQ ID NO: 7668 - protein, 37 aa, Artificial Sequence
  Non-cyclic GFR-binding peptide
  MOD_RES (3)..(3): Xaa is C or S
VQXRPTQVQLSAISVLYLEIVRKKPIFLKNYQTLEDH

SEQ ID NO: 7669 - protein, 41 aa, Artificial Sequence
  Non-cyclic GFR-binding peptide
  MOD_RES (3)..(4)..(38)..(40): Xaa is C or S
  MOD_RES (18)..(19)..(20)..(21)..(22): Xaa is A or G
  MOD_RES (23)..(24)..(25)..(26): Xaa is A or G or absent
KPXXAPTKLSAISVLYLXXXXXXXXXLKNYQNMVVRSXGXH

SEQ ID NO: 7670 - protein, 43 aa, Artificial Sequence
  Non-cyclic GFR-binding peptide
  MOD_RES (6)..(7)..(40)..(42): Xaa is C or S
  MOD_RES (21)..(22)..(23)..(24)..(25): Xaa is A or G
  MOD_RES (26)..(27)..(28)..(29): Xaa is A or G or absent
ASASPXXVPQDLSATSILYYXXXXXXXXXLRKHRMVVKSXKXS

SEQ ID NO: 7671 - protein, 37 aa, Artificial Sequence
  Non-cyclic GFR-binding peptide
  MOD_RES (3)..(3): Xaa is C or S
VQXRPTQVQLSATSVLYYEIVRKKPIFLRKHRTLEDH

SEQ ID NO: 7672 - protein, 39 aa, Artificial Sequence
  Non-cyclic GFR-binding peptide
  MOD_RES (4)..(5)..(37)..(39): Xaa is C or S
PKPXXAPTKLSATSVLYYDDSSNVILRKHRNMVVRSXGX

SEQ ID NO: 7673 - protein, 37 aa, Artificial Sequence
  Non-cyclic GFR-binding peptide
  MOD_RES (5)..(6): Xaa is C or S
VPKPXXAPTKLSAISVLYLDDSSNVILKNYQNMVVRS

SEQ ID NO: 7674 - protein, 33 aa, Artificial Sequence
  Non-cyclic GFR-binding peptide
  MOD_RES (33)..(33): Xaa is C or S
  MOD_RES (14)..(15)..(16)..(17)..(18): Xaa is A or G
  MOD_RES (19)..(20)..(21)..(22): Xaa is A or G or absent
VSQDLSATSILYYXXXXXXXXXLRKHRMIVKSX

SEQ ID NO: 7675 - protein, 38 aa, Artificial Sequence
  Non-cyclic GFR-binding peptide
  MOD_RES (1)..(2)..(35)..(37): Xaa is C or S
  MOD_RES (16)..(17)..(18)..(19)..(20): Xaa is A or G
  MOD_RES (21)..(22)..(23)..(24): Xaa is A or G or absent
XXVSQDLNAISILYFXXXXXXXXXLKKYRMIVKSXKXS

SEQ ID NO: 7676 - protein, 33 aa, Artificial Sequence
  Non-cyclic GFR-binding peptide
  MOD_RES (2)..(3): Xaa is C or S
AXXVPTELSPISMLYKDENEKVVLKYHYDMVVE

SEQ ID NO: 7677 - protein, 32 aa, Artificial Sequence
  Non-cyclic GFR-binding peptide
  MOD_RES (1)..(2): Xaa is C or S
XXVPTELNAISMLYFDENEKVVLKKYRDMVVE

SEQ ID NO: 7678 - protein, 35 aa, Artificial Sequence
  Non-cyclic GFR-binding peptide
  MOD_RES (33)..(35): Xaa is C or S
VPTKLSATSVLYYDDMGVPTLRKHREGMSVAEXGX

SEQ ID NO: 7679 - protein, 41 aa, Artificial Sequence
  Non-cyclic GFR-binding peptide
  MOD_RES (5)..(6)..(40): Xaa is C or S
  MOD_RES (20)..(21)..(22)..(23)..(24): Xaa is A or G
  MOD_RES (25)..(26)..(27)..(28): Xaa is A or G or absent
IPKAXXVPTELSPISMLYKXXXXXXXXXLKYHYEMVVEGXG

SEQ ID NO: 7680 - protein, 40 aa, Artificial Sequence
  Non-cyclic GFR-binding peptide
  MOD_RES (1)..(38)..(40): Xaa is C or S
  MOD_RES (17)..(18)..(19)..(20)..(21): Xaa is A or G
  MOD_RES (22)..(23)..(24)..(25): Xaa is A or G or absent
XRPTQVQLSATSVLYYXXXXXXXXXLRKHRTLEDHLAXKX

SEQ ID NO: 7681 - protein, 37 aa, Artificial Sequence
  Non-cyclic GFR-binding peptide
  MOD_RES (37)..(37): Xaa is C or S
RPTQVQLNAISVLYFEIVRKKPIFLKKYRTLEDHLAX

SEQ ID NO: 7682 - protein, 41 aa, Artificial Sequence
  Non-cyclic GFR-binding peptide
  MOD_RES (5)..(6)..(39)..(41): Xaa is C or S
  MOD_RES (20)..(21)..(22)..(23)..(24): Xaa is A or G
  MOD_RES (25)..(26)..(27)..(28): Xaa is A or G or absent
SASPXXVSQDLSATSILYYXXXXXXXXXLRKHRMIVKSXKX

SEQ ID NO: 7683 - protein, 40 aa, Artificial Sequence
  Non-cyclic GFR-binding peptide
  MOD_RES (6)..(7)..(38)..(40): Xaa is C or S
ASASPXXVPQDLSPISILYKVGRTPKVLKYHYMVVKSXKX

SEQ ID NO: 7684 - protein, 41 aa, Artificial Sequence
  Non-cyclic GFR-binding peptide
  MOD_RES (1)..(38)..(40): Xaa is C or S
XRPTQVQLNAISVLYFEIVRKKPIFLKKYRTLEDHLAXKXE

SEQ ID NO: 7685 - protein, 37 aa, Artificial Sequence
  Non-cyclic GFR-binding peptide
  MOD_RES (1)..(2)..(36): Xaa is C or S
  MOD_RES (16)..(17)..(18)..(19)..(20): Xaa is A or G
  MOD_RES (21)..(22)..(23)..(24): Xaa is A or G or absent
XXVPTELSATSMLYYXXXXXXXXXLRKHRDMVVEGXG

SEQ ID NO: 7686 - protein, 33 aa, Artificial Sequence
  Non-cyclic GFR-binding peptide
  MOD_RES (14)..(15)..(16)..(17)..(18): Xaa is A or G
  MOD_RES (19)..(20)..(21)..(22): Xaa is A or G or absent
TQVQLSAISVLYLXXXXXXXXXLKNYQTLEDHL

SEQ ID NO: 7687 - protein, 39 aa, Artificial Sequence
  Non-cyclic GFR-binding peptide
  MOD_RES (4)..(5)..(39): Xaa is C or S
  MOD_RES (19)..(20)..(21)..(22)..(23): Xaa is A or G
  MOD_RES (24)..(25)..(26)..(27): Xaa is A or G or absent
PKAXXVPTELSATSMLYYXXXXXXXXXLRKHRDMVVEGX

SEQ ID NO: 7688 - protein, 34 aa, Artificial Sequence
  Non-cyclic GFR-binding peptide
  MOD_RES (1)..(2): Xaa is C or S
  MOD_RES (16)..(17)..(18)..(19)..(20): Xaa is A or G
  MOD_RES (21)..(22)..(23)..(24): Xaa is A or G or absent
XXVPTELSPISMLYKXXXXXXXXXLKYHYDMVVE

SEQ ID NO: 7689 - protein, 39 aa, Artificial Sequence
  Non-cyclic GFR-binding peptide
  MOD_RES (2)..(3)..(37)..(39): Xaa is C or S
  MOD_RES (17)..(18)..(19)..(20)..(21): Xaa is A or G
  MOD_RES (22)..(23)..(24)..(25): Xaa is A or G or absent
AXXVPTELNAISMLYFXXXXXXXXXLKKYRDMVVEGXGX

SEQ ID NO: 7690 - protein, 37 aa, Artificial Sequence
  Non-cyclic GFR-binding peptide
  MOD_RES (6)..(7): Xaa is C or S
ASASPXXVPQDLNAISILYFVGRTPKVLKKYRMVVKS

SEQ ID NO: 7691 - protein, 33 aa, Artificial Sequence
  Non-cyclic GFR-binding peptide
  MOD_RES (1)..(1): Xaa is C or S
  MOD_RES (15)..(16)..(17)..(18)..(19): Xaa is A or G
  MOD_RES (20)..(21)..(22)..(23): Xaa is A or G or absent
XAPTQLSATSVLYYXXXXXXXXXLRKHRNMVVR

SEQ ID NO: 7692 - protein, 33 aa, Artificial Sequence
  Non-cyclic GFR-binding peptide
  MOD_RES (2)..(3): Xaa is C or S
PXXVSQDLNAISILYFIGKTPKILKKYRMIVKS

SEQ ID NO: 7693 - protein, 36 aa, Artificial Sequence
  Non-cyclic GFR-binding peptide
  MOD_RES (33)..(35): Xaa is C or S
  MOD_RES (14)..(15)..(16)..(17)..(18): Xaa is A or G
  MOD_RES (19)..(20)..(21)..(22): Xaa is A or G or absent
VSQDLSPISILYKXXXXXXXXXLKYHYMIVKSXKXS

SEQ ID NO: 7694 - protein, 37 aa, Artificial Sequence
  Non-cyclic GFR-binding peptide
  MOD_RES (2)..(3)..(35)..(37): Xaa is C or S
AXXVPTELNAISMLYFDEYDKVVLKKYREMVVEGXGX

SEQ ID NO: 7695 - protein, 38 aa, Artificial Sequence
  Non-cyclic GFR-binding peptide
  MOD_RES (37)..(37): Xaa is C or S
  MOD_RES (16)..(17)..(18)..(19)..(20): Xaa is A or G
  MOD_RES (21)..(22)..(23)..(24): Xaa is A or G or absent
RPTQVQLNAISVLYFXXXXXXXXXLKKYRTLEDHLAXK

SEQ ID NO: 7696 - protein, 34 aa, Artificial Sequence
  Non-cyclic GFR-binding peptide
  MOD_RES (3)..(4): Xaa is C or S
KAXXVPTELNAISMLYFDENEKVVLKKYRDMVVE

SEQ ID NO: 7697 - protein, 37 aa, Artificial Sequence
  Non-cyclic GFR-binding peptide
  MOD_RES (1)..(35)..(37): Xaa is C or S
  MOD_RES (15)..(16)..(17)..(18)..(19): Xaa is A or G
  MOD_RES (20)..(21)..(22)..(23): Xaa is A or G or absent
XAPTKLSPISVLYKXXXXXXXXXLKYHYNMVVRSXGX

SEQ ID NO: 7698 - protein, 38 aa, Artificial Sequence
  Non-cyclic GFR-binding peptide
  MOD_RES (3)..(4)..(36)..(38): Xaa is C or S
KPXXAPTQLSATSVLYYDDSSNVILRKHRNMVVRAXGX

SEQ ID NO: 7699 - protein, 37 aa, Artificial Sequence
  Non-cyclic GFR-binding peptide
  MOD_RES (3)..(4): Xaa is C or S
  MOD_RES (18)..(19)..(20)..(21)..(22): Xaa is A or G
  MOD_RES (23)..(24)..(25)..(26): Xaa is A or G or absent
KAXXAPTKLSPISVLYKXXXXXXXXXLKYHYNMVVKA

SEQ ID NO: 7700 - protein, 39 aa, Artificial Sequence
  Non-cyclic GFR-binding peptide
  MOD_RES (5)..(5): Xaa is C or S
RNVQXRPTQVQLSAISVLYLEIVRKKPIFLKNYQTLEDH

SEQ ID NO: 7701 - protein, 35 aa, Artificial Sequence
  Non-cyclic GFR-binding peptide
  MOD_RES (1)..(1): Xaa is C or S
XRPTQVQLSATSVLYYEIVRKKPIFLRKHRTLEDH

SEQ ID NO: 7702 - protein, 38 aa, Artificial Sequence
  Non-cyclic GFR-binding peptide
  MOD_RES (6)..(7): Xaa is C or S
YVPKPXXAPTKLSPISVLYKDDSSNVILKYHYNMVVRS

SEQ ID NO: 7703 - protein, 39 aa, Artificial Sequence
  Non-cyclic GFR-binding peptide
  MOD_RES (4)..(38): Xaa is C or S
  MOD_RES (18)..(19)..(20)..(21)..(22): Xaa is A or G
  MOD_RES (23)..(24)..(25)..(26): Xaa is A or G or absent
KPTXAPTKLSPISVLYKXXXXXXXXXLKYHYNMVVRSXG

SEQ ID NO: 7704 - protein, 39 aa, Artificial Sequence
  Non-cyclic GFR-binding peptide
  MOD_RES (5)..(6): Xaa is C or S
  MOD_RES (20)..(21)..(22)..(23)..(24): Xaa is A or G
  MOD_RES (25)..(26)..(27)..(28): Xaa is A or G or absent
IPKAXXVPTELSATSMLYYXXXXXXXXXLRKHREMVVEG

SEQ ID NO: 7705 - protein, 33 aa, Artificial Sequence
  Non-cyclic GFR-binding peptide
  MOD_RES (31)..(33): Xaa is C or S
VSQDLSAISILYLIGKTPKILKNYQMIVKSXKX

SEQ ID NO: 7706 - protein, 40 aa, Artificial Sequence
  Non-cyclic GFR-binding peptide
  MOD_RES (3)..(4)..(38)..(40): Xaa is C or S
  MOD_RES (18)..(19)..(20)..(21)..(22): Xaa is A or G
  MOD_RES (23)..(24)..(25)..(26): Xaa is A or G or absent
KPXXAPTQLSAISVLYLXXXXXXXXXLKNYQNMVVRAXGX

SEQ ID NO: 7707 - protein, 37 aa, Artificial Sequence
  Non-cyclic GFR-binding peptide
  MOD_RES (3)..(4): Xaa is C or S
  MOD_RES (18)..(19)..(20)..(21)..(22): Xaa is A or G
  MOD_RES (23)..(24)..(25)..(26): Xaa is A or G or absent
KAXXVPTELSPISMLYKXXXXXXXXXLKYHYEMVVEG

SEQ ID NO: 7708 - protein, 39 aa, Artificial Sequence
  Non-cyclic GFR-binding peptide
  MOD_RES (5)..(6)..(37)..(39): Xaa is C or S
SAAPXXVPQALSAISILYLVGRKPKVLKNYQMIVRSXKX

SEQ ID NO: 7709 - protein, 37 aa, Artificial Sequence
  Non-cyclic GFR-binding peptide
  MOD_RES (37)..(37): Xaa is C or S
  MOD_RES (16)..(17)..(18)..(19)..(20): Xaa is A or G
  MOD_RES (21)..(22)..(23)..(24): Xaa is A or G or absent
RPTQVQLSATSVLYYXXXXXXXXXLRKHRTLEDHLAX

SEQ ID NO: 7710 - protein, 33 aa, Artificial Sequence
  Non-cyclic GFR-binding peptide
  MOD_RES (31)..(33): Xaa is C or S
VSQDLSPISILYKIGKTPKILKYHYMIVKSXKX

SEQ ID NO: 7711 - protein, 41 aa, Artificial Sequence
  Non-cyclic GFR-binding peptide
  MOD_RES (6)..(7)..(39)..(41): Xaa is C or S
YVPKPXXAPTKLSATSVLYYDDSSNVILRKHRNMVVRSXGX

SEQ ID NO: 7712 - protein, 40 aa, Artificial Sequence
  Non-cyclic GFR-binding peptide
  MOD_RES (5)..(6)..(37)..(39): Xaa is C or S
SAAPXXVPQALNAISILYFVGRKPKVLKKYRMIVRSXKXS

SEQ ID NO: 7713 - protein, 41 aa, Artificial Sequence
  Non-cyclic GFR-binding peptide
  MOD_RES (5)..(6)..(39)..(41): Xaa is C or S
  MOD_RES (20)..(21)..(22)..(23)..(24): Xaa is A or G
  MOD_RES (25)..(26)..(27)..(28): Xaa is A or G or absent
SAAPXXVPQALSATSILYYXXXXXXXXXLRKHRMIVRSXKX

SEQ ID NO: 7714 - protein, 35 aa, Artificial Sequence
  Non-cyclic GFR-binding peptide
  MOD_RES (4)..(4): Xaa is C or S
KPTXAPTKLSPISVLYKDDSSNVILKYHYNMVVRS

SEQ ID NO: 7715 - protein, 36 aa, Artificial Sequence
  Non-cyclic GFR-binding peptide
  MOD_RES (33)..(35): Xaa is C or S
VPTKLSATSVLYYDDMGVPTLRKHREGMSVAEXGXR

SEQ ID NO: 7716 - protein, 42 aa, Artificial Sequence
  Non-cyclic GFR-binding peptide
  MOD_RES (2)..(39)..(41): Xaa is C or S
  MOD_RES (18)..(19)..(20)..(21)..(22): Xaa is A or G
  MOD_RES (23)..(24)..(25)..(26): Xaa is A or G or absent
QXRPTQVQLSATSVLYYXXXXXXXXXLRKHRTLEDHLAXKXE

SEQ ID NO: 7717 - protein, 41 aa, Artificial Sequence
  Non-cyclic GFR-binding peptide
  MOD_RES (3)..(4)..(38)..(40): Xaa is C or S
  MOD_RES (18)..(19)..(20)..(21)..(22): Xaa is A or G
  MOD_RES (23)..(24)..(25)..(26): Xaa is A or G or absent
KAXXVPTELSATSMLYYXXXXXXXXXLRKHRDMVVEGXGXR

SEQ ID NO: 7718 - protein, 38 aa, Artificial Sequence
  Non-cyclic GFR-binding peptide
  MOD_RES (5)..(6)..(38): Xaa is C or S
VPKPXXAPTQLSATSVLYYDDSSNVILRKHRNMVVRAX

SEQ ID NO: 7719 - protein, 37 aa, Artificial Sequence
  Non-cyclic GFR-binding peptide
  MOD_RES (1)..(2)..(37): Xaa is C or S
  MOD_RES (16)..(17)..(18)..(19)..(20): Xaa is A or G
  MOD_RES (21)..(22)..(23)..(24): Xaa is A or G or absent
XXVPTKLSATSVLYYXXXXXXXXXLRKHREGMSVAEX

SEQ ID NO: 7720 - protein, 30 aa, Artificial Sequence
  Non-cyclic GFR-binding peptide
VPQDLSATSILYYVGRTPKVLRKHRMVVKS

SEQ ID NO: 7721 - protein, 36 aa, Artificial Sequence
  Non-cyclic GFR-binding peptide
  MOD_RES (3)..(3): Xaa is C or S
  MOD_RES (17)..(18)..(19)..(20)..(21): Xaa is A or G
  MOD_RES (22)..(23)..(24)..(25): Xaa is A or G or absent
PTXAPTKLSPISVLYKXXXXXXXXXLKYHYNMVVRS

SEQ ID NO: 7722 - protein, 35 aa, Artificial Sequence
  Non-cyclic GFR-binding peptide
  MOD_RES (1)..(35): Xaa is C or S
  MOD_RES (15)..(16)..(17)..(18)..(19): Xaa is A or G
  MOD_RES (20)..(21)..(22)..(23): Xaa is A or G or absent
XVPTELNAISMLYFXXXXXXXXXLKKYREMVVEGX

SEQ ID NO: 7723 - protein, 35 aa, Artificial Sequence
  Non-cyclic GFR-binding peptide
  MOD_RES (1)..(2)..(35): Xaa is C or S
  MOD_RES (16)..(17)..(18)..(19)..(20): Xaa is A or G
  MOD_RES (21)..(22)..(23)..(24): Xaa is A or G or absent
XXVPQALSPISILYKXXXXXXXXXLKYHYMIVRSX

SEQ ID NO: 7724 - protein, 36 aa, Artificial Sequence
  Non-cyclic GFR-binding peptide
  MOD_RES (5)..(6): Xaa is C or S
SASPXXVSQDLSATSILYYIGKTPKILRKHRMIVKS

SEQ ID NO: 7725 - protein, 39 aa, Artificial Sequence
  Non-cyclic GFR-binding peptide
  MOD_RES (4)..(4): Xaa is C or S
  MOD_RES (20)..(21)..(22)..(23)..(24): Xaa is A or G
  MOD_RES (25)..(26)..(27)..(28): Xaa is A or G or absent
NVQXRPTQVQLSPISVLYKXXXXXXXXXLKYHYTLEDHL

SEQ ID NO: 7726 - protein, 38 aa, Artificial Sequence
  Non-cyclic GFR-binding peptide
  MOD_RES (5)..(6)..(37): Xaa is C or S
SAAPXXVPQALSATSILYYVGRKPKVLRKHRMIVRSXK

SEQ ID NO: 7727 - protein, 38 aa, Artificial Sequence
  Non-cyclic GFR-binding peptide
  MOD_RES (5)..(6)..(37): Xaa is C or S
SAAPXXVPQALSAISILYLVGRKPKVLKNYQMIVRSXK

SEQ ID NO: 7728 - protein, 35 aa, Artificial Sequence
  Non-cyclic GFR-binding peptide
  MOD_RES (5)..(5): Xaa is C or S
TKPTXAPTKLSATSVLYYDDSSNVILRKHRNMVVR

SEQ ID NO: 7729 - protein, 36 aa, Artificial Sequence
  Non-cyclic GFR-binding peptide
  MOD_RES (5)..(6): Xaa is C or S
SAAPXXVPQALSAISILYLVGRKPKVLKNYQMIVRS

SEQ ID NO: 7730 - protein, 33 aa, Artificial Sequence
  Non-cyclic GFR-binding peptide
  MOD_RES (1)..(1): Xaa is C or S
  MOD_RES (15)..(16)..(17)..(18)..(19): Xaa is A or G
  MOD_RES (20)..(21)..(22)..(23): Xaa is A or G or absent
XAPTQLSPISVLYKXXXXXXXXXLKYHYNMVVR

SEQ ID NO: 7731 - protein, 40 aa, Artificial Sequence
  Non-cyclic GFR-binding peptide
  MOD_RES (37)..(39): Xaa is C or S
  MOD_RES (16)..(17)..(18)..(19)..(20): Xaa is A or G
  MOD_RES (21)..(22)..(23)..(24): Xaa is A or G or absent
RPTQVQLSPISVLYKXXXXXXXXXLKYHYTLEDHLAXKXE

SEQ ID NO: 7732 - protein, 33 aa, Artificial Sequence
  Non-cyclic GFR-binding peptide
  MOD_RES (31)..(33): Xaa is C or S
VPQALSPISILYKVGRKPKVLKYHYMIVRSXKX

SEQ ID NO: 7733 - protein, 37 aa, Artificial Sequence
  Non-cyclic GFR-binding peptide
  MOD_RES (1)..(2)..(35)..(37): Xaa is C or S
  MOD_RES (16)..(17)..(18)..(19)..(20): Xaa is A or G
  MOD_RES (21)..(22)..(23)..(24): Xaa is A or G or absent
XXVPQDLSATSILYYXXXXXXXXXLRKHRMVVKSXKX

SEQ ID NO: 7734 - protein, 34 aa, Artificial Sequence
  Non-cyclic GFR-binding peptide
  MOD_RES (3)..(4): Xaa is C or S
KPXXAPTQLSAISVLYLDDSSNVILKNYQNMVVR

SEQ ID NO: 7735 - protein, 39 aa, Artificial Sequence
  Non-cyclic GFR-binding peptide
  MOD_RES (2)..(3)..(37)..(39): Xaa is C or S
  MOD_RES (17)..(18)..(19)..(20)..(21): Xaa is A or G
  MOD_RES (22)..(23)..(24)..(25): Xaa is A or G or absent
PXXAPTKLSPISVLYKXXXXXXXXXLKYHYNMVVRSXGX

SEQ ID NO: 7736 - protein, 41 aa, Artificial Sequence
  Non-cyclic GFR-binding peptide
  MOD_RES (5)..(6)..(39)..(41): Xaa is C or S
  MOD_RES (20)..(21)..(22)..(23)..(24): Xaa is A or G
  MOD_RES (25)..(26)..(27)..(28): Xaa is A or G or absent
SASPXXVPQDLSPISILYKXXXXXXXXXLKYHYMVVKSXKX

SEQ ID NO: 7737 - protein, 35 aa, Artificial Sequence
  Non-cyclic GFR-binding peptide
  MOD_RES (1)..(1): Xaa is C or S
XRPTQVQLSAISVLYLEIVRKKPIFLKNYQTLEDH

SEQ ID NO: 7738 - protein, 41 aa, Artificial Sequence
  Non-cyclic GFR-binding peptide
  MOD_RES (5)..(6)..(40): Xaa is C or S
  MOD_RES (20)..(21)..(22)..(23)..(24): Xaa is A or G
  MOD_RES (25)..(26)..(27)..(28): Xaa is A or G or absent
VPKPXXAPTQLSPISVLYKXXXXXXXXXLKYHYNMVVRAXG

SEQ ID NO: 7739 - protein, 39 aa, Artificial Sequence
  Non-cyclic GFR-binding peptide
  MOD_RES (4)..(5)..(36)..(38): Xaa is C or S
ASPXXVSQDLSPISILYKIGKTPKILKYHYMIVKSXKXS

SEQ ID NO: 7740 - protein, 33 aa, Artificial Sequence
  Non-cyclic GFR-binding peptide
  MOD_RES (31)..(33): Xaa is C or S
VPQALSATSILYYVGRKPKVLRKHRMIVRSXKX

SEQ ID NO: 7741 - protein, 37 aa, Artificial Sequence
  Non-cyclic GFR-binding peptide
  MOD_RES (2)..(3)..(35)..(37): Xaa is C or S
AXXAPTKLNAISVLYFDSSNNVILKKYRNMVVKAXGX

SEQ ID NO: 7742 - protein, 32 aa, Artificial Sequence
  Non-cyclic GFR-binding peptide
  MOD_RES (32)..(32): Xaa is C or S
APTQLSATSVLYYDDSSNVILRKHRNMVVRAX

SEQ ID NO: 7743 - protein, 40 aa, Artificial Sequence
  Non-cyclic GFR-binding peptide
  MOD_RES (3)..(4)..(39): Xaa is C or S
  MOD_RES (18)..(19)..(20)..(21)..(22): Xaa is A or G
  MOD_RES (23)..(24)..(25)..(26): Xaa is A or G or absent
KAXXVPTKLSATSVLYYXXXXXXXXXLRKHREGMSVAEXG

SEQ ID NO: 7744 - protein, 33 aa, Artificial Sequence
  Non-cyclic GFR-binding peptide
  MOD_RES (14)..(15)..(16)..(17)..(18): Xaa is A or G
  MOD_RES (19)..(20)..(21)..(22): Xaa is A or G or absent
VPTELSPISMLYKXXXXXXXXXLKYHYEMVVEG

SEQ ID NO: 7745 - protein, 36 aa, Artificial Sequence
  Non-cyclic GFR-binding peptide
  MOD_RES (3)..(4): Xaa is C or S
  MOD_RES (18)..(19)..(20)..(21)..(22): Xaa is A or G
  MOD_RES (23)..(24)..(25)..(26): Xaa is A or G or absent
SPXXVSQDLSAISILYLXXXXXXXXXLKNYQMIVKS

SEQ ID NO: 7746 - protein, 37 aa, Artificial Sequence
  Non-cyclic GFR-binding peptide
  MOD_RES (4)..(5): Xaa is C or S
  MOD_RES (19)..(20)..(21)..(22)..(23): Xaa is A or G
  MOD_RES (24)..(25)..(26)..(27): Xaa is A or G or absent
PKPXXAPTQLSAISVLYLXXXXXXXXXLKNYQNMVVR

SEQ ID NO: 7747 - protein, 31 aa, Artificial Sequence
  Non-cyclic GFR-binding peptide
  MOD_RES (1)..(1): Xaa is C or S
XVPQDLSATSILYYVGRTPKVLRKHRMVVKS

SEQ ID NO: 7748 - protein, 40 aa, Artificial Sequence
  Non-cyclic GFR-binding peptide
  MOD_RES (3)..(37)..(39): Xaa is C or S
  MOD_RES (17)..(18)..(19)..(20)..(21): Xaa is A or G
  MOD_RES (22)..(23)..(24)..(25): Xaa is A or G or absent
PTXAPTKLSPISVLYKXXXXXXXXXLKYHYNMVVRSXGXH

SEQ ID NO: 7749 - protein, 37 aa, Artificial Sequence
  Non-cyclic GFR-binding peptide
  MOD_RES (4)..(5)..(37): Xaa is C or S
PKAXXAPTKLSPISVLYKDSSNNVILKYHYNMVVKAX

SEQ ID NO: 7750 - protein, 36 aa, Artificial Sequence
  Non-cyclic GFR-binding peptide
  MOD_RES (3)..(4): Xaa is C or S
  MOD_RES (18)..(19)..(20)..(21)..(22): Xaa is A or G
  MOD_RES (23)..(24)..(25)..(26): Xaa is A or G or absent
KPXXAPTKLSATSVLYYXXXXXXXXXLRKHRNMVVR

SEQ ID NO: 7751 - protein, 40 aa, Artificial Sequence
  Non-cyclic GFR-binding peptide
  MOD_RES (4)..(5)..(40): Xaa is C or S
  MOD_RES (19)..(20)..(21)..(22)..(23): Xaa is A or G
  MOD_RES (24)..(25)..(26)..(27): Xaa is A or G or absent
GKAXXVPTKLNAISVLYFXXXXXXXXXLKKYREGMSVAEX

SEQ ID NO: 7752 - protein, 37 aa, Artificial Sequence
  Non-cyclic GFR-binding peptide
  MOD_RES (5)..(6): Xaa is C or S
IPKAXXVPTELNAISMLYFDENEKVVLKKYRDMVVEG

SEQ ID NO: 7753 - protein, 39 aa, Artificial Sequence
  Non-cyclic GFR-binding peptide
  MOD_RES (4)..(5)..(38): Xaa is C or S
GKAXXVPTKLNAISVLYFDDMGVPTLKKYREGMSVAEXG

SEQ ID NO: 7754 - protein, 33 aa, Artificial Sequence
  Non-cyclic GFR-binding peptide
  MOD_RES (1)..(2)..(33): Xaa is C or S
XXVSQDLNAISILYFIGKTPKILKKYRMIVKSX

SEQ ID NO: 7755 - protein, 37 aa, Artificial Sequence
  Non-cyclic GFR-binding peptide
  MOD_RES (6)..(7): Xaa is C or S
KIPKAXXVPTELSPISMLYKDENEKVVLKYHYDMVVE

SEQ ID NO: 7756 - protein, 39 aa, Artificial Sequence
  Non-cyclic GFR-binding peptide
  MOD_RES (4)..(5): Xaa is C or S
  MOD_RES (19)..(20)..(21)..(22)..(23): Xaa is A or G
  MOD_RES (24)..(25)..(26)..(27): Xaa is A or G or absent
GKAXXVPTKLSATSVLYYXXXXXXXXXLRKHREGMSVAE

SEQ ID NO: 7757 - protein, 33 aa, Artificial Sequence
  Non-cyclic GFR-binding peptide
  MOD_RES (1)..(32): Xaa is C or S
XVPQALSAISILYLVGRKPKVLKNYQMIVRSXK

SEQ ID NO: 7758 - protein, 40 aa, Artificial Sequence
  Non-cyclic GFR-binding peptide
  MOD_RES (1)..(38)..(40): Xaa is C or S
  MOD_RES (17)..(18)..(19)..(20)..(21): Xaa is A or G
  MOD_RES (22)..(23)..(24)..(25): Xaa is A or G or absent
XRPTQVQLSPISVLYKXXXXXXXXXLKYHYTLEDHLAXKX

SEQ ID NO: 7759 - protein, 39 aa, Artificial Sequence
  Non-cyclic GFR-binding peptide
  MOD_RES (2)..(3)..(36)..(38): Xaa is C or S
  MOD_RES (17)..(18)..(19)..(20)..(21): Xaa is A or G
  MOD_RES (22)..(23)..(24)..(25): Xaa is A or G or absent
PXXVPQALSATSILYYXXXXXXXXXLRKHRMIVRSXKXS

SEQ ID NO: 7760 - protein, 35 aa, Artificial Sequence
  Non-cyclic GFR-binding peptide
  MOD_RES (1)..(2)..(33)..(35): Xaa is C or S
XXVPQDLSPISILYKVGRTPKVLKYHYMVVKSXKX

SEQ ID NO: 7761 - protein, 41 aa, Artificial Sequence
  Non-cyclic GFR-binding peptide
  MOD_RES (5)..(6)..(38)..(40): Xaa is C or S
VPKAXXAPTKLSAISVLYLDSSNNVILKNYQNMVVKAXGXH

SEQ ID NO: 7762 - protein, 38 aa, Artificial Sequence
  Non-cyclic GFR-binding peptide
  MOD_RES (1)..(2)..(35)..(37): Xaa is C or S
  MOD_RES (16)..(17)..(18)..(19)..(20): Xaa is A or G
  MOD_RES (21)..(22)..(23)..(24): Xaa is A or G or absent
XXVPQDLNAISILYFXXXXXXXXXLKKYRMVVKSXKXS

SEQ ID NO: 7763 - protein, 39 aa, Artificial Sequence
  Non-cyclic GFR-binding peptide
  MOD_RES (6)..(7)..(39): Xaa is C or S
TVPKPXXAPTQLSAISVLYLDDSSNVILKNYQNMVVRAX

SEQ ID NO: 7764 - protein, 36 aa, Artificial Sequence
  Non-cyclic GFR-binding peptide
  MOD_RES (5)..(6): Xaa is C or S
SASPXXVPQDLSAISILYLVGRTPKVLKNYQMVVKS

SEQ ID NO: 7765 - protein, 36 aa, Artificial Sequence
  Non-cyclic GFR-binding peptide
  MOD_RES (2)..(2): Xaa is C or S
  MOD_RES (18)..(19)..(20)..(21)..(22): Xaa is A or G
  MOD_RES (23)..(24)..(25)..(26): Xaa is A or G or absent
QXRPTQVQLSPISVLYKXXXXXXXXXLKYHYTLEDH

SEQ ID NO: 7766 - protein, 37 aa, Artificial Sequence
  Non-cyclic GFR-binding peptide
  MOD_RES (6)..(7): Xaa is C or S
ASAAPXXVPQALSAISILYLVGRKPKVLKNYQMIVRS

SEQ ID NO: 7767 - protein, 36 aa, Artificial Sequence
  Non-cyclic GFR-binding peptide
  MOD_RES (4)..(5)..(36): Xaa is C or S
AAPXXVPQALSATSILYYVGRKPKVLRKHRMIVRSX

SEQ ID NO: 7768 - protein, 41 aa, Artificial Sequence
  Non-cyclic GFR-binding peptide
  MOD_RES (1)..(38)..(40): Xaa is C or S
  MOD_RES (17)..(18)..(19)..(20)..(21): Xaa is A or G
  MOD_RES (22)..(23)..(24)..(25): Xaa is A or G or absent
XRPTQVQLNAISVLYFXXXXXXXXXLKKYRTLEDHLAXKXE

SEQ ID NO: 7769 - protein, 37 aa, Artificial Sequence
  Non-cyclic GFR-binding peptide
  MOD_RES (4)..(5): Xaa is C or S
  MOD_RES (19)..(20)..(21)..(22)..(23): Xaa is A or G
  MOD_RES (24)..(25)..(26)..(27): Xaa is A or G or absent
AAPXXVPQALSAISILYLXXXXXXXXXLKNYQMIVRS

SEQ ID NO: 7770 - protein, 43 aa, Artificial Sequence
  Non-cyclic GFR-binding peptide
  MOD_RES (3)..(40)..(42): Xaa is C or S
VQXRPTQVQLSATSVLYYEIVRKKPIFLRKHRTLEDHLAXKXE

SEQ ID NO: 7771 - protein, 38 aa, Artificial Sequence
  Non-cyclic GFR-binding peptide
  MOD_RES (2)..(3)..(35)..(37): Xaa is C or S
AXXVPTELSPISMLYKDEYDKVVLKYHYEMVVEGXGXR

SEQ ID NO: 7772 - protein, 36 aa, Artificial Sequence
  Non-cyclic GFR-binding peptide
  MOD_RES (3)..(4): Xaa is C or S
  MOD_RES (18)..(19)..(20)..(21)..(22): Xaa is A or G
  MOD_RES (23)..(24)..(25)..(26): Xaa is A or G or absent
KAXXAPTKLSPISVLYKXXXXXXXXXLKYHYNMVVK

SEQ ID NO: 7773 - protein, 37 aa, Artificial Sequence
  Non-cyclic GFR-binding peptide
  MOD_RES (2)..(3)..(37): Xaa is C or S
  MOD_RES (17)..(18)..(19)..(20)..(21): Xaa is A or G
  MOD_RES (22)..(23)..(24)..(25): Xaa is A or G or absent
AXXAPTKLSAISVLYLXXXXXXXXXLKNYQNMVVKAX

SEQ ID NO: 7774 - protein, 39 aa, Artificial Sequence
  Non-cyclic GFR-binding peptide
  MOD_RES (4)..(5)..(36)..(38): Xaa is C or S
ASPXXVPQDLSAISILYLVGRTPKVLKNYQMVVKSXKXS

SEQ ID NO: 7775 - protein, 41 aa, Artificial Sequence
  Non-cyclic GFR-binding peptide
  MOD_RES (1)..(38)..(40): Xaa is C or S
  MOD_RES (17)..(18)..(19)..(20)..(21): Xaa is A or G
  MOD_RES (22)..(23)..(24)..(25): Xaa is A or G or absent
XRPTQVQLSPISVLYKXXXXXXXXXLKYHYTLEDHLAXKXE

SEQ ID NO: 7776 - protein, 44 aa, Artificial Sequence
  Non-cyclic GFR-binding peptide
  MOD_RES (4)..(41)..(43): Xaa is C or S
  MOD_RES (20)..(21)..(22)..(23)..(24): Xaa is A or G
  MOD_RES (25)..(26)..(27)..(28): Xaa is A or G or absent
NVQXRPTQVQLNAISVLYFXXXXXXXXXLKKYRTLEDHLAXKXE

SEQ ID NO: 7777 - protein, 32 aa, Artificial Sequence
  Non-cyclic GFR-binding peptide
  MOD_RES (1)..(1): Xaa is C or S
XVPTELNAISMLYFDENEKVVLKKYRDMVVEG

SEQ ID NO: 7778 - protein, 39 aa, Artificial Sequence
  Non-cyclic GFR-binding peptide
  MOD_RES (4)..(5): Xaa is C or S
  MOD_RES (19)..(20)..(21)..(22)..(23): Xaa is A or G
  MOD_RES (24)..(25)..(26)..(27): Xaa is A or G or absent
GKAXXVPTKLSAISVLYLXXXXXXXXXLKNYQEGMSVAE

SEQ ID NO: 7779 - protein, 37 aa, Artificial Sequence
  Non-cyclic GFR-binding peptide
  MOD_RES (2)..(3)..(35)..(37): Xaa is C or S
PXXAPTKLSAISVLYLDDSSNVILKNYQNMVVRSXGX

SEQ ID NO: 7780 - protein, 36 aa, Artificial Sequence
  Non-cyclic GFR-binding peptide
  MOD_RES (4)..(4): Xaa is C or S
  MOD_RES (18)..(19)..(20)..(21)..(22): Xaa is A or G
  MOD_RES (23)..(24)..(25)..(26): Xaa is A or G or absent
KPTXAPTKLSPISVLYKXXXXXXXXXLKYHYNMVVR

SEQ ID NO: 7781 - protein, 38 aa, Artificial Sequence
  Non-cyclic GFR-binding peptide
  MOD_RES (4)..(5)..(37): Xaa is C or S
PKAXXAPTKLSAISVLYLDSSNNVILKNYQNMVVKAXG

SEQ ID NO: 7782 - protein, 37 aa, Artificial Sequence
  Non-cyclic GFR-binding peptide
  MOD_RES (4)..(5): Xaa is C or S
  MOD_RES (19)..(20)..(21)..(22)..(23): Xaa is A or G
  MOD_RES (24)..(25)..(26)..(27): Xaa is A or G or absent
ASPXXVSQDLSAISILYLXXXXXXXXXLKNYQMIVKS

SEQ ID NO: 7783 - protein, 36 aa, Artificial Sequence
  Non-cyclic GFR-binding peptide
  MOD_RES (3)..(4): Xaa is C or S
  MOD_RES (18)..(19)..(20)..(21)..(22): Xaa is A or G
  MOD_RES (23)..(24)..(25)..(26): Xaa is A or G or absent
APXXVPQALSPISILYKXXXXXXXXXLKYHYMIVRS

SEQ ID NO: 7784 - protein, 41 aa, Artificial Sequence
  Non-cyclic GFR-binding peptide
  MOD_RES (6)..(7)..(41): Xaa is C or S
  MOD_RES (21)..(22)..(23)..(24)..(25): Xaa is A or G
  MOD_RES (26)..(27)..(28)..(29): Xaa is A or G or absent
SIPKAXXVPTELNAISMLYFXXXXXXXXXLKKYREMVVEGX

SEQ ID NO: 7785 - protein, 32 aa, Artificial Sequence
  Non-cyclic GFR-binding peptide
  MOD_RES (1)..(1): Xaa is C or S
XVPTELNAISMLYFDEYDKVVLKKYREMVVEG

SEQ ID NO: 7786 - protein, 38 aa, Artificial Sequence
  Non-cyclic GFR-binding peptide
  MOD_RES (2)..(3)..(37): Xaa is C or S
  MOD_RES (17)..(18)..(19)..(20)..(21): Xaa is A or G
  MOD_RES (22)..(23)..(24)..(25): Xaa is A or G or absent
AXXVPTELSATSMLYYXXXXXXXXXLRKHRDMVVEGXG

SEQ ID NO: 7787 - protein, 40 aa, Artificial Sequence
  Non-cyclic GFR-binding peptide
  MOD_RES (5)..(6)..(39): Xaa is C or S
  MOD_RES (20)..(21)..(22)..(23)..(24): Xaa is A or G
  MOD_RES (25)..(26)..(27)..(28): Xaa is A or G or absent
SASPXXVSQDLSAISILYLXXXXXXXXXLKNYQMIVKSXK

SEQ ID NO: 7788 - protein, 36 aa, Artificial Sequence
  Non-cyclic GFR-binding peptide
  MOD_RES (2)..(3)..(34)..(36): Xaa is C or S
PXXVSQDLSAISILYLIGKTPKILKNYQMIVKSXKX

SEQ ID NO: 7789 - protein, 39 aa, Artificial Sequence
  Non-cyclic GFR-binding peptide
  MOD_RES (4)..(5)..(39): Xaa is C or S
  MOD_RES (19)..(20)..(21)..(22)..(23): Xaa is A or G
  MOD_RES (24)..(25)..(26)..(27): Xaa is A or G or absent
PKAXXVPTELSPISMLYKXXXXXXXXXLKYHYEMVVEGX

SEQ ID NO: 7790 - protein, 37 aa, Artificial Sequence
  Non-cyclic GFR-binding peptide
  MOD_RES (34)..(36): Xaa is C or S
  MOD_RES (14)..(15)..(16)..(17)..(18): Xaa is A or G
  MOD_RES (19)..(20)..(21)..(22): Xaa is A or G or absent
VPTELNAISMLYFXXXXXXXXXLKKYREMVVEGXGXR

SEQ ID NO: 7791 - protein, 36 aa, Artificial Sequence
  Non-cyclic GFR-binding peptide
  MOD_RES (2)..(3)..(34)..(36): Xaa is C or S
PXXVPQALSAISILYLVGRKPKVLKNYQMIVRSXKX

SEQ ID NO: 7792 - protein, 36 aa, Artificial Sequence
  Non-cyclic GFR-binding peptide
  MOD_RES (1)..(34)..(36): Xaa is C or S
XVPTKLNAISVLYFDDMGVPTLKKYREGMSVAEXGX

SEQ ID NO: 7793 - protein, 40 aa, Artificial Sequence
  Non-cyclic GFR-binding peptide
  MOD_RES (6)..(7)..(39): Xaa is C or S
SIPKAXXVPTELNAISMLYFDEYDKVVLKKYREMVVEGXG

SEQ ID NO: 7794 - protein, 37 aa, Artificial Sequence
  Non-cyclic GFR-binding peptide
  MOD_RES (1)..(2)..(36): Xaa is C or S
  MOD_RES (16)..(17)..(18)..(19)..(20): Xaa is A or G
  MOD_RES (21)..(22)..(23)..(24): Xaa is A or G or absent
XXAPTKLSAISVLYLXXXXXXXXXLKNYQNMVVKAXG

SEQ ID NO: 7795 - protein, 34 aa, Artificial Sequence
  Non-cyclic GFR-binding peptide
  MOD_RES (3)..(4): Xaa is C or S
KPXXAPTQLSPISVLYKDDSSNVILKYHYNMVVR

SEQ ID NO: 7796 - protein, 35 aa, Artificial Sequence
  Non-cyclic GFR-binding peptide
  MOD_RES (2)..(3)..(34): Xaa is C or S
PXXVSQDLSATSILYYIGKTPKILRKHRMIVKSXK

SEQ ID NO: 7797 - protein, 30 aa, Artificial Sequence; identical to SEQ ID NO: 817
  Non-cyclic GFR-binding peptide

SEQ ID NO: 7798 - protein, 41 aa, Artificial Sequence
  Non-cyclic GFR-binding peptide
  MOD_RES (6)..(7)..(39)..(41): Xaa is C or S
SIPKAXXVPTELNAISMLYFDEYDKVVLKKYREMVVEGXGX

SEQ ID NO: 7799 - protein, 36 aa, Artificial Sequence
  Non-cyclic GFR-binding peptide
  MOD_RES (5)..(6): Xaa is C or S
SASPXXVPQDLSPISILYKVGRTPKVLKYHYMVVKS

SEQ ID NO: 7800 - protein, 40 aa, Artificial Sequence
  Non-cyclic GFR-binding peptide
  MOD_RES (4)..(5)..(37)..(39): Xaa is C or S
PKAXXAPTKLNAISVLYFDSSNNVILKKYRNMVVKAXGXH

SEQ ID NO: 7801 - protein, 37 aa, Artificial Sequence
  Non-cyclic GFR-binding peptide
  MOD_RES (5)..(6)..(37): Xaa is C or S
SAAPXXVPQALSAISILYLVGRKPKVLKNYQMIVRSX

SEQ ID NO: 7802 - protein, 37 aa, Artificial Sequence
  Non-cyclic GFR-binding peptide
  MOD_RES (2)..(3)..(34)..(36): Xaa is C or S
PXXVSQDLSAISILYLIGKTPKILKNYQMIVKSXKXS

SEQ ID NO: 7803 - protein, 31 aa, Artificial Sequence
  Non-cyclic GFR-binding peptide
  MOD_RES (1)..(1): Xaa is C or S
XVSQDLSAISILYLIGKTPKILKNYQMIVKS

SEQ ID NO: 7804 - protein, 44 aa, Artificial Sequence
  Non-cyclic GFR-binding peptide
  MOD_RES (5)..(6)..(41)..(43): Xaa is C or S
  MOD_RES (20)..(21)..(22)..(23)..(24): Xaa is A or G
  MOD_RES (25)..(26)..(27)..(28): Xaa is A or G or absent
VGKAXXVPTKLSATSVLYYXXXXXXXXXLRKHREGMSVAEXGXR

SEQ ID NO: 7805 - protein, 40 aa, Artificial Sequence
  Non-cyclic GFR-binding peptide
  MOD_RES (1)..(2)..(37)..(39): Xaa is C or S
  MOD_RES (16)..(17)..(18)..(19)..(20): Xaa is A or G
  MOD_RES (21)..(22)..(23)..(24): Xaa is A or G or absent
XXVPTKLSATSVLYYXXXXXXXXXLRKHREGMSVAEXGXR

SEQ ID NO: 7806 - protein, 44 aa, Artificial Sequence
  Non-cyclic GFR-binding peptide
  MOD_RES (4)..(41)..(43): Xaa is C or S
  MOD_RES (20)..(21)..(22)..(23)..(24): Xaa is A or G
  MOD_RES (25)..(26)..(27)..(28): Xaa is A or G or absent
NVQXRPTQVQLSPISVLYKXXXXXXXXXLKYHYTLEDHLAXKXE

SEQ ID NO: 7807 - protein, 39 aa, Artificial Sequence
  Non-cyclic GFR-binding peptide
  MOD_RES (3)..(4)..(36)..(38): Xaa is C or S
KAXXVPTELNAISMLYFDEYDKVVLKKYREMVVEGXGXR

SEQ ID NO: 7808 - protein, 34 aa, Artificial Sequence
  Non-cyclic GFR-binding peptide
  MOD_RES (1)..(33): Xaa is C or S
XAPTKLSAISVLYLDDSSNVILKNYQNMVVRSXG

SEQ ID NO: 7809 - protein, 34 aa, Artificial Sequence
  Non-cyclic GFR-binding peptide
  MOD_RES (2)..(3): Xaa is C or S
AXXVPTELSPISMLYKDEYDKVVLKYHYEMVVEG

SEQ ID NO: 7810 - protein, 37 aa, Artificial Sequence
  Non-cyclic GFR-binding peptide
  MOD_RES (1)..(35)..(37): Xaa is C or S
  MOD_RES (15)..(16)..(17)..(18)..(19): Xaa is A or G
  MOD_RES (20)..(21)..(22)..(23): Xaa is A or G or absent
XAPTKLSPISVLYKXXXXXXXXXLKYHYNMVVKAXGX

SEQ ID NO: 7811 - protein, 42 aa, Artificial Sequence
  Non-cyclic GFR-binding peptide
  MOD_RES (6)..(7)..(40)..(42): Xaa is C or S
  MOD_RES (21)..(22)..(23)..(24)..(25): Xaa is A or G
  MOD_RES (26)..(27)..(28)..(29): Xaa is A or G or absent
ASASPXXVSQDLSAISILYLXXXXXXXXXLKNYQMIVKSXKX

SEQ ID NO: 7812 - protein, 41 aa, Artificial Sequence
  Non-cyclic GFR-binding peptide
  MOD_RES (5)..(6)..(39)..(41): Xaa is C or S
  MOD_RES (20)..(21)..(22)..(23)..(24): Xaa is A or G
  MOD_RES (25)..(26)..(27)..(28): Xaa is A or G or absent
SASPXXVSQDLSAISILYLXXXXXXXXXLKNYQMIVKSXKX

SEQ ID NO: 7813 - protein, 37 aa, Artificial Sequence
  Non-cyclic GFR-binding peptide
  MOD_RES (6)..(7): Xaa is C or S
ASASPXXVSQDLSATSILYYIGKTPKILRKHRMIVKS

SEQ ID NO: 7814 - protein, 41 aa, Artificial Sequence
  Non-cyclic GFR-binding peptide
  MOD_RES (4)..(5)..(39)..(41): Xaa is C or S
  MOD_RES (19)..(20)..(21)..(22)..(23): Xaa is A or G
  MOD_RES (24)..(25)..(26)..(27): Xaa is A or G or absent
PKPXXAPTQLSAISVLYLXXXXXXXXXLKNYQNMVVRAXGX

SEQ ID NO: 7815 - protein, 32 aa, Artificial Sequence; identical to SEQ ID NO: 786
  Non-cyclic GFR-binding peptide

SEQ ID NO: 7816 - protein, 31 aa, Artificial Sequence
  Non-cyclic GFR-binding peptide
  MOD_RES (1)..(1): Xaa is C or S
XVSQDLSPISILYKIGKTPKILKYHYMIVKS

SEQ ID NO: 7817 - protein, 37 aa, Artificial Sequence
  Non-cyclic GFR-binding peptide
  MOD_RES (3)..(4)..(35)..(37): Xaa is C or S
SPXXVSQDLNAISILYFIGKTPKILKKYRMIVKSXKX

SEQ ID NO: 7818 - protein, 34 aa, Artificial Sequence
  Non-cyclic GFR-binding peptide
  MOD_RES (1)..(2)..(34): Xaa is C or S
XXVPTELSATSMLYYDENEKVVLRKHRDMVVEGX

SEQ ID NO: 7819 - protein, 39 aa, Artificial Sequence
  Non-cyclic GFR-binding peptide
  MOD_RES (2)..(3)..(36)..(38): Xaa is C or S
  MOD_RES (17)..(18)..(19)..(20)..(21): Xaa is A or G
  MOD_RES (22)..(23)..(24)..(25): Xaa is A or G or absent
PXXVSQDLNAISILYFXXXXXXXXXLKKYRMIVKSXKXS

SEQ ID NO: 7820 - protein, 43 aa, Artificial Sequence
  Non-cyclic GFR-binding peptide
  MOD_RES (5)..(6)..(41)..(43): Xaa is C or S
  MOD_RES (20)..(21)..(22)..(23)..(24): Xaa is A or G
  MOD_RES (25)..(26)..(27)..(28): Xaa is A or G or absent
VGKAXXVPTKLSAISVLYLXXXXXXXXXLKNYQEGMSVAEXGX

SEQ ID NO: 7821 - protein, 35 aa, Artificial Sequence
  Non-cyclic GFR-binding peptide
  MOD_RES (1)..(34): Xaa is C or S
  MOD_RES (15)..(16)..(17)..(18)..(19): Xaa is A or G
  MOD_RES (20)..(21)..(22)..(23): Xaa is A or G or absent
XVPQDLNAISILYFXXXXXXXXXLKKYRMVVKSXK

SEQ ID NO: 7822 - protein, 34 aa, Artificial Sequence
  Non-cyclic GFR-binding peptide
  MOD_RES (2)..(3): Xaa is C or S
AXXVPTELSPISMLYKDENEKVVLKYHYDMVVEG

SEQ ID NO: 7823 - protein, 34 aa, Artificial Sequence
  Non-cyclic GFR-binding peptide
  MOD_RES (32)..(34): Xaa is C or S
VPTELSPISMLYKDEYDKVVLKYHYEMVVEGXGX

SEQ ID NO: 7824 - protein, 37 aa, Artificial Sequence
  Non-cyclic GFR-binding peptide
  MOD_RES (1)..(36): Xaa is C or S
  MOD_RES (15)..(16)..(17)..(18)..(19): Xaa is A or G
  MOD_RES (20)..(21)..(22)..(23): Xaa is A or G or absent
XVPTKLSAISVLYLXXXXXXXXXLKNYQEGMSVAEXG

SEQ ID NO: 7825 - protein, 38 aa, Artificial Sequence
  Non-cyclic GFR-binding peptide
  MOD_RES (7)..(7): Xaa is C or S
HVTKPTXAPTKLSPISVLYKDDSSNVILKYHYNMVVRS

SEQ ID NO: 7826 - protein, 42 aa, Artificial Sequence
  Non-cyclic GFR-binding peptide
  MOD_RES (6)..(7)..(41): Xaa is C or S
  MOD_RES (21)..(22)..(23)..(24)..(25): Xaa is A or G
  MOD_RES (26)..(27)..(28)..(29): Xaa is A or G or absent
TVPKPXXAPTQLSPISVLYKXXXXXXXXXLKYHYNMVVRAXG

SEQ ID NO: 7827 - protein, 42 aa, Artificial Sequence
  Non-cyclic GFR-binding peptide
  MOD_RES (6)..(7)..(40)..(42): Xaa is C or S
  MOD_RES (21)..(22)..(23)..(24)..(25): Xaa is A or G
  MOD_RES (26)..(27)..(28)..(29): Xaa is A or G or absent
ASAAPXXVPQALSAISILYLXXXXXXXXXLKNYQMIVRSXKX

SEQ ID NO: 7828 - protein, 38 aa, Artificial Sequence
  Non-cyclic GFR-binding peptide
  MOD_RES (1)..(35)..(37): Xaa is C or S
  MOD_RES (15)..(16)..(17)..(18)..(19): Xaa is A or G
  MOD_RES (20)..(21)..(22)..(23): Xaa is A or G or absent
XVPTELSPISMLYKXXXXXXXXXLKYHYDMVVEGXGXR

SEQ ID NO: 7829 - protein, 40 aa, Artificial Sequence
  Non-cyclic GFR-binding peptide
  MOD_RES (4)..(5)..(39): Xaa is C or S
  MOD_RES (19)..(20)..(21)..(22)..(23): Xaa is A or G
  MOD_RES (24)..(25)..(26)..(27): Xaa is A or G or absent
PKPXXAPTQLSPISVLYKXXXXXXXXXLKYHYNMVVRAXG

SEQ ID NO: 7830 - protein, 40 aa, Artificial Sequence
  Non-cyclic GFR-binding peptide
  MOD_RES (1)..(38)..(40): Xaa is C or S
  MOD_RES (17)..(18)..(19)..(20)..(21): Xaa is A or G
  MOD_RES (22)..(23)..(24)..(25): Xaa is A or G or absent
XRPTQVQLSAISVLYLXXXXXXXXXLKNYQTLEDHLAXKX

SEQ ID NO: 7831 - protein, 36 aa, Artificial Sequence
  Non-cyclic GFR-binding peptide
  MOD_RES (36)..(36): Xaa is C or S
PTQVQLSATSVLYYEIVRKKPIFLRKHRTLEDHLAX

SEQ ID NO: 7832 - protein, 33 aa, Artificial Sequence
  Non-cyclic GFR-binding peptide
  MOD_RES (1)..(33): Xaa is C or S
XVPTELSATSMLYYDEYDKVVLRKHREMVVEGX

SEQ ID NO: 7833 - protein, 41 aa, Artificial Sequence
  Non-cyclic GFR-binding peptide
  MOD_RES (2)..(39)..(41): Xaa is C or S
  MOD_RES (18)..(19)..(20)..(21)..(22): Xaa is A or G
  MOD_RES (23)..(24)..(25)..(26): Xaa is A or G or absent
QXRPTQVQLSPISVLYKXXXXXXXXXLKYHYTLEDHLAXKX

SEQ ID NO: 7834 - protein, 34 aa, Artificial Sequence
  Non-cyclic GFR-binding peptide
  MOD_RES (1)..(32)..(34): Xaa is C or S
XVPQDLSAISILYLVGRTPKVLKNYQMVVKSXKX

SEQ ID NO: 7835 - protein, 42 aa, Artificial Sequence
  Non-cyclic GFR-binding peptide
  MOD_RES (6)..(7)..(42): Xaa is C or S
  MOD_RES (21)..(22)..(23)..(24)..(25): Xaa is A or G
  MOD_RES (26)..(27)..(28)..(29): Xaa is A or G or absent
KVGKAXXVPTKLSAISVLYLXXXXXXXXXLKNYQEGMSVAEX

SEQ ID NO: 7836 - protein, 39 aa, Artificial Sequence
  Non-cyclic GFR-binding peptide
  MOD_RES (6)..(7)..(38): Xaa is C or S
ASASPXXVPQDLNAISILYFVGRTPKVLKKYRMVVKSXK

SEQ ID NO: 7837 - protein, 41 aa, Artificial Sequence
  Non-cyclic GFR-binding peptide
  MOD_RES (6)..(7)..(38)..(40): Xaa is C or S
ASAAPXXVPQALSPISILYKVGRKPKVLKYHYMIVRSXKXS

SEQ ID NO: 7838 - protein, 39 aa, Artificial Sequence
  Non-cyclic GFR-binding peptide
  MOD_RES (37)..(39): Xaa is C or S
RPTQVQLNAISVLYFEIVRKKPIFLKKYRTLEDHLAXKX

SEQ ID NO: 7839 - protein, 38 aa, Artificial Sequence
  Non-cyclic GFR-binding peptide
  MOD_RES (3)..(4)..(37): Xaa is C or S
  MOD_RES (18)..(19)..(20)..(21)..(22): Xaa is A or G
  MOD_RES (23)..(24)..(25)..(26): Xaa is A or G or absent
SPXXVSQDLNAISILYFXXXXXXXXXLKKYRMIVKSXK

SEQ ID NO: 7840 - protein, 36 aa, Artificial Sequence
  Non-cyclic GFR-binding peptide
  MOD_RES (1)..(1): Xaa is C or S
  MOD_RES (17)..(18)..(19)..(20)..(21): Xaa is A or G
  MOD_RES (22)..(23)..(24)..(25): Xaa is A or G or absent
XRPTQVQLSPISVLYKXXXXXXXXXLKYHYTLEDHL

SEQ ID NO: 7841 - protein, 39 aa, Artificial Sequence
  Non-cyclic GFR-binding peptide
  MOD_RES (1)..(2)..(36)..(38): Xaa is C or S
  MOD_RES (16)..(17)..(18)..(19)..(20): Xaa is A or G
  MOD_RES (21)..(22)..(23)..(24): Xaa is A or G or absent
XXVPTELNAISMLYFXXXXXXXXXLKKYRDMVVEGXGXR

SEQ ID NO: 7842 - protein, 38 aa, Artificial Sequence
  Non-cyclic GFR-binding peptide
  MOD_RES (2)..(36)..(38): Xaa is C or S
  MOD_RES (16)..(17)..(18)..(19)..(20): Xaa is A or G
  MOD_RES (21)..(22)..(23)..(24): Xaa is A or G or absent
TXAPTKLSPISVLYKXXXXXXXXXLKYHYNMVVRSXGX

SEQ ID NO: 7843 - protein, 36 aa, Artificial Sequence
  Non-cyclic GFR-binding peptide
  MOD_RES (3)..(4)..(36): Xaa is C or S
KPXXAPTQLSATSVLYYDDSSNVILRKHRNMVVRAX

SEQ ID NO: 7844 - protein, 35 aa, Artificial Sequence
  Non-cyclic GFR-binding peptide
  MOD_RES (1)..(35): Xaa is C or S
  MOD_RES (15)..(16)..(17)..(18)..(19): Xaa is A or G
  MOD_RES (20)..(21)..(22)..(23): Xaa is A or G or absent
XVPTELSPISMLYKXXXXXXXXXLKYHYDMVVEGX

SEQ ID NO: 7845 - protein, 36 aa, Artificial Sequence
  Non-cyclic GFR-binding peptide
  MOD_RES (5)..(6): Xaa is C or S
SAAPXXVPQALSPISILYKVGRKPKVLKYHYMIVRS

SEQ ID NO: 7846 - protein, 36 aa, Artificial Sequence
  Non-cyclic GFR-binding peptide
  MOD_RES (3)..(4): Xaa is C or S
  MOD_RES (18)..(19)..(20)..(21)..(22): Xaa is A or G
  MOD_RES (23)..(24)..(25)..(26): Xaa is A or G or absent
SPXXVPQDLSATSILYYXXXXXXXXXLRKHRMVVKS

SEQ ID NO: 7847 - protein, 38 aa, Artificial Sequence
  Non-cyclic GFR-binding peptide
  MOD_RES (5)..(6): Xaa is C or S
  MOD_RES (20)..(21)..(22)..(23)..(24): Xaa is A or G
  MOD_RES (25)..(26)..(27)..(28): Xaa is A or G or absent
IPKAXXVPTELSPISMLYKXXXXXXXXXLKYHYEMVVE

SEQ ID NO: 7848 - protein, 40 aa, Artificial Sequence
  Non-cyclic GFR-binding peptide
  MOD_RES (5)..(6)..(40): Xaa is C or S
  MOD_RES (20)..(21)..(22)..(23)..(24): Xaa is A or G
  MOD_RES (25)..(26)..(27)..(28): Xaa is A or G or absent
VPKPXXAPTQLSPISVLYKXXXXXXXXXLKYHYNMVVRAX

SEQ ID NO: 7849 - protein, 33 aa, Artificial Sequence
  Non-cyclic GFR-binding peptide
  MOD_RES (1)..(2): Xaa is C or S
XXVPTELSATSMLYYDENEKVVLRKHRDMVVEG

SEQ ID NO: 7850 - protein, 35 aa, Artificial Sequence
  Non-cyclic GFR-binding peptide
  MOD_RES (16)..(17)..(18)..(19)..(20): Xaa is A or G
  MOD_RES (21)..(22)..(23)..(24): Xaa is A or G or absent
RPTQVQLSATSVLYYXXXXXXXXXLRKHRTLEDHL

SEQ ID NO: 7851 - protein, 45 aa, Artificial Sequence
  Non-cyclic GFR-binding peptide
  MOD_RES (6)..(7)..(42)..(44): Xaa is C or S
  MOD_RES (21)..(22)..(23)..(24)..(25): Xaa is A or G
  MOD_RES (26)..(27)..(28)..(29): Xaa is A or G or absent
KVGKAXXVPTKLSATSVLYYXXXXXXXXXLRKHREGMSVAEXGXR

SEQ ID NO: 7852 - protein, 34 aa, Artificial Sequence
  Non-cyclic GFR-binding peptide
  MOD_RES (1)..(2)..(33): Xaa is C or S
XXVSQDLSATSILYYIGKTPKILRKHRMIVKSXK

SEQ ID NO: 7853 - protein, 37 aa, Artificial Sequence
  Non-cyclic GFR-binding peptide
  MOD_RES (36)..(36): Xaa is C or S
PTQVQLNAISVLYFEIVRKKPIFLKKYRTLEDHLAXK

SEQ ID NO: 7854 - protein, 38 aa, Artificial Sequence
  Non-cyclic GFR-binding peptide
  MOD_RES (1)..(36)..(38): Xaa is C or S
  MOD_RES (15)..(16)..(17)..(18)..(19): Xaa is A or G
  MOD_RES (20)..(21)..(22)..(23): Xaa is A or G or absent
XVPTKLNAISVLYFXXXXXXXXXLKKYREGMSVAEXGX

SEQ ID NO: 7855 - protein, 36 aa, Artificial Sequence
  Non-cyclic GFR-binding peptide
  MOD_RES (34)..(36): Xaa is C or S
  MOD_RES (14)..(15)..(16)..(17)..(18): Xaa is A or G
  MOD_RES (19)..(20)..(21)..(22): Xaa is A or G or absent
VPTELNAISMLYFXXXXXXXXXLKKYRDMVVEGXGX

SEQ ID NO: 7856 - protein, 38 aa, Artificial Sequence
  Non-cyclic GFR-binding peptide
  MOD_RES (1)..(2)..(36)..(38): Xaa is C or S
  MOD_RES (16)..(17)..(18)..(19)..(20): Xaa is A or G
  MOD_RES (21)..(22)..(23)..(24): Xaa is A or G or absent
XXAPTQLSPISVLYKXXXXXXXXXLKYHYNMVVRAXGX

SEQ ID NO: 7857 - protein, 37 aa, Artificial Sequence
  Non-cyclic GFR-binding peptide
  MOD_RES (1)..(34)..(36): Xaa is C or S
  MOD_RES (15)..(16)..(17)..(18)..(19): Xaa is A or G
  MOD_RES (20)..(21)..(22)..(23): Xaa is A or G or absent
XVSQDLNAISILYFXXXXXXXXXLKKYRMIVKSXKXS

SEQ ID NO: 7858 - protein, 36 aa, Artificial Sequence
  Non-cyclic GFR-binding peptide
  MOD_RES (2)..(36): Xaa is C or S
  MOD_RES (16)..(17)..(18)..(19)..(20): Xaa is A or G
  MOD_RES (21)..(22)..(23)..(24): Xaa is A or G or absent
TXAPTKLSATSVLYYXXXXXXXXXLRKHRNMVVRSX

SEQ ID NO: 7859 - protein, 42 aa, Artificial Sequence
  Non-cyclic GFR-binding peptide
  MOD_RES (3)..(4)..(39)..(41): Xaa is C or S
  MOD_RES (18)..(19)..(20)..(21)..(22): Xaa is A or G
  MOD_RES (23)..(24)..(25)..(26): Xaa is A or G or absent
KAXXVPTKLSAISVLYLXXXXXXXXXLKNYQEGMSVAEXGXR

SEQ ID NO: 7860 - protein, 35 aa, Artificial Sequence
  Non-cyclic GFR-binding peptide
  MOD_RES (1)..(1): Xaa is C or S
XRPTQVQLSPISVLYKEIVRKKPIFLKYHYTLEDH

SEQ ID NO: 7861 - protein, 40 aa, Artificial Sequence
  Non-cyclic GFR-binding peptide
  MOD_RES (4)..(5)..(39): Xaa is C or S
  MOD_RES (19)..(20)..(21)..(22)..(23): Xaa is A or G
  MOD_RES (24)..(25)..(26)..(27): Xaa is A or G or absent
PKAXXVPTELSPISMLYKXXXXXXXXXLKYHYEMVVEGXG

SEQ ID NO: 7862 - protein, 36 aa, Artificial Sequence
  Non-cyclic GFR-binding peptide
  MOD_RES (3)..(4)..(36): Xaa is C or S
KPXXAPTKLSAISVLYLDDSSNVILKNYQNMVVRSX

SEQ ID NO: 7863 - protein, 35 aa, Artificial Sequence
  Non-cyclic GFR-binding peptide
  MOD_RES (2)..(3)..(35): Xaa is C or S
PXXAPTKLSPISVLYKDDSSNVILKYHYNMVVRSX

SEQ ID NO: 7864 - protein, 37 aa, Artificial Sequence
  Non-cyclic GFR-binding peptide
  MOD_RES (1)..(34)..(36): Xaa is C or S
  MOD_RES (15)..(16)..(17)..(18)..(19): Xaa is A or G
  MOD_RES (20)..(21)..(22)..(23): Xaa is A or G or absent
XVPQALSATSILYYXXXXXXXXXLRKHRMIVRSXKXS

SEQ ID NO: 7865 - protein, 43 aa, Artificial Sequence
  Non-cyclic GFR-binding peptide
  MOD_RES (4)..(41)..(43): Xaa is C or S
NVQXRPTQVQLSPISVLYKEIVRKKPIFLKYHYTLEDHLAXKX

SEQ ID NO: 7866 - protein, 31 aa, Artificial Sequence
  Non-cyclic GFR-binding peptide
APTQLSATSVLYYDDSSNVILRKHRNMVVRA

SEQ ID NO: 7867 - protein, 33 aa, Artificial Sequence
  Non-cyclic GFR-binding peptide
  MOD_RES (1)..(32): Xaa is C or S
XVSQDLSATSILYYIGKTPKILRKHRMIVKSXK

SEQ ID NO: 7868 - protein, 38 aa, Artificial Sequence
  Non-cyclic GFR-binding peptide
  MOD_RES (4)..(36)..(38): Xaa is C or S
KPTXAPTKLSPISVLYKDDSSNVILKYHYNMVVRSXGX

SEQ ID NO: 7869 - protein, 33 aa, Artificial Sequence
  Non-cyclic GFR-binding peptide
  MOD_RES (1)..(2): Xaa is C or S
XXVPTELSATSMLYYDEYDKVVLRKHREMVVEG

SEQ ID NO: 7870 - protein, 35 aa, Artificial Sequence
  Non-cyclic GFR-binding peptide
  MOD_RES (3)..(35): Xaa is C or S
PTXAPTKLSAISVLYLDDSSNVILKNYQNMVVRSX

SEQ ID NO: 7871 - protein, 37 aa, Artificial Sequence
  Non-cyclic GFR-binding peptide
  MOD_RES (3)..(4)..(36): Xaa is C or S
KAXXAPTKLNAISVLYFDSSNNVILKKYRNMVVKAXG

SEQ ID NO: 7872 - protein, 36 aa, Artificial Sequence
  Non-cyclic GFR-binding peptide
  MOD_RES (2)..(3)..(35): Xaa is C or S
PXXAPTKLSPISVLYKDDSSNVILKYHYNMVVRSXG

SEQ ID NO: 7873 - protein, 34 aa, Artificial Sequence
  Non-cyclic GFR-binding peptide
  MOD_RES (31)..(33): Xaa is C or S
VPQALSPISILYKVGRKPKVLKYHYMIVRSXKXS

SEQ ID NO: 7874 - protein, 35 aa, Artificial Sequence
  Non-cyclic GFR-binding peptide
  MOD_RES (3)..(4)..(35): Xaa is C or S
SPXXVPQDLSAISILYLVGRTPKVLKNYQMVVKSX

SEQ ID NO: 7875 - protein, 39 aa, Artificial Sequence
  Non-cyclic GFR-binding peptide
  MOD_RES (6)..(7): Xaa is C or S
  MOD_RES (21)..(22)..(23)..(24)..(25): Xaa is A or G
  MOD_RES (26)..(27)..(28)..(29): Xaa is A or G or absent
TVPKPXXAPTQLSAISVLYLXXXXXXXXXLKNYQNMVVR

SEQ ID NO: 7876 - protein, 36 aa, Artificial Sequence
  Non-cyclic GFR-binding peptide
  MOD_RES (3)..(4): Xaa is C or S
  MOD_RES (18)..(19)..(20)..(21)..(22): Xaa is A or G
  MOD_RES (23)..(24)..(25)..(26): Xaa is A or G or absent
SPXXVPQDLSPISILYKXXXXXXXXXLKYHYMVVKS

SEQ ID NO: 7877 - protein, 36 aa, Artificial Sequence
  Non-cyclic GFR-binding peptide
  MOD_RES (2)..(2): Xaa is C or S
  MOD_RES (18)..(19)..(20)..(21)..(22): Xaa is A or G
  MOD_RES (23)..(24)..(25)..(26): Xaa is A or G or absent
QXRPTQVQLSATSVLYYXXXXXXXXXLRKHRTLEDH

SEQ ID NO: 7878 - protein, 32 aa, Artificial Sequence
  Non-cyclic GFR-binding peptide
  MOD_RES (14)..(15)..(16)..(17)..(18): Xaa is A or G
  MOD_RES (19)..(20)..(21)..(22): Xaa is A or G or absent
VPTELSPISMLYKXXXXXXXXXLKYHYEMVVE

SEQ ID NO: 7879 - protein, 38 aa, Artificial Sequence
  Non-cyclic GFR-binding peptide
  MOD_RES (6)..(7)..(38): Xaa is C or S
ASASPXXVPQDLSATSILYYVGRTPKVLRKHRMVVKSX

SEQ ID NO: 7880 - protein, 33 aa, Artificial Sequence
  Non-cyclic GFR-binding peptide
  MOD_RES (1)..(2)..(33): Xaa is C or S
XXVSQDLSAISILYLIGKTPKILKNYQMIVKSX

SEQ ID NO: 7881 - protein, 40 aa, Artificial Sequence
  Non-cyclic GFR-binding peptide
  MOD_RES (3)..(4)..(39): Xaa is C or S
  MOD_RES (18)..(19)..(20)..(21)..(22): Xaa is A or G
  MOD_RES (23)..(24)..(25)..(26): Xaa is A or G or absent
KAXXVPTKLSAISVLYLXXXXXXXXXLKNYQEGMSVAEXG

SEQ ID NO: 7882 - protein, 37 aa, Artificial Sequence
  Non-cyclic GFR-binding peptide
  MOD_RES (2)..(2): Xaa is C or S
  MOD_RES (18)..(19)..(20)..(21)..(22): Xaa is A or G
  MOD_RES (23)..(24)..(25)..(26): Xaa is A or G or absent
QXRPTQVQLSAISVLYLXXXXXXXXXLKNYQTLEDHL

SEQ ID NO: 7883 - protein, 36 aa, Artificial Sequence
  Non-cyclic GFR-binding peptide
  MOD_RES (1)..(2)..(33)..(35): Xaa is C or S
XXVPQDLSATSILYYVGRTPKVLRKHRMVVKSXKXS

SEQ ID NO: 7884 - protein, 36 aa, Artificial Sequence
  Non-cyclic GFR-binding peptide
  MOD_RES (1)..(33)..(35): Xaa is C or S
XAPTKLSPISVLYKDDSSNVILKYHYNMVVRSXGXH

SEQ ID NO: 7885 - protein, 42 aa, Artificial Sequence
  Non-cyclic GFR-binding peptide
  MOD_RES (2)..(39)..(41): Xaa is C or S
QXRPTQVQLSATSVLYYEIVRKKPIFLRKHRTLEDHLAXKXE

SEQ ID NO: 7886 - protein, 35 aa, Artificial Sequence
  Non-cyclic GFR-binding peptide
  MOD_RES (34)..(34): Xaa is C or S
  MOD_RES (14)..(15)..(16)..(17)..(18): Xaa is A or G
  MOD_RES (19)..(20)..(21)..(22): Xaa is A or G or absent
VPTELSPISMLYKXXXXXXXXXLKYHYEMVVEGXG

SEQ ID NO: 7887 - protein, 38 aa, Artificial Sequence
  Non-cyclic GFR-binding peptide
  MOD_RES (2)..(3)..(37): Xaa is C or S
  MOD_RES (17)..(18)..(19)..(20)..(21): Xaa is A or G
  MOD_RES (22)..(23)..(24)..(25): Xaa is A or G or absent
PXXAPTQLSAISVLYLXXXXXXXXXLKNYQNMVVRAXG

SEQ ID NO: 7888 - protein, 32 aa, Artificial Sequence
  Non-cyclic GFR-binding peptide
  MOD_RES (14)..(15)..(16)..(17)..(18): Xaa is A or G
  MOD_RES (19)..(20)..(21)..(22): Xaa is A or G or absent
VPQALSPISILYKXXXXXXXXXLKYHYMIVRS

SEQ ID NO: 7889 - protein, 40 aa, Artificial Sequence
  Non-cyclic GFR-binding peptide
  MOD_RES (3)..(4)..(37)..(39): Xaa is C or S
  MOD_RES (18)..(19)..(20)..(21)..(22): Xaa is A or G
  MOD_RES (23)..(24)..(25)..(26): Xaa is A or G or absent
APXXVPQALSATSILYYXXXXXXXXXLRKHRMIVRSXKXS

SEQ ID NO: 7890 - protein, 43 aa, Artificial Sequence
  Non-cyclic GFR-binding peptide
  MOD_RES (6)..(7)..(41)..(43): Xaa is C or S
  MOD_RES (21)..(22)..(23)..(24)..(25): Xaa is A or G
  MOD_RES (26)..(27)..(28)..(29): Xaa is A or G or absent
AVPKAXXAPTKLNAISVLYFXXXXXXXXXLKKYRNMVVKAXGX

SEQ ID NO: 7891 - protein, 40 aa, Artificial Sequence
  Non-cyclic GFR-binding peptide
  MOD_RES (7)..(7): Xaa is C or S
  MOD_RES (21)..(22)..(23)..(24)..(25): Xaa is A or G
  MOD_RES (26)..(27)..(28)..(29): Xaa is A or G or absent
HVTKPTXAPTKLSPISVLYKXXXXXXXXXLKYHYNMVVRS

SEQ ID NO: 7892 - protein, 40 aa, Artificial Sequence
  Non-cyclic GFR-binding peptide
  MOD_RES (5)..(5): Xaa is C or S
  MOD_RES (21)..(22)..(23)..(24)..(25): Xaa is A or G
  MOD_RES (26)..(27)..(28)..(29): Xaa is A or G or absent
RNVQXRPTQVQLSPISVLYKXXXXXXXXXLKYHYTLEDHL

SEQ ID NO: 7893 - protein, 41 aa, Artificial Sequence
  Non-cyclic GFR-binding peptide
  MOD_RES (3)..(40): Xaa is C or S
  MOD_RES (19)..(20)..(21)..(22)..(23): Xaa is A or G
  MOD_RES (24)..(25)..(26)..(27): Xaa is A or G or absent
VQXRPTQVQLSAISVLYLXXXXXXXXXLKNYQTLEDHLAXK

SEQ ID NO: 7894 - protein, 39 aa, Artificial Sequence
  Non-cyclic GFR-binding peptide
  MOD_RES (3)..(4)..(38): Xaa is C or S
  MOD_RES (18)..(19)..(20)..(21)..(22): Xaa is A or G
  MOD_RES (23)..(24)..(25)..(26): Xaa is A or G or absent
KAXXAPTKLSPISVLYKXXXXXXXXXLKYHYNMVVKAXG

SEQ ID NO: 7895 - protein, 36 aa, Artificial Sequence
  Non-cyclic GFR-binding peptide
  MOD_RES (1)..(2): Xaa is C or S
  MOD_RES (16)..(17)..(18)..(19)..(20): Xaa is A or G
  MOD_RES (21)..(22)..(23)..(24): Xaa is A or G or absent
XXVPTKLNAISVLYFXXXXXXXXXLKKYREGMSVAE

SEQ ID NO: 7896 - protein, 38 aa, Artificial Sequence
  Non-cyclic GFR-binding peptide
  MOD_RES (5)..(6): Xaa is C or S
  MOD_RES (20)..(21)..(22)..(23)..(24): Xaa is A or G
  MOD_RES (25)..(26)..(27)..(28): Xaa is A or G or absent
IPKAXXVPTELSATSMLYYXXXXXXXXXLRKHREMVVE

SEQ ID NO: 7897 - protein, 44 aa, Artificial Sequence
  Non-cyclic GFR-binding peptide
  MOD_RES (6)..(7)..(41)..(43): Xaa is C or S
  MOD_RES (21)..(22)..(23)..(24)..(25): Xaa is A or G
  MOD_RES (26)..(27)..(28)..(29): Xaa is A or G or absent
TVPKPXXAPTQLSATSVLYYXXXXXXXXXLRKHRNMVVRAXGXH

SEQ ID NO: 7898 - protein, 38 aa, Artificial Sequence
  Non-cyclic GFR-binding peptide
  MOD_RES (5)..(6)..(37): Xaa is C or S
SASPXXVPQDLNAISILYFVGRTPKVLKKYRMVVKSXK

SEQ ID NO: 7899 - protein, 42 aa, Artificial Sequence
  Non-cyclic GFR-binding peptide
  MOD_RES (6)..(7)..(40)..(42): Xaa is C or S
  MOD_RES (21)..(22)..(23)..(24)..(25): Xaa is A or G
  MOD_RES (26)..(27)..(28)..(29): Xaa is A or G or absent
ASAAPXXVPQALSATSILYYXXXXXXXXXLRKHRMIVRSXKX

SEQ ID NO: 7900 - protein, 43 aa, Artificial Sequence
  Non-cyclic GFR-binding peptide
  MOD_RES (6)..(7)..(41)..(43): Xaa is C or S
  MOD_RES (21)..(22)..(23)..(24)..(25): Xaa is A or G
  MOD_RES (26)..(27)..(28)..(29): Xaa is A or G or absent
TVPKPXXAPTQLSPISVLYKXXXXXXXXXLKYHYNMVVRAXGX

SEQ ID NO: 7901 - protein, 36 aa, Artificial Sequence
  Non-cyclic GFR-binding peptide
  MOD_RES (1)..(2)..(34)..(36): Xaa is C or S
XXVPTELSATSMLYYDEYDKVVLRKHREMVVEGXGX

SEQ ID NO: 7902 - protein, 42 aa, Artificial Sequence
  Non-cyclic GFR-binding peptide
  MOD_RES (4)..(41): Xaa is C or S
NVQXRPTQVQLSAISVLYLEIVRKKPIFLKNYQTLEDHLAXK

SEQ ID NO: 7903 - protein, 34 aa, Artificial Sequence
  Non-cyclic GFR-binding peptide
TQVQLSPISVLYKEIVRKKPIFLKYHYTLEDHLA

SEQ ID NO: 7904 - protein, 34 aa, Artificial Sequence
  Non-cyclic GFR-binding peptide
  MOD_RES (16)..(17)..(18)..(19)..(20): Xaa is A or G
  MOD_RES (21)..(22)..(23)..(24): Xaa is A or G or absent
RPTQVQLSPISVLYKXXXXXXXXXLKYHYTLEDH

SEQ ID NO: 7905 - protein, 35 aa, Artificial Sequence
  Non-cyclic GFR-binding peptide
  MOD_RES (1)..(2)..(34): Xaa is C or S
XXVPTELNAISMLYFDENEKVVLKKYRDMVVEGXG

SEQ ID NO: 7906 - protein, 39 aa, Artificial Sequence
  Non-cyclic GFR-binding peptide
  MOD_RES (3)..(4)..(36)..(38): Xaa is C or S
KPXXAPTKLSATSVLYYDDSSNVILRKHRNMVVRSXGXH

SEQ ID NO: 7907 - protein, 31 aa, Artificial Sequence
  Non-cyclic GFR-binding peptide
  MOD_RES (1)..(1): Xaa is C or S
XVPQDLSPISILYKVGRTPKVLKYHYMVVKS

SEQ ID NO: 7908 - protein, 39 aa, Artificial Sequence
  Non-cyclic GFR-binding peptide
  MOD_RES (4)..(5)..(37)..(39): Xaa is C or S
PKAXXAPTKLNAISVLYFDSSNNVILKKYRNMVVKAXGX

SEQ ID NO: 7909 - protein, 33 aa, Artificial Sequence
  Non-cyclic GFR-binding peptide
  MOD_RES (2)..(3): Xaa is C or S
PXXVPQALSATSILYYVGRKPKVLRKHRMIVRS

SEQ ID NO: 7910 - protein, 37 aa, Artificial Sequence
  Non-cyclic GFR-binding peptide
  MOD_RES (3)..(4)..(35)..(37): Xaa is C or S
SPXXVPQDLNAISILYFVGRTPKVLKKYRMVVKSXKX

SEQ ID NO: 7911 - protein, 39 aa, Artificial Sequence
  Non-cyclic GFR-binding peptide
  MOD_RES (2)..(39): Xaa is C or S
QXRPTQVQLSPISVLYKEIVRKKPIFLKYHYTLEDHLAX

SEQ ID NO: 7912 - protein, 37 aa, Artificial Sequence
  Non-cyclic GFR-binding peptide
  MOD_RES (1)..(2)..(35)..(37): Xaa is C or S
XXVPTKLSAISVLYLDDMGVPTLKNYQEGMSVAEXGX

SEQ ID NO: 7913 - protein, 37 aa, Artificial Sequence
  Non-cyclic GFR-binding peptide
  MOD_RES (1)..(2)..(35)..(37): Xaa is C or S
  MOD_RES (16)..(17)..(18)..(19)..(20): Xaa is A or G
  MOD_RES (21)..(22)..(23)..(24): Xaa is A or G or absent
XXVPQDLSAISILYLXXXXXXXXXLKNYQMVVKSXKX

SEQ ID NO: 7914 - protein, 34 aa, Artificial Sequence
  Non-cyclic GFR-binding peptide
  MOD_RES (1)..(34): Xaa is C or S
  MOD_RES (15)..(16)..(17)..(18)..(19): Xaa is A or G
  MOD_RES (20)..(21)..(22)..(23): Xaa is A or G or absent
XVPQDLSAISILYLXXXXXXXXXLKNYQMVVKSX

SEQ ID NO: 7915 - protein, 37 aa, Artificial Sequence
  Non-cyclic GFR-binding peptide
  MOD_RES (5)..(6)..(37): Xaa is C or S
SASPXXVSQDLSPISILYKIGKTPKILKYHYMIVKSX

SEQ ID NO: 7916 - protein, 37 aa, Artificial Sequence
  Non-cyclic GFR-binding peptide
  MOD_RES (1)..(34)..(36): Xaa is C or S
XVPTKLSAISVLYLDDMGVPTLKNYQEGMSVAEXGXR

SEQ ID NO: 7917 - protein, 37 aa, Artificial Sequence
  Non-cyclic GFR-binding peptide
  MOD_RES (6)..(7): Xaa is C or S
ASAAPXXVPQALSPISILYKVGRKPKVLKYHYMIVRS

SEQ ID NO: 7918 - protein, 39 aa, Artificial Sequence
  Non-cyclic GFR-binding peptide
  MOD_RES (2)..(3)..(37)..(39): Xaa is C or S
  MOD_RES (17)..(18)..(19)..(20)..(21): Xaa is A or G
  MOD_RES (22)..(23)..(24)..(25): Xaa is A or G or absent
PXXAPTKLSATSVLYYXXXXXXXXXLRKHRNMVVRSXGX

SEQ ID NO: 7919 - protein, 39 aa, Artificial Sequence
  Non-cyclic GFR-binding peptide
  MOD_RES (4)..(5)..(39): Xaa is C or S
  MOD_RES (19)..(20)..(21)..(22)..(23): Xaa is A or G
  MOD_RES (24)..(25)..(26)..(27): Xaa is A or G or absent
PKAXXAPTKLNAISVLYFXXXXXXXXXLKKYRNMVVKAX

SEQ ID NO: 7920 - protein, 36 aa, Artificial Sequence
  Non-cyclic GFR-binding peptide
  MOD_RES (2)..(3)..(35): Xaa is C or S
AXXVPTELSATSMLYYDEYDKVVLRKHREMVVEGXG

SEQ ID NO: 7921 - protein, 34 aa, Artificial Sequence
  Non-cyclic GFR-binding peptide
  MOD_RES (15)..(16)..(17)..(18)..(19): Xaa is A or G
  MOD_RES (20)..(21)..(22)..(23): Xaa is A or G or absent
PTQVQLSPISVLYKXXXXXXXXXLKYHYTLEDHL

SEQ ID NO: 7922 - protein, 40 aa, Artificial Sequence
  Non-cyclic GFR-binding peptide
  MOD_RES (37)..(39): Xaa is C or S
RPTQVQLSPISVLYKEIVRKKPIFLKYHYTLEDHLAXKXE

SEQ ID NO: 7923 - protein, 43 aa, Artificial Sequence
  Non-cyclic GFR-binding peptide
  MOD_RES (5)..(6)..(40)..(42): Xaa is C or S
  MOD_RES (20)..(21)..(22)..(23)..(24): Xaa is A or G
  MOD_RES (25)..(26)..(27)..(28): Xaa is A or G or absent
VPKPXXAPTQLSAISVLYLXXXXXXXXXLKNYQNMVVRAXGXH

SEQ ID NO: 7924 - protein, 40 aa, Artificial Sequence
  Non-cyclic GFR-binding peptide
  MOD_RES (4)..(5)..(39): Xaa is C or S
  MOD_RES (19)..(20)..(21)..(22)..(23): Xaa is A or G
  MOD_RES (24)..(25)..(26)..(27): Xaa is A or G or absent
PKAXXAPTKLSPISVLYKXXXXXXXXXLKYHYNMVVKAXG

SEQ ID NO: 7925 - protein, 42 aa, Artificial Sequence
  Non-cyclic GFR-binding peptide
  MOD_RES (4)..(5)..(39)..(41): Xaa is C or S
  MOD_RES (19)..(20)..(21)..(22)..(23): Xaa is A or G
  MOD_RES (24)..(25)..(26)..(27): Xaa is A or G or absent
PKAXXVPTELSATSMLYYXXXXXXXXXLRKHREMVVEGXGXR

SEQ ID NO: 7926 - protein, 39 aa, Artificial Sequence
  Non-cyclic GFR-binding peptide
  MOD_RES (4)..(4): Xaa is C or S
  MOD_RES (20)..(21)..(22)..(23)..(24): Xaa is A or G
  MOD_RES (25)..(26)..(27)..(28): Xaa is A or G or absent
NVQXRPTQVQLSATSVLYYXXXXXXXXXLRKHRTLEDHL

SEQ ID NO: 7927 - protein, 34 aa, Artificial Sequence
  Non-cyclic GFR-binding peptide
  MOD_RES (2)..(34): Xaa is C or S
TXAPTKLSATSVLYYDDSSNVILRKHRNMVVRSX

SEQ ID NO: 7928 - protein, 36 aa, Artificial Sequence
  Non-cyclic GFR-binding peptide
  MOD_RES (1)..(2)..(35): Xaa is C or S
  MOD_RES (16)..(17)..(18)..(19)..(20): Xaa is A or G
  MOD_RES (21)..(22)..(23)..(24): Xaa is A or G or absent
XXVPQALNAISILYFXXXXXXXXXLKKYRMIVRSXK

SEQ ID NO: 7929 - protein, 33 aa, Artificial Sequence
  Non-cyclic GFR-binding peptide
  MOD_RES (2)..(2): Xaa is C or S
TXAPTKLSPISVLYKDDSSNVILKYHYNMVVRS

SEQ ID NO: 7930 - protein, 33 aa, Artificial Sequence
  Non-cyclic GFR-binding peptide
  MOD_RES (2)..(3): Xaa is C or S
PXXAPTKLSPISVLYKDDSSNVILKYHYNMVVR

SEQ ID NO: 7931 - protein, 40 aa, Artificial Sequence
  Non-cyclic GFR-binding peptide
  MOD_RES (3)..(4)..(37)..(39): Xaa is C or S
KAXXVPTKLSATSVLYYDDMGVPTLRKHREGMSVAEXGXR

SEQ ID NO: 7932 - protein, 32 aa, Artificial Sequence
  Non-cyclic GFR-binding peptide
  MOD_RES (1)..(1): Xaa is C or S
XAPTKLSAISVLYLDDSSNVILKNYQNMVVRS

SEQ ID NO: 7933 - protein, 36 aa, Artificial Sequence
  Non-cyclic GFR-binding peptide
  MOD_RES (5)..(5): Xaa is C or S
TKPTXAPTKLSATSVLYYDDSSNVILRKHRNMVVRS

SEQ ID NO: 7934 - protein, 34 aa, Artificial Sequence
  Non-cyclic GFR-binding peptide
  MOD_RES (1)..(34): Xaa is C or S
  MOD_RES (15)..(16)..(17)..(18)..(19): Xaa is A or G
  MOD_RES (20)..(21)..(22)..(23): Xaa is A or G or absent
XVPQDLSATSILYYXXXXXXXXXLRKHRMVVKSX

SEQ ID NO: 7935 - protein, 40 aa, Artificial Sequence
  Non-cyclic GFR-binding peptide
  MOD_RES (6)..(7): Xaa is C or S
  MOD_RES (21)..(22)..(23)..(24)..(25): Xaa is A or G
  MOD_RES (26)..(27)..(28)..(29): Xaa is A or G or absent
AVPKAXXAPTKLSAISVLYLXXXXXXXXXLKNYQNMVVKA

SEQ ID NO: 7936 - protein, 37 aa, Artificial Sequence
  Non-cyclic GFR-binding peptide
  MOD_RES (6)..(7): Xaa is C or S
ASASPXXVSQDLSPISILYKIGKTPKILKYHYMIVKS

SEQ ID NO: 7937 - protein, 35 aa, Artificial Sequence
  Non-cyclic GFR-binding peptide
  MOD_RES (1)..(33)..(35): Xaa is C or S
XAPTKLSPISVLYKDDSSNVILKYHYNMVVRSXGX

SEQ ID NO: 7938 - protein, 37 aa, Artificial Sequence
  Non-cyclic GFR-binding peptide
  MOD_RES (3)..(3): Xaa is C or S
VQXRPTQVQLSPISVLYKEIVRKKPIFLKYHYTLEDH

SEQ ID NO: 7939 - protein, 38 aa, Artificial Sequence
  Non-cyclic GFR-binding peptide
  MOD_RES (1)..(2)..(35)..(37): Xaa is C or S
XXVPTKLNAISVLYFDDMGVPTLKKYREGMSVAEXGXR

SEQ ID NO: 7940 - protein, 42 aa, Artificial Sequence
  Non-cyclic GFR-binding peptide
  MOD_RES (6)..(7)..(40)..(42): Xaa is C or S
KVGKAXXVPTKLSAISVLYLDDMGVPTLKNYQEGMSVAEXGX

SEQ ID NO: 7941 - protein, 34 aa, Artificial Sequence
  Non-cyclic GFR-binding peptide
  MOD_RES (2)..(3): Xaa is C or S
PXXAPTQLSATSVLYYDDSSNVILRKHRNMVVRA

SEQ ID NO: 7942 - protein, 39 aa, Artificial Sequence
  Non-cyclic GFR-binding peptide
  MOD_RES (2)..(3)..(37)..(39): Xaa is C or S
  MOD_RES (17)..(18)..(19)..(20)..(21): Xaa is A or G
  MOD_RES (22)..(23)..(24)..(25): Xaa is A or G or absent
PXXAPTQLSPISVLYKXXXXXXXXXLKYHYNMVVRAXGX

SEQ ID NO: 7943 - protein, 37 aa, Artificial Sequence
  Non-cyclic GFR-binding peptide
  MOD_RES (5)..(6): Xaa is C or S
IPKAXXVPTELNAISMLYFDEYDKVVLKKYREMVVEG

SEQ ID NO: 7944 - protein, 43 aa, Artificial Sequence
  Non-cyclic GFR-binding peptide
  MOD_RES (4)..(41)..(43): Xaa is C or S
NVQXRPTQVQLSATSVLYYEIVRKKPIFLRKHRTLEDHLAXKX

SEQ ID NO: 7945 - protein, 39 aa, Artificial Sequence
  Non-cyclic GFR-binding peptide
  MOD_RES (5)..(6): Xaa is C or S
  MOD_RES (20)..(21)..(22)..(23)..(24): Xaa is A or G
  MOD_RES (25)..(26)..(27)..(28): Xaa is A or G or absent
IPKAXXVPTELSPISMLYKXXXXXXXXXLKYHYEMVVEG

SEQ ID NO: 7946 - protein, 38 aa, Artificial Sequence
  Non-cyclic GFR-binding peptide
  MOD_RES (1)..(35)..(37): Xaa is C or S
  MOD_RES (15)..(16)..(17)..(18)..(19): Xaa is A or G
  MOD_RES (20)..(21)..(22)..(23): Xaa is A or G or absent
XVPTELSATSMLYYXXXXXXXXXLRKHRDMVVEGXGXR

SEQ ID NO: 7947 - protein, 42 aa, Artificial Sequence
  Non-cyclic GFR-binding peptide
  MOD_RES (6)..(7)..(39)..(41): Xaa is C or S
SIPKAXXVPTELSATSMLYYDEYDKVVLRKHREMVVEGXGXR

SEQ ID NO: 7948 - protein, 39 aa, Artificial Sequence
  Non-cyclic GFR-binding peptide
  MOD_RES (1)..(38): Xaa is C or S
XRPTQVQLSAISVLYLEIVRKKPIFLKNYQTLEDHLAXK

SEQ ID NO: 7949 - protein, 41 aa, Artificial Sequence
  Non-cyclic GFR-binding peptide
  MOD_RES (4)..(5)..(38)..(40): Xaa is C or S
  MOD_RES (19)..(20)..(21)..(22)..(23): Xaa is A or G
  MOD_RES (24)..(25)..(26)..(27): Xaa is A or G or absent
ASPXXVPQDLSPISILYKXXXXXXXXXLKYHYMVVKSXKXS

SEQ ID NO: 7950 - protein, 39 aa, Artificial Sequence
  Non-cyclic GFR-binding peptide
  MOD_RES (1)..(2)..(36)..(38): Xaa is C or S
  MOD_RES (16)..(17)..(18)..(19)..(20): Xaa is A or G
  MOD_RES (21)..(22)..(23)..(24): Xaa is A or G or absent
XXVPTELSPISMLYKXXXXXXXXXLKYHYEMVVEGXGXR

SEQ ID NO: 7951 - protein, 40 aa, Artificial Sequence
  Non-cyclic GFR-binding peptide
  MOD_RES (6)..(7)..(39): Xaa is C or S
YVPKPXXAPTKLSAISVLYLDDSSNVILKNYQNMVVRSXG

SEQ ID NO: 7952 - protein, 38 aa, Artificial Sequence
  Non-cyclic GFR-binding peptide
  MOD_RES (6)..(6): Xaa is C or S
  MOD_RES (20)..(21)..(22)..(23)..(24): Xaa is A or G
  MOD_RES (25)..(26)..(27)..(28): Xaa is A or G or absent
VTKPTXAPTKLSATSVLYYXXXXXXXXXLRKHRNMVVR

SEQ ID NO: 7953 - protein, 35 aa, Artificial Sequence
  Non-cyclic GFR-binding peptide
  MOD_RES (1)..(33)..(35): Xaa is C or S
XAPTQLSAISVLYLDDSSNVILKNYQNMVVRAXGX

SEQ ID NO: 7954 - protein, 39 aa, Artificial Sequence
  Non-cyclic GFR-binding peptide
  MOD_RES (5)..(6): Xaa is C or S
  MOD_RES (20)..(21)..(22)..(23)..(24): Xaa is A or G
  MOD_RES (25)..(26)..(27)..(28): Xaa is A or G or absent
VPKPXXAPTQLSAISVLYLXXXXXXXXXLKNYQNMVVRA

SEQ ID NO: 7955 - protein, 39 aa, Artificial Sequence
  Non-cyclic GFR-binding peptide
  MOD_RES (3)..(4)..(38): Xaa is C or S
  MOD_RES (18)..(19)..(20)..(21)..(22): Xaa is A or G
  MOD_RES (23)..(24)..(25)..(26): Xaa is A or G or absent
KPXXAPTQLSPISVLYKXXXXXXXXXLKYHYNMVVRAXG

SEQ ID NO: 7956 - protein, 41 aa, Artificial Sequence
  Non-cyclic GFR-binding peptide
  MOD_RES (5)..(6)..(39)..(41): Xaa is C or S
  MOD_RES (20)..(21)..(22)..(23)..(24): Xaa is A or G
  MOD_RES (25)..(26)..(27)..(28): Xaa is A or G or absent
SAAPXXVPQALSAISILYLXXXXXXXXXLKNYQMIVRSXKX

SEQ ID NO: 7957 - protein, 36 aa, Artificial Sequence
  Non-cyclic GFR-binding peptide
  MOD_RES (5)..(6): Xaa is C or S
IPKAXXVPTELNAISMLYFDEYDKVVLKKYREMVVE

SEQ ID NO: 7958 - protein, 40 aa, Artificial Sequence
  Non-cyclic GFR-binding peptide
  MOD_RES (6)..(7)..(40): Xaa is C or S
KVGKAXXVPTKLSATSVLYYDDMGVPTLRKHREGMSVAEX

SEQ ID NO: 7959 - protein, 33 aa, Artificial Sequence
  Non-cyclic GFR-binding peptide
  MOD_RES (14)..(15)..(16)..(17)..(18): Xaa is A or G
  MOD_RES (19)..(20)..(21)..(22): Xaa is A or G or absent
TQVQLSATSVLYYXXXXXXXXXLRKHRTLEDHL

SEQ ID NO: 7960 - protein, 41 aa, Artificial Sequence
  Non-cyclic GFR-binding peptide
  MOD_RES (6)..(40): Xaa is C or S
  MOD_RES (20)..(21)..(22)..(23)..(24): Xaa is A or G
  MOD_RES (25)..(26)..(27)..(28): Xaa is A or G or absent
VTKPTXAPTKLSATSVLYYXXXXXXXXXLRKHRNMVVRSXG

SEQ ID NO: 7961 - protein, 37 aa, Artificial Sequence
  Non-cyclic GFR-binding peptide
  MOD_RES (1)..(36): Xaa is C or S
  MOD_RES (15)..(16)..(17)..(18)..(19): Xaa is A or G
  MOD_RES (20)..(21)..(22)..(23): Xaa is A or G or absent
XVPTKLSATSVLYYXXXXXXXXXLRKHREGMSVAEXG

SEQ ID NO: 7962 - protein, 36 aa, Artificial Sequence
  Non-cyclic GFR-binding peptide
  MOD_RES (5)..(6): Xaa is C or S
SASPXXVSQDLSPISILYKIGKTPKILKYHYMIVKS

SEQ ID NO: 7963 - protein, 42 aa, Artificial Sequence
  Non-cyclic GFR-binding peptide
  MOD_RES (6)..(7)..(39)..(41): Xaa is C or S
AVPKAXXAPTKLSAISVLYLDSSNNVILKNYQNMVVKAXGXH

SEQ ID NO: 7964 - protein, 41 aa, Artificial Sequence
  Non-cyclic GFR-binding peptide
  MOD_RES (5)..(6)..(41): Xaa is C or S
  MOD_RES (20)..(21)..(22)..(23)..(24): Xaa is A or G
  MOD_RES (25)..(26)..(27)..(28): Xaa is A or G or absent
VGKAXXVPTKLNAISVLYFXXXXXXXXXLKKYREGMSVAEX

SEQ ID NO: 7965 - protein, 36 aa, Artificial Sequence
  Non-cyclic GFR-binding peptide
  MOD_RES (3)..(4): Xaa is C or S
  MOD_RES (18)..(19)..(20)..(21)..(22): Xaa is A or G
  MOD_RES (23)..(24)..(25)..(26): Xaa is A or G or absent
KPXXAPTQLSATSVLYYXXXXXXXXXLRKHRNMVVR

SEQ ID NO: 7966 - protein, 35 aa, Artificial Sequence
  Non-cyclic GFR-binding peptide
  MOD_RES (5)..(5): Xaa is C or S
TKPTXAPTKLSPISVLYKDDSSNVILKYHYNMVVR

SEQ ID NO: 7967 - protein, 31 aa, Artificial Sequence
  Non-cyclic GFR-binding peptide
  MOD_RES (1)..(1): Xaa is C or S
XVPTELSATSMLYYDENEKVVLRKHRDMVVE

SEQ ID NO: 7968 - protein, 35 aa, Artificial Sequence
  Non-cyclic GFR-binding peptide
  MOD_RES (1)..(2)..(33)..(35): Xaa is C or S
XXVSQDLSAISILYLIGKTPKILKNYQMIVKSXKX

SEQ ID NO: 7969 - protein, 37 aa, Artificial Sequence
  Non-cyclic GFR-binding peptide
  MOD_RES (1)..(2)..(34)..(36): Xaa is C or S
XXAPTQLSATSVLYYDDSSNVILRKHRNMVVRAXGXH

SEQ ID NO: 7970 - protein, 36 aa, Artificial Sequence
  Non-cyclic GFR-binding peptide
  MOD_RES (2)..(3)..(35): Xaa is C or S
AXXVPTELSPISMLYKDENEKVVLKYHYDMVVEGXG

SEQ ID NO: 7971 - protein, 41 aa, Artificial Sequence
  Non-cyclic GFR-binding peptide
  MOD_RES (6)..(7)..(41): Xaa is C or S
  MOD_RES (21)..(22)..(23)..(24)..(25): Xaa is A or G
  MOD_RES (26)..(27)..(28)..(29): Xaa is A or G or absent
YVPKPXXAPTKLSATSVLYYXXXXXXXXXLRKHRNMVVRSX

SEQ ID NO: 7972 - protein, 42 aa, Artificial Sequence
  Non-cyclic GFR-binding peptide
  MOD_RES (6)..(7)..(41): Xaa is C or S
  MOD_RES (21)..(22)..(23)..(24)..(25): Xaa is A or G
  MOD_RES (26)..(27)..(28)..(29): Xaa is A or G or absent
AVPKAXXAPTKLSAISVLYLXXXXXXXXXLKNYQNMVVKAXG

SEQ ID NO: 7973 - protein, 38 aa, Artificial Sequence
  Non-cyclic GFR-binding peptide
  MOD_RES (1)..(2)..(36)..(38): Xaa is C or S
  MOD_RES (16)..(17)..(18)..(19)..(20): Xaa is A or G
  MOD_RES (21)..(22)..(23)..(24): Xaa is A or G or absent
XXAPTKLSAISVLYLXXXXXXXXXLKNYQNMVVKAXGX

SEQ ID NO: 7974 - protein, 38 aa, Artificial Sequence
  Non-cyclic GFR-binding peptide
  MOD_RES (6)..(7): Xaa is C or S
AVPKAXXAPTKLNAISVLYFDSSNNVILKKYRNMVVKA

SEQ ID NO: 7975 - protein, 32 aa, Artificial Sequence
  Non-cyclic GFR-binding peptide
  MOD_RES (32)..(32): Xaa is C or S
VPTELSATSMLYYDENEKVVLRKHRDMVVEGX

SEQ ID NO: 7976 - protein, 32 aa, Artificial Sequence; identical to SEQ ID NO: 798
  Non-cyclic GFR-binding peptide

SEQ ID NO: 7977 - protein, 37 aa, Artificial Sequence
  Non-cyclic GFR-binding peptide
  MOD_RES (6)..(7): Xaa is C or S
ASASPXXVPQDLSPISILYKVGRTPKVLKYHYMVVKS

SEQ ID NO: 7978 - protein, 38 aa, Artificial Sequence
  Non-cyclic GFR-binding peptide
  MOD_RES (3)..(37): Xaa is C or S
  MOD_RES (17)..(18)..(19)..(20)..(21): Xaa is A or G
  MOD_RES (22)..(23)..(24)..(25): Xaa is A or G or absent
PTXAPTKLSPISVLYKXXXXXXXXXLKYHYNMVVRSXG

SEQ ID NO: 7979 - protein, 35 aa, Artificial Sequence
  Non-cyclic GFR-binding peptide
  MOD_RES (1)..(33)..(35): Xaa is C or S
XAPTKLSPISVLYKDSSNNVILKYHYNMVVKAXGX

SEQ ID NO: 7980 - protein, 36 aa, Artificial Sequence
  Non-cyclic GFR-binding peptide
  MOD_RES (2)..(3): Xaa is C or S
  MOD_RES (17)..(18)..(19)..(20)..(21): Xaa is A or G
  MOD_RES (22)..(23)..(24)..(25): Xaa is A or G or absent
AXXAPTKLSAISVLYLXXXXXXXXXLKNYQNMVVKA

SEQ ID NO: 7981 - protein, 41 aa, Artificial Sequence
  Non-cyclic GFR-binding peptide
  MOD_RES (6)..(7)..(41): Xaa is C or S
  MOD_RES (21)..(22)..(23)..(24)..(25): Xaa is A or G
  MOD_RES (26)..(27)..(28)..(29): Xaa is A or G or absent
KIPKAXXVPTELSATSMLYYXXXXXXXXXLRKHRDMVVEGX

SEQ ID NO: 7982 - protein, 39 aa, Artificial Sequence
  Non-cyclic GFR-binding peptide
  MOD_RES (4)..(36)..(38): Xaa is C or S
KPTXAPTKLSATSVLYYDDSSNVILRKHRNMVVRSXGXH

SEQ ID NO: 7983 - protein, 41 aa, Artificial Sequence
  Non-cyclic GFR-binding peptide
  MOD_RES (5)..(6)..(40): Xaa is C or S
  MOD_RES (20)..(21)..(22)..(23)..(24): Xaa is A or G
  MOD_RES (25)..(26)..(27)..(28): Xaa is A or G or absent
IPKAXXVPTELSPISMLYKXXXXXXXXXLKYHYDMVVEGXG

SEQ ID NO: 7984 - protein, 38 aa, Artificial Sequence
  Non-cyclic GFR-binding peptide
  MOD_RES (2)..(3)..(35)..(37): Xaa is C or S
PXXAPTQLSAISVLYLDDSSNVILKNYQNMVVRAXGXH

SEQ ID NO: 7985 - protein, 37 aa, Artificial Sequence
  Non-cyclic GFR-binding peptide
  MOD_RES (2)..(2): Xaa is C or S
QXRPTQVQLSAISVLYLEIVRKKPIFLKNYQTLEDHL

SEQ ID NO: 7986 - protein, 38 aa, Artificial Sequence
  Non-cyclic GFR-binding peptide
  MOD_RES (3)..(3): Xaa is C or S
VQXRPTQVQLSPISVLYKEIVRKKPIFLKYHYTLEDHL

SEQ ID NO: 7987 - protein, 38 aa, Artificial Sequence
  Non-cyclic GFR-binding peptide
  MOD_RES (5)..(6): Xaa is C or S
  MOD_RES (20)..(21)..(22)..(23)..(24): Xaa is A or G
  MOD_RES (25)..(26)..(27)..(28): Xaa is A or G or absent
VPKPXXAPTQLSPISVLYKXXXXXXXXXLKYHYNMVVR

SEQ ID NO: 7988 - protein, 41 aa, Artificial Sequence
  Non-cyclic GFR-binding peptide
  MOD_RES (6)..(7)..(40): Xaa is C or S
KVGKAXXVPTKLSATSVLYYDDMGVPTLRKHREGMSVAEXG

SEQ ID NO: 7989 - protein, 40 aa, Artificial Sequence
  Non-cyclic GFR-binding peptide
  MOD_RES (5)..(6)..(39): Xaa is C or S
  MOD_RES (20)..(21)..(22)..(23)..(24): Xaa is A or G
  MOD_RES (25)..(26)..(27)..(28): Xaa is A or G or absent
SASPXXVPQDLSATSILYYXXXXXXXXXLRKHRMVVKSXK

SEQ ID NO: 7990 - protein, 36 aa, Artificial Sequence
  Non-cyclic GFR-binding peptide
  MOD_RES (4)..(5)..(36): Xaa is C or S
ASPXXVPQDLNAISILYFVGRTPKVLKKYRMVVKSX

SEQ ID NO: 7991 - protein, 31 aa, Artificial Sequence
  Non-cyclic GFR-binding peptide
APTKLSATSVLYYDDSSNVILRKHRNMVVRS

SEQ ID NO: 7992 - protein, 33 aa, Artificial Sequence
  Non-cyclic GFR-binding peptide
  MOD_RES (1)..(1): Xaa is C or S
  MOD_RES (15)..(16)..(17)..(18)..(19): Xaa is A or G
  MOD_RES (20)..(21)..(22)..(23): Xaa is A or G or absent
XAPTKLSATSVLYYXXXXXXXXXLRKHRNMVVR

SEQ ID NO: 7993 - protein, 37 aa, Artificial Sequence
  Non-cyclic GFR-binding peptide
  MOD_RES (1)..(2)..(34)..(36): Xaa is C or S
XXVPTELSPISMLYKDEYDKVVLKYHYEMVVEGXGXR

SEQ ID NO: 7994 - protein, 38 aa, Artificial Sequence
  Non-cyclic GFR-binding peptide
  MOD_RES (3)..(4)..(38): Xaa is C or S
  MOD_RES (18)..(19)..(20)..(21)..(22): Xaa is A or G
  MOD_RES (23)..(24)..(25)..(26): Xaa is A or G or absent
KAXXVPTELNAISMLYFXXXXXXXXXLKKYRDMVVEGX

SEQ ID NO: 7995 - protein, 38 aa, Artificial Sequence
  Non-cyclic GFR-binding peptide
  MOD_RES (5)..(6): Xaa is C or S
  MOD_RES (20)..(21)..(22)..(23)..(24): Xaa is A or G
  MOD_RES (25)..(26)..(27)..(28): Xaa is A or G or absent
SAAPXXVPQALNAISILYFXXXXXXXXXLKKYRMIVRS

SEQ ID NO: 7996 - protein, 35 aa, Artificial Sequence
  Non-cyclic GFR-binding peptide
  MOD_RES (5)..(5): Xaa is C or S
TKPTXAPTKLSAISVLYLDDSSNVILKNYQNMVVR

SEQ ID NO: 7997 - protein, 30 aa, Artificial Sequence
  Non-cyclic GFR-binding peptide
VPTELNAISMLYFDEYDKVVLKKYREMVVE

SEQ ID NO: 7998 - protein, 35 aa, Artificial Sequence
  Non-cyclic GFR-binding peptide
  MOD_RES (3)..(4)..(35): Xaa is C or S
APXXVPQALSATSILYYVGRKPKVLRKHRMIVRSX

SEQ ID NO: 7999 - protein, 41 aa, Artificial Sequence
  Non-cyclic GFR-binding peptide
  MOD_RES (7)..(41): Xaa is C or S
  MOD_RES (21)..(22)..(23)..(24)..(25): Xaa is A or G
  MOD_RES (26)..(27)..(28)..(29): Xaa is A or G or absent
HVTKPTXAPTKLSATSVLYYXXXXXXXXXLRKHRNMVVRSX

SEQ ID NO: 8000 - protein, 34 aa, Artificial Sequence
  Non-cyclic GFR-binding peptide
  MOD_RES (16)..(17)..(18)..(19)..(20): Xaa is A or G
  MOD_RES (21)..(22)..(23)..(24): Xaa is A or G or absent
RPTQVQLSAISVLYLXXXXXXXXXLKNYQTLEDH

SEQ ID NO: 8001 - protein, 34 aa, Artificial Sequence
  Non-cyclic GFR-binding peptide
  MOD_RES (1)..(33): Xaa is C or S
XAPTQLSPISVLYKDDSSNVILKYHYNMVVRAXG

SEQ ID NO: 8002 - protein, 31 aa, Artificial Sequence
  Non-cyclic GFR-binding peptide
  MOD_RES (31)..(31): Xaa is C or S
VPQALSATSILYYVGRKPKVLRKHRMIVRSX

SEQ ID NO: 8003 - protein, 35 aa, Artificial Sequence
  Non-cyclic GFR-binding peptide
  MOD_RES (33)..(35): Xaa is C or S
VPTKLNAISVLYFDDMGVPTLKKYREGMSVAEXGX

SEQ ID NO: 8004 - protein, 36 aa, Artificial Sequence
  Non-cyclic GFR-binding peptide
  MOD_RES (5)..(6): Xaa is C or S
SASPXXVSQDLSAISILYLIGKTPKILKNYQMIVKS

SEQ ID NO: 8005 - protein, 37 aa, Artificial Sequence
  Non-cyclic GFR-binding peptide
  MOD_RES (7)..(7): Xaa is C or S
HVTKPTXAPTKLSATSVLYYDDSSNVILRKHRNMVVR

SEQ ID NO: 8006 - protein, 32 aa, Artificial Sequence
  Non-cyclic GFR-binding peptide
  MOD_RES (1)..(2): Xaa is C or S
XXVSQDLNAISILYFIGKTPKILKKYRMIVKS

SEQ ID NO: 8007 - protein, 36 aa, Artificial Sequence
  Non-cyclic GFR-binding peptide
  MOD_RES (1)..(34)..(36): Xaa is C or S
XVPTKLSATSVLYYDDMGVPTLRKHREGMSVAEXGX

SEQ ID NO: 8008 - protein, 33 aa, Artificial Sequence
  Non-cyclic GFR-binding peptide
  MOD_RES (31)..(33): Xaa is C or S
VPQDLSPISILYKVGRTPKVLKYHYMVVKSXKX

SEQ ID NO: 8009 - protein, 41 aa, Artificial Sequence
  Non-cyclic GFR-binding peptide
  MOD_RES (5)..(6)..(38)..(40): Xaa is C or S
VPKPXXAPTKLSPISVLYKDDSSNVILKYHYNMVVRSXGXH

SEQ ID NO: 8010 - protein, 37 aa, Artificial Sequence
  Non-cyclic GFR-binding peptide
  MOD_RES (36)..(36): Xaa is C or S
  MOD_RES (15)..(16)..(17)..(18)..(19): Xaa is A or G
  MOD_RES (20)..(21)..(22)..(23): Xaa is A or G or absent
PTQVQLSPISVLYKXXXXXXXXXLKYHYTLEDHLAXK

SEQ ID NO: 8011 - protein, 36 aa, Artificial Sequence
  Non-cyclic GFR-binding peptide
  MOD_RES (3)..(4): Xaa is C or S
  MOD_RES (18)..(19)..(20)..(21)..(22): Xaa is A or G
  MOD_RES (23)..(24)..(25)..(26): Xaa is A or G or absent
KAXXVPTELNAISMLYFXXXXXXXXXLKKYRDMVVE

SEQ ID NO: 8012 - protein, 39 aa, Artificial Sequence
  Non-cyclic GFR-binding peptide
  MOD_RES (3)..(4)..(38): Xaa is C or S
  MOD_RES (18)..(19)..(20)..(21)..(22): Xaa is A or G
  MOD_RES (23)..(24)..(25)..(26): Xaa is A or G or absent
KAXXVPTELSATSMLYYXXXXXXXXXLRKHREMVVEGXG

SEQ ID NO: 8013 - protein, 34 aa, Artificial Sequence
  Non-cyclic GFR-binding peptide
  MOD_RES (1)..(2): Xaa is C or S
  MOD_RES (16)..(17)..(18)..(19)..(20): Xaa is A or G
  MOD_RES (21)..(22)..(23)..(24): Xaa is A or G or absent
XXVPQALNAISILYFXXXXXXXXXLKKYRMIVRS

SEQ ID NO: 8014 - protein, 37 aa, Artificial Sequence
  Non-cyclic GFR-binding peptide
  MOD_RES (3)..(4)..(36): Xaa is C or S
KPXXAPTQLSATSVLYYDDSSNVILRKHRNMVVRAXG

SEQ ID NO: 8015 - protein, 41 aa, Artificial Sequence
  Non-cyclic GFR-binding peptide
  MOD_RES (6)..(7)..(41): Xaa is C or S
  MOD_RES (21)..(22)..(23)..(24)..(25): Xaa is A or G
  MOD_RES (26)..(27)..(28)..(29): Xaa is A or G or absent
TVPKPXXAPTQLSATSVLYYXXXXXXXXXLRKHRNMVVRAX

SEQ ID NO: 8016 - protein, 34 aa, Artificial Sequence
  Non-cyclic GFR-binding peptide
  MOD_RES (1)..(2): Xaa is C or S
XXVPTKLSATSVLYYDDMGVPTLRKHREGMSVAE

SEQ ID NO: 8017 - protein, 37 aa, Artificial Sequence
  Non-cyclic GFR-binding peptide
  MOD_RES (3)..(4): Xaa is C or S
  MOD_RES (18)..(19)..(20)..(21)..(22): Xaa is A or G
  MOD_RES (23)..(24)..(25)..(26): Xaa is A or G or absent
KPXXAPTKLSPISVLYKXXXXXXXXXLKYHYNMVVRS

SEQ ID NO: 8018 - protein, 40 aa, Artificial Sequence
  Non-cyclic GFR-binding peptide
  MOD_RES (5)..(37)..(39): Xaa is C or S
TKPTXAPTKLSATSVLYYDDSSNVILRKHRNMVVRSXGXH

SEQ ID NO: 8019 - protein, 44 aa, Artificial Sequence
  Non-cyclic GFR-binding peptide
  MOD_RES (6)..(7)..(41)..(43): Xaa is C or S
  MOD_RES (21)..(22)..(23)..(24)..(25): Xaa is A or G
  MOD_RES (26)..(27)..(28)..(29): Xaa is A or G or absent
KIPKAXXVPTELNAISMLYFXXXXXXXXXLKKYRDMVVEGXGXR

SEQ ID NO: 8020 - protein, 42 aa, Artificial Sequence
  Non-cyclic GFR-binding peptide
  MOD_RES (5)..(6)..(39)..(41): Xaa is C or S
  MOD_RES (20)..(21)..(22)..(23)..(24): Xaa is A or G
  MOD_RES (25)..(26)..(27)..(28): Xaa is A or G or absent
SASPXXVSQDLNAISILYFXXXXXXXXXLKKYRMIVKSXKXS

SEQ ID NO: 8021 - protein, 37 aa, Artificial Sequence
  Non-cyclic GFR-binding peptide
  MOD_RES (5)..(6): Xaa is C or S
VPKPXXAPTQLSAISVLYLDDSSNVILKNYQNMVVRA

SEQ ID NO: 8022 - protein, 33 aa, Artificial Sequence
  Non-cyclic GFR-binding peptide
  MOD_RES (33)..(33): Xaa is C or S
  MOD_RES (14)..(15)..(16)..(17)..(18): Xaa is A or G
  MOD_RES (19)..(20)..(21)..(22): Xaa is A or G or absent
VSQDLSPISILYKXXXXXXXXXLKYHYMIVKSX

SEQ ID NO: 8023 - protein, 37 aa, Artificial Sequence
  Non-cyclic GFR-binding peptide
  MOD_RES (2)..(36): Xaa is C or S
  MOD_RES (16)..(17)..(18)..(19)..(20): Xaa is A or G
  MOD_RES (21)..(22)..(23)..(24): Xaa is A or G or absent
TXAPTKLSATSVLYYXXXXXXXXXLRKHRNMVVRSXG

SEQ ID NO: 8024 - protein, 38 aa, Artificial Sequence
  Non-cyclic GFR-binding peptide
  MOD_RES (4)..(5)..(37): Xaa is C or S
PKAXXVPTELNAISMLYFDEYDKVVLKKYREMVVEGXG

SEQ ID NO: 8025 - protein, 32 aa, Artificial Sequence
  Non-cyclic GFR-binding peptide
  MOD_RES (32)..(32): Xaa is C or S
APTKLNAISVLYFDSSNNVILKKYRNMVVKAX

SEQ ID NO: 8026 - protein, 40 aa, Artificial Sequence
  Non-cyclic GFR-binding peptide
  MOD_RES (2)..(3)..(37)..(39): Xaa is C or S
  MOD_RES (17)..(18)..(19)..(20)..(21): Xaa is A or G
  MOD_RES (22)..(23)..(24)..(25): Xaa is A or G or absent
PXXAPTQLSAISVLYLXXXXXXXXXLKNYQNMVVRAXGXH

SEQ ID NO: 8027 - protein, 37 aa, Artificial Sequence
  Non-cyclic GFR-binding peptide
  MOD_RES (6)..(7): Xaa is C or S
ASASPXXVSQDLSAISILYLIGKTPKILKNYQMIVKS

SEQ ID NO: 8028 - protein, 42 aa, Artificial Sequence
  Non-cyclic GFR-binding peptide
  MOD_RES (4)..(41): Xaa is C or S
NVQXRPTQVQLSATSVLYYEIVRKKPIFLRKHRTLEDHLAXK

SEQ ID NO: 8029 - protein, 39 aa, Artificial Sequence
  Non-cyclic GFR-binding peptide
  MOD_RES (6)..(7)..(39): Xaa is C or S
KIPKAXXVPTELNAISMLYFDENEKVVLKKYRDMVVEGX

SEQ ID NO: 8030 - protein, 36 aa, Artificial Sequence
  Non-cyclic GFR-binding peptide
  MOD_RES (1)..(2)..(33)..(35): Xaa is C or S
XXVPQALNAISILYFVGRKPKVLKKYRMIVRSXKXS

SEQ ID NO: 8031 - protein, 37 aa, Artificial Sequence
  Non-cyclic GFR-binding peptide
  MOD_RES (3)..(4): Xaa is C or S
  MOD_RES (18)..(19)..(20)..(21)..(22): Xaa is A or G
  MOD_RES (23)..(24)..(25)..(26): Xaa is A or G or absent
KPXXAPTQLSAISVLYLXXXXXXXXXLKNYQNMVVRA

SEQ ID NO: 8032 - protein, 41 aa, Artificial Sequence
  Non-cyclic GFR-binding peptide
  MOD_RES (4)..(5)..(39)..(41): Xaa is C or S
  MOD_RES (19)..(20)..(21)..(22)..(23): Xaa is A or G
  MOD_RES (24)..(25)..(26)..(27): Xaa is A or G or absent
PKPXXAPTKLSAISVLYLXXXXXXXXXLKNYQNMVVRSXGX

SEQ ID NO: 8033 - protein, 41 aa, Artificial Sequence
  Non-cyclic GFR-binding peptide
  MOD_RES (5)..(6)..(40): Xaa is C or S
  MOD_RES (20)..(21)..(22)..(23)..(24): Xaa is A or G
  MOD_RES (25)..(26)..(27)..(28): Xaa is A or G or absent
VPKPXXAPTKLSAISVLYLXXXXXXXXXLKNYQNMVVRSXG

SEQ ID NO: 8034 - protein, 31 aa, Artificial Sequence
  Non-cyclic GFR-binding peptide
  MOD_RES (1)..(1): Xaa is C or S
XVPQDLSAISILYLVGRTPKVLKNYQMVVKS

SEQ ID NO: 8035 - protein, 38 aa, Artificial Sequence
  Non-cyclic GFR-binding peptide
  MOD_RES (6)..(7): Xaa is C or S
AVPKAXXAPTKLSAISVLYLDSSNNVILKNYQNMVVKA

SEQ ID NO: 8036 - protein, 36 aa, Artificial Sequence
  Non-cyclic GFR-binding peptide
  MOD_RES (2)..(3)..(35): Xaa is C or S
AXXVPTELNAISMLYFDENEKVVLKKYRDMVVEGXG

SEQ ID NO: 8037 - protein, 36 aa, Artificial Sequence
  Non-cyclic GFR-binding peptide
  MOD_RES (3)..(4)..(36): Xaa is C or S
KAXXVPTELSATSMLYYDEYDKVVLRKHREMVVEGX

SEQ ID NO: 8038 - protein, 35 aa, Artificial Sequence
  Non-cyclic GFR-binding peptide
  MOD_RES (1)..(33)..(35): Xaa is C or S
XAPTQLSPISVLYKDDSSNVILKYHYNMVVRAXGX

SEQ ID NO: 8039 - protein, 42 aa, Artificial Sequence
  Non-cyclic GFR-binding peptide
  MOD_RES (7)..(41): Xaa is C or S
  MOD_RES (21)..(22)..(23)..(24)..(25): Xaa is A or G
  MOD_RES (26)..(27)..(28)..(29): Xaa is A or G or absent
HVTKPTXAPTKLSAISVLYLXXXXXXXXXLKNYQNMVVRSXG

SEQ ID NO: 8040 - protein, 35 aa, Artificial Sequence
  Non-cyclic GFR-binding peptide
  MOD_RES (32)..(34): Xaa is C or S
APTKLSPISVLYKDDSSNVILKYHYNMVVRSXGXH

SEQ ID NO: 8041 - protein, 41 aa, Artificial Sequence
  Non-cyclic GFR-binding peptide
  MOD_RES (6)..(38)..(40): Xaa is C or S
VTKPTXAPTKLSPISVLYKDDSSNVILKYHYNMVVRSXGXH

SEQ ID NO: 8042 - protein, 40 aa, Artificial Sequence
  Non-cyclic GFR-binding peptide
  MOD_RES (2)..(39): Xaa is C or S
QXRPTQVQLNAISVLYFEIVRKKPIFLKKYRTLEDHLAXK

SEQ ID NO: 8043 - protein, 38 aa, Artificial Sequence
  Non-cyclic GFR-binding peptide
  MOD_RES (5)..(6): Xaa is C or S
  MOD_RES (20)..(21)..(22)..(23)..(24): Xaa is A or G
  MOD_RES (25)..(26)..(27)..(28): Xaa is A or G or absent
VPKPXXAPTQLSAISVLYLXXXXXXXXXLKNYQNMVVR

SEQ ID NO: 8044 - protein, 43 aa, Artificial Sequence
  Non-cyclic GFR-binding peptide
  MOD_RES (6)..(40)..(42): Xaa is C or S
  MOD_RES (20)..(21)..(22)..(23)..(24): Xaa is A or G
  MOD_RES (25)..(26)..(27)..(28): Xaa is A or G or absent
VTKPTXAPTKLSAISVLYLXXXXXXXXXLKNYQNMVVRSXGXH

SEQ ID NO: 8045 - protein, 36 aa, Artificial Sequence
  Non-cyclic GFR-binding peptide
  MOD_RES (3)..(4)..(36): Xaa is C or S
KAXXVPTELSATSMLYYDENEKVVLRKHRDMVVEGX

SEQ ID NO: 8046 - protein, 37 aa, Artificial Sequence
  Non-cyclic GFR-binding peptide
  MOD_RES (3)..(4): Xaa is C or S
  MOD_RES (18)..(19)..(20)..(21)..(22): Xaa is A or G
  MOD_RES (23)..(24)..(25)..(26): Xaa is A or G or absent
KAXXVPTELNAISMLYFXXXXXXXXXLKKYRDMVVEG

SEQ ID NO: 8047 - protein, 36 aa, Artificial Sequence
  Non-cyclic GFR-binding peptide
  MOD_RES (1)..(2)..(36): Xaa is C or S
  MOD_RES (16)..(17)..(18)..(19)..(20): Xaa is A or G
  MOD_RES (21)..(22)..(23)..(24): Xaa is A or G or absent
XXVPTELSPISMLYKXXXXXXXXXLKYHYDMVVEGX

SEQ ID NO: 8048 - protein, 37 aa, Artificial Sequence
  Non-cyclic GFR-binding peptide
  MOD_RES (5)..(6)..(37): Xaa is C or S
SASPXXVSQDLSATSILYYIGKTPKILRKHRMIVKSX

SEQ ID NO: 8049 - protein, 32 aa, Artificial Sequence
  Non-cyclic GFR-binding peptide
  MOD_RES (1)..(2): Xaa is C or S
XXVPQALNAISILYFVGRKPKVLKKYRMIVRS

SEQ ID NO: 8050 - protein, 42 aa, Artificial Sequence
  Non-cyclic GFR-binding peptide
  MOD_RES (6)..(7)..(40)..(42): Xaa is C or S
  MOD_RES (21)..(22)..(23)..(24)..(25): Xaa is A or G
  MOD_RES (26)..(27)..(28)..(29): Xaa is A or G or absent
ASASPXXVSQDLSATSILYYXXXXXXXXXLRKHRMIVKSXKX

SEQ ID NO: 8051 - protein, 30 aa, Artificial Sequence
  Non-cyclic GFR-binding peptide
APTQLSAISVLYLDDSSNVILKNYQNMVVR

SEQ ID NO: 8052 - protein, 35 aa, Artificial Sequence
  Non-cyclic GFR-binding peptide
  MOD_RES (1)..(2)..(34): Xaa is C or S
XXVPTELSPISMLYKDENEKVVLKYHYDMVVEGXG

SEQ ID NO: 8053 - protein, 34 aa, Artificial Sequence
  Non-cyclic GFR-binding peptide
  MOD_RES (1)..(32)..(34): Xaa is C or S
XVPQDLSPISILYKVGRTPKVLKYHYMVVKSXKX

SEQ ID NO: 8054 - protein, 38 aa, Artificial Sequence
  Non-cyclic GFR-binding peptide
  MOD_RES (4)..(5)..(38): Xaa is C or S
GKAXXVPTKLSATSVLYYDDMGVPTLRKHREGMSVAEX

SEQ ID NO: 8055 - protein, 34 aa, Artificial Sequence
  Non-cyclic GFR-binding peptide
  MOD_RES (1)..(2): Xaa is C or S
  MOD_RES (16)..(17)..(18)..(19)..(20): Xaa is A or G
  MOD_RES (21)..(22)..(23)..(24): Xaa is A or G or absent
XXVPTELNAISMLYFXXXXXXXXXLKKYREMVVE

SEQ ID NO: 8056 - protein, 32 aa, Artificial Sequence
  Non-cyclic GFR-binding peptide
  MOD_RES (32)..(32): Xaa is C or S
VPTELSATSMLYYDEYDKVVLRKHREMVVEGX

SEQ ID NO: 8057 - protein, 37 aa, Artificial Sequence
  Non-cyclic GFR-binding peptide
  MOD_RES (4)..(5): Xaa is C or S
  MOD_RES (19)..(20)..(21)..(22)..(23): Xaa is A or G
  MOD_RES (24)..(25)..(26)..(27): Xaa is A or G or absent
ASPXXVPQDLSPISILYKXXXXXXXXXLKYHYMVVKS

SEQ ID NO: 8058 - protein, 33 aa, Artificial Sequence
  Non-cyclic GFR-binding peptide
  MOD_RES (14)..(15)..(16)..(17)..(18): Xaa is A or G
  MOD_RES (19)..(20)..(21)..(22): Xaa is A or G or absent
VPTELNAISMLYFXXXXXXXXXLKKYRDMVVEG

SEQ ID NO: 8059 - protein, 40 aa, Artificial Sequence
  Non-cyclic GFR-binding peptide
  MOD_RES (37)..(39): Xaa is C or S
RPTQVQLNAISVLYFEIVRKKPIFLKKYRTLEDHLAXKXE

SEQ ID NO: 8060 - protein, 38 aa, Artificial Sequence
  Non-cyclic GFR-binding peptide
  MOD_RES (6)..(7)..(38): Xaa is C or S
ASASPXXVPQDLSPISILYKVGRTPKVLKYHYMVVKSX

SEQ ID NO: 8061 - protein, 36 aa, Artificial Sequence
  Non-cyclic GFR-binding peptide
  MOD_RES (3)..(4)..(35): Xaa is C or S
SPXXVPQDLNAISILYFVGRTPKVLKKYRMVVKSXK

SEQ ID NO: 8062 - protein, 38 aa, Artificial Sequence
  Non-cyclic GFR-binding peptide
  MOD_RES (3)..(4)..(38): Xaa is C or S
  MOD_RES (18)..(19)..(20)..(21)..(22): Xaa is A or G
  MOD_RES (23)..(24)..(25)..(26): Xaa is A or G or absent
KPXXAPTQLSPISVLYKXXXXXXXXXLKYHYNMVVRAX

SEQ ID NO: 8063 - protein, 37 aa, Artificial Sequence
  Non-cyclic GFR-binding peptide
  MOD_RES (5)..(6)..(37): Xaa is C or S
SASPXXVPQDLSPISILYKVGRTPKVLKYHYMVVKSX

SEQ ID NO: 8064 - protein, 32 aa, Artificial Sequence
  Non-cyclic GFR-binding peptide
VPTKLSAISVLYLDDMGVPTLKNYQEGMSVAE

SEQ ID NO: 8065 - protein, 44 aa, Artificial Sequence
  Non-cyclic GFR-binding peptide
  MOD_RES (6)..(7)..(41)..(43): Xaa is C or S
  MOD_RES (21)..(22)..(23)..(24)..(25): Xaa is A or G
  MOD_RES (26)..(27)..(28)..(29): Xaa is A or G or absent
TVPKPXXAPTQLSPISVLYKXXXXXXXXXLKYHYNMVVRAXGXH

SEQ ID NO: 8066 - protein, 38 aa, Artificial Sequence
  Non-cyclic GFR-binding peptide
  MOD_RES (1)..(38): Xaa is C or S
XRPTQVQLSAISVLYLEIVRKKPIFLKNYQTLEDHLAX

SEQ ID NO: 8067 - protein, 35 aa, Artificial Sequence
  Non-cyclic GFR-binding peptide
  MOD_RES (1)..(33)..(35): Xaa is C or S
XAPTKLSAISVLYLDSSNNVILKNYQNMVVKAXGX

SEQ ID NO: 8068 - protein, 33 aa, Artificial Sequence
  Non-cyclic GFR-binding peptide
  MOD_RES (1)..(1): Xaa is C or S
  MOD_RES (15)..(16)..(17)..(18)..(19): Xaa is A or G
  MOD_RES (20)..(21)..(22)..(23): Xaa is A or G or absent
XAPTQLSAISVLYLXXXXXXXXXLKNYQNMVVR

SEQ ID NO: 8069 - protein, 42 aa, Artificial Sequence
  Non-cyclic GFR-binding peptide
  MOD_RES (4)..(5)..(39)..(41): Xaa is C or S
  MOD_RES (19)..(20)..(21)..(22)..(23): Xaa is A or G
  MOD_RES (24)..(25)..(26)..(27): Xaa is A or G or absent
PKAXXVPTELSPISMLYKXXXXXXXXXLKYHYEMVVEGXGXR

SEQ ID NO: 8070 - protein, 35 aa, Artificial Sequence
  Non-cyclic GFR-binding peptide
  MOD_RES (3)..(4)..(35): Xaa is C or S
SPXXVPQDLNAISILYFVGRTPKVLKKYRMVVKSX

SEQ ID NO: 8071 - protein, 38 aa, Artificial Sequence
  Non-cyclic GFR-binding peptide
  MOD_RES (3)..(4)..(36)..(38): Xaa is C or S
KPXXAPTKLSATSVLYYDDSSNVILRKHRNMVVRSXGX

SEQ ID NO: 8072 - protein, 39 aa, Artificial Sequence
  Non-cyclic GFR-binding peptide
  MOD_RES (2)..(3)..(37)..(39): Xaa is C or S
  MOD_RES (17)..(18)..(19)..(20)..(21): Xaa is A or G
  MOD_RES (22)..(23)..(24)..(25): Xaa is A or G or absent
AXXAPTKLNAISVLYFXXXXXXXXXLKKYRNMVVKAXGX

SEQ ID NO: 8073 - protein, 36 aa, Artificial Sequence
  Non-cyclic GFR-binding peptide
  MOD_RES (4)..(5): Xaa is C or S
PKPXXAPTKLSPISVLYKDDSSNVILKYHYNMVVRS

SEQ ID NO: 8074 - protein, 41 aa, Artificial Sequence
  Non-cyclic GFR-binding peptide
  MOD_RES (7)..(39)..(41): Xaa is C or S
HVTKPTXAPTKLSPISVLYKDDSSNVILKYHYNMVVRSXGX

SEQ ID NO: 8075 - protein, 38 aa, Artificial Sequence
  Non-cyclic GFR-binding peptide
  MOD_RES (5)..(6)..(38): Xaa is C or S
IPKAXXVPTELSPISMLYKDENEKVVLKYHYDMVVEGX

SEQ ID NO: 8076 - protein, 36 aa, Artificial Sequence
  Non-cyclic GFR-binding peptide
  MOD_RES (3)..(4): Xaa is C or S
KAXXVPTKLNAISVLYFDDMGVPTLKKYREGMSVAE

SEQ ID NO: 8077 - protein, 35 aa, Artificial Sequence
  Non-cyclic GFR-binding peptide
  MOD_RES (1)..(35): Xaa is C or S
  MOD_RES (15)..(16)..(17)..(18)..(19): Xaa is A or G
  MOD_RES (20)..(21)..(22)..(23): Xaa is A or G or absent
XAPTQLSAISVLYLXXXXXXXXXLKNYQNMVVRAX

SEQ ID NO: 8078 - protein, 36 aa, Artificial Sequence
  Non-cyclic GFR-binding peptide
  MOD_RES (1)..(36): Xaa is C or S
  MOD_RES (15)..(16)..(17)..(18)..(19): Xaa is A or G
  MOD_RES (20)..(21)..(22)..(23): Xaa is A or G or absent
XVPTKLSATSVLYYXXXXXXXXXLRKHREGMSVAEX

SEQ ID NO: 8079 - protein, 44 aa, Artificial Sequence
  Non-cyclic GFR-binding peptide
  MOD_RES (5)..(42)..(44): Xaa is C or S
  MOD_RES (21)..(22)..(23)..(24)..(25): Xaa is A or G
  MOD_RES (26)..(27)..(28)..(29): Xaa is A or G or absent
RNVQXRPTQVQLNAISVLYFXXXXXXXXXLKKYRTLEDHLAXKX

SEQ ID NO: 8080 - protein, 37 aa, Artificial Sequence
  Non-cyclic GFR-binding peptide
  MOD_RES (3)..(4)..(36): Xaa is C or S
KAXXVPTELSATSMLYYDENEKVVLRKHRDMVVEGXG

SEQ ID NO: 8081 - protein, 39 aa, Artificial Sequence
  Non-cyclic GFR-binding peptide
  MOD_RES (6)..(7): Xaa is C or S
  MOD_RES (21)..(22)..(23)..(24)..(25): Xaa is A or G
  MOD_RES (26)..(27)..(28)..(29): Xaa is A or G or absent
AVPKAXXAPTKLSAISVLYLXXXXXXXXXLKNYQNMVVK

SEQ ID NO: 8082 - protein, 31 aa, Artificial Sequence
  Non-cyclic GFR-binding peptide
  MOD_RES (31)..(31): Xaa is C or S
VSQDLSPISILYKIGKTPKILKYHYMIVKSX

SEQ ID NO: 8083 - protein, 35 aa, Artificial Sequence
  Non-cyclic GFR-binding peptide
  MOD_RES (1)..(2)..(35): Xaa is C or S
  MOD_RES (16)..(17)..(18)..(19)..(20): Xaa is A or G
  MOD_RES (21)..(22)..(23)..(24): Xaa is A or G or absent
XXVPQALSAISILYLXXXXXXXXXLKNYQMIVRSX

SEQ ID NO: 8084 - protein, 39 aa, Artificial Sequence
  Non-cyclic GFR-binding peptide
  MOD_RES (3)..(3): Xaa is C or S
VQXRPTQVQLSAISVLYLEIVRKKPIFLKNYQTLEDHLA

SEQ ID NO: 8085 - protein, 39 aa, Artificial Sequence
  Non-cyclic GFR-binding peptide
  MOD_RES (3)..(3): Xaa is C or S
VQXRPTQVQLSATSVLYYEIVRKKPIFLRKHRTLEDHLA

SEQ ID NO: 8086 - protein, 39 aa, Artificial Sequence
  Non-cyclic GFR-binding peptide
  MOD_RES (4)..(4): Xaa is C or S
NVQXRPTQVQLSATSVLYYEIVRKKPIFLRKHRTLEDHL

SEQ ID NO: 8087 - protein, 40 aa, Artificial Sequence
  Non-cyclic GFR-binding peptide
  MOD_RES (6)..(7): Xaa is C or S
  MOD_RES (21)..(22)..(23)..(24)..(25): Xaa is A or G
  MOD_RES (26)..(27)..(28)..(29): Xaa is A or G or absent
KIPKAXXVPTELSPISMLYKXXXXXXXXXLKYHYDMVVEG

SEQ ID NO: 8088 - protein, 32 aa, Artificial Sequence
  Non-cyclic GFR-binding peptide
  MOD_RES (1)..(2): Xaa is C or S
XXVPQALSAISILYLVGRKPKVLKNYQMIVRS

SEQ ID NO: 8089 - protein, 35 aa, Artificial Sequence
  Non-cyclic GFR-binding peptide
  MOD_RES (2)..(2): Xaa is C or S
  MOD_RES (16)..(17)..(18)..(19)..(20): Xaa is A or G
  MOD_RES (21)..(22)..(23)..(24): Xaa is A or G or absent
TXAPTKLSPISVLYKXXXXXXXXXLKYHYNMVVRS

SEQ ID NO: 8090 - protein, 41 aa, Artificial Sequence
  Non-cyclic GFR-binding peptide
  MOD_RES (4)..(5)..(40): Xaa is C or S
  MOD_RES (19)..(20)..(21)..(22)..(23): Xaa is A or G
  MOD_RES (24)..(25)..(26)..(27): Xaa is A or G or absent
GKAXXVPTKLSAISVLYLXXXXXXXXXLKNYQEGMSVAEXG

SEQ ID NO: 8091 - protein, 37 aa, Artificial Sequence
  Non-cyclic GFR-binding peptide
  MOD_RES (1)..(2)..(35)..(37): Xaa is C or S
  MOD_RES (16)..(17)..(18)..(19)..(20): Xaa is A or G
  MOD_RES (21)..(22)..(23)..(24): Xaa is A or G or absent
XXVPQDLNAISILYFXXXXXXXXXLKKYRMVVKSXKX

SEQ ID NO: 8092 - protein, 40 aa, Artificial Sequence
  Non-cyclic GFR-binding peptide
  MOD_RES (5)..(6)..(38)..(40): Xaa is C or S
VPKAXXAPTKLSAISVLYLDSSNNVILKNYQNMVVKAXGX

SEQ ID NO: 8093 - protein, 35 aa, Artificial Sequence
  Non-cyclic GFR-binding peptide
  MOD_RES (1)..(2)..(34): Xaa is C or S
XXAPTKLNAISVLYFDSSNNVILKKYRNMVVKAXG

SEQ ID NO: 8094 - protein, 40 aa, Artificial Sequence
  Non-cyclic GFR-binding peptide
  MOD_RES (5)..(6)..(37)..(39): Xaa is C or S
SAAPXXVPQALSAISILYLVGRKPKVLKNYQMIVRSXKXS

SEQ ID NO: 8095 - protein, 37 aa, Artificial Sequence
  Non-cyclic GFR-binding peptide
  MOD_RES (2)..(3)..(36): Xaa is C or S
  MOD_RES (17)..(18)..(19)..(20)..(21): Xaa is A or G
  MOD_RES (22)..(23)..(24)..(25): Xaa is A or G or absent
PXXVSQDLSPISILYKXXXXXXXXXLKYHYMIVKSXK

SEQ ID NO: 8096 - protein, 40 aa, Artificial Sequence
  Non-cyclic GFR-binding peptide
  MOD_RES (5)..(6)..(40): Xaa is C or S
  MOD_RES (20)..(21)..(22)..(23)..(24): Xaa is A or G
  MOD_RES (25)..(26)..(27)..(28): Xaa is A or G or absent
VPKPXXAPTQLSATSVLYYXXXXXXXXXLRKHRNMVVRAX

SEQ ID NO: 8097 - protein, 37 aa, Artificial Sequence
  Non-cyclic GFR-binding peptide
  MOD_RES (6)..(7): Xaa is C or S
ASASPXXVSQDLNAISILYFIGKTPKILKKYRMIVKS

SEQ ID NO: 8098 - protein, 42 aa, Artificial Sequence
  Non-cyclic GFR-binding peptide
  MOD_RES (5)..(6)..(41): Xaa is C or S
  MOD_RES (20)..(21)..(22)..(23)..(24): Xaa is A or G
  MOD_RES (25)..(26)..(27)..(28): Xaa is A or G or absent
VGKAXXVPTKLNAISVLYFXXXXXXXXXLKKYREGMSVAEXG

SEQ ID NO: 8099 - protein, 41 aa, Artificial Sequence
  Non-cyclic GFR-binding peptide
  MOD_RES (6)..(7)..(38)..(40): Xaa is C or S
ASAAPXXVPQALSAISILYLVGRKPKVLKNYQMIVRSXKXS

SEQ ID NO: 8100 - protein, 38 aa, Artificial Sequence
  Non-cyclic GFR-binding peptide
  MOD_RES (1)..(2)..(37): Xaa is C or S
  MOD_RES (16)..(17)..(18)..(19)..(20): Xaa is A or G
  MOD_RES (21)..(22)..(23)..(24): Xaa is A or G or absent
XXVPTKLSATSVLYYXXXXXXXXXLRKHREGMSVAEXG

SEQ ID NO: 8101 - protein, 35 aa, Artificial Sequence
  Non-cyclic GFR-binding peptide
  MOD_RES (2)..(3): Xaa is C or S
  MOD_RES (17)..(18)..(19)..(20)..(21): Xaa is A or G
  MOD_RES (22)..(23)..(24)..(25): Xaa is A or G or absent
PXXVPQALSAISILYLXXXXXXXXXLKNYQMIVRS

SEQ ID NO: 8102 - protein, 39 aa, Artificial Sequence
  Non-cyclic GFR-binding peptide
  MOD_RES (1)..(2)..(36)..(38): Xaa is C or S
  MOD_RES (16)..(17)..(18)..(19)..(20): Xaa is A or G
  MOD_RES (21)..(22)..(23)..(24): Xaa is A or G or absent
XXAPTQLSAISVLYLXXXXXXXXXLKNYQNMVVRAXGXH

SEQ ID NO: 8103 - protein, 34 aa, Artificial Sequence
  Non-cyclic GFR-binding peptide
  MOD_RES (34)..(34): Xaa is C or S
  MOD_RES (14)..(15)..(16)..(17)..(18): Xaa is A or G
  MOD_RES (19)..(20)..(21)..(22): Xaa is A or G or absent
APTQLSPISVLYKXXXXXXXXXLKYHYNMVVRAX

SEQ ID NO: 8104 - protein, 35 aa, Artificial Sequence
  Non-cyclic GFR-binding peptide
  MOD_RES (2)..(3): Xaa is C or S
AXXVPTKLSAISVLYLDDMGVPTLKNYQEGMSVAE

SEQ ID NO: 8105 - protein, 36 aa, Artificial Sequence
  Non-cyclic GFR-binding peptide
  MOD_RES (4)..(5)..(36): Xaa is C or S
ASPXXVPQDLSAISILYLVGRTPKVLKNYQMVVKSX

SEQ ID NO: 8106 - protein, 35 aa, Artificial Sequence
  Non-cyclic GFR-binding peptide
  MOD_RES (1)..(2)..(34): Xaa is C or S
XXVPTELSATSMLYYDEYDKVVLRKHREMVVEGXG

SEQ ID NO: 8107 - protein, 35 aa, Artificial Sequence
  Non-cyclic GFR-binding peptide
  MOD_RES (1)..(32)..(34): Xaa is C or S
XVPQDLSPISILYKVGRTPKVLKYHYMVVKSXKXS

SEQ ID NO: 8108 - protein, 31 aa, Artificial Sequence
  Non-cyclic GFR-binding peptide
  MOD_RES (1)..(1): Xaa is C or S
XAPTQLSAISVLYLDDSSNVILKNYQNMVVR

SEQ ID NO: 8109 - protein, 40 aa, Artificial Sequence
  Non-cyclic GFR-binding peptide
  MOD_RES (2)..(39): Xaa is C or S
  MOD_RES (18)..(19)..(20)..(21)..(22): Xaa is A or G
  MOD_RES (23)..(24)..(25)..(26): Xaa is A or G or absent
QXRPTQVQLSATSVLYYXXXXXXXXXLRKHRTLEDHLAXK

SEQ ID NO: 8110 - protein, 42 aa, Artificial Sequence
  Non-cyclic GFR-binding peptide
  MOD_RES (5)..(6)..(39)..(41): Xaa is C or S
  MOD_RES (20)..(21)..(22)..(23)..(24): Xaa is A or G
  MOD_RES (25)..(26)..(27)..(28): Xaa is A or G or absent
SAAPXXVPQALSAISILYLXXXXXXXXXLKNYQMIVRSXKXS

SEQ ID NO: 8111 - protein, 34 aa, Artificial Sequence
  Non-cyclic GFR-binding peptide
  MOD_RES (1)..(32)..(34): Xaa is C or S
XVPQALSPISILYKVGRKPKVLKYHYMIVRSXKX

SEQ ID NO: 8112 - protein, 41 aa, Artificial Sequence
  Non-cyclic GFR-binding peptide
  MOD_RES (6)..(7)..(40): Xaa is C or S
  MOD_RES (21)..(22)..(23)..(24)..(25): Xaa is A or G
  MOD_RES (26)..(27)..(28)..(29): Xaa is A or G or absent
ASASPXXVSQDLSAISILYLXXXXXXXXXLKNYQMIVKSXK

SEQ ID NO: 8113 - protein, 41 aa, Artificial Sequence
  Non-cyclic GFR-binding peptide
  MOD_RES (6)..(7)..(40): Xaa is C or S
  MOD_RES (21)..(22)..(23)..(24)..(25): Xaa is A or G
  MOD_RES (26)..(27)..(28)..(29): Xaa is A or G or absent
ASASPXXVSQDLNAISILYFXXXXXXXXXLKKYRMIVKSXK

SEQ ID NO: 8114 - protein, 38 aa, Artificial Sequence
  Non-cyclic GFR-binding peptide
  MOD_RES (5)..(6): Xaa is C or S
  MOD_RES (20)..(21)..(22)..(23)..(24): Xaa is A or G
  MOD_RES (25)..(26)..(27)..(28): Xaa is A or G or absent
VPKAXXAPTKLSPISVLYKXXXXXXXXXLKYHYNMVVK

SEQ ID NO: 8115 - protein, 39 aa, Artificial Sequence
  Non-cyclic GFR-binding peptide
  MOD_RES (2)..(3)..(37)..(39): Xaa is C or S
  MOD_RES (17)..(18)..(19)..(20)..(21): Xaa is A or G
  MOD_RES (22)..(23)..(24)..(25): Xaa is A or G or absent
PXXAPTKLSAISVLYLXXXXXXXXXLKNYQNMVVRSXGX

SEQ ID NO: 8116 - protein, 35 aa, Artificial Sequence
  Non-cyclic GFR-binding peptide
  MOD_RES (32)..(34): Xaa is C or S
APTKLSAISVLYLDDSSNVILKNYQNMVVRSXGXH

SEQ ID NO: 8117 - protein, 36 aa, Artificial Sequence
  Non-cyclic GFR-binding peptide
  MOD_RES (3)..(4)..(35): Xaa is C or S
APXXVPQALSATSILYYVGRKPKVLRKHRMIVRSXK

SEQ ID NO: 8118 - protein, 35 aa, Artificial Sequence
  Non-cyclic GFR-binding peptide
  MOD_RES (4)..(5): Xaa is C or S
PKPXXAPTKLSATSVLYYDDSSNVILRKHRNMVVR

SEQ ID NO: 8119 - protein, 39 aa, Artificial Sequence
  Non-cyclic GFR-binding peptide
  MOD_RES (2)..(3)..(36)..(38): Xaa is C or S
AXXVPTKLNAISVLYFDDMGVPTLKKYREGMSVAEXGXR

SEQ ID NO: 8120 - protein, 38 aa, Artificial Sequence
  Non-cyclic GFR-binding peptide
  MOD_RES (3)..(4)..(36)..(38): Xaa is C or S
KAXXVPTELNAISMLYFDENEKVVLKKYRDMVVEGXGX

SEQ ID NO: 8121 - protein, 35 aa, Artificial Sequence
  Non-cyclic GFR-binding peptide
  MOD_RES (1)..(2)..(35): Xaa is C or S
  MOD_RES (16)..(17)..(18)..(19)..(20): Xaa is A or G
  MOD_RES (21)..(22)..(23)..(24): Xaa is A or G or absent
XXVPQALSATSILYYXXXXXXXXXLRKHRMIVRSX

SEQ ID NO: 8122 - protein, 45 aa, Artificial Sequence
  Non-cyclic GFR-binding peptide
  MOD_RES (6)..(7)..(42)..(44): Xaa is C or S
  MOD_RES (21)..(22)..(23)..(24)..(25): Xaa is A or G
  MOD_RES (26)..(27)..(28)..(29): Xaa is A or G or absent
KVGKAXXVPTKLNAISVLYFXXXXXXXXXLKKYREGMSVAEXGXR

SEQ ID NO: 8123 - protein, 37 aa, Artificial Sequence
  Non-cyclic GFR-binding peptide
  MOD_RES (3)..(4)..(37): Xaa is C or S
KAXXVPTKLNAISVLYFDDMGVPTLKKYREGMSVAEX

SEQ ID NO: 8124 - protein, 36 aa, Artificial Sequence
  Non-cyclic GFR-binding peptide
  MOD_RES (1)..(33)..(35): Xaa is C or S
XVPTELSPISMLYKDEYDKVVLKYHYEMVVEGXGXR

SEQ ID NO: 8125 - protein, 33 aa, Artificial Sequence
  Non-cyclic GFR-binding peptide
  MOD_RES (1)..(1): Xaa is C or S
  MOD_RES (15)..(16)..(17)..(18)..(19): Xaa is A or G
  MOD_RES (20)..(21)..(22)..(23): Xaa is A or G or absent
XVPTELNAISMLYFXXXXXXXXXLKKYRDMVVE

SEQ ID NO: 8126 - protein, 40 aa, Artificial Sequence
  Non-cyclic GFR-binding peptide
  MOD_RES (5)..(6)..(38)..(40): Xaa is C or S
IPKAXXVPTELNAISMLYFDEYDKVVLKKYREMVVEGXGX

SEQ ID NO: 8127 - protein, 39 aa, Artificial Sequence
  Non-cyclic GFR-binding peptide
  MOD_RES (6)..(7)..(38): Xaa is C or S
ASASPXXVSQDLSAISILYLIGKTPKILKNYQMIVKSXK

SEQ ID NO: 8128 - protein, 40 aa, Artificial Sequence
  Non-cyclic GFR-binding peptide
  MOD_RES (4)..(5)..(39): Xaa is C or S
  MOD_RES (19)..(20)..(21)..(22)..(23): Xaa is A or G
  MOD_RES (24)..(25)..(26)..(27): Xaa is A or G or absent
PKPXXAPTQLSAISVLYLXXXXXXXXXLKNYQNMVVRAXG

SEQ ID NO: 8129 - protein, 39 aa, Artificial Sequence
  Non-cyclic GFR-binding peptide
  MOD_RES (2)..(3)..(37)..(39): Xaa is C or S
  MOD_RES (17)..(18)..(19)..(20)..(21): Xaa is A or G
  MOD_RES (22)..(23)..(24)..(25): Xaa is A or G or absent
PXXAPTQLSATSVLYYXXXXXXXXXLRKHRNMVVRAXGX

SEQ ID NO: 8130 - protein, 36 aa, Artificial Sequence
  Non-cyclic GFR-binding peptide
  MOD_RES (2)..(2): Xaa is C or S
QXRPTQVQLSAISVLYLEIVRKKPIFLKNYQTLEDH

SEQ ID NO: 8131 - protein, 32 aa, Artificial Sequence
  Non-cyclic GFR-binding peptide
  MOD_RES (14)..(15)..(16)..(17)..(18): Xaa is A or G
  MOD_RES (19)..(20)..(21)..(22): Xaa is A or G or absent
VPQDLSPISILYKXXXXXXXXXLKYHYMVVKS

SEQ ID NO: 8132 - protein, 32 aa, Artificial Sequence
  Non-cyclic GFR-binding peptide
  MOD_RES (31)..(31): Xaa is C or S
VPQDLSPISILYKVGRTPKVLKYHYMVVKSXK

SEQ ID NO: 8133 - protein, 39 aa, Artificial Sequence
  Non-cyclic GFR-binding peptide
  MOD_RES (3)..(4)..(37)..(39): Xaa is C or S
  MOD_RES (18)..(19)..(20)..(21)..(22): Xaa is A or G
  MOD_RES (23)..(24)..(25)..(26): Xaa is A or G or absent
APXXVPQALNAISILYFXXXXXXXXXLKKYRMIVRSXKX

SEQ ID NO: 8134 - protein, 39 aa, Artificial Sequence
  Non-cyclic GFR-binding peptide
  MOD_RES (4)..(4): Xaa is C or S
  MOD_RES (20)..(21)..(22)..(23)..(24): Xaa is A or G
  MOD_RES (25)..(26)..(27)..(28): Xaa is A or G or absent
NVQXRPTQVQLSAISVLYLXXXXXXXXXLKNYQTLEDHL

SEQ ID NO: 8135 - protein, 35 aa, Artificial Sequence
  Non-cyclic GFR-binding peptide
  MOD_RES (1)..(32)..(34): Xaa is C or S
XVPQALSAISILYLVGRKPKVLKNYQMIVRSXKXS

SEQ ID NO: 8136 - protein, 37 aa, Artificial Sequence
  Non-cyclic GFR-binding peptide
  MOD_RES (2)..(3): Xaa is C or S
  MOD_RES (17)..(18)..(19)..(20)..(21): Xaa is A or G
  MOD_RES (22)..(23)..(24)..(25): Xaa is A or G or absent
AXXVPTKLNAISVLYFXXXXXXXXXLKKYREGMSVAE

SEQ ID NO: 8137 - protein, 38 aa, Artificial Sequence
  Non-cyclic GFR-binding peptide
  MOD_RES (6)..(7): Xaa is C or S
KIPKAXXVPTELSATSMLYYDENEKVVLRKHRDMVVEG

SEQ ID NO: 8138 - protein, 36 aa, Artificial Sequence
  Non-cyclic GFR-binding peptide
  MOD_RES (4)..(5)..(36): Xaa is C or S
ASPXXVSQDLSATSILYYIGKTPKILRKHRMIVKSX

SEQ ID NO: 8139 - protein, 37 aa, Artificial Sequence
  Non-cyclic GFR-binding peptide
  MOD_RES (2)..(3)..(37): Xaa is C or S
  MOD_RES (17)..(18)..(19)..(20)..(21): Xaa is A or G
  MOD_RES (22)..(23)..(24)..(25): Xaa is A or G or absent
AXXVPTELSATSMLYYXXXXXXXXXLRKHREMVVEGX

SEQ ID NO: 8140 - protein, 37 aa, Artificial Sequence
  Non-cyclic GFR-binding peptide
  MOD_RES (3)..(3): Xaa is C or S
  MOD_RES (19)..(20)..(21)..(22)..(23): Xaa is A or G
  MOD_RES (24)..(25)..(26)..(27): Xaa is A or G or absent
VQXRPTQVQLSPISVLYKXXXXXXXXXLKYHYTLEDH

SEQ ID NO: 8141 - protein, 39 aa, Artificial Sequence
  Non-cyclic GFR-binding peptide
  MOD_RES (37)..(39): Xaa is C or S
  MOD_RES (16)..(17)..(18)..(19)..(20): Xaa is A or G
  MOD_RES (21)..(22)..(23)..(24): Xaa is A or G or absent
RPTQVQLSATSVLYYXXXXXXXXXLRKHRTLEDHLAXKX

SEQ ID NO: 8142 - protein, 43 aa, Artificial Sequence
  Non-cyclic GFR-binding peptide
  MOD_RES (3)..(40)..(42): Xaa is C or S
VQXRPTQVQLSAISVLYLEIVRKKPIFLKNYQTLEDHLAXKXE

SEQ ID NO: 8143 - protein, 40 aa, Artificial Sequence
  Non-cyclic GFR-binding peptide
  MOD_RES (6)..(7)..(39): Xaa is C or S
KIPKAXXVPTELSATSMLYYDENEKVVLRKHRDMVVEGXG

SEQ ID NO: 8144 - protein, 38 aa, Artificial Sequence
  Non-cyclic GFR-binding peptide
  MOD_RES (3)..(4)..(38): Xaa is C or S
  MOD_RES (18)..(19)..(20)..(21)..(22): Xaa is A or G
  MOD_RES (23)..(24)..(25)..(26): Xaa is A or G or absent
KAXXAPTKLSPISVLYKXXXXXXXXXLKYHYNMVVKAX

SEQ ID NO: 8145 - protein, 41 aa, Artificial Sequence
  Non-cyclic GFR-binding peptide
  MOD_RES (5)..(6)..(38)..(40): Xaa is C or S
IPKAXXVPTELSATSMLYYDEYDKVVLRKHREMVVEGXGXR

SEQ ID NO: 8146 - protein, 36 aa, Artificial Sequence
  Non-cyclic GFR-binding peptide
  MOD_RES (2)..(3): Xaa is C or S
  MOD_RES (17)..(18)..(19)..(20)..(21): Xaa is A or G
  MOD_RES (22)..(23)..(24)..(25): Xaa is A or G or absent
PXXAPTKLSAISVLYLXXXXXXXXXLKNYQNMVVRS

SEQ ID NO: 8147 - protein, 35 aa, Artificial Sequence
  Non-cyclic GFR-binding peptide
  MOD_RES (2)..(3)..(35): Xaa is C or S
PXXAPTKLSAISVLYLDDSSNVILKNYQNMVVRSX

SEQ ID NO: 8148 - protein, 39 aa, Artificial Sequence
  Non-cyclic GFR-binding peptide
  MOD_RES (5)..(6)..(38): Xaa is C or S
VPKPXXAPTKLSPISVLYKDDSSNVILKYHYNMVVRSXG

SEQ ID NO: 8149 - protein, 42 aa, Artificial Sequence
  Non-cyclic GFR-binding peptide
  MOD_RES (3)..(40)..(42): Xaa is C or S
VQXRPTQVQLSAISVLYLEIVRKKPIFLKNYQTLEDHLAXKX

SEQ ID NO: 8150 - protein, 41 aa, Artificial Sequence
  Non-cyclic GFR-binding peptide
  MOD_RES (3)..(40): Xaa is C or S
  MOD_RES (19)..(20)..(21)..(22)..(23): Xaa is A or G
  MOD_RES (24)..(25)..(26)..(27): Xaa is A or G or absent
VQXRPTQVQLSATSVLYYXXXXXXXXXLRKHRTLEDHLAXK

SEQ ID NO: 8151 - protein, 42 aa, Artificial Sequence
  Non-cyclic GFR-binding peptide
  MOD_RES (6)..(7)..(39)..(41): Xaa is C or S
TVPKPXXAPTQLSAISVLYLDDSSNVILKNYQNMVVRAXGXH

SEQ ID NO: 8152 - protein, 31 aa, Artificial Sequence
  Non-cyclic GFR-binding peptide
  MOD_RES (1)..(1): Xaa is C or S
XAPTKLSATSVLYYDDSSNVILRKHRNMVVR

SEQ ID NO: 8153 - protein, 35 aa, Artificial Sequence
  Non-cyclic GFR-binding peptide
  MOD_RES (1)..(33)..(35): Xaa is C or S
XVPTELNAISMLYFDENEKVVLKKYRDMVVEGXGX

SEQ ID NO: 8154 - protein, 33 aa, Artificial Sequence
  Non-cyclic GFR-binding peptide
  MOD_RES (2)..(3): Xaa is C or S
AXXVPTELSPISMLYKDEYDKVVLKYHYEMVVE

SEQ ID NO: 8155 - protein, 40 aa, Artificial Sequence
  Non-cyclic GFR-binding peptide
  MOD_RES (3)..(4)..(37)..(39): Xaa is C or S
  MOD_RES (18)..(19)..(20)..(21)..(22): Xaa is A or G
  MOD_RES (23)..(24)..(25)..(26): Xaa is A or G or absent
APXXVPQALNAISILYFXXXXXXXXXLKKYRMIVRSXKXS

SEQ ID NO: 8156 - protein, 39 aa, Artificial Sequence
  Non-cyclic GFR-binding peptide
  MOD_RES (6)..(7)..(38): Xaa is C or S
ASASPXXVPQDLSAISILYLVGRTPKVLKNYQMVVKSXK

SEQ ID NO: 8157 - protein, 36 aa, Artificial Sequence
  Non-cyclic GFR-binding peptide
  MOD_RES (2)..(34)..(36): Xaa is C or S
TXAPTKLSATSVLYYDDSSNVILRKHRNMVVRSXGX

SEQ ID NO: 8158 - protein, 32 aa, Artificial Sequence
  Non-cyclic GFR-binding peptide
  MOD_RES (1)..(2): Xaa is C or S
XXVPQALSPISILYKVGRKPKVLKYHYMIVRS

SEQ ID NO: 8159 - protein, 35 aa, Artificial Sequence
  Non-cyclic GFR-binding peptide
  MOD_RES (1)..(2): Xaa is C or S
  MOD_RES (16)..(17)..(18)..(19)..(20): Xaa is A or G
  MOD_RES (21)..(22)..(23)..(24): Xaa is A or G or absent
XXVPTELSPISMLYKXXXXXXXXXLKYHYEMVVEG

SEQ ID NO: 8160 - protein, 34 aa, Artificial Sequence
  Non-cyclic GFR-binding peptide
  MOD_RES (32)..(34): Xaa is C or S
APTQLSAISVLYLDDSSNVILKNYQNMVVRAXGX

SEQ ID NO: 8161 - protein, 37 aa, Artificial Sequence
  Non-cyclic GFR-binding peptide
  MOD_RES (5)..(6): Xaa is C or S
VPKPXXAPTQLSPISVLYKDDSSNVILKYHYNMVVRA

SEQ ID NO: 8162 - protein, 40 aa, Artificial Sequence
  Non-cyclic GFR-binding peptide
  MOD_RES (3)..(4)..(38)..(40): Xaa is C or S
  MOD_RES (18)..(19)..(20)..(21)..(22): Xaa is A or G
  MOD_RES (23)..(24)..(25)..(26): Xaa is A or G or absent
KPXXAPTKLSPISVLYKXXXXXXXXXLKYHYNMVVRSXGX

SEQ ID NO: 8163 - protein, 36 aa, Artificial Sequence
  Non-cyclic GFR-binding peptide
  MOD_RES (35)..(35): Xaa is C or S
  MOD_RES (14)..(15)..(16)..(17)..(18): Xaa is A or G
  MOD_RES (19)..(20)..(21)..(22): Xaa is A or G or absent
TQVQLSATSVLYYXXXXXXXXXLRKHRTLEDHLAXK

SEQ ID NO: 8164 - protein, 35 aa, Artificial Sequence
  Non-cyclic GFR-binding peptide
  MOD_RES (32)..(34): Xaa is C or S
VPTELNAISMLYFDENEKVVLKKYRDMVVEGXGXR

SEQ ID NO: 8165 - protein, 39 aa, Artificial Sequence
  Non-cyclic GFR-binding peptide
  MOD_RES (2)..(3)..(36)..(38): Xaa is C or S
  MOD_RES (17)..(18)..(19)..(20)..(21): Xaa is A or G
  MOD_RES (22)..(23)..(24)..(25): Xaa is A or G or absent
PXXVPQDLSPISILYKXXXXXXXXXLKYHYMVVKSXKXS

SEQ ID NO: 8166 - protein, 38 aa, Artificial Sequence
  Non-cyclic GFR-binding peptide
  MOD_RES (3)..(4)..(35)..(37): Xaa is C or S
SPXXVSQDLSATSILYYIGKTPKILRKHRMIVKSXKXS

SEQ ID NO: 8167 - protein, 36 aa, Artificial Sequence
  Non-cyclic GFR-binding peptide
  MOD_RES (5)..(6): Xaa is C or S
SAAPXXVPQALNAISILYFVGRKPKVLKKYRMIVRS

SEQ ID NO: 8168 - protein, 41 aa, Artificial Sequence
  Non-cyclic GFR-binding peptide
  MOD_RES (4)..(5)..(38)..(40): Xaa is C or S
  MOD_RES (19)..(20)..(21)..(22)..(23): Xaa is A or G
  MOD_RES (24)..(25)..(26)..(27): Xaa is A or G or absent
AAPXXVPQALNAISILYFXXXXXXXXXLKKYRMIVRSXKXS

SEQ ID NO: 8169 - protein, 38 aa, Artificial Sequence
  Non-cyclic GFR-binding peptide
  MOD_RES (4)..(5)..(37): Xaa is C or S
PKPXXAPTQLSATSVLYYDDSSNVILRKHRNMVVRAXG

SEQ ID NO: 8170 - protein, 33 aa, Artificial Sequence
  Non-cyclic GFR-binding peptide
  MOD_RES (1)..(2): Xaa is C or S
XXAPTQLSPISVLYKDDSSNVILKYHYNMVVRA

SEQ ID NO: 8171 - protein, 31 aa, Artificial Sequence
  Non-cyclic GFR-binding peptide
  MOD_RES (1)..(1): Xaa is C or S
XAPTQLSPISVLYKDDSSNVILKYHYNMVVR

SEQ ID NO: 8172 - protein, 44 aa, Artificial Sequence
  Non-cyclic GFR-binding peptide
  MOD_RES (5)..(6)..(41)..(43): Xaa is C or S
  MOD_RES (20)..(21)..(22)..(23)..(24): Xaa is A or G
  MOD_RES (25)..(26)..(27)..(28): Xaa is A or G or absent
VGKAXXVPTKLNAISVLYFXXXXXXXXXLKKYREGMSVAEXGXR

SEQ ID NO: 8173 - protein, 39 aa, Artificial Sequence
  Non-cyclic GFR-binding peptide
  MOD_RES (3)..(4)..(36)..(38): Xaa is C or S
KAXXAPTKLNAISVLYFDSSNNVILKKYRNMVVKAXGXH

SEQ ID NO: 8174 - protein, 44 aa, Artificial Sequence
  Non-cyclic GFR-binding peptide
  MOD_RES (6)..(7)..(41)..(43): Xaa is C or S
  MOD_RES (21)..(22)..(23)..(24)..(25): Xaa is A or G
  MOD_RES (26)..(27)..(28)..(29): Xaa is A or G or absent
AVPKAXXAPTKLSPISVLYKXXXXXXXXXLKYHYNMVVKAXGXH

SEQ ID NO: 8175 - protein, 42 aa, Artificial Sequence
  Non-cyclic GFR-binding peptide
  MOD_RES (6)..(7)..(41): Xaa is C or S
  MOD_RES (21)..(22)..(23)..(24)..(25): Xaa is A or G
  MOD_RES (26)..(27)..(28)..(29): Xaa is A or G or absent
YVPKPXXAPTKLSAISVLYLXXXXXXXXXLKNYQNMVVRSXG

SEQ ID NO: 8176 - protein, 38 aa, Artificial Sequence
  Non-cyclic GFR-binding peptide
  MOD_RES (5)..(6)..(38): Xaa is C or S
IPKAXXVPTELNAISMLYFDENEKVVLKKYRDMVVEGX

SEQ ID NO: 8177 - protein, 32 aa, Artificial Sequence
  Non-cyclic GFR-binding peptide
  MOD_RES (31)..(31): Xaa is C or S
VPQDLNAISILYFVGRTPKVLKKYRMVVKSXK

SEQ ID NO: 8178 - protein, 42 aa, Artificial Sequence
  Non-cyclic GFR-binding peptide
  MOD_RES (4)..(41): Xaa is C or S
  MOD_RES (20)..(21)..(22)..(23)..(24): Xaa is A or G
  MOD_RES (25)..(26)..(27)..(28): Xaa is A or G or absent
NVQXRPTQVQLSPISVLYKXXXXXXXXXLKYHYTLEDHLAXK

SEQ ID NO: 8179 - protein, 38 aa, Artificial Sequence
  Non-cyclic GFR-binding peptide
  MOD_RES (5)..(6)..(37): Xaa is C or S
SASPXXVSQDLSPISILYKIGKTPKILKYHYMIVKSXK

SEQ ID NO: 8180 - protein, 42 aa, Artificial Sequence
  Non-cyclic GFR-binding peptide
  MOD_RES (4)..(5)..(39)..(41): Xaa is C or S
  MOD_RES (19)..(20)..(21)..(22)..(23): Xaa is A or G
  MOD_RES (24)..(25)..(26)..(27): Xaa is A or G or absent
PKAXXVPTELSPISMLYKXXXXXXXXXLKYHYDMVVEGXGXR

SEQ ID NO: 8181 - protein, 40 aa, Artificial Sequence
  Non-cyclic GFR-binding peptide
  MOD_RES (6)..(40): Xaa is C or S
  MOD_RES (20)..(21)..(22)..(23)..(24): Xaa is A or G
  MOD_RES (25)..(26)..(27)..(28): Xaa is A or G or absent
VTKPTXAPTKLSATSVLYYXXXXXXXXXLRKHRNMVVRSX

SEQ ID NO: 8182 - protein, 39 aa, Artificial Sequence
  Non-cyclic GFR-binding peptide
  MOD_RES (36)..(38): Xaa is C or S
PTQVQLSPISVLYKEIVRKKPIFLKYHYTLEDHLAXKXE

SEQ ID NO: 8183 - protein, 35 aa, Artificial Sequence
  Non-cyclic GFR-binding peptide
  MOD_RES (3)..(3): Xaa is C or S
  MOD_RES (17)..(18)..(19)..(20)..(21): Xaa is A or G
  MOD_RES (22)..(23)..(24)..(25): Xaa is A or G or absent
PTXAPTKLSAISVLYLXXXXXXXXXLKNYQNMVVR

SEQ ID NO: 8184 - protein, 35 aa, Artificial Sequence
  Non-cyclic GFR-binding peptide
  MOD_RES (35)..(35): Xaa is C or S
TQVQLSATSVLYYEIVRKKPIFLRKHRTLEDHLAX

SEQ ID NO: 8185 - protein, 39 aa, Artificial Sequence
  Non-cyclic GFR-binding peptide
  MOD_RES (1)..(36)..(38): Xaa is C or S
  MOD_RES (15)..(16)..(17)..(18)..(19): Xaa is A or G
  MOD_RES (20)..(21)..(22)..(23): Xaa is A or G or absent
XVPTKLNAISVLYFXXXXXXXXXLKKYREGMSVAEXGXR

SEQ ID NO: 8186 - protein, 33 aa, Artificial Sequence
  Non-cyclic GFR-binding peptide
  MOD_RES (1)..(33): Xaa is C or S
XAPTKLSPISVLYKDSSNNVILKYHYNMVVKAX

SEQ ID NO: 8187 - protein, 30 aa, Artificial Sequence
  Non-cyclic GFR-binding peptide
VPTELSATSMLYYDENEKVVLRKHRDMVVE

SEQ ID NO: 8188 - protein, 38 aa, Artificial Sequence
  Non-cyclic GFR-binding peptide
  MOD_RES (36)..(38): Xaa is C or S
PTQVQLSPISVLYKEIVRKKPIFLKYHYTLEDHLAXKX

SEQ ID NO: 8189 - protein, 35 aa, Artificial Sequence
  Non-cyclic GFR-binding peptide
  MOD_RES (1)..(34): Xaa is C or S
  MOD_RES (15)..(16)..(17)..(18)..(19): Xaa is A or G
  MOD_RES (20)..(21)..(22)..(23): Xaa is A or G or absent
XVPQALSAISILYLXXXXXXXXXLKNYQMIVRSXK

SEQ ID NO: 8190 - protein, 39 aa, Artificial Sequence
  Non-cyclic GFR-binding peptide
  MOD_RES (4)..(5)..(39): Xaa is C or S
  MOD_RES (19)..(20)..(21)..(22)..(23): Xaa is A or G
  MOD_RES (24)..(25)..(26)..(27): Xaa is A or G or absent
PKPXXAPTQLSATSVLYYXXXXXXXXXLRKHRNMVVRAX

SEQ ID NO: 8191 - protein, 33 aa, Artificial Sequence
  Non-cyclic GFR-binding peptide
  MOD_RES (1)..(33): Xaa is C or S
XVPTELNAISMLYFDEYDKVVLKKYREMVVEGX

SEQ ID NO: 8192 - protein, 41 aa, Artificial Sequence
  Non-cyclic GFR-binding peptide
  MOD_RES (4)..(5)..(39)..(41): Xaa is C or S
  MOD_RES (19)..(20)..(21)..(22)..(23): Xaa is A or G
  MOD_RES (24)..(25)..(26)..(27): Xaa is A or G or absent
PKAXXAPTKLSPISVLYKXXXXXXXXXLKYHYNMVVKAXGX

SEQ ID NO: 8193 - protein, 40 aa, Artificial Sequence
  Non-cyclic GFR-binding peptide
  MOD_RES (6)..(7)..(38)..(40): Xaa is C or S
ASAAPXXVPQALSATSILYYVGRKPKVLRKHRMIVRSXKX

SEQ ID NO: 8194 - protein, 39 aa, Artificial Sequence
  Non-cyclic GFR-binding peptide
  MOD_RES (7)..(39): Xaa is C or S
HVTKPTXAPTKLSATSVLYYDDSSNVILRKHRNMVVRSX

SEQ ID NO: 8195 - protein, 39 aa, Artificial Sequence
  Non-cyclic GFR-binding peptide
  MOD_RES (36)..(38): Xaa is C or S
PTQVQLSAISVLYLEIVRKKPIFLKNYQTLEDHLAXKXE

SEQ ID NO: 8196 - protein, 31 aa, Artificial Sequence
  Non-cyclic GFR-binding peptide
  MOD_RES (1)..(1): Xaa is C or S
XVPQDLNAISILYFVGRTPKVLKKYRMVVKS

SEQ ID NO: 8197 - protein, 40 aa, Artificial Sequence
  Non-cyclic GFR-binding peptide
  MOD_RES (37)..(39): Xaa is C or S
RPTQVQLSATSVLYYEIVRKKPIFLRKHRTLEDHLAXKXE

SEQ ID NO: 8198 - protein, 38 aa, Artificial Sequence
  Non-cyclic GFR-binding peptide
  MOD_RES (3)..(4)..(36)..(38): Xaa is C or S
KAXXVPTELNAISMLYFDEYDKVVLKKYREMVVEGXGX

SEQ ID NO: 8199 - protein, 42 aa, Artificial Sequence
  Non-cyclic GFR-binding peptide
  MOD_RES (5)..(6)..(40)..(42): Xaa is C or S
  MOD_RES (20)..(21)..(22)..(23)..(24): Xaa is A or G
  MOD_RES (25)..(26)..(27)..(28): Xaa is A or G or absent
VPKPXXAPTKLSAISVLYLXXXXXXXXXLKNYQNMVVRSXGX

SEQ ID NO: 8200 - protein, 40 aa, Artificial Sequence
  Non-cyclic GFR-binding peptide
  MOD_RES (2)..(39): Xaa is C or S
  MOD_RES (18)..(19)..(20)..(21)..(22): Xaa is A or G
  MOD_RES (23)..(24)..(25)..(26): Xaa is A or G or absent
QXRPTQVQLSAISVLYLXXXXXXXXXLKNYQTLEDHLAXK

SEQ ID NO: 8201 - protein, 39 aa, Artificial Sequence
  Non-cyclic GFR-binding peptide
  MOD_RES (4)..(36)..(38): Xaa is C or S
KPTXAPTKLSPISVLYKDDSSNVILKYHYNMVVRSXGXH

SEQ ID NO: 8202 - protein, 32 aa, Artificial Sequence
  Non-cyclic GFR-binding peptide
  MOD_RES (1)..(2): Xaa is C or S
XXAPTKLSPISVLYKDDSSNVILKYHYNMVVR

SEQ ID NO: 8203 - protein, 33 aa, Artificial Sequence
  Non-cyclic GFR-binding peptide
  MOD_RES (1)..(2): Xaa is C or S
XXAPTKLNAISVLYFDSSNNVILKKYRNMVVKA

SEQ ID NO: 8204 - protein, 32 aa, Artificial Sequence
  Non-cyclic GFR-binding peptide
  MOD_RES (1)..(2): Xaa is C or S
XXVPQDLNAISILYFVGRTPKVLKKYRMVVKS

SEQ ID NO: 8205 - protein, 39 aa, Artificial Sequence
  Non-cyclic GFR-binding peptide
  MOD_RES (4)..(5)..(37)..(39): Xaa is C or S
PKAXXVPTELSPISMLYKDEYDKVVLKYHYEMVVEGXGX

SEQ ID NO: 8206 - protein, 34 aa, Artificial Sequence
  Non-cyclic GFR-binding peptide
  MOD_RES (1)..(32)..(34): Xaa is C or S
XVSQDLSAISILYLIGKTPKILKNYQMIVKSXKX

SEQ ID NO: 8207 - protein, 33 aa, Artificial Sequence
  Non-cyclic GFR-binding peptide
  MOD_RES (2)..(3): Xaa is C or S
PXXVSQDLSPISILYKIGKTPKILKYHYMIVKS

SEQ ID NO: 8208 - protein, 39 aa, Artificial Sequence
  Non-cyclic GFR-binding peptide
  MOD_RES (7)..(7): Xaa is C or S
  MOD_RES (21)..(22)..(23)..(24)..(25): Xaa is A or G
  MOD_RES (26)..(27)..(28)..(29): Xaa is A or G or absent
HVTKPTXAPTKLSAISVLYLXXXXXXXXXLKNYQNMVVR

SEQ ID NO: 8209 - protein, 45 aa, Artificial Sequence
  Non-cyclic GFR-binding peptide
  MOD_RES (6)..(7)..(42)..(44): Xaa is C or S
  MOD_RES (21)..(22)..(23)..(24)..(25): Xaa is A or G
  MOD_RES (26)..(27)..(28)..(29): Xaa is A or G or absent
KVGKAXXVPTKLSAISVLYLXXXXXXXXXLKNYQEGMSVAEXGXR

SEQ ID NO: 8210 - protein, 37 aa, Artificial Sequence
  Non-cyclic GFR-binding peptide
  MOD_RES (6)..(7): Xaa is C or S
ASASPXXVPQDLSAISILYLVGRTPKVLKNYQMVVKS

SEQ ID NO: 8211 - protein, 40 aa, Artificial Sequence
  Non-cyclic GFR-binding peptide
  MOD_RES (5)..(6)..(40): Xaa is C or S
  MOD_RES (20)..(21)..(22)..(23)..(24): Xaa is A or G
  MOD_RES (25)..(26)..(27)..(28): Xaa is A or G or absent
IPKAXXVPTELNAISMLYFXXXXXXXXXLKKYRDMVVEGX

SEQ ID NO: 8212 - protein, 41 aa, Artificial Sequence
  Non-cyclic GFR-binding peptide
  MOD_RES (3)..(4)..(38)..(40): Xaa is C or S
  MOD_RES (18)..(19)..(20)..(21)..(22): Xaa is A or G
  MOD_RES (23)..(24)..(25)..(26): Xaa is A or G or absent
KAXXVPTELSATSMLYYXXXXXXXXXLRKHREMVVEGXGXR

SEQ ID NO: 8213 - protein, 34 aa, Artificial Sequence
  Non-cyclic GFR-binding peptide
  MOD_RES (1)..(2): Xaa is C or S
  MOD_RES (16)..(17)..(18)..(19)..(20): Xaa is A or G
  MOD_RES (21)..(22)..(23)..(24): Xaa is A or G or absent
XXVSQDLSATSILYYXXXXXXXXXLRKHRMIVKS

SEQ ID NO: 8214 - protein, 36 aa, Artificial Sequence
  Non-cyclic GFR-binding peptide
  MOD_RES (3)..(4): Xaa is C or S
  MOD_RES (18)..(19)..(20)..(21)..(22): Xaa is A or G
  MOD_RES (23)..(24)..(25)..(26): Xaa is A or G or absent
KAXXVPTELSPISMLYKXXXXXXXXXLKYHYDMVVE

SEQ ID NO: 8215 - protein, 35 aa, Artificial Sequence
  Non-cyclic GFR-binding peptide
  MOD_RES (3)..(4): Xaa is C or S
KAXXVPTELSPISMLYKDENEKVVLKYHYDMVVEG

SEQ ID NO: 8216 - protein, 35 aa, Artificial Sequence
  Non-cyclic GFR-binding peptide
  MOD_RES (4)..(5): Xaa is C or S
PKPXXAPTQLSPISVLYKDDSSNVILKYHYNMVVR

SEQ ID NO: 8217 - protein, 37 aa, Artificial Sequence
  Non-cyclic GFR-binding peptide
  MOD_RES (2)..(3)..(35)..(37): Xaa is C or S
PXXAPTQLSATSVLYYDDSSNVILRKHRNMVVRAXGX

SEQ ID NO: 8218 - protein, 41 aa, Artificial Sequence
  Non-cyclic GFR-binding peptide
  MOD_RES (6)..(7)..(41): Xaa is C or S
  MOD_RES (21)..(22)..(23)..(24)..(25): Xaa is A or G
  MOD_RES (26)..(27)..(28)..(29): Xaa is A or G or absent
AVPKAXXAPTKLNAISVLYFXXXXXXXXXLKKYRNMVVKAX

SEQ ID NO: 8219 - protein, 37 aa, Artificial Sequence
  Non-cyclic GFR-binding peptide
  MOD_RES (3)..(37): Xaa is C or S
  MOD_RES (17)..(18)..(19)..(20)..(21): Xaa is A or G
  MOD_RES (22)..(23)..(24)..(25): Xaa is A or G or absent
PTXAPTKLSATSVLYYXXXXXXXXXLRKHRNMVVRSX

SEQ ID NO: 8220 - protein, 34 aa, Artificial Sequence
  Non-cyclic GFR-binding peptide
  MOD_RES (1)..(2): Xaa is C or S
  MOD_RES (16)..(17)..(18)..(19)..(20): Xaa is A or G
  MOD_RES (21)..(22)..(23)..(24): Xaa is A or G or absent
XXAPTKLSATSVLYYXXXXXXXXXLRKHRNMVVR

SEQ ID NO: 8221 - protein, 33 aa, Artificial Sequence
  Non-cyclic GFR-binding peptide
  MOD_RES (2)..(3): Xaa is C or S
PXXVSQDLSAISILYLIGKTPKILKNYQMIVKS

SEQ ID NO: 8222 - protein, 35 aa, Artificial Sequence
  Non-cyclic GFR-binding peptide
  MOD_RES (2)..(3): Xaa is C or S
AXXVPTKLNAISVLYFDDMGVPTLKKYREGMSVAE

SEQ ID NO: 8223 - protein, 33 aa, Artificial Sequence
  Non-cyclic GFR-binding peptide
  MOD_RES (1)..(33): Xaa is C or S
XAPTKLNAISVLYFDSSNNVILKKYRNMVVKAX

SEQ ID NO: 8224 - protein, 40 aa, Artificial Sequence
  Non-cyclic GFR-binding peptide
  MOD_RES (6)..(7): Xaa is C or S
  MOD_RES (21)..(22)..(23)..(24)..(25): Xaa is A or G
  MOD_RES (26)..(27)..(28)..(29): Xaa is A or G or absent
AVPKAXXAPTKLNAISVLYFXXXXXXXXXLKKYRNMVVKA

SEQ ID NO: 8225 - protein, 36 aa, Artificial Sequence
  Non-cyclic GFR-binding peptide
  MOD_RES (2)..(34)..(36): Xaa is C or S
TXAPTKLSAISVLYLDDSSNVILKNYQNMVVRSXGX

SEQ ID NO: 8226 - protein, 36 aa, Artificial Sequence
  Non-cyclic GFR-binding peptide
  MOD_RES (34)..(36): Xaa is C or S
  MOD_RES (14)..(15)..(16)..(17)..(18): Xaa is A or G
  MOD_RES (19)..(20)..(21)..(22): Xaa is A or G or absent
APTKLSPISVLYKXXXXXXXXXLKYHYNMVVKAXGX

SEQ ID NO: 8227 - protein, 36 aa, Artificial Sequence
  Non-cyclic GFR-binding peptide
  MOD_RES (1)..(34)..(36): Xaa is C or S
  MOD_RES (15)..(16)..(17)..(18)..(19): Xaa is A or G
  MOD_RES (20)..(21)..(22)..(23): Xaa is A or G or absent
XVPQDLNAISILYFXXXXXXXXXLKKYRMVVKSXKX

SEQ ID NO: 8228 - protein, 37 aa, Artificial Sequence
  Non-cyclic GFR-binding peptide
  MOD_RES (35)..(37): Xaa is C or S
  MOD_RES (14)..(15)..(16)..(17)..(18): Xaa is A or G
  MOD_RES (19)..(20)..(21)..(22): Xaa is A or G or absent
TQVQLNAISVLYFXXXXXXXXXLKKYRTLEDHLAXKX

SEQ ID NO: 8229 - protein, 36 aa, Artificial Sequence
  Non-cyclic GFR-binding peptide
  MOD_RES (33)..(35): Xaa is C or S
  MOD_RES (14)..(15)..(16)..(17)..(18): Xaa is A or G
  MOD_RES (19)..(20)..(21)..(22): Xaa is A or G or absent
VSQDLNAISILYFXXXXXXXXXLKKYRMIVKSXKXS

SEQ ID NO: 8230 - protein, 39 aa, Artificial Sequence
  Non-cyclic GFR-binding peptide
  MOD_RES (3)..(4)..(37)..(39): Xaa is C or S
  MOD_RES (18)..(19)..(20)..(21)..(22): Xaa is A or G
  MOD_RES (23)..(24)..(25)..(26): Xaa is A or G or absent
SPXXVPQDLNAISILYFXXXXXXXXXLKKYRMVVKSXKX

SEQ ID NO: 8231 - protein, 39 aa, Artificial Sequence
  Non-cyclic GFR-binding peptide
  MOD_RES (3)..(37)..(39): Xaa is C or S
  MOD_RES (17)..(18)..(19)..(20)..(21): Xaa is A or G
  MOD_RES (22)..(23)..(24)..(25): Xaa is A or G or absent
PTXAPTKLSAISVLYLXXXXXXXXXLKNYQNMVVRSXGX

SEQ ID NO: 8232 - protein, 41 aa, Artificial Sequence
  Non-cyclic GFR-binding peptide
  MOD_RES (6)..(38)..(40): Xaa is C or S
VTKPTXAPTKLSAISVLYLDDSSNVILKNYQNMVVRSXGXH

SEQ ID NO: 8233 - protein, 39 aa, Artificial Sequence
  Non-cyclic GFR-binding peptide
  MOD_RES (5)..(6)..(38): Xaa is C or S
VPKPXXAPTKLSAISVLYLDDSSNVILKNYQNMVVRSXG

SEQ ID NO: 8234 - protein, 34 aa, Artificial Sequence
  Non-cyclic GFR-binding peptide
  MOD_RES (34)..(34): Xaa is C or S
  MOD_RES (14)..(15)..(16)..(17)..(18): Xaa is A or G
  MOD_RES (19)..(20)..(21)..(22): Xaa is A or G or absent
VPTELSPISMLYKXXXXXXXXXLKYHYDMVVEGX

SEQ ID NO: 8235 - protein, 32 aa, Artificial Sequence
  Non-cyclic GFR-binding peptide
  MOD_RES (14)..(15)..(16)..(17)..(18): Xaa is A or G
  MOD_RES (19)..(20)..(21)..(22): Xaa is A or G or absent
VPQDLSATSILYYXXXXXXXXXLRKHRMVVKS

SEQ ID NO: 8236 - protein, 37 aa, Artificial Sequence
  Non-cyclic GFR-binding peptide
  MOD_RES (34)..(36): Xaa is C or S
  MOD_RES (14)..(15)..(16)..(17)..(18): Xaa is A or G
  MOD_RES (19)..(20)..(21)..(22): Xaa is A or G or absent
APTKLSAISVLYLXXXXXXXXXLKNYQNMVVKAXGXH

SEQ ID NO: 8237 - protein, 35 aa, Artificial Sequence
  Non-cyclic GFR-binding peptide
  MOD_RES (1)..(34): Xaa is C or S
  MOD_RES (15)..(16)..(17)..(18)..(19): Xaa is A or G
  MOD_RES (20)..(21)..(22)..(23): Xaa is A or G or absent
XVPQDLSPISILYKXXXXXXXXXLKYHYMVVKSXK

SEQ ID NO: 8238 - protein, 40 aa, Artificial Sequence
  Non-cyclic GFR-binding peptide
  MOD_RES (5)..(6)..(38)..(40): Xaa is C or S
VPKPXXAPTKLSATSVLYYDDSSNVILRKHRNMVVRSXGX

SEQ ID NO: 8239 - protein, 40 aa, Artificial Sequence
  Non-cyclic GFR-binding peptide
  MOD_RES (5)..(6)..(37)..(39): Xaa is C or S
SASPXXVSQDLSAISILYLIGKTPKILKNYQMIVKSXKXS

SEQ ID NO: 8240 - protein, 38 aa, Artificial Sequence
  Non-cyclic GFR-binding peptide
  MOD_RES (35)..(37): Xaa is C or S
  MOD_RES (14)..(15)..(16)..(17)..(18): Xaa is A or G
  MOD_RES (19)..(20)..(21)..(22): Xaa is A or G or absent
TQVQLSPISVLYKXXXXXXXXXLKYHYTLEDHLAXKXE

SEQ ID NO: 8241 - protein, 43 aa, Artificial Sequence
  Non-cyclic GFR-binding peptide
  MOD_RES (5)..(6)..(40)..(42): Xaa is C or S
  MOD_RES (20)..(21)..(22)..(23)..(24): Xaa is A or G
  MOD_RES (25)..(26)..(27)..(28): Xaa is A or G or absent
IPKAXXVPTELNAISMLYFXXXXXXXXXLKKYRDMVVEGXGXR

SEQ ID NO: 8242 - protein, 40 aa, Artificial Sequence
  Non-cyclic GFR-binding peptide
  MOD_RES (6)..(7): Xaa is C or S
  MOD_RES (21)..(22)..(23)..(24)..(25): Xaa is A or G
  MOD_RES (26)..(27)..(28)..(29): Xaa is A or G or absent
TVPKPXXAPTQLSAISVLYLXXXXXXXXXLKNYQNMVVRA

SEQ ID NO: 8243 - protein, 35 aa, Artificial Sequence
  Non-cyclic GFR-binding peptide
  MOD_RES (4)..(5): Xaa is C or S
PKPXXAPTQLSAISVLYLDDSSNVILKNYQNMVVR

SEQ ID NO: 8244 - protein, 42 aa, Artificial Sequence
  Non-cyclic GFR-binding peptide
  MOD_RES (6)..(7)..(41): Xaa is C or S
  MOD_RES (21)..(22)..(23)..(24)..(25): Xaa is A or G
  MOD_RES (26)..(27)..(28)..(29): Xaa is A or G or absent
SIPKAXXVPTELNAISMLYFXXXXXXXXXLKKYREMVVEGXG

SEQ ID NO: 8245 - protein, 43 aa, Artificial Sequence
  Non-cyclic GFR-binding peptide
  MOD_RES (7)..(41)..(43): Xaa is C or S
  MOD_RES (21)..(22)..(23)..(24)..(25): Xaa is A or G
  MOD_RES (26)..(27)..(28)..(29): Xaa is A or G or absent
HVTKPTXAPTKLSATSVLYYXXXXXXXXXLRKHRNMVVRSXGX

SEQ ID NO: 8246 - protein, 36 aa, Artificial Sequence
  Non-cyclic GFR-binding peptide
  MOD_RES (5)..(6): Xaa is C or S
SAAPXXVPQALSATSILYYVGRKPKVLRKHRMIVRS

SEQ ID NO: 8247 - protein, 41 aa, Artificial Sequence
  Non-cyclic GFR-binding peptide
  MOD_RES (4)..(5)..(40): Xaa is C or S
  MOD_RES (19)..(20)..(21)..(22)..(23): Xaa is A or G
  MOD_RES (24)..(25)..(26)..(27): Xaa is A or G or absent
GKAXXVPTKLSATSVLYYXXXXXXXXXLRKHREGMSVAEXG

SEQ ID NO: 8248 - protein, 40 aa, Artificial Sequence
  Non-cyclic GFR-binding peptide
  MOD_RES (5)..(6)..(40): Xaa is C or S
  MOD_RES (20)..(21)..(22)..(23)..(24): Xaa is A or G
  MOD_RES (25)..(26)..(27)..(28): Xaa is A or G or absent
IPKAXXVPTELSPISMLYKXXXXXXXXXLKYHYEMVVEGX

SEQ ID NO: 8249 - protein, 32 aa, Artificial Sequence
  Non-cyclic GFR-binding peptide
  MOD_RES (14)..(15)..(16)..(17)..(18): Xaa is A or G
  MOD_RES (19)..(20)..(21)..(22): Xaa is A or G or absent
TQVQLSAISVLYLXXXXXXXXXLKNYQTLEDH

SEQ ID NO: 8250 - protein, 40 aa, Artificial Sequence
  Non-cyclic GFR-binding peptide
  MOD_RES (1)..(38)..(40): Xaa is C or S
XRPTQVQLSPISVLYKEIVRKKPIFLKYHYTLEDHLAXKX

SEQ ID NO: 8251 - protein, 37 aa, Artificial Sequence
  Non-cyclic GFR-binding peptide
  MOD_RES (2)..(3)..(34)..(36): Xaa is C or S
PXXVPQALSPISILYKVGRKPKVLKYHYMIVRSXKXS

SEQ ID NO: 8252 - protein, 43 aa, Artificial Sequence
  Non-cyclic GFR-binding peptide
  MOD_RES (5)..(6)..(40)..(42): Xaa is C or S
  MOD_RES (20)..(21)..(22)..(23)..(24): Xaa is A or G
  MOD_RES (25)..(26)..(27)..(28): Xaa is A or G or absent
VPKPXXAPTQLSATSVLYYXXXXXXXXXLRKHRNMVVRAXGXH

SEQ ID NO: 8253 - protein, 41 aa, Artificial Sequence
  Non-cyclic GFR-binding peptide
  MOD_RES (3)..(4)..(38)..(40): Xaa is C or S
  MOD_RES (18)..(19)..(20)..(21)..(22): Xaa is A or G
  MOD_RES (23)..(24)..(25)..(26): Xaa is A or G or absent
KPXXAPTQLSATSVLYYXXXXXXXXXLRKHRNMVVRAXGXH

SEQ ID NO: 8254 - protein, 39 aa, Artificial Sequence
  Non-cyclic GFR-binding peptide
  MOD_RES (1)..(2)..(36)..(38): Xaa is C or S
  MOD_RES (16)..(17)..(18)..(19)..(20): Xaa is A or G
  MOD_RES (21)..(22)..(23)..(24): Xaa is A or G or absent
XXVPTELSATSMLYYXXXXXXXXXLRKHREMVVEGXGXR

SEQ ID NO: 8255 - protein, 41 aa, Artificial Sequence
  Non-cyclic GFR-binding peptide
  MOD_RES (5)..(6)..(40): Xaa is C or S
  MOD_RES (20)..(21)..(22)..(23)..(24): Xaa is A or G
  MOD_RES (25)..(26)..(27)..(28): Xaa is A or G or absent
IPKAXXVPTELSATSMLYYXXXXXXXXXLRKHREMVVEGXG

SEQ ID NO: 8256 - protein, 35 aa, Artificial Sequence
  Non-cyclic GFR-binding peptide
  MOD_RES (3)..(4): Xaa is C or S
KAXXAPTKLSPISVLYKDSSNNVILKYHYNMVVKA

SEQ ID NO: 8257 - protein, 44 aa, Artificial Sequence
  Non-cyclic GFR-binding peptide
  MOD_RES (5)..(42)..(44): Xaa is C or S
RNVQXRPTQVQLSPISVLYKEIVRKKPIFLKYHYTLEDHLAXKX

SEQ ID NO: 8258 - protein, 39 aa, Artificial Sequence
  Non-cyclic GFR-binding peptide
  MOD_RES (3)..(4)..(37)..(39): Xaa is C or S
  MOD_RES (18)..(19)..(20)..(21)..(22): Xaa is A or G
  MOD_RES (23)..(24)..(25)..(26): Xaa is A or G or absent
SPXXVSQDLNAISILYFXXXXXXXXXLKKYRMIVKSXKX

SEQ ID NO: 8259 - protein, 38 aa, Artificial Sequence
  Non-cyclic GFR-binding peptide
  MOD_RES (3)..(4)..(37): Xaa is C or S
  MOD_RES (18)..(19)..(20)..(21)..(22): Xaa is A or G
  MOD_RES (23)..(24)..(25)..(26): Xaa is A or G or absent
APXXVPQALNAISILYFXXXXXXXXXLKKYRMIVRSXK

SEQ ID NO: 8260 - protein, 35 aa, Artificial Sequence
  Non-cyclic GFR-binding peptide
  MOD_RES (1)..(35): Xaa is C or S
  MOD_RES (15)..(16)..(17)..(18)..(19): Xaa is A or G
  MOD_RES (20)..(21)..(22)..(23): Xaa is A or G or absent
XVPTELNAISMLYFXXXXXXXXXLKKYRDMVVEGX

SEQ ID NO: 8261 - protein, 39 aa, Artificial Sequence
  Non-cyclic GFR-binding peptide
  MOD_RES (4)..(5)..(36)..(38): Xaa is C or S
ASPXXVPQDLSPISILYKVGRTPKVLKYHYMVVKSXKXS

SEQ ID NO: 8262 - protein, 38 aa, Artificial Sequence
  Non-cyclic GFR-binding peptide
  MOD_RES (2)..(3)..(37): Xaa is C or S
  MOD_RES (17)..(18)..(19)..(20)..(21): Xaa is A or G
  MOD_RES (22)..(23)..(24)..(25): Xaa is A or G or absent
PXXAPTKLSPISVLYKXXXXXXXXXLKYHYNMVVRSXG

SEQ ID NO: 8263 - protein, 37 aa, Artificial Sequence
  Non-cyclic GFR-binding peptide
  MOD_RES (1)..(2)..(34)..(36): Xaa is C or S
XXAPTKLSAISVLYLDDSSNVILKNYQNMVVRSXGXH

SEQ ID NO: 8264 - protein, 36 aa, Artificial Sequence
  Non-cyclic GFR-binding peptide
  MOD_RES (1)..(34)..(36): Xaa is C or S
  MOD_RES (15)..(16)..(17)..(18)..(19): Xaa is A or G
  MOD_RES (20)..(21)..(22)..(23): Xaa is A or G or absent
XVSQDLSPISILYKXXXXXXXXXLKYHYMIVKSXKX

SEQ ID NO: 8265 - protein, 39 aa, Artificial Sequence
  Non-cyclic GFR-binding peptide
  MOD_RES (6)..(7): Xaa is C or S
  MOD_RES (21)..(22)..(23)..(24)..(25): Xaa is A or G
  MOD_RES (26)..(27)..(28)..(29): Xaa is A or G or absent
SIPKAXXVPTELSATSMLYYXXXXXXXXXLRKHREMVVE

SEQ ID NO: 8266 - protein, 41 aa, Artificial Sequence
  Non-cyclic GFR-binding peptide
  MOD_RES (2)..(39)..(41): Xaa is C or S
  MOD_RES (18)..(19)..(20)..(21)..(22): Xaa is A or G
  MOD_RES (23)..(24)..(25)..(26): Xaa is A or G or absent
QXRPTQVQLSAISVLYLXXXXXXXXXLKNYQTLEDHLAXKX

SEQ ID NO: 8267 - protein, 36 aa, Artificial Sequence
  Non-cyclic GFR-binding peptide
  MOD_RES (1)..(35): Xaa is C or S
  MOD_RES (15)..(16)..(17)..(18)..(19): Xaa is A or G
  MOD_RES (20)..(21)..(22)..(23): Xaa is A or G or absent
XAPTQLSAISVLYLXXXXXXXXXLKNYQNMVVRAXG

SEQ ID NO: 8268 - protein, 31 aa, Artificial Sequence
  Non-cyclic GFR-binding peptide
  MOD_RES (1)..(1): Xaa is C or S
XAPTKLNAISVLYFDSSNNVILKKYRNMVVK

SEQ ID NO: 8269 - protein, 44 aa, Artificial Sequence
  Non-cyclic GFR-binding peptide
  MOD_RES (5)..(6)..(41)..(43): Xaa is C or S
  MOD_RES (20)..(21)..(22)..(23)..(24): Xaa is A or G
  MOD_RES (25)..(26)..(27)..(28): Xaa is A or G or absent
VGKAXXVPTKLSAISVLYLXXXXXXXXXLKNYQEGMSVAEXGXR

SEQ ID NO: 8270 - protein, 38 aa, Artificial Sequence
  Non-cyclic GFR-binding peptide
  MOD_RES (1)..(2)..(35)..(37): Xaa is C or S
XXVPTKLSATSVLYYDDMGVPTLRKHREGMSVAEXGXR

SEQ ID NO: 8271 - protein, 41 aa, Artificial Sequence
  Non-cyclic GFR-binding peptide
  MOD_RES (6)..(7)..(39)..(41): Xaa is C or S
AVPKAXXAPTKLSAISVLYLDSSNNVILKNYQNMVVKAXGX

SEQ ID NO: 8272 - protein, 34 aa, Artificial Sequence
  Non-cyclic GFR-binding peptide
  MOD_RES (31)..(33): Xaa is C or S
VSQDLSATSILYYIGKTPKILRKHRMIVKSXKXS

SEQ ID NO: 8273 - protein, 36 aa, Artificial Sequence
  Non-cyclic GFR-binding peptide
  MOD_RES (3)..(4): Xaa is C or S
  MOD_RES (18)..(19)..(20)..(21)..(22): Xaa is A or G
  MOD_RES (23)..(24)..(25)..(26): Xaa is A or G or absent
APXXVPQALSAISILYLXXXXXXXXXLKNYQMIVRS

SEQ ID NO: 8274 - protein, 34 aa, Artificial Sequence
  Non-cyclic GFR-binding peptide
  MOD_RES (2)..(3)..(34): Xaa is C or S
PXXVPQDLSATSILYYVGRTPKVLRKHRMVVKSX

SEQ ID NO: 8275 - protein, 39 aa, Artificial Sequence
  Non-cyclic GFR-binding peptide
  MOD_RES (4)..(5)..(37)..(39): Xaa is C or S
PKAXXVPTELSPISMLYKDENEKVVLKYHYDMVVEGXGX

SEQ ID NO: 8276 - protein, 44 aa, Artificial Sequence
  Non-cyclic GFR-binding peptide
  MOD_RES (6)..(7)..(42)..(44): Xaa is C or S
  MOD_RES (21)..(22)..(23)..(24)..(25): Xaa is A or G
  MOD_RES (26)..(27)..(28)..(29): Xaa is A or G or absent
KVGKAXXVPTKLSATSVLYYXXXXXXXXXLRKHREGMSVAEXGX

SEQ ID NO: 8277 - protein, 36 aa, Artificial Sequence
  Non-cyclic GFR-binding peptide
  MOD_RES (35)..(35): Xaa is C or S
  MOD_RES (14)..(15)..(16)..(17)..(18): Xaa is A or G
  MOD_RES (19)..(20)..(21)..(22): Xaa is A or G or absent
VPTKLSATSVLYYXXXXXXXXXLRKHREGMSVAEXG

SEQ ID NO: 8278 - protein, 33 aa, Artificial Sequence
  Non-cyclic GFR-binding peptide
  MOD_RES (1)..(1): Xaa is C or S
  MOD_RES (15)..(16)..(17)..(18)..(19): Xaa is A or G
  MOD_RES (20)..(21)..(22)..(23): Xaa is A or G or absent
XAPTKLSPISVLYKXXXXXXXXXLKYHYNMVVK

SEQ ID NO: 8279 - protein, 33 aa, Artificial Sequence
  Non-cyclic GFR-binding peptide
  MOD_RES (1)..(33): Xaa is C or S
XVPTELSATSMLYYDENEKVVLRKHRDMVVEGX

SEQ ID NO: 8280 - protein, 33 aa, Artificial Sequence
  Non-cyclic GFR-binding peptide
  MOD_RES (1)..(1): Xaa is C or S
  MOD_RES (15)..(16)..(17)..(18)..(19): Xaa is A or G
  MOD_RES (20)..(21)..(22)..(23): Xaa is A or G or absent
XAPTKLSPISVLYKXXXXXXXXXLKYHYNMVVR

SEQ ID NO: 8281 - protein, 33 aa, Artificial Sequence
  Non-cyclic GFR-binding peptide
  MOD_RES (1)..(1): Xaa is C or S
  MOD_RES (15)..(16)..(17)..(18)..(19): Xaa is A or G
  MOD_RES (20)..(21)..(22)..(23): Xaa is A or G or absent
XVPQDLSATSILYYXXXXXXXXXLRKHRMVVKS

SEQ ID NO: 8282 - protein, 35 aa, Artificial Sequence
  Non-cyclic GFR-binding peptide
  MOD_RES (35)..(35): Xaa is C or S
  MOD_RES (14)..(15)..(16)..(17)..(18): Xaa is A or G
  MOD_RES (19)..(20)..(21)..(22): Xaa is A or G or absent
TQVQLSAISVLYLXXXXXXXXXLKNYQTLEDHLAX

SEQ ID NO: 8283 - protein, 44 aa, Artificial Sequence
  Non-cyclic GFR-binding peptide
  MOD_RES (4)..(41)..(43): Xaa is C or S
NVQXRPTQVQLSPISVLYKEIVRKKPIFLKYHYTLEDHLAXKXE

SEQ ID NO: 8284 - protein, 32 aa, Artificial Sequence
  Non-cyclic GFR-binding peptide
  MOD_RES (1)..(2): Xaa is C or S
XXAPTKLSAISVLYLDDSSNVILKNYQNMVVR

SEQ ID NO: 8285 - protein, 40 aa, Artificial Sequence
  Non-cyclic GFR-binding peptide
  MOD_RES (6)..(7)..(40): Xaa is C or S
  MOD_RES (21)..(22)..(23)..(24)..(25): Xaa is A or G
  MOD_RES (26)..(27)..(28)..(29): Xaa is A or G or absent
ASAAPXXVPQALSPISILYKXXXXXXXXXLKYHYMIVRSX

SEQ ID NO: 8286 - protein, 39 aa, Artificial Sequence
  Non-cyclic GFR-binding peptide
  MOD_RES (1)..(38): Xaa is C or S
XRPTQVQLSPISVLYKEIVRKKPIFLKYHYTLEDHLAXK

SEQ ID NO: 8287 - protein, 35 aa, Artificial Sequence
  Non-cyclic GFR-binding peptide
  MOD_RES (33)..(35): Xaa is C or S
  MOD_RES (14)..(15)..(16)..(17)..(18): Xaa is A or G
  MOD_RES (19)..(20)..(21)..(22): Xaa is A or G or absent
VSQDLNAISILYFXXXXXXXXXLKKYRMIVKSXKX

SEQ ID NO: 8288 - protein, 34 aa, Artificial Sequence
  Non-cyclic GFR-binding peptide
  MOD_RES (1)..(33): Xaa is C or S
XVPTELSPISMLYKDEYDKVVLKYHYEMVVEGXG

SEQ ID NO: 8289 - protein, 33 aa, Artificial Sequence
  Non-cyclic GFR-binding peptide
  MOD_RES (1)..(2)..(33): Xaa is C or S
XXVPQDLSATSILYYVGRTPKVLRKHRMVVKSX

SEQ ID NO: 8290 - protein, 33 aa, Artificial Sequence
  Non-cyclic GFR-binding peptide
  MOD_RES (14)..(15)..(16)..(17)..(18): Xaa is A or G
  MOD_RES (19)..(20)..(21)..(22): Xaa is A or G or absent
VPTELNAISMLYFXXXXXXXXXLKKYREMVVEG

SEQ ID NO: 8291 - protein, 34 aa, Artificial Sequence
  Non-cyclic GFR-binding peptide
  MOD_RES (1)..(33): Xaa is C or S
XAPTKLSAISVLYLDSSNNVILKNYQNMVVKAXG

SEQ ID NO: 8292 - protein, 39 aa, Artificial Sequence
  Non-cyclic GFR-binding peptide
  MOD_RES (1)..(2)..(36)..(38): Xaa is C or S
  MOD_RES (16)..(17)..(18)..(19)..(20): Xaa is A or G
  MOD_RES (21)..(22)..(23)..(24): Xaa is A or G or absent
XXAPTQLSATSVLYYXXXXXXXXXLRKHRNMVVRAXGXH

SEQ ID NO: 8293 - protein, 31 aa, Artificial Sequence
  Non-cyclic GFR-binding peptide
  MOD_RES (31)..(31): Xaa is C or S
VSQDLNAISILYFIGKTPKILKKYRMIVKSX

SEQ ID NO: 8294 - protein, 40 aa, Artificial Sequence
  Non-cyclic GFR-binding peptide
  MOD_RES (6)..(7): Xaa is C or S
  MOD_RES (21)..(22)..(23)..(24)..(25): Xaa is A or G
  MOD_RES (26)..(27)..(28)..(29): Xaa is A or G or absent
KIPKAXXVPTELSATSMLYYXXXXXXXXXLRKHRDMVVEG

SEQ ID NO: 8295 - protein, 40 aa, Artificial Sequence
  Non-cyclic GFR-binding peptide
  MOD_RES (5)..(6)..(39): Xaa is C or S
  MOD_RES (20)..(21)..(22)..(23)..(24): Xaa is A or G
  MOD_RES (25)..(26)..(27)..(28): Xaa is A or G or absent
SAAPXXVPQALSAISILYLXXXXXXXXXLKNYQMIVRSXK

SEQ ID NO: 8296 - protein, 41 aa, Artificial Sequence
  Non-cyclic GFR-binding peptide
  MOD_RES (4)..(5)..(38)..(40): Xaa is C or S
GKAXXVPTKLSAISVLYLDDMGVPTLKNYQEGMSVAEXGXR

SEQ ID NO: 8297 - protein, 38 aa, Artificial Sequence
  Non-cyclic GFR-binding peptide
  MOD_RES (2)..(36)..(38): Xaa is C or S
  MOD_RES (16)..(17)..(18)..(19)..(20): Xaa is A or G
  MOD_RES (21)..(22)..(23)..(24): Xaa is A or G or absent
TXAPTKLSATSVLYYXXXXXXXXXLRKHRNMVVRSXGX

SEQ ID NO: 8298 - protein, 37 aa, Artificial Sequence
  Non-cyclic GFR-binding peptide
  MOD_RES (3)..(4)..(37): Xaa is C or S
  MOD_RES (18)..(19)..(20)..(21)..(22): Xaa is A or G
  MOD_RES (23)..(24)..(25)..(26): Xaa is A or G or absent
APXXVPQALSATSILYYXXXXXXXXXLRKHRMIVRSX

SEQ ID NO: 8299 - protein, 39 aa, Artificial Sequence
  Non-cyclic GFR-binding peptide
  MOD_RES (1)..(36)..(38): Xaa is C or S
  MOD_RES (15)..(16)..(17)..(18)..(19): Xaa is A or G
  MOD_RES (20)..(21)..(22)..(23): Xaa is A or G or absent
XVPTKLSAISVLYLXXXXXXXXXLKNYQEGMSVAEXGXR

SEQ ID NO: 8300 - protein, 38 aa, Artificial Sequence
  Non-cyclic GFR-binding peptide
  MOD_RES (1)..(36)..(38): Xaa is C or S
  MOD_RES (15)..(16)..(17)..(18)..(19): Xaa is A or G
  MOD_RES (20)..(21)..(22)..(23): Xaa is A or G or absent
XVPTKLSATSVLYYXXXXXXXXXLRKHREGMSVAEXGX

SEQ ID NO: 8301 - protein, 43 aa, Artificial Sequence
  Non-cyclic GFR-binding peptide
  MOD_RES (6)..(7)..(40)..(42): Xaa is C or S
  MOD_RES (21)..(22)..(23)..(24)..(25): Xaa is A or G
  MOD_RES (26)..(27)..(28)..(29): Xaa is A or G or absent
ASASPXXVPQDLSPISILYKXXXXXXXXXLKYHYMVVKSXKXS

SEQ ID NO: 8302 - protein, 41 aa, Artificial Sequence
  Non-cyclic GFR-binding peptide
  MOD_RES (6)..(7)..(40): Xaa is C or S
  MOD_RES (21)..(22)..(23)..(24)..(25): Xaa is A or G
  MOD_RES (26)..(27)..(28)..(29): Xaa is A or G or absent
ASAAPXXVPQALSPISILYKXXXXXXXXXLKYHYMIVRSXK

SEQ ID NO: 8303 - protein, 31 aa, Artificial Sequence
  Non-cyclic GFR-binding peptide
  MOD_RES (1)..(1): Xaa is C or S
XVPQALSPISILYKVGRKPKVLKYHYMIVRS

SEQ ID NO: 8304 - protein, 37 aa, Artificial Sequence
  Non-cyclic GFR-binding peptide
  MOD_RES (6)..(7): Xaa is C or S
ASASPXXVPQDLSATSILYYVGRTPKVLRKHRMVVKS

SEQ ID NO: 8305 - protein, 38 aa, Artificial Sequence
  Non-cyclic GFR-binding peptide
  MOD_RES (5)..(6): Xaa is C or S
  MOD_RES (20)..(21)..(22)..(23)..(24): Xaa is A or G
  MOD_RES (25)..(26)..(27)..(28): Xaa is A or G or absent
SAAPXXVPQALSATSILYYXXXXXXXXXLRKHRMIVRS

SEQ ID NO: 8306 - protein, 39 aa, Artificial Sequence
  Non-cyclic GFR-binding peptide
  MOD_RES (3)..(4)..(39): Xaa is C or S
  MOD_RES (18)..(19)..(20)..(21)..(22): Xaa is A or G
  MOD_RES (23)..(24)..(25)..(26): Xaa is A or G or absent
KAXXVPTKLNAISVLYFXXXXXXXXXLKKYREGMSVAEX

SEQ ID NO: 8307 - protein, 43 aa, Artificial Sequence
  Non-cyclic GFR-binding peptide
  MOD_RES (6)..(7)..(41)..(43): Xaa is C or S
  MOD_RES (21)..(22)..(23)..(24)..(25): Xaa is A or G
  MOD_RES (26)..(27)..(28)..(29): Xaa is A or G or absent
KIPKAXXVPTELSATSMLYYXXXXXXXXXLRKHRDMVVEGXGX

SEQ ID NO: 8308 - protein, 41 aa, Artificial Sequence
  Non-cyclic GFR-binding peptide
  MOD_RES (2)..(39)..(41): Xaa is C or S
  MOD_RES (18)..(19)..(20)..(21)..(22): Xaa is A or G
  MOD_RES (23)..(24)..(25)..(26): Xaa is A or G or absent
QXRPTQVQLSATSVLYYXXXXXXXXXLRKHRTLEDHLAXKX

SEQ ID NO: 8309 - protein, 37 aa, Artificial Sequence
  Non-cyclic GFR-binding peptide
  MOD_RES (4)..(5)..(36): Xaa is C or S
AAPXXVPQALSAISILYLVGRKPKVLKNYQMIVRSXK

SEQ ID NO: 8310 - protein, 36 aa, Artificial Sequence
  Non-cyclic GFR-binding peptide
  MOD_RES (4)..(36): Xaa is C or S
KPTXAPTKLSATSVLYYDDSSNVILRKHRNMVVRSX

SEQ ID NO: 8311 - protein, 32 aa, Artificial Sequence
  Non-cyclic GFR-binding peptide
  MOD_RES (1)..(2): Xaa is C or S
XXAPTKLSATSVLYYDDSSNVILRKHRNMVVR

SEQ ID NO: 8312 - protein, 44 aa, Artificial Sequence
  Non-cyclic GFR-binding peptide
  MOD_RES (6)..(7)..(41)..(43): Xaa is C or S
  MOD_RES (21)..(22)..(23)..(24)..(25): Xaa is A or G
  MOD_RES (26)..(27)..(28)..(29): Xaa is A or G or absent
SIPKAXXVPTELNAISMLYFXXXXXXXXXLKKYREMVVEGXGXR

SEQ ID NO: 8313 - protein, 35 aa, Artificial Sequence
  Non-cyclic GFR-binding peptide
  MOD_RES (16)..(17)..(18)..(19)..(20): Xaa is A or G
  MOD_RES (21)..(22)..(23)..(24): Xaa is A or G or absent
RPTQVQLNAISVLYFXXXXXXXXXLKKYRTLEDHL

SEQ ID NO: 8314 - protein, 38 aa, Artificial Sequence
  Non-cyclic GFR-binding peptide
  MOD_RES (5)..(6)..(38): Xaa is C or S
VPKPXXAPTKLSAISVLYLDDSSNVILKNYQNMVVRSX

SEQ ID NO: 8315 - protein, 37 aa, Artificial Sequence
  Non-cyclic GFR-binding peptide
  MOD_RES (3)..(4)..(37): Xaa is C or S
  MOD_RES (18)..(19)..(20)..(21)..(22): Xaa is A or G
  MOD_RES (23)..(24)..(25)..(26): Xaa is A or G or absent
APXXVPQALSAISILYLXXXXXXXXXLKNYQMIVRSX

SEQ ID NO: 8316 - protein, 35 aa, Artificial Sequence
  Non-cyclic GFR-binding peptide
  MOD_RES (16)..(17)..(18)..(19)..(20): Xaa is A or G
  MOD_RES (21)..(22)..(23)..(24): Xaa is A or G or absent
RPTQVQLSAISVLYLXXXXXXXXXLKNYQTLEDHL

SEQ ID NO: 8317 - protein, 34 aa, Artificial Sequence
  Non-cyclic GFR-binding peptide
  MOD_RES (1)..(33): Xaa is C or S
XAPTKLSPISVLYKDSSNNVILKYHYNMVVKAXG

SEQ ID NO: 8318 - protein, 39 aa, Artificial Sequence
  Non-cyclic GFR-binding peptide
  MOD_RES (4)..(5)..(38): Xaa is C or S
  MOD_RES (19)..(20)..(21)..(22)..(23): Xaa is A or G
  MOD_RES (24)..(25)..(26)..(27): Xaa is A or G or absent
AAPXXVPQALNAISILYFXXXXXXXXXLKKYRMIVRSXK

SEQ ID NO: 8319 - protein, 39 aa, Artificial Sequence
  Non-cyclic GFR-binding peptide
  MOD_RES (2)..(3)..(38): Xaa is C or S
  MOD_RES (17)..(18)..(19)..(20)..(21): Xaa is A or G
  MOD_RES (22)..(23)..(24)..(25): Xaa is A or G or absent
AXXVPTKLSAISVLYLXXXXXXXXXLKNYQEGMSVAEXG

SEQ ID NO: 8320 - protein, 36 aa, Artificial Sequence
  Non-cyclic GFR-binding peptide
  MOD_RES (1)..(2)..(33)..(35): Xaa is C or S
XXVSQDLSATSILYYIGKTPKILRKHRMIVKSXKXS

SEQ ID NO: 8321 - protein, 38 aa, Artificial Sequence
  Non-cyclic GFR-binding peptide
  MOD_RES (4)..(5)..(37): Xaa is C or S
PKAXXVPTELSATSMLYYDENEKVVLRKHRDMVVEGXG

SEQ ID NO: 8322 - protein, 36 aa, Artificial Sequence
  Non-cyclic GFR-binding peptide
  MOD_RES (5)..(6): Xaa is C or S
IPKAXXVPTELSPISMLYKDENEKVVLKYHYDMVVE

SEQ ID NO: 8323 - protein, 36 aa, Artificial Sequence
  Non-cyclic GFR-binding peptide
  MOD_RES (4)..(5): Xaa is C or S
PKPXXAPTQLSATSVLYYDDSSNVILRKHRNMVVRA

SEQ ID NO: 8324 - protein, 36 aa, Artificial Sequence
  Non-cyclic GFR-binding peptide
  MOD_RES (3)..(4): Xaa is C or S
  MOD_RES (18)..(19)..(20)..(21)..(22): Xaa is A or G
  MOD_RES (23)..(24)..(25)..(26): Xaa is A or G or absent
KAXXVPTELSATSMLYYXXXXXXXXXLRKHRDMVVE

SEQ ID NO: 8325 - protein, 32 aa, Artificial Sequence
  Non-cyclic GFR-binding peptide
  MOD_RES (1)..(2): Xaa is C or S
XXAPTQLSAISVLYLDDSSNVILKNYQNMVVR

SEQ ID NO: 8326 - protein, 34 aa, Artificial Sequence
  Non-cyclic GFR-binding peptide
  MOD_RES (32)..(34): Xaa is C or S
APTKLSPISVLYKDSSNNVILKYHYNMVVKAXGX

SEQ ID NO: 8327 - protein, 40 aa, Artificial Sequence
  Non-cyclic GFR-binding peptide
  MOD_RES (3)..(37)..(39): Xaa is C or S
  MOD_RES (17)..(18)..(19)..(20)..(21): Xaa is A or G
  MOD_RES (22)..(23)..(24)..(25): Xaa is A or G or absent
PTXAPTKLSAISVLYLXXXXXXXXXLKNYQNMVVRSXGXH

SEQ ID NO: 8328 - protein, 42 aa, Artificial Sequence
  Non-cyclic GFR-binding peptide
  MOD_RES (4)..(5)..(39)..(41): Xaa is C or S
  MOD_RES (19)..(20)..(21)..(22)..(23): Xaa is A or G
  MOD_RES (24)..(25)..(26)..(27): Xaa is A or G or absent
PKAXXAPTKLSAISVLYLXXXXXXXXXLKNYQNMVVKAXGXH

SEQ ID NO: 8329 - protein, 34 aa, Artificial Sequence
  Non-cyclic GFR-binding peptide
  MOD_RES (3)..(4): Xaa is C or S
APXXVPQALSATSILYYVGRKPKVLRKHRMIVRS

SEQ ID NO: 8330 - protein, 38 aa, Artificial Sequence
  Non-cyclic GFR-binding peptide
  MOD_RES (35)..(37): Xaa is C or S
TQVQLSPISVLYKEIVRKKPIFLKYHYTLEDHLAXKXE

SEQ ID NO: 8331 - protein, 35 aa, Artificial Sequence
  Non-cyclic GFR-binding peptide
  MOD_RES (34)..(34): Xaa is C or S
  MOD_RES (14)..(15)..(16)..(17)..(18): Xaa is A or G
  MOD_RES (19)..(20)..(21)..(22): Xaa is A or G or absent
APTKLSAISVLYLXXXXXXXXXLKNYQNMVVRSXG

SEQ ID NO: 8332 - protein, 34 aa, Artificial Sequence
  Non-cyclic GFR-binding peptide
  MOD_RES (33)..(33): Xaa is C or S
  MOD_RES (14)..(15)..(16)..(17)..(18): Xaa is A or G
  MOD_RES (19)..(20)..(21)..(22): Xaa is A or G or absent
VPQALSAISILYLXXXXXXXXXLKNYQMIVRSXK

SEQ ID NO: 8333 - protein, 35 aa, Artificial Sequence
  Non-cyclic GFR-binding peptide
RPTQVQLSATSVLYYEIVRKKPIFLRKHRTLEDHL

SEQ ID NO: 8334 - protein, 40 aa, Artificial Sequence
  Non-cyclic GFR-binding peptide
  MOD_RES (2)..(3)..(38)..(40): Xaa is C or S
  MOD_RES (17)..(18)..(19)..(20)..(21): Xaa is A or G
  MOD_RES (22)..(23)..(24)..(25): Xaa is A or G or absent
AXXVPTKLNAISVLYFXXXXXXXXXLKKYREGMSVAEXGX

SEQ ID NO: 8335 - protein, 35 aa, Artificial Sequence
  Non-cyclic GFR-binding peptide
  MOD_RES (34)..(34): Xaa is C or S
  MOD_RES (14)..(15)..(16)..(17)..(18): Xaa is A or G
  MOD_RES (19)..(20)..(21)..(22): Xaa is A or G or absent
VPTELNAISMLYFXXXXXXXXXLKKYRDMVVEGXG

SEQ ID NO: 8336 - protein, 37 aa, Artificial Sequence
  Non-cyclic GFR-binding peptide
  MOD_RES (4)..(5)..(37): Xaa is C or S
PKPXXAPTQLSPISVLYKDDSSNVILKYHYNMVVRAX

SEQ ID NO: 8337 - protein, 37 aa, Artificial Sequence
  Non-cyclic GFR-binding peptide
  MOD_RES (37)..(37): Xaa is C or S
RPTQVQLSAISVLYLEIVRKKPIFLKNYQTLEDHLAX

SEQ ID NO: 8338 - protein, 43 aa, Artificial Sequence
  Non-cyclic GFR-binding peptide
  MOD_RES (5)..(6)..(41)..(43): Xaa is C or S
  MOD_RES (20)..(21)..(22)..(23)..(24): Xaa is A or G
  MOD_RES (25)..(26)..(27)..(28): Xaa is A or G or absent
VGKAXXVPTKLSATSVLYYXXXXXXXXXLRKHREGMSVAEXGX

SEQ ID NO: 8339 - protein, 40 aa, Artificial Sequence
  Non-cyclic GFR-binding peptide
  MOD_RES (4)..(5)..(38)..(40): Xaa is C or S
  MOD_RES (19)..(20)..(21)..(22)..(23): Xaa is A or G
  MOD_RES (24)..(25)..(26)..(27): Xaa is A or G or absent
ASPXXVPQDLNAISILYFXXXXXXXXXLKKYRMVVKSXKX

SEQ ID NO: 8340 - protein, 41 aa, Artificial Sequence
  Non-cyclic GFR-binding peptide
  MOD_RES (6)..(7)..(41): Xaa is C or S
  MOD_RES (21)..(22)..(23)..(24)..(25): Xaa is A or G
  MOD_RES (26)..(27)..(28)..(29): Xaa is A or G or absent
AVPKAXXAPTKLSPISVLYKXXXXXXXXXLKYHYNMVVKAX

SEQ ID NO: 8341 - protein, 34 aa, Artificial Sequence
  Non-cyclic GFR-binding peptide
  MOD_RES (2)..(3): Xaa is C or S
PXXAPTKLSPISVLYKDDSSNVILKYHYNMVVRS

SEQ ID NO: 8342 - protein, 35 aa, Artificial Sequence
  Non-cyclic GFR-binding peptide
  MOD_RES (32)..(34): Xaa is C or S
APTQLSPISVLYKDDSSNVILKYHYNMVVRAXGXH

SEQ ID NO: 8343 - protein, 38 aa, Artificial Sequence
  Non-cyclic GFR-binding peptide
  MOD_RES (5)..(6): Xaa is C or S
  MOD_RES (20)..(21)..(22)..(23)..(24): Xaa is A or G
  MOD_RES (25)..(26)..(27)..(28): Xaa is A or G or absent
VPKPXXAPTQLSATSVLYYXXXXXXXXXLRKHRNMVVR

SEQ ID NO: 8344 - protein, 40 aa, Artificial Sequence
  Non-cyclic GFR-binding peptide
  MOD_RES (37)..(39): Xaa is C or S
  MOD_RES (16)..(17)..(18)..(19)..(20): Xaa is A or G
  MOD_RES (21)..(22)..(23)..(24): Xaa is A or G or absent
RPTQVQLNAISVLYFXXXXXXXXXLKKYRTLEDHLAXKXE

SEQ ID NO: 8345 - protein, 34 aa, Artificial Sequence
  Non-cyclic GFR-binding peptide
  MOD_RES (3)..(3): Xaa is C or S
PTXAPTKLSATSVLYYDDSSNVILRKHRNMVVRS

SEQ ID NO: 8346 - protein, 42 aa, Artificial Sequence
  Non-cyclic GFR-binding peptide
  MOD_RES (6)..(7)..(41): Xaa is C or S
  MOD_RES (21)..(22)..(23)..(24)..(25): Xaa is A or G
  MOD_RES (26)..(27)..(28)..(29): Xaa is A or G or absent
SIPKAXXVPTELSPISMLYKXXXXXXXXXLKYHYEMVVEGXG

SEQ ID NO: 8347 - protein, 32 aa, Artificial Sequence
  Non-cyclic GFR-binding peptide
  MOD_RES (1)..(2): Xaa is C or S
XXAPTKLSPISVLYKDSSNNVILKYHYNMVVK

SEQ ID NO: 8348 - protein, 41 aa, Artificial Sequence
  Non-cyclic GFR-binding peptide
  MOD_RES (5)..(6)..(38)..(40): Xaa is C or S
IPKAXXVPTELSATSMLYYDENEKVVLRKHRDMVVEGXGXR

SEQ ID NO: 8349 - protein, 39 aa, Artificial Sequence
  Non-cyclic GFR-binding peptide
  MOD_RES (3)..(4)..(37)..(39): Xaa is C or S
KAXXVPTKLNAISVLYFDDMGVPTLKKYREGMSVAEXGX

SEQ ID NO: 8350 - protein, 35 aa, Artificial Sequence
  Non-cyclic GFR-binding peptide
  MOD_RES (1)..(34): Xaa is C or S
  MOD_RES (15)..(16)..(17)..(18)..(19): Xaa is A or G
  MOD_RES (20)..(21)..(22)..(23): Xaa is A or G or absent
XVPQALSATSILYYXXXXXXXXXLRKHRMIVRSXK

SEQ ID NO: 8351 - protein, 34 aa, Artificial Sequence
  Non-cyclic GFR-binding peptide
RPTQVQLSAISVLYLEIVRKKPIFLKNYQTLEDH

SEQ ID NO: 8352 - protein, 38 aa, Artificial Sequence
  Non-cyclic GFR-binding peptide
  MOD_RES (37)..(37): Xaa is C or S
  MOD_RES (16)..(17)..(18)..(19)..(20): Xaa is A or G
  MOD_RES (21)..(22)..(23)..(24): Xaa is A or G or absent
RPTQVQLSPISVLYKXXXXXXXXXLKYHYTLEDHLAXK

SEQ ID NO: 8353 - protein, 36 aa, Artificial Sequence
  Non-cyclic GFR-binding peptide
  MOD_RES (35)..(35): Xaa is C or S
TQVQLSATSVLYYEIVRKKPIFLRKHRTLEDHLAXK

SEQ ID NO: 8354 - protein, 32 aa, Artificial Sequence
  Non-cyclic GFR-binding peptide
  MOD_RES (1)..(1): Xaa is C or S
XAPTKLSATSVLYYDDSSNVILRKHRNMVVRS

SEQ ID NO: 8355 - protein, 32 aa, Artificial Sequence
  Non-cyclic GFR-binding peptide
  MOD_RES (1)..(2): Xaa is C or S
XXAPTQLSPISVLYKDDSSNVILKYHYNMVVR

SEQ ID NO: 8356 - protein, 35 aa, Artificial Sequence
  Non-cyclic GFR-binding peptide
  MOD_RES (2)..(3): Xaa is C or S
  MOD_RES (17)..(18)..(19)..(20)..(21): Xaa is A or G
  MOD_RES (22)..(23)..(24)..(25): Xaa is A or G or absent
PXXVSQDLSATSILYYXXXXXXXXXLRKHRMIVKS

SEQ ID NO: 8357 - protein, 38 aa, Artificial Sequence
  Non-cyclic GFR-binding peptide
  MOD_RES (2)..(3)..(37): Xaa is C or S
  MOD_RES (17)..(18)..(19)..(20)..(21): Xaa is A or G
  MOD_RES (22)..(23)..(24)..(25): Xaa is A or G or absent
AXXAPTKLSAISVLYLXXXXXXXXXLKNYQNMVVKAXG

SEQ ID NO: 8358 - protein, 36 aa, Artificial Sequence
  Non-cyclic GFR-binding peptide
  MOD_RES (1)..(2)..(36): Xaa is C or S
  MOD_RES (16)..(17)..(18)..(19)..(20): Xaa is A or G
  MOD_RES (21)..(22)..(23)..(24): Xaa is A or G or absent
XXVPTELSATSMLYYXXXXXXXXXLRKHRDMVVEGX

SEQ ID NO: 8359 - protein, 32 aa, Artificial Sequence
  Non-cyclic GFR-binding peptide
  MOD_RES (1)..(32): Xaa is C or S
XVSQDLSPISILYKIGKTPKILKYHYMIVKSX

SEQ ID NO: 8360 - protein, 39 aa, Artificial Sequence
  Non-cyclic GFR-binding peptide
  MOD_RES (5)..(6): Xaa is C or S
  MOD_RES (20)..(21)..(22)..(23)..(24): Xaa is A or G
  MOD_RES (25)..(26)..(27)..(28): Xaa is A or G or absent
VPKAXXAPTKLSAISVLYLXXXXXXXXXLKNYQNMVVKA

SEQ ID NO: 8361 - protein, 38 aa, Artificial Sequence
  Non-cyclic GFR-binding peptide
  MOD_RES (2)..(3)..(37): Xaa is C or S
  MOD_RES (17)..(18)..(19)..(20)..(21): Xaa is A or G
  MOD_RES (22)..(23)..(24)..(25): Xaa is A or G or absent
AXXVPTELSATSMLYYXXXXXXXXXLRKHREMVVEGXG

SEQ ID NO: 8362 - protein, 42 aa, Artificial Sequence
  Non-cyclic GFR-binding peptide
  MOD_RES (5)..(6)..(40)..(42): Xaa is C or S
  MOD_RES (20)..(21)..(22)..(23)..(24): Xaa is A or G
  MOD_RES (25)..(26)..(27)..(28): Xaa is A or G or absent
IPKAXXVPTELSATSMLYYXXXXXXXXXLRKHREMVVEGXGX

SEQ ID NO: 8363 - protein, 35 aa, Artificial Sequence
  Non-cyclic GFR-binding peptide
  MOD_RES (34)..(34): Xaa is C or S
  MOD_RES (14)..(15)..(16)..(17)..(18): Xaa is A or G
  MOD_RES (19)..(20)..(21)..(22): Xaa is A or G or absent
APTKLNAISVLYFXXXXXXXXXLKKYRNMVVKAXG

SEQ ID NO: 8364 - protein, 40 aa, Artificial Sequence
  Non-cyclic GFR-binding peptide
  MOD_RES (5)..(6)..(40): Xaa is C or S
  MOD_RES (20)..(21)..(22)..(23)..(24): Xaa is A or G
  MOD_RES (25)..(26)..(27)..(28): Xaa is A or G or absent
VPKAXXAPTKLSAISVLYLXXXXXXXXXLKNYQNMVVKAX

SEQ ID NO: 8365 - protein, 35 aa, Artificial Sequence
  Non-cyclic GFR-binding peptide
  MOD_RES (4)..(5): Xaa is C or S
ASPXXVSQDLSPISILYKIGKTPKILKYHYMIVKS

SEQ ID NO: 8366 - protein, 40 aa, Artificial Sequence
  Non-cyclic GFR-binding peptide
  MOD_RES (37)..(39): Xaa is C or S
  MOD_RES (16)..(17)..(18)..(19)..(20): Xaa is A or G
  MOD_RES (21)..(22)..(23)..(24): Xaa is A or G or absent
RPTQVQLSATSVLYYXXXXXXXXXLRKHRTLEDHLAXKXE

SEQ ID NO: 8367 - protein, 40 aa, Artificial Sequence
  Non-cyclic GFR-binding peptide
  MOD_RES (3)..(4)..(38)..(40): Xaa is C or S
  MOD_RES (18)..(19)..(20)..(21)..(22): Xaa is A or G
  MOD_RES (23)..(24)..(25)..(26): Xaa is A or G or absent
KAXXVPTELNAISMLYFXXXXXXXXXLKKYREMVVEGXGX

SEQ ID NO: 8368 - protein, 35 aa, Artificial Sequence
  Non-cyclic GFR-binding peptide
  MOD_RES (2)..(3): Xaa is C or S
  MOD_RES (17)..(18)..(19)..(20)..(21): Xaa is A or G
  MOD_RES (22)..(23)..(24)..(25): Xaa is A or G or absent
AXXVPTELSPISMLYKXXXXXXXXXLKYHYDMVVE

SEQ ID NO: 8369 - protein, 31 aa, Artificial Sequence
  Non-cyclic GFR-binding peptide
APTQLSAISVLYLDDSSNVILKNYQNMVVRA

SEQ ID NO: 8370 - protein, 36 aa, Artificial Sequence
  Non-cyclic GFR-binding peptide
  MOD_RES (1)..(34)..(36): Xaa is C or S
  MOD_RES (15)..(16)..(17)..(18)..(19): Xaa is A or G
  MOD_RES (20)..(21)..(22)..(23): Xaa is A or G or absent
XVPQALSAISILYLXXXXXXXXXLKNYQMIVRSXKX

SEQ ID NO: 8371 - protein, 33 aa, Artificial Sequence
  Non-cyclic GFR-binding peptide
  MOD_RES (1)..(33): Xaa is C or S
XAPTQLSATSVLYYDDSSNVILRKHRNMVVRAX

SEQ ID NO: 8372 - protein, 39 aa, Artificial Sequence
  Non-cyclic GFR-binding peptide
  MOD_RES (6)..(7): Xaa is C or S
  MOD_RES (21)..(22)..(23)..(24)..(25): Xaa is A or G
  MOD_RES (26)..(27)..(28)..(29): Xaa is A or G or absent
YVPKPXXAPTKLSPISVLYKXXXXXXXXXLKYHYNMVVR

SEQ ID NO: 8373 - protein, 43 aa, Artificial Sequence
  Non-cyclic GFR-binding peptide
  MOD_RES (3)..(40)..(42): Xaa is C or S
  MOD_RES (19)..(20)..(21)..(22)..(23): Xaa is A or G
  MOD_RES (24)..(25)..(26)..(27): Xaa is A or G or absent
VQXRPTQVQLNAISVLYFXXXXXXXXXLKKYRTLEDHLAXKXE

SEQ ID NO: 8374 - protein, 34 aa, Artificial Sequence
  Non-cyclic GFR-binding peptide
  MOD_RES (31)..(33): Xaa is C or S
VPQDLNAISILYFVGRTPKVLKKYRMVVKSXKXS

SEQ ID NO: 8375 - protein, 41 aa, Artificial Sequence
  Non-cyclic GFR-binding peptide
  MOD_RES (4)..(38)..(40): Xaa is C or S
  MOD_RES (18)..(19)..(20)..(21)..(22): Xaa is A or G
  MOD_RES (23)..(24)..(25)..(26): Xaa is A or G or absent
KPTXAPTKLSPISVLYKXXXXXXXXXLKYHYNMVVRSXGXH

SEQ ID NO: 8376 - protein, 37 aa, Artificial Sequence
  Non-cyclic GFR-binding peptide
  MOD_RES (35)..(37): Xaa is C or S
TQVQLSPISVLYKEIVRKKPIFLKYHYTLEDHLAXKX

SEQ ID NO: 8377 - protein, 37 aa, Artificial Sequence
  Non-cyclic GFR-binding peptide
  MOD_RES (2)..(3)..(35)..(37): Xaa is C or S
PXXAPTKLSPISVLYKDDSSNVILKYHYNMVVRSXGX

SEQ ID NO: 8378 - protein, 37 aa, Artificial Sequence
  Non-cyclic GFR-binding peptide
  MOD_RES (4)..(5)..(37): Xaa is C or S
PKPXXAPTKLSATSVLYYDDSSNVILRKHRNMVVRSX

SEQ ID NO: 8379 - protein, 32 aa, Artificial Sequence
  Non-cyclic GFR-binding peptide
  MOD_RES (1)..(2): Xaa is C or S
XXVPQDLSATSILYYVGRTPKVLRKHRMVVKS

SEQ ID NO: 8380 - protein, 35 aa, Artificial Sequence
  Non-cyclic GFR-binding peptide
  MOD_RES (1)..(35): Xaa is C or S
  MOD_RES (15)..(16)..(17)..(18)..(19): Xaa is A or G
  MOD_RES (20)..(21)..(22)..(23): Xaa is A or G or absent
XVPTELSPISMLYKXXXXXXXXXLKYHYEMVVEGX

SEQ ID NO: 8381 - protein, 42 aa, Artificial Sequence
  Non-cyclic GFR-binding peptide
  MOD_RES (3)..(4)..(39)..(41): Xaa is C or S
  MOD_RES (18)..(19)..(20)..(21)..(22): Xaa is A or G
  MOD_RES (23)..(24)..(25)..(26): Xaa is A or G or absent
KAXXVPTKLNAISVLYFXXXXXXXXXLKKYREGMSVAEXGXR

SEQ ID NO: 8382 - protein, 42 aa, Artificial Sequence
  Non-cyclic GFR-binding peptide
  MOD_RES (5)..(6)..(40)..(42): Xaa is C or S
  MOD_RES (20)..(21)..(22)..(23)..(24): Xaa is A or G
  MOD_RES (25)..(26)..(27)..(28): Xaa is A or G or absent
VPKPXXAPTQLSATSVLYYXXXXXXXXXLRKHRNMVVRAXGX

SEQ ID NO: 8383 - protein, 40 aa, Artificial Sequence
  Non-cyclic GFR-binding peptide
  MOD_RES (5)..(6)..(38)..(40): Xaa is C or S
VPKPXXAPTQLSPISVLYKDDSSNVILKYHYNMVVRAXGX

SEQ ID NO: 8384 - protein, 40 aa, Artificial Sequence
  Non-cyclic GFR-binding peptide
  MOD_RES (3)..(40): Xaa is C or S
VQXRPTQVQLSPISVLYKEIVRKKPIFLKYHYTLEDHLAX

SEQ ID NO: 8385 - protein, 38 aa, Artificial Sequence
  Non-cyclic GFR-binding peptide
  MOD_RES (1)..(2)..(37): Xaa is C or S
  MOD_RES (16)..(17)..(18)..(19)..(20): Xaa is A or G
  MOD_RES (21)..(22)..(23)..(24): Xaa is A or G or absent
XXVPTKLSAISVLYLXXXXXXXXXLKNYQEGMSVAEXG

SEQ ID NO: 8386 - protein, 38 aa, Artificial Sequence
  Non-cyclic GFR-binding peptide
  MOD_RES (4)..(5): Xaa is C or S
  MOD_RES (19)..(20)..(21)..(22)..(23): Xaa is A or G
  MOD_RES (24)..(25)..(26)..(27): Xaa is A or G or absent
PKAXXVPTELSATSMLYYXXXXXXXXXLRKHRDMVVEG

SEQ ID NO: 8387 - protein, 39 aa, Artificial Sequence
  Non-cyclic GFR-binding peptide
  MOD_RES (2)..(3)..(37)..(39): Xaa is C or S
  MOD_RES (17)..(18)..(19)..(20)..(21): Xaa is A or G
  MOD_RES (22)..(23)..(24)..(25): Xaa is A or G or absent
AXXVPTELSPISMLYKXXXXXXXXXLKYHYEMVVEGXGX

SEQ ID NO: 8388 - protein, 38 aa, Artificial Sequence
  Non-cyclic GFR-binding peptide
  MOD_RES (6)..(6): Xaa is C or S
  MOD_RES (20)..(21)..(22)..(23)..(24): Xaa is A or G
  MOD_RES (25)..(26)..(27)..(28): Xaa is A or G or absent
VTKPTXAPTKLSAISVLYLXXXXXXXXXLKNYQNMVVR

SEQ ID NO: 8389 - protein, 33 aa, Artificial Sequence
  Non-cyclic GFR-binding peptide
  MOD_RES (14)..(15)..(16)..(17)..(18): Xaa is A or G
  MOD_RES (19)..(20)..(21)..(22): Xaa is A or G or absent
APTKLNAISVLYFXXXXXXXXXLKKYRNMVVKA

SEQ ID NO: 8390 - protein, 35 aa, Artificial Sequence
  Non-cyclic GFR-binding peptide
  MOD_RES (2)..(3)..(34): Xaa is C or S
PXXVPQDLSAISILYLVGRTPKVLKNYQMVVKSXK

SEQ ID NO: 8391 - protein, 36 aa, Artificial Sequence
  Non-cyclic GFR-binding peptide
  MOD_RES (2)..(3): Xaa is C or S
  MOD_RES (17)..(18)..(19)..(20)..(21): Xaa is A or G
  MOD_RES (22)..(23)..(24)..(25): Xaa is A or G or absent
AXXVPTELNAISMLYFXXXXXXXXXLKKYRDMVVEG

SEQ ID NO: 8392 - protein, 42 aa, Artificial Sequence
  Non-cyclic GFR-binding peptide
  MOD_RES (5)..(6)..(40)..(42): Xaa is C or S
  MOD_RES (20)..(21)..(22)..(23)..(24): Xaa is A or G
  MOD_RES (25)..(26)..(27)..(28): Xaa is A or G or absent
IPKAXXVPTELNAISMLYFXXXXXXXXXLKKYREMVVEGXGX

SEQ ID NO: 8393 - protein, 34 aa, Artificial Sequence
  Non-cyclic GFR-binding peptide
  MOD_RES (16)..(17)..(18)..(19)..(20): Xaa is A or G
  MOD_RES (21)..(22)..(23)..(24): Xaa is A or G or absent
RPTQVQLSATSVLYYXXXXXXXXXLRKHRTLEDH

SEQ ID NO: 8394 - protein, 34 aa, Artificial Sequence
  Non-cyclic GFR-binding peptide
  MOD_RES (1)..(2): Xaa is C or S
  MOD_RES (16)..(17)..(18)..(19)..(20): Xaa is A or G
  MOD_RES (21)..(22)..(23)..(24): Xaa is A or G or absent
XXVPQALSPISILYKXXXXXXXXXLKYHYMIVRS

SEQ ID NO: 8395 - protein, 38 aa, Artificial Sequence
  Non-cyclic GFR-binding peptide
  MOD_RES (1)..(2)..(36)..(38): Xaa is C or S
  MOD_RES (16)..(17)..(18)..(19)..(20): Xaa is A or G
  MOD_RES (21)..(22)..(23)..(24): Xaa is A or G or absent
XXVPTELNAISMLYFXXXXXXXXXLKKYRDMVVEGXGX

SEQ ID NO: 8396 - protein, 34 aa, Artificial Sequence
  Non-cyclic GFR-binding peptide
  MOD_RES (2)..(3)..(34): Xaa is C or S
PXXVSQDLSPISILYKIGKTPKILKYHYMIVKSX

SEQ ID NO: 8397 - protein, 40 aa, Artificial Sequence
  Non-cyclic GFR-binding peptide
  MOD_RES (5)..(6)..(39): Xaa is C or S
  MOD_RES (20)..(21)..(22)..(23)..(24): Xaa is A or G
  MOD_RES (25)..(26)..(27)..(28): Xaa is A or G or absent
SAAPXXVPQALSPISILYKXXXXXXXXXLKYHYMIVRSXK

SEQ ID NO: 8398 - protein, 39 aa, Artificial Sequence
  Non-cyclic GFR-binding peptide
  MOD_RES (1)..(2)..(36)..(38): Xaa is C or S
  MOD_RES (16)..(17)..(18)..(19)..(20): Xaa is A or G
  MOD_RES (21)..(22)..(23)..(24): Xaa is A or G or absent
XXVPTELSPISMLYKXXXXXXXXXLKYHYDMVVEGXGXR

SEQ ID NO: 8399 - protein, 32 aa, Artificial Sequence
  Non-cyclic GFR-binding peptide
  MOD_RES (1)..(2): Xaa is C or S
XXAPTKLSAISVLYLDSSNNVILKNYQNMVVK

SEQ ID NO: 8400 - protein, 35 aa, Artificial Sequence
  Non-cyclic GFR-binding peptide
  MOD_RES (2)..(3): Xaa is C or S
  MOD_RES (17)..(18)..(19)..(20)..(21): Xaa is A or G
  MOD_RES (22)..(23)..(24)..(25): Xaa is A or G or absent
PXXAPTKLSAISVLYLXXXXXXXXXLKNYQNMVVR

SEQ ID NO: 8401 - protein, 39 aa, Artificial Sequence
  Non-cyclic GFR-binding peptide
  MOD_RES (37)..(39): Xaa is C or S
  MOD_RES (16)..(17)..(18)..(19)..(20): Xaa is A or G
  MOD_RES (21)..(22)..(23)..(24): Xaa is A or G or absent
RPTQVQLSAISVLYLXXXXXXXXXLKNYQTLEDHLAXKX

SEQ ID NO: 8402 - protein, 37 aa, Artificial Sequence
  Non-cyclic GFR-binding peptide
  MOD_RES (2)..(3)..(36): Xaa is C or S
  MOD_RES (17)..(18)..(19)..(20)..(21): Xaa is A or G
  MOD_RES (22)..(23)..(24)..(25): Xaa is A or G or absent
PXXVSQDLNAISILYFXXXXXXXXXLKKYRMIVKSXK

SEQ ID NO: 8403 - protein, 37 aa, Artificial Sequence
  Non-cyclic GFR-binding peptide
  MOD_RES (4)..(5): Xaa is C or S
GKAXXVPTKLSAISVLYLDDMGVPTLKNYQEGMSVAE

SEQ ID NO: 8404 - protein, 33 aa, Artificial Sequence
  Non-cyclic GFR-binding peptide
  MOD_RES (14)..(15)..(16)..(17)..(18): Xaa is A or G
  MOD_RES (19)..(20)..(21)..(22): Xaa is A or G or absent
APTKLSAISVLYLXXXXXXXXXLKNYQNMVVKA

SEQ ID NO: 8405 - protein, 37 aa, Artificial Sequence
  Non-cyclic GFR-binding peptide
  MOD_RES (1)..(2)..(35)..(37): Xaa is C or S
  MOD_RES (16)..(17)..(18)..(19)..(20): Xaa is A or G
  MOD_RES (21)..(22)..(23)..(24): Xaa is A or G or absent
XXVSQDLNAISILYFXXXXXXXXXLKKYRMIVKSXKX

SEQ ID NO: 8406 - protein, 33 aa, Artificial Sequence
  Non-cyclic GFR-binding peptide
  MOD_RES (1)..(33): Xaa is C or S
XVPTELSPISMLYKDEYDKVVLKYHYEMVVEGX

SEQ ID NO: 8407 - protein, 41 aa, Artificial Sequence
  Non-cyclic GFR-binding peptide
  MOD_RES (5)..(6)..(39)..(41): Xaa is C or S
  MOD_RES (20)..(21)..(22)..(23)..(24): Xaa is A or G
  MOD_RES (25)..(26)..(27)..(28): Xaa is A or G or absent
SASPXXVSQDLSPISILYKXXXXXXXXXLKYHYMIVKSXKX

SEQ ID NO: 8408 - protein, 36 aa, Artificial Sequence
  Non-cyclic GFR-binding peptide
  MOD_RES (1)..(34)..(36): Xaa is C or S
  MOD_RES (15)..(16)..(17)..(18)..(19): Xaa is A or G
  MOD_RES (20)..(21)..(22)..(23): Xaa is A or G or absent
XVPQALSATSILYYXXXXXXXXXLRKHRMIVRSXKX

SEQ ID NO: 8409 - protein, 45 aa, Artificial Sequence
  Non-cyclic GFR-binding peptide
  MOD_RES (5)..(42)..(44): Xaa is C or S
  MOD_RES (21)..(22)..(23)..(24)..(25): Xaa is A or G
  MOD_RES (26)..(27)..(28)..(29): Xaa is A or G or absent
RNVQXRPTQVQLSATSVLYYXXXXXXXXXLRKHRTLEDHLAXKXE

SEQ ID NO: 8410 - protein, 37 aa, Artificial Sequence
  Non-cyclic GFR-binding peptide
  MOD_RES (3)..(4)..(37): Xaa is C or S
  MOD_RES (18)..(19)..(20)..(21)..(22): Xaa is A or G
  MOD_RES (23)..(24)..(25)..(26): Xaa is A or G or absent
SPXXVPQDLNAISILYFXXXXXXXXXLKKYRMVVKSX

SEQ ID NO: 8411 - protein, 41 aa, Artificial Sequence
  Non-cyclic GFR-binding peptide
  MOD_RES (3)..(4)..(39)..(41): Xaa is C or S
  MOD_RES (18)..(19)..(20)..(21)..(22): Xaa is A or G
  MOD_RES (23)..(24)..(25)..(26): Xaa is A or G or absent
KAXXVPTKLNAISVLYFXXXXXXXXXLKKYREGMSVAEXGX

SEQ ID NO: 8412 - protein, 40 aa, Artificial Sequence
  Non-cyclic GFR-binding peptide
  MOD_RES (4)..(5)..(37)..(39): Xaa is C or S
PKPXXAPTQLSATSVLYYDDSSNVILRKHRNMVVRAXGXH

SEQ ID NO: 8413 - protein, 33 aa, Artificial Sequence
  Non-cyclic GFR-binding peptide
  MOD_RES (1)..(1): Xaa is C or S
  MOD_RES (15)..(16)..(17)..(18)..(19): Xaa is A or G
  MOD_RES (20)..(21)..(22)..(23): Xaa is A or G or absent
XVPQDLSPISILYKXXXXXXXXXLKYHYMVVKS

SEQ ID NO: 8414 - protein, 39 aa, Artificial Sequence
  Non-cyclic GFR-binding peptide
  MOD_RES (3)..(4)..(36)..(38): Xaa is C or S
KPXXAPTQLSPISVLYKDDSSNVILKYHYNMVVRAXGXH

SEQ ID NO: 8415 - protein, 34 aa, Artificial Sequence
  Non-cyclic GFR-binding peptide
  MOD_RES (1)..(2)..(34): Xaa is C or S
XXAPTQLSATSVLYYDDSSNVILRKHRNMVVRAX

SEQ ID NO: 8416 - protein, 43 aa, Artificial Sequence
  Non-cyclic GFR-binding peptide
  MOD_RES (6)..(7)..(41)..(43): Xaa is C or S
  MOD_RES (21)..(22)..(23)..(24)..(25): Xaa is A or G
  MOD_RES (26)..(27)..(28)..(29): Xaa is A or G or absent
YVPKPXXAPTKLSPISVLYKXXXXXXXXXLKYHYNMVVRSXGX

SEQ ID NO: 8417 - protein, 38 aa, Artificial Sequence
  Non-cyclic GFR-binding peptide
  MOD_RES (37)..(37): Xaa is C or S
RPTQVQLSPISVLYKEIVRKKPIFLKYHYTLEDHLAXK

SEQ ID NO: 8418 - protein, 39 aa, Artificial Sequence
  Non-cyclic GFR-binding peptide
  MOD_RES (6)..(7): Xaa is C or S
  MOD_RES (21)..(22)..(23)..(24)..(25): Xaa is A or G
  MOD_RES (26)..(27)..(28)..(29): Xaa is A or G or absent
ASASPXXVSQDLSAISILYLXXXXXXXXXLKNYQMIVKS

SEQ ID NO: 8419 - protein, 36 aa, Artificial Sequence
  Non-cyclic GFR-binding peptide
  MOD_RES (1)..(34)..(36): Xaa is C or S
  MOD_RES (15)..(16)..(17)..(18)..(19): Xaa is A or G
  MOD_RES (20)..(21)..(22)..(23): Xaa is A or G or absent
XVPQALNAISILYFXXXXXXXXXLKKYRMIVRSXKX

SEQ ID NO: 8420 - protein, 38 aa, Artificial Sequence
  Non-cyclic GFR-binding peptide
  MOD_RES (5)..(6)..(37): Xaa is C or S
SASPXXVSQDLNAISILYFIGKTPKILKKYRMIVKSXK

SEQ ID NO: 8421 - protein, 36 aa, Artificial Sequence
  Non-cyclic GFR-binding peptide
  MOD_RES (1)..(33)..(35): Xaa is C or S
XVPTELNAISMLYFDEYDKVVLKKYREMVVEGXGXR

SEQ ID NO: 8422 - protein, 37 aa, Artificial Sequence
  Non-cyclic GFR-binding peptide
  MOD_RES (4)..(5)..(36): Xaa is C or S
AAPXXVPQALNAISILYFVGRKPKVLKKYRMIVRSXK

SEQ ID NO: 8423 - protein, 36 aa, Artificial Sequence
  Non-cyclic GFR-binding peptide
  MOD_RES (6)..(6): Xaa is C or S
VTKPTXAPTKLSATSVLYYDDSSNVILRKHRNMVVR

SEQ ID NO: 8424 - protein, 41 aa, Artificial Sequence
  Non-cyclic GFR-binding peptide
  MOD_RES (6)..(7)..(41): Xaa is C or S
  MOD_RES (21)..(22)..(23)..(24)..(25): Xaa is A or G
  MOD_RES (26)..(27)..(28)..(29): Xaa is A or G or absent
KIPKAXXVPTELSPISMLYKXXXXXXXXXLKYHYDMVVEGX

SEQ ID NO: 8425 - protein, 34 aa, Artificial Sequence
  Non-cyclic GFR-binding peptide
  MOD_RES (3)..(4): Xaa is C or S
APXXVPQALNAISILYFVGRKPKVLKKYRMIVRS

SEQ ID NO: 8426 - protein, 34 aa, Artificial Sequence
  Non-cyclic GFR-binding peptide
  MOD_RES (34)..(34): Xaa is C or S
  MOD_RES (14)..(15)..(16)..(17)..(18): Xaa is A or G
  MOD_RES (19)..(20)..(21)..(22): Xaa is A or G or absent
APTQLSAISVLYLXXXXXXXXXLKNYQNMVVRAX

SEQ ID NO: 8427 - protein, 41 aa, Artificial Sequence
  Non-cyclic GFR-binding peptide
  MOD_RES (6)..(7)..(41): Xaa is C or S
  MOD_RES (21)..(22)..(23)..(24)..(25): Xaa is A or G
  MOD_RES (26)..(27)..(28)..(29): Xaa is A or G or absent
AVPKAXXAPTKLSAISVLYLXXXXXXXXXLKNYQNMVVKAX

SEQ ID NO: 8428 - protein, 40 aa, Artificial Sequence
  Non-cyclic GFR-binding peptide
  MOD_RES (4)..(5)..(37)..(39): Xaa is C or S
PKPXXAPTQLSAISVLYLDDSSNVILKNYQNMVVRAXGXH

SEQ ID NO: 8429 - protein, 37 aa, Artificial Sequence
  Non-cyclic GFR-binding peptide
  MOD_RES (4)..(5): Xaa is C or S
  MOD_RES (19)..(20)..(21)..(22)..(23): Xaa is A or G
  MOD_RES (24)..(25)..(26)..(27): Xaa is A or G or absent
ASPXXVSQDLNAISILYFXXXXXXXXXLKKYRMIVKS

SEQ ID NO: 8430 - protein, 32 aa, Artificial Sequence
  Non-cyclic GFR-binding peptide
  MOD_RES (1)..(32): Xaa is C or S
XVPQDLSATSILYYVGRTPKVLRKHRMVVKSX

SEQ ID NO: 8431 - protein, 42 aa, Artificial Sequence
  Non-cyclic GFR-binding peptide
  MOD_RES (3)..(40)..(42): Xaa is C or S
  MOD_RES (19)..(20)..(21)..(22)..(23): Xaa is A or G
  MOD_RES (24)..(25)..(26)..(27): Xaa is A or G or absent
VQXRPTQVQLSATSVLYYXXXXXXXXXLRKHRTLEDHLAXKX

SEQ ID NO: 8432 - protein, 41 aa, Artificial Sequence
  Non-cyclic GFR-binding peptide
  MOD_RES (6)..(7)..(40): Xaa is C or S
  MOD_RES (21)..(22)..(23)..(24)..(25): Xaa is A or G
  MOD_RES (26)..(27)..(28)..(29): Xaa is A or G or absent
ASASPXXVSQDLSPISILYKXXXXXXXXXLKYHYMIVKSXK

SEQ ID NO: 8433 - protein, 41 aa, Artificial Sequence
  Non-cyclic GFR-binding peptide
  MOD_RES (5)..(6)..(39)..(41): Xaa is C or S
  MOD_RES (20)..(21)..(22)..(23)..(24): Xaa is A or G
  MOD_RES (25)..(26)..(27)..(28): Xaa is A or G or absent
SAAPXXVPQALSPISILYKXXXXXXXXXLKYHYMIVRSXKX

SEQ ID NO: 8434 - protein, 39 aa, Artificial Sequence
  Non-cyclic GFR-binding peptide
  MOD_RES (1)..(38): Xaa is C or S
  MOD_RES (17)..(18)..(19)..(20)..(21): Xaa is A or G
  MOD_RES (22)..(23)..(24)..(25): Xaa is A or G or absent
XRPTQVQLSPISVLYKXXXXXXXXXLKYHYTLEDHLAXK

SEQ ID NO: 8435 - protein, 40 aa, Artificial Sequence
  Non-cyclic GFR-binding peptide
  MOD_RES (3)..(4)..(38)..(40): Xaa is C or S
  MOD_RES (18)..(19)..(20)..(21)..(22): Xaa is A or G
  MOD_RES (23)..(24)..(25)..(26): Xaa is A or G or absent
KAXXVPTELSATSMLYYXXXXXXXXXLRKHRDMVVEGXGX

SEQ ID NO: 8436 - protein, 38 aa, Artificial Sequence
  Non-cyclic GFR-binding peptide
  MOD_RES (2)..(3)..(37): Xaa is C or S
  MOD_RES (17)..(18)..(19)..(20)..(21): Xaa is A or G
  MOD_RES (22)..(23)..(24)..(25): Xaa is A or G or absent
PXXAPTQLSATSVLYYXXXXXXXXXLRKHRNMVVRAXG

SEQ ID NO: 8437 - protein, 36 aa, Artificial Sequence
  Non-cyclic GFR-binding peptide
  MOD_RES (2)..(3): Xaa is C or S
  MOD_RES (17)..(18)..(19)..(20)..(21): Xaa is A or G
  MOD_RES (22)..(23)..(24)..(25): Xaa is A or G or absent
PXXAPTQLSAISVLYLXXXXXXXXXLKNYQNMVVRA

SEQ ID NO: 8438 - protein, 40 aa, Artificial Sequence
  Non-cyclic GFR-binding peptide
  MOD_RES (2)..(3)..(37)..(39): Xaa is C or S
  MOD_RES (17)..(18)..(19)..(20)..(21): Xaa is A or G
  MOD_RES (22)..(23)..(24)..(25): Xaa is A or G or absent
PXXAPTQLSPISVLYKXXXXXXXXXLKYHYNMVVRAXGXH

SEQ ID NO: 8439 - protein, 31 aa, Artificial Sequence
  Non-cyclic GFR-binding peptide
  MOD_RES (31)..(31): Xaa is C or S
VPQDLSATSILYYVGRTPKVLRKHRMVVKSX

SEQ ID NO: 8440 - protein, 41 aa, Artificial Sequence
  Non-cyclic GFR-binding peptide
  MOD_RES (6)..(7)..(38)..(40): Xaa is C or S
ASASPXXVSQDLNAISILYFIGKTPKILKKYRMIVKSXKXS

SEQ ID NO: 8441 - protein, 35 aa, Artificial Sequence
  Non-cyclic GFR-binding peptide
  MOD_RES (2)..(3): Xaa is C or S
  MOD_RES (17)..(18)..(19)..(20)..(21): Xaa is A or G
  MOD_RES (22)..(23)..(24)..(25): Xaa is A or G or absent
PXXAPTKLSPISVLYKXXXXXXXXXLKYHYNMVVR

SEQ ID NO: 8442 - protein, 35 aa, Artificial Sequence
  Non-cyclic GFR-binding peptide
  MOD_RES (35)..(35): Xaa is C or S
  MOD_RES (14)..(15)..(16)..(17)..(18): Xaa is A or G
  MOD_RES (19)..(20)..(21)..(22): Xaa is A or G or absent
TQVQLSPISVLYKXXXXXXXXXLKYHYTLEDHLAX

SEQ ID NO: 8443 - protein, 39 aa, Artificial Sequence
  Non-cyclic GFR-binding peptide
  MOD_RES (4)..(5)..(36)..(38): Xaa is C or S
AAPXXVPQALNAISILYFVGRKPKVLKKYRMIVRSXKXS

SEQ ID NO: 8444 - protein, 36 aa, Artificial Sequence
  Non-cyclic GFR-binding peptide
  MOD_RES (1)..(2)..(34)..(36): Xaa is C or S
XXAPTKLSAISVLYLDSSNNVILKNYQNMVVKAXGX

SEQ ID NO: 8445 - protein, 34 aa, Artificial Sequence
  Non-cyclic GFR-binding peptide
  MOD_RES (34)..(34): Xaa is C or S
  MOD_RES (14)..(15)..(16)..(17)..(18): Xaa is A or G
  MOD_RES (19)..(20)..(21)..(22): Xaa is A or G or absent
APTKLSPISVLYKXXXXXXXXXLKYHYNMVVKAX

SEQ ID NO: 8446 - protein, 33 aa, Artificial Sequence
  Non-cyclic GFR-binding peptide
  MOD_RES (32)..(32): Xaa is C or S
APTQLSAISVLYLDDSSNVILKNYQNMVVRAXG

SEQ ID NO: 8447 - protein, 37 aa, Artificial Sequence
  Non-cyclic GFR-binding peptide
  MOD_RES (4)..(5): Xaa is C or S
  MOD_RES (19)..(20)..(21)..(22)..(23): Xaa is A or G
  MOD_RES (24)..(25)..(26)..(27): Xaa is A or G or absent
PKAXXVPTELNAISMLYFXXXXXXXXXLKKYREMVVE

SEQ ID NO: 8448 - protein, 40 aa, Artificial Sequence
  Non-cyclic GFR-binding peptide
  MOD_RES (4)..(5)..(40): Xaa is C or S
  MOD_RES (19)..(20)..(21)..(22)..(23): Xaa is A or G
  MOD_RES (24)..(25)..(26)..(27): Xaa is A or G or absent
GKAXXVPTKLSAISVLYLXXXXXXXXXLKNYQEGMSVAEX

SEQ ID NO: 8449 - protein, 40 aa, Artificial Sequence
  Non-cyclic GFR-binding peptide
  MOD_RES (5)..(6)..(38)..(40): Xaa is C or S
IPKAXXVPTELNAISMLYFDENEKVVLKKYRDMVVEGXGX

SEQ ID NO: 8450 - protein, 39 aa, Artificial Sequence
  Non-cyclic GFR-binding peptide
  MOD_RES (5)..(6)..(39): Xaa is C or S
VGKAXXVPTKLSATSVLYYDDMGVPTLRKHREGMSVAEX

SEQ ID NO: 8451 - protein, 34 aa, Artificial Sequence
  Non-cyclic GFR-binding peptide
  MOD_RES (3)..(4): Xaa is C or S
KAXXVPTELSPISMLYKDENEKVVLKYHYDMVVE

SEQ ID NO: 8452 - protein, 39 aa, Artificial Sequence
  Non-cyclic GFR-binding peptide
  MOD_RES (5)..(6)..(38): Xaa is C or S
IPKAXXVPTELSATSMLYYDEYDKVVLRKHREMVVEGXG

SEQ ID NO: 8453 - protein, 39 aa, Artificial Sequence
  Non-cyclic GFR-binding peptide
  MOD_RES (6)..(7): Xaa is C or S
  MOD_RES (21)..(22)..(23)..(24)..(25): Xaa is A or G
  MOD_RES (26)..(27)..(28)..(29): Xaa is A or G or absent
ASASPXXVPQDLNAISILYFXXXXXXXXXLKKYRMVVKS

SEQ ID NO: 8454 - protein, 34 aa, Artificial Sequence
  Non-cyclic GFR-binding peptide
  MOD_RES (1)..(2): Xaa is C or S
  MOD_RES (16)..(17)..(18)..(19)..(20): Xaa is A or G
  MOD_RES (21)..(22)..(23)..(24): Xaa is A or G or absent
XXVSQDLSPISILYKXXXXXXXXXLKYHYMIVKS

SEQ ID NO: 8455 - protein, 39 aa, Artificial Sequence
  Non-cyclic GFR-binding peptide
  MOD_RES (4)..(4): Xaa is C or S
  MOD_RES (20)..(21)..(22)..(23)..(24): Xaa is A or G
  MOD_RES (25)..(26)..(27)..(28): Xaa is A or G or absent
NVQXRPTQVQLNAISVLYFXXXXXXXXXLKKYRTLEDHL

SEQ ID NO: 8456 - protein, 36 aa, Artificial Sequence
  Non-cyclic GFR-binding peptide
  MOD_RES (35)..(35): Xaa is C or S
  MOD_RES (14)..(15)..(16)..(17)..(18): Xaa is A or G
  MOD_RES (19)..(20)..(21)..(22): Xaa is A or G or absent
VPTKLSAISVLYLXXXXXXXXXLKNYQEGMSVAEXG

SEQ ID NO: 8457 - protein, 38 aa, Artificial Sequence
  Non-cyclic GFR-binding peptide
  MOD_RES (35)..(37): Xaa is C or S
  MOD_RES (14)..(15)..(16)..(17)..(18): Xaa is A or G
  MOD_RES (19)..(20)..(21)..(22): Xaa is A or G or absent
TQVQLSAISVLYLXXXXXXXXXLKNYQTLEDHLAXKXE

SEQ ID NO: 8458 - protein, 39 aa, Artificial Sequence
  Non-cyclic GFR-binding peptide
  MOD_RES (1)..(2)..(37)..(39): Xaa is C or S
  MOD_RES (16)..(17)..(18)..(19)..(20): Xaa is A or G
  MOD_RES (21)..(22)..(23)..(24): Xaa is A or G or absent
XXVPTKLNAISVLYFXXXXXXXXXLKKYREGMSVAEXGX

SEQ ID NO: 8459 - protein, 36 aa, Artificial Sequence
  Non-cyclic GFR-binding peptide
  MOD_RES (5)..(6): Xaa is C or S
IPKAXXVPTELSPISMLYKDEYDKVVLKYHYEMVVE

SEQ ID NO: 8460 - protein, 39 aa, Artificial Sequence
  Non-cyclic GFR-binding peptide
  MOD_RES (2)..(3)..(38): Xaa is C or S
  MOD_RES (17)..(18)..(19)..(20)..(21): Xaa is A or G
  MOD_RES (22)..(23)..(24)..(25): Xaa is A or G or absent
AXXVPTKLSATSVLYYXXXXXXXXXLRKHREGMSVAEXG

SEQ ID NO: 8461 - protein, 42 aa, Artificial Sequence
  Non-cyclic GFR-binding peptide
  MOD_RES (6)..(7)..(40)..(42): Xaa is C or S
  MOD_RES (21)..(22)..(23)..(24)..(25): Xaa is A or G
  MOD_RES (26)..(27)..(28)..(29): Xaa is A or G or absent
ASASPXXVPQDLNAISILYFXXXXXXXXXLKKYRMVVKSXKX

SEQ ID NO: 8462 - protein, 43 aa, Artificial Sequence
  Non-cyclic GFR-binding peptide
  MOD_RES (6)..(7)..(40)..(42): Xaa is C or S
  MOD_RES (21)..(22)..(23)..(24)..(25): Xaa is A or G
  MOD_RES (26)..(27)..(28)..(29): Xaa is A or G or absent
ASASPXXVPQDLNAISILYFXXXXXXXXXLKKYRMVVKSXKXS

SEQ ID NO: 8463 - protein, 33 aa, Artificial Sequence
  Non-cyclic GFR-binding peptide
  MOD_RES (31)..(33): Xaa is C or S
VPQDLNAISILYFVGRTPKVLKKYRMVVKSXKX

SEQ ID NO: 8464 - protein, 40 aa, Artificial Sequence
  Non-cyclic GFR-binding peptide
  MOD_RES (6)..(40): Xaa is C or S
  MOD_RES (20)..(21)..(22)..(23)..(24): Xaa is A or G
  MOD_RES (25)..(26)..(27)..(28): Xaa is A or G or absent
VTKPTXAPTKLSAISVLYLXXXXXXXXXLKNYQNMVVRSX

SEQ ID NO: 8465 - protein, 41 aa, Artificial Sequence
  Non-cyclic GFR-binding peptide
  MOD_RES (5)..(6)..(38)..(40): Xaa is C or S
VPKPXXAPTQLSPISVLYKDDSSNVILKYHYNMVVRAXGXH

SEQ ID NO: 8466 - protein, 35 aa, Artificial Sequence
  Non-cyclic GFR-binding peptide
  MOD_RES (34)..(34): Xaa is C or S
  MOD_RES (14)..(15)..(16)..(17)..(18): Xaa is A or G
  MOD_RES (19)..(20)..(21)..(22): Xaa is A or G or absent
VPTELSATSMLYYXXXXXXXXXLRKHRDMVVEGXG

SEQ ID NO: 8467 - protein, 39 aa, Artificial Sequence
  Non-cyclic GFR-binding peptide
  MOD_RES (3)..(4)..(39): Xaa is C or S
  MOD_RES (18)..(19)..(20)..(21)..(22): Xaa is A or G
  MOD_RES (23)..(24)..(25)..(26): Xaa is A or G or absent
KAXXVPTKLSATSVLYYXXXXXXXXXLRKHREGMSVAEX

SEQ ID NO: 8468 - protein, 39 aa, Artificial Sequence
  Non-cyclic GFR-binding peptide
  MOD_RES (5)..(37)..(39): Xaa is C or S
TKPTXAPTKLSAISVLYLDDSSNVILKNYQNMVVRSXGX

SEQ ID NO: 8469 - protein, 41 aa, Artificial Sequence
  Non-cyclic GFR-binding peptide
  MOD_RES (3)..(4)..(38)..(40): Xaa is C or S
  MOD_RES (18)..(19)..(20)..(21)..(22): Xaa is A or G
  MOD_RES (23)..(24)..(25)..(26): Xaa is A or G or absent
KAXXVPTELSPISMLYKXXXXXXXXXLKYHYDMVVEGXGXR

SEQ ID NO: 8470 - protein, 35 aa, Artificial Sequence
  Non-cyclic GFR-binding peptide
  MOD_RES (1)..(35): Xaa is C or S
  MOD_RES (15)..(16)..(17)..(18)..(19): Xaa is A or G
  MOD_RES (20)..(21)..(22)..(23): Xaa is A or G or absent
XAPTKLSPISVLYKXXXXXXXXXLKYHYNMVVKAX

SEQ ID NO: 8471 - protein, 33 aa, Artificial Sequence
  Non-cyclic GFR-binding peptide
  MOD_RES (32)..(32): Xaa is C or S
APTKLSAISVLYLDDSSNVILKNYQNMVVRSXG

SEQ ID NO: 8472 - protein, 39 aa, Artificial Sequence
  Non-cyclic GFR-binding peptide
  MOD_RES (2)..(3)..(36)..(38): Xaa is C or S
  MOD_RES (17)..(18)..(19)..(20)..(21): Xaa is A or G
  MOD_RES (22)..(23)..(24)..(25): Xaa is A or G or absent
PXXVPQALSPISILYKXXXXXXXXXLKYHYMIVRSXKXS

SEQ ID NO: 8473 - protein, 36 aa, Artificial Sequence
  Non-cyclic GFR-binding peptide
  MOD_RES (1)..(2)..(34)..(36): Xaa is C or S
XXAPTQLSATSVLYYDDSSNVILRKHRNMVVRAXGX

SEQ ID NO: 8474 - protein, 36 aa, Artificial Sequence
  Non-cyclic GFR-binding peptide
  MOD_RES (3)..(4): Xaa is C or S
  MOD_RES (18)..(19)..(20)..(21)..(22): Xaa is A or G
  MOD_RES (23)..(24)..(25)..(26): Xaa is A or G or absent
SPXXVPQDLNAISILYFXXXXXXXXXLKKYRMVVKS

SEQ ID NO: 8475 - protein, 37 aa, Artificial Sequence
  Non-cyclic GFR-binding peptide
  MOD_RES (3)..(4)..(37): Xaa is C or S
  MOD_RES (18)..(19)..(20)..(21)..(22): Xaa is A or G
  MOD_RES (23)..(24)..(25)..(26): Xaa is A or G or absent
SPXXVSQDLNAISILYFXXXXXXXXXLKKYRMIVKSX

SEQ ID NO: 8476 - protein, 38 aa, Artificial Sequence
  Non-cyclic GFR-binding peptide
  MOD_RES (5)..(6)..(38): Xaa is C or S
IPKAXXVPTELSATSMLYYDENEKVVLRKHRDMVVEGX

SEQ ID NO: 8477 - protein, 40 aa, Artificial Sequence
  Non-cyclic GFR-binding peptide
  MOD_RES (4)..(4): Xaa is C or S
NVQXRPTQVQLSPISVLYKEIVRKKPIFLKYHYTLEDHLA

SEQ ID NO: 8478 - protein, 37 aa, Artificial Sequence
  Non-cyclic GFR-binding peptide
  MOD_RES (3)..(35)..(37): Xaa is C or S
PTXAPTKLSATSVLYYDDSSNVILRKHRNMVVRSXGX

SEQ ID NO: 8479 - protein, 42 aa, Artificial Sequence
  Non-cyclic GFR-binding peptide
  MOD_RES (6)..(40)..(42): Xaa is C or S
  MOD_RES (20)..(21)..(22)..(23)..(24): Xaa is A or G
  MOD_RES (25)..(26)..(27)..(28): Xaa is A or G or absent
VTKPTXAPTKLSATSVLYYXXXXXXXXXLRKHRNMVVRSXGX

SEQ ID NO: 8480 - protein, 33 aa, Artificial Sequence
  Non-cyclic GFR-binding peptide
  MOD_RES (1)..(32): Xaa is C or S
XVSQDLSAISILYLIGKTPKILKNYQMIVKSXK

SEQ ID NO: 8481 - protein, 40 aa, Artificial Sequence
  Non-cyclic GFR-binding peptide
  MOD_RES (5)..(6)..(40): Xaa is C or S
  MOD_RES (20)..(21)..(22)..(23)..(24): Xaa is A or G
  MOD_RES (25)..(26)..(27)..(28): Xaa is A or G or absent
VPKPXXAPTQLSAISVLYLXXXXXXXXXLKNYQNMVVRAX

SEQ ID NO: 8482 - protein, 35 aa, Artificial Sequence
  Non-cyclic GFR-binding peptide
  MOD_RES (1)..(33)..(35): Xaa is C or S
XVPTELNAISMLYFDEYDKVVLKKYREMVVEGXGX

SEQ ID NO: 8483 - protein, 39 aa, Artificial Sequence
  Non-cyclic GFR-binding peptide
  MOD_RES (5)..(6): Xaa is C or S
  MOD_RES (20)..(21)..(22)..(23)..(24): Xaa is A or G
  MOD_RES (25)..(26)..(27)..(28): Xaa is A or G or absent
VPKAXXAPTKLNAISVLYFXXXXXXXXXLKKYRNMVVKA

SEQ ID NO: 8484 - protein, 40 aa, Artificial Sequence
  Non-cyclic GFR-binding peptide
  MOD_RES (4)..(5)..(39): Xaa is C or S
  MOD_RES (19)..(20)..(21)..(22)..(23): Xaa is A or G
  MOD_RES (24)..(25)..(26)..(27): Xaa is A or G or absent
PKPXXAPTKLSPISVLYKXXXXXXXXXLKYHYNMVVRSXG

SEQ ID NO: 8485 - protein, 37 aa, Artificial Sequence
  Non-cyclic GFR-binding peptide
  MOD_RES (1)..(2)..(35)..(37): Xaa is C or S
  MOD_RES (16)..(17)..(18)..(19)..(20): Xaa is A or G
  MOD_RES (21)..(22)..(23)..(24): Xaa is A or G or absent
XXVPQALNAISILYFXXXXXXXXXLKKYRMIVRSXKX

SEQ ID NO: 8486 - protein, 37 aa, Artificial Sequence
  Non-cyclic GFR-binding peptide
  MOD_RES (3)..(4)..(36): Xaa is C or S
KAXXVPTELNAISMLYFDENEKVVLKKYRDMVVEGXG

SEQ ID NO: 8487 - protein, 37 aa, Artificial Sequence
  Non-cyclic GFR-binding peptide
  MOD_RES (2)..(3)..(37): Xaa is C or S
  MOD_RES (17)..(18)..(19)..(20)..(21): Xaa is A or G
  MOD_RES (22)..(23)..(24)..(25): Xaa is A or G or absent
PXXAPTKLSATSVLYYXXXXXXXXXLRKHRNMVVRSX

SEQ ID NO: 8488 - protein, 33 aa, Artificial Sequence
  Non-cyclic GFR-binding peptide
  MOD_RES (14)..(15)..(16)..(17)..(18): Xaa is A or G
  MOD_RES (19)..(20)..(21)..(22): Xaa is A or G or absent
APTKLSAISVLYLXXXXXXXXXLKNYQNMVVRS

SEQ ID NO: 8489 - protein, 35 aa, Artificial Sequence
  Non-cyclic GFR-binding peptide
  MOD_RES (3)..(4)..(35): Xaa is C or S
APXXVPQALNAISILYFVGRKPKVLKKYRMIVRSX

SEQ ID NO: 8490 - protein, 43 aa, Artificial Sequence
  Non-cyclic GFR-binding peptide
  MOD_RES (4)..(5)..(40)..(42): Xaa is C or S
  MOD_RES (19)..(20)..(21)..(22)..(23): Xaa is A or G
  MOD_RES (24)..(25)..(26)..(27): Xaa is A or G or absent
GKAXXVPTKLSATSVLYYXXXXXXXXXLRKHREGMSVAEXGXR

SEQ ID NO: 8491 - protein, 43 aa, Artificial Sequence
  Non-cyclic GFR-binding peptide
  MOD_RES (6)..(7)..(41)..(43): Xaa is C or S
  MOD_RES (21)..(22)..(23)..(24)..(25): Xaa is A or G
  MOD_RES (26)..(27)..(28)..(29): Xaa is A or G or absent
YVPKPXXAPTKLSAISVLYLXXXXXXXXXLKNYQNMVVRSXGX

SEQ ID NO: 8492 - protein, 35 aa, Artificial Sequence
  Non-cyclic GFR-binding peptide
  MOD_RES (2)..(3)..(34): Xaa is C or S
PXXVPQDLNAISILYFVGRTPKVLKKYRMVVKSXK

SEQ ID NO: 8493 - protein, 36 aa, Artificial Sequence
  Non-cyclic GFR-binding peptide
  MOD_RES (3)..(4)..(36): Xaa is C or S
KAXXAPTKLSAISVLYLDSSNNVILKNYQNMVVKAX

SEQ ID NO: 8494 - protein, 33 aa, Artificial Sequence
  Non-cyclic GFR-binding peptide
  MOD_RES (14)..(15)..(16)..(17)..(18): Xaa is A or G
  MOD_RES (19)..(20)..(21)..(22): Xaa is A or G or absent
TQVQLNAISVLYFXXXXXXXXXLKKYRTLEDHL

SEQ ID NO: 8495 - protein, 34 aa, Artificial Sequence
  Non-cyclic GFR-binding peptide
RPTQVQLSPISVLYKEIVRKKPIFLKYHYTLEDH

SEQ ID NO: 8496 - protein, 38 aa, Artificial Sequence
  Non-cyclic GFR-binding peptide
  MOD_RES (1)..(2)..(36)..(38): Xaa is C or S
  MOD_RES (16)..(17)..(18)..(19)..(20): Xaa is A or G
  MOD_RES (21)..(22)..(23)..(24): Xaa is A or G or absent
XXAPTKLSPISVLYKXXXXXXXXXLKYHYNMVVKAXGX

SEQ ID NO: 8497 - protein, 41 aa, Artificial Sequence
  Non-cyclic GFR-binding peptide
  MOD_RES (6)..(7)..(38)..(40): Xaa is C or S
ASASPXXVPQDLSATSILYYVGRTPKVLRKHRMVVKSXKXS

SEQ ID NO: 8498 - protein, 31 aa, Artificial Sequence
  Non-cyclic GFR-binding peptide
VPTELNAISMLYFDEYDKVVLKKYREMVVEG

SEQ ID NO: 8499 - protein, 39 aa, Artificial Sequence
  Non-cyclic GFR-binding peptide
  MOD_RES (3)..(4)..(38): Xaa is C or S
  MOD_RES (18)..(19)..(20)..(21)..(22): Xaa is A or G
  MOD_RES (23)..(24)..(25)..(26): Xaa is A or G or absent
KPXXAPTKLSPISVLYKXXXXXXXXXLKYHYNMVVRSXG

SEQ ID NO: 8500 - protein, 39 aa, Artificial Sequence
  Non-cyclic GFR-binding peptide
  MOD_RES (1)..(2)..(36)..(38): Xaa is C or S
  MOD_RES (16)..(17)..(18)..(19)..(20): Xaa is A or G
  MOD_RES (21)..(22)..(23)..(24): Xaa is A or G or absent
XXAPTKLSAISVLYLXXXXXXXXXLKNYQNMVVKAXGXH

SEQ ID NO: 8501 - protein, 34 aa, Artificial Sequence
  Non-cyclic GFR-binding peptide
  MOD_RES (15)..(16)..(17)..(18)..(19): Xaa is A or G
  MOD_RES (20)..(21)..(22)..(23): Xaa is A or G or absent
PTQVQLSAISVLYLXXXXXXXXXLKNYQTLEDHL

SEQ ID NO: 8502 - protein, 37 aa, Artificial Sequence
  Non-cyclic GFR-binding peptide
  MOD_RES (34)..(36): Xaa is C or S
  MOD_RES (14)..(15)..(16)..(17)..(18): Xaa is A or G
  MOD_RES (19)..(20)..(21)..(22): Xaa is A or G or absent
APTQLSAISVLYLXXXXXXXXXLKNYQNMVVRAXGXH

SEQ ID NO: 8503 - protein, 41 aa, Artificial Sequence
  Non-cyclic GFR-binding peptide
  MOD_RES (4)..(5)..(38)..(40): Xaa is C or S
  MOD_RES (19)..(20)..(21)..(22)..(23): Xaa is A or G
  MOD_RES (24)..(25)..(26)..(27): Xaa is A or G or absent
AAPXXVPQALSPISILYKXXXXXXXXXLKYHYMIVRSXKXS

SEQ ID NO: 8504 - protein, 38 aa, Artificial Sequence
  Non-cyclic GFR-binding peptide
  MOD_RES (3)..(4)..(35)..(37): Xaa is C or S
APXXVPQALSPISILYKVGRKPKVLKYHYMIVRSXKXS

SEQ ID NO: 8505 - protein, 37 aa, Artificial Sequence
  Non-cyclic GFR-binding peptide
  MOD_RES (5)..(6): Xaa is C or S
VPKPXXAPTKLSATSVLYYDDSSNVILRKHRNMVVRS

SEQ ID NO: 8506 - protein, 39 aa, Artificial Sequence
  Non-cyclic GFR-binding peptide
  MOD_RES (5)..(6)..(38): Xaa is C or S
IPKAXXVPTELNAISMLYFDENEKVVLKKYRDMVVEGXG

SEQ ID NO: 8507 - protein, 36 aa, Artificial Sequence
  Non-cyclic GFR-binding peptide
  MOD_RES (33)..(35): Xaa is C or S
  MOD_RES (14)..(15)..(16)..(17)..(18): Xaa is A or G
  MOD_RES (19)..(20)..(21)..(22): Xaa is A or G or absent
VPQALSPISILYKXXXXXXXXXLKYHYMIVRSXKXS

SEQ ID NO: 8508 - protein, 36 aa, Artificial Sequence
  Non-cyclic GFR-binding peptide
  MOD_RES (3)..(4): Xaa is C or S
  MOD_RES (18)..(19)..(20)..(21)..(22): Xaa is A or G
  MOD_RES (23)..(24)..(25)..(26): Xaa is A or G or absent
KPXXAPTKLSAISVLYLXXXXXXXXXLKNYQNMVVR

SEQ ID NO: 8509 - protein, 37 aa, Artificial Sequence
  Non-cyclic GFR-binding peptide
  MOD_RES (4)..(5)..(37): Xaa is C or S
PKPXXAPTKLSPISVLYKDDSSNVILKYHYNMVVRSX

SEQ ID NO: 8510 - protein, 33 aa, Artificial Sequence
  Non-cyclic GFR-binding peptide
  MOD_RES (1)..(1): Xaa is C or S
XVPTKLSATSVLYYDDMGVPTLRKHREGMSVAE

SEQ ID NO: 8511 - protein, 35 aa, Artificial Sequence
  Non-cyclic GFR-binding peptide
  MOD_RES (4)..(5): Xaa is C or S
ASPXXVPQDLNAISILYFVGRTPKVLKKYRMVVKS

SEQ ID NO: 8512 - protein, 36 aa, Artificial Sequence
  Non-cyclic GFR-binding peptide
  MOD_RES (1)..(33)..(35): Xaa is C or S
XAPTQLSATSVLYYDDSSNVILRKHRNMVVRAXGXH

SEQ ID NO: 8513 - protein, 38 aa, Artificial Sequence
  Non-cyclic GFR-binding peptide
  MOD_RES (3)..(4)..(38): Xaa is C or S
  MOD_RES (18)..(19)..(20)..(21)..(22): Xaa is A or G
  MOD_RES (23)..(24)..(25)..(26): Xaa is A or G or absent
KAXXVPTELNAISMLYFXXXXXXXXXLKKYREMVVEGX

SEQ ID NO: 8514 - protein, 38 aa, Artificial Sequence
  Non-cyclic GFR-binding peptide
  MOD_RES (4)..(4): Xaa is C or S
NVQXRPTQVQLSAISVLYLEIVRKKPIFLKNYQTLEDH

SEQ ID NO: 8515 - protein, 37 aa, Artificial Sequence
  Non-cyclic GFR-binding peptide
  MOD_RES (34)..(36): Xaa is C or S
  MOD_RES (14)..(15)..(16)..(17)..(18): Xaa is A or G
  MOD_RES (19)..(20)..(21)..(22): Xaa is A or G or absent
VPTELSATSMLYYXXXXXXXXXLRKHREMVVEGXGXR

SEQ ID NO: 8516 - protein, 38 aa, Artificial Sequence
  Non-cyclic GFR-binding peptide
  MOD_RES (5)..(6)..(37): Xaa is C or S
SASPXXVSQDLSAISILYLIGKTPKILKNYQMIVKSXK

SEQ ID NO: 8517 - protein, 39 aa, Artificial Sequence
  Non-cyclic GFR-binding peptide
  MOD_RES (5)..(5): Xaa is C or S
  MOD_RES (21)..(22)..(23)..(24)..(25): Xaa is A or G
  MOD_RES (26)..(27)..(28)..(29): Xaa is A or G or absent
RNVQXRPTQVQLNAISVLYFXXXXXXXXXLKKYRTLEDH

SEQ ID NO: 8518 - protein, 31 aa, Artificial Sequence
  Non-cyclic GFR-binding peptide
  MOD_RES (1)..(1): Xaa is C or S
XVPTELSPISMLYKDENEKVVLKYHYDMVVE

SEQ ID NO: 8519 - protein, 35 aa, Artificial Sequence
  Non-cyclic GFR-binding peptide
  MOD_RES (1)..(2): Xaa is C or S
  MOD_RES (16)..(17)..(18)..(19)..(20): Xaa is A or G
  MOD_RES (21)..(22)..(23)..(24): Xaa is A or G or absent
XXAPTQLSPISVLYKXXXXXXXXXLKYHYNMVVRA

SEQ ID NO: 8520 - protein, 34 aa, Artificial Sequence
  Non-cyclic GFR-binding peptide
  MOD_RES (1)..(2)..(34): Xaa is C or S
XXVPTELSPISMLYKDEYDKVVLKYHYEMVVEGX

SEQ ID NO: 8521 - protein, 39 aa, Artificial Sequence
  Non-cyclic GFR-binding peptide
  MOD_RES (6)..(7): Xaa is C or S
  MOD_RES (21)..(22)..(23)..(24)..(25): Xaa is A or G
  MOD_RES (26)..(27)..(28)..(29): Xaa is A or G or absent
ASAAPXXVPQALSPISILYKXXXXXXXXXLKYHYMIVRS

SEQ ID NO: 8522 - protein, 43 aa, Artificial Sequence
  Non-cyclic GFR-binding peptide
  MOD_RES (6)..(7)..(40)..(42): Xaa is C or S
KVGKAXXVPTKLSATSVLYYDDMGVPTLRKHREGMSVAEXGXR

SEQ ID NO: 8523 - protein, 41 aa, Artificial Sequence
  Non-cyclic GFR-binding peptide
  MOD_RES (6)..(7)..(39)..(41): Xaa is C or S
AVPKAXXAPTKLNAISVLYFDSSNNVILKKYRNMVVKAXGX

SEQ ID NO: 8524 - protein, 37 aa, Artificial Sequence
  Non-cyclic GFR-binding peptide
  MOD_RES (3)..(4)..(37): Xaa is C or S
  MOD_RES (18)..(19)..(20)..(21)..(22): Xaa is A or G
  MOD_RES (23)..(24)..(25)..(26): Xaa is A or G or absent
SPXXVSQDLSATSILYYXXXXXXXXXLRKHRMIVKSX

SEQ ID NO: 8525 - protein, 39 aa, Artificial Sequence
  Non-cyclic GFR-binding peptide
  MOD_RES (4)..(5)..(36)..(38): Xaa is C or S
ASPXXVSQDLNAISILYFIGKTPKILKKYRMIVKSXKXS

SEQ ID NO: 8526 - protein, 42 aa, Artificial Sequence
  Non-cyclic GFR-binding peptide
  MOD_RES (4)..(5)..(39)..(41): Xaa is C or S
  MOD_RES (19)..(20)..(21)..(22)..(23): Xaa is A or G
  MOD_RES (24)..(25)..(26)..(27): Xaa is A or G or absent
PKPXXAPTQLSPISVLYKXXXXXXXXXLKYHYNMVVRAXGXH

SEQ ID NO: 8527 - protein, 33 aa, Artificial Sequence
  Non-cyclic GFR-binding peptide
  MOD_RES (32)..(32): Xaa is C or S
APTKLSPISVLYKDDSSNVILKYHYNMVVRSXG

SEQ ID NO: 8528 - protein, 37 aa, Artificial Sequence
  Non-cyclic GFR-binding peptide
  MOD_RES (5)..(6): Xaa is C or S
VPKAXXAPTKLSAISVLYLDSSNNVILKNYQNMVVKA

SEQ ID NO: 8529 - protein, 37 aa, Artificial Sequence
  Non-cyclic GFR-binding peptide
  MOD_RES (1)..(34)..(36): Xaa is C or S
  MOD_RES (15)..(16)..(17)..(18)..(19): Xaa is A or G
  MOD_RES (20)..(21)..(22)..(23): Xaa is A or G or absent
XVPQALSAISILYLXXXXXXXXXLKNYQMIVRSXKXS

SEQ ID NO: 8530 - protein, 36 aa, Artificial Sequence
  Non-cyclic GFR-binding peptide
  MOD_RES (4)..(4): Xaa is C or S
  MOD_RES (18)..(19)..(20)..(21)..(22): Xaa is A or G
  MOD_RES (23)..(24)..(25)..(26): Xaa is A or G or absent
KPTXAPTKLSATSVLYYXXXXXXXXXLRKHRNMVVR

SEQ ID NO: 8531 - protein, 36 aa, Artificial Sequence
  Non-cyclic GFR-binding peptide
  MOD_RES (5)..(6): Xaa is C or S
IPKAXXVPTELSATSMLYYDENEKVVLRKHRDMVVE

SEQ ID NO: 8532 - protein, 37 aa, Artificial Sequence
  Non-cyclic GFR-binding peptide
  MOD_RES (3)..(4)..(37): Xaa is C or S
  MOD_RES (18)..(19)..(20)..(21)..(22): Xaa is A or G
  MOD_RES (23)..(24)..(25)..(26): Xaa is A or G or absent
SPXXVSQDLSAISILYLXXXXXXXXXLKNYQMIVKSX

SEQ ID NO: 8533 - protein, 35 aa, Artificial Sequence
  Non-cyclic GFR-binding peptide
  MOD_RES (2)..(3): Xaa is C or S
  MOD_RES (17)..(18)..(19)..(20)..(21): Xaa is A or G
  MOD_RES (22)..(23)..(24)..(25): Xaa is A or G or absent
PXXAPTKLSATSVLYYXXXXXXXXXLRKHRNMVVR

SEQ ID NO: 8534 - protein, 42 aa, Artificial Sequence
  Non-cyclic GFR-binding peptide
  MOD_RES (5)..(6)..(39)..(41): Xaa is C or S
  MOD_RES (20)..(21)..(22)..(23)..(24): Xaa is A or G
  MOD_RES (25)..(26)..(27)..(28): Xaa is A or G or absent
SASPXXVSQDLSAISILYLXXXXXXXXXLKNYQMIVKSXKXS

SEQ ID NO: 8535 - protein, 42 aa, Artificial Sequence
  Non-cyclic GFR-binding peptide
  MOD_RES (6)..(7)..(39)..(41): Xaa is C or S
TVPKPXXAPTQLSATSVLYYDDSSNVILRKHRNMVVRAXGXH

SEQ ID NO: 8536 - protein, 32 aa, Artificial Sequence
  Non-cyclic GFR-binding peptide
  MOD_RES (14)..(15)..(16)..(17)..(18): Xaa is A or G
  MOD_RES (19)..(20)..(21)..(22): Xaa is A or G or absent
VSQDLNAISILYFXXXXXXXXXLKKYRMIVKS

SEQ ID NO: 8537 - protein, 43 aa, Artificial Sequence
  Non-cyclic GFR-binding peptide
  MOD_RES (6)..(7)..(42): Xaa is C or S
  MOD_RES (21)..(22)..(23)..(24)..(25): Xaa is A or G
  MOD_RES (26)..(27)..(28)..(29): Xaa is A or G or absent
KVGKAXXVPTKLSATSVLYYXXXXXXXXXLRKHREGMSVAEXG

SEQ ID NO: 8538 - protein, 35 aa, Artificial Sequence
  Non-cyclic GFR-binding peptide
  MOD_RES (4)..(5): Xaa is C or S
PKPXXAPTQLSATSVLYYDDSSNVILRKHRNMVVR

SEQ ID NO: 8539 - protein, 37 aa, Artificial Sequence
  Non-cyclic GFR-binding peptide
  MOD_RES (2)..(3)..(35)..(37): Xaa is C or S
AXXVPTELSPISMLYKDEYDKVVLKYHYEMVVEGXGX

SEQ ID NO: 8540 - protein, 40 aa, Artificial Sequence
  Non-cyclic GFR-binding peptide
  MOD_RES (3)..(4)..(38)..(40): Xaa is C or S
  MOD_RES (18)..(19)..(20)..(21)..(22): Xaa is A or G
  MOD_RES (23)..(24)..(25)..(26): Xaa is A or G or absent
KAXXVPTELSATSMLYYXXXXXXXXXLRKHREMVVEGXGX

SEQ ID NO: 8541 - protein, 38 aa, Artificial Sequence
  Non-cyclic GFR-binding peptide
  MOD_RES (3)..(4)..(37): Xaa is C or S
  MOD_RES (18)..(19)..(20)..(21)..(22): Xaa is A or G
  MOD_RES (23)..(24)..(25)..(26): Xaa is A or G or absent
SPXXVPQDLSATSILYYXXXXXXXXXLRKHRMVVKSXK

SEQ ID NO: 8542 - protein, 38 aa, Artificial Sequence
  Non-cyclic GFR-binding peptide
  MOD_RES (1)..(2)..(35)..(37): Xaa is C or S
  MOD_RES (16)..(17)..(18)..(19)..(20): Xaa is A or G
  MOD_RES (21)..(22)..(23)..(24): Xaa is A or G or absent
XXVPQALNAISILYFXXXXXXXXXLKKYRMIVRSXKXS

SEQ ID NO: 8543 - protein, 34 aa, Artificial Sequence
  Non-cyclic GFR-binding peptide
  MOD_RES (3)..(4): Xaa is C or S
APXXVPQALSPISILYKVGRKPKVLKYHYMIVRS

SEQ ID NO: 8544 - protein, 34 aa, Artificial Sequence
  Non-cyclic GFR-binding peptide
  MOD_RES (1)..(1): Xaa is C or S
  MOD_RES (15)..(16)..(17)..(18)..(19): Xaa is A or G
  MOD_RES (20)..(21)..(22)..(23): Xaa is A or G or absent
XVPTELSPISMLYKXXXXXXXXXLKYHYEMVVEG

SEQ ID NO: 8545 - protein, 34 aa, Artificial Sequence
  Non-cyclic GFR-binding peptide
PTQVQLSATSVLYYEIVRKKPIFLRKHRTLEDHL

SEQ ID NO: 8546 - protein, 37 aa, Artificial Sequence
  Non-cyclic GFR-binding peptide
  MOD_RES (35)..(37): Xaa is C or S
  MOD_RES (14)..(15)..(16)..(17)..(18): Xaa is A or G
  MOD_RES (19)..(20)..(21)..(22): Xaa is A or G or absent
VPTKLNAISVLYFXXXXXXXXXLKKYREGMSVAEXGX

SEQ ID NO: 8547 - protein, 38 aa, Artificial Sequence
  Non-cyclic GFR-binding peptide
  MOD_RES (3)..(4)..(38): Xaa is C or S
  MOD_RES (18)..(19)..(20)..(21)..(22): Xaa is A or G
  MOD_RES (23)..(24)..(25)..(26): Xaa is A or G or absent
KAXXAPTKLNAISVLYFXXXXXXXXXLKKYRNMVVKAX

SEQ ID NO: 8548 - protein, 42 aa, Artificial Sequence
  Non-cyclic GFR-binding peptide
  MOD_RES (5)..(6)..(40)..(42): Xaa is C or S
  MOD_RES (20)..(21)..(22)..(23)..(24): Xaa is A or G
  MOD_RES (25)..(26)..(27)..(28): Xaa is A or G or absent
VPKPXXAPTKLSPISVLYKXXXXXXXXXLKYHYNMVVRSXGX

SEQ ID NO: 8549 - protein, 38 aa, Artificial Sequence
  Non-cyclic GFR-binding peptide
  MOD_RES (5)..(6): Xaa is C or S
  MOD_RES (20)..(21)..(22)..(23)..(24): Xaa is A or G
  MOD_RES (25)..(26)..(27)..(28): Xaa is A or G or absent
SASPXXVSQDLSAISILYLXXXXXXXXXLKNYQMIVKS

SEQ ID NO: 8550 - protein, 34 aa, Artificial Sequence
  Non-cyclic GFR-binding peptide
  MOD_RES (1)..(2): Xaa is C or S
  MOD_RES (16)..(17)..(18)..(19)..(20): Xaa is A or G
  MOD_RES (21)..(22)..(23)..(24): Xaa is A or G or absent
XXVPQALSAISILYLXXXXXXXXXLKNYQMIVRS

SEQ ID NO: 8551 - protein, 38 aa, Artificial Sequence
  Non-cyclic GFR-binding peptide
  MOD_RES (4)..(5)..(38): Xaa is C or S
  MOD_RES (19)..(20)..(21)..(22)..(23): Xaa is A or G
  MOD_RES (24)..(25)..(26)..(27): Xaa is A or G or absent
AAPXXVPQALSATSILYYXXXXXXXXXLRKHRMIVRSX

SEQ ID NO: 8552 - protein, 39 aa, Artificial Sequence
  Non-cyclic GFR-binding peptide
  MOD_RES (4)..(5)..(39): Xaa is C or S
  MOD_RES (19)..(20)..(21)..(22)..(23): Xaa is A or G
  MOD_RES (24)..(25)..(26)..(27): Xaa is A or G or absent
PKPXXAPTQLSAISVLYLXXXXXXXXXLKNYQNMVVRAX

SEQ ID NO: 8553 - protein, 38 aa, Artificial Sequence
  Non-cyclic GFR-binding peptide
  MOD_RES (4)..(5)..(38): Xaa is C or S
  MOD_RES (19)..(20)..(21)..(22)..(23): Xaa is A or G
  MOD_RES (24)..(25)..(26)..(27): Xaa is A or G or absent
AAPXXVPQALSAISILYLXXXXXXXXXLKNYQMIVRSX

SEQ ID NO: 8554 - protein, 40 aa, Artificial Sequence
  Non-cyclic GFR-binding peptide
  MOD_RES (7)..(7): Xaa is C or S
  MOD_RES (21)..(22)..(23)..(24)..(25): Xaa is A or G
  MOD_RES (26)..(27)..(28)..(29): Xaa is A or G or absent
HVTKPTXAPTKLSATSVLYYXXXXXXXXXLRKHRNMVVRS

SEQ ID NO: 8555 - protein, 36 aa, Artificial Sequence
  Non-cyclic GFR-binding peptide
  MOD_RES (4)..(5)..(36): Xaa is C or S
ASPXXVPQDLSPISILYKVGRTPKVLKYHYMVVKSX

SEQ ID NO: 8556 - protein, 34 aa, Artificial Sequence
  Non-cyclic GFR-binding peptide
  MOD_RES (1)..(2)..(34): Xaa is C or S
XXVPTELNAISMLYFDEYDKVVLKKYREMVVEGX

SEQ ID NO: 8557 - protein, 35 aa, Artificial Sequence
  Non-cyclic GFR-binding peptide
  MOD_RES (35)..(35): Xaa is C or S
  MOD_RES (14)..(15)..(16)..(17)..(18): Xaa is A or G
  MOD_RES (19)..(20)..(21)..(22): Xaa is A or G or absent
VPTKLSAISVLYLXXXXXXXXXLKNYQEGMSVAEX

SEQ ID NO: 8558 - protein, 37 aa, Artificial Sequence
  Non-cyclic GFR-binding peptide
  MOD_RES (4)..(5)..(36): Xaa is C or S
ASPXXVPQDLNAISILYFVGRTPKVLKKYRMVVKSXK

SEQ ID NO: 8559 - protein, 38 aa, Artificial Sequence
  Non-cyclic GFR-binding peptide
  MOD_RES (3)..(4)..(38): Xaa is C or S
  MOD_RES (18)..(19)..(20)..(21)..(22): Xaa is A or G
  MOD_RES (23)..(24)..(25)..(26): Xaa is A or G or absent
KAXXAPTKLSAISVLYLXXXXXXXXXLKNYQNMVVKAX

SEQ ID NO: 8560 - protein, 36 aa, Artificial Sequence
  Non-cyclic GFR-binding peptide
  MOD_RES (1)..(2)..(35): Xaa is C or S
XXVPTKLNAISVLYFDDMGVPTLKKYREGMSVAEXG

SEQ ID NO: 8561 - protein, 34 aa, Artificial Sequence
  Non-cyclic GFR-binding peptide
  MOD_RES (33)..(33): Xaa is C or S
  MOD_RES (14)..(15)..(16)..(17)..(18): Xaa is A or G
  MOD_RES (19)..(20)..(21)..(22): Xaa is A or G or absent
VPQALSATSILYYXXXXXXXXXLRKHRMIVRSXK

SEQ ID NO: 8562 - protein, 41 aa, Artificial Sequence
  Non-cyclic GFR-binding peptide
  MOD_RES (4)..(5)..(38)..(40): Xaa is C or S
GKAXXVPTKLSATSVLYYDDMGVPTLRKHREGMSVAEXGXR

SEQ ID NO: 8563 - protein, 43 aa, Artificial Sequence
  Non-cyclic GFR-binding peptide
  MOD_RES (6)..(7)..(42): Xaa is C or S
  MOD_RES (21)..(22)..(23)..(24)..(25): Xaa is A or G
  MOD_RES (26)..(27)..(28)..(29): Xaa is A or G or absent
KVGKAXXVPTKLSAISVLYLXXXXXXXXXLKNYQEGMSVAEXG

SEQ ID NO: 8564 - protein, 42 aa, Artificial Sequence
  Non-cyclic GFR-binding peptide
  MOD_RES (2)..(39)..(41): Xaa is C or S
QXRPTQVQLSAISVLYLEIVRKKPIFLKNYQTLEDHLAXKXE

SEQ ID NO: 8565 - protein, 35 aa, Artificial Sequence
  Non-cyclic GFR-binding peptide
  MOD_RES (2)..(3)..(34): Xaa is C or S
PXXVPQDLSPISILYKVGRTPKVLKYHYMVVKSXK

SEQ ID NO: 8566 - protein, 36 aa, Artificial Sequence
  Non-cyclic GFR-binding peptide
  MOD_RES (1)..(35): Xaa is C or S
  MOD_RES (15)..(16)..(17)..(18)..(19): Xaa is A or G
  MOD_RES (20)..(21)..(22)..(23): Xaa is A or G or absent
XVPTELSPISMLYKXXXXXXXXXLKYHYEMVVEGXG

SEQ ID NO: 8567 - protein, 32 aa, Artificial Sequence
  Non-cyclic GFR-binding peptide
  MOD_RES (1)..(32): Xaa is C or S
XVSQDLNAISILYFIGKTPKILKKYRMIVKSX

SEQ ID NO: 8568 - protein, 36 aa, Artificial Sequence
  Non-cyclic GFR-binding peptide
  MOD_RES (2)..(3)..(35): Xaa is C or S
AXXVPTELSATSMLYYDENEKVVLRKHRDMVVEGXG

SEQ ID NO: 8569 - protein, 40 aa, Artificial Sequence
  Non-cyclic GFR-binding peptide
  MOD_RES (6)..(38)..(40): Xaa is C or S
VTKPTXAPTKLSAISVLYLDDSSNVILKNYQNMVVRSXGX

SEQ ID NO: 8570 - protein, 36 aa, Artificial Sequence
  Non-cyclic GFR-binding peptide
  MOD_RES (2)..(3): Xaa is C or S
  MOD_RES (17)..(18)..(19)..(20)..(21): Xaa is A or G
  MOD_RES (22)..(23)..(24)..(25): Xaa is A or G or absent
AXXVPTELNAISMLYFXXXXXXXXXLKKYREMVVEG

SEQ ID NO: 8571 - protein, 33 aa, Artificial Sequence
  Non-cyclic GFR-binding peptide
  MOD_RES (33)..(33): Xaa is C or S
  MOD_RES (14)..(15)..(16)..(17)..(18): Xaa is A or G
  MOD_RES (19)..(20)..(21)..(22): Xaa is A or G or absent
VPQDLSATSILYYXXXXXXXXXLRKHRMVVKSX

SEQ ID NO: 8572 - protein, 37 aa, Artificial Sequence
  Non-cyclic GFR-binding peptide
  MOD_RES (4)..(5): Xaa is C or S
GKAXXVPTKLSATSVLYYDDMGVPTLRKHREGMSVAE

SEQ ID NO: 8573 - protein, 40 aa, Artificial Sequence
  Non-cyclic GFR-binding peptide
  MOD_RES (37)..(39): Xaa is C or S
RPTQVQLSAISVLYLEIVRKKPIFLKNYQTLEDHLAXKXE

SEQ ID NO: 8574 - protein, 39 aa, Artificial Sequence
  Non-cyclic GFR-binding peptide
  MOD_RES (3)..(4)..(36)..(38): Xaa is C or S
KAXXVPTELSATSMLYYDENEKVVLRKHRDMVVEGXGXR

SEQ ID NO: 8575 - protein, 39 aa, Artificial Sequence
  Non-cyclic GFR-binding peptide
  MOD_RES (6)..(7)..(39): Xaa is C or S
YVPKPXXAPTKLSATSVLYYDDSSNVILRKHRNMVVRSX

SEQ ID NO: 8576 - protein, 38 aa, Artificial Sequence
  Non-cyclic GFR-binding peptide
  MOD_RES (35)..(37): Xaa is C or S
TQVQLSATSVLYYEIVRKKPIFLRKHRTLEDHLAXKXE

SEQ ID NO: 8577 - protein, 34 aa, Artificial Sequence
  Non-cyclic GFR-binding peptide
  MOD_RES (1)..(2): Xaa is C or S
  MOD_RES (16)..(17)..(18)..(19)..(20): Xaa is A or G
  MOD_RES (21)..(22)..(23)..(24): Xaa is A or G or absent
XXVPTELSPISMLYKXXXXXXXXXLKYHYEMVVE

SEQ ID NO: 8578 - protein, 39 aa, Artificial Sequence
  Non-cyclic GFR-binding peptide
  MOD_RES (2)..(3)..(37)..(39): Xaa is C or S
  MOD_RES (17)..(18)..(19)..(20)..(21): Xaa is A or G
  MOD_RES (22)..(23)..(24)..(25): Xaa is A or G or absent
AXXVPTELSATSMLYYXXXXXXXXXLRKHRDMVVEGXGX

SEQ ID NO: 8579 - protein, 32 aa, Artificial Sequence
  Non-cyclic GFR-binding peptide
  MOD_RES (1)..(32): Xaa is C or S
XVPQDLSAISILYLVGRTPKVLKNYQMVVKSX

SEQ ID NO: 8580 - protein, 37 aa, Artificial Sequence
  Non-cyclic GFR-binding peptide
  MOD_RES (5)..(6): Xaa is C or S
IPKAXXVPTELSATSMLYYDENEKVVLRKHRDMVVEG

SEQ ID NO: 8581 - protein, 38 aa, Artificial Sequence
  Non-cyclic GFR-binding peptide
  MOD_RES (1)..(35)..(37): Xaa is C or S
  MOD_RES (15)..(16)..(17)..(18)..(19): Xaa is A or G
  MOD_RES (20)..(21)..(22)..(23): Xaa is A or G or absent
XAPTKLSAISVLYLXXXXXXXXXLKNYQNMVVRSXGXH

SEQ ID NO: 8582 - protein, 39 aa, Artificial Sequence
  Non-cyclic GFR-binding peptide
  MOD_RES (3)..(4)..(37)..(39): Xaa is C or S
KAXXVPTKLSAISVLYLDDMGVPTLKNYQEGMSVAEXGX

SEQ ID NO: 8583 - protein, 38 aa, Artificial Sequence
  Non-cyclic GFR-binding peptide
  MOD_RES (1)..(2)..(35)..(37): Xaa is C or S
  MOD_RES (16)..(17)..(18)..(19)..(20): Xaa is A or G
  MOD_RES (21)..(22)..(23)..(24): Xaa is A or G or absent
XXVPQDLSAISILYLXXXXXXXXXLKNYQMVVKSXKXS

SEQ ID NO: 8584 - protein, 36 aa, Artificial Sequence
  Non-cyclic GFR-binding peptide
  MOD_RES (1)..(2)..(36): Xaa is C or S
  MOD_RES (16)..(17)..(18)..(19)..(20): Xaa is A or G
  MOD_RES (21)..(22)..(23)..(24): Xaa is A or G or absent
XXAPTKLSAISVLYLXXXXXXXXXLKNYQNMVVRSX

SEQ ID NO: 8585 - protein, 34 aa, Artificial Sequence
  Non-cyclic GFR-binding peptide
RPTQVQLSATSVLYYEIVRKKPIFLRKHRTLEDH

SEQ ID NO: 8586 - protein, 34 aa, Artificial Sequence
  Non-cyclic GFR-binding peptide
  MOD_RES (32)..(34): Xaa is C or S
VPTELSATSMLYYDEYDKVVLRKHREMVVEGXGX

SEQ ID NO: 8587 - protein, 40 aa, Artificial Sequence
  Non-cyclic GFR-binding peptide
  MOD_RES (3)..(4)..(38)..(40): Xaa is C or S
  MOD_RES (18)..(19)..(20)..(21)..(22): Xaa is A or G
  MOD_RES (23)..(24)..(25)..(26): Xaa is A or G or absent
KPXXAPTQLSATSVLYYXXXXXXXXXLRKHRNMVVRAXGX

SEQ ID NO: 8588 - protein, 38 aa, Artificial Sequence
  Non-cyclic GFR-binding peptide
  MOD_RES (2)..(3)..(36)..(38): Xaa is C or S
  MOD_RES (17)..(18)..(19)..(20)..(21): Xaa is A or G
  MOD_RES (22)..(23)..(24)..(25): Xaa is A or G or absent
PXXVPQALSPISILYKXXXXXXXXXLKYHYMIVRSXKX

SEQ ID NO: 8589 - protein, 37 aa, Artificial Sequence
  Non-cyclic GFR-binding peptide
  MOD_RES (4)..(4): Xaa is C or S
  MOD_RES (18)..(19)..(20)..(21)..(22): Xaa is A or G
  MOD_RES (23)..(24)..(25)..(26): Xaa is A or G or absent
KPTXAPTKLSPISVLYKXXXXXXXXXLKYHYNMVVRS

SEQ ID NO: 8590 - protein, 31 aa, Artificial Sequence
  Non-cyclic GFR-binding peptide
  MOD_RES (31)..(31): Xaa is C or S
VSQDLSAISILYLIGKTPKILKNYQMIVKSX

SEQ ID NO: 8591 - protein, 36 aa, Artificial Sequence
  Non-cyclic GFR-binding peptide
  MOD_RES (2)..(3)..(35): Xaa is C or S
AXXAPTKLSAISVLYLDSSNNVILKNYQNMVVKAXG

SEQ ID NO: 8592 - protein, 39 aa, Artificial Sequence
  Non-cyclic GFR-binding peptide
  MOD_RES (6)..(7)..(39): Xaa is C or S
KIPKAXXVPTELSATSMLYYDENEKVVLRKHRDMVVEGX

SEQ ID NO: 8593 - protein, 34 aa, Artificial Sequence
  Non-cyclic GFR-binding peptide
  MOD_RES (31)..(33): Xaa is C or S
VSQDLSAISILYLIGKTPKILKNYQMIVKSXKXS

SEQ ID NO: 8594 - protein, 30 aa, Artificial Sequence
  Non-cyclic GFR-binding peptide
VPQALNAISILYFVGRKPKVLKKYRMIVRS

SEQ ID NO: 8595 - protein, 38 aa, Artificial Sequence
  Non-cyclic GFR-binding peptide
  MOD_RES (5)..(6)..(37): Xaa is C or S
SASPXXVPQDLSAISILYLVGRTPKVLKNYQMVVKSXK

SEQ ID NO: 8596 - protein, 38 aa, Artificial Sequence
  Non-cyclic GFR-binding peptide
  MOD_RES (6)..(7): Xaa is C or S
TVPKPXXAPTQLSPISVLYKDDSSNVILKYHYNMVVRA

SEQ ID NO: 8597 - protein, 38 aa, Artificial Sequence
  Non-cyclic GFR-binding peptide
  MOD_RES (4)..(5)..(36)..(38): Xaa is C or S
ASPXXVSQDLSAISILYLIGKTPKILKNYQMIVKSXKX

SEQ ID NO: 8598 - protein, 31 aa, Artificial Sequence
  Non-cyclic GFR-binding peptide
APTKLSPISVLYKDDSSNVILKYHYNMVVRS

SEQ ID NO: 8599 - protein, 41 aa, Artificial Sequence
  Non-cyclic GFR-binding peptide
  MOD_RES (5)..(6)..(41): Xaa is C or S
  MOD_RES (20)..(21)..(22)..(23)..(24): Xaa is A or G
  MOD_RES (25)..(26)..(27)..(28): Xaa is A or G or absent
VGKAXXVPTKLSAISVLYLXXXXXXXXXLKNYQEGMSVAEX

SEQ ID NO: 8600 - protein, 35 aa, Artificial Sequence
  Non-cyclic GFR-binding peptide
  MOD_RES (3)..(4)..(35): Xaa is C or S
APXXVPQALSAISILYLVGRKPKVLKNYQMIVRSX

SEQ ID NO: 8601 - protein, 39 aa, Artificial Sequence
  Non-cyclic GFR-binding peptide
  MOD_RES (5)..(6): Xaa is C or S
  MOD_RES (20)..(21)..(22)..(23)..(24): Xaa is A or G
  MOD_RES (25)..(26)..(27)..(28): Xaa is A or G or absent
VPKPXXAPTKLSAISVLYLXXXXXXXXXLKNYQNMVVRS

SEQ ID NO: 8602 - protein, 37 aa, Artificial Sequence
  Non-cyclic GFR-binding peptide
  MOD_RES (37)..(37): Xaa is C or S
  MOD_RES (16)..(17)..(18)..(19)..(20): Xaa is A or G
  MOD_RES (21)..(22)..(23)..(24): Xaa is A or G or absent
RPTQVQLNAISVLYFXXXXXXXXXLKKYRTLEDHLAX

SEQ ID NO: 8603 - protein, 40 aa, Artificial Sequence
  Non-cyclic GFR-binding peptide
  MOD_RES (4)..(5)..(37)..(39): Xaa is C or S
PKAXXVPTELSPISMLYKDENEKVVLKYHYDMVVEGXGXR

SEQ ID NO: 8604 - protein, 38 aa, Artificial Sequence
  Non-cyclic GFR-binding peptide
  MOD_RES (5)..(6): Xaa is C or S
  MOD_RES (20)..(21)..(22)..(23)..(24): Xaa is A or G
  MOD_RES (25)..(26)..(27)..(28): Xaa is A or G or absent
IPKAXXVPTELSPISMLYKXXXXXXXXXLKYHYDMVVE

SEQ ID NO: 8605 - protein, 40 aa, Artificial Sequence
  Non-cyclic GFR-binding peptide
  MOD_RES (6)..(40): Xaa is C or S
  MOD_RES (20)..(21)..(22)..(23)..(24): Xaa is A or G
  MOD_RES (25)..(26)..(27)..(28): Xaa is A or G or absent
VTKPTXAPTKLSPISVLYKXXXXXXXXXLKYHYNMVVRSX

SEQ ID NO: 8606 - protein, 36 aa, Artificial Sequence
  Non-cyclic GFR-binding peptide
  MOD_RES (35)..(35): Xaa is C or S
TQVQLSAISVLYLEIVRKKPIFLKNYQTLEDHLAXK

SEQ ID NO: 8607 - protein, 38 aa, Artificial Sequence
  Non-cyclic GFR-binding peptide
  MOD_RES (2)..(3)..(35)..(37): Xaa is C or S
PXXAPTQLSPISVLYKDDSSNVILKYHYNMVVRAXGXH

SEQ ID NO: 8608 - protein, 36 aa, Artificial Sequence
  Non-cyclic GFR-binding peptide
  MOD_RES (35)..(35): Xaa is C or S
  MOD_RES (14)..(15)..(16)..(17)..(18): Xaa is A or G
  MOD_RES (19)..(20)..(21)..(22): Xaa is A or G or absent
VPTKLNAISVLYFXXXXXXXXXLKKYREGMSVAEXG

SEQ ID NO: 8609 - protein, 34 aa, Artificial Sequence
  Non-cyclic GFR-binding peptide
  MOD_RES (1)..(33): Xaa is C or S
XAPTKLSATSVLYYDDSSNVILRKHRNMVVRSXG

SEQ ID NO: 8610 - protein, 36 aa, Artificial Sequence
  Non-cyclic GFR-binding peptide
  MOD_RES (3)..(4): Xaa is C or S
  MOD_RES (18)..(19)..(20)..(21)..(22): Xaa is A or G
  MOD_RES (23)..(24)..(25)..(26): Xaa is A or G or absent
KPXXAPTKLSPISVLYKXXXXXXXXXLKYHYNMVVR

SEQ ID NO: 8611 - protein, 37 aa, Artificial Sequence
  Non-cyclic GFR-binding peptide
  MOD_RES (2)..(3)..(36): Xaa is C or S
  MOD_RES (17)..(18)..(19)..(20)..(21): Xaa is A or G
  MOD_RES (22)..(23)..(24)..(25): Xaa is A or G or absent
PXXVSQDLSAISILYLXXXXXXXXXLKNYQMIVKSXK

SEQ ID NO: 8612 - protein, 39 aa, Artificial Sequence
  Non-cyclic GFR-binding peptide
  MOD_RES (7)..(39): Xaa is C or S
HVTKPTXAPTKLSPISVLYKDDSSNVILKYHYNMVVRSX

SEQ ID NO: 8613 - protein, 39 aa, Artificial Sequence
  Non-cyclic GFR-binding peptide
  MOD_RES (3)..(4)..(36)..(38): Xaa is C or S
KAXXVPTELSPISMLYKDEYDKVVLKYHYEMVVEGXGXR

SEQ ID NO: 8614 - protein, 45 aa, Artificial Sequence
  Non-cyclic GFR-binding peptide
  MOD_RES (5)..(42)..(44): Xaa is C or S
RNVQXRPTQVQLSPISVLYKEIVRKKPIFLKYHYTLEDHLAXKXE

SEQ ID NO: 8615 - protein, 34 aa, Artificial Sequence
  Non-cyclic GFR-binding peptide
  MOD_RES (3)..(4): Xaa is C or S
APXXVPQALSAISILYLVGRKPKVLKNYQMIVRS

SEQ ID NO: 8616 - protein, 41 aa, Artificial Sequence
  Non-cyclic GFR-binding peptide
  MOD_RES (5)..(6)..(39)..(41): Xaa is C or S
  MOD_RES (20)..(21)..(22)..(23)..(24): Xaa is A or G
  MOD_RES (25)..(26)..(27)..(28): Xaa is A or G or absent
SASPXXVPQDLSAISILYLXXXXXXXXXLKNYQMVVKSXKX

SEQ ID NO: 8617 - protein, 36 aa, Artificial Sequence
  Non-cyclic GFR-binding peptide
  MOD_RES (3)..(4)..(35): Xaa is C or S
APXXVPQALNAISILYFVGRKPKVLKKYRMIVRSXK

SEQ ID NO: 8618 - protein, 37 aa, Artificial Sequence
  Non-cyclic GFR-binding peptide
  MOD_RES (1)..(2)..(34)..(36): Xaa is C or S
XXAPTKLSATSVLYYDDSSNVILRKHRNMVVRSXGXH

SEQ ID NO: 8619 - protein, 36 aa, Artificial Sequence
  Non-cyclic GFR-binding peptide
  MOD_RES (1)..(2)..(34)..(36): Xaa is C or S
XXAPTKLSPISVLYKDDSSNVILKYHYNMVVRSXGX

SEQ ID NO: 8620 - protein, 39 aa, Artificial Sequence
  Non-cyclic GFR-binding peptide
  MOD_RES (6)..(7): Xaa is C or S
  MOD_RES (21)..(22)..(23)..(24)..(25): Xaa is A or G
  MOD_RES (26)..(27)..(28)..(29): Xaa is A or G or absent
ASAAPXXVPQALSAISILYLXXXXXXXXXLKNYQMIVRS

SEQ ID NO: 8621 - protein, 35 aa, Artificial Sequence
  Non-cyclic GFR-binding peptide
  MOD_RES (2)..(3)..(34): Xaa is C or S
PXXVSQDLNAISILYFIGKTPKILKKYRMIVKSXK

SEQ ID NO: 8622 - protein, 39 aa, Artificial Sequence
  Non-cyclic GFR-binding peptide
  MOD_RES (5)..(6)..(38): Xaa is C or S
VPKAXXAPTKLNAISVLYFDSSNNVILKKYRNMVVKAXG

SEQ ID NO: 8623 - protein, 36 aa, Artificial Sequence
  Non-cyclic GFR-binding peptide
  MOD_RES (1)..(1): Xaa is C or S
  MOD_RES (17)..(18)..(19)..(20)..(21): Xaa is A or G
  MOD_RES (22)..(23)..(24)..(25): Xaa is A or G or absent
XRPTQVQLNAISVLYFXXXXXXXXXLKKYRTLEDHL

SEQ ID NO: 8624 - protein, 34 aa, Artificial Sequence
  Non-cyclic GFR-binding peptide
  MOD_RES (1)..(1): Xaa is C or S
  MOD_RES (15)..(16)..(17)..(18)..(19): Xaa is A or G
  MOD_RES (20)..(21)..(22)..(23): Xaa is A or G or absent
XVPTELSPISMLYKXXXXXXXXXLKYHYDMVVEG

SEQ ID NO: 8625 - protein, 38 aa, Artificial Sequence
  Non-cyclic GFR-binding peptide
  MOD_RES (5)..(6): Xaa is C or S
  MOD_RES (20)..(21)..(22)..(23)..(24): Xaa is A or G
  MOD_RES (25)..(26)..(27)..(28): Xaa is A or G or absent
SASPXXVSQDLSPISILYKXXXXXXXXXLKYHYMIVKS

SEQ ID NO: 8626 - protein, 37 aa, Artificial Sequence
  Non-cyclic GFR-binding peptide
  MOD_RES (5)..(6): Xaa is C or S
VPKAXXAPTKLNAISVLYFDSSNNVILKKYRNMVVKA

SEQ ID NO: 8627 - protein, 38 aa, Artificial Sequence
  Non-cyclic GFR-binding peptide
  MOD_RES (5)..(6): Xaa is C or S
  MOD_RES (20)..(21)..(22)..(23)..(24): Xaa is A or G
  MOD_RES (25)..(26)..(27)..(28): Xaa is A or G or absent
SAAPXXVPQALSPISILYKXXXXXXXXXLKYHYMIVRS

SEQ ID NO: 8628 - protein, 36 aa, Artificial Sequence
  Non-cyclic GFR-binding peptide
  MOD_RES (33)..(35): Xaa is C or S
  MOD_RES (14)..(15)..(16)..(17)..(18): Xaa is A or G
  MOD_RES (19)..(20)..(21)..(22): Xaa is A or G or absent
VSQDLSATSILYYXXXXXXXXXLRKHRMIVKSXKXS

SEQ ID NO: 8629 - protein, 39 aa, Artificial Sequence
  Non-cyclic GFR-binding peptide
  MOD_RES (6)..(7)..(38): Xaa is C or S
ASASPXXVSQDLSPISILYKIGKTPKILKYHYMIVKSXK

SEQ ID NO: 8630 - protein, 32 aa, Artificial Sequence
  Non-cyclic GFR-binding peptide
TQVQLSAISVLYLEIVRKKPIFLKNYQTLEDH

SEQ ID NO: 8631 - protein, 35 aa, Artificial Sequence
  Non-cyclic GFR-binding peptide
  MOD_RES (1)..(2)..(34): Xaa is C or S
XXAPTQLSPISVLYKDDSSNVILKYHYNMVVRAXG

SEQ ID NO: 8632 - protein, 41 aa, Artificial Sequence
  Non-cyclic GFR-binding peptide
  MOD_RES (3)..(4)..(38)..(40): Xaa is C or S
  MOD_RES (18)..(19)..(20)..(21)..(22): Xaa is A or G
  MOD_RES (23)..(24)..(25)..(26): Xaa is A or G or absent
KAXXVPTELNAISMLYFXXXXXXXXXLKKYRDMVVEGXGXR

SEQ ID NO: 8633 - protein, 37 aa, Artificial Sequence
  Non-cyclic GFR-binding peptide
  MOD_RES (6)..(7): Xaa is C or S
AVPKAXXAPTKLNAISVLYFDSSNNVILKKYRNMVVK

SEQ ID NO: 8634 - protein, 41 aa, Artificial Sequence
  Non-cyclic GFR-binding peptide
  MOD_RES (4)..(5)..(39)..(41): Xaa is C or S
  MOD_RES (19)..(20)..(21)..(22)..(23): Xaa is A or G
  MOD_RES (24)..(25)..(26)..(27): Xaa is A or G or absent
PKAXXVPTELSATSMLYYXXXXXXXXXLRKHREMVVEGXGX

SEQ ID NO: 8635 - protein, 36 aa, Artificial Sequence
  Non-cyclic GFR-binding peptide
  MOD_RES (5)..(5): Xaa is C or S
TKPTXAPTKLSAISVLYLDDSSNVILKNYQNMVVRS

SEQ ID NO: 8636 - protein, 37 aa, Artificial Sequence
  Non-cyclic GFR-binding peptide
  MOD_RES (2)..(3)..(34)..(36): Xaa is C or S
PXXVSQDLSATSILYYIGKTPKILRKHRMIVKSXKXS

SEQ ID NO: 8637 - protein, 34 aa, Artificial Sequence
  Non-cyclic GFR-binding peptide
  MOD_RES (2)..(3): Xaa is C or S
PXXAPTQLSAISVLYLDDSSNVILKNYQNMVVRA

SEQ ID NO: 8638 - protein, 36 aa, Artificial Sequence
  Non-cyclic GFR-binding peptide
  MOD_RES (1)..(2)..(35): Xaa is C or S
  MOD_RES (16)..(17)..(18)..(19)..(20): Xaa is A or G
  MOD_RES (21)..(22)..(23)..(24): Xaa is A or G or absent
XXVSQDLSPISILYKXXXXXXXXXLKYHYMIVKSXK

SEQ ID NO: 8639 - protein, 40 aa, Artificial Sequence
  Non-cyclic GFR-binding peptide
  MOD_RES (2)..(3)..(37)..(39): Xaa is C or S
  MOD_RES (17)..(18)..(19)..(20)..(21): Xaa is A or G
  MOD_RES (22)..(23)..(24)..(25): Xaa is A or G or absent
AXXVPTELNAISMLYFXXXXXXXXXLKKYREMVVEGXGXR

SEQ ID NO: 8640 - protein, 40 aa, Artificial Sequence
  Non-cyclic GFR-binding peptide
  MOD_RES (3)..(4)..(38)..(40): Xaa is C or S
  MOD_RES (18)..(19)..(20)..(21)..(22): Xaa is A or G
  MOD_RES (23)..(24)..(25)..(26): Xaa is A or G or absent
KPXXAPTKLSAISVLYLXXXXXXXXXLKNYQNMVVRSXGX

SEQ ID NO: 8641 - protein, 40 aa, Artificial Sequence
  Non-cyclic GFR-binding peptide
  MOD_RES (6)..(7)..(39): Xaa is C or S
AVPKAXXAPTKLSPISVLYKDSSNNVILKYHYNMVVKAXG

SEQ ID NO: 8642 - protein, 32 aa, Artificial Sequence
  Non-cyclic GFR-binding peptide
  MOD_RES (1)..(2): Xaa is C or S
XXAPTKLNAISVLYFDSSNNVILKKYRNMVVK

SEQ ID NO: 8643 - protein, 45 aa, Artificial Sequence
  Non-cyclic GFR-binding peptide
  MOD_RES (5)..(42)..(44): Xaa is C or S
  MOD_RES (21)..(22)..(23)..(24)..(25): Xaa is A or G
  MOD_RES (26)..(27)..(28)..(29): Xaa is A or G or absent
RNVQXRPTQVQLSPISVLYKXXXXXXXXXLKYHYTLEDHLAXKXE

SEQ ID NO: 8644 - protein, 34 aa, Artificial Sequence
  Non-cyclic GFR-binding peptide
  MOD_RES (34)..(34): Xaa is C or S
  MOD_RES (14)..(15)..(16)..(17)..(18): Xaa is A or G
  MOD_RES (19)..(20)..(21)..(22): Xaa is A or G or absent
VPTELNAISMLYFXXXXXXXXXLKKYRDMVVEGX

SEQ ID NO: 8645 - protein, 37 aa, Artificial Sequence
  Non-cyclic GFR-binding peptide
  MOD_RES (2)..(2): Xaa is C or S
QXRPTQVQLSPISVLYKEIVRKKPIFLKYHYTLEDHL

SEQ ID NO: 8646 - protein, 39 aa, Artificial Sequence
  Non-cyclic GFR-binding peptide
  MOD_RES (5)..(6)..(39): Xaa is C or S
  MOD_RES (20)..(21)..(22)..(23)..(24): Xaa is A or G
  MOD_RES (25)..(26)..(27)..(28): Xaa is A or G or absent
SASPXXVSQDLSATSILYYXXXXXXXXXLRKHRMIVKSX

SEQ ID NO: 8647 - protein, 43 aa, Artificial Sequence
  Non-cyclic GFR-binding peptide
  MOD_RES (6)..(7)..(40)..(42): Xaa is C or S
  MOD_RES (21)..(22)..(23)..(24)..(25): Xaa is A or G
  MOD_RES (26)..(27)..(28)..(29): Xaa is A or G or absent
ASAAPXXVPQALNAISILYFXXXXXXXXXLKKYRMIVRSXKXS

SEQ ID NO: 8648 - protein, 41 aa, Artificial Sequence
  Non-cyclic GFR-binding peptide
  MOD_RES (6)..(7)..(38)..(40): Xaa is C or S
ASAAPXXVPQALNAISILYFVGRKPKVLKKYRMIVRSXKXS

SEQ ID NO: 8649 - protein, 35 aa, Artificial Sequence
  Non-cyclic GFR-binding peptide
  MOD_RES (4)..(5): Xaa is C or S
ASPXXVSQDLSAISILYLIGKTPKILKNYQMIVKS

SEQ ID NO: 8650 - protein, 35 aa, Artificial Sequence
  Non-cyclic GFR-binding peptide
  MOD_RES (1)..(2)..(34): Xaa is C or S
XXVPTELNAISMLYFDEYDKVVLKKYREMVVEGXG

SEQ ID NO: 8651 - protein, 36 aa, Artificial Sequence
  Non-cyclic GFR-binding peptide
  MOD_RES (1)..(33)..(35): Xaa is C or S
XAPTKLNAISVLYFDSSNNVILKKYRNMVVKAXGXH

SEQ ID NO: 8652 - protein, 42 aa, Artificial Sequence
  Non-cyclic GFR-binding peptide
  MOD_RES (7)..(41): Xaa is C or S
  MOD_RES (21)..(22)..(23)..(24)..(25): Xaa is A or G
  MOD_RES (26)..(27)..(28)..(29): Xaa is A or G or absent
HVTKPTXAPTKLSPISVLYKXXXXXXXXXLKYHYNMVVRSXG

SEQ ID NO: 8653 - protein, 39 aa, Artificial Sequence
  Non-cyclic GFR-binding peptide
  MOD_RES (5)..(6)..(39): Xaa is C or S
  MOD_RES (20)..(21)..(22)..(23)..(24): Xaa is A or G
  MOD_RES (25)..(26)..(27)..(28): Xaa is A or G or absent
SASPXXVSQDLSAISILYLXXXXXXXXXLKNYQMIVKSX

SEQ ID NO: 8654 - protein, 38 aa, Artificial Sequence
  Non-cyclic GFR-binding peptide
  MOD_RES (36)..(38): Xaa is C or S
  MOD_RES (15)..(16)..(17)..(18)..(19): Xaa is A or G
  MOD_RES (20)..(21)..(22)..(23): Xaa is A or G or absent
PTQVQLSPISVLYKXXXXXXXXXLKYHYTLEDHLAXKX

SEQ ID NO: 8655 - protein, 38 aa, Artificial Sequence
  Non-cyclic GFR-binding peptide
  MOD_RES (3)..(4)..(36)..(38): Xaa is C or S
KAXXAPTKLSAISVLYLDSSNNVILKNYQNMVVKAXGX

SEQ ID NO: 8656 - protein, 35 aa, Artificial Sequence
  Non-cyclic GFR-binding peptide
  MOD_RES (1)..(35): Xaa is C or S
  MOD_RES (15)..(16)..(17)..(18)..(19): Xaa is A or G
  MOD_RES (20)..(21)..(22)..(23): Xaa is A or G or absent
XAPTKLSAISVLYLXXXXXXXXXLKNYQNMVVKAX

SEQ ID NO: 8657 - protein, 37 aa, Artificial Sequence
  Non-cyclic GFR-binding peptide
  MOD_RES (4)..(5)..(36): Xaa is C or S
ASPXXVSQDLSATSILYYIGKTPKILRKHRMIVKSXK

SEQ ID NO: 8658 - protein, 33 aa, Artificial Sequence
  Non-cyclic GFR-binding peptide
  MOD_RES (1)..(2)..(33): Xaa is C or S
XXVSQDLSATSILYYIGKTPKILRKHRMIVKSX

SEQ ID NO: 8659 - protein, 33 aa, Artificial Sequence
  Non-cyclic GFR-binding peptide
  MOD_RES (33)..(33): Xaa is C or S
  MOD_RES (14)..(15)..(16)..(17)..(18): Xaa is A or G
  MOD_RES (19)..(20)..(21)..(22): Xaa is A or G or absent
VPQALSAISILYLXXXXXXXXXLKNYQMIVRSX

SEQ ID NO: 8660 - protein, 44 aa, Artificial Sequence
  Non-cyclic GFR-binding peptide
  MOD_RES (6)..(7)..(41)..(43): Xaa is C or S
  MOD_RES (21)..(22)..(23)..(24)..(25): Xaa is A or G
  MOD_RES (26)..(27)..(28)..(29): Xaa is A or G or absent
KIPKAXXVPTELSPISMLYKXXXXXXXXXLKYHYDMVVEGXGXR

SEQ ID NO: 8661 - protein, 38 aa, Artificial Sequence
  Non-cyclic GFR-binding peptide
  MOD_RES (1)..(35)..(37): Xaa is C or S
  MOD_RES (15)..(16)..(17)..(18)..(19): Xaa is A or G
  MOD_RES (20)..(21)..(22)..(23): Xaa is A or G or absent
XAPTKLSATSVLYYXXXXXXXXXLRKHRNMVVRSXGXH

SEQ ID NO: 8662 - protein, 34 aa, Artificial Sequence
  Non-cyclic GFR-binding peptide
  MOD_RES (33)..(33): Xaa is C or S
  MOD_RES (14)..(15)..(16)..(17)..(18): Xaa is A or G
  MOD_RES (19)..(20)..(21)..(22): Xaa is A or G or absent
VPQDLSPISILYKXXXXXXXXXLKYHYMVVKSXK

SEQ ID NO: 8663 - protein, 31 aa, Artificial Sequence
  Non-cyclic GFR-binding peptide
VPTELSPISMLYKDENEKVVLKYHYDMVVEG

SEQ ID NO: 8664 - protein, 32 aa, Artificial Sequence
  Non-cyclic GFR-binding peptide
  MOD_RES (31)..(31): Xaa is C or S
VPQDLSAISILYLVGRTPKVLKNYQMVVKSXK

SEQ ID NO: 8665 - protein, 39 aa, Artificial Sequence
  Non-cyclic GFR-binding peptide
  MOD_RES (2)..(3)..(36)..(38): Xaa is C or S
  MOD_RES (17)..(18)..(19)..(20)..(21): Xaa is A or G
  MOD_RES (22)..(23)..(24)..(25): Xaa is A or G or absent
PXXVSQDLSATSILYYXXXXXXXXXLRKHRMIVKSXKXS

SEQ ID NO: 8666 - protein, 39 aa, Artificial Sequence
  Non-cyclic GFR-binding peptide
  MOD_RES (2)..(3)..(36)..(38): Xaa is C or S
  MOD_RES (17)..(18)..(19)..(20)..(21): Xaa is A or G
  MOD_RES (22)..(23)..(24)..(25): Xaa is A or G or absent
PXXVPQALNAISILYFXXXXXXXXXLKKYRMIVRSXKXS

SEQ ID NO: 8667 - protein, 33 aa, Artificial Sequence
  Non-cyclic GFR-binding peptide
  MOD_RES (33)..(33): Xaa is C or S
  MOD_RES (14)..(15)..(16)..(17)..(18): Xaa is A or G
  MOD_RES (19)..(20)..(21)..(22): Xaa is A or G or absent
VPQALSATSILYYXXXXXXXXXLRKHRMIVRSX

SEQ ID NO: 8668 - protein, 36 aa, Artificial Sequence
  Non-cyclic GFR-binding peptide
  MOD_RES (3)..(4)..(35): Xaa is C or S
APXXVPQALSPISILYKVGRKPKVLKYHYMIVRSXK

SEQ ID NO: 8669 - protein, 38 aa, Artificial Sequence
  Non-cyclic GFR-binding peptide
  MOD_RES (3)..(37): Xaa is C or S
  MOD_RES (17)..(18)..(19)..(20)..(21): Xaa is A or G
  MOD_RES (22)..(23)..(24)..(25): Xaa is A or G or absent
PTXAPTKLSAISVLYLXXXXXXXXXLKNYQNMVVRSXG

SEQ ID NO: 8670 - protein, 42 aa, Artificial Sequence
  Non-cyclic GFR-binding peptide
  MOD_RES (2)..(39)..(41): Xaa is C or S
QXRPTQVQLNAISVLYFEIVRKKPIFLKKYRTLEDHLAXKXE

SEQ ID NO: 8671 - protein, 39 aa, Artificial Sequence
  Non-cyclic GFR-binding peptide
  MOD_RES (4)..(5)..(36)..(38): Xaa is C or S
ASPXXVPQDLSATSILYYVGRTPKVLRKHRMVVKSXKXS

SEQ ID NO: 8672 - protein, 36 aa, Artificial Sequence
  Non-cyclic GFR-binding peptide
  MOD_RES (2)..(3): Xaa is C or S
  MOD_RES (17)..(18)..(19)..(20)..(21): Xaa is A or G
  MOD_RES (22)..(23)..(24)..(25): Xaa is A or G or absent
PXXAPTQLSPISVLYKXXXXXXXXXLKYHYNMVVRA

SEQ ID NO: 8673 - protein, 30 aa, Artificial Sequence
  Non-cyclic GFR-binding peptide
VPTELSPISMLYKDENEKVVLKYHYDMVVE

SEQ ID NO: 8674 - protein, 39 aa, Artificial Sequence
  Non-cyclic GFR-binding peptide
  MOD_RES (36)..(38): Xaa is C or S
  MOD_RES (15)..(16)..(17)..(18)..(19): Xaa is A or G
  MOD_RES (20)..(21)..(22)..(23): Xaa is A or G or absent
PTQVQLSAISVLYLXXXXXXXXXLKNYQTLEDHLAXKXE

SEQ ID NO: 8675 - protein, 38 aa, Artificial Sequence
  Non-cyclic GFR-binding peptide
  MOD_RES (6)..(7): Xaa is C or S
SIPKAXXVPTELNAISMLYFDEYDKVVLKKYREMVVEG

SEQ ID NO: 8676 - protein, 40 aa, Artificial Sequence
  Non-cyclic GFR-binding peptide
  MOD_RES (5)..(6)..(37)..(39): Xaa is C or S
SASPXXVSQDLNAISILYFIGKTPKILKKYRMIVKSXKXS

SEQ ID NO: 8677 - protein, 37 aa, Artificial Sequence
  Non-cyclic GFR-binding peptide
  MOD_RES (4)..(36): Xaa is C or S
KPTXAPTKLSAISVLYLDDSSNVILKNYQNMVVRSXG

SEQ ID NO: 8678 - protein, 41 aa, Artificial Sequence
  Non-cyclic GFR-binding peptide
  MOD_RES (3)..(40): Xaa is C or S
VQXRPTQVQLSPISVLYKEIVRKKPIFLKYHYTLEDHLAXK

SEQ ID NO: 8679 - protein, 36 aa, Artificial Sequence
  Non-cyclic GFR-binding peptide
  MOD_RES (1)..(34)..(36): Xaa is C or S
  MOD_RES (15)..(16)..(17)..(18)..(19): Xaa is A or G
  MOD_RES (20)..(21)..(22)..(23): Xaa is A or G or absent
XVPQDLSATSILYYXXXXXXXXXLRKHRMVVKSXKX

SEQ ID NO: 8680 - protein, 39 aa, Artificial Sequence
  Non-cyclic GFR-binding peptide
  MOD_RES (2)..(39): Xaa is C or S
QXRPTQVQLSAISVLYLEIVRKKPIFLKNYQTLEDHLAX

SEQ ID NO: 8681 - protein, 33 aa, Artificial Sequence
  Non-cyclic GFR-binding peptide
  MOD_RES (3)..(3): Xaa is C or S
PTXAPTKLSATSVLYYDDSSNVILRKHRNMVVR

SEQ ID NO: 8682 - protein, 34 aa, Artificial Sequence
  Non-cyclic GFR-binding peptide
  MOD_RES (1)..(33): Xaa is C or S
XVPTELSPISMLYKDENEKVVLKYHYDMVVEGXG

SEQ ID NO: 8683 - protein, 39 aa, Artificial Sequence
  Non-cyclic GFR-binding peptide
  MOD_RES (6)..(7)..(38): Xaa is C or S
ASASPXXVSQDLNAISILYFIGKTPKILKKYRMIVKSXK

SEQ ID NO: 8684 - protein, 38 aa, Artificial Sequence
  Non-cyclic GFR-binding peptide
  MOD_RES (35)..(37): Xaa is C or S
  MOD_RES (14)..(15)..(16)..(17)..(18): Xaa is A or G
  MOD_RES (19)..(20)..(21)..(22): Xaa is A or G or absent
TQVQLSATSVLYYXXXXXXXXXLRKHRTLEDHLAXKXE

SEQ ID NO: 8685 - protein, 37 aa, Artificial Sequence
  Non-cyclic GFR-binding peptide
  MOD_RES (1)..(2)..(35)..(37): Xaa is C or S
XXVPTKLNAISVLYFDDMGVPTLKKYREGMSVAEXGX

SEQ ID NO: 8686 - protein, 41 aa, Artificial Sequence
  Non-cyclic GFR-binding peptide
  MOD_RES (4)..(5)..(38)..(40): Xaa is C or S
  MOD_RES (19)..(20)..(21)..(22)..(23): Xaa is A or G
  MOD_RES (24)..(25)..(26)..(27): Xaa is A or G or absent
ASPXXVPQDLSAISILYLXXXXXXXXXLKNYQMVVKSXKXS

SEQ ID NO: 8687 - protein, 34 aa, Artificial Sequence
  Non-cyclic GFR-binding peptide
  MOD_RES (34)..(34): Xaa is C or S
  MOD_RES (14)..(15)..(16)..(17)..(18): Xaa is A or G
  MOD_RES (19)..(20)..(21)..(22): Xaa is A or G or absent
VPTELSATSMLYYXXXXXXXXXLRKHREMVVEGX

SEQ ID NO: 8688 - protein, 39 aa, Artificial Sequence
  Non-cyclic GFR-binding peptide
  MOD_RES (3)..(3): Xaa is C or S
  MOD_RES (19)..(20)..(21)..(22)..(23): Xaa is A or G
  MOD_RES (24)..(25)..(26)..(27): Xaa is A or G or absent
VQXRPTQVQLSATSVLYYXXXXXXXXXLRKHRTLEDHLA

SEQ ID NO: 8689 - protein, 40 aa, Artificial Sequence
  Non-cyclic GFR-binding peptide
  MOD_RES (6)..(7)..(40): Xaa is C or S
KVGKAXXVPTKLNAISVLYFDDMGVPTLKKYREGMSVAEX

SEQ ID NO: 8690 - protein, 40 aa, Artificial Sequence
  Non-cyclic GFR-binding peptide
  MOD_RES (3)..(40): Xaa is C or S
VQXRPTQVQLNAISVLYFEIVRKKPIFLKKYRTLEDHLAX

SEQ ID NO: 8691 - protein, 37 aa, Artificial Sequence
  Non-cyclic GFR-binding peptide
  MOD_RES (1)..(2)..(37): Xaa is C or S
  MOD_RES (16)..(17)..(18)..(19)..(20): Xaa is A or G
  MOD_RES (21)..(22)..(23)..(24): Xaa is A or G or absent
XXVPTKLNAISVLYFXXXXXXXXXLKKYREGMSVAEX

SEQ ID NO: 8692 - protein, 32 aa, Artificial Sequence
  Non-cyclic GFR-binding peptide
  MOD_RES (1)..(1): Xaa is C or S
XAPTKLNAISVLYFDSSNNVILKKYRNMVVKA

SEQ ID NO: 8693 - protein, 39 aa, Artificial Sequence
  Non-cyclic GFR-binding peptide
  MOD_RES (6)..(7): Xaa is C or S
  MOD_RES (21)..(22)..(23)..(24)..(25): Xaa is A or G
  MOD_RES (26)..(27)..(28)..(29): Xaa is A or G or absent
SIPKAXXVPTELSPISMLYKXXXXXXXXXLKYHYEMVVE

SEQ ID NO: 8694 - protein, 38 aa, Artificial Sequence
  Non-cyclic GFR-binding peptide
  MOD_RES (2)..(2): Xaa is C or S
QXRPTQVQLSPISVLYKEIVRKKPIFLKYHYTLEDHLA

SEQ ID NO: 8695 - protein, 34 aa, Artificial Sequence
  Non-cyclic GFR-binding peptide
  MOD_RES (1)..(32)..(34): Xaa is C or S
XVPQALNAISILYFVGRKPKVLKKYRMIVRSXKX

SEQ ID NO: 8696 - protein, 40 aa, Artificial Sequence
  Non-cyclic GFR-binding peptide
  MOD_RES (5)..(5): Xaa is C or S
RNVQXRPTQVQLNAISVLYFEIVRKKPIFLKKYRTLEDHL

SEQ ID NO: 8697 - protein, 40 aa, Artificial Sequence
  Non-cyclic GFR-binding peptide
  MOD_RES (5)..(6)..(39): Xaa is C or S
  MOD_RES (20)..(21)..(22)..(23)..(24): Xaa is A or G
  MOD_RES (25)..(26)..(27)..(28): Xaa is A or G or absent
SAAPXXVPQALNAISILYFXXXXXXXXXLKKYRMIVRSXK

SEQ ID NO: 8698 - protein, 32 aa, Artificial Sequence
  Non-cyclic GFR-binding peptide
  MOD_RES (2)..(2): Xaa is C or S
TXAPTKLSATSVLYYDDSSNVILRKHRNMVVR

SEQ ID NO: 8699 - protein, 36 aa, Artificial Sequence
  Non-cyclic GFR-binding peptide
  MOD_RES (1)..(33)..(35): Xaa is C or S
XAPTKLSPISVLYKDSSNNVILKYHYNMVVKAXGXH

SEQ ID NO: 8700 - protein, 41 aa, Artificial Sequence
  Non-cyclic GFR-binding peptide
  MOD_RES (3)..(4)..(39)..(41): Xaa is C or S
  MOD_RES (18)..(19)..(20)..(21)..(22): Xaa is A or G
  MOD_RES (23)..(24)..(25)..(26): Xaa is A or G or absent
KAXXVPTKLSAISVLYLXXXXXXXXXLKNYQEGMSVAEXGX

SEQ ID NO: 8701 - protein, 37 aa, Artificial Sequence
  Non-cyclic GFR-binding peptide
  MOD_RES (3)..(4)..(36): Xaa is C or S
KAXXVPTELSATSMLYYDEYDKVVLRKHREMVVEGXG

SEQ ID NO: 8702 - protein, 36 aa, Artificial Sequence
  Non-cyclic GFR-binding peptide
  MOD_RES (4)..(5)..(36): Xaa is C or S
ASPXXVPQDLSATSILYYVGRTPKVLRKHRMVVKSX

SEQ ID NO: 8703 - protein, 37 aa, Artificial Sequence
  Non-cyclic GFR-binding peptide
  MOD_RES (2)..(3)..(37): Xaa is C or S
  MOD_RES (17)..(18)..(19)..(20)..(21): Xaa is A or G
  MOD_RES (22)..(23)..(24)..(25): Xaa is A or G or absent
AXXVPTELSPISMLYKXXXXXXXXXLKYHYDMVVEGX

SEQ ID NO: 8704 - protein, 36 aa, Artificial Sequence
  Non-cyclic GFR-binding peptide
  MOD_RES (1)..(35): Xaa is C or S
  MOD_RES (15)..(16)..(17)..(18)..(19): Xaa is A or G
  MOD_RES (20)..(21)..(22)..(23): Xaa is A or G or absent
XVPTELSPISMLYKXXXXXXXXXLKYHYDMVVEGXG

SEQ ID NO: 8705 - protein, 33 aa, Artificial Sequence
  Non-cyclic GFR-binding peptide
  MOD_RES (14)..(15)..(16)..(17)..(18): Xaa is A or G
  MOD_RES (19)..(20)..(21)..(22): Xaa is A or G or absent
VPTELSPISMLYKXXXXXXXXXLKYHYDMVVEG

SEQ ID NO: 8706 - protein, 36 aa, Artificial Sequence
  Non-cyclic GFR-binding peptide
  MOD_RES (33)..(35): Xaa is C or S
  MOD_RES (14)..(15)..(16)..(17)..(18): Xaa is A or G
  MOD_RES (19)..(20)..(21)..(22): Xaa is A or G or absent
VPQDLSAISILYLXXXXXXXXXLKNYQMVVKSXKXS

SEQ ID NO: 8707 - protein, 33 aa, Artificial Sequence
  Non-cyclic GFR-binding peptide
  MOD_RES (1)..(1): Xaa is C or S
  MOD_RES (15)..(16)..(17)..(18)..(19): Xaa is A or G
  MOD_RES (20)..(21)..(22)..(23): Xaa is A or G or absent
XVSQDLNAISILYFXXXXXXXXXLKKYRMIVKS

SEQ ID NO: 8708 - protein, 42 aa, Artificial Sequence
  Non-cyclic GFR-binding peptide
  MOD_RES (5)..(6)..(39)..(41): Xaa is C or S
VGKAXXVPTKLSATSVLYYDDMGVPTLRKHREGMSVAEXGXR

SEQ ID NO: 8709 - protein, 40 aa, Artificial Sequence
  Non-cyclic GFR-binding peptide
  MOD_RES (2)..(39): Xaa is C or S
QXRPTQVQLSAISVLYLEIVRKKPIFLKNYQTLEDHLAXK

SEQ ID NO: 8710 - protein, 38 aa, Artificial Sequence
  Non-cyclic GFR-binding peptide
  MOD_RES (3)..(3): Xaa is C or S
VQXRPTQVQLNAISVLYFEIVRKKPIFLKKYRTLEDHL

SEQ ID NO: 8711 - protein, 41 aa, Artificial Sequence
  Non-cyclic GFR-binding peptide
  MOD_RES (3)..(4)..(38)..(40): Xaa is C or S
  MOD_RES (18)..(19)..(20)..(21)..(22): Xaa is A or G
  MOD_RES (23)..(24)..(25)..(26): Xaa is A or G or absent
KPXXAPTQLSAISVLYLXXXXXXXXXLKNYQNMVVRAXGXH

SEQ ID NO: 8712 - protein, 38 aa, Artificial Sequence
  Non-cyclic GFR-binding peptide
  MOD_RES (4)..(5)..(37): Xaa is C or S
PKAXXVPTELNAISMLYFDENEKVVLKKYRDMVVEGXG

SEQ ID NO: 8713 - protein, 38 aa, Artificial Sequence
  Non-cyclic GFR-binding peptide
  MOD_RES (4)..(5)..(38): Xaa is C or S
  MOD_RES (19)..(20)..(21)..(22)..(23): Xaa is A or G
  MOD_RES (24)..(25)..(26)..(27): Xaa is A or G or absent
ASPXXVPQDLSPISILYKXXXXXXXXXLKYHYMVVKSX

SEQ ID NO: 8714 - protein, 34 aa, Artificial Sequence
  Non-cyclic GFR-binding peptide
  MOD_RES (3)..(4): Xaa is C or S
KAXXAPTKLNAISVLYFDSSNNVILKKYRNMVVK

SEQ ID NO: 8715 - protein, 41 aa, Artificial Sequence
  Non-cyclic GFR-binding peptide
  MOD_RES (6)..(7)..(41): Xaa is C or S
  MOD_RES (21)..(22)..(23)..(24)..(25): Xaa is A or G
  MOD_RES (26)..(27)..(28)..(29): Xaa is A or G or absent
KIPKAXXVPTELNAISMLYFXXXXXXXXXLKKYRDMVVEGX

SEQ ID NO: 8716 - protein, 40 aa, Artificial Sequence
  Non-cyclic GFR-binding peptide
  MOD_RES (6)..(7)..(40): Xaa is C or S
  MOD_RES (21)..(22)..(23)..(24)..(25): Xaa is A or G
  MOD_RES (26)..(27)..(28)..(29): Xaa is A or G or absent
ASASPXXVPQDLSATSILYYXXXXXXXXXLRKHRMVVKSX

SEQ ID NO: 8717 - protein, 38 aa, Artificial Sequence
  Non-cyclic GFR-binding peptide
  MOD_RES (6)..(7): Xaa is C or S
AVPKAXXAPTKLSPISVLYKDSSNNVILKYHYNMVVKA

SEQ ID NO: 8718 - protein, 32 aa, Artificial Sequence
  Non-cyclic GFR-binding peptide
  MOD_RES (31)..(31): Xaa is C or S
VSQDLSPISILYKIGKTPKILKYHYMIVKSXK

SEQ ID NO: 8719 - protein, 39 aa, Artificial Sequence
  Non-cyclic GFR-binding peptide
  MOD_RES (5)..(6)..(39): Xaa is C or S
VGKAXXVPTKLNAISVLYFDDMGVPTLKKYREGMSVAEX

SEQ ID NO: 8720 - protein, 35 aa, Artificial Sequence
  Non-cyclic GFR-binding peptide
  MOD_RES (1)..(2)..(34): Xaa is C or S
XXAPTKLSAISVLYLDDSSNVILKNYQNMVVRSXG

SEQ ID NO: 8721 - protein, 34 aa, Artificial Sequence
  Non-cyclic GFR-binding peptide
  MOD_RES (32)..(34): Xaa is C or S
VPTELSATSMLYYDENEKVVLRKHRDMVVEGXGX

SEQ ID NO: 8722 - protein, 30 aa, Artificial Sequence
  Non-cyclic GFR-binding peptide
VPQALSPISILYKVGRKPKVLKYHYMIVRS

SEQ ID NO: 8723 - protein, 37 aa, Artificial Sequence
  Non-cyclic GFR-binding peptide
  MOD_RES (2)..(3)..(35)..(37): Xaa is C or S
AXXVPTELSPISMLYKDENEKVVLKYHYDMVVEGXGX

SEQ ID NO: 8724 - protein, 36 aa, Artificial Sequence
  Non-cyclic GFR-binding peptide
  MOD_RES (1)..(34)..(36): Xaa is C or S
  MOD_RES (15)..(16)..(17)..(18)..(19): Xaa is A or G
  MOD_RES (20)..(21)..(22)..(23): Xaa is A or G or absent
XVPQDLSAISILYLXXXXXXXXXLKNYQMVVKSXKX

SEQ ID NO: 8725 - protein, 36 aa, Artificial Sequence
  Non-cyclic GFR-binding peptide
  MOD_RES (1)..(35): Xaa is C or S
  MOD_RES (15)..(16)..(17)..(18)..(19): Xaa is A or G
  MOD_RES (20)..(21)..(22)..(23): Xaa is A or G or absent
XAPTQLSPISVLYKXXXXXXXXXLKYHYNMVVRAXG

SEQ ID NO: 8726 - protein, 40 aa, Artificial Sequence
  Non-cyclic GFR-binding peptide
  MOD_RES (5)..(6)..(40): Xaa is C or S
  MOD_RES (20)..(21)..(22)..(23)..(24): Xaa is A or G
  MOD_RES (25)..(26)..(27)..(28): Xaa is A or G or absent
VPKAXXAPTKLNAISVLYFXXXXXXXXXLKKYRNMVVKAX

SEQ ID NO: 8727 - protein, 32 aa, Artificial Sequence
  Non-cyclic GFR-binding peptide
  MOD_RES (14)..(15)..(16)..(17)..(18): Xaa is A or G
  MOD_RES (19)..(20)..(21)..(22): Xaa is A or G or absent
VPQALNAISILYFXXXXXXXXXLKKYRMIVRS

SEQ ID NO: 8728 - protein, 36 aa, Artificial Sequence
  Non-cyclic GFR-binding peptide
  MOD_RES (6)..(6): Xaa is C or S
VTKPTXAPTKLSAISVLYLDDSSNVILKNYQNMVVR

SEQ ID NO: 8729 - protein, 39 aa, Artificial Sequence
  Non-cyclic GFR-binding peptide
  MOD_RES (3)..(3): Xaa is C or S
  MOD_RES (19)..(20)..(21)..(22)..(23): Xaa is A or G
  MOD_RES (24)..(25)..(26)..(27): Xaa is A or G or absent
VQXRPTQVQLSAISVLYLXXXXXXXXXLKNYQTLEDHLA

SEQ ID NO: 8730 - protein, 42 aa, Artificial Sequence
  Non-cyclic GFR-binding peptide
  MOD_RES (6)..(7)..(40)..(42): Xaa is C or S
  MOD_RES (21)..(22)..(23)..(24)..(25): Xaa is A or G
  MOD_RES (26)..(27)..(28)..(29): Xaa is A or G or absent
ASASPXXVSQDLNAISILYFXXXXXXXXXLKKYRMIVKSXKX

SEQ ID NO: 8731 - protein, 40 aa, Artificial Sequence
  Non-cyclic GFR-binding peptide
  MOD_RES (6)..(7)..(40): Xaa is C or S
  MOD_RES (21)..(22)..(23)..(24)..(25): Xaa is A or G
  MOD_RES (26)..(27)..(28)..(29): Xaa is A or G or absent
ASASPXXVPQDLSAISILYLXXXXXXXXXLKNYQMVVKSX

SEQ ID NO: 8732 - protein, 40 aa, Artificial Sequence
  Non-cyclic GFR-binding peptide
  MOD_RES (5)..(5): Xaa is C or S
RNVQXRPTQVQLSAISVLYLEIVRKKPIFLKNYQTLEDHL

SEQ ID NO: 8733 - protein, 37 aa, Artificial Sequence
  Non-cyclic GFR-binding peptide
  MOD_RES (4)..(5)..(37): Xaa is C or S
PKAXXVPTELSPISMLYKDENEKVVLKYHYDMVVEGX

SEQ ID NO: 8734 - protein, 33 aa, Artificial Sequence
  Non-cyclic GFR-binding peptide
  MOD_RES (1)..(2): Xaa is C or S
XXVPTELSPISMLYKDEYDKVVLKYHYEMVVEG

SEQ ID NO: 8735 - protein, 39 aa, Artificial Sequence
  Non-cyclic GFR-binding peptide
  MOD_RES (4)..(5)..(37)..(39): Xaa is C or S
PKPXXAPTKLSPISVLYKDDSSNVILKYHYNMVVRSXGX

SEQ ID NO: 8736 - protein, 40 aa, Artificial Sequence
  Non-cyclic GFR-binding peptide
  MOD_RES (5)..(39): Xaa is C or S
  MOD_RES (19)..(20)..(21)..(22)..(23): Xaa is A or G
  MOD_RES (24)..(25)..(26)..(27): Xaa is A or G or absent
TKPTXAPTKLSATSVLYYXXXXXXXXXLRKHRNMVVRSXG

SEQ ID NO: 8737 - protein, 35 aa, Artificial Sequence
  Non-cyclic GFR-binding peptide
  MOD_RES (2)..(3): Xaa is C or S
  MOD_RES (17)..(18)..(19)..(20)..(21): Xaa is A or G
  MOD_RES (22)..(23)..(24)..(25): Xaa is A or G or absent
PXXVSQDLSPISILYKXXXXXXXXXLKYHYMIVKS

SEQ ID NO: 8738 - protein, 36 aa, Artificial Sequence
  Non-cyclic GFR-binding peptide
  MOD_RES (3)..(4)..(36): Xaa is C or S
KAXXVPTELSPISMLYKDENEKVVLKYHYDMVVEGX

SEQ ID NO: 8739 - protein, 35 aa, Artificial Sequence
  Non-cyclic GFR-binding peptide
  MOD_RES (32)..(34): Xaa is C or S
VPTELSATSMLYYDEYDKVVLRKHREMVVEGXGXR

SEQ ID NO: 8740 - protein, 36 aa, Artificial Sequence
  Non-cyclic GFR-binding peptide
  MOD_RES (35)..(35): Xaa is C or S
  MOD_RES (14)..(15)..(16)..(17)..(18): Xaa is A or G
  MOD_RES (19)..(20)..(21)..(22): Xaa is A or G or absent
TQVQLSAISVLYLXXXXXXXXXLKNYQTLEDHLAXK

SEQ ID NO: 8741 - protein, 41 aa, Artificial Sequence
  Non-cyclic GFR-binding peptide
  MOD_RES (5)..(6)..(40): Xaa is C or S
  MOD_RES (20)..(21)..(22)..(23)..(24): Xaa is A or G
  MOD_RES (25)..(26)..(27)..(28): Xaa is A or G or absent
VPKPXXAPTKLSPISVLYKXXXXXXXXXLKYHYNMVVRSXG

SEQ ID NO: 8742 - protein, 35 aa, Artificial Sequence
  Non-cyclic GFR-binding peptide
  MOD_RES (4)..(5): Xaa is C or S
ASPXXVSQDLSATSILYYIGKTPKILRKHRMIVKS

SEQ ID NO: 8743 - protein, 43 aa, Artificial Sequence
  Non-cyclic GFR-binding peptide
  MOD_RES (6)..(7)..(40)..(42): Xaa is C or S
KVGKAXXVPTKLSAISVLYLDDMGVPTLKNYQEGMSVAEXGXR

SEQ ID NO: 8744 - protein, 39 aa, Artificial Sequence
  Non-cyclic GFR-binding peptide
  MOD_RES (5)..(6)..(39): Xaa is C or S
  MOD_RES (20)..(21)..(22)..(23)..(24): Xaa is A or G
  MOD_RES (25)..(26)..(27)..(28): Xaa is A or G or absent
SASPXXVPQDLSPISILYKXXXXXXXXXLKYHYMVVKSX

SEQ ID NO: 8745 - protein, 36 aa, Artificial Sequence
  Non-cyclic GFR-binding peptide
  MOD_RES (4)..(5): Xaa is C or S
PKAXXVPTELSATSMLYYDEYDKVVLRKHREMVVEG

SEQ ID NO: 8746 - protein, 38 aa, Artificial Sequence
  Non-cyclic GFR-binding peptide
  MOD_RES (1)..(2)..(35)..(37): Xaa is C or S
  MOD_RES (16)..(17)..(18)..(19)..(20): Xaa is A or G
  MOD_RES (21)..(22)..(23)..(24): Xaa is A or G or absent
XXVSQDLSATSILYYXXXXXXXXXLRKHRMIVKSXKXS

SEQ ID NO: 8747 - protein, 35 aa, Artificial Sequence
  Non-cyclic GFR-binding peptide
  MOD_RES (1)..(35): Xaa is C or S
  MOD_RES (15)..(16)..(17)..(18)..(19): Xaa is A or G
  MOD_RES (20)..(21)..(22)..(23): Xaa is A or G or absent
XAPTQLSATSVLYYXXXXXXXXXLRKHRNMVVRAX

SEQ ID NO: 8748 - protein, 36 aa, Artificial Sequence
  Non-cyclic GFR-binding peptide
  MOD_RES (2)..(3)..(35): Xaa is C or S
PXXAPTKLSATSVLYYDDSSNVILRKHRNMVVRSXG

SEQ ID NO: 8749 - protein, 42 aa, Artificial Sequence
  Non-cyclic GFR-binding peptide
  MOD_RES (6)..(7)..(41): Xaa is C or S
  MOD_RES (21)..(22)..(23)..(24)..(25): Xaa is A or G
  MOD_RES (26)..(27)..(28)..(29): Xaa is A or G or absent
KIPKAXXVPTELSATSMLYYXXXXXXXXXLRKHRDMVVEGXG

SEQ ID NO: 8750 - protein, 37 aa, Artificial Sequence
  Non-cyclic GFR-binding peptide
  MOD_RES (3)..(4): Xaa is C or S
  MOD_RES (18)..(19)..(20)..(21)..(22): Xaa is A or G
  MOD_RES (23)..(24)..(25)..(26): Xaa is A or G or absent
KAXXVPTELSATSMLYYXXXXXXXXXLRKHREMVVEG

SEQ ID NO: 8751 - protein, 35 aa, Artificial Sequence
  Non-cyclic GFR-binding peptide
  MOD_RES (1)..(2): Xaa is C or S
  MOD_RES (16)..(17)..(18)..(19)..(20): Xaa is A or G
  MOD_RES (21)..(22)..(23)..(24): Xaa is A or G or absent
XXAPTKLNAISVLYFXXXXXXXXXLKKYRNMVVKA

SEQ ID NO: 8752 - protein, 40 aa, Artificial Sequence
  Non-cyclic GFR-binding peptide
  MOD_RES (4)..(5)..(38)..(40): Xaa is C or S
  MOD_RES (19)..(20)..(21)..(22)..(23): Xaa is A or G
  MOD_RES (24)..(25)..(26)..(27): Xaa is A or G or absent
ASPXXVSQDLNAISILYFXXXXXXXXXLKKYRMIVKSXKX

SEQ ID NO: 8753 - protein, 39 aa, Artificial Sequence
  Non-cyclic GFR-binding peptide
  MOD_RES (36)..(38): Xaa is C or S
PTQVQLSATSVLYYEIVRKKPIFLRKHRTLEDHLAXKXE

SEQ ID NO: 8754 - protein, 37 aa, Artificial Sequence
  Non-cyclic GFR-binding peptide
  MOD_RES (2)..(3)..(37): Xaa is C or S
  MOD_RES (17)..(18)..(19)..(20)..(21): Xaa is A or G
  MOD_RES (22)..(23)..(24)..(25): Xaa is A or G or absent
PXXAPTKLSAISVLYLXXXXXXXXXLKNYQNMVVRSX

SEQ ID NO: 8755 - protein, 36 aa, Artificial Sequence
  Non-cyclic GFR-binding peptide
  MOD_RES (1)..(2)..(33)..(35): Xaa is C or S
XXVPQALSPISILYKVGRKPKVLKYHYMIVRSXKXS

SEQ ID NO: 8756 - protein, 39 aa, Artificial Sequence
  Non-cyclic GFR-binding peptide
  MOD_RES (4)..(5)..(39): Xaa is C or S
  MOD_RES (19)..(20)..(21)..(22)..(23): Xaa is A or G
  MOD_RES (24)..(25)..(26)..(27): Xaa is A or G or absent
PKPXXAPTQLSPISVLYKXXXXXXXXXLKYHYNMVVRAX

SEQ ID NO: 8757 - protein, 33 aa, Artificial Sequence
  Non-cyclic GFR-binding peptide
  MOD_RES (2)..(3): Xaa is C or S
AXXVPTELSATSMLYYDEYDKVVLRKHREMVVE

SEQ ID NO: 8758 - protein, 41 aa, Artificial Sequence
  Non-cyclic GFR-binding peptide
  MOD_RES (6)..(7)..(41): Xaa is C or S
  MOD_RES (21)..(22)..(23)..(24)..(25): Xaa is A or G
  MOD_RES (26)..(27)..(28)..(29): Xaa is A or G or absent
SIPKAXXVPTELSATSMLYYXXXXXXXXXLRKHREMVVEGX

SEQ ID NO: 8759 - protein, 35 aa, Artificial Sequence
  Non-cyclic GFR-binding peptide
  MOD_RES (1)..(2)..(35): Xaa is C or S
  MOD_RES (16)..(17)..(18)..(19)..(20): Xaa is A or G
  MOD_RES (21)..(22)..(23)..(24): Xaa is A or G or absent
XXVPQDLSATSILYYXXXXXXXXXLRKHRMVVKSX

SEQ ID NO: 8760 - protein, 42 aa, Artificial Sequence
  Non-cyclic GFR-binding peptide
  MOD_RES (5)..(42): Xaa is C or S
RNVQXRPTQVQLSAISVLYLEIVRKKPIFLKNYQTLEDHLAX

SEQ ID NO: 8761 - protein, 42 aa, Artificial Sequence
  Non-cyclic GFR-binding peptide
  MOD_RES (5)..(6)..(39)..(41): Xaa is C or S
  MOD_RES (20)..(21)..(22)..(23)..(24): Xaa is A or G
  MOD_RES (25)..(26)..(27)..(28): Xaa is A or G or absent
SASPXXVPQDLSATSILYYXXXXXXXXXLRKHRMVVKSXKXS

SEQ ID NO: 8762 - protein, 36 aa, Artificial Sequence
  Non-cyclic GFR-binding peptide
  MOD_RES (4)..(5): Xaa is C or S
PKAXXAPTKLSPISVLYKDSSNNVILKYHYNMVVKA

SEQ ID NO: 8763 - protein, 39 aa, Artificial Sequence
  Non-cyclic GFR-binding peptide
  MOD_RES (3)..(37)..(39): Xaa is C or S
  MOD_RES (17)..(18)..(19)..(20)..(21): Xaa is A or G
  MOD_RES (22)..(23)..(24)..(25): Xaa is A or G or absent
PTXAPTKLSPISVLYKXXXXXXXXXLKYHYNMVVRSXGX

SEQ ID NO: 8764 - protein, 33 aa, Artificial Sequence
  Non-cyclic GFR-binding peptide
  MOD_RES (32)..(32): Xaa is C or S
APTQLSPISVLYKDDSSNVILKYHYNMVVRAXG

SEQ ID NO: 8765 - protein, 32 aa, Artificial Sequence
  Non-cyclic GFR-binding peptide
  MOD_RES (1)..(32): Xaa is C or S
XVSQDLSAISILYLIGKTPKILKNYQMIVKSX

SEQ ID NO: 8766 - protein, 40 aa, Artificial Sequence
  Non-cyclic GFR-binding peptide
  MOD_RES (6)..(7)..(39): Xaa is C or S
SIPKAXXVPTELSATSMLYYDEYDKVVLRKHREMVVEGXG

SEQ ID NO: 8767 - protein, 40 aa, Artificial Sequence
  Non-cyclic GFR-binding peptide
  MOD_RES (7)..(39): Xaa is C or S
HVTKPTXAPTKLSATSVLYYDDSSNVILRKHRNMVVRSXG

SEQ ID NO: 8768 - protein, 34 aa, Artificial Sequence
  Non-cyclic GFR-binding peptide
  MOD_RES (1)..(1): Xaa is C or S
  MOD_RES (15)..(16)..(17)..(18)..(19): Xaa is A or G
  MOD_RES (20)..(21)..(22)..(23): Xaa is A or G or absent
XAPTKLSAISVLYLXXXXXXXXXLKNYQNMVVRS

SEQ ID NO: 8769 - protein, 43 aa, Artificial Sequence
  Non-cyclic GFR-binding peptide
  MOD_RES (6)..(7)..(41)..(43): Xaa is C or S
  MOD_RES (21)..(22)..(23)..(24)..(25): Xaa is A or G
  MOD_RES (26)..(27)..(28)..(29): Xaa is A or G or absent
SIPKAXXVPTELSATSMLYYXXXXXXXXXLRKHREMVVEGXGX

SEQ ID NO: 8770 - protein, 40 aa, Artificial Sequence
  Non-cyclic GFR-binding peptide
  MOD_RES (4)..(5)..(39): Xaa is C or S
  MOD_RES (19)..(20)..(21)..(22)..(23): Xaa is A or G
  MOD_RES (24)..(25)..(26)..(27): Xaa is A or G or absent
PKAXXAPTKLSAISVLYLXXXXXXXXXLKNYQNMVVKAXG

SEQ ID NO: 8771 - protein, 36 aa, Artificial Sequence
  Non-cyclic GFR-binding peptide
  MOD_RES (4)..(5): Xaa is C or S
PKPXXAPTKLSAISVLYLDDSSNVILKNYQNMVVRS

SEQ ID NO: 8772 - protein, 34 aa, Artificial Sequence
  Non-cyclic GFR-binding peptide
  MOD_RES (1)..(1): Xaa is C or S
  MOD_RES (15)..(16)..(17)..(18)..(19): Xaa is A or G
  MOD_RES (20)..(21)..(22)..(23): Xaa is A or G or absent
XAPTKLNAISVLYFXXXXXXXXXLKKYRNMVVKA

SEQ ID NO: 8773 - protein, 37 aa, Artificial Sequence
  Non-cyclic GFR-binding peptide
  MOD_RES (34)..(36): Xaa is C or S
  MOD_RES (14)..(15)..(16)..(17)..(18): Xaa is A or G
  MOD_RES (19)..(20)..(21)..(22): Xaa is A or G or absent
VPTELSPISMLYKXXXXXXXXXLKYHYDMVVEGXGXR

SEQ ID NO: 8774 - protein, 39 aa, Artificial Sequence
  Non-cyclic GFR-binding peptide
  MOD_RES (2)..(3)..(37)..(39): Xaa is C or S
  MOD_RES (17)..(18)..(19)..(20)..(21): Xaa is A or G
  MOD_RES (22)..(23)..(24)..(25): Xaa is A or G or absent
AXXVPTELNAISMLYFXXXXXXXXXLKKYREMVVEGXGX

SEQ ID NO: 8775 - protein, 41 aa, Artificial Sequence
  Non-cyclic GFR-binding peptide
  MOD_RES (5)..(6)..(38)..(40): Xaa is C or S
VPKAXXAPTKLSPISVLYKDSSNNVILKYHYNMVVKAXGXH

SEQ ID NO: 8776 - protein, 34 aa, Artificial Sequence
  Non-cyclic GFR-binding peptide
  MOD_RES (34)..(34): Xaa is C or S
  MOD_RES (14)..(15)..(16)..(17)..(18): Xaa is A or G
  MOD_RES (19)..(20)..(21)..(22): Xaa is A or G or absent
APTQLSATSVLYYXXXXXXXXXLRKHRNMVVRAX

SEQ ID NO: 8777 - protein, 41 aa, Artificial Sequence
  Non-cyclic GFR-binding peptide
  MOD_RES (5)..(6)..(38)..(40): Xaa is C or S
VPKPXXAPTKLSAISVLYLDDSSNVILKNYQNMVVRSXGXH

SEQ ID NO: 8778 - protein, 32 aa, Artificial Sequence
  Non-cyclic GFR-binding peptide
  MOD_RES (31)..(31): Xaa is C or S
VSQDLNAISILYFIGKTPKILKKYRMIVKSXK

SEQ ID NO: 8779 - protein, 37 aa, Artificial Sequence
  Non-cyclic GFR-binding peptide
  MOD_RES (1)..(34)..(36): Xaa is C or S
  MOD_RES (15)..(16)..(17)..(18)..(19): Xaa is A or G
  MOD_RES (20)..(21)..(22)..(23): Xaa is A or G or absent
XVPQDLSATSILYYXXXXXXXXXLRKHRMVVKSXKXS

SEQ ID NO: 8780 - protein, 42 aa, Artificial Sequence
  Non-cyclic GFR-binding peptide
  MOD_RES (6)..(7)..(40)..(42): Xaa is C or S
  MOD_RES (21)..(22)..(23)..(24)..(25): Xaa is A or G
  MOD_RES (26)..(27)..(28)..(29): Xaa is A or G or absent
ASAAPXXVPQALNAISILYFXXXXXXXXXLKKYRMIVRSXKX

SEQ ID NO: 8781 - protein, 38 aa, Artificial Sequence
  Non-cyclic GFR-binding peptide
  MOD_RES (3)..(3): Xaa is C or S
VQXRPTQVQLSAISVLYLEIVRKKPIFLKNYQTLEDHL

SEQ ID NO: 8782 - protein, 41 aa, Artificial Sequence
  Non-cyclic GFR-binding peptide
  MOD_RES (4)..(5)..(39)..(41): Xaa is C or S
  MOD_RES (19)..(20)..(21)..(22)..(23): Xaa is A or G
  MOD_RES (24)..(25)..(26)..(27): Xaa is A or G or absent
PKAXXAPTKLSAISVLYLXXXXXXXXXLKNYQNMVVKAXGX

SEQ ID NO: 8783 - protein, 37 aa, Artificial Sequence
  Non-cyclic GFR-binding peptide
  MOD_RES (1)..(2)..(34)..(36): Xaa is C or S
XXAPTQLSAISVLYLDDSSNVILKNYQNMVVRAXGXH

SEQ ID NO: 8784 - protein, 39 aa, Artificial Sequence
  Non-cyclic GFR-binding peptide
  MOD_RES (5)..(5): Xaa is C or S
RNVQXRPTQVQLNAISVLYFEIVRKKPIFLKKYRTLEDH

SEQ ID NO: 8785 - protein, 38 aa, Artificial Sequence
  Non-cyclic GFR-binding peptide
  MOD_RES (5)..(6): Xaa is C or S
  MOD_RES (20)..(21)..(22)..(23)..(24): Xaa is A or G
  MOD_RES (25)..(26)..(27)..(28): Xaa is A or G or absent
IPKAXXVPTELSATSMLYYXXXXXXXXXLRKHRDMVVE

SEQ ID NO: 8786 - protein, 44 aa, Artificial Sequence
  Non-cyclic GFR-binding peptide
  MOD_RES (6)..(7)..(42)..(44): Xaa is C or S
  MOD_RES (21)..(22)..(23)..(24)..(25): Xaa is A or G
  MOD_RES (26)..(27)..(28)..(29): Xaa is A or G or absent
KVGKAXXVPTKLSAISVLYLXXXXXXXXXLKNYQEGMSVAEXGX

SEQ ID NO: 8787 - protein, 35 aa, Artificial Sequence
  Non-cyclic GFR-binding peptide
  MOD_RES (4)..(5): Xaa is C or S
PKAXXAPTKLSPISVLYKDSSNNVILKYHYNMVVK

SEQ ID NO: 8788 - protein, 36 aa, Artificial Sequence
  Non-cyclic GFR-binding peptide
  MOD_RES (3)..(4)..(36): Xaa is C or S
KAXXVPTELNAISMLYFDENEKVVLKKYRDMVVEGX

SEQ ID NO: 8789 - protein, 43 aa, Artificial Sequence
  Non-cyclic GFR-binding peptide
  MOD_RES (5)..(6)..(40)..(42): Xaa is C or S
  MOD_RES (20)..(21)..(22)..(23)..(24): Xaa is A or G
  MOD_RES (25)..(26)..(27)..(28): Xaa is A or G or absent
VPKAXXAPTKLSPISVLYKXXXXXXXXXLKYHYNMVVKAXGXH

SEQ ID NO: 8790 - protein, 42 aa, Artificial Sequence
  Non-cyclic GFR-binding peptide
  MOD_RES (4)..(41): Xaa is C or S
NVQXRPTQVQLSPISVLYKEIVRKKPIFLKYHYTLEDHLAXK

SEQ ID NO: 8791 - protein, 37 aa, Artificial Sequence
  Non-cyclic GFR-binding peptide
  MOD_RES (2)..(3)..(37): Xaa is C or S
  MOD_RES (17)..(18)..(19)..(20)..(21): Xaa is A or G
  MOD_RES (22)..(23)..(24)..(25): Xaa is A or G or absent
PXXAPTKLSPISVLYKXXXXXXXXXLKYHYNMVVRSX

SEQ ID NO: 8792 - protein, 39 aa, Artificial Sequence
  Non-cyclic GFR-binding peptide
  MOD_RES (4)..(5)..(37)..(39): Xaa is C or S
PKAXXAPTKLSAISVLYLDSSNNVILKNYQNMVVKAXGX

SEQ ID NO: 8793 - protein, 35 aa, Artificial Sequence
  Non-cyclic GFR-binding peptide
  MOD_RES (2)..(3)..(34): Xaa is C or S
PXXVSQDLSPISILYKIGKTPKILKYHYMIVKSXK

SEQ ID NO: 8794 - protein, 43 aa, Artificial Sequence
  Non-cyclic GFR-binding peptide
  MOD_RES (6)..(7)..(41)..(43): Xaa is C or S
  MOD_RES (21)..(22)..(23)..(24)..(25): Xaa is A or G
  MOD_RES (26)..(27)..(28)..(29): Xaa is A or G or absent
TVPKPXXAPTQLSAISVLYLXXXXXXXXXLKNYQNMVVRAXGX

SEQ ID NO: 8795 - protein, 43 aa, Artificial Sequence
  Non-cyclic GFR-binding peptide
  MOD_RES (5)..(6)..(40)..(42): Xaa is C or S
  MOD_RES (20)..(21)..(22)..(23)..(24): Xaa is A or G
  MOD_RES (25)..(26)..(27)..(28): Xaa is A or G or absent
VPKPXXAPTKLSAISVLYLXXXXXXXXXLKNYQNMVVRSXGXH

SEQ ID NO: 8796 - protein, 35 aa, Artificial Sequence
  Non-cyclic GFR-binding peptide
  MOD_RES (4)..(5): Xaa is C or S
PKAXXAPTKLSAISVLYLDSSNNVILKNYQNMVVK

SEQ ID NO: 8797 - protein, 40 aa, Artificial Sequence
  Non-cyclic GFR-binding peptide
  MOD_RES (3)..(40): Xaa is C or S
  MOD_RES (19)..(20)..(21)..(22)..(23): Xaa is A or G
  MOD_RES (24)..(25)..(26)..(27): Xaa is A or G or absent
VQXRPTQVQLSATSVLYYXXXXXXXXXLRKHRTLEDHLAX

SEQ ID NO: 8798 - protein, 38 aa, Artificial Sequence
  Non-cyclic GFR-binding peptide
  MOD_RES (3)..(4)..(36)..(38): Xaa is C or S
KPXXAPTQLSPISVLYKDDSSNVILKYHYNMVVRAXGX

SEQ ID NO: 8799 - protein, 40 aa, Artificial Sequence
  Non-cyclic GFR-binding peptide
  MOD_RES (6)..(7)..(39): Xaa is C or S
TVPKPXXAPTQLSATSVLYYDDSSNVILRKHRNMVVRAXG

SEQ ID NO: 8800 - protein, 33 aa, Artificial Sequence
  Non-cyclic GFR-binding peptide
  MOD_RES (1)..(2)..(33): Xaa is C or S
XXVSQDLSPISILYKIGKTPKILKYHYMIVKSX

SEQ ID NO: 8801 - protein, 31 aa, Artificial Sequence
  Non-cyclic GFR-binding peptide
  MOD_RES (1)..(1): Xaa is C or S
XAPTQLSATSVLYYDDSSNVILRKHRNMVVR

SEQ ID NO: 8802 - protein, 39 aa, Artificial Sequence
  Non-cyclic GFR-binding peptide
  MOD_RES (2)..(3)..(36)..(38): Xaa is C or S
  MOD_RES (17)..(18)..(19)..(20)..(21): Xaa is A or G
  MOD_RES (22)..(23)..(24)..(25): Xaa is A or G or absent
PXXVPQDLSAISILYLXXXXXXXXXLKNYQMVVKSXKXS

SEQ ID NO: 8803 - protein, 36 aa, Artificial Sequence
  Non-cyclic GFR-binding peptide
  MOD_RES (1)..(35): Xaa is C or S
  MOD_RES (15)..(16)..(17)..(18)..(19): Xaa is A or G
  MOD_RES (20)..(21)..(22)..(23): Xaa is A or G or absent
XAPTKLSPISVLYKXXXXXXXXXLKYHYNMVVKAXG

SEQ ID NO: 8804 - protein, 35 aa, Artificial Sequence
  Non-cyclic GFR-binding peptide
  MOD_RES (2)..(3): Xaa is C or S
  MOD_RES (17)..(18)..(19)..(20)..(21): Xaa is A or G
  MOD_RES (22)..(23)..(24)..(25): Xaa is A or G or absent
PXXVSQDLSAISILYLXXXXXXXXXLKNYQMIVKS

SEQ ID NO: 8805 - protein, 36 aa, Artificial Sequence
  Non-cyclic GFR-binding peptide
  MOD_RES (3)..(3): Xaa is C or S
  MOD_RES (17)..(18)..(19)..(20)..(21): Xaa is A or G
  MOD_RES (22)..(23)..(24)..(25): Xaa is A or G or absent
PTXAPTKLSAISVLYLXXXXXXXXXLKNYQNMVVRS

SEQ ID NO: 8806 - protein, 39 aa, Artificial Sequence
  Non-cyclic GFR-binding peptide
  MOD_RES (6)..(7): Xaa is C or S
  MOD_RES (21)..(22)..(23)..(24)..(25): Xaa is A or G
  MOD_RES (26)..(27)..(28)..(29): Xaa is A or G or absent
ASASPXXVSQDLSATSILYYXXXXXXXXXLRKHRMIVKS

SEQ ID NO: 8807 - protein, 36 aa, Artificial Sequence
  Non-cyclic GFR-binding peptide
  MOD_RES (1)..(2)..(34)..(36): Xaa is C or S
XXVPTELSPISMLYKDEYDKVVLKYHYEMVVEGXGX

SEQ ID NO: 8808 - protein, 36 aa, Artificial Sequence
  Non-cyclic GFR-binding peptide
  MOD_RES (5)..(6): Xaa is C or S
IPKAXXVPTELNAISMLYFDENEKVVLKKYRDMVVE

SEQ ID NO: 8809 - protein, 34 aa, Artificial Sequence
  Non-cyclic GFR-binding peptide
  MOD_RES (1)..(2)..(33): Xaa is C or S
XXVPQDLSAISILYLVGRTPKVLKNYQMVVKSXK

SEQ ID NO: 8810 - protein, 38 aa, Artificial Sequence
  Non-cyclic GFR-binding peptide
  MOD_RES (3)..(4)..(38): Xaa is C or S
  MOD_RES (18)..(19)..(20)..(21)..(22): Xaa is A or G
  MOD_RES (23)..(24)..(25)..(26): Xaa is A or G or absent
KAXXVPTELSPISMLYKXXXXXXXXXLKYHYEMVVEGX

SEQ ID NO: 8811 - protein, 40 aa, Artificial Sequence
  Non-cyclic GFR-binding peptide
  MOD_RES (5)..(37)..(39): Xaa is C or S
TKPTXAPTKLSAISVLYLDDSSNVILKNYQNMVVRSXGXH

SEQ ID NO: 8812 - protein, 42 aa, Artificial Sequence
  Non-cyclic GFR-binding peptide
  MOD_RES (3)..(40)..(42): Xaa is C or S
VQXRPTQVQLSATSVLYYEIVRKKPIFLRKHRTLEDHLAXKX

SEQ ID NO: 8813 - protein, 37 aa, Artificial Sequence
  Non-cyclic GFR-binding peptide
  MOD_RES (6)..(7): Xaa is C or S
AVPKAXXAPTKLSAISVLYLDSSNNVILKNYQNMVVK

SEQ ID NO: 8814 - protein, 41 aa, Artificial Sequence
  Non-cyclic GFR-binding peptide
  MOD_RES (6)..(7)..(40): Xaa is C or S
  MOD_RES (21)..(22)..(23)..(24)..(25): Xaa is A or G
  MOD_RES (26)..(27)..(28)..(29): Xaa is A or G or absent
ASAAPXXVPQALNAISILYFXXXXXXXXXLKKYRMIVRSXK

SEQ ID NO: 8815 - protein, 37 aa, Artificial Sequence
  Non-cyclic GFR-binding peptide
  MOD_RES (4)..(5): Xaa is C or S
  MOD_RES (19)..(20)..(21)..(22)..(23): Xaa is A or G
  MOD_RES (24)..(25)..(26)..(27): Xaa is A or G or absent
AAPXXVPQALNAISILYFXXXXXXXXXLKKYRMIVRS

SEQ ID NO: 8816 - protein, 35 aa, Artificial Sequence
  Non-cyclic GFR-binding peptide
  MOD_RES (1)..(2)..(35): Xaa is C or S
  MOD_RES (16)..(17)..(18)..(19)..(20): Xaa is A or G
  MOD_RES (21)..(22)..(23)..(24): Xaa is A or G or absent
XXVPQDLSAISILYLXXXXXXXXXLKNYQMVVKSX

SEQ ID NO: 8817 - protein, 42 aa, Artificial Sequence
  Non-cyclic GFR-binding peptide
  MOD_RES (6)..(7)..(40)..(42): Xaa is C or S
KVGKAXXVPTKLNAISVLYFDDMGVPTLKKYREGMSVAEXGX

SEQ ID NO: 8818 - protein, 40 aa, Artificial Sequence
  Non-cyclic GFR-binding peptide
  MOD_RES (1)..(38)..(40): Xaa is C or S
  MOD_RES (17)..(18)..(19)..(20)..(21): Xaa is A or G
  MOD_RES (22)..(23)..(24)..(25): Xaa is A or G or absent
XRPTQVQLNAISVLYFXXXXXXXXXLKKYRTLEDHLAXKX

SEQ ID NO: 8819 - protein, 40 aa, Artificial Sequence
  Non-cyclic GFR-binding peptide
  MOD_RES (2)..(39): Xaa is C or S
QXRPTQVQLSATSVLYYEIVRKKPIFLRKHRTLEDHLAXK

SEQ ID NO: 8820 - protein, 30 aa, Artificial Sequence
  Non-cyclic GFR-binding peptide
VPTELNAISMLYFDENEKVVLKKYRDMVVE

SEQ ID NO: 8821 - protein, 40 aa, Artificial Sequence
  Non-cyclic GFR-binding peptide
  MOD_RES (6)..(7): Xaa is C or S
  MOD_RES (21)..(22)..(23)..(24)..(25): Xaa is A or G
  MOD_RES (26)..(27)..(28)..(29): Xaa is A or G or absent
YVPKPXXAPTKLSPISVLYKXXXXXXXXXLKYHYNMVVRS

SEQ ID NO: 8822 - protein, 42 aa, Artificial Sequence
  Non-cyclic GFR-binding peptide
  MOD_RES (5)..(6)..(39)..(41): Xaa is C or S
VGKAXXVPTKLSAISVLYLDDMGVPTLKNYQEGMSVAEXGXR

SEQ ID NO: 8823 - protein, 44 aa, Artificial Sequence
  Non-cyclic GFR-binding peptide
  MOD_RES (6)..(7)..(41)..(43): Xaa is C or S
  MOD_RES (21)..(22)..(23)..(24)..(25): Xaa is A or G
  MOD_RES (26)..(27)..(28)..(29): Xaa is A or G or absent
AVPKAXXAPTKLNAISVLYFXXXXXXXXXLKKYRNMVVKAXGXH

SEQ ID NO: 8824 - protein, 35 aa, Artificial Sequence
  Non-cyclic GFR-binding peptide
  MOD_RES (2)..(3): Xaa is C or S
  MOD_RES (17)..(18)..(19)..(20)..(21): Xaa is A or G
  MOD_RES (22)..(23)..(24)..(25): Xaa is A or G or absent
PXXVPQALSPISILYKXXXXXXXXXLKYHYMIVRS

SEQ ID NO: 8825 - protein, 39 aa, Artificial Sequence
  Non-cyclic GFR-binding peptide
  MOD_RES (5)..(6): Xaa is C or S
  MOD_RES (20)..(21)..(22)..(23)..(24): Xaa is A or G
  MOD_RES (25)..(26)..(27)..(28): Xaa is A or G or absent
VPKPXXAPTQLSPISVLYKXXXXXXXXXLKYHYNMVVRA

SEQ ID NO: 8826 - protein, 37 aa, Artificial Sequence
  Non-cyclic GFR-binding peptide
  MOD_RES (4)..(5): Xaa is C or S
  MOD_RES (19)..(20)..(21)..(22)..(23): Xaa is A or G
  MOD_RES (24)..(25)..(26)..(27): Xaa is A or G or absent
PKAXXAPTKLNAISVLYFXXXXXXXXXLKKYRNMVVK

SEQ ID NO: 8827 - protein, 37 aa, Artificial Sequence
  Non-cyclic GFR-binding peptide
  MOD_RES (2)..(3): Xaa is C or S
  MOD_RES (17)..(18)..(19)..(20)..(21): Xaa is A or G
  MOD_RES (22)..(23)..(24)..(25): Xaa is A or G or absent
AXXVPTKLSATSVLYYXXXXXXXXXLRKHREGMSVAE

SEQ ID NO: 8828 - protein, 38 aa, Artificial Sequence
  Non-cyclic GFR-binding peptide
  MOD_RES (2)..(3)..(38): Xaa is C or S
  MOD_RES (17)..(18)..(19)..(20)..(21): Xaa is A or G
  MOD_RES (22)..(23)..(24)..(25): Xaa is A or G or absent
AXXVPTKLNAISVLYFXXXXXXXXXLKKYREGMSVAEX

SEQ ID NO: 8829 - protein, 37 aa, Artificial Sequence
  Non-cyclic GFR-binding peptide
  MOD_RES (4)..(36): Xaa is C or S
KPTXAPTKLSPISVLYKDDSSNVILKYHYNMVVRSXG

SEQ ID NO: 8830 - protein, 33 aa, Artificial Sequence
  Non-cyclic GFR-binding peptide
  MOD_RES (31)..(33): Xaa is C or S
VPQALNAISILYFVGRKPKVLKKYRMIVRSXKX

SEQ ID NO: 8831 - protein, 39 aa, Artificial Sequence
  Non-cyclic GFR-binding peptide
  MOD_RES (5)..(6): Xaa is C or S
  MOD_RES (20)..(21)..(22)..(23)..(24): Xaa is A or G
  MOD_RES (25)..(26)..(27)..(28): Xaa is A or G or absent
IPKAXXVPTELSATSMLYYXXXXXXXXXLRKHRDMVVEG

SEQ ID NO: 8832 - protein, 39 aa, Artificial Sequence
  Non-cyclic GFR-binding peptide
  MOD_RES (6)..(7): Xaa is C or S
  MOD_RES (21)..(22)..(23)..(24)..(25): Xaa is A or G
  MOD_RES (26)..(27)..(28)..(29): Xaa is A or G or absent
KIPKAXXVPTELNAISMLYFXXXXXXXXXLKKYRDMVVE

SEQ ID NO: 8833 - protein, 40 aa, Artificial Sequence
  Non-cyclic GFR-binding peptide
  MOD_RES (5)..(6)..(39): Xaa is C or S
  MOD_RES (20)..(21)..(22)..(23)..(24): Xaa is A or G
  MOD_RES (25)..(26)..(27)..(28): Xaa is A or G or absent
SASPXXVSQDLNAISILYFXXXXXXXXXLKKYRMIVKSXK

SEQ ID NO: 8834 - protein, 37 aa, Artificial Sequence
  Non-cyclic GFR-binding peptide
  MOD_RES (2)..(3)..(36): Xaa is C or S
AXXVPTKLSATSVLYYDDMGVPTLRKHREGMSVAEXG

SEQ ID NO: 8835 - protein, 40 aa, Artificial Sequence
  Non-cyclic GFR-binding peptide
  MOD_RES (37)..(39): Xaa is C or S
  MOD_RES (16)..(17)..(18)..(19)..(20): Xaa is A or G
  MOD_RES (21)..(22)..(23)..(24): Xaa is A or G or absent
RPTQVQLSAISVLYLXXXXXXXXXLKNYQTLEDHLAXKXE

SEQ ID NO: 8836 - protein, 35 aa, Artificial Sequence
  Non-cyclic GFR-binding peptide
  MOD_RES (1)..(35): Xaa is C or S
  MOD_RES (15)..(16)..(17)..(18)..(19): Xaa is A or G
  MOD_RES (20)..(21)..(22)..(23): Xaa is A or G or absent
XVPTELSATSMLYYXXXXXXXXXLRKHREMVVEGX

SEQ ID NO: 8837 - protein, 35 aa, Artificial Sequence
  Non-cyclic GFR-binding peptide
  MOD_RES (4)..(5): Xaa is C or S
ASPXXVPQDLSAISILYLVGRTPKVLKNYQMVVKS

SEQ ID NO: 8838 - protein, 35 aa, Artificial Sequence
  Non-cyclic GFR-binding peptide
  MOD_RES (2)..(3): Xaa is C or S
  MOD_RES (17)..(18)..(19)..(20)..(21): Xaa is A or G
  MOD_RES (22)..(23)..(24)..(25): Xaa is A or G or absent
AXXVPTELSATSMLYYXXXXXXXXXLRKHRDMVVE

SEQ ID NO: 8839 - protein, 42 aa, Artificial Sequence
  Non-cyclic GFR-binding peptide
  MOD_RES (6)..(7)..(41): Xaa is C or S
  MOD_RES (21)..(22)..(23)..(24)..(25): Xaa is A or G
  MOD_RES (26)..(27)..(28)..(29): Xaa is A or G or absent
YVPKPXXAPTKLSPISVLYKXXXXXXXXXLKYHYNMVVRSXG

SEQ ID NO: 8840 - protein, 37 aa, Artificial Sequence
  Non-cyclic GFR-binding peptide
  MOD_RES (2)..(3): Xaa is C or S
  MOD_RES (17)..(18)..(19)..(20)..(21): Xaa is A or G
  MOD_RES (22)..(23)..(24)..(25): Xaa is A or G or absent
AXXVPTKLSAISVLYLXXXXXXXXXLKNYQEGMSVAE

SEQ ID NO: 8841 - protein, 34 aa, Artificial Sequence
  Non-cyclic GFR-binding peptide
  MOD_RES (2)..(3): Xaa is C or S
AXXVPTELNAISMLYFDEYDKVVLKKYREMVVEG

SEQ ID NO: 8842 - protein, 34 aa, Artificial Sequence
  Non-cyclic GFR-binding peptide
  MOD_RES (1)..(2): Xaa is C or S
  MOD_RES (16)..(17)..(18)..(19)..(20): Xaa is A or G
  MOD_RES (21)..(22)..(23)..(24): Xaa is A or G or absent
XXAPTKLSPISVLYKXXXXXXXXXLKYHYNMVVK

SEQ ID NO: 8843 - protein, 35 aa, Artificial Sequence
  Non-cyclic GFR-binding peptide
  MOD_RES (1)..(34): Xaa is C or S
  MOD_RES (15)..(16)..(17)..(18)..(19): Xaa is A or G
  MOD_RES (20)..(21)..(22)..(23): Xaa is A or G or absent
XVPQDLSAISILYLXXXXXXXXXLKNYQMVVKSXK

SEQ ID NO: 8844 - protein, 37 aa, Artificial Sequence
  Non-cyclic GFR-binding peptide
  MOD_RES (4)..(5)..(37): Xaa is C or S
PKAXXVPTELNAISMLYFDENEKVVLKKYRDMVVEGX

SEQ ID NO: 8845 - protein, 37 aa, Artificial Sequence
  Non-cyclic GFR-binding peptide
  MOD_RES (1)..(2)..(36): Xaa is C or S
  MOD_RES (16)..(17)..(18)..(19)..(20): Xaa is A or G
  MOD_RES (21)..(22)..(23)..(24): Xaa is A or G or absent
XXAPTKLSPISVLYKXXXXXXXXXLKYHYNMVVRSXG

SEQ ID NO: 8846 - protein, 38 aa, Artificial Sequence
  Non-cyclic GFR-binding peptide
  MOD_RES (3)..(4)..(36)..(38): Xaa is C or S
KPXXAPTKLSPISVLYKDDSSNVILKYHYNMVVRSXGX

SEQ ID NO: 8847 - protein, 34 aa, Artificial Sequence
  Non-cyclic GFR-binding peptide
  MOD_RES (1)..(2): Xaa is C or S
  MOD_RES (16)..(17)..(18)..(19)..(20): Xaa is A or G
  MOD_RES (21)..(22)..(23)..(24): Xaa is A or G or absent
XXVPTELNAISMLYFXXXXXXXXXLKKYRDMVVE

SEQ ID NO: 8848 - protein, 38 aa, Artificial Sequence
  Non-cyclic GFR-binding peptide
  MOD_RES (5)..(37): Xaa is C or S
TKPTXAPTKLSPISVLYKDDSSNVILKYHYNMVVRSXG

SEQ ID NO: 8849 - protein, 39 aa, Artificial Sequence
  Non-cyclic GFR-binding peptide
  MOD_RES (37)..(39): Xaa is C or S
RPTQVQLSAISVLYLEIVRKKPIFLKNYQTLEDHLAXKX

SEQ ID NO: 8850 - protein, 44 aa, Artificial Sequence
  Non-cyclic GFR-binding peptide
  MOD_RES (7)..(41)..(43): Xaa is C or S
  MOD_RES (21)..(22)..(23)..(24)..(25): Xaa is A or G
  MOD_RES (26)..(27)..(28)..(29): Xaa is A or G or absent
HVTKPTXAPTKLSPISVLYKXXXXXXXXXLKYHYNMVVRSXGXH

SEQ ID NO: 8851 - protein, 37 aa, Artificial Sequence
  Non-cyclic GFR-binding peptide
  MOD_RES (34)..(36): Xaa is C or S
  MOD_RES (14)..(15)..(16)..(17)..(18): Xaa is A or G
  MOD_RES (19)..(20)..(21)..(22): Xaa is A or G or absent
APTQLSATSVLYYXXXXXXXXXLRKHRNMVVRAXGXH

SEQ ID NO: 8852 - protein, 30 aa, Artificial Sequence
  Non-cyclic GFR-binding peptide
VPQALSAISILYLVGRKPKVLKNYQMIVRS

SEQ ID NO: 8853 - protein, 39 aa, Artificial Sequence
  Non-cyclic GFR-binding peptide
  MOD_RES (6)..(7): Xaa is C or S
  MOD_RES (21)..(22)..(23)..(24)..(25): Xaa is A or G
  MOD_RES (26)..(27)..(28)..(29): Xaa is A or G or absent
YVPKPXXAPTKLSATSVLYYXXXXXXXXXLRKHRNMVVR

SEQ ID NO: 8854 - protein, 40 aa, Artificial Sequence
  Non-cyclic GFR-binding peptide
  MOD_RES (6)..(7)..(39): Xaa is C or S
KIPKAXXVPTELNAISMLYFDENEKVVLKKYRDMVVEGXG

SEQ ID NO: 8855 - protein, 33 aa, Artificial Sequence
  Non-cyclic GFR-binding peptide
  MOD_RES (14)..(15)..(16)..(17)..(18): Xaa is A or G
  MOD_RES (19)..(20)..(21)..(22): Xaa is A or G or absent
APTQLSPISVLYKXXXXXXXXXLKYHYNMVVRA

SEQ ID NO: 8856 - protein, 37 aa, Artificial Sequence
  Non-cyclic GFR-binding peptide
  MOD_RES (3)..(4)..(35)..(37): Xaa is C or S
SPXXVSQDLSAISILYLIGKTPKILKNYQMIVKSXKX

SEQ ID NO: 8857 - protein, 44 aa, Artificial Sequence
  Non-cyclic GFR-binding peptide
  MOD_RES (4)..(41)..(43): Xaa is C or S
  MOD_RES (20)..(21)..(22)..(23)..(24): Xaa is A or G
  MOD_RES (25)..(26)..(27)..(28): Xaa is A or G or absent
NVQXRPTQVQLSATSVLYYXXXXXXXXXLRKHRTLEDHLAXKXE

SEQ ID NO: 8858 - protein, 38 aa, Artificial Sequence
  Non-cyclic GFR-binding peptide
  MOD_RES (4)..(4): Xaa is C or S
NVQXRPTQVQLSATSVLYYEIVRKKPIFLRKHRTLEDH

SEQ ID NO: 8859 - protein, 43 aa, Artificial Sequence
  Non-cyclic GFR-binding peptide
  MOD_RES (3)..(40)..(42): Xaa is C or S
VQXRPTQVQLNAISVLYFEIVRKKPIFLKKYRTLEDHLAXKXE

SEQ ID NO: 8860 - protein, 37 aa, Artificial Sequence
  Non-cyclic GFR-binding peptide
  MOD_RES (4)..(5)..(37): Xaa is C or S
PKAXXAPTKLSAISVLYLDSSNNVILKNYQNMVVKAX

SEQ ID NO: 8861 - protein, 42 aa, Artificial Sequence
  Non-cyclic GFR-binding peptide
  MOD_RES (6)..(7)..(39)..(41): Xaa is C or S
YVPKPXXAPTKLSATSVLYYDDSSNVILRKHRNMVVRSXGXH

SEQ ID NO: 8862 - protein, 32 aa, Artificial Sequence
  Non-cyclic GFR-binding peptide
  MOD_RES (1)..(2): Xaa is C or S
XXAPTQLSATSVLYYDDSSNVILRKHRNMVVR

SEQ ID NO: 8863 - protein, 35 aa, Artificial Sequence
  Non-cyclic GFR-binding peptide
  MOD_RES (15)..(16)..(17)..(18)..(19): Xaa is A or G
  MOD_RES (20)..(21)..(22)..(23): Xaa is A or G or absent
PTQVQLNAISVLYFXXXXXXXXXLKKYRTLEDHLA

SEQ ID NO: 8864 - protein, 40 aa, Artificial Sequence
  Non-cyclic GFR-binding peptide
  MOD_RES (4)..(5)..(38)..(40): Xaa is C or S
  MOD_RES (19)..(20)..(21)..(22)..(23): Xaa is A or G
  MOD_RES (24)..(25)..(26)..(27): Xaa is A or G or absent
AAPXXVPQALNAISILYFXXXXXXXXXLKKYRMIVRSXKX

SEQ ID NO: 8865 - protein, 38 aa, Artificial Sequence
  Non-cyclic GFR-binding peptide
  MOD_RES (2)..(3)..(35)..(37): Xaa is C or S
AXXVPTELSATSMLYYDENEKVVLRKHRDMVVEGXGXR

SEQ ID NO: 8866 - protein, 37 aa, Artificial Sequence
  Non-cyclic GFR-binding peptide
  MOD_RES (4)..(5)..(36): Xaa is C or S
ASPXXVPQDLSPISILYKVGRTPKVLKYHYMVVKSXK

SEQ ID NO: 8867 - protein, 38 aa, Artificial Sequence
  Non-cyclic GFR-binding peptide
  MOD_RES (5)..(6): Xaa is C or S
  MOD_RES (20)..(21)..(22)..(23)..(24): Xaa is A or G
  MOD_RES (25)..(26)..(27)..(28): Xaa is A or G or absent
SASPXXVSQDLSATSILYYXXXXXXXXXLRKHRMIVKS

SEQ ID NO: 8868 - protein, 34 aa, Artificial Sequence
  Non-cyclic GFR-binding peptide
  MOD_RES (1)..(2): Xaa is C or S
  MOD_RES (16)..(17)..(18)..(19)..(20): Xaa is A or G
  MOD_RES (21)..(22)..(23)..(24): Xaa is A or G or absent
XXAPTKLSPISVLYKXXXXXXXXXLKYHYNMVVR

SEQ ID NO: 8869 - protein, 37 aa, Artificial Sequence
  Non-cyclic GFR-binding peptide
  MOD_RES (3)..(4)..(37): Xaa is C or S
  MOD_RES (18)..(19)..(20)..(21)..(22): Xaa is A or G
  MOD_RES (23)..(24)..(25)..(26): Xaa is A or G or absent
SPXXVPQDLSPISILYKXXXXXXXXXLKYHYMVVKSX

SEQ ID NO: 8870 - protein, 38 aa, Artificial Sequence
  Non-cyclic GFR-binding peptide
  MOD_RES (6)..(38): Xaa is C or S
VTKPTXAPTKLSATSVLYYDDSSNVILRKHRNMVVRSX

SEQ ID NO: 8871 - protein, 36 aa, Artificial Sequence
  Non-cyclic GFR-binding peptide
  MOD_RES (34)..(36): Xaa is C or S
  MOD_RES (14)..(15)..(16)..(17)..(18): Xaa is A or G
  MOD_RES (19)..(20)..(21)..(22): Xaa is A or G or absent
VPTELSPISMLYKXXXXXXXXXLKYHYDMVVEGXGX

SEQ ID NO: 8872 - protein, 40 aa, Artificial Sequence
  Non-cyclic GFR-binding peptide
  MOD_RES (6)..(7)..(39): Xaa is C or S
AVPKAXXAPTKLSAISVLYLDSSNNVILKNYQNMVVKAXG

SEQ ID NO: 8873 - protein, 36 aa, Artificial Sequence
  Non-cyclic GFR-binding peptide
  MOD_RES (1)..(34)..(36): Xaa is C or S
XVPTKLSAISVLYLDDMGVPTLKNYQEGMSVAEXGX

SEQ ID NO: 8874 - protein, 35 aa, Artificial Sequence
  Non-cyclic GFR-binding peptide
  MOD_RES (1)..(2)..(34): Xaa is C or S
XXAPTQLSAISVLYLDDSSNVILKNYQNMVVRAXG

SEQ ID NO: 8875 - protein, 39 aa, Artificial Sequence
  Non-cyclic GFR-binding peptide
  MOD_RES (3)..(4)..(36)..(38): Xaa is C or S
KPXXAPTKLSAISVLYLDDSSNVILKNYQNMVVRSXGXH

SEQ ID NO: 8876 - protein, 38 aa, Artificial Sequence
  Non-cyclic GFR-binding peptide
  MOD_RES (1)..(35)..(37): Xaa is C or S
  MOD_RES (15)..(16)..(17)..(18)..(19): Xaa is A or G
  MOD_RES (20)..(21)..(22)..(23): Xaa is A or G or absent
XVPTELNAISMLYFXXXXXXXXXLKKYRDMVVEGXGXR

SEQ ID NO: 8877 - protein, 37 aa, Artificial Sequence
  Non-cyclic GFR-binding peptide
  MOD_RES (1)..(34)..(36): Xaa is C or S
  MOD_RES (15)..(16)..(17)..(18)..(19): Xaa is A or G
  MOD_RES (20)..(21)..(22)..(23): Xaa is A or G or absent
XVSQDLSPISILYKXXXXXXXXXLKYHYMIVKSXKXS

SEQ ID NO: 8878 - protein, 32 aa, Artificial Sequence
  Non-cyclic GFR-binding peptide
  MOD_RES (1)..(1): Xaa is C or S
XAPTKLSAISVLYLDSSNNVILKNYQNMVVKA

SEQ ID NO: 8879 - protein, 36 aa, Artificial Sequence
  Non-cyclic GFR-binding peptide
  MOD_RES (6)..(6): Xaa is C or S
VTKPTXAPTKLSPISVLYKDDSSNVILKYHYNMVVR

SEQ ID NO: 8880 - protein, 40 aa, Artificial Sequence
  Non-cyclic GFR-binding peptide
  MOD_RES (4)..(5)..(37)..(39): Xaa is C or S
PKPXXAPTKLSATSVLYYDDSSNVILRKHRNMVVRSXGXH

SEQ ID NO: 8881 - protein, 41 aa, Artificial Sequence
  Non-cyclic GFR-binding peptide
  MOD_RES (5)..(6)..(39)..(41): Xaa is C or S
  MOD_RES (20)..(21)..(22)..(23)..(24): Xaa is A or G
  MOD_RES (25)..(26)..(27)..(28): Xaa is A or G or absent
SASPXXVPQDLSATSILYYXXXXXXXXXLRKHRMVVKSXKX

SEQ ID NO: 8882 - protein, 37 aa, Artificial Sequence
  Non-cyclic GFR-binding peptide
  MOD_RES (3)..(4)..(35)..(37): Xaa is C or S
SPXXVPQDLSAISILYLVGRTPKVLKNYQMVVKSXKX

SEQ ID NO: 8883 - protein, 41 aa, Artificial Sequence
  Non-cyclic GFR-binding peptide
  MOD_RES (2)..(39)..(41): Xaa is C or S
QXRPTQVQLNAISVLYFEIVRKKPIFLKKYRTLEDHLAXKX

SEQ ID NO: 8884 - protein, 38 aa, Artificial Sequence
  Non-cyclic GFR-binding peptide
  MOD_RES (1)..(36)..(38): Xaa is C or S
  MOD_RES (15)..(16)..(17)..(18)..(19): Xaa is A or G
  MOD_RES (20)..(21)..(22)..(23): Xaa is A or G or absent
XVPTKLSAISVLYLXXXXXXXXXLKNYQEGMSVAEXGX

SEQ ID NO: 8885 - protein, 36 aa, Artificial Sequence
  Non-cyclic GFR-binding peptide
  MOD_RES (2)..(3)..(35): Xaa is C or S
AXXAPTKLSPISVLYKDSSNNVILKYHYNMVVKAXG

SEQ ID NO: 8886 - protein, 39 aa, Artificial Sequence
  Non-cyclic GFR-binding peptide
  MOD_RES (3)..(4)..(38): Xaa is C or S
  MOD_RES (18)..(19)..(20)..(21)..(22): Xaa is A or G
  MOD_RES (23)..(24)..(25)..(26): Xaa is A or G or absent
KAXXAPTKLSAISVLYLXXXXXXXXXLKNYQNMVVKAXG

SEQ ID NO: 8887 - protein, 35 aa, Artificial Sequence
  Non-cyclic GFR-binding peptide
  MOD_RES (1)..(32)..(34): Xaa is C or S
XVSQDLNAISILYFIGKTPKILKKYRMIVKSXKXS

SEQ ID NO: 8888 - protein, 36 aa, Artificial Sequence
  Non-cyclic GFR-binding peptide
  MOD_RES (2)..(3)..(36): Xaa is C or S
  MOD_RES (17)..(18)..(19)..(20)..(21): Xaa is A or G
  MOD_RES (22)..(23)..(24)..(25): Xaa is A or G or absent
PXXVSQDLSPISILYKXXXXXXXXXLKYHYMIVKSX

SEQ ID NO: 8889 - protein, 36 aa, Artificial Sequence
  Non-cyclic GFR-binding peptide
  MOD_RES (1)..(2)..(36): Xaa is C or S
  MOD_RES (16)..(17)..(18)..(19)..(20): Xaa is A or G
  MOD_RES (21)..(22)..(23)..(24): Xaa is A or G or absent
XXAPTKLSPISVLYKXXXXXXXXXLKYHYNMVVRSX

SEQ ID NO: 8890 - protein, 39 aa, Artificial Sequence
  Non-cyclic GFR-binding peptide
  MOD_RES (3)..(4)..(36)..(38): Xaa is C or S
KAXXAPTKLSPISVLYKDSSNNVILKYHYNMVVKAXGXH

SEQ ID NO: 8891 - protein, 34 aa, Artificial Sequence
  Non-cyclic GFR-binding peptide
  MOD_RES (15)..(16)..(17)..(18)..(19): Xaa is A or G
  MOD_RES (20)..(21)..(22)..(23): Xaa is A or G or absent
PTQVQLNAISVLYFXXXXXXXXXLKKYRTLEDHL

SEQ ID NO: 8892 - protein, 33 aa, Artificial Sequence
  Non-cyclic GFR-binding peptide
  MOD_RES (2)..(3): Xaa is C or S
AXXVPTELNAISMLYFDEYDKVVLKKYREMVVE

SEQ ID NO: 8893 - protein, 33 aa, Artificial Sequence
  Non-cyclic GFR-binding peptide
  MOD_RES (1)..(32): Xaa is C or S
XVPQDLSAISILYLVGRTPKVLKNYQMVVKSXK

SEQ ID NO: 8894 - protein, 36 aa, Artificial Sequence
  Non-cyclic GFR-binding peptide
  MOD_RES (2)..(4)..(36): Xaa is C or S
HXGXSRVVMNNSLQEIVNSSDDYYVVPLPELKTPAX

SEQ ID NO: 8895 - protein, 35 aa, Artificial Sequence
  Non-cyclic GFR-binding peptide
  MOD_RES (1)..(33)..(34): Xaa is C or S
XGEVVMENSLQEVVKDYEDYYVMPLPELETPVXXA

SEQ ID NO: 8896 - protein, 34 aa, Artificial Sequence
  Non-cyclic GFR-binding peptide
  MOD_RES (2)..(34): Xaa is C or S
GXARVVMNNSLQEIVNSSDDYYLVTLPELQTPAX

SEQ ID NO: 8897 - protein, 40 aa, Artificial Sequence
  Non-cyclic GFR-binding peptide
  MOD_RES (2)..(34)..(35): Xaa is C or S
GXGEVVMDNSLQEVVKENEDYYVMPLPELETPVXXAKPIK

SEQ ID NO: 8898 - protein, 35 aa, Artificial Sequence
  Non-cyclic GFR-binding peptide
  MOD_RES (1)..(33)..(34): Xaa is C or S
XSRVVMNEYQKYIVNSSDDIFLVSIPSLKTPAXXP

SEQ ID NO: 8899 - protein, 36 aa, Artificial Sequence
  Non-cyclic GFR-binding peptide
  MOD_RES (1)..(35)..(36): Xaa is C or S
  MOD_RES (13)..(14)..(15)..(16)..(17): Xaa is A or G
  MOD_RES (18)..(19)..(20)..(21): Xaa is A or G or absent
XGEVVMDNSLQEXXXXXXXXXYYVMPLPELETPVXX

SEQ ID NO: 8900 - protein, 41 aa, Artificial Sequence
  Non-cyclic GFR-binding peptide
  MOD_RES (1)..(3)..(37)..(38): Xaa is C or S
  MOD_RES (15)..(16)..(17)..(18)..(19): Xaa is A or G
  MOD_RES (20)..(21)..(22)..(23): Xaa is A or G or absent
XGXGEVVMENSLQEXXXXXXXXXYYVMPLPELETPVXXAKP

SEQ ID NO: 8901 - protein, 35 aa, Artificial Sequence
  Non-cyclic GFR-binding peptide
  MOD_RES (1)..(33)..(34): Xaa is C or S
XSEVVMDNSLQEVVNNASDYYVIPLPELRTPVXXT

SEQ ID NO: 8902 - protein, 35 aa, Artificial Sequence
  Non-cyclic GFR-binding peptide
  MOD_RES (2)..(34)..(35): Xaa is C or S
GXGEVVMENSLQEVVKDYEDYYVMPLPELETPVXX

SEQ ID NO: 8903 - protein, 33 aa, Artificial Sequence
  Non-cyclic GFR-binding peptide
  MOD_RES (12)..(13)..(14)..(15)..(16): Xaa is A or G
  MOD_RES (17)..(18)..(19)..(20): Xaa is A or G or absent
GEVVMDNSLQEXXXXXXXXXYYVMPLPELETPV

SEQ ID NO: 8904 - protein, 39 aa, Artificial Sequence
  Non-cyclic GFR-binding peptide
  MOD_RES (1)..(3)..(37): Xaa is C or S
  MOD_RES (15)..(16)..(17)..(18)..(19): Xaa is A or G
  MOD_RES (20)..(21)..(22)..(23): Xaa is A or G or absent
XGXSRVVMNNSLQEXXXXXXXXXYYLVTLPELKTPAXTP

SEQ ID NO: 8905 - protein, 37 aa, Artificial Sequence
  Non-cyclic GFR-binding peptide
  MOD_RES (1)..(34)..(35): Xaa is C or S
  MOD_RES (12)..(13)..(14)..(15)..(16): Xaa is A or G
  MOD_RES (17)..(18)..(19)..(20): Xaa is A or G or absent
XSKVIMEYQKYXXXXXXXXXIFLISIPSLDQSVXXPS

SEQ ID NO: 8906 - protein, 36 aa, Artificial Sequence
  Non-cyclic GFR-binding peptide
  MOD_RES (2)..(36): Xaa is C or S
  MOD_RES (14)..(15)..(16)..(17)..(18): Xaa is A or G
  MOD_RES (19)..(20)..(21)..(22): Xaa is A or G or absent
GXSEVVMDRYKKLXXXXXXXXXFYLISIANLRTPVX

SEQ ID NO: 8907 - protein, 37 aa, Artificial Sequence
  Non-cyclic GFR-binding peptide
  MOD_RES (32)..(33): Xaa is C or S
GEVVMENSLQEVVKDYEDYYLMTLPELETPVXXAKPI

SEQ ID NO: 8908 - protein, 36 aa, Artificial Sequence
  Non-cyclic GFR-binding peptide
  MOD_RES (33)..(34): Xaa is C or S
  MOD_RES (11)..(12)..(13)..(14)..(15): Xaa is A or G
  MOD_RES (16)..(17)..(18)..(19): Xaa is A or G or absent
SRVIMNSLQEXXXXXXXXXYYLITLPELAQPVXXPA

SEQ ID NO: 8909 - protein, 35 aa, Artificial Sequence
  Non-cyclic GFR-binding peptide
  MOD_RES (31)..(32): Xaa is C or S
EVVMDNSLQEVVNNASDYYLITLPELRTPVXXTPP

SEQ ID NO: 8910 - protein, 41 aa, Artificial Sequence
  Non-cyclic GFR-binding peptide
  MOD_RES (1)..(3)..(36)..(37): Xaa is C or S
  MOD_RES (14)..(15)..(16)..(17)..(18): Xaa is A or G
  MOD_RES (19)..(20)..(21)..(22): Xaa is A or G or absent
XKXSKVVMNSLQEXXXXXXXXXYYVIPLPELDQPVXXPSAS

SEQ ID NO: 8911 - protein, 39 aa, Artificial Sequence
  Non-cyclic GFR-binding peptide
  MOD_RES (1)..(3)..(36)..(37): Xaa is C or S
  MOD_RES (14)..(15)..(16)..(17)..(18): Xaa is A or G
  MOD_RES (19)..(20)..(21)..(22): Xaa is A or G or absent
XKXSKVIMNSLQEXXXXXXXXXYYVIPLPELDQSVXXPS

SEQ ID NO: 8912 - protein, 33 aa, Artificial Sequence
  Non-cyclic GFR-binding peptide
  MOD_RES (2)..(2): Xaa is C or S
GXSRVVMNEYQKYIVNSSDDIFLVSIPSLKTPA

SEQ ID NO: 8913 - protein, 37 aa, Artificial Sequence
  Non-cyclic GFR-binding peptide
  MOD_RES (1)..(33)..(34): Xaa is C or S
XSEVVMDNSLQEVVNNASDYYVIPLPELRTPVXXTPP

SEQ ID NO: 8914 - protein, 41 aa, Artificial Sequence
  Non-cyclic GFR-binding peptide
  MOD_RES (1)..(3)..(35)..(36): Xaa is C or S
XGXSEVVMDQYNKLVVNNASDLYLISIASLRTPVXXTPPTS

SEQ ID NO: 8915 - protein, 36 aa, Artificial Sequence
  Non-cyclic GFR-binding peptide
  MOD_RES (1)..(3): Xaa is C or S
  MOD_RES (15)..(16)..(17)..(18)..(19): Xaa is A or G
  MOD_RES (20)..(21)..(22)..(23): Xaa is A or G or absent
XGXGEVVMENSLQEXXXXXXXXXYYVMPLPELETPV

SEQ ID NO: 8916 - protein, 38 aa, Artificial Sequence
  Non-cyclic GFR-binding peptide
  MOD_RES (2)..(4)..(38): Xaa is C or S
  MOD_RES (16)..(17)..(18)..(19)..(20): Xaa is A or G
  MOD_RES (21)..(22)..(23)..(24): Xaa is A or G or absent
HXGXSRVVMNNSLQEXXXXXXXXXYYLVTLPELKTPAX

SEQ ID NO: 8917 - protein, 40 aa, Artificial Sequence
  Non-cyclic GFR-binding peptide
  MOD_RES (1)..(3)..(34)..(35): Xaa is C or S
XKXSKVVMEYQKYVKPTRGVIFLISIPSLDQPVXXPSASA

SEQ ID NO: 8918 - protein, 35 aa, Artificial Sequence
  Non-cyclic GFR-binding peptide
  MOD_RES (2)..(4): Xaa is C or S
HXGXSRVVMNNSLQEIVNSSDDYYVVPLPELKTPA

SEQ ID NO: 8919 - protein, 34 aa, Artificial Sequence
  Non-cyclic GFR-binding peptide
  MOD_RES (1)..(1): Xaa is C or S
  MOD_RES (13)..(14)..(15)..(16)..(17): Xaa is A or G
  MOD_RES (18)..(19)..(20)..(21): Xaa is A or G or absent
XARVVMNEYQKYXXXXXXXXXIFLVSIPSLQTPA

SEQ ID NO: 8920 - protein, 38 aa, Artificial Sequence
  Non-cyclic GFR-binding peptide
  MOD_RES (33)..(34): Xaa is C or S
  MOD_RES (11)..(12)..(13)..(14)..(15): Xaa is A or G
  MOD_RES (16)..(17)..(18)..(19): Xaa is A or G or absent
EVVMENSLQEXXXXXXXXXYYLMTLPELETPVXXAKPI

SEQ ID NO: 8921 - protein, 31 aa, Artificial Sequence
  Non-cyclic GFR-binding peptide
SRVVMNNSLQEIVNSSDDYYVVPLPELKTPA

SEQ ID NO: 8922 - protein, 40 aa, Artificial Sequence
  Non-cyclic GFR-binding peptide
  MOD_RES (2)..(36)..(37): Xaa is C or S
  MOD_RES (14)..(15)..(16)..(17)..(18): Xaa is A or G
  MOD_RES (19)..(20)..(21)..(22): Xaa is A or G or absent
GXGEVVMDEYQKYXXXXXXXXXIFLMSIPSLETPVXXAKP

SEQ ID NO: 8923 - protein, 32 aa, Artificial Sequence
  Non-cyclic GFR-binding peptide
  MOD_RES (1)..(1): Xaa is C or S
XARVVMNNSLQEIVNSSDDYYLVTLPELQTPA

SEQ ID NO: 8924 - protein, 41 aa, Artificial Sequence
  Non-cyclic GFR-binding peptide
  MOD_RES (2)..(4)..(38)..(39): Xaa is C or S
  MOD_RES (16)..(17)..(18)..(19)..(20): Xaa is A or G
  MOD_RES (21)..(22)..(23)..(24): Xaa is A or G or absent
HXGXARVVMNNSLQEXXXXXXXXXYYVVPLPELQTPAXXPK

SEQ ID NO: 8925 - protein, 35 aa, Artificial Sequence
  Non-cyclic GFR-binding peptide
  MOD_RES (31)..(32): Xaa is C or S
EVVMDNSLQEVVKENEDYYLMTLPELETPVXXAKP

SEQ ID NO: 8926 - protein, 42 aa, Artificial Sequence
  Non-cyclic GFR-binding peptide
  MOD_RES (2)..(4)..(37)..(38): Xaa is C or S
  MOD_RES (15)..(16)..(17)..(18)..(19): Xaa is A or G
  MOD_RES (20)..(21)..(22)..(23): Xaa is A or G or absent
SXKXSKVIMNSLQEXXXXXXXXXYYVIPLPELDQSVXXPSAS

SEQ ID NO: 8927 - protein, 36 aa, Artificial Sequence
  Non-cyclic GFR-binding peptide
  MOD_RES (1)..(3)..(36): Xaa is C or S
  MOD_RES (14)..(15)..(16)..(17)..(18): Xaa is A or G
  MOD_RES (19)..(20)..(21)..(22): Xaa is A or G or absent
XKXSRVIMEYQKYXXXXXXXXXIFLISIPSLAQPVX

SEQ ID NO: 8928 - protein, 37 aa, Artificial Sequence
  Non-cyclic GFR-binding peptide
  MOD_RES (1)..(3)..(37): Xaa is C or S
  MOD_RES (15)..(16)..(17)..(18)..(19): Xaa is A or G
  MOD_RES (20)..(21)..(22)..(23): Xaa is A or G or absent
XGXSEVVMDNSLQEXXXXXXXXXYYVIPLPELRTPVX

SEQ ID NO: 8929 - protein, 36 aa, Artificial Sequence
  Non-cyclic GFR-binding peptide
  MOD_RES (1)..(33)..(34): Xaa is C or S
XSEVVMDNSLQEVVNNASDYYLITLPELRTPVXXTP

SEQ ID NO: 8930 - protein, 37 aa, Artificial Sequence
  Non-cyclic GFR-binding peptide
  MOD_RES (2)..(36)..(37): Xaa is C or S
  MOD_RES (14)..(15)..(16)..(17)..(18): Xaa is A or G
  MOD_RES (19)..(20)..(21)..(22): Xaa is A or G or absent
GXSRVVMNNSLQEXXXXXXXXXYYVVPLPELKTPAXX

SEQ ID NO: 8931 - protein, 39 aa, Artificial Sequence
  Non-cyclic GFR-binding peptide
  MOD_RES (2)..(4)..(38): Xaa is C or S
  MOD_RES (16)..(17)..(18)..(19)..(20): Xaa is A or G
  MOD_RES (21)..(22)..(23)..(24): Xaa is A or G or absent
HXGXSRVVMNNSLQEXXXXXXXXXYYLVTLPELKTPAXT

SEQ ID NO: 8932 - protein, 37 aa, Artificial Sequence
  Non-cyclic GFR-binding peptide
  MOD_RES (2)..(4): Xaa is C or S
  MOD_RES (16)..(17)..(18)..(19)..(20): Xaa is A or G
  MOD_RES (21)..(22)..(23)..(24): Xaa is A or G or absent
HXGXSRVVMNNSLQEXXXXXXXXXYYLVTLPELKTPA

SEQ ID NO: 8933 - protein, 41 aa, Artificial Sequence
  Non-cyclic GFR-binding peptide
  MOD_RES (2)..(4)..(36)..(37): Xaa is C or S
RXGXGEVVMDEYQKYVVKENEDIFLMSIPSLETPVXXAKPI

SEQ ID NO: 8934 - protein, 40 aa, Artificial Sequence
  Non-cyclic GFR-binding peptide
  MOD_RES (1)..(35)..(36): Xaa is C or S
  MOD_RES (13)..(14)..(15)..(16)..(17): Xaa is A or G
  MOD_RES (18)..(19)..(20)..(21): Xaa is A or G or absent
XGEVVMEEYQKYXXXXXXXXXIFLMSIPSLETPVXXAKPI

SEQ ID NO: 8935 - protein, 32 aa, Artificial Sequence
  Non-cyclic GFR-binding peptide
  MOD_RES (31)..(32): Xaa is C or S
RVVMNEYQKYIVNSSDDIFLVSIPSLKTPAXX

SEQ ID NO: 8936 - protein, 40 aa, Artificial Sequence
  Non-cyclic GFR-binding peptide
  MOD_RES (2)..(4)..(35)..(36): Xaa is C or S
SXKXSRVIMEYQKYVKPKRGVIFLISIPSLAQPVXXPAAS

SEQ ID NO: 8937 - protein, 42 aa, Artificial Sequence
  Non-cyclic GFR-binding peptide
  MOD_RES (2)..(4)..(38): Xaa is C or S
  MOD_RES (16)..(17)..(18)..(19)..(20): Xaa is A or G
  MOD_RES (21)..(22)..(23)..(24): Xaa is A or G or absent
HXGXSRVVMNEYQKYXXXXXXXXXIFLVSIPSLKTPAXTPKT

SEQ ID NO: 8938 - protein, 36 aa, Artificial Sequence
  Non-cyclic GFR-binding peptide
  MOD_RES (1)..(34)..(35): Xaa is C or S
  MOD_RES (12)..(13)..(14)..(15)..(16): Xaa is A or G
  MOD_RES (17)..(18)..(19)..(20): Xaa is A or G or absent
XSRVIMEYQKYXXXXXXXXXIFLISIPSLAQPVXXP

SEQ ID NO: 8939 - protein, 32 aa, Artificial Sequence
  Non-cyclic GFR-binding peptide
  MOD_RES (32)..(32): Xaa is C or S
GEVVMENSLQEVVKDYEDYYLMTLPELETPVX

SEQ ID NO: 8940 - protein, 39 aa, Artificial Sequence
  Non-cyclic GFR-binding peptide
  MOD_RES (1)..(3)..(35)..(36): Xaa is C or S
XGXSRVVMNNSLQEIVNSSDDYYLVTLPELKTPAXXPKP

SEQ ID NO: 8941 - protein, 38 aa, Artificial Sequence
  Non-cyclic GFR-binding peptide
  MOD_RES (1)..(35): Xaa is C or S
  MOD_RES (13)..(14)..(15)..(16)..(17): Xaa is A or G
  MOD_RES (18)..(19)..(20)..(21): Xaa is A or G or absent
XSRVVMNNSLQEXXXXXXXXXYYLVTLPELKTPAXTPK

SEQ ID NO: 8942 - protein, 43 aa, Artificial Sequence
  Non-cyclic GFR-binding peptide
  MOD_RES (2)..(4)..(37)..(38): Xaa is C or S
  MOD_RES (15)..(16)..(17)..(18)..(19): Xaa is A or G
  MOD_RES (20)..(21)..(22)..(23): Xaa is A or G or absent
SXKXSRVIMEYQKYXXXXXXXXXIFLISIPSLAQPVXXPAASA

SEQ ID NO: 8943 - protein, 31 aa, Artificial Sequence
  Non-cyclic GFR-binding peptide
  MOD_RES (31)..(31): Xaa is C or S
RVVMNEYQKYIVNSSDDIFLVSIPSLQTPAX

SEQ ID NO: 8944 - protein, 41 aa, Artificial Sequence
  Non-cyclic GFR-binding peptide
  MOD_RES (1)..(3)..(37)..(38): Xaa is C or S
  MOD_RES (15)..(16)..(17)..(18)..(19): Xaa is A or G
  MOD_RES (20)..(21)..(22)..(23): Xaa is A or G or absent
XGXSEVVMDNSLQEXXXXXXXXXYYVIPLPELRTPVXXTPP

SEQ ID NO: 8945 - protein, 32 aa, Artificial Sequence
  Non-cyclic GFR-binding peptide
  MOD_RES (31)..(32): Xaa is C or S
SRVIMEYQKYVKPKRGVIFLISIPSLAQPVXX

SEQ ID NO: 8946 - protein, 38 aa, Artificial Sequence
  Non-cyclic GFR-binding peptide
  MOD_RES (2)..(4)..(37)..(38): Xaa is C or S
  MOD_RES (15)..(16)..(17)..(18)..(19): Xaa is A or G
  MOD_RES (20)..(21)..(22)..(23): Xaa is A or G or absent
SXKXSKVVMNSLQEXXXXXXXXXYYVIPLPELDQPVXX

SEQ ID NO: 8947 - protein, 39 aa, Artificial Sequence
  Non-cyclic GFR-binding peptide
  MOD_RES (33)..(33): Xaa is C or S
  MOD_RES (11)..(12)..(13)..(14)..(15): Xaa is A or G
  MOD_RES (16)..(17)..(18)..(19): Xaa is A or G or absent
RVVMNNSLQEXXXXXXXXXYYVVPLPELKTPAXTPKTVH

SEQ ID NO: 8948 - protein, 35 aa, Artificial Sequence
  Non-cyclic GFR-binding peptide
  MOD_RES (33)..(34): Xaa is C or S
  MOD_RES (11)..(12)..(13)..(14)..(15): Xaa is A or G
  MOD_RES (16)..(17)..(18)..(19): Xaa is A or G or absent
RVVMNNSLQEXXXXXXXXXYYVVPLPELQTPAXXP

SEQ ID NO: 8949 - protein, 37 aa, Artificial Sequence
  Non-cyclic GFR-binding peptide
  MOD_RES (34)..(35): Xaa is C or S
  MOD_RES (12)..(13)..(14)..(15)..(16): Xaa is A or G
  MOD_RES (17)..(18)..(19)..(20): Xaa is A or G or absent
ARVVMNNSLQEXXXXXXXXXYYLVTLPELQTPAXXPK

SEQ ID NO: 8950 - protein, 34 aa, Artificial Sequence
  Non-cyclic GFR-binding peptide
  MOD_RES (31)..(31): Xaa is C or S
RVVMNNSLQEIVNSSDDYYLVTLPELKTPAXTPK

SEQ ID NO: 8951 - protein, 44 aa, Artificial Sequence
  Non-cyclic GFR-binding peptide
  MOD_RES (2)..(4)..(38)..(39): Xaa is C or S
  MOD_RES (16)..(17)..(18)..(19)..(20): Xaa is A or G
  MOD_RES (21)..(22)..(23)..(24): Xaa is A or G or absent
HXGXARVVMNEYQKYXXXXXXXXXIFLVSIPSLQTPAXXPKPVT

SEQ ID NO: 8952 - protein, 39 aa, Artificial Sequence
  Non-cyclic GFR-binding peptide
  MOD_RES (34)..(35): Xaa is C or S
  MOD_RES (12)..(13)..(14)..(15)..(16): Xaa is A or G
  MOD_RES (17)..(18)..(19)..(20): Xaa is A or G or absent
SEVVMDNSLQEXXXXXXXXXYYLITLPELRTPVXXTPPT

SEQ ID NO: 8953 - protein, 42 aa, Artificial Sequence
  Non-cyclic GFR-binding peptide
  MOD_RES (1)..(3)..(37): Xaa is C or S
  MOD_RES (15)..(16)..(17)..(18)..(19): Xaa is A or G
  MOD_RES (20)..(21)..(22)..(23): Xaa is A or G or absent
XGXSRVVMNNSLQEXXXXXXXXXYYVVPLPELKTPAXTPKTV

SEQ ID NO: 8954 - protein, 39 aa, Artificial Sequence
  Non-cyclic GFR-binding peptide
  MOD_RES (2)..(4)..(37)..(38): Xaa is C or S
  MOD_RES (15)..(16)..(17)..(18)..(19): Xaa is A or G
  MOD_RES (20)..(21)..(22)..(23): Xaa is A or G or absent
SXKXSKVIMNSLQEXXXXXXXXXYYVIPLPELDQSVXXP

SEQ ID NO: 8955 - protein, 41 aa, Artificial Sequence
  Non-cyclic GFR-binding peptide
  MOD_RES (1)..(3)..(37)..(38): Xaa is C or S
  MOD_RES (15)..(16)..(17)..(18)..(19): Xaa is A or G
  MOD_RES (20)..(21)..(22)..(23): Xaa is A or G or absent
XGXARVVMNEYQKYXXXXXXXXXIFLVSIPSLQTPAXXPKP

SEQ ID NO: 8956 - protein, 37 aa, Artificial Sequence
  Non-cyclic GFR-binding peptide
  MOD_RES (2)..(4)..(37): Xaa is C or S
  MOD_RES (15)..(16)..(17)..(18)..(19): Xaa is A or G
  MOD_RES (20)..(21)..(22)..(23): Xaa is A or G or absent
SXKXSKVIMNSLQEXXXXXXXXXYYVIPLPELDQSVX

SEQ ID NO: 8957 - protein, 38 aa, Artificial Sequence
  Non-cyclic GFR-binding peptide
  MOD_RES (1)..(33)..(34): Xaa is C or S
XSEVVMDQYNKLVVNNASDLYLISIASLRTPVXXTPPT

SEQ ID NO: 8958 - protein, 39 aa, Artificial Sequence
  Non-cyclic GFR-binding peptide
  MOD_RES (1)..(35)..(36): Xaa is C or S
  MOD_RES (13)..(14)..(15)..(16)..(17): Xaa is A or G
  MOD_RES (18)..(19)..(20)..(21): Xaa is A or G or absent
XGEVVMDNSLQEXXXXXXXXXYYLMTLPELETPVXXAKP

SEQ ID NO: 8959 - protein, 36 aa, Artificial Sequence
  Non-cyclic GFR-binding peptide
  MOD_RES (33)..(34): Xaa is C or S
  MOD_RES (11)..(12)..(13)..(14)..(15): Xaa is A or G
  MOD_RES (16)..(17)..(18)..(19): Xaa is A or G or absent
RVVMNNSLQEXXXXXXXXXYYLVTLPELQTPAXXPK

SEQ ID NO: 8960 - protein, 38 aa, Artificial Sequence
  Non-cyclic GFR-binding peptide
  MOD_RES (1)..(3)..(37)..(38): Xaa is C or S
  MOD_RES (15)..(16)..(17)..(18)..(19): Xaa is A or G
  MOD_RES (20)..(21)..(22)..(23): Xaa is A or G or absent
XGXGEVVMDNSLQEXXXXXXXXXYYVMPLPELETPVXX

SEQ ID NO: 8961 - protein, 39 aa, Artificial Sequence
  Non-cyclic GFR-binding peptide
  MOD_RES (2)..(34): Xaa is C or S
GXSRVVMNEYQKYIVNSSDDIFLVSIPSLKTPAXTPKTV

SEQ ID NO: 8962 - protein, 37 aa, Artificial Sequence
  Non-cyclic GFR-binding peptide
  MOD_RES (33)..(34): Xaa is C or S
  MOD_RES (11)..(12)..(13)..(14)..(15): Xaa is A or G
  MOD_RES (16)..(17)..(18)..(19): Xaa is A or G or absent
SKVVMNSLQEXXXXXXXXXYYVIPLPELDQPVXXPSA

SEQ ID NO: 8963 - protein, 41 aa, Artificial Sequence
  Non-cyclic GFR-binding peptide
  MOD_RES (2)..(35)..(36): Xaa is C or S
  MOD_RES (13)..(14)..(15)..(16)..(17): Xaa is A or G
  MOD_RES (18)..(19)..(20)..(21): Xaa is A or G or absent
KXSKVIMNSLQEXXXXXXXXXYYVIPLPELDQSVXXPSASA

SEQ ID NO: 8964 - protein, 35 aa, Artificial Sequence
  Non-cyclic GFR-binding peptide
  MOD_RES (1)..(3)..(34)..(35): Xaa is C or S
XKXSKVIMNSLQEIKPTKGIYYVIPLPELDQSVXX

SEQ ID NO: 8965 - protein, 38 aa, Artificial Sequence
  Non-cyclic GFR-binding peptide
  MOD_RES (2)..(4)..(36)..(37): Xaa is C or S
RXGXGEVVMENSLQEVVKDYEDYYVMPLPELETPVXXA

SEQ ID NO: 8966 - protein, 35 aa, Artificial Sequence
  Non-cyclic GFR-binding peptide
  MOD_RES (1)..(3): Xaa is C or S
  MOD_RES (14)..(15)..(16)..(17)..(18): Xaa is A or G
  MOD_RES (19)..(20)..(21)..(22): Xaa is A or G or absent
XKXSRVIMEYQKYXXXXXXXXXIFLISIPSLAQPV

SEQ ID NO: 8967 - protein, 34 aa, Artificial Sequence
  Non-cyclic GFR-binding peptide
  MOD_RES (32)..(33): Xaa is C or S
ARVVMNNSLQEIVNSSDDYYVVPLPELQTPAXXP

SEQ ID NO: 8968 - protein, 40 aa, Artificial Sequence
  Non-cyclic GFR-binding peptide
  MOD_RES (2)..(34)..(35): Xaa is C or S
GXSEVVMDRYKKLVVNNASDFYLISIANLRTPVXXTPPTS

SEQ ID NO: 8969 - protein, 38 aa, Artificial Sequence
  Non-cyclic GFR-binding peptide
  MOD_RES (2)..(4)..(37)..(38): Xaa is C or S
  MOD_RES (15)..(16)..(17)..(18)..(19): Xaa is A or G
  MOD_RES (20)..(21)..(22)..(23): Xaa is A or G or absent
SXKXSKVIMEYQKYXXXXXXXXXIFLISIPSLDQSVXX

SEQ ID NO: 8970 - protein, 34 aa, Artificial Sequence
  Non-cyclic GFR-binding peptide
  MOD_RES (1)..(3): Xaa is C or S
XGXARVVMNEYQKYIVNSSDDIFLVSIPSLQTPA

SEQ ID NO: 8971 - protein, 41 aa, Artificial Sequence
  Non-cyclic GFR-binding peptide
  MOD_RES (1)..(35): Xaa is C or S
  MOD_RES (13)..(14)..(15)..(16)..(17): Xaa is A or G
  MOD_RES (18)..(19)..(20)..(21): Xaa is A or G or absent
XSRVVMNNSLQEXXXXXXXXXYYLVTLPELKTPAXTPKTVH

SEQ ID NO: 8972 - protein, 30 aa, Artificial Sequence
  Non-cyclic GFR-binding peptide
EVVMDNSLQEVVKENEDYYLMTLPELETPV

SEQ ID NO: 8973 - protein, 40 aa, Artificial Sequence
  Non-cyclic GFR-binding peptide
  MOD_RES (34)..(35): Xaa is C or S
  MOD_RES (12)..(13)..(14)..(15)..(16): Xaa is A or G
  MOD_RES (17)..(18)..(19)..(20): Xaa is A or G or absent
GEVVMENSLQEXXXXXXXXXYYVMPLPELETPVXXAKPIS

SEQ ID NO: 8974 - protein, 37 aa, Artificial Sequence
  Non-cyclic GFR-binding peptide
  MOD_RES (1)..(3)..(34)..(35): Xaa is C or S
XKXSRVIMEYQKYVKPKRGVIFLISIPSLAQPVXXPA

SEQ ID NO: 8975 - protein, 32 aa, Artificial Sequence
  Non-cyclic GFR-binding peptide
  MOD_RES (11)..(12)..(13)..(14)..(15): Xaa is A or G
  MOD_RES (16)..(17)..(18)..(19): Xaa is A or G or absent
EVVMENSLQEXXXXXXXXXYYLMTLPELETPV

SEQ ID NO: 8976 - protein, 38 aa, Artificial Sequence
  Non-cyclic GFR-binding peptide
  MOD_RES (1)..(35)..(36): Xaa is C or S
  MOD_RES (13)..(14)..(15)..(16)..(17): Xaa is A or G
  MOD_RES (18)..(19)..(20)..(21): Xaa is A or G or absent
XGEVVMEEYQKYXXXXXXXXXIFLMSIPSLETPVXXAK

SEQ ID NO: 8977 - protein, 38 aa, Artificial Sequence
  Non-cyclic GFR-binding peptide
  MOD_RES (2)..(4)..(36)..(37): Xaa is C or S
HXGXARVVMNNSLQEIVNSSDDYYVVPLPELQTPAXXP

SEQ ID NO: 8978 - protein, 37 aa, Artificial Sequence
  Non-cyclic GFR-binding peptide
  MOD_RES (1)..(3)..(37): Xaa is C or S
  MOD_RES (15)..(16)..(17)..(18)..(19): Xaa is A or G
  MOD_RES (20)..(21)..(22)..(23): Xaa is A or G or absent
XGXGEVVMDNSLQEXXXXXXXXXYYLMTLPELETPVX

SEQ ID NO: 8979 - protein, 38 aa, Artificial Sequence
  Non-cyclic GFR-binding peptide
  MOD_RES (33)..(34): Xaa is C or S
  MOD_RES (11)..(12)..(13)..(14)..(15): Xaa is A or G
  MOD_RES (16)..(17)..(18)..(19): Xaa is A or G or absent
EVVMDEYQKYXXXXXXXXXIFLMSIPSLETPVXXAKPI

SEQ ID NO: 8980 - protein, 31 aa, Artificial Sequence
  Non-cyclic GFR-binding peptide
  MOD_RES (31)..(31): Xaa is C or S
RVVMNNSLQEIVNSSDDYYVVPLPELKTPAX

SEQ ID NO: 8981 - protein, 36 aa, Artificial Sequence
  Non-cyclic GFR-binding peptide
  MOD_RES (2)..(36): Xaa is C or S
  MOD_RES (14)..(15)..(16)..(17)..(18): Xaa is A or G
  MOD_RES (19)..(20)..(21)..(22): Xaa is A or G or absent
GXARVVMNEYQKYXXXXXXXXXIFLVSIPSLQTPAX

SEQ ID NO: 8982 - protein, 39 aa, Artificial Sequence
  Non-cyclic GFR-binding peptide
  MOD_RES (33)..(34): Xaa is C or S
  MOD_RES (11)..(12)..(13)..(14)..(15): Xaa is A or G
  MOD_RES (16)..(17)..(18)..(19): Xaa is A or G or absent
RVVMNEYQKYXXXXXXXXXIFLVSIPSLKTPAXXPKPVY

SEQ ID NO: 8983 - protein, 36 aa, Artificial Sequence
  Non-cyclic GFR-binding peptide
  MOD_RES (2)..(36): Xaa is C or S
  MOD_RES (14)..(15)..(16)..(17)..(18): Xaa is A or G
  MOD_RES (19)..(20)..(21)..(22): Xaa is A or G or absent
GXARVVMNNSLQEXXXXXXXXXYYLVTLPELQTPAX

SEQ ID NO: 8984 - protein, 41 aa, Artificial Sequence
  Non-cyclic GFR-binding peptide
  MOD_RES (2)..(4)..(35)..(36): Xaa is C or S
SXKXSRVIMEYQKYVKPKRGVIFLISIPSLAQPVXXPAASA

SEQ ID NO: 8985 - protein, 37 aa, Artificial Sequence
  Non-cyclic GFR-binding peptide
  MOD_RES (31)..(32): Xaa is C or S
SKVVMEYQKYVKPTRGVIFLISIPSLDQPVXXPSASA

SEQ ID NO: 8986 - protein, 36 aa, Artificial Sequence
  Non-cyclic GFR-binding peptide
  MOD_RES (32)..(33): Xaa is C or S
ARVVMNNSLQEIVNSSDDYYLVTLPELQTPAXXPKP

SEQ ID NO: 8987 - protein, 37 aa, Artificial Sequence
  Non-cyclic GFR-binding peptide
  MOD_RES (1)..(3)..(37): Xaa is C or S
  MOD_RES (15)..(16)..(17)..(18)..(19): Xaa is A or G
  MOD_RES (20)..(21)..(22)..(23): Xaa is A or G or absent
XGXGEVVMENSLQEXXXXXXXXXYYLMTLPELETPVX

SEQ ID NO: 8988 - protein, 38 aa, Artificial Sequence
  Non-cyclic GFR-binding peptide
  MOD_RES (33)..(34): Xaa is C or S
  MOD_RES (11)..(12)..(13)..(14)..(15): Xaa is A or G
  MOD_RES (16)..(17)..(18)..(19): Xaa is A or G or absent
EVVMDRYKKLXXXXXXXXXFYLISIANLRTPVXXTPPT

SEQ ID NO: 8989 - protein, 31 aa, Artificial Sequence
  Non-cyclic GFR-binding peptide
  MOD_RES (1)..(1): Xaa is C or S
XSKVVMNSLQEVKPTRGVYYVIPLPELDQPV

SEQ ID NO: 8990 - protein, 32 aa, Artificial Sequence
  Non-cyclic GFR-binding peptide
  MOD_RES (11)..(12)..(13)..(14)..(15): Xaa is A or G
  MOD_RES (16)..(17)..(18)..(19): Xaa is A or G or absent
EVVMENSLQEXXXXXXXXXYYVMPLPELETPV

SEQ ID NO: 8991 - protein, 34 aa, Artificial Sequence
  Non-cyclic GFR-binding peptide
  MOD_RES (1)..(3): Xaa is C or S
XGXGEVVMDNSLQEVVKENEDYYLMTLPELETPV

SEQ ID NO: 8992 - protein, 41 aa, Artificial Sequence
  Non-cyclic GFR-binding peptide
  MOD_RES (2)..(36)..(37): Xaa is C or S
  MOD_RES (14)..(15)..(16)..(17)..(18): Xaa is A or G
  MOD_RES (19)..(20)..(21)..(22): Xaa is A or G or absent
GXSEVVMDNSLQEXXXXXXXXXYYLITLPELRTPVXXTPPT

SEQ ID NO: 8993 - protein, 40 aa, Artificial Sequence
  Non-cyclic GFR-binding peptide
  MOD_RES (34)..(35): Xaa is C or S
  MOD_RES (12)..(13)..(14)..(15)..(16): Xaa is A or G
  MOD_RES (17)..(18)..(19)..(20): Xaa is A or G or absent
ARVVMNNSLQEXXXXXXXXXYYLVTLPELQTPAXXPKPVT

SEQ ID NO: 8994 - protein, 34 aa, Artificial Sequence
  Non-cyclic GFR-binding peptide
  MOD_RES (2)..(2): Xaa is C or S
  MOD_RES (13)..(14)..(15)..(16)..(17): Xaa is A or G
  MOD_RES (18)..(19)..(20)..(21): Xaa is A or G or absent
KXSRVIMEYQKYXXXXXXXXXIFLISIPSLAQPV

SEQ ID NO: 8995 - protein, 34 aa, Artificial Sequence
  Non-cyclic GFR-binding peptide
  MOD_RES (34)..(34): Xaa is C or S
  MOD_RES (12)..(13)..(14)..(15)..(16): Xaa is A or G
  MOD_RES (17)..(18)..(19)..(20): Xaa is A or G or absent
ARVVMNNSLQEXXXXXXXXXYYVVPLPELQTPAX

SEQ ID NO: 8996 - protein, 39 aa, Artificial Sequence
  Non-cyclic GFR-binding peptide
  MOD_RES (1)..(3)..(37)..(38): Xaa is C or S
  MOD_RES (15)..(16)..(17)..(18)..(19): Xaa is A or G
  MOD_RES (20)..(21)..(22)..(23): Xaa is A or G or absent
XGXGEVVMEEYQKYXXXXXXXXXIFLMSIPSLETPVXXA

SEQ ID NO: 8997 - protein, 34 aa, Artificial Sequence
  Non-cyclic GFR-binding peptide
  MOD_RES (1)..(1): Xaa is C or S
  MOD_RES (13)..(14)..(15)..(16)..(17): Xaa is A or G
  MOD_RES (18)..(19)..(20)..(21): Xaa is A or G or absent
XSEVVMDNSLQEXXXXXXXXXYYVIPLPELRTPV

SEQ ID NO: 8998 - protein, 34 aa, Artificial Sequence
  Non-cyclic GFR-binding peptide
  MOD_RES (32)..(33): Xaa is C or S
SEVVMDRYKKLVVNNASDFYLISIANLRTPVXXT

SEQ ID NO: 8999 - protein, 39 aa, Artificial Sequence
  Non-cyclic GFR-binding peptide
  MOD_RES (34)..(35): Xaa is C or S
  MOD_RES (12)..(13)..(14)..(15)..(16): Xaa is A or G
  MOD_RES (17)..(18)..(19)..(20): Xaa is A or G or absent
GEVVMDNSLQEXXXXXXXXXYYLMTLPELETPVXXAKPI

SEQ ID NO: 9000 - protein, 41 aa, Artificial Sequence
  Non-cyclic GFR-binding peptide
  MOD_RES (2)..(4)..(36)..(37): Xaa is C or S
RXGXSEVVMDNSLQEVVNNASDYYLITLPELRTPVXXTPPT

SEQ ID NO: 9001 - protein, 33 aa, Artificial Sequence
  Non-cyclic GFR-binding peptide
  MOD_RES (1)..(33): Xaa is C or S
XGEVVMENSLQEVVKDYEDYYLMTLPELETPVX

SEQ ID NO: 9002 - protein, 35 aa, Artificial Sequence
  Non-cyclic GFR-binding peptide
  MOD_RES (1)..(33)..(34): Xaa is C or S
XGEVVMEEYQKYVVKDYEDIFLMSIPSLETPVXXA

SEQ ID NO: 9003 - protein, 37 aa, Artificial Sequence
  Non-cyclic GFR-binding peptide
  MOD_RES (32)..(33): Xaa is C or S
GEVVMDNSLQEVVKENEDYYVMPLPELETPVXXAKPI

SEQ ID NO: 9004 - protein, 38 aa, Artificial Sequence
  Non-cyclic GFR-binding peptide
  MOD_RES (1)..(33)..(34): Xaa is C or S
XGEVVMEEYQKYVVKDYEDIFLMSIPSLETPVXXAKPI

SEQ ID NO: 9005 - protein, 37 aa, Artificial Sequence
  Non-cyclic GFR-binding peptide
  MOD_RES (1)..(3)..(34)..(35): Xaa is C or S
XKXSRVIMNSLQEVKPKRGVYYLITLPELAQPVXXPA

SEQ ID NO: 9006 - protein, 35 aa, Artificial Sequence
  Non-cyclic GFR-binding peptide
  MOD_RES (1)..(32)..(33): Xaa is C or S
XSKVIMNSLQEIKPTKGIYYVIPLPELDQSVXXPS

SEQ ID NO: 9007 - protein, 40 aa, Artificial Sequence
  Non-cyclic GFR-binding peptide
  MOD_RES (2)..(4)..(38)..(39): Xaa is C or S
  MOD_RES (16)..(17)..(18)..(19)..(20): Xaa is A or G
  MOD_RES (21)..(22)..(23)..(24): Xaa is A or G or absent
RXGXGEVVMENSLQEXXXXXXXXXYYVMPLPELETPVXXA

SEQ ID NO: 9008 - protein, 34 aa, Artificial Sequence
  Non-cyclic GFR-binding peptide
  MOD_RES (31)..(32): Xaa is C or S
EVVMDEYQKYVVKENEDIFLMSIPSLETPVXXAK

SEQ ID NO: 9009 - protein, 40 aa, Artificial Sequence
  Non-cyclic GFR-binding peptide
  MOD_RES (1)..(35)..(36): Xaa is C or S
  MOD_RES (13)..(14)..(15)..(16)..(17): Xaa is A or G
  MOD_RES (18)..(19)..(20)..(21): Xaa is A or G or absent
XSRVVMNEYQKYXXXXXXXXXIFLVSIPSLKTPAXXPKPV

SEQ ID NO: 9010 - protein, 35 aa, Artificial Sequence
  Non-cyclic GFR-binding peptide
  MOD_RES (33)..(34): Xaa is C or S
  MOD_RES (11)..(12)..(13)..(14)..(15): Xaa is A or G
  MOD_RES (16)..(17)..(18)..(19): Xaa is A or G or absent
RVVMNNSLQEXXXXXXXXXYYLVTLPELKTPAXXP

SEQ ID NO: 9011 - protein, 34 aa, Artificial Sequence
  Non-cyclic GFR-binding peptide
  MOD_RES (1)..(33)..(34): Xaa is C or S
XGEVVMDNSLQEVVKENEDYYLMTLPELETPVXX

SEQ ID NO: 9012 - protein, 34 aa, Artificial Sequence
  Non-cyclic GFR-binding peptide
  MOD_RES (1)..(3): Xaa is C or S
XGXGEVVMEEYQKYVVKDYEDIFLMSIPSLETPV

SEQ ID NO: 9013 - protein, 34 aa, Artificial Sequence
  Non-cyclic GFR-binding peptide
  MOD_RES (32)..(32): Xaa is C or S
SRVVMNNSLQEIVNSSDDYYLVTLPELKTPAXTP

SEQ ID NO: 9014 - protein, 37 aa, Artificial Sequence
  Non-cyclic GFR-binding peptide
  MOD_RES (1)..(34)..(35): Xaa is C or S
  MOD_RES (12)..(13)..(14)..(15)..(16): Xaa is A or G
  MOD_RES (17)..(18)..(19)..(20): Xaa is A or G or absent
XSKVVMNSLQEXXXXXXXXXYYVIPLPELDQPVXXPS

SEQ ID NO: 9015 - protein, 34 aa, Artificial Sequence
  Non-cyclic GFR-binding peptide
  MOD_RES (2)..(33)..(34): Xaa is C or S
KXSRVIMEYQKYVKPKRGVIFLISIPSLAQPVXX

SEQ ID NO: 9016 - protein, 40 aa, Artificial Sequence
  Non-cyclic GFR-binding peptide
  MOD_RES (34)..(34): Xaa is C or S
  MOD_RES (12)..(13)..(14)..(15)..(16): Xaa is A or G
  MOD_RES (17)..(18)..(19)..(20): Xaa is A or G or absent
SRVVMNEYQKYXXXXXXXXXIFLVSIPSLKTPAXTPKTVH

SEQ ID NO: 9017 - protein, 39 aa, Artificial Sequence
  Non-cyclic GFR-binding peptide
  MOD_RES (34)..(35): Xaa is C or S
  MOD_RES (12)..(13)..(14)..(15)..(16): Xaa is A or G
  MOD_RES (17)..(18)..(19)..(20): Xaa is A or G or absent
ARVVMNNSLQEXXXXXXXXXYYLVTLPELQTPAXXPKPV

SEQ ID NO: 9018 - protein, 35 aa, Artificial Sequence
  Non-cyclic GFR-binding peptide
  MOD_RES (1)..(35): Xaa is C or S
  MOD_RES (13)..(14)..(15)..(16)..(17): Xaa is A or G
  MOD_RES (18)..(19)..(20)..(21): Xaa is A or G or absent
XSEVVMDNSLQEXXXXXXXXXYYLITLPELRTPVX

SEQ ID NO: 9019 - protein, 36 aa, Artificial Sequence
  Non-cyclic GFR-binding peptide
  MOD_RES (31)..(31): Xaa is C or S
RVVMNEYQKYIVNSSDDIFLVSIPSLKTPAXTPKTV

SEQ ID NO: 9020 - protein, 39 aa, Artificial Sequence
  Non-cyclic GFR-binding peptide
  MOD_RES (33)..(34): Xaa is C or S
  MOD_RES (11)..(12)..(13)..(14)..(15): Xaa is A or G
  MOD_RES (16)..(17)..(18)..(19): Xaa is A or G or absent
EVVMDQYNKLXXXXXXXXXLYLISIASLRTPVXXTPPTS

SEQ ID NO: 9021 - protein, 41 aa, Artificial Sequence
  Non-cyclic GFR-binding peptide
  MOD_RES (2)..(4)..(36)..(37): Xaa is C or S
RXGXSEVVMDRYKKLVVNNASDFYLISIANLRTPVXXTPPT

SEQ ID NO: 9022 - protein, 39 aa, Artificial Sequence
  Non-cyclic GFR-binding peptide
  MOD_RES (2)..(4)..(38)..(39): Xaa is C or S
  MOD_RES (16)..(17)..(18)..(19)..(20): Xaa is A or G
  MOD_RES (21)..(22)..(23)..(24): Xaa is A or G or absent
RXGXGEVVMDNSLQEXXXXXXXXXYYVMPLPELETPVXX

SEQ ID NO: 9023 - protein, 37 aa, Artificial Sequence
  Non-cyclic GFR-binding peptide
  MOD_RES (2)..(35)..(36): Xaa is C or S
  MOD_RES (13)..(14)..(15)..(16)..(17): Xaa is A or G
  MOD_RES (18)..(19)..(20)..(21): Xaa is A or G or absent
KXSKVIMEYQKYXXXXXXXXXIFLISIPSLDQSVXXP

SEQ ID NO: 9024 - protein, 34 aa, Artificial Sequence
  Non-cyclic GFR-binding peptide
  MOD_RES (1)..(33)..(34): Xaa is C or S
XGEVVMENSLQEVVKDYEDYYLMTLPELETPVXX

SEQ ID NO: 9025 - protein, 33 aa, Artificial Sequence
  Non-cyclic GFR-binding peptide
  MOD_RES (31)..(32): Xaa is C or S
EVVMDQYNKLVVNNASDLYLISIASLRTPVXXT

SEQ ID NO: 9026 - protein, 30 aa, Artificial Sequence
  Non-cyclic GFR-binding peptide
EVVMDNSLQEVVKENEDYYVMPLPELETPV

SEQ ID NO: 9027 - protein, 37 aa, Artificial Sequence
  Non-cyclic GFR-binding peptide
  MOD_RES (1)..(3)..(36)..(37): Xaa is C or S
  MOD_RES (14)..(15)..(16)..(17)..(18): Xaa is A or G
  MOD_RES (19)..(20)..(21)..(22): Xaa is A or G or absent
XKXSRVIMEYQKYXXXXXXXXXIFLISIPSLAQPVXX

SEQ ID NO: 9028 - protein, 42 aa, Artificial Sequence
  Non-cyclic GFR-binding peptide
  MOD_RES (1)..(3)..(37)..(38): Xaa is C or S
  MOD_RES (15)..(16)..(17)..(18)..(19): Xaa is A or G
  MOD_RES (20)..(21)..(22)..(23): Xaa is A or G or absent
XGXSEVVMDQYNKLXXXXXXXXXLYLISIASLRTPVXXTPPT

SEQ ID NO: 9029 - protein, 36 aa, Artificial Sequence
  Non-cyclic GFR-binding peptide
  MOD_RES (34)..(34): Xaa is C or S
  MOD_RES (12)..(13)..(14)..(15)..(16): Xaa is A or G
  MOD_RES (17)..(18)..(19)..(20): Xaa is A or G or absent
SRVVMNEYQKYXXXXXXXXXIFLVSIPSLKTPAXTP

SEQ ID NO: 9030 - protein, 39 aa, Artificial Sequence
  Non-cyclic GFR-binding peptide
  MOD_RES (2)..(34)..(35): Xaa is C or S
GXGEVVMDNSLQEVVKENEDYYLMTLPELETPVXXAKPI

SEQ ID NO: 9031 - protein, 35 aa, Artificial Sequence
  Non-cyclic GFR-binding peptide
  MOD_RES (34)..(35): Xaa is C or S
  MOD_RES (12)..(13)..(14)..(15)..(16): Xaa is A or G
  MOD_RES (17)..(18)..(19)..(20): Xaa is A or G or absent
ARVVMNNSLQEXXXXXXXXXYYVVPLPELQTPAXX

SEQ ID NO: 9032 - protein, 35 aa, Artificial Sequence
  Non-cyclic GFR-binding peptide
  MOD_RES (31)..(32): Xaa is C or S
RVVMNNSLQEIVNSSDDYYVVPLPELKTPAXXPKP

SEQ ID NO: 9033 - protein, 35 aa, Artificial Sequence
  Non-cyclic GFR-binding peptide
  MOD_RES (1)..(33)..(34): Xaa is C or S
XSRVVMNNSLQEIVNSSDDYYVVPLPELKTPAXXP

SEQ ID NO: 9034 - protein, 36 aa, Artificial Sequence
  Non-cyclic GFR-binding peptide
  MOD_RES (2)..(34)..(35): Xaa is C or S
GXGEVVMENSLQEVVKDYEDYYVMPLPELETPVXXA

SEQ ID NO: 9035 - protein, 36 aa, Artificial Sequence
  Non-cyclic GFR-binding peptide
  MOD_RES (2)..(34)..(35): Xaa is C or S
GXSRVVMNNSLQEIVNSSDDYYVVPLPELKTPAXXP

SEQ ID NO: 9036 - protein, 34 aa, Artificial Sequence
  Non-cyclic GFR-binding peptide
  MOD_RES (1)..(3): Xaa is C or S
XGXSEVVMDRYKKLVVNNASDFYLISIANLRTPV

SEQ ID NO: 9037 - protein, 32 aa, Artificial Sequence
  Non-cyclic GFR-binding peptide
  MOD_RES (11)..(12)..(13)..(14)..(15): Xaa is A or G
  MOD_RES (16)..(17)..(18)..(19): Xaa is A or G or absent
EVVMDEYQKYXXXXXXXXXIFLMSIPSLETPV

SEQ ID NO: 9038 - protein, 39 aa, Artificial Sequence
  Non-cyclic GFR-binding peptide
  MOD_RES (1)..(3)..(35)..(36): Xaa is C or S
XGXGEVVMDNSLQEVVKENEDYYLMTLPELETPVXXAKP

SEQ ID NO: 9039 - protein, 35 aa, Artificial Sequence
  Non-cyclic GFR-binding peptide
  MOD_RES (1)..(33)..(34): Xaa is C or S
XSEVVMDRYKKLVVNNASDFYLISIANLRTPVXXT

SEQ ID NO: 9040 - protein, 35 aa, Artificial Sequence
  Non-cyclic GFR-binding peptide
  MOD_RES (1)..(33)..(34): Xaa is C or S
XARVVMNEYQKYIVNSSDDIFLVSIPSLQTPAXXP

SEQ ID NO: 9041 - protein, 34 aa, Artificial Sequence
  Non-cyclic GFR-binding peptide
  MOD_RES (2)..(34): Xaa is C or S
GXGEVVMEEYQKYVVKDYEDIFLMSIPSLETPVX

SEQ ID NO: 9042 - protein, 32 aa, Artificial Sequence
  Non-cyclic GFR-binding peptide
  MOD_RES (1)..(1): Xaa is C or S
XGEVVMDNSLQEVVKENEDYYLMTLPELETPV

SEQ ID NO: 9043 - protein, 33 aa, Artificial Sequence
  Non-cyclic GFR-binding peptide
  MOD_RES (1)..(1): Xaa is C or S
  MOD_RES (12)..(13)..(14)..(15)..(16): Xaa is A or G
  MOD_RES (17)..(18)..(19)..(20): Xaa is A or G or absent
XSRVIMEYQKYXXXXXXXXXIFLISIPSLAQPV

SEQ ID NO: 9044 - protein, 32 aa, Artificial Sequence
  Non-cyclic GFR-binding peptide
  MOD_RES (2)..(2): Xaa is C or S
KXSRVIMEYQKYVKPKRGVIFLISIPSLAQPV

SEQ ID NO: 9045 - protein, 36 aa, Artificial Sequence
  Non-cyclic GFR-binding peptide
  MOD_RES (2)..(4)..(36): Xaa is C or S
HXGXARVVMNEYQKYIVNSSDDIFLVSIPSLQTPAX

SEQ ID NO: 9046 - protein, 42 aa, Artificial Sequence
  Non-cyclic GFR-binding peptide
  MOD_RES (2)..(36)..(37): Xaa is C or S
  MOD_RES (14)..(15)..(16)..(17)..(18): Xaa is A or G
  MOD_RES (19)..(20)..(21)..(22): Xaa is A or G or absent
GXGEVVMENSLQEXXXXXXXXXYYLMTLPELETPVXXAKPIS

SEQ ID NO: 9047 - protein, 40 aa, Artificial Sequence
  Non-cyclic GFR-binding peptide
  MOD_RES (1)..(3)..(37): Xaa is C or S
  MOD_RES (15)..(16)..(17)..(18)..(19): Xaa is A or G
  MOD_RES (20)..(21)..(22)..(23): Xaa is A or G or absent
XGXSRVVMNNSLQEXXXXXXXXXYYVVPLPELKTPAXTPK

SEQ ID NO: 9048 - protein, 43 aa, Artificial Sequence
  Non-cyclic GFR-binding peptide
  MOD_RES (2)..(4)..(37)..(38): Xaa is C or S
  MOD_RES (15)..(16)..(17)..(18)..(19): Xaa is A or G
  MOD_RES (20)..(21)..(22)..(23): Xaa is A or G or absent
SXKXSKVIMNSLQEXXXXXXXXXYYVIPLPELDQSVXXPSASA

SEQ ID NO: 9049 - protein, 32 aa, Artificial Sequence
  Non-cyclic GFR-binding peptide
  MOD_RES (31)..(32): Xaa is C or S
EVVMDRYKKLVVNNASDFYLISIANLRTPVXX

SEQ ID NO: 9050 - protein, 36 aa, Artificial Sequence
  Non-cyclic GFR-binding peptide
  MOD_RES (2)..(4): Xaa is C or S
  MOD_RES (15)..(16)..(17)..(18)..(19): Xaa is A or G
  MOD_RES (20)..(21)..(22)..(23): Xaa is A or G or absent
SXKXSKVVMNSLQEXXXXXXXXXYYVIPLPELDQPV

SEQ ID NO: 9051 - protein, 31 aa, Artificial Sequence
  Non-cyclic GFR-binding peptide
  MOD_RES (31)..(31): Xaa is C or S
EVVMENSLQEVVKDYEDYYVMPLPELETPVX

SEQ ID NO: 9052 - protein, 35 aa, Artificial Sequence
  Non-cyclic GFR-binding peptide
  MOD_RES (1)..(33)..(34): Xaa is C or S
XGEVVMDEYQKYVVKENEDIFLMSIPSLETPVXXA

SEQ ID NO: 9053 - protein, 39 aa, Artificial Sequence
  Non-cyclic GFR-binding peptide
  MOD_RES (1)..(3)..(35): Xaa is C or S
XGXSRVVMNEYQKYIVNSSDDIFLVSIPSLKTPAXTPKT

SEQ ID NO: 9054 - protein, 41 aa, Artificial Sequence
  Non-cyclic GFR-binding peptide
  MOD_RES (2)..(4)..(36): Xaa is C or S
HXGXSRVVMNNSLQEIVNSSDDYYLVTLPELKTPAXTPKTV

SEQ ID NO: 9055 - protein, 36 aa, Artificial Sequence
  Non-cyclic GFR-binding peptide
  MOD_RES (2)..(34)..(35): Xaa is C or S
GXSRVVMNEYQKYIVNSSDDIFLVSIPSLKTPAXXP

SEQ ID NO: 9056 - protein, 36 aa, Artificial Sequence
  Non-cyclic GFR-binding peptide
  MOD_RES (31)..(32): Xaa is C or S
EVVMEEYQKYVVKDYEDIFLMSIPSLETPVXXAKPI

SEQ ID NO: 9057 - protein, 37 aa, Artificial Sequence
  Non-cyclic GFR-binding peptide
  MOD_RES (1)..(3)..(37): Xaa is C or S
  MOD_RES (15)..(16)..(17)..(18)..(19): Xaa is A or G
  MOD_RES (20)..(21)..(22)..(23): Xaa is A or G or absent
XGXSRVVMNNSLQEXXXXXXXXXYYLVTLPELKTPAX

SEQ ID NO: 9058 - protein, 37 aa, Artificial Sequence
  Non-cyclic GFR-binding peptide
  MOD_RES (34)..(35): Xaa is C or S
  MOD_RES (12)..(13)..(14)..(15)..(16): Xaa is A or G
  MOD_RES (17)..(18)..(19)..(20): Xaa is A or G or absent
SRVVMNNSLQEXXXXXXXXXYYLVTLPELKTPAXXPK

SEQ ID NO: 9059 - protein, 36 aa, Artificial Sequence
  Non-cyclic GFR-binding peptide
  MOD_RES (1)..(3): Xaa is C or S
  MOD_RES (15)..(16)..(17)..(18)..(19): Xaa is A or G
  MOD_RES (20)..(21)..(22)..(23): Xaa is A or G or absent
XGXARVVMNNSLQEXXXXXXXXXYYLVTLPELQTPA

SEQ ID NO: 9060 - protein, 40 aa, Artificial Sequence
  Non-cyclic GFR-binding peptide
  MOD_RES (1)..(3)..(35): Xaa is C or S
XGXSRVVMNNSLQEIVNSSDDYYLVTLPELKTPAXTPKTV

SEQ ID NO: 9061 - protein, 31 aa, Artificial Sequence
  Non-cyclic GFR-binding peptide
  MOD_RES (1)..(1): Xaa is C or S
XSRVIMEYQKYVKPKRGVIFLISIPSLAQPV

SEQ ID NO: 9062 - protein, 42 aa, Artificial Sequence
  Non-cyclic GFR-binding peptide
  MOD_RES (2)..(4)..(36)..(37): Xaa is C or S
RXGXGEVVMDNSLQEVVKENEDYYVMPLPELETPVXXAKPIK

SEQ ID NO: 9063 - protein, 37 aa, Artificial Sequence
  Non-cyclic GFR-binding peptide
  MOD_RES (2)..(36)..(37): Xaa is C or S
  MOD_RES (14)..(15)..(16)..(17)..(18): Xaa is A or G
  MOD_RES (19)..(20)..(21)..(22): Xaa is A or G or absent
GXGEVVMDNSLQEXXXXXXXXXYYVMPLPELETPVXX

SEQ ID NO: 9064 - protein, 42 aa, Artificial Sequence
  Non-cyclic GFR-binding peptide
  MOD_RES (1)..(3)..(36)..(37): Xaa is C or S
  MOD_RES (14)..(15)..(16)..(17)..(18): Xaa is A or G
  MOD_RES (19)..(20)..(21)..(22): Xaa is A or G or absent
XKXSKVIMEYQKYXXXXXXXXXIFLISIPSLDQSVXXPSASA

SEQ ID NO: 9065 - protein, 36 aa, Artificial Sequence
  Non-cyclic GFR-binding peptide
  MOD_RES (2)..(4)..(35)..(36): Xaa is C or S
SXKXSKVIMNSLQEIKPTKGIYYVIPLPELDQSVXX

SEQ ID NO: 9066 - protein, 33 aa, Artificial Sequence
  Non-cyclic GFR-binding peptide
  MOD_RES (1)..(3): Xaa is C or S
XKXSRVIMNSLQEVKPKRGVYYLITLPELAQPV

SEQ ID NO: 9067 - protein, 38 aa, Artificial Sequence
  Non-cyclic GFR-binding peptide
  MOD_RES (34)..(35): Xaa is C or S
  MOD_RES (12)..(13)..(14)..(15)..(16): Xaa is A or G
  MOD_RES (17)..(18)..(19)..(20): Xaa is A or G or absent
GEVVMENSLQEXXXXXXXXXYYVMPLPELETPVXXAKP

SEQ ID NO: 9068 - protein, 39 aa, Artificial Sequence
  Non-cyclic GFR-binding peptide
  MOD_RES (2)..(4)..(38)..(39): Xaa is C or S
  MOD_RES (16)..(17)..(18)..(19)..(20): Xaa is A or G
  MOD_RES (21)..(22)..(23)..(24): Xaa is A or G or absent
RXGXGEVVMDNSLQEXXXXXXXXXYYLMTLPELETPVXX

SEQ ID NO: 9069 - protein, 36 aa, Artificial Sequence
  Non-cyclic GFR-binding peptide
  MOD_RES (31)..(32): Xaa is C or S
EVVMDEYQKYVVKENEDIFLMSIPSLETPVXXAKPI

SEQ ID NO: 9070 - protein, 35 aa, Artificial Sequence
  Non-cyclic GFR-binding peptide
  MOD_RES (32)..(33): Xaa is C or S
SEVVMDNSLQEVVNNASDYYLITLPELRTPVXXTP

SEQ ID NO: 9071 - protein, 33 aa, Artificial Sequence
  Non-cyclic GFR-binding peptide
  MOD_RES (31)..(32): Xaa is C or S
EVVMDNSLQEVVNNASDYYLITLPELRTPVXXT

SEQ ID NO: 9072 - protein, 36 aa, Artificial Sequence
  Non-cyclic GFR-binding peptide
  MOD_RES (33)..(34): Xaa is C or S
  MOD_RES (11)..(12)..(13)..(14)..(15): Xaa is A or G
  MOD_RES (16)..(17)..(18)..(19): Xaa is A or G or absent
EVVMDQYNKLXXXXXXXXXLYLISIASLRTPVXXTP

SEQ ID NO: 9073 - protein, 34 aa, Artificial Sequence
  Non-cyclic GFR-binding peptide
  MOD_RES (31)..(32): Xaa is C or S
RVVMNEYQKYIVNSSDDIFLVSIPSLKTPAXXPK

SEQ ID NO: 9074 - protein, 38 aa, Artificial Sequence
  Non-cyclic GFR-binding peptide
  MOD_RES (1)..(32)..(33): Xaa is C or S
XSKVVMEYQKYVKPTRGVIFLISIPSLDQPVXXPSASA

SEQ ID NO: 9075 - protein, 37 aa, Artificial Sequence
  Non-cyclic GFR-binding peptide
  MOD_RES (31)..(32): Xaa is C or S
RVVMNNSLQEIVNSSDDYYLVTLPELKTPAXXPKPVY

SEQ ID NO: 9076 - protein, 37 aa, Artificial Sequence
  Non-cyclic GFR-binding peptide
  MOD_RES (2)..(4)..(36)..(37): Xaa is C or S
HXGXSRVVMNNSLQEIVNSSDDYYLVTLPELKTPAXX

SEQ ID NO: 9077 - protein, 38 aa, Artificial Sequence
  Non-cyclic GFR-binding peptide
  MOD_RES (2)..(35)..(36): Xaa is C or S
  MOD_RES (13)..(14)..(15)..(16)..(17): Xaa is A or G
  MOD_RES (18)..(19)..(20)..(21): Xaa is A or G or absent
KXSRVIMEYQKYXXXXXXXXXIFLISIPSLAQPVXXPA

SEQ ID NO: 9078 - protein, 38 aa, Artificial Sequence
  Non-cyclic GFR-binding peptide
  MOD_RES (1)..(33)..(34): Xaa is C or S
XGEVVMENSLQEVVKDYEDYYVMPLPELETPVXXAKPI

SEQ ID NO: 9079 - protein, 33 aa, Artificial Sequence
  Non-cyclic GFR-binding peptide
  MOD_RES (31)..(32): Xaa is C or S
EVVMENSLQEVVKDYEDYYVMPLPELETPVXXA

SEQ ID NO: 9080 - protein, 38 aa, Artificial Sequence
  Non-cyclic GFR-binding peptide
  MOD_RES (1)..(3)..(34)..(35): Xaa is C or S
XKXSRVIMNSLQEVKPKRGVYYLITLPELAQPVXXPAA

SEQ ID NO: 9081 - protein, 36 aa, Artificial Sequence
  Non-cyclic GFR-binding peptide
  MOD_RES (33)..(34): Xaa is C or S
  MOD_RES (11)..(12)..(13)..(14)..(15): Xaa is A or G
  MOD_RES (16)..(17)..(18)..(19): Xaa is A or G or absent
RVVMNNSLQEXXXXXXXXXYYVVPLPELQTPAXXPK

SEQ ID NO: 9082 - protein, 34 aa, Artificial Sequence
  Non-cyclic GFR-binding peptide
  MOD_RES (1)..(3): Xaa is C or S
XGXGEVVMENSLQEVVKDYEDYYVMPLPELETPV

SEQ ID NO: 9083 - protein, 35 aa, Artificial Sequence
  Non-cyclic GFR-binding peptide
  MOD_RES (2)..(4)..(35): Xaa is C or S
SXKXSKVVMEYQKYVKPTRGVIFLISIPSLDQPVX

SEQ ID NO: 9084 - protein, 40 aa, Artificial Sequence
  Non-cyclic GFR-binding peptide
  MOD_RES (1)..(3)..(36)..(37): Xaa is C or S
  MOD_RES (14)..(15)..(16)..(17)..(18): Xaa is A or G
  MOD_RES (19)..(20)..(21)..(22): Xaa is A or G or absent
XKXSKVIMNSLQEXXXXXXXXXYYVIPLPELDQSVXXPSA

SEQ ID NO: 9085 - protein, 36 aa, Artificial Sequence
  Non-cyclic GFR-binding peptide
  MOD_RES (1)..(32)..(33): Xaa is C or S
XSKVIMNSLQEIKPTKGIYYVIPLPELDQSVXXPSA

SEQ ID NO: 9086 - protein, 40 aa, Artificial Sequence
  Non-cyclic GFR-binding peptide
  MOD_RES (1)..(3)..(35)..(36): Xaa is C or S
XGXSRVVMNNSLQEIVNSSDDYYVVPLPELKTPAXXPKPV

SEQ ID NO: 9087 - protein, 40 aa, Artificial Sequence
  Non-cyclic GFR-binding peptide
  MOD_RES (2)..(4)..(36)..(37): Xaa is C or S
RXGXGEVVMDNSLQEVVKENEDYYLMTLPELETPVXXAKP

SEQ ID NO: 9088 - protein, 36 aa, Artificial Sequence
  Non-cyclic GFR-binding peptide
  MOD_RES (34)..(35): Xaa is C or S
  MOD_RES (12)..(13)..(14)..(15)..(16): Xaa is A or G
  MOD_RES (17)..(18)..(19)..(20): Xaa is A or G or absent
GEVVMDNSLQEXXXXXXXXXYYLMTLPELETPVXXA

SEQ ID NO: 9089 - protein, 35 aa, Artificial Sequence
  Non-cyclic GFR-binding peptide
  MOD_RES (33)..(34): Xaa is C or S
  MOD_RES (11)..(12)..(13)..(14)..(15): Xaa is A or G
  MOD_RES (16)..(17)..(18)..(19): Xaa is A or G or absent
RVVMNNSLQEXXXXXXXXXYYLVTLPELQTPAXXP

SEQ ID NO: 9090 - protein, 35 aa, Artificial Sequence
  Non-cyclic GFR-binding peptide
  MOD_RES (1)..(3)..(35): Xaa is C or S
XGXGEVVMENSLQEVVKDYEDYYVMPLPELETPVX

SEQ ID NO: 9091 - protein, 38 aa, Artificial Sequence
  Non-cyclic GFR-binding peptide
  MOD_RES (2)..(4)..(38): Xaa is C or S
  MOD_RES (16)..(17)..(18)..(19)..(20): Xaa is A or G
  MOD_RES (21)..(22)..(23)..(24): Xaa is A or G or absent
HXGXSRVVMNNSLQEXXXXXXXXXYYVVPLPELKTPAX

SEQ ID NO: 9092 - protein, 37 aa, Artificial Sequence
  Non-cyclic GFR-binding peptide
  MOD_RES (2)..(4): Xaa is C or S
  MOD_RES (16)..(17)..(18)..(19)..(20): Xaa is A or G
  MOD_RES (21)..(22)..(23)..(24): Xaa is A or G or absent
RXGXGEVVMDNSLQEXXXXXXXXXYYVMPLPELETPV

SEQ ID NO: 9093 - protein, 36 aa, Artificial Sequence
  Non-cyclic GFR-binding peptide
  MOD_RES (1)..(3)..(35): Xaa is C or S
XGXSRVVMNNSLQEIVNSSDDYYLVTLPELKTPAXT

SEQ ID NO: 9094 - protein, 39 aa, Artificial Sequence
  Non-cyclic GFR-binding peptide
  MOD_RES (33)..(34): Xaa is C or S
  MOD_RES (11)..(12)..(13)..(14)..(15): Xaa is A or G
  MOD_RES (16)..(17)..(18)..(19): Xaa is A or G or absent
SKVIMNSLQEXXXXXXXXXYYVIPLPELDQSVXXPSASA

SEQ ID NO: 9095 - protein, 33 aa, Artificial Sequence
  Non-cyclic GFR-binding peptide
  MOD_RES (33)..(33): Xaa is C or S
  MOD_RES (11)..(12)..(13)..(14)..(15): Xaa is A or G
  MOD_RES (16)..(17)..(18)..(19): Xaa is A or G or absent
SKVVMEYQKYXXXXXXXXXIFLISIPSLDQPVX

SEQ ID NO: 9096 - protein, 36 aa, Artificial Sequence
  Non-cyclic GFR-binding peptide
  MOD_RES (2)..(34)..(35): Xaa is C or S
GXSEVVMDRYKKLVVNNASDFYLISIANLRTPVXXT

SEQ ID NO: 9097 - protein, 37 aa, Artificial Sequence
  Non-cyclic GFR-binding peptide
  MOD_RES (2)..(4): Xaa is C or S
  MOD_RES (16)..(17)..(18)..(19)..(20): Xaa is A or G
  MOD_RES (21)..(22)..(23)..(24): Xaa is A or G or absent
HXGXSRVVMNNSLQEXXXXXXXXXYYVVPLPELKTPA

SEQ ID NO: 9098 - protein, 38 aa, Artificial Sequence
  Non-cyclic GFR-binding peptide
  MOD_RES (2)..(36)..(37): Xaa is C or S
  MOD_RES (14)..(15)..(16)..(17)..(18): Xaa is A or G
  MOD_RES (19)..(20)..(21)..(22): Xaa is A or G or absent
GXGEVVMEEYQKYXXXXXXXXXIFLMSIPSLETPVXXA

SEQ ID NO: 9099 - protein, 37 aa, Artificial Sequence
  Non-cyclic GFR-binding peptide
  MOD_RES (31)..(32): Xaa is C or S
EVVMEEYQKYVVKDYEDIFLMSIPSLETPVXXAKPIS

SEQ ID NO: 9100 - protein, 35 aa, Artificial Sequence
  Non-cyclic GFR-binding peptide
  MOD_RES (2)..(4)..(35): Xaa is C or S
SXKXSRVIMNSLQEVKPKRGVYYLITLPELAQPVX

SEQ ID NO: 9101 - protein, 35 aa, Artificial Sequence
  Non-cyclic GFR-binding peptide
  MOD_RES (31)..(32): Xaa is C or S
RVVMNEYQKYIVNSSDDIFLVSIPSLQTPAXXPKP

SEQ ID NO: 9102 - protein, 40 aa, Artificial Sequence
  Non-cyclic GFR-binding peptide
  MOD_RES (2)..(36)..(37): Xaa is C or S
  MOD_RES (14)..(15)..(16)..(17)..(18): Xaa is A or G
  MOD_RES (19)..(20)..(21)..(22): Xaa is A or G or absent
GXGEVVMDNSLQEXXXXXXXXXYYLMTLPELETPVXXAKP

SEQ ID NO: 9103 - protein, 35 aa, Artificial Sequence
  Non-cyclic GFR-binding peptide
  MOD_RES (1)..(35): Xaa is C or S
  MOD_RES (13)..(14)..(15)..(16)..(17): Xaa is A or G
  MOD_RES (18)..(19)..(20)..(21): Xaa is A or G or absent
XSEVVMDRYKKLXXXXXXXXXFYLISIANLRTPVX

SEQ ID NO: 9104 - protein, 42 aa, Artificial Sequence
  Non-cyclic GFR-binding peptide
  MOD_RES (2)..(4)..(38)..(39): Xaa is C or S
  MOD_RES (16)..(17)..(18)..(19)..(20): Xaa is A or G
  MOD_RES (21)..(22)..(23)..(24): Xaa is A or G or absent
HXGXSRVVMNNSLQEXXXXXXXXXYYLVTLPELKTPAXXPKP

SEQ ID NO: 9105 - protein, 41 aa, Artificial Sequence
  Non-cyclic GFR-binding peptide
  MOD_RES (1)..(35)..(36): Xaa is C or S
  MOD_RES (13)..(14)..(15)..(16)..(17): Xaa is A or G
  MOD_RES (18)..(19)..(20)..(21): Xaa is A or G or absent
XGEVVMDEYQKYXXXXXXXXXIFLMSIPSLETPVXXAKPIK

SEQ ID NO: 9106 - protein, 35 aa, Artificial Sequence
  Non-cyclic GFR-binding peptide
  MOD_RES (1)..(35): Xaa is C or S
  MOD_RES (13)..(14)..(15)..(16)..(17): Xaa is A or G
  MOD_RES (18)..(19)..(20)..(21): Xaa is A or G or absent
XARVVMNEYQKYXXXXXXXXXIFLVSIPSLQTPAX

SEQ ID NO: 9107 - protein, 36 aa, Artificial Sequence
  Non-cyclic GFR-binding peptide
  MOD_RES (33)..(33): Xaa is C or S
  MOD_RES (11)..(12)..(13)..(14)..(15): Xaa is A or G
  MOD_RES (16)..(17)..(18)..(19): Xaa is A or G or absent
RVVMNEYQKYXXXXXXXXXIFLVSIPSLKTPAXTPK

SEQ ID NO: 9108 - protein, 38 aa, Artificial Sequence
  Non-cyclic GFR-binding peptide
  MOD_RES (1)..(3)..(34)..(35): Xaa is C or S
XKXSKVIMNSLQEIKPTKGIYYVIPLPELDQSVXXPSA

SEQ ID NO: 9109 - protein, 38 aa, Artificial Sequence
  Non-cyclic GFR-binding peptide
  MOD_RES (34)..(35): Xaa is C or S
  MOD_RES (12)..(13)..(14)..(15)..(16): Xaa is A or G
  MOD_RES (17)..(18)..(19)..(20): Xaa is A or G or absent
SEVVMDQYNKLXXXXXXXXXLYLISIASLRTPVXXTPP

SEQ ID NO: 9110 - protein, 33 aa, Artificial Sequence
  Non-cyclic GFR-binding peptide
  MOD_RES (31)..(32): Xaa is C or S
RVVMNNSLQEIVNSSDDYYLVTLPELQTPAXXP

SEQ ID NO: 9111 - protein, 38 aa, Artificial Sequence
  Non-cyclic GFR-binding peptide
  MOD_RES (34)..(35): Xaa is C or S
  MOD_RES (12)..(13)..(14)..(15)..(16): Xaa is A or G
  MOD_RES (17)..(18)..(19)..(20): Xaa is A or G or absent
ARVVMNNSLQEXXXXXXXXXYYVVPLPELQTPAXXPKP

SEQ ID NO: 9112 - protein, 34 aa, Artificial Sequence
  Non-cyclic GFR-binding peptide
  MOD_RES (1)..(3)..(34): Xaa is C or S
XKXSRVIMNSLQEVKPKRGVYYLITLPELAQPVX

SEQ ID NO: 9113 - protein, 39 aa, Artificial Sequence
  Non-cyclic GFR-binding peptide
  MOD_RES (2)..(4)..(36)..(37): Xaa is C or S
RXGXSEVVMDNSLQEVVNNASDYYVIPLPELRTPVXXTP

SEQ ID NO: 9114 - protein, 39 aa, Artificial Sequence
  Non-cyclic GFR-binding peptide
  MOD_RES (2)..(36)..(37): Xaa is C or S
  MOD_RES (14)..(15)..(16)..(17)..(18): Xaa is A or G
  MOD_RES (19)..(20)..(21)..(22): Xaa is A or G or absent
GXSRVVMNNSLQEXXXXXXXXXYYVVPLPELKTPAXXPK

SEQ ID NO: 9115 - protein, 38 aa, Artificial Sequence
  Non-cyclic GFR-binding peptide
  MOD_RES (32)..(33): Xaa is C or S
ARVVMNEYQKYIVNSSDDIFLVSIPSLQTPAXXPKPVT

SEQ ID NO: 9116 - protein, 31 aa, Artificial Sequence
  Non-cyclic GFR-binding peptide
SEVVMDNSLQEVVNNASDYYVIPLPELRTPV

SEQ ID NO: 9117 - protein, 41 aa, Artificial Sequence
  Non-cyclic GFR-binding peptide
  MOD_RES (2)..(4)..(36)..(37): Xaa is C or S
RXGXGEVVMDNSLQEVVKENEDYYLMTLPELETPVXXAKPI

SEQ ID NO: 9118 - protein, 35 aa, Artificial Sequence
  Non-cyclic GFR-binding peptide
  MOD_RES (32)..(33): Xaa is C or S
SEVVMDNSLQEVVNNASDYYVIPLPELRTPVXXTP

SEQ ID NO: 9119 - protein, 31 aa, Artificial Sequence
  Non-cyclic GFR-binding peptide
  MOD_RES (31)..(31): Xaa is C or S
SRVIMNSLQEVKPKRGVYYLITLPELAQPVX

SEQ ID NO: 9120 - protein, 38 aa, Artificial Sequence
  Non-cyclic GFR-binding peptide
  MOD_RES (33)..(34): Xaa is C or S
  MOD_RES (11)..(12)..(13)..(14)..(15): Xaa is A or G
  MOD_RES (16)..(17)..(18)..(19): Xaa is A or G or absent
EVVMENSLQEXXXXXXXXXYYVMPLPELETPVXXAKPI

SEQ ID NO: 9121 - protein, 42 aa, Artificial Sequence
  Non-cyclic GFR-binding peptide
  MOD_RES (1)..(3)..(37)..(38): Xaa is C or S
  MOD_RES (15)..(16)..(17)..(18)..(19): Xaa is A or G
  MOD_RES (20)..(21)..(22)..(23): Xaa is A or G or absent
XGXGEVVMDNSLQEXXXXXXXXXYYVMPLPELETPVXXAKPI

SEQ ID NO: 9122 - protein, 34 aa, Artificial Sequence
  Non-cyclic GFR-binding peptide
  MOD_RES (1)..(3)..(34): Xaa is C or S
XKXSKVIMNSLQEIKPTKGIYYVIPLPELDQSVX

SEQ ID NO: 9123 - protein, 36 aa, Artificial Sequence
  Non-cyclic GFR-binding peptide
  MOD_RES (33)..(34): Xaa is C or S
  MOD_RES (11)..(12)..(13)..(14)..(15): Xaa is A or G
  MOD_RES (16)..(17)..(18)..(19): Xaa is A or G or absent
SKVVMNSLQEXXXXXXXXXYYVIPLPELDQPVXXPS

SEQ ID NO: 9124 - protein, 38 aa, Artificial Sequence
  Non-cyclic GFR-binding peptide
  MOD_RES (34)..(35): Xaa is C or S
  MOD_RES (12)..(13)..(14)..(15)..(16): Xaa is A or G
  MOD_RES (17)..(18)..(19)..(20): Xaa is A or G or absent
GEVVMDEYQKYXXXXXXXXXIFLMSIPSLETPVXXAKP

SEQ ID NO: 9125 - protein, 40 aa, Artificial Sequence
  Non-cyclic GFR-binding peptide
  MOD_RES (2)..(4)..(38)..(39): Xaa is C or S
  MOD_RES (16)..(17)..(18)..(19)..(20): Xaa is A or G
  MOD_RES (21)..(22)..(23)..(24): Xaa is A or G or absent
RXGXGEVVMDNSLQEXXXXXXXXXYYLMTLPELETPVXXA

SEQ ID NO: 9126 - protein, 39 aa, Artificial Sequence
  Non-cyclic GFR-binding peptide
  MOD_RES (1)..(35)..(36): Xaa is C or S
  MOD_RES (13)..(14)..(15)..(16)..(17): Xaa is A or G
  MOD_RES (18)..(19)..(20)..(21): Xaa is A or G or absent
XGEVVMENSLQEXXXXXXXXXYYVMPLPELETPVXXAKP

SEQ ID NO: 9127 - protein, 41 aa, Artificial Sequence
  Non-cyclic GFR-binding peptide
  MOD_RES (2)..(4)..(36)..(37): Xaa is C or S
HXGXSRVVMNEYQKYIVNSSDDIFLVSIPSLKTPAXXPKPV

SEQ ID NO: 9128 - protein, 35 aa, Artificial Sequence
  Non-cyclic GFR-binding peptide
  MOD_RES (1)..(32)..(33): Xaa is C or S
XSRVIMEYQKYVKPKRGVIFLISIPSLAQPVXXPA

SEQ ID NO: 9129 - protein, 39 aa, Artificial Sequence
  Non-cyclic GFR-binding peptide
  MOD_RES (34)..(35): Xaa is C or S
  MOD_RES (12)..(13)..(14)..(15)..(16): Xaa is A or G
  MOD_RES (17)..(18)..(19)..(20): Xaa is A or G or absent
SRVVMNNSLQEXXXXXXXXXYYLVTLPELKTPAXXPKPV

SEQ ID NO: 9130 - protein, 41 aa, Artificial Sequence
  Non-cyclic GFR-binding peptide
  MOD_RES (1)..(35)..(36): Xaa is C or S
  MOD_RES (13)..(14)..(15)..(16)..(17): Xaa is A or G
  MOD_RES (18)..(19)..(20)..(21): Xaa is A or G or absent
XSRVVMNEYQKYXXXXXXXXXIFLVSIPSLKTPAXXPKPVY

SEQ ID NO: 9131 - protein, 33 aa, Artificial Sequence
  Non-cyclic GFR-binding peptide
  MOD_RES (32)..(33): Xaa is C or S
SEVVMDQYNKLVVNNASDLYLISIASLRTPVXX

SEQ ID NO: 9132 - protein, 37 aa, Artificial Sequence
  Non-cyclic GFR-binding peptide
  MOD_RES (34)..(35): Xaa is C or S
  MOD_RES (12)..(13)..(14)..(15)..(16): Xaa is A or G
  MOD_RES (17)..(18)..(19)..(20): Xaa is A or G or absent
SRVVMNEYQKYXXXXXXXXXIFLVSIPSLKTPAXXPK

SEQ ID NO: 9133 - protein, 34 aa, Artificial Sequence
  Non-cyclic GFR-binding peptide
  MOD_RES (31)..(31): Xaa is C or S
RVVMNNSLQEIVNSSDDYYVVPLPELKTPAXTPK

SEQ ID NO: 9134 - protein, 35 aa, Artificial Sequence
  Non-cyclic GFR-binding peptide
  MOD_RES (34)..(35): Xaa is C or S
  MOD_RES (12)..(13)..(14)..(15)..(16): Xaa is A or G
  MOD_RES (17)..(18)..(19)..(20): Xaa is A or G or absent
SRVVMNNSLQEXXXXXXXXXYYVVPLPELKTPAXX

SEQ ID NO: 9135 - protein, 37 aa, Artificial Sequence
  Non-cyclic GFR-binding peptide
  MOD_RES (34)..(34): Xaa is C or S
  MOD_RES (12)..(13)..(14)..(15)..(16): Xaa is A or G
  MOD_RES (17)..(18)..(19)..(20): Xaa is A or G or absent
SRVVMNEYQKYXXXXXXXXXIFLVSIPSLKTPAXTPK

SEQ ID NO: 9136 - protein, 37 aa, Artificial Sequence
  Non-cyclic GFR-binding peptide
  MOD_RES (31)..(31): Xaa is C or S
RVVMNNSLQEIVNSSDDYYVVPLPELKTPAXTPKTVH

SEQ ID NO: 9137 - protein, 32 aa, Artificial Sequence
  Non-cyclic GFR-binding peptide
  MOD_RES (32)..(32): Xaa is C or S
SEVVMDRYKKLVVNNASDFYLISIANLRTPVX

SEQ ID NO: 9138 - protein, 41 aa, Artificial Sequence
  Non-cyclic GFR-binding peptide
  MOD_RES (2)..(35)..(36): Xaa is C or S
  MOD_RES (13)..(14)..(15)..(16)..(17): Xaa is A or G
  MOD_RES (18)..(19)..(20)..(21): Xaa is A or G or absent
KXSKVVMNSLQEXXXXXXXXXYYVIPLPELDQPVXXPSASA

SEQ ID NO: 9139 - protein, 34 aa, Artificial Sequence
  Non-cyclic GFR-binding peptide
  MOD_RES (33)..(34): Xaa is C or S
  MOD_RES (11)..(12)..(13)..(14)..(15): Xaa is A or G
  MOD_RES (16)..(17)..(18)..(19): Xaa is A or G or absent
EVVMDEYQKYXXXXXXXXXIFLMSIPSLETPVXX

SEQ ID NO: 9140 - protein, 34 aa, Artificial Sequence
  Non-cyclic GFR-binding peptide
  MOD_RES (1)..(33): Xaa is C or S
XSRVVMNNSLQEIVNSSDDYYLVTLPELKTPAXT

SEQ ID NO: 9141 - protein, 42 aa, Artificial Sequence
  Non-cyclic GFR-binding peptide
  MOD_RES (2)..(36)..(37): Xaa is C or S
  MOD_RES (14)..(15)..(16)..(17)..(18): Xaa is A or G
  MOD_RES (19)..(20)..(21)..(22): Xaa is A or G or absent
GXSEVVMDNSLQEXXXXXXXXXYYVIPLPELRTPVXXTPPTS

SEQ ID NO: 9142 - protein, 42 aa, Artificial Sequence
  Non-cyclic GFR-binding peptide
  MOD_RES (2)..(36)..(37): Xaa is C or S
  MOD_RES (14)..(15)..(16)..(17)..(18): Xaa is A or G
  MOD_RES (19)..(20)..(21)..(22): Xaa is A or G or absent
GXGEVVMEEYQKYXXXXXXXXXIFLMSIPSLETPVXXAKPIS

SEQ ID NO: 9143 - protein, 36 aa, Artificial Sequence
  Non-cyclic GFR-binding peptide
  MOD_RES (1)..(33)..(34): Xaa is C or S
XGEVVMDNSLQEVVKENEDYYLMTLPELETPVXXAK

SEQ ID NO: 9144 - protein, 33 aa, Artificial Sequence
  Non-cyclic GFR-binding peptide
  MOD_RES (31)..(32): Xaa is C or S
SKVIMEYQKYIKPTKGIIFLISIPSLDQSVXXP

SEQ ID NO: 9145 - protein, 37 aa, Artificial Sequence
  Non-cyclic GFR-binding peptide
  MOD_RES (1)..(32)..(33): Xaa is C or S
XSKVIMEYQKYIKPTKGIIFLISIPSLDQSVXXPSAS

SEQ ID NO: 9146 - protein, 41 aa, Artificial Sequence
  Non-cyclic GFR-binding peptide
  MOD_RES (1)..(35)..(36): Xaa is C or S
  MOD_RES (13)..(14)..(15)..(16)..(17): Xaa is A or G
  MOD_RES (18)..(19)..(20)..(21): Xaa is A or G or absent
XSEVVMDQYNKLXXXXXXXXXLYLISIASLRTPVXXTPPTS

SEQ ID NO: 9147 - protein, 38 aa, Artificial Sequence
  Non-cyclic GFR-binding peptide
  MOD_RES (1)..(3)..(37)..(38): Xaa is C or S
  MOD_RES (15)..(16)..(17)..(18)..(19): Xaa is A or G
  MOD_RES (20)..(21)..(22)..(23): Xaa is A or G or absent
XGXARVVMNNSLQEXXXXXXXXXYYLVTLPELQTPAXX

SEQ ID NO: 9148 - protein, 32 aa, Artificial Sequence
  Non-cyclic GFR-binding peptide
  MOD_RES (11)..(12)..(13)..(14)..(15): Xaa is A or G
  MOD_RES (16)..(17)..(18)..(19): Xaa is A or G or absent
EVVMDRYKKLXXXXXXXXXFYLISIANLRTPV

SEQ ID NO: 9149 - protein, 34 aa, Artificial Sequence
  Non-cyclic GFR-binding peptide
  MOD_RES (34)..(34): Xaa is C or S
  MOD_RES (12)..(13)..(14)..(15)..(16): Xaa is A or G
  MOD_RES (17)..(18)..(19)..(20): Xaa is A or G or absent
SRVVMNNSLQEXXXXXXXXXYYVVPLPELKTPAX

SEQ ID NO: 9150 - protein, 40 aa, Artificial Sequence
  Non-cyclic GFR-binding peptide
  MOD_RES (2)..(34): Xaa is C or S
GXSRVVMNNSLQEIVNSSDDYYVVPLPELKTPAXTPKTVH

SEQ ID NO: 9151 - protein, 40 aa, Artificial Sequence
  Non-cyclic GFR-binding peptide
  MOD_RES (1)..(35)..(36): Xaa is C or S
  MOD_RES (13)..(14)..(15)..(16)..(17): Xaa is A or G
  MOD_RES (18)..(19)..(20)..(21): Xaa is A or G or absent
XARVVMNNSLQEXXXXXXXXXYYVVPLPELQTPAXXPKPV

SEQ ID NO: 9152 - protein, 31 aa, Artificial Sequence
  Non-cyclic GFR-binding peptide
SRVVMNNSLQEIVNSSDDYYLVTLPELKTPA

SEQ ID NO: 9153 - protein, 35 aa, Artificial Sequence
  Non-cyclic GFR-binding peptide
  MOD_RES (2)..(2): Xaa is C or S
  MOD_RES (14)..(15)..(16)..(17)..(18): Xaa is A or G
  MOD_RES (19)..(20)..(21)..(22): Xaa is A or G or absent
GXGEVVMDEYQKYXXXXXXXXXIFLMSIPSLETPV

SEQ ID NO: 9154 - protein, 37 aa, Artificial Sequence
  Non-cyclic GFR-binding peptide
  MOD_RES (34)..(35): Xaa is C or S
  MOD_RES (12)..(13)..(14)..(15)..(16): Xaa is A or G
  MOD_RES (17)..(18)..(19)..(20): Xaa is A or G or absent
GEVVMDNSLQEXXXXXXXXXYYVMPLPELETPVXXAK

SEQ ID NO: 9155 - protein, 38 aa, Artificial Sequence
  Non-cyclic GFR-binding peptide
  MOD_RES (2)..(4)..(38): Xaa is C or S
  MOD_RES (16)..(17)..(18)..(19)..(20): Xaa is A or G
  MOD_RES (21)..(22)..(23)..(24): Xaa is A or G or absent
RXGXGEVVMDNSLQEXXXXXXXXXYYVMPLPELETPVX

SEQ ID NO: 9156 - protein, 36 aa, Artificial Sequence
  Non-cyclic GFR-binding peptide
  MOD_RES (1)..(3)..(35)..(36): Xaa is C or S
XGXARVVMNNSLQEIVNSSDDYYLVTLPELQTPAXX

SEQ ID NO: 9157 - protein, 39 aa, Artificial Sequence
  Non-cyclic GFR-binding peptide
  MOD_RES (34)..(35): Xaa is C or S
  MOD_RES (12)..(13)..(14)..(15)..(16): Xaa is A or G
  MOD_RES (17)..(18)..(19)..(20): Xaa is A or G or absent
GEVVMEEYQKYXXXXXXXXXIFLMSIPSLETPVXXAKPI

SEQ ID NO: 9158 - protein, 34 aa, Artificial Sequence
  Non-cyclic GFR-binding peptide
  MOD_RES (33)..(34): Xaa is C or S
  MOD_RES (11)..(12)..(13)..(14)..(15): Xaa is A or G
  MOD_RES (16)..(17)..(18)..(19): Xaa is A or G or absent
SKVIMEYQKYXXXXXXXXXIFLISIPSLDQSVXX

SEQ ID NO: 9159 - protein, 38 aa, Artificial Sequence
  Non-cyclic GFR-binding peptide
  MOD_RES (1)..(34)..(35): Xaa is C or S
  MOD_RES (12)..(13)..(14)..(15)..(16): Xaa is A or G
  MOD_RES (17)..(18)..(19)..(20): Xaa is A or G or absent
XSRVIMEYQKYXXXXXXXXXIFLISIPSLAQPVXXPAA

SEQ ID NO: 9160 - protein, 42 aa, Artificial Sequence
  Non-cyclic GFR-binding peptide
  MOD_RES (1)..(3)..(37)..(38): Xaa is C or S
  MOD_RES (15)..(16)..(17)..(18)..(19): Xaa is A or G
  MOD_RES (20)..(21)..(22)..(23): Xaa is A or G or absent
XGXGEVVMENSLQEXXXXXXXXXYYVMPLPELETPVXXAKPI

SEQ ID NO: 9161 - protein, 30 aa, Artificial Sequence
  Non-cyclic GFR-binding peptide
EVVMENSLQEVVKDYEDYYLMTLPELETPV

SEQ ID NO: 9162 - protein, 37 aa, Artificial Sequence
  Non-cyclic GFR-binding peptide
  MOD_RES (31)..(32): Xaa is C or S
RVVMNNSLQEIVNSSDDYYVVPLPELKTPAXXPKPVY

SEQ ID NO: 9163 - protein, 36 aa, Artificial Sequence
  Non-cyclic GFR-binding peptide
  MOD_RES (2)..(4)..(36): Xaa is C or S
HXGXSRVVMNNSLQEIVNSSDDYYLVTLPELKTPAX

SEQ ID NO: 9164 - protein, 40 aa, Artificial Sequence
  Non-cyclic GFR-binding peptide
  MOD_RES (2)..(34)..(35): Xaa is C or S
GXSEVVMDNSLQEVVNNASDYYLITLPELRTPVXXTPPTS

SEQ ID NO: 9165 - protein, 40 aa, Artificial Sequence
  Non-cyclic GFR-binding peptide
  MOD_RES (2)..(36)..(37): Xaa is C or S
  MOD_RES (14)..(15)..(16)..(17)..(18): Xaa is A or G
  MOD_RES (19)..(20)..(21)..(22): Xaa is A or G or absent
GXSEVVMDQYNKLXXXXXXXXXLYLISIASLRTPVXXTPP

SEQ ID NO: 9166 - protein, 35 aa, Artificial Sequence
  Non-cyclic GFR-binding peptide
  MOD_RES (1)..(3)..(34)..(35): Xaa is C or S
XKXSRVIMEYQKYVKPKRGVIFLISIPSLAQPVXX

SEQ ID NO: 9167 - protein, 41 aa, Artificial Sequence
  Non-cyclic GFR-binding peptide
  MOD_RES (1)..(3)..(36)..(37): Xaa is C or S
  MOD_RES (14)..(15)..(16)..(17)..(18): Xaa is A or G
  MOD_RES (19)..(20)..(21)..(22): Xaa is A or G or absent
XKXSRVIMEYQKYXXXXXXXXXIFLISIPSLAQPVXXPAAS

SEQ ID NO: 9168 - protein, 36 aa, Artificial Sequence
  Non-cyclic GFR-binding peptide
  MOD_RES (32)..(32): Xaa is C or S
SRVVMNNSLQEIVNSSDDYYVVPLPELKTPAXTPKT

SEQ ID NO: 9169 - protein, 35 aa, Artificial Sequence
  Non-cyclic GFR-binding peptide
  MOD_RES (1)..(3)..(34)..(35): Xaa is C or S
XKXSKVIMEYQKYIKPTKGIIFLISIPSLDQSVXX

SEQ ID NO: 9170 - protein, 36 aa, Artificial Sequence
  Non-cyclic GFR-binding peptide
  MOD_RES (33)..(34): Xaa is C or S
  MOD_RES (11)..(12)..(13)..(14)..(15): Xaa is A or G
  MOD_RES (16)..(17)..(18)..(19): Xaa is A or G or absent
SKVVMEYQKYXXXXXXXXXIFLISIPSLDQPVXXPS

SEQ ID NO: 9171 - protein, 39 aa, Artificial Sequence
  Non-cyclic GFR-binding peptide
  MOD_RES (2)..(4)..(38)..(39): Xaa is C or S
  MOD_RES (16)..(17)..(18)..(19)..(20): Xaa is A or G
  MOD_RES (21)..(22)..(23)..(24): Xaa is A or G or absent
HXGXSRVVMNNSLQEXXXXXXXXXYYLVTLPELKTPAXX

SEQ ID NO: 9172 - protein, 41 aa, Artificial Sequence
  Non-cyclic GFR-binding peptide
  MOD_RES (1)..(3)..(36)..(37): Xaa is C or S
  MOD_RES (14)..(15)..(16)..(17)..(18): Xaa is A or G
  MOD_RES (19)..(20)..(21)..(22): Xaa is A or G or absent
XKXSKVIMEYQKYXXXXXXXXXIFLISIPSLDQSVXXPSAS

SEQ ID NO: 9173 - protein, 41 aa, Artificial Sequence
  Non-cyclic GFR-binding peptide
  MOD_RES (2)..(4)..(38): Xaa is C or S
  MOD_RES (16)..(17)..(18)..(19)..(20): Xaa is A or G
  MOD_RES (21)..(22)..(23)..(24): Xaa is A or G or absent
HXGXSRVVMNNSLQEXXXXXXXXXYYLVTLPELKTPAXTPK

SEQ ID NO: 9174 - protein, 35 aa, Artificial Sequence
  Non-cyclic GFR-binding peptide
  MOD_RES (1)..(3)..(34)..(35): Xaa is C or S
XKXSKVVMNSLQEVKPTRGVYYVIPLPELDQPVXX

SEQ ID NO: 9175 - protein, 37 aa, Artificial Sequence
  Non-cyclic GFR-binding peptide
  MOD_RES (1)..(3)..(35)..(36): Xaa is C or S
XGXSEVVMDNSLQEVVNNASDYYVIPLPELRTPVXXT

SEQ ID NO: 9176 - protein, 36 aa, Artificial Sequence
  Non-cyclic GFR-binding peptide
  MOD_RES (34)..(35): Xaa is C or S
  MOD_RES (12)..(13)..(14)..(15)..(16): Xaa is A or G
  MOD_RES (17)..(18)..(19)..(20): Xaa is A or G or absent
GEVVMDEYQKYXXXXXXXXXIFLMSIPSLETPVXXA

SEQ ID NO: 9177 - protein, 38 aa, Artificial Sequence
  Non-cyclic GFR-binding peptide
  MOD_RES (1)..(3)..(37)..(38): Xaa is C or S
  MOD_RES (15)..(16)..(17)..(18)..(19): Xaa is A or G
  MOD_RES (20)..(21)..(22)..(23): Xaa is A or G or absent
XGXSRVVMNNSLQEXXXXXXXXXYYVVPLPELKTPAXX

SEQ ID NO: 9178 - protein, 38 aa, Artificial Sequence
  Non-cyclic GFR-binding peptide
  MOD_RES (34)..(35): Xaa is C or S
  MOD_RES (12)..(13)..(14)..(15)..(16): Xaa is A or G
  MOD_RES (17)..(18)..(19)..(20): Xaa is A or G or absent
SEVVMDNSLQEXXXXXXXXXYYVIPLPELRTPVXXTPP

SEQ ID NO: 9179 - protein, 38 aa, Artificial Sequence
  Non-cyclic GFR-binding peptide
  MOD_RES (2)..(36): Xaa is C or S
  MOD_RES (14)..(15)..(16)..(17)..(18): Xaa is A or G
  MOD_RES (19)..(20)..(21)..(22): Xaa is A or G or absent
GXSRVVMNNSLQEXXXXXXXXXYYVVPLPELKTPAXTP

SEQ ID NO: 9180 - protein, 31 aa, Artificial Sequence
  Non-cyclic GFR-binding peptide
GEVVMDNSLQEVVKENEDYYLMTLPELETPV

SEQ ID NO: 9181 - protein, 39 aa, Artificial Sequence
  Non-cyclic GFR-binding peptide
  MOD_RES (1)..(3)..(35): Xaa is C or S
XGXSRVVMNNSLQEIVNSSDDYYVVPLPELKTPAXTPKT

SEQ ID NO: 9182 - protein, 37 aa, Artificial Sequence
  Non-cyclic GFR-binding peptide
  MOD_RES (1)..(33): Xaa is C or S
XSRVVMNNSLQEIVNSSDDYYLVTLPELKTPAXTPKT

SEQ ID NO: 9183 - protein, 33 aa, Artificial Sequence
  Non-cyclic GFR-binding peptide
  MOD_RES (31)..(32): Xaa is C or S
SKVVMEYQKYVKPTRGVIFLISIPSLDQPVXXP

SEQ ID NO: 9184 - protein, 38 aa, Artificial Sequence
  Non-cyclic GFR-binding peptide
  MOD_RES (32)..(33): Xaa is C or S
SEVVMDQYNKLVVNNASDLYLISIASLRTPVXXTPPTS

SEQ ID NO: 9185 - protein, 32 aa, Artificial Sequence
  Non-cyclic GFR-binding peptide
  MOD_RES (1)..(32): Xaa is C or S
XSRVIMNSLQEVKPKRGVYYLITLPELAQPVX

SEQ ID NO: 9186 - protein, 34 aa, Artificial Sequence
  Non-cyclic GFR-binding peptide
  MOD_RES (1)..(3)..(34): Xaa is C or S
XKXSKVIMEYQKYIKPTKGIIFLISIPSLDQSVX

SEQ ID NO: 9187 - protein, 32 aa, Artificial Sequence
  Non-cyclic GFR-binding peptide
  MOD_RES (31)..(31): Xaa is C or S
RVVMNNSLQEIVNSSDDYYLVTLPELKTPAXT

SEQ ID NO: 9188 - protein, 37 aa, Artificial Sequence
  Non-cyclic GFR-binding peptide
  MOD_RES (2)..(36)..(37): Xaa is C or S
  MOD_RES (14)..(15)..(16)..(17)..(18): Xaa is A or G
  MOD_RES (19)..(20)..(21)..(22): Xaa is A or G or absent
GXSEVVMDNSLQEXXXXXXXXXYYVIPLPELRTPVXX

SEQ ID NO: 9189 - protein, 34 aa, Artificial Sequence
  Non-cyclic GFR-binding peptide
  MOD_RES (1)..(3)..(34): Xaa is C or S
XKXSRVIMEYQKYVKPKRGVIFLISIPSLAQPVX

SEQ ID NO: 9190 - protein, 38 aa, Artificial Sequence
  Non-cyclic GFR-binding peptide
  MOD_RES (1)..(35)..(36): Xaa is C or S
  MOD_RES (13)..(14)..(15)..(16)..(17): Xaa is A or G
  MOD_RES (18)..(19)..(20)..(21): Xaa is A or G or absent
XGEVVMDEYQKYXXXXXXXXXIFLMSIPSLETPVXXAK

SEQ ID NO: 9191 - protein, 35 aa, Artificial Sequence
  Non-cyclic GFR-binding peptide
  MOD_RES (2)..(2): Xaa is C or S
  MOD_RES (14)..(15)..(16)..(17)..(18): Xaa is A or G
  MOD_RES (19)..(20)..(21)..(22): Xaa is A or G or absent
GXARVVMNNSLQEXXXXXXXXXYYLVTLPELQTPA

SEQ ID NO: 9192 - protein, 34 aa, Artificial Sequence
  Non-cyclic GFR-binding peptide
  MOD_RES (33)..(34): Xaa is C or S
  MOD_RES (11)..(12)..(13)..(14)..(15): Xaa is A or G
  MOD_RES (16)..(17)..(18)..(19): Xaa is A or G or absent
EVVMENSLQEXXXXXXXXXYYVMPLPELETPVXX

SEQ ID NO: 9193 - protein, 44 aa, Artificial Sequence
  Non-cyclic GFR-binding peptide
  MOD_RES (2)..(4)..(38)..(39): Xaa is C or S
  MOD_RES (16)..(17)..(18)..(19)..(20): Xaa is A or G
  MOD_RES (21)..(22)..(23)..(24): Xaa is A or G or absent
RXGXGEVVMENSLQEXXXXXXXXXYYVMPLPELETPVXXAKPIS

SEQ ID NO: 9194 - protein, 38 aa, Artificial Sequence
  Non-cyclic GFR-binding peptide
  MOD_RES (32)..(33): Xaa is C or S
ARVVMNNSLQEIVNSSDDYYLVTLPELQTPAXXPKPVT

SEQ ID NO: 9195 - protein, 37 aa, Artificial Sequence
  Non-cyclic GFR-binding peptide
  MOD_RES (1)..(33)..(34): Xaa is C or S
XGEVVMDNSLQEVVKENEDYYVMPLPELETPVXXAKP

SEQ ID NO: 9196 - protein, 37 aa, Artificial Sequence
  Non-cyclic GFR-binding peptide
  MOD_RES (1)..(3)..(35)..(36): Xaa is C or S
XGXARVVMNNSLQEIVNSSDDYYLVTLPELQTPAXXP

SEQ ID NO: 9197 - protein, 35 aa, Artificial Sequence
  Non-cyclic GFR-binding peptide
  MOD_RES (1)..(3)..(35): Xaa is C or S
XGXARVVMNNSLQEIVNSSDDYYVVPLPELQTPAX

SEQ ID NO: 9198 - protein, 36 aa, Artificial Sequence
  Non-cyclic GFR-binding peptide
  MOD_RES (2)..(34)..(35): Xaa is C or S
GXSEVVMDQYNKLVVNNASDLYLISIASLRTPVXXT

SEQ ID NO: 9199 - protein, 37 aa, Artificial Sequence
  Non-cyclic GFR-binding peptide
  MOD_RES (1)..(3)..(35)..(36): Xaa is C or S
XGXSRVVMNNSLQEIVNSSDDYYLVTLPELKTPAXXP

SEQ ID NO: 9200 - protein, 34 aa, Artificial Sequence
  Non-cyclic GFR-binding peptide
  MOD_RES (32)..(32): Xaa is C or S
SRVVMNNSLQEIVNSSDDYYVVPLPELKTPAXTP

SEQ ID NO: 9201 - protein, 33 aa, Artificial Sequence
  Non-cyclic GFR-binding peptide
  MOD_RES (31)..(32): Xaa is C or S
EVVMENSLQEVVKDYEDYYLMTLPELETPVXXA

SEQ ID NO: 9202 - protein, 33 aa, Artificial Sequence
  Non-cyclic GFR-binding peptide
  MOD_RES (2)..(2): Xaa is C or S
GXGEVVMDNSLQEVVKENEDYYVMPLPELETPV

SEQ ID NO: 9203 - protein, 38 aa, Artificial Sequence
  Non-cyclic GFR-binding peptide
  MOD_RES (33)..(33): Xaa is C or S
  MOD_RES (11)..(12)..(13)..(14)..(15): Xaa is A or G
  MOD_RES (16)..(17)..(18)..(19): Xaa is A or G or absent
RVVMNEYQKYXXXXXXXXXIFLVSIPSLKTPAXTPKTV

SEQ ID NO: 9204 - protein, 35 aa, Artificial Sequence
  Non-cyclic GFR-binding peptide
  MOD_RES (31)..(32): Xaa is C or S
EVVMDNSLQEVVKENEDYYVMPLPELETPVXXAKP

SEQ ID NO: 9205 - protein, 36 aa, Artificial Sequence
  Non-cyclic GFR-binding peptide
  MOD_RES (1)..(35): Xaa is C or S
  MOD_RES (13)..(14)..(15)..(16)..(17): Xaa is A or G
  MOD_RES (18)..(19)..(20)..(21): Xaa is A or G or absent
XSRVVMNNSLQEXXXXXXXXXYYVVPLPELKTPAXT

SEQ ID NO: 9206 - protein, 38 aa, Artificial Sequence
  Non-cyclic GFR-binding peptide
  MOD_RES (2)..(4)..(38): Xaa is C or S
  MOD_RES (16)..(17)..(18)..(19)..(20): Xaa is A or G
  MOD_RES (21)..(22)..(23)..(24): Xaa is A or G or absent
RXGXSEVVMDRYKKLXXXXXXXXXFYLISIANLRTPVX

SEQ ID NO: 9207 - protein, 38 aa, Artificial Sequence
  Non-cyclic GFR-binding peptide
  MOD_RES (1)..(33)..(34): Xaa is C or S
XSRVVMNNSLQEIVNSSDDYYLVTLPELKTPAXXPKPV

SEQ ID NO: 9208 - protein, 35 aa, Artificial Sequence
  Non-cyclic GFR-binding peptide
  MOD_RES (31)..(32): Xaa is C or S
EVVMDNSLQEVVNNASDYYVIPLPELRTPVXXTPP

SEQ ID NO: 9209 - protein, 39 aa, Artificial Sequence
  Non-cyclic GFR-binding peptide
  MOD_RES (2)..(36)..(37): Xaa is C or S
  MOD_RES (14)..(15)..(16)..(17)..(18): Xaa is A or G
  MOD_RES (19)..(20)..(21)..(22): Xaa is A or G or absent
GXSEVVMDQYNKLXXXXXXXXXLYLISIASLRTPVXXTP

SEQ ID NO: 9210 - protein, 36 aa, Artificial Sequence
  Non-cyclic GFR-binding peptide
  MOD_RES (2)..(4): Xaa is C or S
  MOD_RES (15)..(16)..(17)..(18)..(19): Xaa is A or G
  MOD_RES (20)..(21)..(22)..(23): Xaa is A or G or absent
SXKXSKVVMEYQKYXXXXXXXXXIFLISIPSLDQPV

SEQ ID NO: 9211 - protein, 34 aa, Artificial Sequence
  Non-cyclic GFR-binding peptide
  MOD_RES (1)..(3)..(34): Xaa is C or S
XKXSKVVMNSLQEVKPTRGVYYVIPLPELDQPVX

SEQ ID NO: 9212 - protein, 38 aa, Artificial Sequence
  Non-cyclic GFR-binding peptide
  MOD_RES (2)..(4)..(36)..(37): Xaa is C or S
HXGXARVVMNNSLQEIVNSSDDYYLVTLPELQTPAXXP

SEQ ID NO: 9213 - protein, 40 aa, Artificial Sequence
  Non-cyclic GFR-binding peptide
  MOD_RES (2)..(4)..(38)..(39): Xaa is C or S
  MOD_RES (16)..(17)..(18)..(19)..(20): Xaa is A or G
  MOD_RES (21)..(22)..(23)..(24): Xaa is A or G or absent
RXGXGEVVMDNSLQEXXXXXXXXXYYVMPLPELETPVXXA

SEQ ID NO: 9214 - protein, 38 aa, Artificial Sequence
  Non-cyclic GFR-binding peptide
  MOD_RES (1)..(35): Xaa is C or S
  MOD_RES (13)..(14)..(15)..(16)..(17): Xaa is A or G
  MOD_RES (18)..(19)..(20)..(21): Xaa is A or G or absent
XSRVVMNNSLQEXXXXXXXXXYYVVPLPELKTPAXTPK

SEQ ID NO: 9215 - protein, 33 aa, Artificial Sequence
  Non-cyclic GFR-binding peptide
  MOD_RES (12)..(13)..(14)..(15)..(16): Xaa is A or G
  MOD_RES (17)..(18)..(19)..(20): Xaa is A or G or absent
GEVVMENSLQEXXXXXXXXXYYLMTLPELETPV

SEQ ID NO: 9216 - protein, 41 aa, Artificial Sequence
  Non-cyclic GFR-binding peptide
  MOD_RES (2)..(4)..(36)..(37): Xaa is C or S
RXGXSEVVMDNSLQEVVNNASDYYVIPLPELRTPVXXTPPT

SEQ ID NO: 9217 - protein, 36 aa, Artificial Sequence
  Non-cyclic GFR-binding peptide
  MOD_RES (1)..(33)..(34): Xaa is C or S
XSEVVMDQYNKLVVNNASDLYLISIASLRTPVXXTP

SEQ ID NO: 9218 - protein, 37 aa, Artificial Sequence
  Non-cyclic GFR-binding peptide
  MOD_RES (2)..(4)..(35)..(36): Xaa is C or S
SXKXSKVIMNSLQEIKPTKGIYYVIPLPELDQSVXXP

SEQ ID NO: 9219 - protein, 38 aa, Artificial Sequence
  Non-cyclic GFR-binding peptide
  MOD_RES (33)..(34): Xaa is C or S
  MOD_RES (11)..(12)..(13)..(14)..(15): Xaa is A or G
  MOD_RES (16)..(17)..(18)..(19): Xaa is A or G or absent
EVVMDQYNKLXXXXXXXXXLYLISIASLRTPVXXTPPT

SEQ ID NO: 9220 - protein, 37 aa, Artificial Sequence
  Non-cyclic GFR-binding peptide
  MOD_RES (32)..(33): Xaa is C or S
GEVVMEEYQKYVVKDYEDIFLMSIPSLETPVXXAKPI

SEQ ID NO: 9221 - protein, 41 aa, Artificial Sequence
  Non-cyclic GFR-binding peptide
  MOD_RES (2)..(4)..(38)..(39): Xaa is C or S
  MOD_RES (16)..(17)..(18)..(19)..(20): Xaa is A or G
  MOD_RES (21)..(22)..(23)..(24): Xaa is A or G or absent
HXGXARVVMNNSLQEXXXXXXXXXYYLVTLPELQTPAXXPK

SEQ ID NO: 9222 - protein, 39 aa, Artificial Sequence
  Non-cyclic GFR-binding peptide
  MOD_RES (1)..(3)..(35)..(36): Xaa is C or S
XGXGEVVMEEYQKYVVKDYEDIFLMSIPSLETPVXXAKP

SEQ ID NO: 9223 - protein, 32 aa, Artificial Sequence
  Non-cyclic GFR-binding peptide
  MOD_RES (31)..(32): Xaa is C or S
EVVMDNSLQEVVKENEDYYLMTLPELETPVXX

SEQ ID NO: 9224 - protein, 35 aa, Artificial Sequence
  Non-cyclic GFR-binding peptide
  MOD_RES (1)..(3): Xaa is C or S
  MOD_RES (14)..(15)..(16)..(17)..(18): Xaa is A or G
  MOD_RES (19)..(20)..(21)..(22): Xaa is A or G or absent
XKXSKVVMEYQKYXXXXXXXXXIFLISIPSLDQPV

SEQ ID NO: 9225 - protein, 39 aa, Artificial Sequence
  Non-cyclic GFR-binding peptide
  MOD_RES (1)..(35)..(36): Xaa is C or S
  MOD_RES (13)..(14)..(15)..(16)..(17): Xaa is A or G
  MOD_RES (18)..(19)..(20)..(21): Xaa is A or G or absent
XSEVVMDNSLQEXXXXXXXXXYYLITLPELRTPVXXTPP

SEQ ID NO: 9226 - protein, 37 aa, Artificial Sequence
  Non-cyclic GFR-binding peptide
  MOD_RES (1)..(35)..(36): Xaa is C or S
  MOD_RES (13)..(14)..(15)..(16)..(17): Xaa is A or G
  MOD_RES (18)..(19)..(20)..(21): Xaa is A or G or absent
XARVVMNNSLQEXXXXXXXXXYYVVPLPELQTPAXXP

SEQ ID NO: 9227 - protein, 34 aa, Artificial Sequence
  Non-cyclic GFR-binding peptide
  MOD_RES (33)..(33): Xaa is C or S
  MOD_RES (11)..(12)..(13)..(14)..(15): Xaa is A or G
  MOD_RES (16)..(17)..(18)..(19): Xaa is A or G or absent
RVVMNNSLQEXXXXXXXXXYYVVPLPELKTPAXT

SEQ ID NO: 9228 - protein, 38 aa, Artificial Sequence
  Non-cyclic GFR-binding peptide
  MOD_RES (32)..(33): Xaa is C or S
SEVVMDRYKKLVVNNASDFYLISIANLRTPVXXTPPTS

SEQ ID NO: 9229 - protein, 36 aa, Artificial Sequence
  Non-cyclic GFR-binding peptide
  MOD_RES (2)..(34)..(35): Xaa is C or S
GXSEVVMDNSLQEVVNNASDYYLITLPELRTPVXXT

SEQ ID NO: 9230 - protein, 34 aa, Artificial Sequence
  Non-cyclic GFR-binding peptide
  MOD_RES (2)..(34): Xaa is C or S
GXSEVVMDNSLQEVVNNASDYYLITLPELRTPVX

SEQ ID NO: 9231 - protein, 36 aa, Artificial Sequence
  Non-cyclic GFR-binding peptide
  MOD_RES (1)..(35)..(36): Xaa is C or S
  MOD_RES (13)..(14)..(15)..(16)..(17): Xaa is A or G
  MOD_RES (18)..(19)..(20)..(21): Xaa is A or G or absent
XGEVVMENSLQEXXXXXXXXXYYVMPLPELETPVXX

SEQ ID NO: 9232 - protein, 44 aa, Artificial Sequence
  Non-cyclic GFR-binding peptide
  MOD_RES (2)..(4)..(38)..(39): Xaa is C or S
  MOD_RES (16)..(17)..(18)..(19)..(20): Xaa is A or G
  MOD_RES (21)..(22)..(23)..(24): Xaa is A or G or absent
RXGXGEVVMDNSLQEXXXXXXXXXYYLMTLPELETPVXXAKPIK

SEQ ID NO: 9233 - protein, 41 aa, Artificial Sequence
  Non-cyclic GFR-binding peptide
  MOD_RES (2)..(36)..(37): Xaa is C or S
  MOD_RES (14)..(15)..(16)..(17)..(18): Xaa is A or G
  MOD_RES (19)..(20)..(21)..(22): Xaa is A or G or absent
GXGEVVMENSLQEXXXXXXXXXYYVMPLPELETPVXXAKPI

SEQ ID NO: 9234 - protein, 33 aa, Artificial Sequence
  Non-cyclic GFR-binding peptide
  MOD_RES (1)..(32)..(33): Xaa is C or S
XSRVIMEYQKYVKPKRGVIFLISIPSLAQPVXX

SEQ ID NO: 9235 - protein, 38 aa, Artificial Sequence
  Non-cyclic GFR-binding peptide
  MOD_RES (1)..(3)..(34)..(35): Xaa is C or S
XKXSRVIMEYQKYVKPKRGVIFLISIPSLAQPVXXPAA

SEQ ID NO: 9236 - protein, 37 aa, Artificial Sequence
  Non-cyclic GFR-binding peptide
  MOD_RES (1)..(33)..(34): Xaa is C or S
XGEVVMDEYQKYVVKENEDIFLMSIPSLETPVXXAKP

SEQ ID NO: 9237 - protein, 36 aa, Artificial Sequence
  Non-cyclic GFR-binding peptide
  MOD_RES (31)..(32): Xaa is C or S
EVVMDRYKKLVVNNASDFYLISIANLRTPVXXTPPT

SEQ ID NO: 9238 - protein, 38 aa, Artificial Sequence
  Non-cyclic GFR-binding peptide
  MOD_RES (1)..(3)..(35): Xaa is C or S
XGXSRVVMNNSLQEIVNSSDDYYVVPLPELKTPAXTPK

SEQ ID NO: 9239 - protein, 39 aa, Artificial Sequence
  Non-cyclic GFR-binding peptide
  MOD_RES (2)..(4)..(36)..(37): Xaa is C or S
RXGXSEVVMDNSLQEVVNNASDYYLITLPELRTPVXXTP

SEQ ID NO: 9240 - protein, 42 aa, Artificial Sequence
  Non-cyclic GFR-binding peptide
  MOD_RES (2)..(4)..(36)..(37): Xaa is C or S
HXGXSRVVMNEYQKYIVNSSDDIFLVSIPSLKTPAXXPKPVY

SEQ ID NO: 9241 - protein, 38 aa, Artificial Sequence
  Non-cyclic GFR-binding peptide
  MOD_RES (1)..(3)..(35)..(36): Xaa is C or S
XGXGEVVMENSLQEVVKDYEDYYLMTLPELETPVXXAK

SEQ ID NO: 9242 - protein, 35 aa, Artificial Sequence
  Non-cyclic GFR-binding peptide
  MOD_RES (2)..(2): Xaa is C or S
  MOD_RES (14)..(15)..(16)..(17)..(18): Xaa is A or G
  MOD_RES (19)..(20)..(21)..(22): Xaa is A or G or absent
GXSEVVMDRYKKLXXXXXXXXXFYLISIANLRTPV

SEQ ID NO: 9243 - protein, 42 aa, Artificial Sequence
  Non-cyclic GFR-binding peptide
  MOD_RES (2)..(4)..(36): Xaa is C or S
HXGXSRVVMNEYQKYIVNSSDDIFLVSIPSLKTPAXTPKTVH

SEQ ID NO: 9244 - protein, 40 aa, Artificial Sequence
  Non-cyclic GFR-binding peptide
  MOD_RES (2)..(34)..(35): Xaa is C or S
GXGEVVMEEYQKYVVKDYEDIFLMSIPSLETPVXXAKPIS

SEQ ID NO: 9245 - protein, 41 aa, Artificial Sequence
  Non-cyclic GFR-binding peptide
  MOD_RES (1)..(3)..(37)..(38): Xaa is C or S
  MOD_RES (15)..(16)..(17)..(18)..(19): Xaa is A or G
  MOD_RES (20)..(21)..(22)..(23): Xaa is A or G or absent
XGXSEVVMDQYNKLXXXXXXXXXLYLISIASLRTPVXXTPP

SEQ ID NO: 9246 - protein, 33 aa, Artificial Sequence
  Non-cyclic GFR-binding peptide
  MOD_RES (2)..(2): Xaa is C or S
GXSRVVMNNSLQEIVNSSDDYYVVPLPELKTPA

SEQ ID NO: 9247 - protein, 39 aa, Artificial Sequence
  Non-cyclic GFR-binding peptide
  MOD_RES (2)..(4)..(38): Xaa is C or S
  MOD_RES (16)..(17)..(18)..(19)..(20): Xaa is A or G
  MOD_RES (21)..(22)..(23)..(24): Xaa is A or G or absent
HXGXSRVVMNNSLQEXXXXXXXXXYYVVPLPELKTPAXT

SEQ ID NO: 9248 - protein, 38 aa, Artificial Sequence
  Non-cyclic GFR-binding peptide
  MOD_RES (1)..(3)..(37)..(38): Xaa is C or S
  MOD_RES (15)..(16)..(17)..(18)..(19): Xaa is A or G
  MOD_RES (20)..(21)..(22)..(23): Xaa is A or G or absent
XGXGEVVMENSLQEXXXXXXXXXYYVMPLPELETPVXX

SEQ ID NO: 9249 - protein, 39 aa, Artificial Sequence
  Non-cyclic GFR-binding peptide
  MOD_RES (1)..(3)..(34)..(35): Xaa is C or S
XKXSKVVMEYQKYVKPTRGVIFLISIPSLDQPVXXPSAS

SEQ ID NO: 9250 - protein, 38 aa, Artificial Sequence
  Non-cyclic GFR-binding peptide
  MOD_RES (1)..(3)..(35)..(36): Xaa is C or S
XGXGEVVMDNSLQEVVKENEDYYVMPLPELETPVXXAK

SEQ ID NO: 9251 - protein, 35 aa, Artificial Sequence
  Non-cyclic GFR-binding peptide
  MOD_RES (31)..(32): Xaa is C or S
EVVMENSLQEVVKDYEDYYLMTLPELETPVXXAKP

SEQ ID NO: 9252 - protein, 34 aa, Artificial Sequence
  Non-cyclic GFR-binding peptide
  MOD_RES (2)..(34): Xaa is C or S
GXSRVVMNNSLQEIVNSSDDYYLVTLPELKTPAX

SEQ ID NO: 9253 - protein, 38 aa, Artificial Sequence
  Non-cyclic GFR-binding peptide
  MOD_RES (1)..(3)..(37): Xaa is C or S
  MOD_RES (15)..(16)..(17)..(18)..(19): Xaa is A or G
  MOD_RES (20)..(21)..(22)..(23): Xaa is A or G or absent
XGXSRVVMNEYQKYXXXXXXXXXIFLVSIPSLKTPAXT

SEQ ID NO: 9254 - protein, 38 aa, Artificial Sequence
  Non-cyclic GFR-binding peptide
  MOD_RES (1)..(33)..(34): Xaa is C or S
XSEVVMDNSLQEVVNNASDYYLITLPELRTPVXXTPPT

SEQ ID NO: 9255 - protein, 38 aa, Artificial Sequence
  Non-cyclic GFR-binding peptide
  MOD_RES (1)..(35)..(36): Xaa is C or S
  MOD_RES (13)..(14)..(15)..(16)..(17): Xaa is A or G
  MOD_RES (18)..(19)..(20)..(21): Xaa is A or G or absent
XGEVVMENSLQEXXXXXXXXXYYLMTLPELETPVXXAK

SEQ ID NO: 9256 - protein, 32 aa, Artificial Sequence
  Non-cyclic GFR-binding peptide
  MOD_RES (11)..(12)..(13)..(14)..(15): Xaa is A or G
  MOD_RES (16)..(17)..(18)..(19): Xaa is A or G or absent
EVVMDQYNKLXXXXXXXXXLYLISIASLRTPV

SEQ ID NO: 9257 - protein, 38 aa, Artificial Sequence
  Non-cyclic GFR-binding peptide
  MOD_RES (1)..(3)..(35)..(36): Xaa is C or S
XGXGEVVMDEYQKYVVKENEDIFLMSIPSLETPVXXAK

SEQ ID NO: 9258 - protein, 33 aa, Artificial Sequence
  Non-cyclic GFR-binding peptide
  MOD_RES (33)..(33): Xaa is C or S
  MOD_RES (11)..(12)..(13)..(14)..(15): Xaa is A or G
  MOD_RES (16)..(17)..(18)..(19): Xaa is A or G or absent
SRVIMEYQKYXXXXXXXXXIFLISIPSLAQPVX

SEQ ID NO: 9259 - protein, 36 aa, Artificial Sequence
  Non-cyclic GFR-binding peptide
  MOD_RES (1)..(35)..(36): Xaa is C or S
  MOD_RES (13)..(14)..(15)..(16)..(17): Xaa is A or G
  MOD_RES (18)..(19)..(20)..(21): Xaa is A or G or absent
XARVVMNEYQKYXXXXXXXXXIFLVSIPSLQTPAXX

SEQ ID NO: 9260 - protein, 32 aa, Artificial Sequence
  Non-cyclic GFR-binding peptide
  MOD_RES (11)..(12)..(13)..(14)..(15): Xaa is A or G
  MOD_RES (16)..(17)..(18)..(19): Xaa is A or G or absent
RVVMNEYQKYXXXXXXXXXIFLVSIPSLKTPA

SEQ ID NO: 9261 - protein, 33 aa, Artificial Sequence
  Non-cyclic GFR-binding peptide
  MOD_RES (1)..(33): Xaa is C or S
XSRVVMNNSLQEIVNSSDDYYVVPLPELKTPAX

SEQ ID NO: 9262 - protein, 38 aa, Artificial Sequence
  Non-cyclic GFR-binding peptide
  MOD_RES (33)..(33): Xaa is C or S
  MOD_RES (11)..(12)..(13)..(14)..(15): Xaa is A or G
  MOD_RES (16)..(17)..(18)..(19): Xaa is A or G or absent
RVVMNNSLQEXXXXXXXXXYYLVTLPELKTPAXTPKTV

SEQ ID NO: 9263 - protein, 39 aa, Artificial Sequence
  Non-cyclic GFR-binding peptide
  MOD_RES (1)..(33)..(34): Xaa is C or S
XGEVVMENSLQEVVKDYEDYYLMTLPELETPVXXAKPIS

SEQ ID NO: 9264 - protein, 36 aa, Artificial Sequence
  Non-cyclic GFR-binding peptide
  MOD_RES (32)..(33): Xaa is C or S
ARVVMNNSLQEIVNSSDDYYVVPLPELQTPAXXPKP

SEQ ID NO: 9265 - protein, 42 aa, Artificial Sequence
  Non-cyclic GFR-binding peptide
  MOD_RES (2)..(4)..(38)..(39): Xaa is C or S
  MOD_RES (16)..(17)..(18)..(19)..(20): Xaa is A or G
  MOD_RES (21)..(22)..(23)..(24): Xaa is A or G or absent
RXGXGEVVMENSLQEXXXXXXXXXYYVMPLPELETPVXXAKP

SEQ ID NO: 9266 - protein, 32 aa, Artificial Sequence
  Non-cyclic GFR-binding peptide
  MOD_RES (11)..(12)..(13)..(14)..(15): Xaa is A or G
  MOD_RES (16)..(17)..(18)..(19): Xaa is A or G or absent
SKVIMEYQKYXXXXXXXXXIFLISIPSLDQSV

SEQ ID NO: 9267 - protein, 40 aa, Artificial Sequence
  Non-cyclic GFR-binding peptide
  MOD_RES (2)..(4)..(36)..(37): Xaa is C or S
RXGXGEVVMDNSLQEVVKENEDYYVMPLPELETPVXXAKP

SEQ ID NO: 9268 - protein, 39 aa, Artificial Sequence
  Non-cyclic GFR-binding peptide
  MOD_RES (2)..(4)..(37)..(38): Xaa is C or S
  MOD_RES (15)..(16)..(17)..(18)..(19): Xaa is A or G
  MOD_RES (20)..(21)..(22)..(23): Xaa is A or G or absent
SXKXSRVIMNSLQEXXXXXXXXXYYLITLPELAQPVXXP

SEQ ID NO: 9269 - protein, 35 aa, Artificial Sequence
  Non-cyclic GFR-binding peptide
  MOD_RES (2)..(4)..(35): Xaa is C or S
SXKXSKVVMNSLQEVKPTRGVYYVIPLPELDQPVX

SEQ ID NO: 9270 - protein, 36 aa, Artificial Sequence
  Non-cyclic GFR-binding peptide
  MOD_RES (32)..(33): Xaa is C or S
SEVVMDRYKKLVVNNASDFYLISIANLRTPVXXTPP

SEQ ID NO: 9271 - protein, 34 aa, Artificial Sequence
  Non-cyclic GFR-binding peptide
  MOD_RES (2)..(4): Xaa is C or S
SXKXSRVIMNSLQEVKPKRGVYYLITLPELAQPV

SEQ ID NO: 9272 - protein, 37 aa, Artificial Sequence
  Non-cyclic GFR-binding peptide
  MOD_RES (2)..(4)..(37): Xaa is C or S
  MOD_RES (15)..(16)..(17)..(18)..(19): Xaa is A or G
  MOD_RES (20)..(21)..(22)..(23): Xaa is A or G or absent
SXKXSRVIMNSLQEXXXXXXXXXYYLITLPELAQPVX

SEQ ID NO: 9273 - protein, 37 aa, Artificial Sequence
  Non-cyclic GFR-binding peptide
  MOD_RES (2)..(4): Xaa is C or S
  MOD_RES (16)..(17)..(18)..(19)..(20): Xaa is A or G
  MOD_RES (21)..(22)..(23)..(24): Xaa is A or G or absent
RXGXGEVVMENSLQEXXXXXXXXXYYVMPLPELETPV

SEQ ID NO: 9274 - protein, 33 aa, Artificial Sequence
  Non-cyclic GFR-binding peptide
  MOD_RES (2)..(2): Xaa is C or S
GXSEVVMDNSLQEVVNNASDYYVIPLPELRTPV

SEQ ID NO: 9275 - protein, 35 aa, Artificial Sequence
  Non-cyclic GFR-binding peptide
  MOD_RES (1)..(33)..(34): Xaa is C or S
XGEVVMDNSLQEVVKENEDYYVMPLPELETPVXXA

SEQ ID NO: 9276 - protein, 40 aa, Artificial Sequence
  Non-cyclic GFR-binding peptide
  MOD_RES (2)..(4)..(36)..(37): Xaa is C or S
HXGXSRVVMNEYQKYIVNSSDDIFLVSIPSLKTPAXXPKP

SEQ ID NO: 9277 - protein, 32 aa, Artificial Sequence
  Non-cyclic GFR-binding peptide
  MOD_RES (2)..(2): Xaa is C or S
KXSKVVMEYQKYVKPTRGVIFLISIPSLDQPV

SEQ ID NO: 9278 - protein, 36 aa, Artificial Sequence
  Non-cyclic GFR-binding peptide
  MOD_RES (2)..(35)..(36): Xaa is C or S
  MOD_RES (13)..(14)..(15)..(16)..(17): Xaa is A or G
  MOD_RES (18)..(19)..(20)..(21): Xaa is A or G or absent
KXSKVVMNSLQEXXXXXXXXXYYVIPLPELDQPVXX

SEQ ID NO: 9279 - protein, 36 aa, Artificial Sequence
  Non-cyclic GFR-binding peptide
  MOD_RES (1)..(35)..(36): Xaa is C or S
  MOD_RES (13)..(14)..(15)..(16)..(17): Xaa is A or G
  MOD_RES (18)..(19)..(20)..(21): Xaa is A or G or absent
XSEVVMDRYKKLXXXXXXXXXFYLISIANLRTPVXX

SEQ ID NO: 9280 - protein, 34 aa, Artificial Sequence
  Non-cyclic GFR-binding peptide
  MOD_RES (33)..(34): Xaa is C or S
  MOD_RES (11)..(12)..(13)..(14)..(15): Xaa is A or G
  MOD_RES (16)..(17)..(18)..(19): Xaa is A or G or absent
EVVMDRYKKLXXXXXXXXXFYLISIANLRTPVXX

SEQ ID NO: 9281 - protein, 36 aa, Artificial Sequence
  Non-cyclic GFR-binding peptide
  MOD_RES (34)..(35): Xaa is C or S
  MOD_RES (12)..(13)..(14)..(15)..(16): Xaa is A or G
  MOD_RES (17)..(18)..(19)..(20): Xaa is A or G or absent
SEVVMDNSLQEXXXXXXXXXYYVIPLPELRTPVXXT

SEQ ID NO: 9282 - protein, 33 aa, Artificial Sequence
  Non-cyclic GFR-binding peptide
  MOD_RES (2)..(33): Xaa is C or S
KXSRVIMEYQKYVKPKRGVIFLISIPSLAQPVX

SEQ ID NO: 9283 - protein, 36 aa, Artificial Sequence
  Non-cyclic GFR-binding peptide
  MOD_RES (32)..(33): Xaa is C or S
SRVVMNEYQKYIVNSSDDIFLVSIPSLKTPAXXPKP

SEQ ID NO: 9284 - protein, 36 aa, Artificial Sequence
  Non-cyclic GFR-binding peptide
  MOD_RES (2)..(34)..(35): Xaa is C or S
GXARVVMNEYQKYIVNSSDDIFLVSIPSLQTPAXXP

SEQ ID NO: 9285 - protein, 35 aa, Artificial Sequence
  Non-cyclic GFR-binding peptide
  MOD_RES (33)..(34): Xaa is C or S
  MOD_RES (11)..(12)..(13)..(14)..(15): Xaa is A or G
  MOD_RES (16)..(17)..(18)..(19): Xaa is A or G or absent
SKVIMNSLQEXXXXXXXXXYYVIPLPELDQSVXXP

SEQ ID NO: 9286 - protein, 42 aa, Artificial Sequence
  Non-cyclic GFR-binding peptide
  MOD_RES (2)..(4)..(36)..(37): Xaa is C or S
HXGXSRVVMNNSLQEIVNSSDDYYVVPLPELKTPAXXPKPVY

SEQ ID NO: 9287 - protein, 34 aa, Artificial Sequence
  Non-cyclic GFR-binding peptide
  MOD_RES (32)..(32): Xaa is C or S
SRVVMNEYQKYIVNSSDDIFLVSIPSLKTPAXTP

SEQ ID NO: 9288 - protein, 39 aa, Artificial Sequence
  Non-cyclic GFR-binding peptide
  MOD_RES (2)..(34): Xaa is C or S
GXSRVVMNNSLQEIVNSSDDYYVVPLPELKTPAXTPKTV

SEQ ID NO: 9289 - protein, 34 aa, Artificial Sequence
  Non-cyclic GFR-binding peptide
  MOD_RES (33)..(34): Xaa is C or S
  MOD_RES (11)..(12)..(13)..(14)..(15): Xaa is A or G
  MOD_RES (16)..(17)..(18)..(19): Xaa is A or G or absent
SRVIMNSLQEXXXXXXXXXYYLITLPELAQPVXX

SEQ ID NO: 9290 - protein, 35 aa, Artificial Sequence
  Non-cyclic GFR-binding peptide
  MOD_RES (2)..(4): Xaa is C or S
RXGXGEVVMENSLQEVVKDYEDYYVMPLPELETPV

SEQ ID NO: 9291 - protein, 36 aa, Artificial Sequence
  Non-cyclic GFR-binding peptide
  MOD_RES (2)..(4)..(36): Xaa is C or S
HXGXARVVMNNSLQEIVNSSDDYYLVTLPELQTPAX

SEQ ID NO: 9292 - protein, 36 aa, Artificial Sequence
  Non-cyclic GFR-binding peptide
  MOD_RES (34)..(35): Xaa is C or S
  MOD_RES (12)..(13)..(14)..(15)..(16): Xaa is A or G
  MOD_RES (17)..(18)..(19)..(20): Xaa is A or G or absent
ARVVMNNSLQEXXXXXXXXXYYVVPLPELQTPAXXP

SEQ ID NO: 9293 - protein, 37 aa, Artificial Sequence
  Non-cyclic GFR-binding peptide
  MOD_RES (31)..(32): Xaa is C or S
RVVMNNSLQEIVNSSDDYYVVPLPELQTPAXXPKPVT

SEQ ID NO: 9294 - protein, 36 aa, Artificial Sequence
  Non-cyclic GFR-binding peptide
  MOD_RES (32)..(33): Xaa is C or S
ARVVMNEYQKYIVNSSDDIFLVSIPSLQTPAXXPKP

SEQ ID NO: 9295 - protein, 36 aa, Artificial Sequence
  Non-cyclic GFR-binding peptide
  MOD_RES (31)..(32): Xaa is C or S
RVVMNEYQKYIVNSSDDIFLVSIPSLKTPAXXPKPV

SEQ ID NO: 9296 - protein, 33 aa, Artificial Sequence
  Non-cyclic GFR-binding peptide
  MOD_RES (2)..(2): Xaa is C or S
GXGEVVMENSLQEVVKDYEDYYLMTLPELETPV

SEQ ID NO: 9297 - protein, 34 aa, Artificial Sequence
  Non-cyclic GFR-binding peptide
  MOD_RES (1)..(33)..(34): Xaa is C or S
XSRVVMNNSLQEIVNSSDDYYLVTLPELKTPAXX

SEQ ID NO: 9298 - protein, 37 aa, Artificial Sequence
  Non-cyclic GFR-binding peptide
  MOD_RES (2)..(34): Xaa is C or S
GXSRVVMNNSLQEIVNSSDDYYVVPLPELKTPAXTPK

SEQ ID NO: 9299 - protein, 37 aa, Artificial Sequence
  Non-cyclic GFR-binding peptide
  MOD_RES (1)..(3)..(37): Xaa is C or S
  MOD_RES (15)..(16)..(17)..(18)..(19): Xaa is A or G
  MOD_RES (20)..(21)..(22)..(23): Xaa is A or G or absent
XGXARVVMNEYQKYXXXXXXXXXIFLVSIPSLQTPAX

SEQ ID NO: 9300 - protein, 37 aa, Artificial Sequence
  Non-cyclic GFR-binding peptide
  MOD_RES (32)..(33): Xaa is C or S
GEVVMDNSLQEVVKENEDYYLMTLPELETPVXXAKPI

SEQ ID NO: 9301 - protein, 36 aa, Artificial Sequence
  Non-cyclic GFR-binding peptide
  MOD_RES (1)..(3)..(36): Xaa is C or S
  MOD_RES (14)..(15)..(16)..(17)..(18): Xaa is A or G
  MOD_RES (19)..(20)..(21)..(22): Xaa is A or G or absent
XKXSKVIMNSLQEXXXXXXXXXYYVIPLPELDQSVX

SEQ ID NO: 9302 - protein, 38 aa, Artificial Sequence
  Non-cyclic GFR-binding peptide
  MOD_RES (33)..(33): Xaa is C or S
  MOD_RES (11)..(12)..(13)..(14)..(15): Xaa is A or G
  MOD_RES (16)..(17)..(18)..(19): Xaa is A or G or absent
RVVMNNSLQEXXXXXXXXXYYVVPLPELKTPAXTPKTV

SEQ ID NO: 9303 - protein, 36 aa, Artificial Sequence
  Non-cyclic GFR-binding peptide
  MOD_RES (1)..(35)..(36): Xaa is C or S
  MOD_RES (13)..(14)..(15)..(16)..(17): Xaa is A or G
  MOD_RES (18)..(19)..(20)..(21): Xaa is A or G or absent
XSRVVMNNSLQEXXXXXXXXXYYVVPLPELKTPAXX

SEQ ID NO: 9304 - protein, 35 aa, Artificial Sequence
  Non-cyclic GFR-binding peptide
  MOD_RES (1)..(3)..(35): Xaa is C or S
XGXARVVMNEYQKYIVNSSDDIFLVSIPSLQTPAX

SEQ ID NO: 9305 - protein, 39 aa, Artificial Sequence
  Non-cyclic GFR-binding peptide
  MOD_RES (1)..(3)..(36)..(37): Xaa is C or S
  MOD_RES (14)..(15)..(16)..(17)..(18): Xaa is A or G
  MOD_RES (19)..(20)..(21)..(22): Xaa is A or G or absent
XKXSRVIMNSLQEXXXXXXXXXYYLITLPELAQPVXXPA

SEQ ID NO: 9306 - protein, 35 aa, Artificial Sequence
  Non-cyclic GFR-binding peptide
  MOD_RES (2)..(4): Xaa is C or S
HXGXARVVMNEYQKYIVNSSDDIFLVSIPSLQTPA

SEQ ID NO: 9307 - protein, 37 aa, Artificial Sequence
  Non-cyclic GFR-binding peptide
  MOD_RES (33)..(34): Xaa is C or S
  MOD_RES (11)..(12)..(13)..(14)..(15): Xaa is A or G
  MOD_RES (16)..(17)..(18)..(19): Xaa is A or G or absent
SKVVMEYQKYXXXXXXXXXIFLISIPSLDQPVXXPSA

SEQ ID NO: 9308 - protein, 39 aa, Artificial Sequence
  Non-cyclic GFR-binding peptide
  MOD_RES (1)..(3)..(36)..(37): Xaa is C or S
  MOD_RES (14)..(15)..(16)..(17)..(18): Xaa is A or G
  MOD_RES (19)..(20)..(21)..(22): Xaa is A or G or absent
XKXSKVVMEYQKYXXXXXXXXXIFLISIPSLDQPVXXPS

SEQ ID NO: 9309 - protein, 39 aa, Artificial Sequence
  Non-cyclic GFR-binding peptide
  MOD_RES (1)..(3)..(37)..(38): Xaa is C or S
  MOD_RES (15)..(16)..(17)..(18)..(19): Xaa is A or G
  MOD_RES (20)..(21)..(22)..(23): Xaa is A or G or absent
XGXSRVVMNNSLQEXXXXXXXXXYYLVTLPELKTPAXXP

SEQ ID NO: 9310 - protein, 33 aa, Artificial Sequence
  Non-cyclic GFR-binding peptide
  MOD_RES (33)..(33): Xaa is C or S
  MOD_RES (11)..(12)..(13)..(14)..(15): Xaa is A or G
  MOD_RES (16)..(17)..(18)..(19): Xaa is A or G or absent
EVVMEEYQKYXXXXXXXXXIFLMSIPSLETPVX

SEQ ID NO: 9311 - protein, 38 aa, Artificial Sequence
  Non-cyclic GFR-binding peptide
  MOD_RES (2)..(36)..(37): Xaa is C or S
  MOD_RES (14)..(15)..(16)..(17)..(18): Xaa is A or G
  MOD_RES (19)..(20)..(21)..(22): Xaa is A or G or absent
GXGEVVMDNSLQEXXXXXXXXXYYLMTLPELETPVXXA

SEQ ID NO: 9312 - protein, 39 aa, Artificial Sequence
  Non-cyclic GFR-binding peptide
  MOD_RES (2)..(36)..(37): Xaa is C or S
  MOD_RES (14)..(15)..(16)..(17)..(18): Xaa is A or G
  MOD_RES (19)..(20)..(21)..(22): Xaa is A or G or absent
GXGEVVMENSLQEXXXXXXXXXYYLMTLPELETPVXXAK

SEQ ID NO: 9313 - protein, 39 aa, Artificial Sequence
  Non-cyclic GFR-binding peptide
  MOD_RES (1)..(3)..(34)..(35): Xaa is C or S
XKXSKVVMNSLQEVKPTRGVYYVIPLPELDQPVXXPSAS

SEQ ID NO: 9314 - protein, 34 aa, Artificial Sequence
  Non-cyclic GFR-binding peptide
  MOD_RES (33)..(34): Xaa is C or S
  MOD_RES (11)..(12)..(13)..(14)..(15): Xaa is A or G
  MOD_RES (16)..(17)..(18)..(19): Xaa is A or G or absent
EVVMENSLQEXXXXXXXXXYYLMTLPELETPVXX

SEQ ID NO: 9315 - protein, 33 aa, Artificial Sequence
  Non-cyclic GFR-binding peptide
  MOD_RES (31)..(32): Xaa is C or S
EVVMDNSLQEVVKENEDYYVMPLPELETPVXXA

SEQ ID NO: 9316 - protein, 40 aa, Artificial Sequence
  Non-cyclic GFR-binding peptide
  MOD_RES (1)..(34)..(35): Xaa is C or S
  MOD_RES (12)..(13)..(14)..(15)..(16): Xaa is A or G
  MOD_RES (17)..(18)..(19)..(20): Xaa is A or G or absent
XSKVVMEYQKYXXXXXXXXXIFLISIPSLDQPVXXPSASA

SEQ ID NO: 9317 - protein, 44 aa, Artificial Sequence
  Non-cyclic GFR-binding peptide
  MOD_RES (2)..(4)..(38)..(39): Xaa is C or S
  MOD_RES (16)..(17)..(18)..(19)..(20): Xaa is A or G
  MOD_RES (21)..(22)..(23)..(24): Xaa is A or G or absent
HXGXSRVVMNEYQKYXXXXXXXXXIFLVSIPSLKTPAXXPKPVY

SEQ ID NO: 9318 - protein, 40 aa, Artificial Sequence
  Non-cyclic GFR-binding peptide
  MOD_RES (2)..(36): Xaa is C or S
  MOD_RES (14)..(15)..(16)..(17)..(18): Xaa is A or G
  MOD_RES (19)..(20)..(21)..(22): Xaa is A or G or absent
GXSRVVMNEYQKYXXXXXXXXXIFLVSIPSLKTPAXTPKT

SEQ ID NO: 9319 - protein, 34 aa, Artificial Sequence
  Non-cyclic GFR-binding peptide
  MOD_RES (34)..(34): Xaa is C or S
  MOD_RES (12)..(13)..(14)..(15)..(16): Xaa is A or G
  MOD_RES (17)..(18)..(19)..(20): Xaa is A or G or absent
GEVVMENSLQEXXXXXXXXXYYVMPLPELETPVX

SEQ ID NO: 9320 - protein, 38 aa, Artificial Sequence
  Non-cyclic GFR-binding peptide
  MOD_RES (2)..(36)..(37): Xaa is C or S
  MOD_RES (14)..(15)..(16)..(17)..(18): Xaa is A or G
  MOD_RES (19)..(20)..(21)..(22): Xaa is A or G or absent
GXSEVVMDNSLQEXXXXXXXXXYYLITLPELRTPVXXT

SEQ ID NO: 9321 - protein, 38 aa, Artificial Sequence
  Non-cyclic GFR-binding peptide
  MOD_RES (1)..(3)..(37)..(38): Xaa is C or S
  MOD_RES (15)..(16)..(17)..(18)..(19): Xaa is A or G
  MOD_RES (20)..(21)..(22)..(23): Xaa is A or G or absent
XGXSRVVMNNSLQEXXXXXXXXXYYLVTLPELKTPAXX

SEQ ID NO: 9322 - protein, 40 aa, Artificial Sequence
  Non-cyclic GFR-binding peptide
  MOD_RES (2)..(4)..(37)..(38): Xaa is C or S
  MOD_RES (15)..(16)..(17)..(18)..(19): Xaa is A or G
  MOD_RES (20)..(21)..(22)..(23): Xaa is A or G or absent
SXKXSRVIMNSLQEXXXXXXXXXYYLITLPELAQPVXXPA

SEQ ID NO: 9323 - protein, 32 aa, Artificial Sequence
  Non-cyclic GFR-binding peptide
  MOD_RES (31)..(32): Xaa is C or S
SKVVMNSLQEVKPTRGVYYVIPLPELDQPVXX

SEQ ID NO: 9324 - protein, 35 aa, Artificial Sequence
  Non-cyclic GFR-binding peptide
  MOD_RES (1)..(34)..(35): Xaa is C or S
  MOD_RES (12)..(13)..(14)..(15)..(16): Xaa is A or G
  MOD_RES (17)..(18)..(19)..(20): Xaa is A or G or absent
XSKVVMEYQKYXXXXXXXXXIFLISIPSLDQPVXX

SEQ ID NO: 9325 - protein, 39 aa, Artificial Sequence
  Non-cyclic GFR-binding peptide
  MOD_RES (1)..(3)..(37)..(38): Xaa is C or S
  MOD_RES (15)..(16)..(17)..(18)..(19): Xaa is A or G
  MOD_RES (20)..(21)..(22)..(23): Xaa is A or G or absent
XGXGEVVMDEYQKYXXXXXXXXXIFLMSIPSLETPVXXA

SEQ ID NO: 9326 - protein, 37 aa, Artificial Sequence
  Non-cyclic GFR-binding peptide
  MOD_RES (34)..(35): Xaa is C or S
  MOD_RES (12)..(13)..(14)..(15)..(16): Xaa is A or G
  MOD_RES (17)..(18)..(19)..(20): Xaa is A or G or absent
SEVVMDRYKKLXXXXXXXXXFYLISIANLRTPVXXTP

SEQ ID NO: 9327 - protein, 34 aa, Artificial Sequence
  Non-cyclic GFR-binding peptide
  MOD_RES (31)..(32): Xaa is C or S
EVVMEEYQKYVVKDYEDIFLMSIPSLETPVXXAK

SEQ ID NO: 9328 - protein, 41 aa, Artificial Sequence
  Non-cyclic GFR-binding peptide
  MOD_RES (1)..(35)..(36): Xaa is C or S
  MOD_RES (13)..(14)..(15)..(16)..(17): Xaa is A or G
  MOD_RES (18)..(19)..(20)..(21): Xaa is A or G or absent
XARVVMNNSLQEXXXXXXXXXYYLVTLPELQTPAXXPKPVT

SEQ ID NO: 9329 - protein, 36 aa, Artificial Sequence
  Non-cyclic GFR-binding peptide
  MOD_RES (31)..(32): Xaa is C or S
SKVVMEYQKYVKPTRGVIFLISIPSLDQPVXXPSAS

SEQ ID NO: 9330 - protein, 32 aa, Artificial Sequence
  Non-cyclic GFR-binding peptide
  MOD_RES (1)..(32): Xaa is C or S
XSKVIMNSLQEIKPTKGIYYVIPLPELDQSVX

SEQ ID NO: 9331 - protein, 42 aa, Artificial Sequence
  Non-cyclic GFR-binding peptide
  MOD_RES (2)..(4)..(38)..(39): Xaa is C or S
  MOD_RES (16)..(17)..(18)..(19)..(20): Xaa is A or G
  MOD_RES (21)..(22)..(23)..(24): Xaa is A or G or absent
HXGXSRVVMNNSLQEXXXXXXXXXYYVVPLPELKTPAXXPKP

SEQ ID NO: 9332 - protein, 37 aa, Artificial Sequence
  Non-cyclic GFR-binding peptide
  MOD_RES (31)..(32): Xaa is C or S
SRVIMEYQKYVKPKRGVIFLISIPSLAQPVXXPAASA

SEQ ID NO: 9333 - protein, 33 aa, Artificial Sequence
  Non-cyclic GFR-binding peptide
  MOD_RES (32)..(32): Xaa is C or S
SRVVMNEYQKYIVNSSDDIFLVSIPSLKTPAXT

SEQ ID NO: 9334 - protein, 32 aa, Artificial Sequence
  Non-cyclic GFR-binding peptide
  MOD_RES (1)..(1): Xaa is C or S
XSRVVMNNSLQEIVNSSDDYYLVTLPELKTPA

SEQ ID NO: 9335 - protein, 35 aa, Artificial Sequence
  Non-cyclic GFR-binding peptide
  MOD_RES (2)..(34): Xaa is C or S
GXSRVVMNNSLQEIVNSSDDYYVVPLPELKTPAXT

SEQ ID NO: 9336 - protein, 40 aa, Artificial Sequence
  Non-cyclic GFR-binding peptide
  MOD_RES (34)..(35): Xaa is C or S
  MOD_RES (12)..(13)..(14)..(15)..(16): Xaa is A or G
  MOD_RES (17)..(18)..(19)..(20): Xaa is A or G or absent
ARVVMNEYQKYXXXXXXXXXIFLVSIPSLQTPAXXPKPVT

SEQ ID NO: 9337 - protein, 35 aa, Artificial Sequence
  Non-cyclic GFR-binding peptide
  MOD_RES (2)..(4): Xaa is C or S
HXGXARVVMNNSLQEIVNSSDDYYLVTLPELQTPA

SEQ ID NO: 9338 - protein, 37 aa, Artificial Sequence
  Non-cyclic GFR-binding peptide
  MOD_RES (34)..(35): Xaa is C or S
  MOD_RES (12)..(13)..(14)..(15)..(16): Xaa is A or G
  MOD_RES (17)..(18)..(19)..(20): Xaa is A or G or absent
GEVVMENSLQEXXXXXXXXXYYLMTLPELETPVXXAK

SEQ ID NO: 9339 - protein, 41 aa, Artificial Sequence
  Non-cyclic GFR-binding peptide
  MOD_RES (2)..(36)..(37): Xaa is C or S
  MOD_RES (14)..(15)..(16)..(17)..(18): Xaa is A or G
  MOD_RES (19)..(20)..(21)..(22): Xaa is A or G or absent
GXARVVMNNSLQEXXXXXXXXXYYLVTLPELQTPAXXPKPV

SEQ ID NO: 9340 - protein, 40 aa, Artificial Sequence
  Non-cyclic GFR-binding peptide
  MOD_RES (2)..(36)..(37): Xaa is C or S
  MOD_RES (14)..(15)..(16)..(17)..(18): Xaa is A or G
  MOD_RES (19)..(20)..(21)..(22): Xaa is A or G or absent
GXARVVMNNSLQEXXXXXXXXXYYVVPLPELQTPAXXPKP

SEQ ID NO: 9341 - protein, 40 aa, Artificial Sequence
  Non-cyclic GFR-binding peptide
  MOD_RES (1)..(3)..(36)..(37): Xaa is C or S
  MOD_RES (14)..(15)..(16)..(17)..(18): Xaa is A or G
  MOD_RES (19)..(20)..(21)..(22): Xaa is A or G or absent
XKXSRVIMNSLQEXXXXXXXXXYYLITLPELAQPVXXPAA

SEQ ID NO: 9342 - protein, 35 aa, Artificial Sequence
  Non-cyclic GFR-binding peptide
  MOD_RES (1)..(3): Xaa is C or S
  MOD_RES (14)..(15)..(16)..(17)..(18): Xaa is A or G
  MOD_RES (19)..(20)..(21)..(22): Xaa is A or G or absent
XKXSKVIMNSLQEXXXXXXXXXYYVIPLPELDQSV

SEQ ID NO: 9343 - protein, 37 aa, Artificial Sequence
  Non-cyclic GFR-binding peptide
  MOD_RES (1)..(32)..(33): Xaa is C or S
XSKVVMNSLQEVKPTRGVYYVIPLPELDQPVXXPSAS

SEQ ID NO: 9344 - protein, 35 aa, Artificial Sequence
  Non-cyclic GFR-binding peptide
  MOD_RES (1)..(3)..(34)..(35): Xaa is C or S
XKXSRVIMNSLQEVKPKRGVYYLITLPELAQPVXX

SEQ ID NO: 9345 - protein, 35 aa, Artificial Sequence
  Non-cyclic GFR-binding peptide
  MOD_RES (34)..(35): Xaa is C or S
  MOD_RES (12)..(13)..(14)..(15)..(16): Xaa is A or G
  MOD_RES (17)..(18)..(19)..(20): Xaa is A or G or absent
GEVVMENSLQEXXXXXXXXXYYVMPLPELETPVXX

SEQ ID NO: 9346 - protein, 36 aa, Artificial Sequence
  Non-cyclic GFR-binding peptide
  MOD_RES (2)..(4)..(36): Xaa is C or S
RXGXGEVVMENSLQEVVKDYEDYYVMPLPELETPVX

SEQ ID NO: 9347 - protein, 42 aa, Artificial Sequence
  Non-cyclic GFR-binding peptide
  MOD_RES (2)..(36)..(37): Xaa is C or S
  MOD_RES (14)..(15)..(16)..(17)..(18): Xaa is A or G
  MOD_RES (19)..(20)..(21)..(22): Xaa is A or G or absent
GXARVVMNNSLQEXXXXXXXXXYYVVPLPELQTPAXXPKPVT

SEQ ID NO: 9348 - protein, 34 aa, Artificial Sequence
  Non-cyclic GFR-binding peptide
  MOD_RES (33)..(34): Xaa is C or S
  MOD_RES (11)..(12)..(13)..(14)..(15): Xaa is A or G
  MOD_RES (16)..(17)..(18)..(19): Xaa is A or G or absent
SKVIMNSLQEXXXXXXXXXYYVIPLPELDQSVXX

SEQ ID NO: 9349 - protein, 35 aa, Artificial Sequence
  Non-cyclic GFR-binding peptide
  MOD_RES (2)..(34)..(35): Xaa is C or S
GXGEVVMDEYQKYVVKENEDIFLMSIPSLETPVXX

SEQ ID NO: 9350 - protein, 39 aa, Artificial Sequence
  Non-cyclic GFR-binding peptide
  MOD_RES (1)..(35): Xaa is C or S
  MOD_RES (13)..(14)..(15)..(16)..(17): Xaa is A or G
  MOD_RES (18)..(19)..(20)..(21): Xaa is A or G or absent
XSRVVMNEYQKYXXXXXXXXXIFLVSIPSLKTPAXTPKT

SEQ ID NO: 9351 - protein, 39 aa, Artificial Sequence
  Non-cyclic GFR-binding peptide
  MOD_RES (1)..(3)..(34)..(35): Xaa is C or S
XKXSKVIMEYQKYIKPTKGIIFLISIPSLDQSVXXPSAS

SEQ ID NO: 9352 - protein, 30 aa, Artificial Sequence; identical to SEQ ID NO: 2133
  Non-cyclic GFR-binding peptide

SEQ ID NO: 9353 - protein, 36 aa, Artificial Sequence
  Non-cyclic GFR-binding peptide
  MOD_RES (34)..(34): Xaa is C or S
  MOD_RES (12)..(13)..(14)..(15)..(16): Xaa is A or G
  MOD_RES (17)..(18)..(19)..(20): Xaa is A or G or absent
SRVVMNNSLQEXXXXXXXXXYYLVTLPELKTPAXTP

SEQ ID NO: 9354 - protein, 39 aa, Artificial Sequence
  Non-cyclic GFR-binding peptide
  MOD_RES (33)..(33): Xaa is C or S
  MOD_RES (11)..(12)..(13)..(14)..(15): Xaa is A or G
  MOD_RES (16)..(17)..(18)..(19): Xaa is A or G or absent
RVVMNNSLQEXXXXXXXXXYYLVTLPELKTPAXTPKTVH

SEQ ID NO: 9355 - protein, 32 aa, Artificial Sequence
  Non-cyclic GFR-binding peptide
  MOD_RES (32)..(32): Xaa is C or S
GEVVMDNSLQEVVKENEDYYLMTLPELETPVX

SEQ ID NO: 9356 - protein, 43 aa, Artificial Sequence
  Non-cyclic GFR-binding peptide
  MOD_RES (1)..(3)..(37)..(38): Xaa is C or S
  MOD_RES (15)..(16)..(17)..(18)..(19): Xaa is A or G
  MOD_RES (20)..(21)..(22)..(23): Xaa is A or G or absent
XGXSRVVMNEYQKYXXXXXXXXXIFLVSIPSLKTPAXXPKPVY

SEQ ID NO: 9357 - protein, 41 aa, Artificial Sequence
  Non-cyclic GFR-binding peptide
  MOD_RES (2)..(4)..(36)..(37): Xaa is C or S
RXGXGEVVMDNSLQEVVKENEDYYVMPLPELETPVXXAKPI

SEQ ID NO: 9358 - protein, 39 aa, Artificial Sequence
  Non-cyclic GFR-binding peptide
  MOD_RES (2)..(4)..(38)..(39): Xaa is C or S
  MOD_RES (16)..(17)..(18)..(19)..(20): Xaa is A or G
  MOD_RES (21)..(22)..(23)..(24): Xaa is A or G or absent
RXGXGEVVMENSLQEXXXXXXXXXYYVMPLPELETPVXX

SEQ ID NO: 9359 - protein, 42 aa, Artificial Sequence
  Non-cyclic GFR-binding peptide
  MOD_RES (2)..(4)..(38)..(39): Xaa is C or S
  MOD_RES (16)..(17)..(18)..(19)..(20): Xaa is A or G
  MOD_RES (21)..(22)..(23)..(24): Xaa is A or G or absent
RXGXGEVVMDNSLQEXXXXXXXXXYYVMPLPELETPVXXAKP

SEQ ID NO: 9360 - protein, 33 aa, Artificial Sequence
  Non-cyclic GFR-binding peptide
  MOD_RES (1)..(33): Xaa is C or S
XARVVMNEYQKYIVNSSDDIFLVSIPSLQTPAX

SEQ ID NO: 9361 - protein, 43 aa, Artificial Sequence
  Non-cyclic GFR-binding peptide
  MOD_RES (2)..(4)..(38)..(39): Xaa is C or S
  MOD_RES (16)..(17)..(18)..(19)..(20): Xaa is A or G
  MOD_RES (21)..(22)..(23)..(24): Xaa is A or G or absent
RXGXGEVVMENSLQEXXXXXXXXXYYLMTLPELETPVXXAKPI

SEQ ID NO: 9362 - protein, 39 aa, Artificial Sequence
  Non-cyclic GFR-binding peptide
  MOD_RES (1)..(3)..(37)..(38): Xaa is C or S
  MOD_RES (15)..(16)..(17)..(18)..(19): Xaa is A or G
  MOD_RES (20)..(21)..(22)..(23): Xaa is A or G or absent
XGXSEVVMDNSLQEXXXXXXXXXYYVIPLPELRTPVXXT

SEQ ID NO: 9363 - protein, 39 aa, Artificial Sequence
  Non-cyclic GFR-binding peptide
  MOD_RES (2)..(4)..(36)..(37): Xaa is C or S
RXGXGEVVMDEYQKYVVKENEDIFLMSIPSLETPVXXAK

SEQ ID NO: 9364 - protein, 41 aa, Artificial Sequence
  Non-cyclic GFR-binding peptide
  MOD_RES (1)..(3)..(37)..(38): Xaa is C or S
  MOD_RES (15)..(16)..(17)..(18)..(19): Xaa is A or G
  MOD_RES (20)..(21)..(22)..(23): Xaa is A or G or absent
XGXGEVVMDNSLQEXXXXXXXXXYYVMPLPELETPVXXAKP

SEQ ID NO: 9365 - protein, 37 aa, Artificial Sequence
  Non-cyclic GFR-binding peptide
  MOD_RES (2)..(4): Xaa is C or S
  MOD_RES (16)..(17)..(18)..(19)..(20): Xaa is A or G
  MOD_RES (21)..(22)..(23)..(24): Xaa is A or G or absent
RXGXGEVVMEEYQKYXXXXXXXXXIFLMSIPSLETPV

SEQ ID NO: 9366 - protein, 35 aa, Artificial Sequence
  Non-cyclic GFR-binding peptide
  MOD_RES (31)..(31): Xaa is C or S
RVVMNNSLQEIVNSSDDYYVVPLPELKTPAXTPKT

SEQ ID NO: 9367 - protein, 42 aa, Artificial Sequence
  Non-cyclic GFR-binding peptide
  MOD_RES (2)..(4)..(36)..(37): Xaa is C or S
RXGXSEVVMDNSLQEVVNNASDYYVIPLPELRTPVXXTPPTS

SEQ ID NO: 9368 - protein, 42 aa, Artificial Sequence
  Non-cyclic GFR-binding peptide
  MOD_RES (2)..(4)..(36)..(37): Xaa is C or S
HXGXSRVVMNNSLQEIVNSSDDYYLVTLPELKTPAXXPKPVY

SEQ ID NO: 9369 - protein, 36 aa, Artificial Sequence
  Non-cyclic GFR-binding peptide
  MOD_RES (1)..(3): Xaa is C or S
  MOD_RES (15)..(16)..(17)..(18)..(19): Xaa is A or G
  MOD_RES (20)..(21)..(22)..(23): Xaa is A or G or absent
XGXSRVVMNNSLQEXXXXXXXXXYYVVPLPELKTPA

SEQ ID NO: 9370 - protein, 40 aa, Artificial Sequence
  Non-cyclic GFR-binding peptide
  MOD_RES (2)..(4)..(38): Xaa is C or S
  MOD_RES (16)..(17)..(18)..(19)..(20): Xaa is A or G
  MOD_RES (21)..(22)..(23)..(24): Xaa is A or G or absent
HXGXSRVVMNNSLQEXXXXXXXXXYYVVPLPELKTPAXTP

SEQ ID NO: 9371 - protein, 38 aa, Artificial Sequence
  Non-cyclic GFR-binding peptide
  MOD_RES (2)..(34)..(35): Xaa is C or S
GXGEVVMEEYQKYVVKDYEDIFLMSIPSLETPVXXAKP

SEQ ID NO: 9372 - protein, 35 aa, Artificial Sequence
  Non-cyclic GFR-binding peptide
  MOD_RES (1)..(3)..(35): Xaa is C or S
XGXSRVVMNNSLQEIVNSSDDYYVVPLPELKTPAX

SEQ ID NO: 9373 - protein, 35 aa, Artificial Sequence
  Non-cyclic GFR-binding peptide
  MOD_RES (1)..(33)..(34): Xaa is C or S
XARVVMNNSLQEIVNSSDDYYVVPLPELQTPAXXP

SEQ ID NO: 9374 - protein, 38 aa, Artificial Sequence
  Non-cyclic GFR-binding peptide
  MOD_RES (1)..(3)..(35): Xaa is C or S
XGXSRVVMNEYQKYIVNSSDDIFLVSIPSLKTPAXTPK

SEQ ID NO: 9375 - protein, 40 aa, Artificial Sequence
  Non-cyclic GFR-binding peptide
  MOD_RES (2)..(34)..(35): Xaa is C or S
GXSRVVMNNSLQEIVNSSDDYYLVTLPELKTPAXXPKPVY

SEQ ID NO: 9376 - protein, 40 aa, Artificial Sequence
  Non-cyclic GFR-binding peptide
  MOD_RES (1)..(3)..(37)..(38): Xaa is C or S
  MOD_RES (15)..(16)..(17)..(18)..(19): Xaa is A or G
  MOD_RES (20)..(21)..(22)..(23): Xaa is A or G or absent
XGXGEVVMEEYQKYXXXXXXXXXIFLMSIPSLETPVXXAK

SEQ ID NO: 9377 - protein, 36 aa, Artificial Sequence
  Non-cyclic GFR-binding peptide
  MOD_RES (1)..(34)..(35): Xaa is C or S
  MOD_RES (12)..(13)..(14)..(15)..(16): Xaa is A or G
  MOD_RES (17)..(18)..(19)..(20): Xaa is A or G or absent
XSRVIMNSLQEXXXXXXXXXYYLITLPELAQPVXXP

SEQ ID NO: 9378 - protein, 37 aa, Artificial Sequence
  Non-cyclic GFR-binding peptide
  MOD_RES (1)..(33)..(34): Xaa is C or S
XGEVVMENSLQEVVKDYEDYYVMPLPELETPVXXAKP

SEQ ID NO: 9379 - protein, 40 aa, Artificial Sequence
  Non-cyclic GFR-binding peptide
  MOD_RES (1)..(3)..(34)..(35): Xaa is C or S
XKXSKVVMNSLQEVKPTRGVYYVIPLPELDQPVXXPSASA

SEQ ID NO: 9380 - protein, 35 aa, Artificial Sequence
  Non-cyclic GFR-binding peptide
  MOD_RES (1)..(3)..(35): Xaa is C or S
XGXSRVVMNEYQKYIVNSSDDIFLVSIPSLKTPAX

SEQ ID NO: 9381 - protein, 32 aa, Artificial Sequence
  Non-cyclic GFR-binding peptide
  MOD_RES (31)..(32): Xaa is C or S
EVVMEEYQKYVVKDYEDIFLMSIPSLETPVXX

SEQ ID NO: 9382 - protein, 39 aa, Artificial Sequence
  Non-cyclic GFR-binding peptide
  MOD_RES (2)..(4)..(37)..(38): Xaa is C or S
  MOD_RES (15)..(16)..(17)..(18)..(19): Xaa is A or G
  MOD_RES (20)..(21)..(22)..(23): Xaa is A or G or absent
SXKXSKVIMEYQKYXXXXXXXXXIFLISIPSLDQSVXXP

SEQ ID NO: 9383 - protein, 38 aa, Artificial Sequence
  Non-cyclic GFR-binding peptide
  MOD_RES (2)..(33)..(34): Xaa is C or S
KXSRVIMNSLQEVKPKRGVYYLITLPELAQPVXXPAAS

SEQ ID NO: 9384 - protein, 37 aa, Artificial Sequence
  Non-cyclic GFR-binding peptide
  MOD_RES (2)..(4): Xaa is C or S
  MOD_RES (16)..(17)..(18)..(19)..(20): Xaa is A or G
  MOD_RES (21)..(22)..(23)..(24): Xaa is A or G or absent
HXGXARVVMNNSLQEXXXXXXXXXYYLVTLPELQTPA

SEQ ID NO: 9385 - protein, 35 aa, Artificial Sequence
  Non-cyclic GFR-binding peptide
  MOD_RES (1)..(3)..(35): Xaa is C or S
XGXSEVVMDQYNKLVVNNASDLYLISIASLRTPVX

SEQ ID NO: 9386 - protein, 37 aa, Artificial Sequence
  Non-cyclic GFR-binding peptide
  MOD_RES (33)..(34): Xaa is C or S
  MOD_RES (11)..(12)..(13)..(14)..(15): Xaa is A or G
  MOD_RES (16)..(17)..(18)..(19): Xaa is A or G or absent
EVVMDEYQKYXXXXXXXXXIFLMSIPSLETPVXXAKP

SEQ ID NO: 9387 - protein, 39 aa, Artificial Sequence
  Non-cyclic GFR-binding peptide
  MOD_RES (33)..(34): Xaa is C or S
  MOD_RES (11)..(12)..(13)..(14)..(15): Xaa is A or G
  MOD_RES (16)..(17)..(18)..(19): Xaa is A or G or absent
EVVMDNSLQEXXXXXXXXXYYVIPLPELRTPVXXTPPTS

SEQ ID NO: 9388 - protein, 40 aa, Artificial Sequence
  Non-cyclic GFR-binding peptide
  MOD_RES (1)..(3)..(36)..(37): Xaa is C or S
  MOD_RES (14)..(15)..(16)..(17)..(18): Xaa is A or G
  MOD_RES (19)..(20)..(21)..(22): Xaa is A or G or absent
XKXSKVVMEYQKYXXXXXXXXXIFLISIPSLDQPVXXPSA

SEQ ID NO: 9389 - protein, 42 aa, Artificial Sequence
  Non-cyclic GFR-binding peptide
  MOD_RES (2)..(36)..(37): Xaa is C or S
  MOD_RES (14)..(15)..(16)..(17)..(18): Xaa is A or G
  MOD_RES (19)..(20)..(21)..(22): Xaa is A or G or absent
GXGEVVMDEYQKYXXXXXXXXXIFLMSIPSLETPVXXAKPIK

SEQ ID NO: 9390 - protein, 31 aa, Artificial Sequence
  Non-cyclic GFR-binding peptide
  MOD_RES (1)..(1): Xaa is C or S
XSKVIMEYQKYIKPTKGIIFLISIPSLDQSV

SEQ ID NO: 9391 - protein, 36 aa, Artificial Sequence
  Non-cyclic GFR-binding peptide
  MOD_RES (1)..(35): Xaa is C or S
  MOD_RES (13)..(14)..(15)..(16)..(17): Xaa is A or G
  MOD_RES (18)..(19)..(20)..(21): Xaa is A or G or absent
XSRVVMNNSLQEXXXXXXXXXYYLVTLPELKTPAXT

SEQ ID NO: 9392 - protein, 37 aa, Artificial Sequence
  Non-cyclic GFR-binding peptide
  MOD_RES (32)..(33): Xaa is C or S
SRVVMNNSLQEIVNSSDDYYLVTLPELKTPAXXPKPV

SEQ ID NO: 9393 - protein, 37 aa, Artificial Sequence
  Non-cyclic GFR-binding peptide
  MOD_RES (2)..(4): Xaa is C or S
  MOD_RES (16)..(17)..(18)..(19)..(20): Xaa is A or G
  MOD_RES (21)..(22)..(23)..(24): Xaa is A or G or absent
RXGXGEVVMDNSLQEXXXXXXXXXYYLMTLPELETPV

SEQ ID NO: 9394 - protein, 36 aa, Artificial Sequence
  Non-cyclic GFR-binding peptide
  MOD_RES (2)..(34)..(35): Xaa is C or S
GXGEVVMDEYQKYVVKENEDIFLMSIPSLETPVXXA

SEQ ID NO: 9395 - protein, 37 aa, Artificial Sequence
  Non-cyclic GFR-binding peptide
  MOD_RES (2)..(33)..(34): Xaa is C or S
KXSKVVMNSLQEVKPTRGVYYVIPLPELDQPVXXPSA

SEQ ID NO: 9396 - protein, 35 aa, Artificial Sequence
  Non-cyclic GFR-binding peptide
  MOD_RES (1)..(35): Xaa is C or S
  MOD_RES (13)..(14)..(15)..(16)..(17): Xaa is A or G
  MOD_RES (18)..(19)..(20)..(21): Xaa is A or G or absent
XSRVVMNNSLQEXXXXXXXXXYYVVPLPELKTPAX

SEQ ID NO: 9397 - protein, 34 aa, Artificial Sequence
  Non-cyclic GFR-binding peptide
  MOD_RES (1)..(34): Xaa is C or S
  MOD_RES (12)..(13)..(14)..(15)..(16): Xaa is A or G
  MOD_RES (17)..(18)..(19)..(20): Xaa is A or G or absent
XSKVIMNSLQEXXXXXXXXXYYVIPLPELDQSVX

SEQ ID NO: 9398 - protein, 34 aa, Artificial Sequence
  Non-cyclic GFR-binding peptide
  MOD_RES (31)..(32): Xaa is C or S
SRVIMNSLQEVKPKRGVYYLITLPELAQPVXXPA

SEQ ID NO: 9399 - protein, 41 aa, Artificial Sequence
  Non-cyclic GFR-binding peptide
  MOD_RES (2)..(36): Xaa is C or S
  MOD_RES (14)..(15)..(16)..(17)..(18): Xaa is A or G
  MOD_RES (19)..(20)..(21)..(22): Xaa is A or G or absent
GXSRVVMNNSLQEXXXXXXXXXYYVVPLPELKTPAXTPKTV

SEQ ID NO: 9400 - protein, 37 aa, Artificial Sequence
  Non-cyclic GFR-binding peptide
  MOD_RES (1)..(33)..(34): Xaa is C or S
XSEVVMDQYNKLVVNNASDLYLISIASLRTPVXXTPP

SEQ ID NO: 9401 - protein, 39 aa, Artificial Sequence
  Non-cyclic GFR-binding peptide
  MOD_RES (33)..(34): Xaa is C or S
  MOD_RES (11)..(12)..(13)..(14)..(15): Xaa is A or G
  MOD_RES (16)..(17)..(18)..(19): Xaa is A or G or absent
EVVMDRYKKLXXXXXXXXXFYLISIANLRTPVXXTPPTS

SEQ ID NO: 9402 - protein, 40 aa, Artificial Sequence
  Non-cyclic GFR-binding peptide
  MOD_RES (1)..(34)..(35): Xaa is C or S
  MOD_RES (12)..(13)..(14)..(15)..(16): Xaa is A or G
  MOD_RES (17)..(18)..(19)..(20): Xaa is A or G or absent
XSRVIMEYQKYXXXXXXXXXIFLISIPSLAQPVXXPAASA

SEQ ID NO: 9403 - protein, 36 aa, Artificial Sequence
  Non-cyclic GFR-binding peptide
  MOD_RES (1)..(33)..(34): Xaa is C or S
XSRVVMNNSLQEIVNSSDDYYLVTLPELKTPAXXPK

SEQ ID NO: 9404 - protein, 39 aa, Artificial Sequence
  Non-cyclic GFR-binding peptide
  MOD_RES (1)..(33)..(34): Xaa is C or S
XARVVMNNSLQEIVNSSDDYYLVTLPELQTPAXXPKPVT

SEQ ID NO: 9405 - protein, 35 aa, Artificial Sequence
  Non-cyclic GFR-binding peptide
  MOD_RES (2)..(35): Xaa is C or S
  MOD_RES (13)..(14)..(15)..(16)..(17): Xaa is A or G
  MOD_RES (18)..(19)..(20)..(21): Xaa is A or G or absent
KXSKVVMNSLQEXXXXXXXXXYYVIPLPELDQPVX

SEQ ID NO: 9406 - protein, 36 aa, Artificial Sequence
  Non-cyclic GFR-binding peptide
  MOD_RES (33)..(34): Xaa is C or S
  MOD_RES (11)..(12)..(13)..(14)..(15): Xaa is A or G
  MOD_RES (16)..(17)..(18)..(19): Xaa is A or G or absent
RVVMNNSLQEXXXXXXXXXYYVVPLPELKTPAXXPK

SEQ ID NO: 9407 - protein, 39 aa, Artificial Sequence
  Non-cyclic GFR-binding peptide
  MOD_RES (2)..(34)..(35): Xaa is C or S
GXGEVVMENSLQEVVKDYEDYYLMTLPELETPVXXAKPI

SEQ ID NO: 9408 - protein, 35 aa, Artificial Sequence
  Non-cyclic GFR-binding peptide
  MOD_RES (2)..(2): Xaa is C or S
  MOD_RES (14)..(15)..(16)..(17)..(18): Xaa is A or G
  MOD_RES (19)..(20)..(21)..(22): Xaa is A or G or absent
GXSRVVMNNSLQEXXXXXXXXXYYLVTLPELKTPA

SEQ ID NO: 9409 - protein, 37 aa, Artificial Sequence
  Non-cyclic GFR-binding peptide
  MOD_RES (2)..(36): Xaa is C or S
  MOD_RES (14)..(15)..(16)..(17)..(18): Xaa is A or G
  MOD_RES (19)..(20)..(21)..(22): Xaa is A or G or absent
GXSRVVMNNSLQEXXXXXXXXXYYLVTLPELKTPAXT

SEQ ID NO: 9410 - protein, 37 aa, Artificial Sequence
  Non-cyclic GFR-binding peptide
  MOD_RES (2)..(4)..(36)..(37): Xaa is C or S
HXGXSRVVMNNSLQEIVNSSDDYYVVPLPELKTPAXX

SEQ ID NO: 9411 - protein, 40 aa, Artificial Sequence
  Non-cyclic GFR-binding peptide
  MOD_RES (1)..(3)..(35)..(36): Xaa is C or S
XGXSEVVMDNSLQEVVNNASDYYVIPLPELRTPVXXTPPT

SEQ ID NO: 9412 - protein, 36 aa, Artificial Sequence
  Non-cyclic GFR-binding peptide
  MOD_RES (33)..(34): Xaa is C or S
  MOD_RES (11)..(12)..(13)..(14)..(15): Xaa is A or G
  MOD_RES (16)..(17)..(18)..(19): Xaa is A or G or absent
EVVMDNSLQEXXXXXXXXXYYLMTLPELETPVXXAK

SEQ ID NO: 9413 - protein, 35 aa, Artificial Sequence
  Non-cyclic GFR-binding peptide
  MOD_RES (1)..(3)..(35): Xaa is C or S
XGXSEVVMDNSLQEVVNNASDYYLITLPELRTPVX

SEQ ID NO: 9414 - protein, 35 aa, Artificial Sequence
  Non-cyclic GFR-binding peptide
  MOD_RES (34)..(34): Xaa is C or S
  MOD_RES (12)..(13)..(14)..(15)..(16): Xaa is A or G
  MOD_RES (17)..(18)..(19)..(20): Xaa is A or G or absent
SRVVMNNSLQEXXXXXXXXXYYVVPLPELKTPAXT

SEQ ID NO: 9415 - protein, 40 aa, Artificial Sequence
  Non-cyclic GFR-binding peptide
  MOD_RES (2)..(36)..(37): Xaa is C or S
  MOD_RES (14)..(15)..(16)..(17)..(18): Xaa is A or G
  MOD_RES (19)..(20)..(21)..(22): Xaa is A or G or absent
GXGEVVMENSLQEXXXXXXXXXYYLMTLPELETPVXXAKP

SEQ ID NO: 9416 - protein, 36 aa, Artificial Sequence
  Non-cyclic GFR-binding peptide
  MOD_RES (31)..(32): Xaa is C or S
SRVIMEYQKYVKPKRGVIFLISIPSLAQPVXXPAAS

SEQ ID NO: 9417 - protein, 41 aa, Artificial Sequence
  Non-cyclic GFR-binding peptide
  MOD_RES (2)..(4)..(36)..(37): Xaa is C or S
HXGXARVVMNEYQKYIVNSSDDIFLVSIPSLQTPAXXPKPV

SEQ ID NO: 9418 - protein, 40 aa, Artificial Sequence
  Non-cyclic GFR-binding peptide
  MOD_RES (1)..(3)..(34)..(35): Xaa is C or S
XKXSKVIMEYQKYIKPTKGIIFLISIPSLDQSVXXPSASA

SEQ ID NO: 9419 - protein, 42 aa, Artificial Sequence
  Non-cyclic GFR-binding peptide
  MOD_RES (1)..(3)..(36)..(37): Xaa is C or S
  MOD_RES (14)..(15)..(16)..(17)..(18): Xaa is A or G
  MOD_RES (19)..(20)..(21)..(22): Xaa is A or G or absent
XKXSKVVMNSLQEXXXXXXXXXYYVIPLPELDQPVXXPSASA

SEQ ID NO: 9420 - protein, 41 aa, Artificial Sequence
  Non-cyclic GFR-binding peptide
  MOD_RES (2)..(4)..(38)..(39): Xaa is C or S
  MOD_RES (16)..(17)..(18)..(19)..(20): Xaa is A or G
  MOD_RES (21)..(22)..(23)..(24): Xaa is A or G or absent
RXGXSEVVMDQYNKLXXXXXXXXXLYLISIASLRTPVXXTP

SEQ ID NO: 9421 - protein, 37 aa, Artificial Sequence
  Non-cyclic GFR-binding peptide
  MOD_RES (34)..(35): Xaa is C or S
  MOD_RES (12)..(13)..(14)..(15)..(16): Xaa is A or G
  MOD_RES (17)..(18)..(19)..(20): Xaa is A or G or absent
GEVVMEEYQKYXXXXXXXXXIFLMSIPSLETPVXXAK

SEQ ID NO: 9422 - protein, 40 aa, Artificial Sequence
  Non-cyclic GFR-binding peptide
  MOD_RES (1)..(3)..(34)..(35): Xaa is C or S
XKXSKVIMNSLQEIKPTKGIYYVIPLPELDQSVXXPSASA

SEQ ID NO: 9423 - protein, 36 aa, Artificial Sequence
  Non-cyclic GFR-binding peptide
  MOD_RES (33)..(34): Xaa is C or S
  MOD_RES (11)..(12)..(13)..(14)..(15): Xaa is A or G
  MOD_RES (16)..(17)..(18)..(19): Xaa is A or G or absent
EVVMDNSLQEXXXXXXXXXYYVMPLPELETPVXXAK

SEQ ID NO: 9424 - protein, 38 aa, Artificial Sequence
  Non-cyclic GFR-binding peptide
  MOD_RES (33)..(34): Xaa is C or S
  MOD_RES (11)..(12)..(13)..(14)..(15): Xaa is A or G
  MOD_RES (16)..(17)..(18)..(19): Xaa is A or G or absent
SRVIMNSLQEXXXXXXXXXYYLITLPELAQPVXXPAAS

SEQ ID NO: 9425 - protein, 35 aa, Artificial Sequence
  Non-cyclic GFR-binding peptide
  MOD_RES (32)..(33): Xaa is C or S
GEVVMENSLQEVVKDYEDYYLMTLPELETPVXXAK

SEQ ID NO: 9426 - protein, 36 aa, Artificial Sequence
  Non-cyclic GFR-binding peptide
  MOD_RES (33)..(34): Xaa is C or S
  MOD_RES (11)..(12)..(13)..(14)..(15): Xaa is A or G
  MOD_RES (16)..(17)..(18)..(19): Xaa is A or G or absent
RVVMNNSLQEXXXXXXXXXYYLVTLPELKTPAXXPK

SEQ ID NO: 9427 - protein, 35 aa, Artificial Sequence
  Non-cyclic GFR-binding peptide
  MOD_RES (2)..(4)..(35): Xaa is C or S
SXKXSKVIMEYQKYIKPTKGIIFLISIPSLDQSVX

SEQ ID NO: 9428 - protein, 37 aa, Artificial Sequence
  Non-cyclic GFR-binding peptide
  MOD_RES (2)..(35)..(36): Xaa is C or S
  MOD_RES (13)..(14)..(15)..(16)..(17): Xaa is A or G
  MOD_RES (18)..(19)..(20)..(21): Xaa is A or G or absent
KXSKVVMEYQKYXXXXXXXXXIFLISIPSLDQPVXXP

SEQ ID NO: 9429 - protein, 33 aa, Artificial Sequence
  Non-cyclic GFR-binding peptide
  MOD_RES (1)..(3): Xaa is C or S
XKXSRVIMEYQKYVKPKRGVIFLISIPSLAQPV

SEQ ID NO: 9430 - protein, 35 aa, Artificial Sequence
  Non-cyclic GFR-binding peptide
  MOD_RES (31)..(32): Xaa is C or S
EVVMDQYNKLVVNNASDLYLISIASLRTPVXXTPP

SEQ ID NO: 9431 - protein, 38 aa, Artificial Sequence
  Non-cyclic GFR-binding peptide
  MOD_RES (1)..(3)..(36)..(37): Xaa is C or S
  MOD_RES (14)..(15)..(16)..(17)..(18): Xaa is A or G
  MOD_RES (19)..(20)..(21)..(22): Xaa is A or G or absent
XKXSKVIMEYQKYXXXXXXXXXIFLISIPSLDQSVXXP

SEQ ID NO: 9432 - protein, 36 aa, Artificial Sequence
  Non-cyclic GFR-binding peptide
  MOD_RES (2)..(4): Xaa is C or S
  MOD_RES (15)..(16)..(17)..(18)..(19): Xaa is A or G
  MOD_RES (20)..(21)..(22)..(23): Xaa is A or G or absent
SXKXSKVIMEYQKYXXXXXXXXXIFLISIPSLDQSV

SEQ ID NO: 9433 - protein, 37 aa, Artificial Sequence
  Non-cyclic GFR-binding peptide
  MOD_RES (1)..(35)..(36): Xaa is C or S
  MOD_RES (13)..(14)..(15)..(16)..(17): Xaa is A or G
  MOD_RES (18)..(19)..(20)..(21): Xaa is A or G or absent
XSRVVMNEYQKYXXXXXXXXXIFLVSIPSLKTPAXXP

SEQ ID NO: 9434 - protein, 35 aa, Artificial Sequence
  Non-cyclic GFR-binding peptide
  MOD_RES (2)..(4): Xaa is C or S
HXGXARVVMNNSLQEIVNSSDDYYVVPLPELQTPA

SEQ ID NO: 9435 - protein, 32 aa, Artificial Sequence
  Non-cyclic GFR-binding peptide
  MOD_RES (11)..(12)..(13)..(14)..(15): Xaa is A or G
  MOD_RES (16)..(17)..(18)..(19): Xaa is A or G or absent
EVVMEEYQKYXXXXXXXXXIFLMSIPSLETPV

SEQ ID NO: 9436 - protein, 36 aa, Artificial Sequence
  Non-cyclic GFR-binding peptide
  MOD_RES (1)..(32)..(33): Xaa is C or S
XSKVIMEYQKYIKPTKGIIFLISIPSLDQSVXXPSA

SEQ ID NO: 9437 - protein, 36 aa, Artificial Sequence
  Non-cyclic GFR-binding peptide
  MOD_RES (1)..(3): Xaa is C or S
  MOD_RES (15)..(16)..(17)..(18)..(19): Xaa is A or G
  MOD_RES (20)..(21)..(22)..(23): Xaa is A or G or absent
XGXARVVMNNSLQEXXXXXXXXXYYVVPLPELQTPA

SEQ ID NO: 9438 - protein, 36 aa, Artificial Sequence
  Non-cyclic GFR-binding peptide
  MOD_RES (33)..(34): Xaa is C or S
  MOD_RES (11)..(12)..(13)..(14)..(15): Xaa is A or G
  MOD_RES (16)..(17)..(18)..(19): Xaa is A or G or absent
RVVMNEYQKYXXXXXXXXXIFLVSIPSLQTPAXXPK

SEQ ID NO: 9439 - protein, 36 aa, Artificial Sequence
  Non-cyclic GFR-binding peptide
  MOD_RES (34)..(35): Xaa is C or S
  MOD_RES (12)..(13)..(14)..(15)..(16): Xaa is A or G
  MOD_RES (17)..(18)..(19)..(20): Xaa is A or G or absent
ARVVMNEYQKYXXXXXXXXXIFLVSIPSLQTPAXXP

SEQ ID NO: 9440 - protein, 38 aa, Artificial Sequence
  Non-cyclic GFR-binding peptide
  MOD_RES (2)..(34)..(35): Xaa is C or S
GXSRVVMNEYQKYIVNSSDDIFLVSIPSLKTPAXXPKP

SEQ ID NO: 9441 - protein, 32 aa, Artificial Sequence
  Non-cyclic GFR-binding peptide
  MOD_RES (11)..(12)..(13)..(14)..(15): Xaa is A or G
  MOD_RES (16)..(17)..(18)..(19): Xaa is A or G or absent
SRVIMEYQKYXXXXXXXXXIFLISIPSLAQPV

SEQ ID NO: 9442 - protein, 41 aa, Artificial Sequence
  Non-cyclic GFR-binding peptide
  MOD_RES (2)..(36)..(37): Xaa is C or S
  MOD_RES (14)..(15)..(16)..(17)..(18): Xaa is A or G
  MOD_RES (19)..(20)..(21)..(22): Xaa is A or G or absent
GXGEVVMDNSLQEXXXXXXXXXYYVMPLPELETPVXXAKPI

SEQ ID NO: 9443 - protein, 38 aa, Artificial Sequence
  Non-cyclic GFR-binding peptide
  MOD_RES (1)..(3)..(37)..(38): Xaa is C or S
  MOD_RES (15)..(16)..(17)..(18)..(19): Xaa is A or G
  MOD_RES (20)..(21)..(22)..(23): Xaa is A or G or absent
XGXGEVVMDEYQKYXXXXXXXXXIFLMSIPSLETPVXX

SEQ ID NO: 9444 - protein, 39 aa, Artificial Sequence
  Non-cyclic GFR-binding peptide
  MOD_RES (1)..(33): Xaa is C or S
XSRVVMNEYQKYIVNSSDDIFLVSIPSLKTPAXTPKTVH

SEQ ID NO: 9445 - protein, 42 aa, Artificial Sequence
  Non-cyclic GFR-binding peptide
  MOD_RES (1)..(3)..(37)..(38): Xaa is C or S
  MOD_RES (15)..(16)..(17)..(18)..(19): Xaa is A or G
  MOD_RES (20)..(21)..(22)..(23): Xaa is A or G or absent
XGXSEVVMDNSLQEXXXXXXXXXYYLITLPELRTPVXXTPPT

SEQ ID NO: 9446 - protein, 36 aa, Artificial Sequence
  Non-cyclic GFR-binding peptide
  MOD_RES (2)..(4)..(36): Xaa is C or S
RXGXGEVVMENSLQEVVKDYEDYYLMTLPELETPVX

SEQ ID NO: 9447 - protein, 42 aa, Artificial Sequence
  Non-cyclic GFR-binding peptide
  MOD_RES (2)..(4)..(36)..(37): Xaa is C or S
RXGXGEVVMDEYQKYVVKENEDIFLMSIPSLETPVXXAKPIK

SEQ ID NO: 9448 - protein, 39 aa, Artificial Sequence
  Non-cyclic GFR-binding peptide
  MOD_RES (2)..(4)..(35)..(36): Xaa is C or S
SXKXSRVIMEYQKYVKPKRGVIFLISIPSLAQPVXXPAA

SEQ ID NO: 9449 - protein, 38 aa, Artificial Sequence
  Non-cyclic GFR-binding peptide
  MOD_RES (2)..(4)..(37)..(38): Xaa is C or S
  MOD_RES (15)..(16)..(17)..(18)..(19): Xaa is A or G
  MOD_RES (20)..(21)..(22)..(23): Xaa is A or G or absent
SXKXSKVIMNSLQEXXXXXXXXXYYVIPLPELDQSVXX

SEQ ID NO: 9450 - protein, 33 aa, Artificial Sequence
  Non-cyclic GFR-binding peptide
  MOD_RES (1)..(1): Xaa is C or S
  MOD_RES (12)..(13)..(14)..(15)..(16): Xaa is A or G
  MOD_RES (17)..(18)..(19)..(20): Xaa is A or G or absent
XSKVIMNSLQEXXXXXXXXXYYVIPLPELDQSV

SEQ ID NO: 9451 - protein, 38 aa, Artificial Sequence
  Non-cyclic GFR-binding peptide
  MOD_RES (1)..(33)..(34): Xaa is C or S
XSEVVMDNSLQEVVNNASDYYVIPLPELRTPVXXTPPT

SEQ ID NO: 9452 - protein, 38 aa, Artificial Sequence
  Non-cyclic GFR-binding peptide
  MOD_RES (2)..(4)..(37)..(38): Xaa is C or S
  MOD_RES (15)..(16)..(17)..(18)..(19): Xaa is A or G
  MOD_RES (20)..(21)..(22)..(23): Xaa is A or G or absent
SXKXSKVVMEYQKYXXXXXXXXXIFLISIPSLDQPVXX

SEQ ID NO: 9453 - protein, 33 aa, Artificial Sequence
  Non-cyclic GFR-binding peptide
  MOD_RES (32)..(33): Xaa is C or S
ARVVMNNSLQEIVNSSDDYYLVTLPELQTPAXX

SEQ ID NO: 9454 - protein, 37 aa, Artificial Sequence
  Non-cyclic GFR-binding peptide
  MOD_RES (1)..(3)..(35)..(36): Xaa is C or S
XGXGEVVMENSLQEVVKDYEDYYVMPLPELETPVXXA

SEQ ID NO: 9455 - protein, 32 aa, Artificial Sequence
  Non-cyclic GFR-binding peptide
  MOD_RES (32)..(32): Xaa is C or S
SEVVMDQYNKLVVNNASDLYLISIASLRTPVX

SEQ ID NO: 9456 - protein, 37 aa, Artificial Sequence
  Non-cyclic GFR-binding peptide
  MOD_RES (32)..(33): Xaa is C or S
ARVVMNNSLQEIVNSSDDYYLVTLPELQTPAXXPKPV

SEQ ID NO: 9457 - protein, 37 aa, Artificial Sequence
  Non-cyclic GFR-binding peptide
  MOD_RES (2)..(4): Xaa is C or S
  MOD_RES (16)..(17)..(18)..(19)..(20): Xaa is A or G
  MOD_RES (21)..(22)..(23)..(24): Xaa is A or G or absent
RXGXGEVVMENSLQEXXXXXXXXXYYLMTLPELETPV

SEQ ID NO: 9458 - protein, 42 aa, Artificial Sequence
  Non-cyclic GFR-binding peptide
  MOD_RES (1)..(3)..(37)..(38): Xaa is C or S
  MOD_RES (15)..(16)..(17)..(18)..(19): Xaa is A or G
  MOD_RES (20)..(21)..(22)..(23): Xaa is A or G or absent
XGXGEVVMEEYQKYXXXXXXXXXIFLMSIPSLETPVXXAKPI

SEQ ID NO: 9459 - protein, 35 aa, Artificial Sequence
  Non-cyclic GFR-binding peptide
  MOD_RES (2)..(34)..(35): Xaa is C or S
GXGEVVMENSLQEVVKDYEDYYLMTLPELETPVXX

SEQ ID NO: 9460 - protein, 37 aa, Artificial Sequence
  Non-cyclic GFR-binding peptide
  MOD_RES (1)..(33)..(34): Xaa is C or S
XARVVMNNSLQEIVNSSDDYYVVPLPELQTPAXXPKP

SEQ ID NO: 9461 - protein, 39 aa, Artificial Sequence
  Non-cyclic GFR-binding peptide
  MOD_RES (1)..(33)..(34): Xaa is C or S
XSEVVMDNSLQEVVNNASDYYLITLPELRTPVXXTPPTS

SEQ ID NO: 9462 - protein, 36 aa, Artificial Sequence
  Non-cyclic GFR-binding peptide
  MOD_RES (1)..(3)..(34)..(35): Xaa is C or S
XKXSRVIMEYQKYVKPKRGVIFLISIPSLAQPVXXP

SEQ ID NO: 9463 - protein, 39 aa, Artificial Sequence
  Non-cyclic GFR-binding peptide
  MOD_RES (33)..(34): Xaa is C or S
  MOD_RES (11)..(12)..(13)..(14)..(15): Xaa is A or G
  MOD_RES (16)..(17)..(18)..(19): Xaa is A or G or absent
EVVMDNSLQEXXXXXXXXXYYLITLPELRTPVXXTPPTS

SEQ ID NO: 9464 - protein, 37 aa, Artificial Sequence
  Non-cyclic GFR-binding peptide
  MOD_RES (33)..(34): Xaa is C or S
  MOD_RES (11)..(12)..(13)..(14)..(15): Xaa is A or G
  MOD_RES (16)..(17)..(18)..(19): Xaa is A or G or absent
EVVMENSLQEXXXXXXXXXYYLMTLPELETPVXXAKP

SEQ ID NO: 9465 - protein, 30 aa, Artificial Sequence
  Non-cyclic GFR-binding peptide
EVVMEEYQKYVVKDYEDIFLMSIPSLETPV

SEQ ID NO: 9466 - protein, 38 aa, Artificial Sequence
  Non-cyclic GFR-binding peptide
  MOD_RES (2)..(34)..(35): Xaa is C or S
GXGEVVMENSLQEVVKDYEDYYVMPLPELETPVXXAKP

SEQ ID NO: 9467 - protein, 36 aa, Artificial Sequence
  Non-cyclic GFR-binding peptide
  MOD_RES (2)..(35)..(36): Xaa is C or S
  MOD_RES (13)..(14)..(15)..(16)..(17): Xaa is A or G
  MOD_RES (18)..(19)..(20)..(21): Xaa is A or G or absent
KXSKVIMNSLQEXXXXXXXXXYYVIPLPELDQSVXX

SEQ ID NO: 9468 - protein, 37 aa, Artificial Sequence
  Non-cyclic GFR-binding peptide
  MOD_RES (2)..(34)..(35): Xaa is C or S
GXSEVVMDQYNKLVVNNASDLYLISIASLRTPVXXTP

SEQ ID NO: 9469 - protein, 33 aa, Artificial Sequence
  Non-cyclic GFR-binding peptide
  MOD_RES (31)..(31): Xaa is C or S
RVVMNEYQKYIVNSSDDIFLVSIPSLKTPAXTP

SEQ ID NO: 9470 - protein, 41 aa, Artificial Sequence
  Non-cyclic GFR-binding peptide
  MOD_RES (1)..(3)..(35)..(36): Xaa is C or S
XGXGEVVMEEYQKYVVKDYEDIFLMSIPSLETPVXXAKPIS

SEQ ID NO: 9471 - protein, 43 aa, Artificial Sequence
  Non-cyclic GFR-binding peptide
  MOD_RES (2)..(4)..(38)..(39): Xaa is C or S
  MOD_RES (16)..(17)..(18)..(19)..(20): Xaa is A or G
  MOD_RES (21)..(22)..(23)..(24): Xaa is A or G or absent
HXGXSRVVMNNSLQEXXXXXXXXXYYVVPLPELKTPAXXPKPV

SEQ ID NO: 9472 - protein, 43 aa, Artificial Sequence
  Non-cyclic GFR-binding peptide
  MOD_RES (1)..(3)..(37)..(38): Xaa is C or S
  MOD_RES (15)..(16)..(17)..(18)..(19): Xaa is A or G
  MOD_RES (20)..(21)..(22)..(23): Xaa is A or G or absent
XGXSEVVMDNSLQEXXXXXXXXXYYLITLPELRTPVXXTPPTS

SEQ ID NO: 9473 - protein, 33 aa, Artificial Sequence
  Non-cyclic GFR-binding peptide
  MOD_RES (1)..(1): Xaa is C or S
  MOD_RES (12)..(13)..(14)..(15)..(16): Xaa is A or G
  MOD_RES (17)..(18)..(19)..(20): Xaa is A or G or absent
XSKVVMNSLQEXXXXXXXXXYYVIPLPELDQPV

SEQ ID NO: 9474 - protein, 40 aa, Artificial Sequence
  Non-cyclic GFR-binding peptide
  MOD_RES (2)..(34)..(35): Xaa is C or S
GXARVVMNEYQKYIVNSSDDIFLVSIPSLQTPAXXPKPVT

SEQ ID NO: 9475 - protein, 32 aa, Artificial Sequence
  Non-cyclic GFR-binding peptide
  MOD_RES (2)..(2): Xaa is C or S
KXSKVIMNSLQEIKPTKGIYYVIPLPELDQSV

SEQ ID NO: 9476 - protein, 38 aa, Artificial Sequence
  Non-cyclic GFR-binding peptide
  MOD_RES (32)..(33): Xaa is C or S
ARVVMNNSLQEIVNSSDDYYVVPLPELQTPAXXPKPVT

SEQ ID NO: 9477 - protein, 34 aa, Artificial Sequence
  Non-cyclic GFR-binding peptide
  MOD_RES (1)..(3)..(34): Xaa is C or S
XKXSKVVMEYQKYVKPTRGVIFLISIPSLDQPVX

SEQ ID NO: 9478 - protein, 35 aa, Artificial Sequence
  Non-cyclic GFR-binding peptide
  MOD_RES (32)..(32): Xaa is C or S
SRVVMNEYQKYIVNSSDDIFLVSIPSLKTPAXTPK

SEQ ID NO: 9479 - protein, 35 aa, Artificial Sequence
  Non-cyclic GFR-binding peptide
  MOD_RES (31)..(32): Xaa is C or S
SKVVMEYQKYVKPTRGVIFLISIPSLDQPVXXPSA

SEQ ID NO: 9480 - protein, 39 aa, Artificial Sequence
  Non-cyclic GFR-binding peptide
  MOD_RES (2)..(36)..(37): Xaa is C or S
  MOD_RES (14)..(15)..(16)..(17)..(18): Xaa is A or G
  MOD_RES (19)..(20)..(21)..(22): Xaa is A or G or absent
GXARVVMNEYQKYXXXXXXXXXIFLVSIPSLQTPAXXPK

SEQ ID NO: 9481 - protein, 33 aa, Artificial Sequence
  Non-cyclic GFR-binding peptide
  MOD_RES (33)..(33): Xaa is C or S
  MOD_RES (11)..(12)..(13)..(14)..(15): Xaa is A or G
  MOD_RES (16)..(17)..(18)..(19): Xaa is A or G or absent
EVVMDNSLQEXXXXXXXXXYYLMTLPELETPVX

SEQ ID NO: 9482 - protein, 31 aa, Artificial Sequence
  Non-cyclic GFR-binding peptide
GEVVMDNSLQEVVKENEDYYVMPLPELETPV

SEQ ID NO: 9483 - protein, 39 aa, Artificial Sequence
  Non-cyclic GFR-binding peptide
  MOD_RES (34)..(35): Xaa is C or S
  MOD_RES (12)..(13)..(14)..(15)..(16): Xaa is A or G
  MOD_RES (17)..(18)..(19)..(20): Xaa is A or G or absent
GEVVMENSLQEXXXXXXXXXYYLMTLPELETPVXXAKPI

SEQ ID NO: 9484 - protein, 40 aa, Artificial Sequence
  Non-cyclic GFR-binding peptide
  MOD_RES (2)..(34)..(35): Xaa is C or S
GXGEVVMDNSLQEVVKENEDYYLMTLPELETPVXXAKPIK

SEQ ID NO: 9485 - protein, 36 aa, Artificial Sequence
  Non-cyclic GFR-binding peptide
  MOD_RES (2)..(36): Xaa is C or S
  MOD_RES (14)..(15)..(16)..(17)..(18): Xaa is A or G
  MOD_RES (19)..(20)..(21)..(22): Xaa is A or G or absent
GXSEVVMDNSLQEXXXXXXXXXYYVIPLPELRTPVX

SEQ ID NO: 9486 - protein, 40 aa, Artificial Sequence
  Non-cyclic GFR-binding peptide
  MOD_RES (2)..(4)..(37)..(38): Xaa is C or S
  MOD_RES (15)..(16)..(17)..(18)..(19): Xaa is A or G
  MOD_RES (20)..(21)..(22)..(23): Xaa is A or G or absent
SXKXSKVVMEYQKYXXXXXXXXXIFLISIPSLDQPVXXPS

SEQ ID NO: 9487 - protein, 32 aa, Artificial Sequence
  Non-cyclic GFR-binding peptide
  MOD_RES (11)..(12)..(13)..(14)..(15): Xaa is A or G
  MOD_RES (16)..(17)..(18)..(19): Xaa is A or G or absent
EVVMDNSLQEXXXXXXXXXYYVMPLPELETPV

SEQ ID NO: 9488 - protein, 39 aa, Artificial Sequence
  Non-cyclic GFR-binding peptide
  MOD_RES (2)..(34)..(35): Xaa is C or S
GXGEVVMDNSLQEVVKENEDYYVMPLPELETPVXXAKPI

SEQ ID NO: 9489 - protein, 35 aa, Artificial Sequence
  Non-cyclic GFR-binding peptide
  MOD_RES (34)..(35): Xaa is C or S
  MOD_RES (12)..(13)..(14)..(15)..(16): Xaa is A or G
  MOD_RES (17)..(18)..(19)..(20): Xaa is A or G or absent
GEVVMENSLQEXXXXXXXXXYYLMTLPELETPVXX

SEQ ID NO: 9490 - protein, 38 aa, Artificial Sequence
  Non-cyclic GFR-binding peptide
  MOD_RES (2)..(34)..(35): Xaa is C or S
GXARVVMNNSLQEIVNSSDDYYLVTLPELQTPAXXPKP

SEQ ID NO: 9491 - protein, 40 aa, Artificial Sequence
  Non-cyclic GFR-binding peptide
  MOD_RES (1)..(3)..(35)..(36): Xaa is C or S
XGXSEVVMDRYKKLVVNNASDFYLISIANLRTPVXXTPPT

SEQ ID NO: 9492 - protein, 39 aa, Artificial Sequence
  Non-cyclic GFR-binding peptide
  MOD_RES (2)..(4)..(38)..(39): Xaa is C or S
  MOD_RES (16)..(17)..(18)..(19)..(20): Xaa is A or G
  MOD_RES (21)..(22)..(23)..(24): Xaa is A or G or absent
RXGXSEVVMDRYKKLXXXXXXXXXFYLISIANLRTPVXX

SEQ ID NO: 9493 - protein, 38 aa, Artificial Sequence
  Non-cyclic GFR-binding peptide
  MOD_RES (1)..(35)..(36): Xaa is C or S
  MOD_RES (13)..(14)..(15)..(16)..(17): Xaa is A or G
  MOD_RES (18)..(19)..(20)..(21): Xaa is A or G or absent
XSRVVMNNSLQEXXXXXXXXXYYVVPLPELKTPAXXPK

SEQ ID NO: 9494 - protein, 34 aa, Artificial Sequence
  Non-cyclic GFR-binding peptide
  MOD_RES (1)..(34): Xaa is C or S
  MOD_RES (12)..(13)..(14)..(15)..(16): Xaa is A or G
  MOD_RES (17)..(18)..(19)..(20): Xaa is A or G or absent
XSKVIMEYQKYXXXXXXXXXIFLISIPSLDQSVX

SEQ ID NO: 9495 - protein, 35 aa, Artificial Sequence
  Non-cyclic GFR-binding peptide
  MOD_RES (2)..(4)..(35): Xaa is C or S
SXKXSKVIMNSLQEIKPTKGIYYVIPLPELDQSVX

SEQ ID NO: 9496 - protein, 39 aa, Artificial Sequence
  Non-cyclic GFR-binding peptide
  MOD_RES (1)..(3)..(37)..(38): Xaa is C or S
  MOD_RES (15)..(16)..(17)..(18)..(19): Xaa is A or G
  MOD_RES (20)..(21)..(22)..(23): Xaa is A or G or absent
XGXARVVMNNSLQEXXXXXXXXXYYLVTLPELQTPAXXP

SEQ ID NO: 9497 - protein, 39 aa, Artificial Sequence
  Non-cyclic GFR-binding peptide
  MOD_RES (2)..(4)..(38)..(39): Xaa is C or S
  MOD_RES (16)..(17)..(18)..(19)..(20): Xaa is A or G
  MOD_RES (21)..(22)..(23)..(24): Xaa is A or G or absent
HXGXARVVMNEYQKYXXXXXXXXXIFLVSIPSLQTPAXX

SEQ ID NO: 9498 - protein, 38 aa, Artificial Sequence
  Non-cyclic GFR-binding peptide
  MOD_RES (2)..(4)..(36): Xaa is C or S
HXGXSRVVMNEYQKYIVNSSDDIFLVSIPSLKTPAXTP

SEQ ID NO: 9499 - protein, 39 aa, Artificial Sequence
  Non-cyclic GFR-binding peptide
  MOD_RES (2)..(36): Xaa is C or S
  MOD_RES (14)..(15)..(16)..(17)..(18): Xaa is A or G
  MOD_RES (19)..(20)..(21)..(22): Xaa is A or G or absent
GXSRVVMNNSLQEXXXXXXXXXYYLVTLPELKTPAXTPK

SEQ ID NO: 9500 - protein, 39 aa, Artificial Sequence
  Non-cyclic GFR-binding peptide
  MOD_RES (1)..(34)..(35): Xaa is C or S
  MOD_RES (12)..(13)..(14)..(15)..(16): Xaa is A or G
  MOD_RES (17)..(18)..(19)..(20): Xaa is A or G or absent
XSKVVMEYQKYXXXXXXXXXIFLISIPSLDQPVXXPSAS

SEQ ID NO: 9501 - protein, 40 aa, Artificial Sequence
  Non-cyclic GFR-binding peptide
  MOD_RES (2)..(4)..(36)..(37): Xaa is C or S
RXGXSEVVMDNSLQEVVNNASDYYLITLPELRTPVXXTPP

SEQ ID NO: 9502 - protein, 36 aa, Artificial Sequence
  Non-cyclic GFR-binding peptide
  MOD_RES (1)..(33): Xaa is C or S
XSRVVMNEYQKYIVNSSDDIFLVSIPSLKTPAXTPK

SEQ ID NO: 9503 - protein, 37 aa, Artificial Sequence
  Non-cyclic GFR-binding peptide
  MOD_RES (1)..(33)..(34): Xaa is C or S
XGEVVMDNSLQEVVKENEDYYLMTLPELETPVXXAKP

SEQ ID NO: 9504 - protein, 36 aa, Artificial Sequence
  Non-cyclic GFR-binding peptide
  MOD_RES (2)..(36): Xaa is C or S
  MOD_RES (14)..(15)..(16)..(17)..(18): Xaa is A or G
  MOD_RES (19)..(20)..(21)..(22): Xaa is A or G or absent
GXGEVVMDNSLQEXXXXXXXXXYYVMPLPELETPVX

SEQ ID NO: 9505 - protein, 33 aa, Artificial Sequence
  Non-cyclic GFR-binding peptide
  MOD_RES (32)..(33): Xaa is C or S
GEVVMENSLQEVVKDYEDYYLMTLPELETPVXX

SEQ ID NO: 9506 - protein, 40 aa, Artificial Sequence
  Non-cyclic GFR-binding peptide
  MOD_RES (2)..(36): Xaa is C or S
  MOD_RES (14)..(15)..(16)..(17)..(18): Xaa is A or G
  MOD_RES (19)..(20)..(21)..(22): Xaa is A or G or absent
GXSRVVMNNSLQEXXXXXXXXXYYLVTLPELKTPAXTPKT

SEQ ID NO: 9507 - protein, 34 aa, Artificial Sequence
  Non-cyclic GFR-binding peptide
  MOD_RES (34)..(34): Xaa is C or S
  MOD_RES (12)..(13)..(14)..(15)..(16): Xaa is A or G
  MOD_RES (17)..(18)..(19)..(20): Xaa is A or G or absent
GEVVMDNSLQEXXXXXXXXXYYVMPLPELETPVX

SEQ ID NO: 9508 - protein, 37 aa, Artificial Sequence
  Non-cyclic GFR-binding peptide
  MOD_RES (1)..(33): Xaa is C or S
XSRVVMNNSLQEIVNSSDDYYVVPLPELKTPAXTPKT

SEQ ID NO: 9509 - protein, 36 aa, Artificial Sequence
  Non-cyclic GFR-binding peptide
  MOD_RES (31)..(32): Xaa is C or S
SKVIMEYQKYIKPTKGIIFLISIPSLDQSVXXPSAS

SEQ ID NO: 9510 - protein, 42 aa, Artificial Sequence
  Non-cyclic GFR-binding peptide
  MOD_RES (2)..(4)..(37)..(38): Xaa is C or S
  MOD_RES (15)..(16)..(17)..(18)..(19): Xaa is A or G
  MOD_RES (20)..(21)..(22)..(23): Xaa is A or G or absent
SXKXSKVVMNSLQEXXXXXXXXXYYVIPLPELDQPVXXPSAS

SEQ ID NO: 9511 - protein, 35 aa, Artificial Sequence
  Non-cyclic GFR-binding peptide
  MOD_RES (31)..(32): Xaa is C or S
SKVVMNSLQEVKPTRGVYYVIPLPELDQPVXXPSA

SEQ ID NO: 9512 - protein, 41 aa, Artificial Sequence
  Non-cyclic GFR-binding peptide
  MOD_RES (1)..(35)..(36): Xaa is C or S
  MOD_RES (13)..(14)..(15)..(16)..(17): Xaa is A or G
  MOD_RES (18)..(19)..(20)..(21): Xaa is A or G or absent
XGEVVMDNSLQEXXXXXXXXXYYLMTLPELETPVXXAKPIK

SEQ ID NO: 9513 - protein, 38 aa, Artificial Sequence
  Non-cyclic GFR-binding peptide
  MOD_RES (2)..(35)..(36): Xaa is C or S
  MOD_RES (13)..(14)..(15)..(16)..(17): Xaa is A or G
  MOD_RES (18)..(19)..(20)..(21): Xaa is A or G or absent
KXSKVVMEYQKYXXXXXXXXXIFLISIPSLDQPVXXPS

SEQ ID NO: 9514 - protein, 40 aa, Artificial Sequence
  Non-cyclic GFR-binding peptide
  MOD_RES (34)..(34): Xaa is C or S
  MOD_RES (12)..(13)..(14)..(15)..(16): Xaa is A or G
  MOD_RES (17)..(18)..(19)..(20): Xaa is A or G or absent
SRVVMNNSLQEXXXXXXXXXYYLVTLPELKTPAXTPKTVH

SEQ ID NO: 9515 - protein, 37 aa, Artificial Sequence
  Non-cyclic GFR-binding peptide
  MOD_RES (2)..(4)..(36)..(37): Xaa is C or S
RXGXGEVVMENSLQEVVKDYEDYYLMTLPELETPVXX

SEQ ID NO: 9516 - protein, 39 aa, Artificial Sequence
  Non-cyclic GFR-binding peptide
  MOD_RES (2)..(4)..(38)..(39): Xaa is C or S
  MOD_RES (16)..(17)..(18)..(19)..(20): Xaa is A or G
  MOD_RES (21)..(22)..(23)..(24): Xaa is A or G or absent
RXGXSEVVMDNSLQEXXXXXXXXXYYVIPLPELRTPVXX

SEQ ID NO: 9517 - protein, 44 aa, Artificial Sequence
  Non-cyclic GFR-binding peptide
  MOD_RES (2)..(4)..(38)..(39): Xaa is C or S
  MOD_RES (16)..(17)..(18)..(19)..(20): Xaa is A or G
  MOD_RES (21)..(22)..(23)..(24): Xaa is A or G or absent
RXGXSEVVMDRYKKLXXXXXXXXXFYLISIANLRTPVXXTPPTS

SEQ ID NO: 9518 - protein, 41 aa, Artificial Sequence
  Non-cyclic GFR-binding peptide
  MOD_RES (1)..(3)..(35)..(36): Xaa is C or S
XGXARVVMNNSLQEIVNSSDDYYLVTLPELQTPAXXPKPVT

SEQ ID NO: 9519 - protein, 38 aa, Artificial Sequence
  Non-cyclic GFR-binding peptide
  MOD_RES (2)..(4)..(35)..(36): Xaa is C or S
SXKXSKVVMEYQKYVKPTRGVIFLISIPSLDQPVXXPS

SEQ ID NO: 9520 - protein, 32 aa, Artificial Sequence
  Non-cyclic GFR-binding peptide
  MOD_RES (31)..(32): Xaa is C or S
EVVMDEYQKYVVKENEDIFLMSIPSLETPVXX

SEQ ID NO: 9521 - protein, 37 aa, Artificial Sequence
  Non-cyclic GFR-binding peptide
  MOD_RES (31)..(32): Xaa is C or S
EVVMDNSLQEVVNNASDYYVIPLPELRTPVXXTPPTS

SEQ ID NO: 9522 - protein, 37 aa, Artificial Sequence
  Non-cyclic GFR-binding peptide
  MOD_RES (1)..(3)..(37): Xaa is C or S
  MOD_RES (15)..(16)..(17)..(18)..(19): Xaa is A or G
  MOD_RES (20)..(21)..(22)..(23): Xaa is A or G or absent
XGXGEVVMDNSLQEXXXXXXXXXYYVMPLPELETPVX

SEQ ID NO: 9523 - protein, 34 aa, Artificial Sequence
  Non-cyclic GFR-binding peptide
  MOD_RES (1)..(33)..(34): Xaa is C or S
XSRVVMNNSLQEIVNSSDDYYVVPLPELKTPAXX

SEQ ID NO: 9524 - protein, 38 aa, Artificial Sequence
  Non-cyclic GFR-binding peptide
  MOD_RES (2)..(4)..(36)..(37): Xaa is C or S
HXGXSRVVMNNSLQEIVNSSDDYYVVPLPELKTPAXXP

SEQ ID NO: 9525 - protein, 33 aa, Artificial Sequence
  Non-cyclic GFR-binding peptide
  MOD_RES (31)..(31): Xaa is C or S
RVVMNNSLQEIVNSSDDYYVVPLPELKTPAXTP

SEQ ID NO: 9526 - protein, 38 aa, Artificial Sequence
  Non-cyclic GFR-binding peptide
  MOD_RES (2)..(4)..(36)..(37): Xaa is C or S
HXGXARVVMNEYQKYIVNSSDDIFLVSIPSLQTPAXXP

SEQ ID NO: 9527 - protein, 40 aa, Artificial Sequence
  Non-cyclic GFR-binding peptide
  MOD_RES (34)..(35): Xaa is C or S
  MOD_RES (12)..(13)..(14)..(15)..(16): Xaa is A or G
  MOD_RES (17)..(18)..(19)..(20): Xaa is A or G or absent
SEVVMDNSLQEXXXXXXXXXYYVIPLPELRTPVXXTPPTS

SEQ ID NO: 9528 - protein, 36 aa, Artificial Sequence
  Non-cyclic GFR-binding peptide
  MOD_RES (2)..(33)..(34): Xaa is C or S
KXSRVIMEYQKYVKPKRGVIFLISIPSLAQPVXXPA

SEQ ID NO: 9529 - protein, 39 aa, Artificial Sequence
  Non-cyclic GFR-binding peptide
  MOD_RES (1)..(35)..(36): Xaa is C or S
  MOD_RES (13)..(14)..(15)..(16)..(17): Xaa is A or G
  MOD_RES (18)..(19)..(20)..(21): Xaa is A or G or absent
XSEVVMDNSLQEXXXXXXXXXYYVIPLPELRTPVXXTPP

SEQ ID NO: 9530 - protein, 41 aa, Artificial Sequence
  Non-cyclic GFR-binding peptide
  MOD_RES (1)..(3)..(35)..(36): Xaa is C or S
XGXGEVVMENSLQEVVKDYEDYYLMTLPELETPVXXAKPIS

SEQ ID NO: 9531 - protein, 41 aa, Artificial Sequence
  Non-cyclic GFR-binding peptide
  MOD_RES (1)..(3)..(37)..(38): Xaa is C or S
  MOD_RES (15)..(16)..(17)..(18)..(19): Xaa is A or G
  MOD_RES (20)..(21)..(22)..(23): Xaa is A or G or absent
XGXARVVMNNSLQEXXXXXXXXXYYVVPLPELQTPAXXPKP

SEQ ID NO: 9532 - protein, 39 aa, Artificial Sequence
  Non-cyclic GFR-binding peptide
  MOD_RES (2)..(4)..(35)..(36): Xaa is C or S
SXKXSKVIMNSLQEIKPTKGIYYVIPLPELDQSVXXPSA

SEQ ID NO: 9533 - protein, 34 aa, Artificial Sequence
  Non-cyclic GFR-binding peptide
  MOD_RES (31)..(32): Xaa is C or S
RVVMNNSLQEIVNSSDDYYLVTLPELQTPAXXPK

SEQ ID NO: 9534 - protein, 34 aa, Artificial Sequence
  Non-cyclic GFR-binding peptide
  MOD_RES (31)..(32): Xaa is C or S
RVVMNNSLQEIVNSSDDYYVVPLPELQTPAXXPK

SEQ ID NO: 9535 - protein, 43 aa, Artificial Sequence
  Non-cyclic GFR-binding peptide
  MOD_RES (2)..(4)..(38): Xaa is C or S
  MOD_RES (16)..(17)..(18)..(19)..(20): Xaa is A or G
  MOD_RES (21)..(22)..(23)..(24): Xaa is A or G or absent
HXGXSRVVMNNSLQEXXXXXXXXXYYVVPLPELKTPAXTPKTV

SEQ ID NO: 9536 - protein, 40 aa, Artificial Sequence
  Non-cyclic GFR-binding peptide
  MOD_RES (2)..(4)..(38): Xaa is C or S
  MOD_RES (16)..(17)..(18)..(19)..(20): Xaa is A or G
  MOD_RES (21)..(22)..(23)..(24): Xaa is A or G or absent
HXGXSRVVMNNSLQEXXXXXXXXXYYLVTLPELKTPAXTP

SEQ ID NO: 9537 - protein, 42 aa, Artificial Sequence
  Non-cyclic GFR-binding peptide
  MOD_RES (1)..(3)..(37)..(38): Xaa is C or S
  MOD_RES (15)..(16)..(17)..(18)..(19): Xaa is A or G
  MOD_RES (20)..(21)..(22)..(23): Xaa is A or G or absent
XGXSEVVMDRYKKLXXXXXXXXXFYLISIANLRTPVXXTPPT

SEQ ID NO: 9538 - protein, 39 aa, Artificial Sequence
  Non-cyclic GFR-binding peptide
  MOD_RES (1)..(3)..(37)..(38): Xaa is C or S
  MOD_RES (15)..(16)..(17)..(18)..(19): Xaa is A or G
  MOD_RES (20)..(21)..(22)..(23): Xaa is A or G or absent
XGXGEVVMDNSLQEXXXXXXXXXYYVMPLPELETPVXXA

SEQ ID NO: 9539 - protein, 38 aa, Artificial Sequence
  Non-cyclic GFR-binding peptide
  MOD_RES (2)..(4)..(36)..(37): Xaa is C or S
RXGXGEVVMEEYQKYVVKDYEDIFLMSIPSLETPVXXA

SEQ ID NO: 9540 - protein, 38 aa, Artificial Sequence
  Non-cyclic GFR-binding peptide
  MOD_RES (1)..(34)..(35): Xaa is C or S
  MOD_RES (12)..(13)..(14)..(15)..(16): Xaa is A or G
  MOD_RES (17)..(18)..(19)..(20): Xaa is A or G or absent
XSKVIMEYQKYXXXXXXXXXIFLISIPSLDQSVXXPSA

SEQ ID NO: 9541 - protein, 40 aa, Artificial Sequence
  Non-cyclic GFR-binding peptide
  MOD_RES (34)..(35): Xaa is C or S
  MOD_RES (12)..(13)..(14)..(15)..(16): Xaa is A or G
  MOD_RES (17)..(18)..(19)..(20): Xaa is A or G or absent
SRVVMNEYQKYXXXXXXXXXIFLVSIPSLKTPAXXPKPVY

SEQ ID NO: 9542 - protein, 42 aa, Artificial Sequence
  Non-cyclic GFR-binding peptide
  MOD_RES (2)..(36)..(37): Xaa is C or S
  MOD_RES (14)..(15)..(16)..(17)..(18): Xaa is A or G
  MOD_RES (19)..(20)..(21)..(22): Xaa is A or G or absent
GXSEVVMDRYKKLXXXXXXXXXFYLISIANLRTPVXXTPPTS

SEQ ID NO: 9543 - protein, 36 aa, Artificial Sequence
  Non-cyclic GFR-binding peptide
  MOD_RES (1)..(33)..(34): Xaa is C or S
XARVVMNNSLQEIVNSSDDYYLVTLPELQTPAXXPK

SEQ ID NO: 9544 - protein, 38 aa, Artificial Sequence
  Non-cyclic GFR-binding peptide
  MOD_RES (33)..(34): Xaa is C or S
  MOD_RES (11)..(12)..(13)..(14)..(15): Xaa is A or G
  MOD_RES (16)..(17)..(18)..(19): Xaa is A or G or absent
EVVMEEYQKYXXXXXXXXXIFLMSIPSLETPVXXAKPI

SEQ ID NO: 9545 - protein, 36 aa, Artificial Sequence
  Non-cyclic GFR-binding peptide
  MOD_RES (2)..(34)..(35): Xaa is C or S
GXARVVMNNSLQEIVNSSDDYYVVPLPELQTPAXXP

SEQ ID NO: 9546 - protein, 42 aa, Artificial Sequence
  Non-cyclic GFR-binding peptide
  MOD_RES (2)..(4)..(36)..(37): Xaa is C or S
RXGXSEVVMDNSLQEVVNNASDYYLITLPELRTPVXXTPPTS

SEQ ID NO: 9547 - protein, 32 aa, Artificial Sequence
  Non-cyclic GFR-binding peptide
  MOD_RES (1)..(1): Xaa is C or S
XSEVVMDRYKKLVVNNASDFYLISIANLRTPV

SEQ ID NO: 9548 - protein, 33 aa, Artificial Sequence
  Non-cyclic GFR-binding peptide
  MOD_RES (2)..(2): Xaa is C or S
GXARVVMNNSLQEIVNSSDDYYVVPLPELQTPA

SEQ ID NO: 9549 - protein, 32 aa, Artificial Sequence
  Non-cyclic GFR-binding peptide
  MOD_RES (32)..(32): Xaa is C or S
SEVVMDNSLQEVVNNASDYYVIPLPELRTPVX

SEQ ID NO: 9550 - protein, 40 aa, Artificial Sequence
  Non-cyclic GFR-binding peptide
  MOD_RES (2)..(35)..(36): Xaa is C or S
  MOD_RES (13)..(14)..(15)..(16)..(17): Xaa is A or G
  MOD_RES (18)..(19)..(20)..(21): Xaa is A or G or absent
KXSRVIMNSLQEXXXXXXXXXYYLITLPELAQPVXXPAAS

SEQ ID NO: 9551 - protein, 40 aa, Artificial Sequence
  Non-cyclic GFR-binding peptide
  MOD_RES (2)..(34)..(35): Xaa is C or S
GXGEVVMENSLQEVVKDYEDYYVMPLPELETPVXXAKPIS

SEQ ID NO: 9552 - protein, 37 aa, Artificial Sequence
  Non-cyclic GFR-binding peptide
  MOD_RES (32)..(32): Xaa is C or S
SRVVMNEYQKYIVNSSDDIFLVSIPSLKTPAXTPKTV

SEQ ID NO: 9553 - protein, 39 aa, Artificial Sequence
  Non-cyclic GFR-binding peptide
  MOD_RES (1)..(35)..(36): Xaa is C or S
  MOD_RES (13)..(14)..(15)..(16)..(17): Xaa is A or G
  MOD_RES (18)..(19)..(20)..(21): Xaa is A or G or absent
XGEVVMDEYQKYXXXXXXXXXIFLMSIPSLETPVXXAKP

SEQ ID NO: 9554 - protein, 32 aa, Artificial Sequence
  Non-cyclic GFR-binding peptide
  MOD_RES (31)..(31): Xaa is C or S
RVVMNNSLQEIVNSSDDYYVVPLPELKTPAXT

SEQ ID NO: 9555 - protein, 35 aa, Artificial Sequence
  Non-cyclic GFR-binding peptide
  MOD_RES (34)..(34): Xaa is C or S
  MOD_RES (12)..(13)..(14)..(15)..(16): Xaa is A or G
  MOD_RES (17)..(18)..(19)..(20): Xaa is A or G or absent
SRVVMNNSLQEXXXXXXXXXYYLVTLPELKTPAXT

SEQ ID NO: 9556 - protein, 35 aa, Artificial Sequence
  Non-cyclic GFR-binding peptide
  MOD_RES (31)..(32): Xaa is C or S
EVVMDRYKKLVVNNASDFYLISIANLRTPVXXTPP

SEQ ID NO: 9557 - protein, 33 aa, Artificial Sequence
  Non-cyclic GFR-binding peptide
  MOD_RES (31)..(32): Xaa is C or S
EVVMDNSLQEVVKENEDYYLMTLPELETPVXXA

SEQ ID NO: 9558 - protein, 36 aa, Artificial Sequence
  Non-cyclic GFR-binding peptide
  MOD_RES (2)..(36): Xaa is C or S
  MOD_RES (14)..(15)..(16)..(17)..(18): Xaa is A or G
  MOD_RES (19)..(20)..(21)..(22): Xaa is A or G or absent
GXSRVVMNNSLQEXXXXXXXXXYYLVTLPELKTPAX

SEQ ID NO: 9559 - protein, 33 aa, Artificial Sequence
  Non-cyclic GFR-binding peptide
  MOD_RES (12)..(13)..(14)..(15)..(16): Xaa is A or G
  MOD_RES (17)..(18)..(19)..(20): Xaa is A or G or absent
ARVVMNNSLQEXXXXXXXXXYYLVTLPELQTPA

SEQ ID NO: 9560 - protein, 34 aa, Artificial Sequence
  Non-cyclic GFR-binding peptide
  MOD_RES (33)..(33): Xaa is C or S
  MOD_RES (11)..(12)..(13)..(14)..(15): Xaa is A or G
  MOD_RES (16)..(17)..(18)..(19): Xaa is A or G or absent
RVVMNNSLQEXXXXXXXXXYYLVTLPELKTPAXT

SEQ ID NO: 9561 - protein, 32 aa, Artificial Sequence
  Non-cyclic GFR-binding peptide
  MOD_RES (2)..(2): Xaa is C or S
KXSKVIMEYQKYIKPTKGIIFLISIPSLDQSV

SEQ ID NO: 9562 - protein, 42 aa, Artificial Sequence
  Non-cyclic GFR-binding peptide
  MOD_RES (2)..(4)..(37)..(38): Xaa is C or S
  MOD_RES (15)..(16)..(17)..(18)..(19): Xaa is A or G
  MOD_RES (20)..(21)..(22)..(23): Xaa is A or G or absent
SXKXSKVIMEYQKYXXXXXXXXXIFLISIPSLDQSVXXPSAS

SEQ ID NO: 9563 - protein, 41 aa, Artificial Sequence
  Non-cyclic GFR-binding peptide
  MOD_RES (1)..(3)..(35)..(36): Xaa is C or S
XGXSEVVMDNSLQEVVNNASDYYVIPLPELRTPVXXTPPTS

SEQ ID NO: 9564 - protein, 37 aa, Artificial Sequence
  Non-cyclic GFR-binding peptide
  MOD_RES (2)..(34)..(35): Xaa is C or S
GXGEVVMDNSLQEVVKENEDYYLMTLPELETPVXXAK

SEQ ID NO: 9565 - protein, 39 aa, Artificial Sequence
  Non-cyclic GFR-binding peptide
  MOD_RES (2)..(4)..(36)..(37): Xaa is C or S
RXGXGEVVMDNSLQEVVKENEDYYLMTLPELETPVXXAK

SEQ ID NO: 9566 - protein, 41 aa, Artificial Sequence
  Non-cyclic GFR-binding peptide
  MOD_RES (1)..(3)..(35)..(36): Xaa is C or S
XGXARVVMNEYQKYIVNSSDDIFLVSIPSLQTPAXXPKPVT

SEQ ID NO: 9567 - protein, 39 aa, Artificial Sequence
  Non-cyclic GFR-binding peptide
  MOD_RES (1)..(3)..(37)..(38): Xaa is C or S
  MOD_RES (15)..(16)..(17)..(18)..(19): Xaa is A or G
  MOD_RES (20)..(21)..(22)..(23): Xaa is A or G or absent
XGXARVVMNEYQKYXXXXXXXXXIFLVSIPSLQTPAXXP

SEQ ID NO: 9568 - protein, 36 aa, Artificial Sequence
  Non-cyclic GFR-binding peptide
  MOD_RES (2)..(4)..(36): Xaa is C or S
RXGXGEVVMDEYQKYVVKENEDIFLMSIPSLETPVX

SEQ ID NO: 9569 - protein, 30 aa, Artificial Sequence; identical to SEQ ID NO: 2036
  Non-cyclic GFR-binding peptide

SEQ ID NO: 9570 - protein, 35 aa, Artificial Sequence
  Non-cyclic GFR-binding peptide
  MOD_RES (1)..(3)..(35): Xaa is C or S
XGXGEVVMDEYQKYVVKENEDIFLMSIPSLETPVX

SEQ ID NO: 9571 - protein, 40 aa, Artificial Sequence
  Non-cyclic GFR-binding peptide
  MOD_RES (1)..(35)..(36): Xaa is C or S
  MOD_RES (13)..(14)..(15)..(16)..(17): Xaa is A or G
  MOD_RES (18)..(19)..(20)..(21): Xaa is A or G or absent
XARVVMNEYQKYXXXXXXXXXIFLVSIPSLQTPAXXPKPV

SEQ ID NO: 9572 - protein, 38 aa, Artificial Sequence
  Non-cyclic GFR-binding peptide
  MOD_RES (1)..(3)..(34)..(35): Xaa is C or S
XKXSKVIMEYQKYIKPTKGIIFLISIPSLDQSVXXPSA

SEQ ID NO: 9573 - protein, 37 aa, Artificial Sequence
  Non-cyclic GFR-binding peptide
  MOD_RES (34)..(34): Xaa is C or S
  MOD_RES (12)..(13)..(14)..(15)..(16): Xaa is A or G
  MOD_RES (17)..(18)..(19)..(20): Xaa is A or G or absent
SRVVMNNSLQEXXXXXXXXXYYLVTLPELKTPAXTPK

SEQ ID NO: 9574 - protein, 43 aa, Artificial Sequence
  Non-cyclic GFR-binding peptide
  MOD_RES (1)..(3)..(37)..(38): Xaa is C or S
  MOD_RES (15)..(16)..(17)..(18)..(19): Xaa is A or G
  MOD_RES (20)..(21)..(22)..(23): Xaa is A or G or absent
XGXSEVVMDRYKKLXXXXXXXXXFYLISIANLRTPVXXTPPTS

SEQ ID NO: 9575 - protein, 35 aa, Artificial Sequence
  Non-cyclic GFR-binding peptide
  MOD_RES (1)..(35): Xaa is C or S
  MOD_RES (13)..(14)..(15)..(16)..(17): Xaa is A or G
  MOD_RES (18)..(19)..(20)..(21): Xaa is A or G or absent
XGEVVMDNSLQEXXXXXXXXXYYLMTLPELETPVX

SEQ ID NO: 9576 - protein, 36 aa, Artificial Sequence
  Non-cyclic GFR-binding peptide
  MOD_RES (2)..(4)..(36): Xaa is C or S
RXGXGEVVMDNSLQEVVKENEDYYLMTLPELETPVX

SEQ ID NO: 9577 - protein, 41 aa, Artificial Sequence
  Non-cyclic GFR-binding peptide
  MOD_RES (2)..(36)..(37): Xaa is C or S
  MOD_RES (14)..(15)..(16)..(17)..(18): Xaa is A or G
  MOD_RES (19)..(20)..(21)..(22): Xaa is A or G or absent
GXSEVVMDQYNKLXXXXXXXXXLYLISIASLRTPVXXTPPT

SEQ ID NO: 9578 - protein, 35 aa, Artificial Sequence
  Non-cyclic GFR-binding peptide
  MOD_RES (2)..(34)..(35): Xaa is C or S
GXSEVVMDNSLQEVVNNASDYYLITLPELRTPVXX

SEQ ID NO: 9579 - protein, 42 aa, Artificial Sequence
  Non-cyclic GFR-binding peptide
  MOD_RES (1)..(3)..(37)..(38): Xaa is C or S
  MOD_RES (15)..(16)..(17)..(18)..(19): Xaa is A or G
  MOD_RES (20)..(21)..(22)..(23): Xaa is A or G or absent
XGXARVVMNNSLQEXXXXXXXXXYYLVTLPELQTPAXXPKPV

SEQ ID NO: 9580 - protein, 40 aa, Artificial Sequence
  Non-cyclic GFR-binding peptide
  MOD_RES (1)..(3)..(37)..(38): Xaa is C or S
  MOD_RES (15)..(16)..(17)..(18)..(19): Xaa is A or G
  MOD_RES (20)..(21)..(22)..(23): Xaa is A or G or absent
XGXGEVVMDNSLQEXXXXXXXXXYYLMTLPELETPVXXAK

SEQ ID NO: 9581 - protein, 37 aa, Artificial Sequence
  Non-cyclic GFR-binding peptide
  MOD_RES (2)..(36)..(37): Xaa is C or S
  MOD_RES (14)..(15)..(16)..(17)..(18): Xaa is A or G
  MOD_RES (19)..(20)..(21)..(22): Xaa is A or G or absent
GXGEVVMENSLQEXXXXXXXXXYYLMTLPELETPVXX

SEQ ID NO: 9582 - protein, 38 aa, Artificial Sequence
  Non-cyclic GFR-binding peptide
  MOD_RES (33)..(34): Xaa is C or S
  MOD_RES (11)..(12)..(13)..(14)..(15): Xaa is A or G
  MOD_RES (16)..(17)..(18)..(19): Xaa is A or G or absent
RVVMNNSLQEXXXXXXXXXYYVVPLPELKTPAXXPKPV

SEQ ID NO: 9583 - protein, 34 aa, Artificial Sequence
  Non-cyclic GFR-binding peptide
  MOD_RES (1)..(3): Xaa is C or S
XGXSRVVMNNSLQEIVNSSDDYYLVTLPELKTPA

SEQ ID NO: 9584 - protein, 43 aa, Artificial Sequence
  Non-cyclic GFR-binding peptide
  MOD_RES (1)..(3)..(37)..(38): Xaa is C or S
  MOD_RES (15)..(16)..(17)..(18)..(19): Xaa is A or G
  MOD_RES (20)..(21)..(22)..(23): Xaa is A or G or absent
XGXGEVVMDNSLQEXXXXXXXXXYYLMTLPELETPVXXAKPIK

SEQ ID NO: 9585 - protein, 32 aa, Artificial Sequence
  Non-cyclic GFR-binding peptide
  MOD_RES (1)..(1): Xaa is C or S
XSRVVMNNSLQEIVNSSDDYYVVPLPELKTPA

SEQ ID NO: 9586 - protein, 37 aa, Artificial Sequence
  Non-cyclic GFR-binding peptide
  MOD_RES (1)..(3)..(35)..(36): Xaa is C or S
XGXSEVVMDNSLQEVVNNASDYYLITLPELRTPVXXT

SEQ ID NO: 9587 - protein, 36 aa, Artificial Sequence
  Non-cyclic GFR-binding peptide
  MOD_RES (2)..(4)..(36): Xaa is C or S
HXGXSRVVMNEYQKYIVNSSDDIFLVSIPSLKTPAX

SEQ ID NO: 9588 - protein, 38 aa, Artificial Sequence
  Non-cyclic GFR-binding peptide
  MOD_RES (32)..(33): Xaa is C or S
GEVVMDNSLQEVVKENEDYYVMPLPELETPVXXAKPIK

SEQ ID NO: 9589 - protein, 36 aa, Artificial Sequence
  Non-cyclic GFR-binding peptide
  MOD_RES (1)..(34)..(35): Xaa is C or S
  MOD_RES (12)..(13)..(14)..(15)..(16): Xaa is A or G
  MOD_RES (17)..(18)..(19)..(20): Xaa is A or G or absent
XSKVIMEYQKYXXXXXXXXXIFLISIPSLDQSVXXP

SEQ ID NO: 9590 - protein, 37 aa, Artificial Sequence
  Non-cyclic GFR-binding peptide
  MOD_RES (2)..(4)..(36): Xaa is C or S
HXGXSRVVMNEYQKYIVNSSDDIFLVSIPSLKTPAXT

SEQ ID NO: 9591 - protein, 39 aa, Artificial Sequence
  Non-cyclic GFR-binding peptide
  MOD_RES (34)..(35): Xaa is C or S
  MOD_RES (12)..(13)..(14)..(15)..(16): Xaa is A or G
  MOD_RES (17)..(18)..(19)..(20): Xaa is A or G or absent
ARVVMNEYQKYXXXXXXXXXIFLVSIPSLQTPAXXPKPV

SEQ ID NO: 9592 - protein, 43 aa, Artificial Sequence
  Non-cyclic GFR-binding peptide
  MOD_RES (1)..(3)..(37): Xaa is C or S
  MOD_RES (15)..(16)..(17)..(18)..(19): Xaa is A or G
  MOD_RES (20)..(21)..(22)..(23): Xaa is A or G or absent
XGXSRVVMNNSLQEXXXXXXXXXYYLVTLPELKTPAXTPKTVH

SEQ ID NO: 9593 - protein, 31 aa, Artificial Sequence
  Non-cyclic GFR-binding peptide
  MOD_RES (31)..(31): Xaa is C or S
EVVMDNSLQEVVKENEDYYVMPLPELETPVX

SEQ ID NO: 9594 - protein, 38 aa, Artificial Sequence
  Non-cyclic GFR-binding peptide
  MOD_RES (34)..(35): Xaa is C or S
  MOD_RES (12)..(13)..(14)..(15)..(16): Xaa is A or G
  MOD_RES (17)..(18)..(19)..(20): Xaa is A or G or absent
SRVVMNNSLQEXXXXXXXXXYYLVTLPELKTPAXXPKP

SEQ ID NO: 9595 - protein, 34 aa, Artificial Sequence
  Non-cyclic GFR-binding peptide
  MOD_RES (1)..(3): Xaa is C or S
XGXSRVVMNEYQKYIVNSSDDIFLVSIPSLKTPA

SEQ ID NO: 9596 - protein, 41 aa, Artificial Sequence
  Non-cyclic GFR-binding peptide
  MOD_RES (1)..(3)..(35)..(36): Xaa is C or S
XGXGEVVMDNSLQEVVKENEDYYVMPLPELETPVXXAKPIK

SEQ ID NO: 9597 - protein, 30 aa, Artificial Sequence
  Non-cyclic GFR-binding peptide
EVVMENSLQEVVKDYEDYYVMPLPELETPV

SEQ ID NO: 9598 - protein, 33 aa, Artificial Sequence
  Non-cyclic GFR-binding peptide
  MOD_RES (32)..(33): Xaa is C or S
SEVVMDRYKKLVVNNASDFYLISIANLRTPVXX

SEQ ID NO: 9599 - protein, 36 aa, Artificial Sequence
  Non-cyclic GFR-binding peptide
  MOD_RES (2)..(34): Xaa is C or S
GXSRVVMNNSLQEIVNSSDDYYLVTLPELKTPAXTP

SEQ ID NO: 9600 - protein, 36 aa, Artificial Sequence
  Non-cyclic GFR-binding peptide
  MOD_RES (1)..(35)..(36): Xaa is C or S
  MOD_RES (13)..(14)..(15)..(16)..(17): Xaa is A or G
  MOD_RES (18)..(19)..(20)..(21): Xaa is A or G or absent
XGEVVMENSLQEXXXXXXXXXYYLMTLPELETPVXX

SEQ ID NO: 9601 - protein, 35 aa, Artificial Sequence
  Non-cyclic GFR-binding peptide
  MOD_RES (1)..(3)..(35): Xaa is C or S
XGXGEVVMDNSLQEVVKENEDYYLMTLPELETPVX

SEQ ID NO: 9602 - protein, 43 aa, Artificial Sequence
  Non-cyclic GFR-binding peptide
  MOD_RES (2)..(4)..(38)..(39): Xaa is C or S
  MOD_RES (16)..(17)..(18)..(19)..(20): Xaa is A or G
  MOD_RES (21)..(22)..(23)..(24): Xaa is A or G or absent
RXGXSEVVMDNSLQEXXXXXXXXXYYLITLPELRTPVXXTPPT

SEQ ID NO: 9603 - protein, 36 aa, Artificial Sequence
  Non-cyclic GFR-binding peptide
  MOD_RES (2)..(34)..(35): Xaa is C or S
GXSRVVMNNSLQEIVNSSDDYYLVTLPELKTPAXXP

SEQ ID NO: 9604 - protein, 40 aa, Artificial Sequence
  Non-cyclic GFR-binding peptide
  MOD_RES (2)..(34)..(35): Xaa is C or S
GXARVVMNNSLQEIVNSSDDYYVVPLPELQTPAXXPKPVT

SEQ ID NO: 9605 - protein, 39 aa, Artificial Sequence
  Non-cyclic GFR-binding peptide
  MOD_RES (2)..(4)..(38)..(39): Xaa is C or S
  MOD_RES (16)..(17)..(18)..(19)..(20): Xaa is A or G
  MOD_RES (21)..(22)..(23)..(24): Xaa is A or G or absent
HXGXARVVMNNSLQEXXXXXXXXXYYLVTLPELQTPAXX

SEQ ID NO: 9606 - protein, 32 aa, Artificial Sequence
  Non-cyclic GFR-binding peptide
  MOD_RES (2)..(2): Xaa is C or S
KXSKVVMNSLQEVKPTRGVYYVIPLPELDQPV

SEQ ID NO: 9607 - protein, 37 aa, Artificial Sequence
  Non-cyclic GFR-binding peptide
  MOD_RES (31)..(31): Xaa is C or S
RVVMNNSLQEIVNSSDDYYLVTLPELKTPAXTPKTVH

SEQ ID NO: 9608 - protein, 37 aa, Artificial Sequence
  Non-cyclic GFR-binding peptide
  MOD_RES (2)..(34)..(35): Xaa is C or S
GXGEVVMEEYQKYVVKDYEDIFLMSIPSLETPVXXAK

SEQ ID NO: 9609 - protein, 41 aa, Artificial Sequence
  Non-cyclic GFR-binding peptide
  MOD_RES (2)..(35)..(36): Xaa is C or S
  MOD_RES (13)..(14)..(15)..(16)..(17): Xaa is A or G
  MOD_RES (18)..(19)..(20)..(21): Xaa is A or G or absent
KXSKVVMEYQKYXXXXXXXXXIFLISIPSLDQPVXXPSASA

SEQ ID NO: 9610 - protein, 37 aa, Artificial Sequence
  Non-cyclic GFR-binding peptide
  MOD_RES (2)..(34)..(35): Xaa is C or S
GXSRVVMNEYQKYIVNSSDDIFLVSIPSLKTPAXXPK

SEQ ID NO: 9611 - protein, 40 aa, Artificial Sequence
  Non-cyclic GFR-binding peptide
  MOD_RES (1)..(3)..(36)..(37): Xaa is C or S
  MOD_RES (14)..(15)..(16)..(17)..(18): Xaa is A or G
  MOD_RES (19)..(20)..(21)..(22): Xaa is A or G or absent
XKXSRVIMEYQKYXXXXXXXXXIFLISIPSLAQPVXXPAA

SEQ ID NO: 9612 - protein, 37 aa, Artificial Sequence
  Non-cyclic GFR-binding peptide
  MOD_RES (2)..(4)..(35)..(36): Xaa is C or S
SXKXSKVVMEYQKYVKPTRGVIFLISIPSLDQPVXXP

SEQ ID NO: 9613 - protein, 34 aa, Artificial Sequence
  Non-cyclic GFR-binding peptide
  MOD_RES (34)..(34): Xaa is C or S
  MOD_RES (12)..(13)..(14)..(15)..(16): Xaa is A or G
  MOD_RES (17)..(18)..(19)..(20): Xaa is A or G or absent
GEVVMENSLQEXXXXXXXXXYYLMTLPELETPVX

SEQ ID NO: 9614 - protein, 35 aa, Artificial Sequence
  Non-cyclic GFR-binding peptide
  MOD_RES (31)..(32): Xaa is C or S
RVVMNNSLQEIVNSSDDYYLVTLPELQTPAXXPKP

SEQ ID NO: 9615 - protein, 37 aa, Artificial Sequence
  Non-cyclic GFR-binding peptide
  MOD_RES (2)..(4)..(36): Xaa is C or S
HXGXSRVVMNNSLQEIVNSSDDYYLVTLPELKTPAXT

SEQ ID NO: 9616 - protein, 41 aa, Artificial Sequence
  Non-cyclic GFR-binding peptide
  MOD_RES (2)..(4)..(37)..(38): Xaa is C or S
  MOD_RES (15)..(16)..(17)..(18)..(19): Xaa is A or G
  MOD_RES (20)..(21)..(22)..(23): Xaa is A or G or absent
SXKXSKVIMNSLQEXXXXXXXXXYYVIPLPELDQSVXXPSA

SEQ ID NO: 9617 - protein, 38 aa, Artificial Sequence
  Non-cyclic GFR-binding peptide
  MOD_RES (1)..(34)..(35): Xaa is C or S
  MOD_RES (12)..(13)..(14)..(15)..(16): Xaa is A or G
  MOD_RES (17)..(18)..(19)..(20): Xaa is A or G or absent
XSKVVMEYQKYXXXXXXXXXIFLISIPSLDQPVXXPSA

SEQ ID NO: 9618 - protein, 37 aa, Artificial Sequence
  Non-cyclic GFR-binding peptide
  MOD_RES (1)..(35)..(36): Xaa is C or S
  MOD_RES (13)..(14)..(15)..(16)..(17): Xaa is A or G
  MOD_RES (18)..(19)..(20)..(21): Xaa is A or G or absent
XGEVVMEEYQKYXXXXXXXXXIFLMSIPSLETPVXXA

SEQ ID NO: 9619 - protein, 40 aa, Artificial Sequence
  Non-cyclic GFR-binding peptide
  MOD_RES (34)..(35): Xaa is C or S
  MOD_RES (12)..(13)..(14)..(15)..(16): Xaa is A or G
  MOD_RES (17)..(18)..(19)..(20): Xaa is A or G or absent
GEVVMDNSLQEXXXXXXXXXYYVMPLPELETPVXXAKPIK

SEQ ID NO: 9620 - protein, 34 aa, Artificial Sequence
  Non-cyclic GFR-binding peptide
  MOD_RES (2)..(34): Xaa is C or S
GXGEVVMDNSLQEVVKENEDYYVMPLPELETPVX

SEQ ID NO: 9621 - protein, 36 aa, Artificial Sequence
  Non-cyclic GFR-binding peptide
  MOD_RES (1)..(35)..(36): Xaa is C or S
  MOD_RES (13)..(14)..(15)..(16)..(17): Xaa is A or G
  MOD_RES (18)..(19)..(20)..(21): Xaa is A or G or absent
XARVVMNNSLQEXXXXXXXXXYYLVTLPELQTPAXX

SEQ ID NO: 9622 - protein, 40 aa, Artificial Sequence
  Non-cyclic GFR-binding peptide
  MOD_RES (34)..(35): Xaa is C or S
  MOD_RES (12)..(13)..(14)..(15)..(16): Xaa is A or G
  MOD_RES (17)..(18)..(19)..(20): Xaa is A or G or absent
GEVVMDNSLQEXXXXXXXXXYYLMTLPELETPVXXAKPIK

SEQ ID NO: 9623 - protein, 40 aa, Artificial Sequence
  Non-cyclic GFR-binding peptide
  MOD_RES (2)..(34): Xaa is C or S
GXSRVVMNNSLQEIVNSSDDYYLVTLPELKTPAXTPKTVH

SEQ ID NO: 9624 - protein, 37 aa, Artificial Sequence
  Non-cyclic GFR-binding peptide
  MOD_RES (2)..(4): Xaa is C or S
  MOD_RES (16)..(17)..(18)..(19)..(20): Xaa is A or G
  MOD_RES (21)..(22)..(23)..(24): Xaa is A or G or absent
HXGXARVVMNNSLQEXXXXXXXXXYYVVPLPELQTPA

SEQ ID NO: 9625 - protein, 39 aa, Artificial Sequence
  Non-cyclic GFR-binding peptide
  MOD_RES (1)..(33)..(34): Xaa is C or S
XGEVVMDEYQKYVVKENEDIFLMSIPSLETPVXXAKPIK

SEQ ID NO: 9626 - protein, 37 aa, Artificial Sequence
  Non-cyclic GFR-binding peptide
  MOD_RES (2)..(36)..(37): Xaa is C or S
  MOD_RES (14)..(15)..(16)..(17)..(18): Xaa is A or G
  MOD_RES (19)..(20)..(21)..(22): Xaa is A or G or absent
GXGEVVMEEYQKYXXXXXXXXXIFLMSIPSLETPVXX

SEQ ID NO: 9627 - protein, 38 aa, Artificial Sequence
  Non-cyclic GFR-binding peptide
  MOD_RES (2)..(34)..(35): Xaa is C or S
GXSEVVMDQYNKLVVNNASDLYLISIASLRTPVXXTPP

SEQ ID NO: 9628 - protein, 37 aa, Artificial Sequence
  Non-cyclic GFR-binding peptide
  MOD_RES (2)..(34)..(35): Xaa is C or S
GXGEVVMENSLQEVVKDYEDYYVMPLPELETPVXXAK

SEQ ID NO: 9629 - protein, 39 aa, Artificial Sequence
  Non-cyclic GFR-binding peptide
  MOD_RES (2)..(36)..(37): Xaa is C or S
  MOD_RES (14)..(15)..(16)..(17)..(18): Xaa is A or G
  MOD_RES (19)..(20)..(21)..(22): Xaa is A or G or absent
GXGEVVMDNSLQEXXXXXXXXXYYVMPLPELETPVXXAK

SEQ ID NO: 9630 - protein, 36 aa, Artificial Sequence
  Non-cyclic GFR-binding peptide
  MOD_RES (31)..(32): Xaa is C or S
EVVMDNSLQEVVKENEDYYLMTLPELETPVXXAKPI

SEQ ID NO: 9631 - protein, 37 aa, Artificial Sequence
  Non-cyclic GFR-binding peptide
  MOD_RES (2)..(4)..(36)..(37): Xaa is C or S
HXGXARVVMNNSLQEIVNSSDDYYVVPLPELQTPAXX

SEQ ID NO: 9632 - protein, 37 aa, Artificial Sequence
  Non-cyclic GFR-binding peptide
  MOD_RES (1)..(35)..(36): Xaa is C or S
  MOD_RES (13)..(14)..(15)..(16)..(17): Xaa is A or G
  MOD_RES (18)..(19)..(20)..(21): Xaa is A or G or absent
XSEVVMDRYKKLXXXXXXXXXFYLISIANLRTPVXXT

SEQ ID NO: 9633 - protein, 30 aa, Artificial Sequence
  Non-cyclic GFR-binding peptide
RVVMNNSLQEIVNSSDDYYLVTLPELKTPA

SEQ ID NO: 9634 - protein, 38 aa, Artificial Sequence
  Non-cyclic GFR-binding peptide
  MOD_RES (1)..(3)..(37)..(38): Xaa is C or S
  MOD_RES (15)..(16)..(17)..(18)..(19): Xaa is A or G
  MOD_RES (20)..(21)..(22)..(23): Xaa is A or G or absent
XGXARVVMNNSLQEXXXXXXXXXYYVVPLPELQTPAXX

SEQ ID NO: 9635 - protein, 39 aa, Artificial Sequence
  Non-cyclic GFR-binding peptide
  MOD_RES (2)..(4)..(36)..(37): Xaa is C or S
HXGXARVVMNNSLQEIVNSSDDYYVVPLPELQTPAXXPK

SEQ ID NO: 9636 - protein, 39 aa, Artificial Sequence
  Non-cyclic GFR-binding peptide
  MOD_RES (33)..(34): Xaa is C or S
  MOD_RES (11)..(12)..(13)..(14)..(15): Xaa is A or G
  MOD_RES (16)..(17)..(18)..(19): Xaa is A or G or absent
EVVMDEYQKYXXXXXXXXXIFLMSIPSLETPVXXAKPIK

SEQ ID NO: 9637 - protein, 43 aa, Artificial Sequence
  Non-cyclic GFR-binding peptide
  MOD_RES (2)..(4)..(38)..(39): Xaa is C or S
  MOD_RES (16)..(17)..(18)..(19)..(20): Xaa is A or G
  MOD_RES (21)..(22)..(23)..(24): Xaa is A or G or absent
RXGXGEVVMDNSLQEXXXXXXXXXYYLMTLPELETPVXXAKPI

SEQ ID NO: 9638 - protein, 42 aa, Artificial Sequence
  Non-cyclic GFR-binding peptide
  MOD_RES (2)..(4)..(36)..(37): Xaa is C or S
RXGXGEVVMENSLQEVVKDYEDYYVMPLPELETPVXXAKPIS

SEQ ID NO: 9639 - protein, 37 aa, Artificial Sequence
  Non-cyclic GFR-binding peptide
  MOD_RES (2)..(34)..(35): Xaa is C or S
GXSRVVMNNSLQEIVNSSDDYYLVTLPELKTPAXXPK

SEQ ID NO: 9640 - protein, 34 aa, Artificial Sequence
  Non-cyclic GFR-binding peptide
  MOD_RES (2)..(33)..(34): Xaa is C or S
KXSKVIMNSLQEIKPTKGIYYVIPLPELDQSVXX

SEQ ID NO: 9641 - protein, 38 aa, Artificial Sequence
  Non-cyclic GFR-binding peptide
  MOD_RES (2)..(33)..(34): Xaa is C or S
KXSKVIMNSLQEIKPTKGIYYVIPLPELDQSVXXPSAS

SEQ ID NO: 9642 - protein, 37 aa, Artificial Sequence
  Non-cyclic GFR-binding peptide
  MOD_RES (33)..(33): Xaa is C or S
  MOD_RES (11)..(12)..(13)..(14)..(15): Xaa is A or G
  MOD_RES (16)..(17)..(18)..(19): Xaa is A or G or absent
RVVMNNSLQEXXXXXXXXXYYLVTLPELKTPAXTPKT

SEQ ID NO: 9643 - protein, 34 aa, Artificial Sequence
  Non-cyclic GFR-binding peptide
  MOD_RES (32)..(33): Xaa is C or S
SRVVMNNSLQEIVNSSDDYYLVTLPELKTPAXXP

SEQ ID NO: 9644 - protein, 37 aa, Artificial Sequence
  Non-cyclic GFR-binding peptide
  MOD_RES (1)..(33)..(34): Xaa is C or S
XARVVMNNSLQEIVNSSDDYYLVTLPELQTPAXXPKP

SEQ ID NO: 9645 - protein, 42 aa, Artificial Sequence
  Non-cyclic GFR-binding peptide
  MOD_RES (2)..(4)..(36): Xaa is C or S
HXGXSRVVMNNSLQEIVNSSDDYYLVTLPELKTPAXTPKTVH

SEQ ID NO: 9646 - protein, 33 aa, Artificial Sequence
  Non-cyclic GFR-binding peptide
  MOD_RES (32)..(33): Xaa is C or S
ARVVMNNSLQEIVNSSDDYYVVPLPELQTPAXX

SEQ ID NO: 9647 - protein, 40 aa, Artificial Sequence
  Non-cyclic GFR-binding peptide
  MOD_RES (1)..(3)..(35)..(36): Xaa is C or S
XGXGEVVMDNSLQEVVKENEDYYVMPLPELETPVXXAKPI

SEQ ID NO: 9648 - protein, 31 aa, Artificial Sequence
  Non-cyclic GFR-binding peptide
  MOD_RES (31)..(31): Xaa is C or S
RVVMNNSLQEIVNSSDDYYLVTLPELQTPAX

SEQ ID NO: 9649 - protein, 35 aa, Artificial Sequence
  Non-cyclic GFR-binding peptide
  MOD_RES (33)..(34): Xaa is C or S
  MOD_RES (11)..(12)..(13)..(14)..(15): Xaa is A or G
  MOD_RES (16)..(17)..(18)..(19): Xaa is A or G or absent
EVVMEEYQKYXXXXXXXXXIFLMSIPSLETPVXXA

SEQ ID NO: 9650 - protein, 42 aa, Artificial Sequence
  Non-cyclic GFR-binding peptide
  MOD_RES (1)..(3)..(37): Xaa is C or S
  MOD_RES (15)..(16)..(17)..(18)..(19): Xaa is A or G
  MOD_RES (20)..(21)..(22)..(23): Xaa is A or G or absent
XGXSRVVMNNSLQEXXXXXXXXXYYLVTLPELKTPAXTPKTV

SEQ ID NO: 9651 - protein, 36 aa, Artificial Sequence
  Non-cyclic GFR-binding peptide
  MOD_RES (33)..(34): Xaa is C or S
  MOD_RES (11)..(12)..(13)..(14)..(15): Xaa is A or G
  MOD_RES (16)..(17)..(18)..(19): Xaa is A or G or absent
EVVMDNSLQEXXXXXXXXXYYLITLPELRTPVXXTP

SEQ ID NO: 9652 - protein, 37 aa, Artificial Sequence
  Non-cyclic GFR-binding peptide
  MOD_RES (2)..(4)..(36)..(37): Xaa is C or S
RXGXGEVVMEEYQKYVVKDYEDIFLMSIPSLETPVXX

SEQ ID NO: 9653 - protein, 33 aa, Artificial Sequence
  Non-cyclic GFR-binding peptide
  MOD_RES (33)..(33): Xaa is C or S
  MOD_RES (11)..(12)..(13)..(14)..(15): Xaa is A or G
  MOD_RES (16)..(17)..(18)..(19): Xaa is A or G or absent
RVVMNNSLQEXXXXXXXXXYYVVPLPELKTPAX

SEQ ID NO: 9654 - protein, 40 aa, Artificial Sequence
  Non-cyclic GFR-binding peptide
  MOD_RES (2)..(35)..(36): Xaa is C or S
  MOD_RES (13)..(14)..(15)..(16)..(17): Xaa is A or G
  MOD_RES (18)..(19)..(20)..(21): Xaa is A or G or absent
KXSKVVMEYQKYXXXXXXXXXIFLISIPSLDQPVXXPSAS

SEQ ID NO: 9655 - protein, 37 aa, Artificial Sequence
  Non-cyclic GFR-binding peptide
  MOD_RES (33)..(34): Xaa is C or S
  MOD_RES (11)..(12)..(13)..(14)..(15): Xaa is A or G
  MOD_RES (16)..(17)..(18)..(19): Xaa is A or G or absent
EVVMENSLQEXXXXXXXXXYYVMPLPELETPVXXAKP

SEQ ID NO: 9656 - protein, 33 aa, Artificial Sequence
  Non-cyclic GFR-binding peptide
  MOD_RES (33)..(33): Xaa is C or S
  MOD_RES (11)..(12)..(13)..(14)..(15): Xaa is A or G
  MOD_RES (16)..(17)..(18)..(19): Xaa is A or G or absent
RVVMNNSLQEXXXXXXXXXYYLVTLPELKTPAX

SEQ ID NO: 9657 - protein, 40 aa, Artificial Sequence
  Non-cyclic GFR-binding peptide
  MOD_RES (2)..(4)..(35)..(36): Xaa is C or S
SXKXSKVVMNSLQEVKPTRGVYYVIPLPELDQPVXXPSAS

SEQ ID NO: 9658 - protein, 36 aa, Artificial Sequence
  Non-cyclic GFR-binding peptide
  MOD_RES (2)..(4): Xaa is C or S
  MOD_RES (15)..(16)..(17)..(18)..(19): Xaa is A or G
  MOD_RES (20)..(21)..(22)..(23): Xaa is A or G or absent
SXKXSKVIMNSLQEXXXXXXXXXYYVIPLPELDQSV

SEQ ID NO: 9659 - protein, 42 aa, Artificial Sequence
  Non-cyclic GFR-binding peptide
  MOD_RES (1)..(3)..(37)..(38): Xaa is C or S
  MOD_RES (15)..(16)..(17)..(18)..(19): Xaa is A or G
  MOD_RES (20)..(21)..(22)..(23): Xaa is A or G or absent
XGXGEVVMENSLQEXXXXXXXXXYYLMTLPELETPVXXAKPI

SEQ ID NO: 9660 - protein, 32 aa, Artificial Sequence
  Non-cyclic GFR-binding peptide
  MOD_RES (1)..(1): Xaa is C or S
XGEVVMENSLQEVVKDYEDYYLMTLPELETPV

SEQ ID NO: 9661 - protein, 32 aa, Artificial Sequence
  Non-cyclic GFR-binding peptide
  MOD_RES (11)..(12)..(13)..(14)..(15): Xaa is A or G
  MOD_RES (16)..(17)..(18)..(19): Xaa is A or G or absent
RVVMNNSLQEXXXXXXXXXYYVVPLPELKTPA

SEQ ID NO: 9662 - protein, 36 aa, Artificial Sequence
  Non-cyclic GFR-binding peptide
  MOD_RES (1)..(3)..(36): Xaa is C or S
  MOD_RES (14)..(15)..(16)..(17)..(18): Xaa is A or G
  MOD_RES (19)..(20)..(21)..(22): Xaa is A or G or absent
XKXSKVVMEYQKYXXXXXXXXXIFLISIPSLDQPVX

SEQ ID NO: 9663 - protein, 36 aa, Artificial Sequence
  Non-cyclic GFR-binding peptide
  MOD_RES (31)..(32): Xaa is C or S
EVVMDNSLQEVVNNASDYYLITLPELRTPVXXTPPT

SEQ ID NO: 9664 - protein, 32 aa, Artificial Sequence
  Non-cyclic GFR-binding peptide
  MOD_RES (31)..(32): Xaa is C or S
EVVMDNSLQEVVKENEDYYVMPLPELETPVXX

SEQ ID NO: 9665 - protein, 38 aa, Artificial Sequence
  Non-cyclic GFR-binding peptide
  MOD_RES (1)..(3)..(34)..(35): Xaa is C or S
XKXSKVVMEYQKYVKPTRGVIFLISIPSLDQPVXXPSA

SEQ ID NO: 9666 - protein, 40 aa, Artificial Sequence
  Non-cyclic GFR-binding peptide
  MOD_RES (2)..(36)..(37): Xaa is C or S
  MOD_RES (14)..(15)..(16)..(17)..(18): Xaa is A or G
  MOD_RES (19)..(20)..(21)..(22): Xaa is A or G or absent
GXSRVVMNNSLQEXXXXXXXXXYYVVPLPELKTPAXXPKP

SEQ ID NO: 9667 - protein, 33 aa, Artificial Sequence
  Non-cyclic GFR-binding peptide
  MOD_RES (1)..(3): Xaa is C or S
XKXSKVVMEYQKYVKPTRGVIFLISIPSLDQPV

SEQ ID NO: 9668 - protein, 36 aa, Artificial Sequence
  Non-cyclic GFR-binding peptide
  MOD_RES (1)..(3): Xaa is C or S
  MOD_RES (15)..(16)..(17)..(18)..(19): Xaa is A or G
  MOD_RES (20)..(21)..(22)..(23): Xaa is A or G or absent
XGXGEVVMDEYQKYXXXXXXXXXIFLMSIPSLETPV

SEQ ID NO: 9669 - protein, 38 aa, Artificial Sequence
  Non-cyclic GFR-binding peptide
  MOD_RES (33)..(34): Xaa is C or S
  MOD_RES (11)..(12)..(13)..(14)..(15): Xaa is A or G
  MOD_RES (16)..(17)..(18)..(19): Xaa is A or G or absent
RVVMNNSLQEXXXXXXXXXYYLVTLPELKTPAXXPKPV

SEQ ID NO: 9670 - protein, 40 aa, Artificial Sequence
  Non-cyclic GFR-binding peptide
  MOD_RES (1)..(35)..(36): Xaa is C or S
  MOD_RES (13)..(14)..(15)..(16)..(17): Xaa is A or G
  MOD_RES (18)..(19)..(20)..(21): Xaa is A or G or absent
XSRVVMNNSLQEXXXXXXXXXYYLVTLPELKTPAXXPKPV

SEQ ID NO: 9671 - protein, 34 aa, Artificial Sequence
  Non-cyclic GFR-binding peptide
  MOD_RES (32)..(33): Xaa is C or S
GEVVMDEYQKYVVKENEDIFLMSIPSLETPVXXA

SEQ ID NO: 9672 - protein, 32 aa, Artificial Sequence
  Non-cyclic GFR-binding peptide
  MOD_RES (1)..(32): Xaa is C or S
XSRVIMEYQKYVKPKRGVIFLISIPSLAQPVX

SEQ ID NO: 9673 - protein, 42 aa, Artificial Sequence
  Non-cyclic GFR-binding peptide
  MOD_RES (1)..(3)..(37)..(38): Xaa is C or S
  MOD_RES (15)..(16)..(17)..(18)..(19): Xaa is A or G
  MOD_RES (20)..(21)..(22)..(23): Xaa is A or G or absent
XGXGEVVMDNSLQEXXXXXXXXXYYLMTLPELETPVXXAKPI

SEQ ID NO: 9674 - protein, 37 aa, Artificial Sequence
  Non-cyclic GFR-binding peptide
  MOD_RES (2)..(34)..(35): Xaa is C or S
GXARVVMNNSLQEIVNSSDDYYLVTLPELQTPAXXPK

SEQ ID NO: 9675 - protein, 41 aa, Artificial Sequence
  Non-cyclic GFR-binding peptide
  MOD_RES (2)..(4)..(37)..(38): Xaa is C or S
  MOD_RES (15)..(16)..(17)..(18)..(19): Xaa is A or G
  MOD_RES (20)..(21)..(22)..(23): Xaa is A or G or absent
SXKXSRVIMEYQKYXXXXXXXXXIFLISIPSLAQPVXXPAA

SEQ ID NO: 9676 - protein, 39 aa, Artificial Sequence
  Non-cyclic GFR-binding peptide
  MOD_RES (1)..(35): Xaa is C or S
  MOD_RES (13)..(14)..(15)..(16)..(17): Xaa is A or G
  MOD_RES (18)..(19)..(20)..(21): Xaa is A or G or absent
XSRVVMNNSLQEXXXXXXXXXYYLVTLPELKTPAXTPKT

SEQ ID NO: 9677 - protein, 38 aa, Artificial Sequence
  Non-cyclic GFR-binding peptide
  MOD_RES (2)..(4)..(38): Xaa is C or S
  MOD_RES (16)..(17)..(18)..(19)..(20): Xaa is A or G
  MOD_RES (21)..(22)..(23)..(24): Xaa is A or G or absent
HXGXARVVMNNSLQEXXXXXXXXXYYVVPLPELQTPAX

SEQ ID NO: 9678 - protein, 38 aa, Artificial Sequence
  Non-cyclic GFR-binding peptide
  MOD_RES (33)..(34): Xaa is C or S
  MOD_RES (11)..(12)..(13)..(14)..(15): Xaa is A or G
  MOD_RES (16)..(17)..(18)..(19): Xaa is A or G or absent
SKVVMNSLQEXXXXXXXXXYYVIPLPELDQPVXXPSAS

SEQ ID NO: 9679 - protein, 40 aa, Artificial Sequence
  Non-cyclic GFR-binding peptide
  MOD_RES (34)..(35): Xaa is C or S
  MOD_RES (12)..(13)..(14)..(15)..(16): Xaa is A or G
  MOD_RES (17)..(18)..(19)..(20): Xaa is A or G or absent
GEVVMENSLQEXXXXXXXXXYYLMTLPELETPVXXAKPIS

SEQ ID NO: 9680 - protein, 41 aa, Artificial Sequence
  Non-cyclic GFR-binding peptide
  MOD_RES (2)..(4)..(38)..(39): Xaa is C or S
  MOD_RES (16)..(17)..(18)..(19)..(20): Xaa is A or G
  MOD_RES (21)..(22)..(23)..(24): Xaa is A or G or absent
HXGXSRVVMNNSLQEXXXXXXXXXYYLVTLPELKTPAXXPK

SEQ ID NO: 9681 - protein, 32 aa, Artificial Sequence
  Non-cyclic GFR-binding peptide
  MOD_RES (31)..(31): Xaa is C or S
RVVMNEYQKYIVNSSDDIFLVSIPSLKTPAXT

SEQ ID NO: 9682 - protein, 37 aa, Artificial Sequence
  Non-cyclic GFR-binding peptide
  MOD_RES (2)..(4)..(37): Xaa is C or S
  MOD_RES (15)..(16)..(17)..(18)..(19): Xaa is A or G
  MOD_RES (20)..(21)..(22)..(23): Xaa is A or G or absent
SXKXSKVIMEYQKYXXXXXXXXXIFLISIPSLDQSVX

SEQ ID NO: 9683 - protein, 37 aa, Artificial Sequence
  Non-cyclic GFR-binding peptide
  MOD_RES (1)..(3)..(35): Xaa is C or S
XGXSRVVMNEYQKYIVNSSDDIFLVSIPSLKTPAXTP

SEQ ID NO: 9684 - protein, 37 aa, Artificial Sequence
  Non-cyclic GFR-binding peptide
  MOD_RES (33)..(34): Xaa is C or S
  MOD_RES (11)..(12)..(13)..(14)..(15): Xaa is A or G
  MOD_RES (16)..(17)..(18)..(19): Xaa is A or G or absent
SRVIMEYQKYXXXXXXXXXIFLISIPSLAQPVXXPAA

SEQ ID NO: 9685 - protein, 37 aa, Artificial Sequence
  Non-cyclic GFR-binding peptide
  MOD_RES (33)..(33): Xaa is C or S
  MOD_RES (11)..(12)..(13)..(14)..(15): Xaa is A or G
  MOD_RES (16)..(17)..(18)..(19): Xaa is A or G or absent
RVVMNNSLQEXXXXXXXXXYYVVPLPELKTPAXTPKT

SEQ ID NO: 9686 - protein, 40 aa, Artificial Sequence
  Non-cyclic GFR-binding peptide
  MOD_RES (2)..(4)..(38)..(39): Xaa is C or S
  MOD_RES (16)..(17)..(18)..(19)..(20): Xaa is A or G
  MOD_RES (21)..(22)..(23)..(24): Xaa is A or G or absent
RXGXSEVVMDRYKKLXXXXXXXXXFYLISIANLRTPVXXT

SEQ ID NO: 9687 - protein, 37 aa, Artificial Sequence
  Non-cyclic GFR-binding peptide
  MOD_RES (2)..(33)..(34): Xaa is C or S
KXSKVVMEYQKYVKPTRGVIFLISIPSLDQPVXXPSA

SEQ ID NO: 9688 - protein, 36 aa, Artificial Sequence
  Non-cyclic GFR-binding peptide
  MOD_RES (33)..(34): Xaa is C or S
  MOD_RES (11)..(12)..(13)..(14)..(15): Xaa is A or G
  MOD_RES (16)..(17)..(18)..(19): Xaa is A or G or absent
EVVMDNSLQEXXXXXXXXXYYVIPLPELRTPVXXTP

SEQ ID NO: 9689 - protein, 40 aa, Artificial Sequence
  Non-cyclic GFR-binding peptide
  MOD_RES (34)..(35): Xaa is C or S
  MOD_RES (12)..(13)..(14)..(15)..(16): Xaa is A or G
  MOD_RES (17)..(18)..(19)..(20): Xaa is A or G or absent
SRVVMNNSLQEXXXXXXXXXYYVVPLPELKTPAXXPKPVY

SEQ ID NO: 9690 - protein, 37 aa, Artificial Sequence
  Non-cyclic GFR-binding peptide
  MOD_RES (2)..(36)..(37): Xaa is C or S
  MOD_RES (14)..(15)..(16)..(17)..(18): Xaa is A or G
  MOD_RES (19)..(20)..(21)..(22): Xaa is A or G or absent
GXSEVVMDRYKKLXXXXXXXXXFYLISIANLRTPVXX

SEQ ID NO: 9691 - protein, 41 aa, Artificial Sequence
  Non-cyclic GFR-binding peptide
  MOD_RES (1)..(35)..(36): Xaa is C or S
  MOD_RES (13)..(14)..(15)..(16)..(17): Xaa is A or G
  MOD_RES (18)..(19)..(20)..(21): Xaa is A or G or absent
XGEVVMEEYQKYXXXXXXXXXIFLMSIPSLETPVXXAKPIS

SEQ ID NO: 9692 - protein, 39 aa, Artificial Sequence
  Non-cyclic GFR-binding peptide
  MOD_RES (2)..(36)..(37): Xaa is C or S
  MOD_RES (14)..(15)..(16)..(17)..(18): Xaa is A or G
  MOD_RES (19)..(20)..(21)..(22): Xaa is A or G or absent
GXGEVVMDEYQKYXXXXXXXXXIFLMSIPSLETPVXXAK

SEQ ID NO: 9693 - protein, 39 aa, Artificial Sequence
  Non-cyclic GFR-binding peptide
  MOD_RES (2)..(4)..(35)..(36): Xaa is C or S
SXKXSRVIMNSLQEVKPKRGVYYLITLPELAQPVXXPAA

SEQ ID NO: 9694 - protein, 40 aa, Artificial Sequence
  Non-cyclic GFR-binding peptide
  MOD_RES (1)..(3)..(35)..(36): Xaa is C or S
XGXARVVMNNSLQEIVNSSDDYYVVPLPELQTPAXXPKPV

SEQ ID NO: 9695 - protein, 43 aa, Artificial Sequence
  Non-cyclic GFR-binding peptide
  MOD_RES (1)..(3)..(37)..(38): Xaa is C or S
  MOD_RES (15)..(16)..(17)..(18)..(19): Xaa is A or G
  MOD_RES (20)..(21)..(22)..(23): Xaa is A or G or absent
XGXGEVVMDNSLQEXXXXXXXXXYYVMPLPELETPVXXAKPIK

SEQ ID NO: 9696 - protein, 33 aa, Artificial Sequence
  Non-cyclic GFR-binding peptide
  MOD_RES (12)..(13)..(14)..(15)..(16): Xaa is A or G
  MOD_RES (17)..(18)..(19)..(20): Xaa is A or G or absent
ARVVMNNSLQEXXXXXXXXXYYVVPLPELQTPA

SEQ ID NO: 9697 - protein, 32 aa, Artificial Sequence
  Non-cyclic GFR-binding peptide
  MOD_RES (31)..(32): Xaa is C or S
RVVMNNSLQEIVNSSDDYYLVTLPELQTPAXX

SEQ ID NO: 9698 - protein, 42 aa, Artificial Sequence
  Non-cyclic GFR-binding peptide
  MOD_RES (2)..(4)..(38)..(39): Xaa is C or S
  MOD_RES (16)..(17)..(18)..(19)..(20): Xaa is A or G
  MOD_RES (21)..(22)..(23)..(24): Xaa is A or G or absent
HXGXARVVMNNSLQEXXXXXXXXXYYLVTLPELQTPAXXPKP

SEQ ID NO: 9699 - protein, 34 aa, Artificial Sequence
  Non-cyclic GFR-binding peptide
  MOD_RES (32)..(33): Xaa is C or S
SRVVMNNSLQEIVNSSDDYYVVPLPELKTPAXXP

SEQ ID NO: 9700 - protein, 40 aa, Artificial Sequence
  Non-cyclic GFR-binding peptide
  MOD_RES (2)..(34): Xaa is C or S
GXSRVVMNEYQKYIVNSSDDIFLVSIPSLKTPAXTPKTVH

SEQ ID NO: 9701 - protein, 38 aa, Artificial Sequence
  Non-cyclic GFR-binding peptide
  MOD_RES (1)..(32)..(33): Xaa is C or S
XSKVIMEYQKYIKPTKGIIFLISIPSLDQSVXXPSASA

SEQ ID NO: 9702 - protein, 41 aa, Artificial Sequence
  Non-cyclic GFR-binding peptide
  MOD_RES (1)..(3)..(35)..(36): Xaa is C or S
XGXSRVVMNNSLQEIVNSSDDYYVVPLPELKTPAXXPKPVY

SEQ ID NO: 9703 - protein, 35 aa, Artificial Sequence
  Non-cyclic GFR-binding peptide
  MOD_RES (1)..(3)..(35): Xaa is C or S
XGXGEVVMEEYQKYVVKDYEDIFLMSIPSLETPVX

SEQ ID NO: 9704 - protein, 34 aa, Artificial Sequence
  Non-cyclic GFR-binding peptide
  MOD_RES (2)..(4): Xaa is C or S
SXKXSKVVMNSLQEVKPTRGVYYVIPLPELDQPV

SEQ ID NO: 9705 - protein, 40 aa, Artificial Sequence
  Non-cyclic GFR-binding peptide
  MOD_RES (1)..(3)..(36)..(37): Xaa is C or S
  MOD_RES (14)..(15)..(16)..(17)..(18): Xaa is A or G
  MOD_RES (19)..(20)..(21)..(22): Xaa is A or G or absent
XKXSKVIMEYQKYXXXXXXXXXIFLISIPSLDQSVXXPSA

SEQ ID NO: 9706 - protein, 38 aa, Artificial Sequence
  Non-cyclic GFR-binding peptide
  MOD_RES (1)..(3)..(37): Xaa is C or S
  MOD_RES (15)..(16)..(17)..(18)..(19): Xaa is A or G
  MOD_RES (20)..(21)..(22)..(23): Xaa is A or G or absent
XGXSRVVMNNSLQEXXXXXXXXXYYLVTLPELKTPAXT

SEQ ID NO: 9707 - protein, 40 aa, Artificial Sequence
  Non-cyclic GFR-binding peptide
  MOD_RES (1)..(3)..(37)..(38): Xaa is C or S
  MOD_RES (15)..(16)..(17)..(18)..(19): Xaa is A or G
  MOD_RES (20)..(21)..(22)..(23): Xaa is A or G or absent
XGXGEVVMENSLQEXXXXXXXXXYYVMPLPELETPVXXAK

SEQ ID NO: 9708 - protein, 36 aa, Artificial Sequence
  Non-cyclic GFR-binding peptide
  MOD_RES (1)..(3)..(35)..(36): Xaa is C or S
XGXSRVVMNNSLQEIVNSSDDYYVVPLPELKTPAXX

SEQ ID NO: 9709 - protein, 36 aa, Artificial Sequence
  Non-cyclic GFR-binding peptide
  MOD_RES (2)..(34): Xaa is C or S
GXSRVVMNEYQKYIVNSSDDIFLVSIPSLKTPAXTP

SEQ ID NO: 9710 - protein, 39 aa, Artificial Sequence
  Non-cyclic GFR-binding peptide
  MOD_RES (1)..(33)..(34): Xaa is C or S
XGEVVMENSLQEVVKDYEDYYVMPLPELETPVXXAKPIS

SEQ ID NO: 9711 - protein, 35 aa, Artificial Sequence
  Non-cyclic GFR-binding peptide
  MOD_RES (2)..(2): Xaa is C or S
  MOD_RES (14)..(15)..(16)..(17)..(18): Xaa is A or G
  MOD_RES (19)..(20)..(21)..(22): Xaa is A or G or absent
GXGEVVMDNSLQEXXXXXXXXXYYLMTLPELETPV

SEQ ID NO: 9712 - protein, 39 aa, Artificial Sequence
  Non-cyclic GFR-binding peptide
  MOD_RES (1)..(3)..(35)..(36): Xaa is C or S
XGXGEVVMENSLQEVVKDYEDYYVMPLPELETPVXXAKP

SEQ ID NO: 9713 - protein, 37 aa, Artificial Sequence
  Non-cyclic GFR-binding peptide
  MOD_RES (2)..(4): Xaa is C or S
  MOD_RES (16)..(17)..(18)..(19)..(20): Xaa is A or G
  MOD_RES (21)..(22)..(23)..(24): Xaa is A or G or absent
HXGXARVVMNEYQKYXXXXXXXXXIFLVSIPSLQTPA

SEQ ID NO: 9714 - protein, 38 aa, Artificial Sequence
  Non-cyclic GFR-binding peptide
  MOD_RES (34)..(35): Xaa is C or S
  MOD_RES (12)..(13)..(14)..(15)..(16): Xaa is A or G
  MOD_RES (17)..(18)..(19)..(20): Xaa is A or G or absent
SEVVMDNSLQEXXXXXXXXXYYLITLPELRTPVXXTPP

SEQ ID NO: 9715 - protein, 42 aa, Artificial Sequence
  Non-cyclic GFR-binding peptide
  MOD_RES (1)..(3)..(37)..(38): Xaa is C or S
  MOD_RES (15)..(16)..(17)..(18)..(19): Xaa is A or G
  MOD_RES (20)..(21)..(22)..(23): Xaa is A or G or absent
XGXARVVMNNSLQEXXXXXXXXXYYVVPLPELQTPAXXPKPV

SEQ ID NO: 9716 - protein, 33 aa, Artificial Sequence
  Non-cyclic GFR-binding peptide
  MOD_RES (1)..(3): Xaa is C or S
XKXSKVIMEYQKYIKPTKGIIFLISIPSLDQSV

SEQ ID NO: 9717 - protein, 35 aa, Artificial Sequence
  Non-cyclic GFR-binding peptide
  MOD_RES (1)..(3)..(35): Xaa is C or S
XGXGEVVMENSLQEVVKDYEDYYLMTLPELETPVX

SEQ ID NO: 9718 - protein, 37 aa, Artificial Sequence
  Non-cyclic GFR-binding peptide
  MOD_RES (1)..(3)..(35): Xaa is C or S
XGXSRVVMNNSLQEIVNSSDDYYLVTLPELKTPAXTP

SEQ ID NO: 9719 - protein, 34 aa, Artificial Sequence
  Non-cyclic GFR-binding peptide
  MOD_RES (1)..(1): Xaa is C or S
  MOD_RES (13)..(14)..(15)..(16)..(17): Xaa is A or G
  MOD_RES (18)..(19)..(20)..(21): Xaa is A or G or absent
XGEVVMDNSLQEXXXXXXXXXYYLMTLPELETPV

SEQ ID NO: 9720 - protein, 43 aa, Artificial Sequence
  Non-cyclic GFR-binding peptide
  MOD_RES (2)..(4)..(38)..(39): Xaa is C or S
  MOD_RES (16)..(17)..(18)..(19)..(20): Xaa is A or G
  MOD_RES (21)..(22)..(23)..(24): Xaa is A or G or absent
HXGXSRVVMNNSLQEXXXXXXXXXYYLVTLPELKTPAXXPKPV

SEQ ID NO: 9721 - protein, 42 aa, Artificial Sequence
  Non-cyclic GFR-binding peptide
  MOD_RES (1)..(3)..(37)..(38): Xaa is C or S
  MOD_RES (15)..(16)..(17)..(18)..(19): Xaa is A or G
  MOD_RES (20)..(21)..(22)..(23): Xaa is A or G or absent
XGXSRVVMNEYQKYXXXXXXXXXIFLVSIPSLKTPAXXPKPV

SEQ ID NO: 9722 - protein, 40 aa, Artificial Sequence
  Non-cyclic GFR-binding peptide
  MOD_RES (1)..(3)..(37)..(38): Xaa is C or S
  MOD_RES (15)..(16)..(17)..(18)..(19): Xaa is A or G
  MOD_RES (20)..(21)..(22)..(23): Xaa is A or G or absent
XGXGEVVMDNSLQEXXXXXXXXXYYVMPLPELETPVXXAK

SEQ ID NO: 9723 - protein, 36 aa, Artificial Sequence
  Non-cyclic GFR-binding peptide
  MOD_RES (2)..(4)..(36): Xaa is C or S
RXGXGEVVMEEYQKYVVKDYEDIFLMSIPSLETPVX

SEQ ID NO: 9724 - protein, 40 aa, Artificial Sequence
  Non-cyclic GFR-binding peptide
  MOD_RES (1)..(3)..(37)..(38): Xaa is C or S
  MOD_RES (15)..(16)..(17)..(18)..(19): Xaa is A or G
  MOD_RES (20)..(21)..(22)..(23): Xaa is A or G or absent
XGXGEVVMENSLQEXXXXXXXXXYYLMTLPELETPVXXAK

SEQ ID NO: 9725 - protein, 38 aa, Artificial Sequence
  Non-cyclic GFR-binding peptide
  MOD_RES (1)..(3)..(35)..(36): Xaa is C or S
XGXARVVMNNSLQEIVNSSDDYYVVPLPELQTPAXXPK

SEQ ID NO: 9726 - protein, 37 aa, Artificial Sequence
  Non-cyclic GFR-binding peptide
  MOD_RES (1)..(3)..(36)..(37): Xaa is C or S
  MOD_RES (14)..(15)..(16)..(17)..(18): Xaa is A or G
  MOD_RES (19)..(20)..(21)..(22): Xaa is A or G or absent
XKXSKVVMEYQKYXXXXXXXXXIFLISIPSLDQPVXX

SEQ ID NO: 9727 - protein, 41 aa, Artificial Sequence
  Non-cyclic GFR-binding peptide
  MOD_RES (1)..(35)..(36): Xaa is C or S
  MOD_RES (13)..(14)..(15)..(16)..(17): Xaa is A or G
  MOD_RES (18)..(19)..(20)..(21): Xaa is A or G or absent
XARVVMNNSLQEXXXXXXXXXYYVVPLPELQTPAXXPKPVT

SEQ ID NO: 9728 - protein, 38 aa, Artificial Sequence
  Non-cyclic GFR-binding peptide
  MOD_RES (33)..(34): Xaa is C or S
  MOD_RES (11)..(12)..(13)..(14)..(15): Xaa is A or G
  MOD_RES (16)..(17)..(18)..(19): Xaa is A or G or absent
SKVVMEYQKYXXXXXXXXXIFLISIPSLDQPVXXPSAS

SEQ ID NO: 9729 - protein, 32 aa, Artificial Sequence
  Non-cyclic GFR-binding peptide
  MOD_RES (31)..(32): Xaa is C or S
RVVMNNSLQEIVNSSDDYYLVTLPELKTPAXX

SEQ ID NO: 9730 - protein, 42 aa, Artificial Sequence
  Non-cyclic GFR-binding peptide
  MOD_RES (2)..(4)..(38): Xaa is C or S
  MOD_RES (16)..(17)..(18)..(19)..(20): Xaa is A or G
  MOD_RES (21)..(22)..(23)..(24): Xaa is A or G or absent
HXGXSRVVMNNSLQEXXXXXXXXXYYVVPLPELKTPAXTPKT

SEQ ID NO: 9731 - protein, 35 aa, Artificial Sequence
  Non-cyclic GFR-binding peptide
  MOD_RES (2)..(35): Xaa is C or S
  MOD_RES (13)..(14)..(15)..(16)..(17): Xaa is A or G
  MOD_RES (18)..(19)..(20)..(21): Xaa is A or G or absent
KXSRVIMEYQKYXXXXXXXXXIFLISIPSLAQPVX

SEQ ID NO: 9732 - protein, 37 aa, Artificial Sequence
  Non-cyclic GFR-binding peptide
  MOD_RES (2)..(36)..(37): Xaa is C or S
  MOD_RES (14)..(15)..(16)..(17)..(18): Xaa is A or G
  MOD_RES (19)..(20)..(21)..(22): Xaa is A or G or absent
GXARVVMNEYQKYXXXXXXXXXIFLVSIPSLQTPAXX

SEQ ID NO: 9733 - protein, 36 aa, Artificial Sequence
  Non-cyclic GFR-binding peptide
  MOD_RES (2)..(34)..(35): Xaa is C or S
GXGEVVMDNSLQEVVKENEDYYVMPLPELETPVXXA

SEQ ID NO: 9734 - protein, 38 aa, Artificial Sequence
  Non-cyclic GFR-binding peptide
  MOD_RES (1)..(32)..(33): Xaa is C or S
XSRVIMNSLQEVKPKRGVYYLITLPELAQPVXXPAASA

SEQ ID NO: 9735 - protein, 35 aa, Artificial Sequence
  Non-cyclic GFR-binding peptide
  MOD_RES (2)..(4): Xaa is C or S
RXGXGEVVMDNSLQEVVKENEDYYVMPLPELETPV

SEQ ID NO: 9736 - protein, 40 aa, Artificial Sequence
  Non-cyclic GFR-binding peptide
  MOD_RES (1)..(3)..(35)..(36): Xaa is C or S
XGXGEVVMENSLQEVVKDYEDYYVMPLPELETPVXXAKPI

SEQ ID NO: 9737 - protein, 40 aa, Artificial Sequence
  Non-cyclic GFR-binding peptide
  MOD_RES (1)..(35)..(36): Xaa is C or S
  MOD_RES (13)..(14)..(15)..(16)..(17): Xaa is A or G
  MOD_RES (18)..(19)..(20)..(21): Xaa is A or G or absent
XSEVVMDRYKKLXXXXXXXXXFYLISIANLRTPVXXTPPT

SEQ ID NO: 9738 - protein, 33 aa, Artificial Sequence
  Non-cyclic GFR-binding peptide
  MOD_RES (1)..(32)..(33): Xaa is C or S
XSKVIMEYQKYIKPTKGIIFLISIPSLDQSVXX

SEQ ID NO: 9739 - protein, 37 aa, Artificial Sequence
  Non-cyclic GFR-binding peptide
  MOD_RES (33)..(34): Xaa is C or S
  MOD_RES (11)..(12)..(13)..(14)..(15): Xaa is A or G
  MOD_RES (16)..(17)..(18)..(19): Xaa is A or G or absent
EVVMDRYKKLXXXXXXXXXFYLISIANLRTPVXXTPP

SEQ ID NO: 9740 - protein, 37 aa, Artificial Sequence
  Non-cyclic GFR-binding peptide
  MOD_RES (2)..(36)..(37): Xaa is C or S
  MOD_RES (14)..(15)..(16)..(17)..(18): Xaa is A or G
  MOD_RES (19)..(20)..(21)..(22): Xaa is A or G or absent
GXGEVVMDEYQKYXXXXXXXXXIFLMSIPSLETPVXX

SEQ ID NO: 9741 - protein, 39 aa, Artificial Sequence
  Non-cyclic GFR-binding peptide
  MOD_RES (2)..(35)..(36): Xaa is C or S
  MOD_RES (13)..(14)..(15)..(16)..(17): Xaa is A or G
  MOD_RES (18)..(19)..(20)..(21): Xaa is A or G or absent
KXSRVIMNSLQEXXXXXXXXXYYLITLPELAQPVXXPAA

SEQ ID NO: 9742 - protein, 39 aa, Artificial Sequence
  Non-cyclic GFR-binding peptide
  MOD_RES (2)..(4)..(38)..(39): Xaa is C or S
  MOD_RES (16)..(17)..(18)..(19)..(20): Xaa is A or G
  MOD_RES (21)..(22)..(23)..(24): Xaa is A or G or absent
RXGXGEVVMENSLQEXXXXXXXXXYYLMTLPELETPVXX

SEQ ID NO: 9743 - protein, 34 aa, Artificial Sequence
  Non-cyclic GFR-binding peptide
  MOD_RES (1)..(1): Xaa is C or S
  MOD_RES (13)..(14)..(15)..(16)..(17): Xaa is A or G
  MOD_RES (18)..(19)..(20)..(21): Xaa is A or G or absent
XGEVVMEEYQKYXXXXXXXXXIFLMSIPSLETPV

SEQ ID NO: 9744 - protein, 35 aa, Artificial Sequence
  Non-cyclic GFR-binding peptide
  MOD_RES (34)..(35): Xaa is C or S
  MOD_RES (12)..(13)..(14)..(15)..(16): Xaa is A or G
  MOD_RES (17)..(18)..(19)..(20): Xaa is A or G or absent
GEVVMDNSLQEXXXXXXXXXYYVMPLPELETPVXX

SEQ ID NO: 9745 - protein, 39 aa, Artificial Sequence
  Non-cyclic GFR-binding peptide
  MOD_RES (34)..(35): Xaa is C or S
  MOD_RES (12)..(13)..(14)..(15)..(16): Xaa is A or G
  MOD_RES (17)..(18)..(19)..(20): Xaa is A or G or absent
GEVVMENSLQEXXXXXXXXXYYVMPLPELETPVXXAKPI

SEQ ID NO: 9746 - protein, 36 aa, Artificial Sequence
  Non-cyclic GFR-binding peptide
  MOD_RES (31)..(32): Xaa is C or S
EVVMDNSLQEVVKENEDYYVMPLPELETPVXXAKPI

SEQ ID NO: 9747 - protein, 34 aa, Artificial Sequence
  Non-cyclic GFR-binding peptide
  MOD_RES (1)..(3): Xaa is C or S
XGXSEVVMDQYNKLVVNNASDLYLISIASLRTPV

SEQ ID NO: 9748 - protein, 42 aa, Artificial Sequence
  Non-cyclic GFR-binding peptide
  MOD_RES (2)..(4)..(38)..(39): Xaa is C or S
  MOD_RES (16)..(17)..(18)..(19)..(20): Xaa is A or G
  MOD_RES (21)..(22)..(23)..(24): Xaa is A or G or absent
RXGXSEVVMDNSLQEXXXXXXXXXYYLITLPELRTPVXXTPP

SEQ ID NO: 9749 - protein, 40 aa, Artificial Sequence
  Non-cyclic GFR-binding peptide
  MOD_RES (34)..(35): Xaa is C or S
  MOD_RES (12)..(13)..(14)..(15)..(16): Xaa is A or G
  MOD_RES (17)..(18)..(19)..(20): Xaa is A or G or absent
SRVVMNNSLQEXXXXXXXXXYYLVTLPELKTPAXXPKPVY

SEQ ID NO: 9750 - protein, 43 aa, Artificial Sequence
  Non-cyclic GFR-binding peptide
  MOD_RES (2)..(4)..(38): Xaa is C or S
  MOD_RES (16)..(17)..(18)..(19)..(20): Xaa is A or G
  MOD_RES (21)..(22)..(23)..(24): Xaa is A or G or absent
HXGXSRVVMNEYQKYXXXXXXXXXIFLVSIPSLKTPAXTPKTV

SEQ ID NO: 9751 - protein, 32 aa, Artificial Sequence
  Non-cyclic GFR-binding peptide
  MOD_RES (31)..(32): Xaa is C or S
RVVMNNSLQEIVNSSDDYYVVPLPELQTPAXX

SEQ ID NO: 9752 - protein, 40 aa, Artificial Sequence
  Non-cyclic GFR-binding peptide
  MOD_RES (2)..(36)..(37): Xaa is C or S
  MOD_RES (14)..(15)..(16)..(17)..(18): Xaa is A or G
  MOD_RES (19)..(20)..(21)..(22): Xaa is A or G or absent
GXSEVVMDNSLQEXXXXXXXXXYYLITLPELRTPVXXTPP

SEQ ID NO: 9753 - protein, 37 aa, Artificial Sequence
  Non-cyclic GFR-binding peptide
  MOD_RES (2)..(34)..(35): Xaa is C or S
GXGEVVMDEYQKYVVKENEDIFLMSIPSLETPVXXAK

SEQ ID NO: 9754 - protein, 40 aa, Artificial Sequence
  Non-cyclic GFR-binding peptide
  MOD_RES (2)..(34)..(35): Xaa is C or S
GXSRVVMNNSLQEIVNSSDDYYVVPLPELKTPAXXPKPVY

SEQ ID NO: 9755 - protein, 36 aa, Artificial Sequence
  Non-cyclic GFR-binding peptide
  MOD_RES (1)..(32)..(33): Xaa is C or S
XSRVIMEYQKYVKPKRGVIFLISIPSLAQPVXXPAA

SEQ ID NO: 9756 - protein, 42 aa, Artificial Sequence
  Non-cyclic GFR-binding peptide
  MOD_RES (2)..(36)..(37): Xaa is C or S
  MOD_RES (14)..(15)..(16)..(17)..(18): Xaa is A or G
  MOD_RES (19)..(20)..(21)..(22): Xaa is A or G or absent
GXGEVVMDNSLQEXXXXXXXXXYYLMTLPELETPVXXAKPIK

SEQ ID NO: 9757 - protein, 38 aa, Artificial Sequence
  Non-cyclic GFR-binding peptide
  MOD_RES (2)..(36)..(37): Xaa is C or S
  MOD_RES (14)..(15)..(16)..(17)..(18): Xaa is A or G
  MOD_RES (19)..(20)..(21)..(22): Xaa is A or G or absent
GXGEVVMENSLQEXXXXXXXXXYYLMTLPELETPVXXA

SEQ ID NO: 9758 - protein, 33 aa, Artificial Sequence
  Non-cyclic GFR-binding peptide
  MOD_RES (32)..(33): Xaa is C or S
ARVVMNEYQKYIVNSSDDIFLVSIPSLQTPAXX

SEQ ID NO: 9759 - protein, 33 aa, Artificial Sequence
  Non-cyclic GFR-binding peptide
  MOD_RES (32)..(33): Xaa is C or S
SEVVMDNSLQEVVNNASDYYLITLPELRTPVXX

SEQ ID NO: 9760 - protein, 33 aa, Artificial Sequence
  Non-cyclic GFR-binding peptide
  MOD_RES (33)..(33): Xaa is C or S
  MOD_RES (11)..(12)..(13)..(14)..(15): Xaa is A or G
  MOD_RES (16)..(17)..(18)..(19): Xaa is A or G or absent
EVVMENSLQEXXXXXXXXXYYVMPLPELETPVX

SEQ ID NO: 9761 - protein, 40 aa, Artificial Sequence
  Non-cyclic GFR-binding peptide
  MOD_RES (2)..(4)..(37)..(38): Xaa is C or S
  MOD_RES (15)..(16)..(17)..(18)..(19): Xaa is A or G
  MOD_RES (20)..(21)..(22)..(23): Xaa is A or G or absent
SXKXSRVIMEYQKYXXXXXXXXXIFLISIPSLAQPVXXPA

SEQ ID NO: 9762 - protein, 37 aa, Artificial Sequence
  Non-cyclic GFR-binding peptide
  MOD_RES (32)..(33): Xaa is C or S
ARVVMNEYQKYIVNSSDDIFLVSIPSLQTPAXXPKPV

SEQ ID NO: 9763 - protein, 33 aa, Artificial Sequence
  Non-cyclic GFR-binding peptide
  MOD_RES (12)..(13)..(14)..(15)..(16): Xaa is A or G
  MOD_RES (17)..(18)..(19)..(20): Xaa is A or G or absent
ARVVMNEYQKYXXXXXXXXXIFLVSIPSLQTPA

SEQ ID NO: 9764 - protein, 39 aa, Artificial Sequence
  Non-cyclic GFR-binding peptide
  MOD_RES (1)..(3)..(35)..(36): Xaa is C or S
XGXARVVMNNSLQEIVNSSDDYYVVPLPELQTPAXXPKP

SEQ ID NO: 9765 - protein, 34 aa, Artificial Sequence
  Non-cyclic GFR-binding peptide
  MOD_RES (33)..(34): Xaa is C or S
  MOD_RES (11)..(12)..(13)..(14)..(15): Xaa is A or G
  MOD_RES (16)..(17)..(18)..(19): Xaa is A or G or absent
EVVMDNSLQEXXXXXXXXXYYVMPLPELETPVXX

SEQ ID NO: 9766 - protein, 33 aa, Artificial Sequence
  Non-cyclic GFR-binding peptide
  MOD_RES (2)..(2): Xaa is C or S
GXSEVVMDNSLQEVVNNASDYYLITLPELRTPV

SEQ ID NO: 9767 - protein, 36 aa, Artificial Sequence
  Non-cyclic GFR-binding peptide
  MOD_RES (1)..(35)..(36): Xaa is C or S
  MOD_RES (13)..(14)..(15)..(16)..(17): Xaa is A or G
  MOD_RES (18)..(19)..(20)..(21): Xaa is A or G or absent
XGEVVMDEYQKYXXXXXXXXXIFLMSIPSLETPVXX

SEQ ID NO: 9768 - protein, 41 aa, Artificial Sequence
  Non-cyclic GFR-binding peptide
  MOD_RES (1)..(35): Xaa is C or S
  MOD_RES (13)..(14)..(15)..(16)..(17): Xaa is A or G
  MOD_RES (18)..(19)..(20)..(21): Xaa is A or G or absent
XSRVVMNNSLQEXXXXXXXXXYYVVPLPELKTPAXTPKTVH

SEQ ID NO: 9769 - protein, 34 aa, Artificial Sequence
  Non-cyclic GFR-binding peptide
  MOD_RES (31)..(32): Xaa is C or S
SRVIMEYQKYVKPKRGVIFLISIPSLAQPVXXPA

SEQ ID NO: 9770 - protein, 42 aa, Artificial Sequence
  Non-cyclic GFR-binding peptide
  MOD_RES (2)..(4)..(36)..(37): Xaa is C or S
RXGXGEVVMDNSLQEVVKENEDYYLMTLPELETPVXXAKPIK

SEQ ID NO: 9771 - protein, 38 aa, Artificial Sequence
  Non-cyclic GFR-binding peptide
  MOD_RES (2)..(4)..(38): Xaa is C or S
  MOD_RES (16)..(17)..(18)..(19)..(20): Xaa is A or G
  MOD_RES (21)..(22)..(23)..(24): Xaa is A or G or absent
HXGXARVVMNEYQKYXXXXXXXXXIFLVSIPSLQTPAX

SEQ ID NO: 9772 - protein, 39 aa, Artificial Sequence
  Non-cyclic GFR-binding peptide
  MOD_RES (2)..(4)..(36)..(37): Xaa is C or S
RXGXGEVVMENSLQEVVKDYEDYYLMTLPELETPVXXAK

SEQ ID NO: 9773 - protein, 38 aa, Artificial Sequence
  Non-cyclic GFR-binding peptide
  MOD_RES (2)..(33)..(34): Xaa is C or S
KXSKVVMNSLQEVKPTRGVYYVIPLPELDQPVXXPSAS

SEQ ID NO: 9774 - protein, 38 aa, Artificial Sequence
  Non-cyclic GFR-binding peptide
  MOD_RES (1)..(3)..(35)..(36): Xaa is C or S
XGXSRVVMNNSLQEIVNSSDDYYVVPLPELKTPAXXPK

SEQ ID NO: 9775 - protein, 37 aa, Artificial Sequence
  Non-cyclic GFR-binding peptide
  MOD_RES (1)..(35): Xaa is C or S
  MOD_RES (13)..(14)..(15)..(16)..(17): Xaa is A or G
  MOD_RES (18)..(19)..(20)..(21): Xaa is A or G or absent
XSRVVMNEYQKYXXXXXXXXXIFLVSIPSLKTPAXTP

SEQ ID NO: 9776 - protein, 35 aa, Artificial Sequence
  Non-cyclic GFR-binding peptide
  MOD_RES (32)..(33): Xaa is C or S
SRVVMNNSLQEIVNSSDDYYVVPLPELKTPAXXPK

SEQ ID NO: 9777 - protein, 34 aa, Artificial Sequence
  Non-cyclic GFR-binding peptide
  MOD_RES (33)..(34): Xaa is C or S
  MOD_RES (11)..(12)..(13)..(14)..(15): Xaa is A or G
  MOD_RES (16)..(17)..(18)..(19): Xaa is A or G or absent
RVVMNEYQKYXXXXXXXXXIFLVSIPSLQTPAXX

SEQ ID NO: 9778 - protein, 38 aa, Artificial Sequence
  Non-cyclic GFR-binding peptide
  MOD_RES (2)..(36)..(37): Xaa is C or S
  MOD_RES (14)..(15)..(16)..(17)..(18): Xaa is A or G
  MOD_RES (19)..(20)..(21)..(22): Xaa is A or G or absent
GXSEVVMDRYKKLXXXXXXXXXFYLISIANLRTPVXXT

SEQ ID NO: 9779 - protein, 40 aa, Artificial Sequence
  Non-cyclic GFR-binding peptide
  MOD_RES (1)..(34)..(35): Xaa is C or S
  MOD_RES (12)..(13)..(14)..(15)..(16): Xaa is A or G
  MOD_RES (17)..(18)..(19)..(20): Xaa is A or G or absent
XSKVIMNSLQEXXXXXXXXXYYVIPLPELDQSVXXPSASA

SEQ ID NO: 9780 - protein, 34 aa, Artificial Sequence
  Non-cyclic GFR-binding peptide
  MOD_RES (34)..(34): Xaa is C or S
  MOD_RES (12)..(13)..(14)..(15)..(16): Xaa is A or G
  MOD_RES (17)..(18)..(19)..(20): Xaa is A or G or absent
ARVVMNEYQKYXXXXXXXXXIFLVSIPSLQTPAX

SEQ ID NO: 9781 - protein, 35 aa, Artificial Sequence
  Non-cyclic GFR-binding peptide
  MOD_RES (2)..(34)..(35): Xaa is C or S
GXGEVVMEEYQKYVVKDYEDIFLMSIPSLETPVXX

SEQ ID NO: 9782 - protein, 35 aa, Artificial Sequence
  Non-cyclic GFR-binding peptide
  MOD_RES (31)..(32): Xaa is C or S
SKVIMNSLQEIKPTKGIYYVIPLPELDQSVXXPSA

SEQ ID NO: 9783 - protein, 37 aa, Artificial Sequence
  Non-cyclic GFR-binding peptide
  MOD_RES (34)..(35): Xaa is C or S
  MOD_RES (12)..(13)..(14)..(15)..(16): Xaa is A or G
  MOD_RES (17)..(18)..(19)..(20): Xaa is A or G or absent
SEVVMDNSLQEXXXXXXXXXYYLITLPELRTPVXXTP

SEQ ID NO: 9784 - protein, 37 aa, Artificial Sequence
  Non-cyclic GFR-binding peptide
  MOD_RES (1)..(3)..(34)..(35): Xaa is C or S
XKXSKVVMEYQKYVKPTRGVIFLISIPSLDQPVXXPS

SEQ ID NO: 9785 - protein, 34 aa, Artificial Sequence
  Non-cyclic GFR-binding peptide
  MOD_RES (1)..(3): Xaa is C or S
XGXSEVVMDNSLQEVVNNASDYYVIPLPELRTPV

SEQ ID NO: 9786 - protein, 34 aa, Artificial Sequence
  Non-cyclic GFR-binding peptide
  MOD_RES (1)..(1): Xaa is C or S
  MOD_RES (13)..(14)..(15)..(16)..(17): Xaa is A or G
  MOD_RES (18)..(19)..(20)..(21): Xaa is A or G or absent
XSEVVMDNSLQEXXXXXXXXXYYLITLPELRTPV

SEQ ID NO: 9787 - protein, 39 aa, Artificial Sequence
  Non-cyclic GFR-binding peptide
  MOD_RES (2)..(35)..(36): Xaa is C or S
  MOD_RES (13)..(14)..(15)..(16)..(17): Xaa is A or G
  MOD_RES (18)..(19)..(20)..(21): Xaa is A or G or absent
KXSKVVMEYQKYXXXXXXXXXIFLISIPSLDQPVXXPSA

SEQ ID NO: 9788 - protein, 39 aa, Artificial Sequence
  Non-cyclic GFR-binding peptide
  MOD_RES (1)..(3)..(35)..(36): Xaa is C or S
XGXSEVVMDQYNKLVVNNASDLYLISIASLRTPVXXTPP

SEQ ID NO: 9789 - protein, 37 aa, Artificial Sequence
  Non-cyclic GFR-binding peptide
  MOD_RES (2)..(4): Xaa is C or S
  MOD_RES (16)..(17)..(18)..(19)..(20): Xaa is A or G
  MOD_RES (21)..(22)..(23)..(24): Xaa is A or G or absent
RXGXSEVVMDNSLQEXXXXXXXXXYYVIPLPELRTPV

SEQ ID NO: 9790 - protein, 40 aa, Artificial Sequence
  Non-cyclic GFR-binding peptide
  MOD_RES (2)..(4)..(36): Xaa is C or S
HXGXSRVVMNNSLQEIVNSSDDYYVVPLPELKTPAXTPKT

SEQ ID NO: 9791 - protein, 38 aa, Artificial Sequence
  Non-cyclic GFR-binding peptide
  MOD_RES (2)..(4)..(38): Xaa is C or S
  MOD_RES (16)..(17)..(18)..(19)..(20): Xaa is A or G
  MOD_RES (21)..(22)..(23)..(24): Xaa is A or G or absent
RXGXSEVVMDQYNKLXXXXXXXXXLYLISIASLRTPVX

SEQ ID NO: 9792 - protein, 35 aa, Artificial Sequence
  Non-cyclic GFR-binding peptide
  MOD_RES (32)..(33): Xaa is C or S
SEVVMDQYNKLVVNNASDLYLISIASLRTPVXXTP

SEQ ID NO: 9793 - protein, 39 aa, Artificial Sequence
  Non-cyclic GFR-binding peptide
  MOD_RES (1)..(3)..(35)..(36): Xaa is C or S
XGXSRVVMNNSLQEIVNSSDDYYVVPLPELKTPAXXPKP

SEQ ID NO: 9794 - protein, 39 aa, Artificial Sequence
  Non-cyclic GFR-binding peptide
  MOD_RES (2)..(34)..(35): Xaa is C or S
GXGEVVMDEYQKYVVKENEDIFLMSIPSLETPVXXAKPI

SEQ ID NO: 9795 - protein, 41 aa, Artificial Sequence
  Non-cyclic GFR-binding peptide
  MOD_RES (1)..(35)..(36): Xaa is C or S
  MOD_RES (13)..(14)..(15)..(16)..(17): Xaa is A or G
  MOD_RES (18)..(19)..(20)..(21): Xaa is A or G or absent
XGEVVMDNSLQEXXXXXXXXXYYVMPLPELETPVXXAKPIK

SEQ ID NO: 9796 - protein, 37 aa, Artificial Sequence
  Non-cyclic GFR-binding peptide
  MOD_RES (1)..(3)..(36)..(37): Xaa is C or S
  MOD_RES (14)..(15)..(16)..(17)..(18): Xaa is A or G
  MOD_RES (19)..(20)..(21)..(22): Xaa is A or G or absent
XKXSKVIMEYQKYXXXXXXXXXIFLISIPSLDQSVXX

SEQ ID NO: 9797 - protein, 37 aa, Artificial Sequence
  Non-cyclic GFR-binding peptide
  MOD_RES (1)..(32)..(33): Xaa is C or S
XSRVIMNSLQEVKPKRGVYYLITLPELAQPVXXPAAS

SEQ ID NO: 9798 - protein, 42 aa, Artificial Sequence
  Non-cyclic GFR-binding peptide
  MOD_RES (2)..(36): Xaa is C or S
  MOD_RES (14)..(15)..(16)..(17)..(18): Xaa is A or G
  MOD_RES (19)..(20)..(21)..(22): Xaa is A or G or absent
GXSRVVMNNSLQEXXXXXXXXXYYVVPLPELKTPAXTPKTVH

SEQ ID NO: 9799 - protein, 41 aa, Artificial Sequence
  Non-cyclic GFR-binding peptide
  MOD_RES (1)..(3)..(35): Xaa is C or S
XGXSRVVMNNSLQEIVNSSDDYYVVPLPELKTPAXTPKTVH

SEQ ID NO: 9800 - protein, 35 aa, Artificial Sequence
  Non-cyclic GFR-binding peptide
  MOD_RES (31)..(32): Xaa is C or S
RVVMNNSLQEIVNSSDDYYVVPLPELQTPAXXPKP

SEQ ID NO: 9801 - protein, 33 aa, Artificial Sequence
  Non-cyclic GFR-binding peptide
  MOD_RES (12)..(13)..(14)..(15)..(16): Xaa is A or G
  MOD_RES (17)..(18)..(19)..(20): Xaa is A or G or absent
GEVVMDNSLQEXXXXXXXXXYYLMTLPELETPV

SEQ ID NO: 9802 - protein, 38 aa, Artificial Sequence
  Non-cyclic GFR-binding peptide
  MOD_RES (2)..(34)..(35): Xaa is C or S
GXSRVVMNNSLQEIVNSSDDYYLVTLPELKTPAXXPKP

SEQ ID NO: 9803 - protein, 30 aa, Artificial Sequence
  Non-cyclic GFR-binding peptide
RVVMNNSLQEIVNSSDDYYLVTLPELQTPA

SEQ ID NO: 9804 - protein, 38 aa, Artificial Sequence
  Non-cyclic GFR-binding peptide
  MOD_RES (1)..(3)..(36)..(37): Xaa is C or S
  MOD_RES (14)..(15)..(16)..(17)..(18): Xaa is A or G
  MOD_RES (19)..(20)..(21)..(22): Xaa is A or G or absent
XKXSKVVMNSLQEXXXXXXXXXYYVIPLPELDQPVXXP

SEQ ID NO: 9805 - protein, 43 aa, Artificial Sequence
  Non-cyclic GFR-binding peptide
  MOD_RES (2)..(4)..(38)..(39): Xaa is C or S
  MOD_RES (16)..(17)..(18)..(19)..(20): Xaa is A or G
  MOD_RES (21)..(22)..(23)..(24): Xaa is A or G or absent
RXGXGEVVMENSLQEXXXXXXXXXYYVMPLPELETPVXXAKPI

SEQ ID NO: 9806 - protein, 35 aa, Artificial Sequence
  Non-cyclic GFR-binding peptide
  MOD_RES (2)..(34)..(35): Xaa is C or S
GXSEVVMDNSLQEVVNNASDYYVIPLPELRTPVXX

SEQ ID NO: 9807 - protein, 41 aa, Artificial Sequence
  Non-cyclic GFR-binding peptide
  MOD_RES (2)..(4)..(38)..(39): Xaa is C or S
  MOD_RES (16)..(17)..(18)..(19)..(20): Xaa is A or G
  MOD_RES (21)..(22)..(23)..(24): Xaa is A or G or absent
RXGXSEVVMDRYKKLXXXXXXXXXFYLISIANLRTPVXXTP

SEQ ID NO: 9808 - protein, 41 aa, Artificial Sequence
  Non-cyclic GFR-binding peptide
  MOD_RES (2)..(4)..(38)..(39): Xaa is C or S
  MOD_RES (16)..(17)..(18)..(19)..(20): Xaa is A or G
  MOD_RES (21)..(22)..(23)..(24): Xaa is A or G or absent
RXGXSEVVMDNSLQEXXXXXXXXXYYVIPLPELRTPVXXTP

SEQ ID NO: 9809 - protein, 37 aa, Artificial Sequence
  Non-cyclic GFR-binding peptide
  MOD_RES (32)..(33): Xaa is C or S
GEVVMENSLQEVVKDYEDYYVMPLPELETPVXXAKPI

SEQ ID NO: 9810 - protein, 37 aa, Artificial Sequence
  Non-cyclic GFR-binding peptide
  MOD_RES (1)..(3)..(37): Xaa is C or S
  MOD_RES (15)..(16)..(17)..(18)..(19): Xaa is A or G
  MOD_RES (20)..(21)..(22)..(23): Xaa is A or G or absent
XGXGEVVMENSLQEXXXXXXXXXYYVMPLPELETPVX

SEQ ID NO: 9811 - protein, 31 aa, Artificial Sequence
  Non-cyclic GFR-binding peptide
  MOD_RES (31)..(31): Xaa is C or S
EVVMDEYQKYVVKENEDIFLMSIPSLETPVX

SEQ ID NO: 9812 - protein, 38 aa, Artificial Sequence
  Non-cyclic GFR-binding peptide
  MOD_RES (34)..(35): Xaa is C or S
  MOD_RES (12)..(13)..(14)..(15)..(16): Xaa is A or G
  MOD_RES (17)..(18)..(19)..(20): Xaa is A or G or absent
SRVVMNNSLQEXXXXXXXXXYYVVPLPELKTPAXXPKP

SEQ ID NO: 9813 - protein, 39 aa, Artificial Sequence
  Non-cyclic GFR-binding peptide
  MOD_RES (1)..(3)..(37)..(38): Xaa is C or S
  MOD_RES (15)..(16)..(17)..(18)..(19): Xaa is A or G
  MOD_RES (20)..(21)..(22)..(23): Xaa is A or G or absent
XGXGEVVMDNSLQEXXXXXXXXXYYLMTLPELETPVXXA

SEQ ID NO: 9814 - protein, 34 aa, Artificial Sequence
  Non-cyclic GFR-binding peptide
  MOD_RES (1)..(32)..(33): Xaa is C or S
XSKVVMEYQKYVKPTRGVIFLISIPSLDQPVXXP

SEQ ID NO: 9815 - protein, 41 aa, Artificial Sequence
  Non-cyclic GFR-binding peptide
  MOD_RES (2)..(36)..(37): Xaa is C or S
  MOD_RES (14)..(15)..(16)..(17)..(18): Xaa is A or G
  MOD_RES (19)..(20)..(21)..(22): Xaa is A or G or absent
GXSRVVMNNSLQEXXXXXXXXXYYVVPLPELKTPAXXPKPV

SEQ ID NO: 9816 - protein, 32 aa, Artificial Sequence
  Non-cyclic GFR-binding peptide
  MOD_RES (32)..(32): Xaa is C or S
GEVVMEEYQKYVVKDYEDIFLMSIPSLETPVX

SEQ ID NO: 9817 - protein, 35 aa, Artificial Sequence
  Non-cyclic GFR-binding peptide
  MOD_RES (32)..(33): Xaa is C or S
SEVVMDRYKKLVVNNASDFYLISIANLRTPVXXTP

SEQ ID NO: 9818 - protein, 39 aa, Artificial Sequence
  Non-cyclic GFR-binding peptide
  MOD_RES (2)..(4)..(36): Xaa is C or S
HXGXSRVVMNEYQKYIVNSSDDIFLVSIPSLKTPAXTPK

SEQ ID NO: 9819 - protein, 35 aa, Artificial Sequence
  Non-cyclic GFR-binding peptide
  MOD_RES (33)..(34): Xaa is C or S
  MOD_RES (11)..(12)..(13)..(14)..(15): Xaa is A or G
  MOD_RES (16)..(17)..(18)..(19): Xaa is A or G or absent
SKVVMEYQKYXXXXXXXXXIFLISIPSLDQPVXXP

SEQ ID NO: 9820 - protein, 34 aa, Artificial Sequence
  Non-cyclic GFR-binding peptide
  MOD_RES (2)..(4): Xaa is C or S
SXKXSKVIMEYQKYIKPTKGIIFLISIPSLDQSV

SEQ ID NO: 9821 - protein, 35 aa, Artificial Sequence
  Non-cyclic GFR-binding peptide
  MOD_RES (1)..(34)..(35): Xaa is C or S
  MOD_RES (12)..(13)..(14)..(15)..(16): Xaa is A or G
  MOD_RES (17)..(18)..(19)..(20): Xaa is A or G or absent
XSKVIMNSLQEXXXXXXXXXYYVIPLPELDQSVXX

SEQ ID NO: 9822 - protein, 38 aa, Artificial Sequence
  Non-cyclic GFR-binding peptide
  MOD_RES (1)..(33)..(34): Xaa is C or S
XGEVVMDEYQKYVVKENEDIFLMSIPSLETPVXXAKPI

SEQ ID NO: 9823 - protein, 40 aa, Artificial Sequence
  Non-cyclic GFR-binding peptide
  MOD_RES (2)..(4)..(36)..(37): Xaa is C or S
RXGXGEVVMENSLQEVVKDYEDYYVMPLPELETPVXXAKP

SEQ ID NO: 9824 - protein, 33 aa, Artificial Sequence
  Non-cyclic GFR-binding peptide
  MOD_RES (32)..(33): Xaa is C or S
GEVVMENSLQEVVKDYEDYYVMPLPELETPVXX

SEQ ID NO: 9825 - protein, 38 aa, Artificial Sequence
  Non-cyclic GFR-binding peptide
  MOD_RES (1)..(33): Xaa is C or S
XSRVVMNEYQKYIVNSSDDIFLVSIPSLKTPAXTPKTV

SEQ ID NO: 9826 - protein, 38 aa, Artificial Sequence
  Non-cyclic GFR-binding peptide
  MOD_RES (1)..(3)..(35)..(36): Xaa is C or S
XGXSEVVMDQYNKLVVNNASDLYLISIASLRTPVXXTP

SEQ ID NO: 9827 - protein, 36 aa, Artificial Sequence
  Non-cyclic GFR-binding peptide
  MOD_RES (2)..(36): Xaa is C or S
  MOD_RES (14)..(15)..(16)..(17)..(18): Xaa is A or G
  MOD_RES (19)..(20)..(21)..(22): Xaa is A or G or absent
GXGEVVMENSLQEXXXXXXXXXYYVMPLPELETPVX

SEQ ID NO: 9828 - protein, 37 aa, Artificial Sequence
  Non-cyclic GFR-binding peptide
  MOD_RES (1)..(35)..(36): Xaa is C or S
  MOD_RES (13)..(14)..(15)..(16)..(17): Xaa is A or G
  MOD_RES (18)..(19)..(20)..(21): Xaa is A or G or absent
XARVVMNNSLQEXXXXXXXXXYYLVTLPELQTPAXXP

SEQ ID NO: 9829 - protein, 41 aa, Artificial Sequence
  Non-cyclic GFR-binding peptide
  MOD_RES (1)..(3)..(37)..(38): Xaa is C or S
  MOD_RES (15)..(16)..(17)..(18)..(19): Xaa is A or G
  MOD_RES (20)..(21)..(22)..(23): Xaa is A or G or absent
XGXGEVVMENSLQEXXXXXXXXXYYLMTLPELETPVXXAKP

SEQ ID NO: 9830 - protein, 37 aa, Artificial Sequence
  Non-cyclic GFR-binding peptide
  MOD_RES (2)..(4): Xaa is C or S
  MOD_RES (16)..(17)..(18)..(19)..(20): Xaa is A or G
  MOD_RES (21)..(22)..(23)..(24): Xaa is A or G or absent
RXGXSEVVMDRYKKLXXXXXXXXXFYLISIANLRTPV

SEQ ID NO: 9831 - protein, 35 aa, Artificial Sequence
  Non-cyclic GFR-binding peptide
  MOD_RES (1)..(35): Xaa is C or S
  MOD_RES (13)..(14)..(15)..(16)..(17): Xaa is A or G
  MOD_RES (18)..(19)..(20)..(21): Xaa is A or G or absent
XSEVVMDNSLQEXXXXXXXXXYYVIPLPELRTPVX

SEQ ID NO: 9832 - protein, 39 aa, Artificial Sequence
  Non-cyclic GFR-binding peptide
  MOD_RES (2)..(34): Xaa is C or S
GXSRVVMNNSLQEIVNSSDDYYLVTLPELKTPAXTPKTV

SEQ ID NO: 9833 - protein, 33 aa, Artificial Sequence
  Non-cyclic GFR-binding peptide
  MOD_RES (31)..(31): Xaa is C or S
RVVMNNSLQEIVNSSDDYYLVTLPELKTPAXTP

SEQ ID NO: 9834 - protein, 36 aa, Artificial Sequence
  Non-cyclic GFR-binding peptide
  MOD_RES (1)..(33)..(34): Xaa is C or S
XSRVVMNEYQKYIVNSSDDIFLVSIPSLKTPAXXPK

SEQ ID NO: 9835 - protein, 44 aa, Artificial Sequence
  Non-cyclic GFR-binding peptide
  MOD_RES (2)..(4)..(38)..(39): Xaa is C or S
  MOD_RES (16)..(17)..(18)..(19)..(20): Xaa is A or G
  MOD_RES (21)..(22)..(23)..(24): Xaa is A or G or absent
HXGXSRVVMNNSLQEXXXXXXXXXYYLVTLPELKTPAXXPKPVY

SEQ ID NO: 9836 - protein, 41 aa, Artificial Sequence
  Non-cyclic GFR-binding peptide
  MOD_RES (1)..(35)..(36): Xaa is C or S
  MOD_RES (13)..(14)..(15)..(16)..(17): Xaa is A or G
  MOD_RES (18)..(19)..(20)..(21): Xaa is A or G or absent
XSEVVMDRYKKLXXXXXXXXXFYLISIANLRTPVXXTPPTS

SEQ ID NO: 9837 - protein, 41 aa, Artificial Sequence
  Non-cyclic GFR-binding peptide
  MOD_RES (2)..(4)..(38)..(39): Xaa is C or S
  MOD_RES (16)..(17)..(18)..(19)..(20): Xaa is A or G
  MOD_RES (21)..(22)..(23)..(24): Xaa is A or G or absent
RXGXGEVVMEEYQKYXXXXXXXXXIFLMSIPSLETPVXXAK

SEQ ID NO: 9838 - protein, 39 aa, Artificial Sequence
  Non-cyclic GFR-binding peptide
  MOD_RES (1)..(3)..(34)..(35): Xaa is C or S
XKXSRVIMNSLQEVKPKRGVYYLITLPELAQPVXXPAAS

SEQ ID NO: 9839 - protein, 34 aa, Artificial Sequence
  Non-cyclic GFR-binding peptide
  MOD_RES (1)..(33)..(34): Xaa is C or S
XSEVVMDQYNKLVVNNASDLYLISIASLRTPVXX

SEQ ID NO: 9840 - protein, 34 aa, Artificial Sequence
  Non-cyclic GFR-binding peptide
  MOD_RES (34)..(34): Xaa is C or S
  MOD_RES (12)..(13)..(14)..(15)..(16): Xaa is A or G
  MOD_RES (17)..(18)..(19)..(20): Xaa is A or G or absent
ARVVMNNSLQEXXXXXXXXXYYLVTLPELQTPAX

SEQ ID NO: 9841 - protein, 42 aa, Artificial Sequence
  Non-cyclic GFR-binding peptide
  MOD_RES (1)..(3)..(36)..(37): Xaa is C or S
  MOD_RES (14)..(15)..(16)..(17)..(18): Xaa is A or G
  MOD_RES (19)..(20)..(21)..(22): Xaa is A or G or absent
XKXSRVIMEYQKYXXXXXXXXXIFLISIPSLAQPVXXPAASA

SEQ ID NO: 9842 - protein, 40 aa, Artificial Sequence
  Non-cyclic GFR-binding peptide
  MOD_RES (1)..(34)..(35): Xaa is C or S
  MOD_RES (12)..(13)..(14)..(15)..(16): Xaa is A or G
  MOD_RES (17)..(18)..(19)..(20): Xaa is A or G or absent
XSRVIMNSLQEXXXXXXXXXYYLITLPELAQPVXXPAASA

SEQ ID NO: 9843 - protein, 38 aa, Artificial Sequence
  Non-cyclic GFR-binding peptide
  MOD_RES (2)..(4)..(38): Xaa is C or S
  MOD_RES (16)..(17)..(18)..(19)..(20): Xaa is A or G
  MOD_RES (21)..(22)..(23)..(24): Xaa is A or G or absent
RXGXGEVVMENSLQEXXXXXXXXXYYVMPLPELETPVX

SEQ ID NO: 9844 - protein, 42 aa, Artificial Sequence
  Non-cyclic GFR-binding peptide
  MOD_RES (2)..(4)..(38)..(39): Xaa is C or S
  MOD_RES (16)..(17)..(18)..(19)..(20): Xaa is A or G
  MOD_RES (21)..(22)..(23)..(24): Xaa is A or G or absent
RXGXGEVVMENSLQEXXXXXXXXXYYLMTLPELETPVXXAKP

SEQ ID NO: 9845 - protein, 37 aa, Artificial Sequence
  Non-cyclic GFR-binding peptide
  MOD_RES (2)..(36): Xaa is C or S
  MOD_RES (14)..(15)..(16)..(17)..(18): Xaa is A or G
  MOD_RES (19)..(20)..(21)..(22): Xaa is A or G or absent
GXSRVVMNEYQKYXXXXXXXXXIFLVSIPSLKTPAXT

SEQ ID NO: 9846 - protein, 35 aa, Artificial Sequence
  Non-cyclic GFR-binding peptide
  MOD_RES (2)..(2): Xaa is C or S
  MOD_RES (14)..(15)..(16)..(17)..(18): Xaa is A or G
  MOD_RES (19)..(20)..(21)..(22): Xaa is A or G or absent
GXSRVVMNEYQKYXXXXXXXXXIFLVSIPSLKTPA

SEQ ID NO: 9847 - protein, 41 aa, Artificial Sequence
  Non-cyclic GFR-binding peptide
  MOD_RES (2)..(36)..(37): Xaa is C or S
  MOD_RES (14)..(15)..(16)..(17)..(18): Xaa is A or G
  MOD_RES (19)..(20)..(21)..(22): Xaa is A or G or absent
GXARVVMNEYQKYXXXXXXXXXIFLVSIPSLQTPAXXPKPV

SEQ ID NO: 9848 - protein, 39 aa, Artificial Sequence
  Non-cyclic GFR-binding peptide
  MOD_RES (1)..(3)..(35)..(36): Xaa is C or S
XGXSEVVMDNSLQEVVNNASDYYVIPLPELRTPVXXTPP

SEQ ID NO: 9849 - protein, 40 aa, Artificial Sequence
  Non-cyclic GFR-binding peptide
  MOD_RES (2)..(35)..(36): Xaa is C or S
  MOD_RES (13)..(14)..(15)..(16)..(17): Xaa is A or G
  MOD_RES (18)..(19)..(20)..(21): Xaa is A or G or absent
KXSKVIMNSLQEXXXXXXXXXYYVIPLPELDQSVXXPSAS

SEQ ID NO: 9850 - protein, 38 aa, Artificial Sequence
  Non-cyclic GFR-binding peptide
  MOD_RES (1)..(35)..(36): Xaa is C or S
  MOD_RES (13)..(14)..(15)..(16)..(17): Xaa is A or G
  MOD_RES (18)..(19)..(20)..(21): Xaa is A or G or absent
XGEVVMDNSLQEXXXXXXXXXYYLMTLPELETPVXXAK

SEQ ID NO: 9851 - protein, 34 aa, Artificial Sequence
  Non-cyclic GFR-binding peptide
  MOD_RES (32)..(33): Xaa is C or S
SEVVMDNSLQEVVNNASDYYLITLPELRTPVXXT

SEQ ID NO: 9852 - protein, 39 aa, Artificial Sequence
  Non-cyclic GFR-binding peptide
  MOD_RES (34)..(34): Xaa is C or S
  MOD_RES (12)..(13)..(14)..(15)..(16): Xaa is A or G
  MOD_RES (17)..(18)..(19)..(20): Xaa is A or G or absent
SRVVMNNSLQEXXXXXXXXXYYLVTLPELKTPAXTPKTV

SEQ ID NO: 9853 - protein, 34 aa, Artificial Sequence
  Non-cyclic GFR-binding peptide
  MOD_RES (31)..(32): Xaa is C or S
RVVMNNSLQEIVNSSDDYYLVTLPELKTPAXXPK

SEQ ID NO: 9854 - protein, 31 aa, Artificial Sequence
  Non-cyclic GFR-binding peptide
  MOD_RES (31)..(31): Xaa is C or S
RVVMNNSLQEIVNSSDDYYLVTLPELKTPAX

SEQ ID NO: 9855 - protein, 33 aa, Artificial Sequence
  Non-cyclic GFR-binding peptide
  MOD_RES (32)..(33): Xaa is C or S
GEVVMEEYQKYVVKDYEDIFLMSIPSLETPVXX

SEQ ID NO: 9856 - protein, 34 aa, Artificial Sequence
  Non-cyclic GFR-binding peptide
  MOD_RES (1)..(3): Xaa is C or S
XGXARVVMNNSLQEIVNSSDDYYLVTLPELQTPA

SEQ ID NO: 9857 - protein, 38 aa, Artificial Sequence
  Non-cyclic GFR-binding peptide
  MOD_RES (1)..(3)..(35)..(36): Xaa is C or S
XGXSEVVMDNSLQEVVNNASDYYVIPLPELRTPVXXTP

SEQ ID NO: 9858 - protein, 38 aa, Artificial Sequence
  Non-cyclic GFR-binding peptide
  MOD_RES (2)..(36)..(37): Xaa is C or S
  MOD_RES (14)..(15)..(16)..(17)..(18): Xaa is A or G
  MOD_RES (19)..(20)..(21)..(22): Xaa is A or G or absent
GXGEVVMDEYQKYXXXXXXXXXIFLMSIPSLETPVXXA

SEQ ID NO: 9859 - protein, 38 aa, Artificial Sequence
  Non-cyclic GFR-binding peptide
  MOD_RES (2)..(4)..(38): Xaa is C or S
  MOD_RES (16)..(17)..(18)..(19)..(20): Xaa is A or G
  MOD_RES (21)..(22)..(23)..(24): Xaa is A or G or absent
RXGXGEVVMDNSLQEXXXXXXXXXYYLMTLPELETPVX

SEQ ID NO: 9860 - protein, 34 aa, Artificial Sequence
  Non-cyclic GFR-binding peptide
  MOD_RES (32)..(33): Xaa is C or S
SRVVMNEYQKYIVNSSDDIFLVSIPSLKTPAXXP

SEQ ID NO: 9861 - protein, 40 aa, Artificial Sequence
  Non-cyclic GFR-binding peptide
  MOD_RES (2)..(4)..(36)..(37): Xaa is C or S
RXGXGEVVMDEYQKYVVKENEDIFLMSIPSLETPVXXAKP

SEQ ID NO: 9862 - protein, 40 aa, Artificial Sequence
  Non-cyclic GFR-binding peptide
  MOD_RES (2)..(36)..(37): Xaa is C or S
  MOD_RES (14)..(15)..(16)..(17)..(18): Xaa is A or G
  MOD_RES (19)..(20)..(21)..(22): Xaa is A or G or absent
GXGEVVMEEYQKYXXXXXXXXXIFLMSIPSLETPVXXAKP

SEQ ID NO: 9863 - protein, 43 aa, Artificial Sequence
  Non-cyclic GFR-binding peptide
  MOD_RES (2)..(4)..(38)..(39): Xaa is C or S
  MOD_RES (16)..(17)..(18)..(19)..(20): Xaa is A or G
  MOD_RES (21)..(22)..(23)..(24): Xaa is A or G or absent
HXGXARVVMNEYQKYXXXXXXXXXIFLVSIPSLQTPAXXPKPV

SEQ ID NO: 9864 - protein, 38 aa, Artificial Sequence
  Non-cyclic GFR-binding peptide
  MOD_RES (2)..(34)..(35): Xaa is C or S
GXGEVVMDNSLQEVVKENEDYYLMTLPELETPVXXAKP

SEQ ID NO: 9865 - protein, 37 aa, Artificial Sequence
  Non-cyclic GFR-binding peptide
  MOD_RES (1)..(3)..(34)..(35): Xaa is C or S
XKXSKVIMEYQKYIKPTKGIIFLISIPSLDQSVXXPS

SEQ ID NO: 9866 - protein, 34 aa, Artificial Sequence
  Non-cyclic GFR-binding peptide
  MOD_RES (2)..(33)..(34): Xaa is C or S
KXSKVVMNSLQEVKPTRGVYYVIPLPELDQPVXX

SEQ ID NO: 9867 - protein, 39 aa, Artificial Sequence
  Non-cyclic GFR-binding peptide
  MOD_RES (2)..(4)..(36)..(37): Xaa is C or S
RXGXSEVVMDRYKKLVVNNASDFYLISIANLRTPVXXTP

SEQ ID NO: 9868 - protein, 39 aa, Artificial Sequence
  Non-cyclic GFR-binding peptide
  MOD_RES (2)..(36)..(37): Xaa is C or S
  MOD_RES (14)..(15)..(16)..(17)..(18): Xaa is A or G
  MOD_RES (19)..(20)..(21)..(22): Xaa is A or G or absent
GXGEVVMEEYQKYXXXXXXXXXIFLMSIPSLETPVXXAK

SEQ ID NO: 9869 - protein, 34 aa, Artificial Sequence
  Non-cyclic GFR-binding peptide
  MOD_RES (33)..(34): Xaa is C or S
  MOD_RES (11)..(12)..(13)..(14)..(15): Xaa is A or G
  MOD_RES (16)..(17)..(18)..(19): Xaa is A or G or absent
EVVMDQYNKLXXXXXXXXXLYLISIASLRTPVXX

SEQ ID NO: 9870 - protein, 35 aa, Artificial Sequence
  Non-cyclic GFR-binding peptide
  MOD_RES (1)..(32)..(33): Xaa is C or S
XSKVVMNSLQEVKPTRGVYYVIPLPELDQPVXXPS

SEQ ID NO: 9871 - protein, 37 aa, Artificial Sequence
  Non-cyclic GFR-binding peptide
  MOD_RES (33)..(33): Xaa is C or S
  MOD_RES (11)..(12)..(13)..(14)..(15): Xaa is A or G
  MOD_RES (16)..(17)..(18)..(19): Xaa is A or G or absent
RVVMNEYQKYXXXXXXXXXIFLVSIPSLKTPAXTPKT

SEQ ID NO: 9872 - protein, 41 aa, Artificial Sequence
  Non-cyclic GFR-binding peptide
  MOD_RES (2)..(36)..(37): Xaa is C or S
  MOD_RES (14)..(15)..(16)..(17)..(18): Xaa is A or G
  MOD_RES (19)..(20)..(21)..(22): Xaa is A or G or absent
GXGEVVMDEYQKYXXXXXXXXXIFLMSIPSLETPVXXAKPI

SEQ ID NO: 9873 - protein, 42 aa, Artificial Sequence
  Non-cyclic GFR-binding peptide
  MOD_RES (1)..(3)..(37)..(38): Xaa is C or S
  MOD_RES (15)..(16)..(17)..(18)..(19): Xaa is A or G
  MOD_RES (20)..(21)..(22)..(23): Xaa is A or G or absent
XGXSEVVMDNSLQEXXXXXXXXXYYVIPLPELRTPVXXTPPT

SEQ ID NO: 9874 - protein, 34 aa, Artificial Sequence
  Non-cyclic GFR-binding peptide
  MOD_RES (2)..(34): Xaa is C or S
GXSRVVMNNSLQEIVNSSDDYYVVPLPELKTPAX

SEQ ID NO: 9875 - protein, 35 aa, Artificial Sequence
  Non-cyclic GFR-binding peptide
  MOD_RES (31)..(32): Xaa is C or S
RVVMNNSLQEIVNSSDDYYLVTLPELKTPAXXPKP

SEQ ID NO: 9876 - protein, 36 aa, Artificial Sequence
  Non-cyclic GFR-binding peptide
  MOD_RES (1)..(3)..(35)..(36): Xaa is C or S
XGXGEVVMENSLQEVVKDYEDYYVMPLPELETPVXX

SEQ ID NO: 9877 - protein, 39 aa, Artificial Sequence
  Non-cyclic GFR-binding peptide
  MOD_RES (2)..(35)..(36): Xaa is C or S
  MOD_RES (13)..(14)..(15)..(16)..(17): Xaa is A or G
  MOD_RES (18)..(19)..(20)..(21): Xaa is A or G or absent
KXSKVIMNSLQEXXXXXXXXXYYVIPLPELDQSVXXPSA

SEQ ID NO: 9878 - protein, 41 aa, Artificial Sequence
  Non-cyclic GFR-binding peptide
  MOD_RES (2)..(36): Xaa is C or S
  MOD_RES (14)..(15)..(16)..(17)..(18): Xaa is A or G
  MOD_RES (19)..(20)..(21)..(22): Xaa is A or G or absent
GXSRVVMNEYQKYXXXXXXXXXIFLVSIPSLKTPAXTPKTV

SEQ ID NO: 9879 - protein, 38 aa, Artificial Sequence
  Non-cyclic GFR-binding peptide
  MOD_RES (2)..(4)..(36)..(37): Xaa is C or S
RXGXSEVVMDRYKKLVVNNASDFYLISIANLRTPVXXT

SEQ ID NO: 9880 - protein, 42 aa, Artificial Sequence
  Non-cyclic GFR-binding peptide
  MOD_RES (2)..(36)..(37): Xaa is C or S
  MOD_RES (14)..(15)..(16)..(17)..(18): Xaa is A or G
  MOD_RES (19)..(20)..(21)..(22): Xaa is A or G or absent
GXSRVVMNNSLQEXXXXXXXXXYYVVPLPELKTPAXXPKPVY

SEQ ID NO: 9881 - protein, 33 aa, Artificial Sequence
  Non-cyclic GFR-binding peptide
  MOD_RES (1)..(32)..(33): Xaa is C or S
XSKVVMEYQKYVKPTRGVIFLISIPSLDQPVXX

SEQ ID NO: 9882 - protein, 37 aa, Artificial Sequence
  Non-cyclic GFR-binding peptide
  MOD_RES (33)..(34): Xaa is C or S
  MOD_RES (11)..(12)..(13)..(14)..(15): Xaa is A or G
  MOD_RES (16)..(17)..(18)..(19): Xaa is A or G or absent
SRVIMNSLQEXXXXXXXXXYYLITLPELAQPVXXPAA

SEQ ID NO: 9883 - protein, 43 aa, Artificial Sequence
  Non-cyclic GFR-binding peptide
  MOD_RES (2)..(4)..(37)..(38): Xaa is C or S
  MOD_RES (15)..(16)..(17)..(18)..(19): Xaa is A or G
  MOD_RES (20)..(21)..(22)..(23): Xaa is A or G or absent
SXKXSKVVMEYQKYXXXXXXXXXIFLISIPSLDQPVXXPSASA

SEQ ID NO: 9884 - protein, 36 aa, Artificial Sequence
  Non-cyclic GFR-binding peptide
  MOD_RES (34)..(35): Xaa is C or S
  MOD_RES (12)..(13)..(14)..(15)..(16): Xaa is A or G
  MOD_RES (17)..(18)..(19)..(20): Xaa is A or G or absent
SEVVMDQYNKLXXXXXXXXXLYLISIASLRTPVXXT

SEQ ID NO: 9885 - protein, 44 aa, Artificial Sequence
  Non-cyclic GFR-binding peptide
  MOD_RES (2)..(4)..(38)..(39): Xaa is C or S
  MOD_RES (16)..(17)..(18)..(19)..(20): Xaa is A or G
  MOD_RES (21)..(22)..(23)..(24): Xaa is A or G or absent
RXGXSEVVMDQYNKLXXXXXXXXXLYLISIASLRTPVXXTPPTS

SEQ ID NO: 9886 - protein, 37 aa, Artificial Sequence
  Non-cyclic GFR-binding peptide
  MOD_RES (33)..(34): Xaa is C or S
  MOD_RES (11)..(12)..(13)..(14)..(15): Xaa is A or G
  MOD_RES (16)..(17)..(18)..(19): Xaa is A or G or absent
RVVMNNSLQEXXXXXXXXXYYVVPLPELQTPAXXPKP

SEQ ID NO: 9887 - protein, 38 aa, Artificial Sequence
  Non-cyclic GFR-binding peptide
  MOD_RES (1)..(35)..(36): Xaa is C or S
  MOD_RES (13)..(14)..(15)..(16)..(17): Xaa is A or G
  MOD_RES (18)..(19)..(20)..(21): Xaa is A or G or absent
XSRVVMNNSLQEXXXXXXXXXYYLVTLPELKTPAXXPK

SEQ ID NO: 9888 - protein, 35 aa, Artificial Sequence
  Non-cyclic GFR-binding peptide
  MOD_RES (2)..(34): Xaa is C or S
GXSRVVMNEYQKYIVNSSDDIFLVSIPSLKTPAXT

SEQ ID NO: 9889 - protein, 38 aa, Artificial Sequence
  Non-cyclic GFR-binding peptide
  MOD_RES (2)..(4)..(37)..(38): Xaa is C or S
  MOD_RES (15)..(16)..(17)..(18)..(19): Xaa is A or G
  MOD_RES (20)..(21)..(22)..(23): Xaa is A or G or absent
SXKXSRVIMEYQKYXXXXXXXXXIFLISIPSLAQPVXX

SEQ ID NO: 9890 - protein, 37 aa, Artificial Sequence
  Non-cyclic GFR-binding peptide
  MOD_RES (33)..(34): Xaa is C or S
  MOD_RES (11)..(12)..(13)..(14)..(15): Xaa is A or G
  MOD_RES (16)..(17)..(18)..(19): Xaa is A or G or absent
EVVMEEYQKYXXXXXXXXXIFLMSIPSLETPVXXAKP

SEQ ID NO: 9891 - protein, 35 aa, Artificial Sequence
  Non-cyclic GFR-binding peptide
  MOD_RES (32)..(33): Xaa is C or S
GEVVMDNSLQEVVKENEDYYVMPLPELETPVXXAK

SEQ ID NO: 9892 - protein, 34 aa, Artificial Sequence
  Non-cyclic GFR-binding peptide
  MOD_RES (33)..(33): Xaa is C or S
  MOD_RES (11)..(12)..(13)..(14)..(15): Xaa is A or G
  MOD_RES (16)..(17)..(18)..(19): Xaa is A or G or absent
RVVMNEYQKYXXXXXXXXXIFLVSIPSLKTPAXT

SEQ ID NO: 9893 - protein, 40 aa, Artificial Sequence
  Non-cyclic GFR-binding peptide
  MOD_RES (2)..(4)..(35)..(36): Xaa is C or S
SXKXSRVIMNSLQEVKPKRGVYYLITLPELAQPVXXPAAS

SEQ ID NO: 9894 - protein, 41 aa, Artificial Sequence
  Non-cyclic GFR-binding peptide
  MOD_RES (1)..(3)..(37)..(38): Xaa is C or S
  MOD_RES (15)..(16)..(17)..(18)..(19): Xaa is A or G
  MOD_RES (20)..(21)..(22)..(23): Xaa is A or G or absent
XGXSRVVMNEYQKYXXXXXXXXXIFLVSIPSLKTPAXXPKP

SEQ ID NO: 9895 - protein, 36 aa, Artificial Sequence
  Non-cyclic GFR-binding peptide
  MOD_RES (1)..(34)..(35): Xaa is C or S
  MOD_RES (12)..(13)..(14)..(15)..(16): Xaa is A or G
  MOD_RES (17)..(18)..(19)..(20): Xaa is A or G or absent
XSKVVMNSLQEXXXXXXXXXYYVIPLPELDQPVXXP

SEQ ID NO: 9896 - protein, 39 aa, Artificial Sequence
  Non-cyclic GFR-binding peptide
  MOD_RES (33)..(34): Xaa is C or S
  MOD_RES (11)..(12)..(13)..(14)..(15): Xaa is A or G
  MOD_RES (16)..(17)..(18)..(19): Xaa is A or G or absent
SKVVMEYQKYXXXXXXXXXIFLISIPSLDQPVXXPSASA

SEQ ID NO: 9897 - protein, 38 aa, Artificial Sequence
  Non-cyclic GFR-binding peptide
  MOD_RES (2)..(34)..(35): Xaa is C or S
GXGEVVMDEYQKYVVKENEDIFLMSIPSLETPVXXAKP

SEQ ID NO: 9898 - protein, 33 aa, Artificial Sequence
  Non-cyclic GFR-binding peptide
  MOD_RES (33)..(33): Xaa is C or S
  MOD_RES (11)..(12)..(13)..(14)..(15): Xaa is A or G
  MOD_RES (16)..(17)..(18)..(19): Xaa is A or G or absent
EVVMENSLQEXXXXXXXXXYYLMTLPELETPVX

SEQ ID NO: 9899 - protein, 33 aa, Artificial Sequence
  Non-cyclic GFR-binding peptide
  MOD_RES (1)..(33): Xaa is C or S
XSEVVMDQYNKLVVNNASDLYLISIASLRTPVX

SEQ ID NO: 9900 - protein, 38 aa, Artificial Sequence
  Non-cyclic GFR-binding peptide
  MOD_RES (2)..(36): Xaa is C or S
  MOD_RES (14)..(15)..(16)..(17)..(18): Xaa is A or G
  MOD_RES (19)..(20)..(21)..(22): Xaa is A or G or absent
GXSRVVMNEYQKYXXXXXXXXXIFLVSIPSLKTPAXTP

SEQ ID NO: 9901 - protein, 34 aa, Artificial Sequence
  Non-cyclic GFR-binding peptide
  MOD_RES (33)..(34): Xaa is C or S
  MOD_RES (11)..(12)..(13)..(14)..(15): Xaa is A or G
  MOD_RES (16)..(17)..(18)..(19): Xaa is A or G or absent
EVVMDNSLQEXXXXXXXXXYYLMTLPELETPVXX

SEQ ID NO: 9902 - protein, 41 aa, Artificial Sequence
  Non-cyclic GFR-binding peptide
  MOD_RES (2)..(4)..(36)..(37): Xaa is C or S
HXGXSRVVMNNSLQEIVNSSDDYYVVPLPELKTPAXXPKPV

SEQ ID NO: 9903 - protein, 36 aa, Artificial Sequence
  Non-cyclic GFR-binding peptide
  MOD_RES (2)..(35)..(36): Xaa is C or S
  MOD_RES (13)..(14)..(15)..(16)..(17): Xaa is A or G
  MOD_RES (18)..(19)..(20)..(21): Xaa is A or G or absent
KXSRVIMNSLQEXXXXXXXXXYYLITLPELAQPVXX

SEQ ID NO: 9904 - protein, 40 aa, Artificial Sequence
  Non-cyclic GFR-binding peptide
  MOD_RES (1)..(3)..(37)..(38): Xaa is C or S
  MOD_RES (15)..(16)..(17)..(18)..(19): Xaa is A or G
  MOD_RES (20)..(21)..(22)..(23): Xaa is A or G or absent
XGXARVVMNNSLQEXXXXXXXXXYYLVTLPELQTPAXXPK

SEQ ID NO: 9905 - protein, 39 aa, Artificial Sequence
  Non-cyclic GFR-binding peptide
  MOD_RES (2)..(34)..(35): Xaa is C or S
GXGEVVMENSLQEVVKDYEDYYVMPLPELETPVXXAKPI

SEQ ID NO: 9906 - protein, 32 aa, Artificial Sequence
  Non-cyclic GFR-binding peptide
  MOD_RES (1)..(1): Xaa is C or S
XSEVVMDQYNKLVVNNASDLYLISIASLRTPV

SEQ ID NO: 9907 - protein, 43 aa, Artificial Sequence
  Non-cyclic GFR-binding peptide
  MOD_RES (1)..(3)..(37)..(38): Xaa is C or S
  MOD_RES (15)..(16)..(17)..(18)..(19): Xaa is A or G
  MOD_RES (20)..(21)..(22)..(23): Xaa is A or G or absent
XGXGEVVMENSLQEXXXXXXXXXYYLMTLPELETPVXXAKPIS

SEQ ID NO: 9908 - protein, 39 aa, Artificial Sequence
  Non-cyclic GFR-binding peptide
  MOD_RES (34)..(34): Xaa is C or S
  MOD_RES (12)..(13)..(14)..(15)..(16): Xaa is A or G
  MOD_RES (17)..(18)..(19)..(20): Xaa is A or G or absent
SRVVMNNSLQEXXXXXXXXXYYVVPLPELKTPAXTPKTV

SEQ ID NO: 9909 - protein, 38 aa, Artificial Sequence
  Non-cyclic GFR-binding peptide
  MOD_RES (2)..(36)..(37): Xaa is C or S
  MOD_RES (14)..(15)..(16)..(17)..(18): Xaa is A or G
  MOD_RES (19)..(20)..(21)..(22): Xaa is A or G or absent
GXSRVVMNNSLQEXXXXXXXXXYYVVPLPELKTPAXXP

SEQ ID NO: 9910 - protein, 44 aa, Artificial Sequence
  Non-cyclic GFR-binding peptide
  MOD_RES (2)..(4)..(38)..(39): Xaa is C or S
  MOD_RES (16)..(17)..(18)..(19)..(20): Xaa is A or G
  MOD_RES (21)..(22)..(23)..(24): Xaa is A or G or absent
RXGXGEVVMENSLQEXXXXXXXXXYYLMTLPELETPVXXAKPIS

SEQ ID NO: 9911 - protein, 34 aa, Artificial Sequence
  Non-cyclic GFR-binding peptide
  MOD_RES (32)..(33): Xaa is C or S
GEVVMDNSLQEVVKENEDYYLMTLPELETPVXXA

SEQ ID NO: 9912 - protein, 37 aa, Artificial Sequence
  Non-cyclic GFR-binding peptide
  MOD_RES (1)..(33)..(34): Xaa is C or S
XSRVVMNEYQKYIVNSSDDIFLVSIPSLKTPAXXPKP

SEQ ID NO: 9913 - protein, 32 aa, Artificial Sequence
  Non-cyclic GFR-binding peptide
  MOD_RES (11)..(12)..(13)..(14)..(15): Xaa is A or G
  MOD_RES (16)..(17)..(18)..(19): Xaa is A or G or absent
SRVIMNSLQEXXXXXXXXXYYLITLPELAQPV

SEQ ID NO: 9914 - protein, 40 aa, Artificial Sequence
  Non-cyclic GFR-binding peptide
  MOD_RES (1)..(3)..(37): Xaa is C or S
  MOD_RES (15)..(16)..(17)..(18)..(19): Xaa is A or G
  MOD_RES (20)..(21)..(22)..(23): Xaa is A or G or absent
XGXSRVVMNEYQKYXXXXXXXXXIFLVSIPSLKTPAXTPK

SEQ ID NO: 9915 - protein, 37 aa, Artificial Sequence
  Non-cyclic GFR-binding peptide
  MOD_RES (33)..(34): Xaa is C or S
  MOD_RES (11)..(12)..(13)..(14)..(15): Xaa is A or G
  MOD_RES (16)..(17)..(18)..(19): Xaa is A or G or absent
RVVMNNSLQEXXXXXXXXXYYLVTLPELQTPAXXPKP

SEQ ID NO: 9916 - protein, 34 aa, Artificial Sequence
  Non-cyclic GFR-binding peptide
  MOD_RES (34)..(34): Xaa is C or S
  MOD_RES (12)..(13)..(14)..(15)..(16): Xaa is A or G
  MOD_RES (17)..(18)..(19)..(20): Xaa is A or G or absent
GEVVMDEYQKYXXXXXXXXXIFLMSIPSLETPVX

SEQ ID NO: 9917 - protein, 38 aa, Artificial Sequence
  Non-cyclic GFR-binding peptide
  MOD_RES (2)..(4)..(38): Xaa is C or S
  MOD_RES (16)..(17)..(18)..(19)..(20): Xaa is A or G
  MOD_RES (21)..(22)..(23)..(24): Xaa is A or G or absent
RXGXGEVVMEEYQKYXXXXXXXXXIFLMSIPSLETPVX

SEQ ID NO: 9918 - protein, 40 aa, Artificial Sequence
  Non-cyclic GFR-binding peptide
  MOD_RES (2)..(4)..(38)..(39): Xaa is C or S
  MOD_RES (16)..(17)..(18)..(19)..(20): Xaa is A or G
  MOD_RES (21)..(22)..(23)..(24): Xaa is A or G or absent
RXGXGEVVMENSLQEXXXXXXXXXYYLMTLPELETPVXXA

SEQ ID NO: 9919 - protein, 31 aa, Artificial Sequence
  Non-cyclic GFR-binding peptide
SRVVMNEYQKYIVNSSDDIFLVSIPSLKTPA

SEQ ID NO: 9920 - protein, 40 aa, Artificial Sequence
  Non-cyclic GFR-binding peptide
  MOD_RES (2)..(34)..(35): Xaa is C or S
GXGEVVMDEYQKYVVKENEDIFLMSIPSLETPVXXAKPIK

SEQ ID NO: 9921 - protein, 34 aa, Artificial Sequence
  Non-cyclic GFR-binding peptide
  MOD_RES (1)..(34): Xaa is C or S
  MOD_RES (12)..(13)..(14)..(15)..(16): Xaa is A or G
  MOD_RES (17)..(18)..(19)..(20): Xaa is A or G or absent
XSKVVMNSLQEXXXXXXXXXYYVIPLPELDQPVX

SEQ ID NO: 9922 - protein, 35 aa, Artificial Sequence
  Non-cyclic GFR-binding peptide
  MOD_RES (2)..(4): Xaa is C or S
RXGXSEVVMDNSLQEVVNNASDYYVIPLPELRTPV

SEQ ID NO: 9923 - protein, 40 aa, Artificial Sequence
  Non-cyclic GFR-binding peptide
  MOD_RES (1)..(3)..(34)..(35): Xaa is C or S
XKXSRVIMNSLQEVKPKRGVYYLITLPELAQPVXXPAASA

SEQ ID NO: 9924 - protein, 33 aa, Artificial Sequence
  Non-cyclic GFR-binding peptide
  MOD_RES (2)..(33): Xaa is C or S
KXSKVVMNSLQEVKPTRGVYYVIPLPELDQPVX

SEQ ID NO: 9925 - protein, 32 aa, Artificial Sequence
  Non-cyclic GFR-binding peptide
  MOD_RES (32)..(32): Xaa is C or S
ARVVMNEYQKYIVNSSDDIFLVSIPSLQTPAX

SEQ ID NO: 9926 - protein, 34 aa, Artificial Sequence
  Non-cyclic GFR-binding peptide
  MOD_RES (1)..(32)..(33): Xaa is C or S
XSRVIMNSLQEVKPKRGVYYLITLPELAQPVXXP

SEQ ID NO: 9927 - protein, 37 aa, Artificial Sequence
  Non-cyclic GFR-binding peptide
  MOD_RES (31)..(32): Xaa is C or S
RVVMNNSLQEIVNSSDDYYLVTLPELQTPAXXPKPVT

SEQ ID NO: 9928 - protein, 37 aa, Artificial Sequence
  Non-cyclic GFR-binding peptide
  MOD_RES (32)..(33): Xaa is C or S
ARVVMNNSLQEIVNSSDDYYVVPLPELQTPAXXPKPV

SEQ ID NO: 9929 - protein, 35 aa, Artificial Sequence
  Non-cyclic GFR-binding peptide
  MOD_RES (33)..(34): Xaa is C or S
  MOD_RES (11)..(12)..(13)..(14)..(15): Xaa is A or G
  MOD_RES (16)..(17)..(18)..(19): Xaa is A or G or absent
EVVMDNSLQEXXXXXXXXXYYLITLPELRTPVXXT

SEQ ID NO: 9930 - protein, 39 aa, Artificial Sequence
  Non-cyclic GFR-binding peptide
  MOD_RES (1)..(35)..(36): Xaa is C or S
  MOD_RES (13)..(14)..(15)..(16)..(17): Xaa is A or G
  MOD_RES (18)..(19)..(20)..(21): Xaa is A or G or absent
XGEVVMENSLQEXXXXXXXXXYYLMTLPELETPVXXAKP

SEQ ID NO: 9931 - protein, 32 aa, Artificial Sequence
  Non-cyclic GFR-binding peptide
  MOD_RES (32)..(32): Xaa is C or S
GEVVMENSLQEVVKDYEDYYVMPLPELETPVX

SEQ ID NO: 9932 - protein, 31 aa, Artificial Sequence
  Non-cyclic GFR-binding peptide
GEVVMDEYQKYVVKENEDIFLMSIPSLETPV

SEQ ID NO: 9933 - protein, 44 aa, Artificial Sequence
  Non-cyclic GFR-binding peptide
  MOD_RES (2)..(4)..(38)..(39): Xaa is C or S
  MOD_RES (16)..(17)..(18)..(19)..(20): Xaa is A or G
  MOD_RES (21)..(22)..(23)..(24): Xaa is A or G or absent
HXGXARVVMNNSLQEXXXXXXXXXYYLVTLPELQTPAXXPKPVT

SEQ ID NO: 9934 - protein, 36 aa, Artificial Sequence
  Non-cyclic GFR-binding peptide
  MOD_RES (2)..(36): Xaa is C or S
  MOD_RES (14)..(15)..(16)..(17)..(18): Xaa is A or G
  MOD_RES (19)..(20)..(21)..(22): Xaa is A or G or absent
GXARVVMNNSLQEXXXXXXXXXYYVVPLPELQTPAX

SEQ ID NO: 9935 - protein, 38 aa, Artificial Sequence
  Non-cyclic GFR-binding peptide
  MOD_RES (2)..(34)..(35): Xaa is C or S
GXARVVMNEYQKYIVNSSDDIFLVSIPSLQTPAXXPKP

SEQ ID NO: 9936 - protein, 37 aa, Artificial Sequence
  Non-cyclic GFR-binding peptide
  MOD_RES (1)..(3)..(35)..(36): Xaa is C or S
XGXGEVVMDNSLQEVVKENEDYYVMPLPELETPVXXA

SEQ ID NO: 9937 - protein, 32 aa, Artificial Sequence
  Non-cyclic GFR-binding peptide
  MOD_RES (11)..(12)..(13)..(14)..(15): Xaa is A or G
  MOD_RES (16)..(17)..(18)..(19): Xaa is A or G or absent
SKVIMNSLQEXXXXXXXXXYYVIPLPELDQSV

SEQ ID NO: 9938 - protein, 37 aa, Artificial Sequence
  Non-cyclic GFR-binding peptide
  MOD_RES (2)..(33)..(34): Xaa is C or S
KXSRVIMNSLQEVKPKRGVYYLITLPELAQPVXXPAA

SEQ ID NO: 9939 - protein, 33 aa, Artificial Sequence
  Non-cyclic GFR-binding peptide
  MOD_RES (33)..(33): Xaa is C or S
  MOD_RES (11)..(12)..(13)..(14)..(15): Xaa is A or G
  MOD_RES (16)..(17)..(18)..(19): Xaa is A or G or absent
SRVIMNSLQEXXXXXXXXXYYLITLPELAQPVX

SEQ ID NO: 9940 - protein, 33 aa, Artificial Sequence
  Non-cyclic GFR-binding peptide
  MOD_RES (33)..(33): Xaa is C or S
  MOD_RES (11)..(12)..(13)..(14)..(15): Xaa is A or G
  MOD_RES (16)..(17)..(18)..(19): Xaa is A or G or absent
SKVIMNSLQEXXXXXXXXXYYVIPLPELDQSVX

SEQ ID NO: 9941 - protein, 39 aa, Artificial Sequence
  Non-cyclic GFR-binding peptide
  MOD_RES (34)..(34): Xaa is C or S
  MOD_RES (12)..(13)..(14)..(15)..(16): Xaa is A or G
  MOD_RES (17)..(18)..(19)..(20): Xaa is A or G or absent
SRVVMNEYQKYXXXXXXXXXIFLVSIPSLKTPAXTPKTV

SEQ ID NO: 9942 - protein, 40 aa, Artificial Sequence
  Non-cyclic GFR-binding peptide
  MOD_RES (2)..(4)..(37)..(38): Xaa is C or S
  MOD_RES (15)..(16)..(17)..(18)..(19): Xaa is A or G
  MOD_RES (20)..(21)..(22)..(23): Xaa is A or G or absent
SXKXSKVIMNSLQEXXXXXXXXXYYVIPLPELDQSVXXPS

SEQ ID NO: 9943 - protein, 34 aa, Artificial Sequence
  Non-cyclic GFR-binding peptide
  MOD_RES (32)..(33): Xaa is C or S
SEVVMDQYNKLVVNNASDLYLISIASLRTPVXXT

SEQ ID NO: 9944 - protein, 39 aa, Artificial Sequence
  Non-cyclic GFR-binding peptide
  MOD_RES (2)..(4)..(37)..(38): Xaa is C or S
  MOD_RES (15)..(16)..(17)..(18)..(19): Xaa is A or G
  MOD_RES (20)..(21)..(22)..(23): Xaa is A or G or absent
SXKXSRVIMEYQKYXXXXXXXXXIFLISIPSLAQPVXXP

SEQ ID NO: 9945 - protein, 35 aa, Artificial Sequence
  Non-cyclic GFR-binding peptide
  MOD_RES (33)..(34): Xaa is C or S
  MOD_RES (11)..(12)..(13)..(14)..(15): Xaa is A or G
  MOD_RES (16)..(17)..(18)..(19): Xaa is A or G or absent
RVVMNEYQKYXXXXXXXXXIFLVSIPSLQTPAXXP

SEQ ID NO: 9946 - protein, 38 aa, Artificial Sequence
  Non-cyclic GFR-binding peptide
  MOD_RES (2)..(4)..(36)..(37): Xaa is C or S
RXGXGEVVMENSLQEVVKDYEDYYLMTLPELETPVXXA

SEQ ID NO: 9947 - protein, 37 aa, Artificial Sequence
  Non-cyclic GFR-binding peptide
  MOD_RES (2)..(33)..(34): Xaa is C or S
KXSKVIMEYQKYIKPTKGIIFLISIPSLDQSVXXPSA

SEQ ID NO: 9948 - protein, 39 aa, Artificial Sequence
  Non-cyclic GFR-binding peptide
  MOD_RES (2)..(4)..(36): Xaa is C or S
HXGXSRVVMNNSLQEIVNSSDDYYLVTLPELKTPAXTPK

SEQ ID NO: 9949 - protein, 40 aa, Artificial Sequence
  Non-cyclic GFR-binding peptide
  MOD_RES (1)..(3)..(37)..(38): Xaa is C or S
  MOD_RES (15)..(16)..(17)..(18)..(19): Xaa is A or G
  MOD_RES (20)..(21)..(22)..(23): Xaa is A or G or absent
XGXARVVMNNSLQEXXXXXXXXXYYVVPLPELQTPAXXPK

SEQ ID NO: 9950 - protein, 34 aa, Artificial Sequence
  Non-cyclic GFR-binding peptide
  MOD_RES (34)..(34): Xaa is C or S
  MOD_RES (12)..(13)..(14)..(15)..(16): Xaa is A or G
  MOD_RES (17)..(18)..(19)..(20): Xaa is A or G or absent
GEVVMDNSLQEXXXXXXXXXYYLMTLPELETPVX

SEQ ID NO: 9951 - protein, 36 aa, Artificial Sequence
  Non-cyclic GFR-binding peptide
  MOD_RES (2)..(4)..(35)..(36): Xaa is C or S
SXKXSKVVMEYQKYVKPTRGVIFLISIPSLDQPVXX

SEQ ID NO: 9952 - protein, 41 aa, Artificial Sequence
  Non-cyclic GFR-binding peptide
  MOD_RES (2)..(4)..(36): Xaa is C or S
HXGXSRVVMNNSLQEIVNSSDDYYVVPLPELKTPAXTPKTV

SEQ ID NO: 9953 - protein, 34 aa, Artificial Sequence
  Non-cyclic GFR-binding peptide
  MOD_RES (1)..(1): Xaa is C or S
  MOD_RES (13)..(14)..(15)..(16)..(17): Xaa is A or G
  MOD_RES (18)..(19)..(20)..(21): Xaa is A or G or absent
XGEVVMDNSLQEXXXXXXXXXYYVMPLPELETPV

SEQ ID NO: 9954 - protein, 36 aa, Artificial Sequence
  Non-cyclic GFR-binding peptide
  MOD_RES (32)..(33): Xaa is C or S
SEVVMDNSLQEVVNNASDYYVIPLPELRTPVXXTPP

SEQ ID NO: 9955 - protein, 40 aa, Artificial Sequence
  Non-cyclic GFR-binding peptide
  MOD_RES (1)..(35)..(36): Xaa is C or S
  MOD_RES (13)..(14)..(15)..(16)..(17): Xaa is A or G
  MOD_RES (18)..(19)..(20)..(21): Xaa is A or G or absent
XGEVVMDNSLQEXXXXXXXXXYYLMTLPELETPVXXAKPI

SEQ ID NO: 9956 - protein, 33 aa, Artificial Sequence
  Non-cyclic GFR-binding peptide
  MOD_RES (2)..(2): Xaa is C or S
GXSEVVMDQYNKLVVNNASDLYLISIASLRTPV

SEQ ID NO: 9957 - protein, 35 aa, Artificial Sequence
  Non-cyclic GFR-binding peptide
  MOD_RES (2)..(2): Xaa is C or S
  MOD_RES (14)..(15)..(16)..(17)..(18): Xaa is A or G
  MOD_RES (19)..(20)..(21)..(22): Xaa is A or G or absent
GXSEVVMDNSLQEXXXXXXXXXYYLITLPELRTPV

SEQ ID NO: 9958 - protein, 36 aa, Artificial Sequence
  Non-cyclic GFR-binding peptide
  MOD_RES (1)..(3)..(35)..(36): Xaa is C or S
XGXGEVVMDNSLQEVVKENEDYYVMPLPELETPVXX

SEQ ID NO: 9959 - protein, 34 aa, Artificial Sequence
  Non-cyclic GFR-binding peptide
  MOD_RES (2)..(34): Xaa is C or S
GXARVVMNNSLQEIVNSSDDYYVVPLPELQTPAX

SEQ ID NO: 9960 - protein, 35 aa, Artificial Sequence
  Non-cyclic GFR-binding peptide
  MOD_RES (34)..(35): Xaa is C or S
  MOD_RES (12)..(13)..(14)..(15)..(16): Xaa is A or G
  MOD_RES (17)..(18)..(19)..(20): Xaa is A or G or absent
ARVVMNNSLQEXXXXXXXXXYYLVTLPELQTPAXX

SEQ ID NO: 9961 - protein, 37 aa, Artificial Sequence
  Non-cyclic GFR-binding peptide
  MOD_RES (2)..(4)..(37): Xaa is C or S
  MOD_RES (15)..(16)..(17)..(18)..(19): Xaa is A or G
  MOD_RES (20)..(21)..(22)..(23): Xaa is A or G or absent
SXKXSKVVMNSLQEXXXXXXXXXYYVIPLPELDQPVX

SEQ ID NO: 9962 - protein, 35 aa, Artificial Sequence
  Non-cyclic GFR-binding peptide
  MOD_RES (1)..(35): Xaa is C or S
  MOD_RES (13)..(14)..(15)..(16)..(17): Xaa is A or G
  MOD_RES (18)..(19)..(20)..(21): Xaa is A or G or absent
XGEVVMDNSLQEXXXXXXXXXYYVMPLPELETPVX

SEQ ID NO: 9963 - protein, 35 aa, Artificial Sequence
  Non-cyclic GFR-binding peptide
  MOD_RES (33)..(34): Xaa is C or S
  MOD_RES (11)..(12)..(13)..(14)..(15): Xaa is A or G
  MOD_RES (16)..(17)..(18)..(19): Xaa is A or G or absent
EVVMDNSLQEXXXXXXXXXYYVIPLPELRTPVXXT

SEQ ID NO: 9964 - protein, 39 aa, Artificial Sequence
  Non-cyclic GFR-binding peptide
  MOD_RES (33)..(34): Xaa is C or S
  MOD_RES (11)..(12)..(13)..(14)..(15): Xaa is A or G
  MOD_RES (16)..(17)..(18)..(19): Xaa is A or G or absent
EVVMDNSLQEXXXXXXXXXYYVMPLPELETPVXXAKPIK

SEQ ID NO: 9965 - protein, 39 aa, Artificial Sequence
  Non-cyclic GFR-binding peptide
  MOD_RES (33)..(34): Xaa is C or S
  MOD_RES (11)..(12)..(13)..(14)..(15): Xaa is A or G
  MOD_RES (16)..(17)..(18)..(19): Xaa is A or G or absent
EVVMDNSLQEXXXXXXXXXYYLMTLPELETPVXXAKPIK

SEQ ID NO: 9966 - protein, 35 aa, Artificial Sequence
  Non-cyclic GFR-binding peptide
  MOD_RES (34)..(35): Xaa is C or S
  MOD_RES (12)..(13)..(14)..(15)..(16): Xaa is A or G
  MOD_RES (17)..(18)..(19)..(20): Xaa is A or G or absent
GEVVMDEYQKYXXXXXXXXXIFLMSIPSLETPVXX

SEQ ID NO: 9967 - protein, 39 aa, Artificial Sequence
  Non-cyclic GFR-binding peptide
  MOD_RES (1)..(3)..(37)..(38): Xaa is C or S
  MOD_RES (15)..(16)..(17)..(18)..(19): Xaa is A or G
  MOD_RES (20)..(21)..(22)..(23): Xaa is A or G or absent
XGXSEVVMDRYKKLXXXXXXXXXFYLISIANLRTPVXXT

SEQ ID NO: 9968 - protein, 32 aa, Artificial Sequence
  Non-cyclic GFR-binding peptide
  MOD_RES (31)..(32): Xaa is C or S
EVVMDNSLQEVVNNASDYYVIPLPELRTPVXX

SEQ ID NO: 9969 - protein, 38 aa, Artificial Sequence
  Non-cyclic GFR-binding peptide
  MOD_RES (2)..(35)..(36): Xaa is C or S
  MOD_RES (13)..(14)..(15)..(16)..(17): Xaa is A or G
  MOD_RES (18)..(19)..(20)..(21): Xaa is A or G or absent
KXSRVIMNSLQEXXXXXXXXXYYLITLPELAQPVXXPA

SEQ ID NO: 9970 - protein, 35 aa, Artificial Sequence
  Non-cyclic GFR-binding peptide
  MOD_RES (1)..(3)..(35): Xaa is C or S
XGXSEVVMDRYKKLVVNNASDFYLISIANLRTPVX

SEQ ID NO: 9971 - protein, 39 aa, Artificial Sequence
  Non-cyclic GFR-binding peptide
  MOD_RES (2)..(36)..(37): Xaa is C or S
  MOD_RES (14)..(15)..(16)..(17)..(18): Xaa is A or G
  MOD_RES (19)..(20)..(21)..(22): Xaa is A or G or absent
GXSEVVMDNSLQEXXXXXXXXXYYLITLPELRTPVXXTP

SEQ ID NO: 9972 - protein, 37 aa, Artificial Sequence
  Non-cyclic GFR-binding peptide
  MOD_RES (2)..(35)..(36): Xaa is C or S
  MOD_RES (13)..(14)..(15)..(16)..(17): Xaa is A or G
  MOD_RES (18)..(19)..(20)..(21): Xaa is A or G or absent
KXSRVIMNSLQEXXXXXXXXXYYLITLPELAQPVXXP

SEQ ID NO: 9973 - protein, 31 aa, Artificial Sequence
  Non-cyclic GFR-binding peptide
  MOD_RES (31)..(31): Xaa is C or S
EVVMDNSLQEVVNNASDYYVIPLPELRTPVX

SEQ ID NO: 9974 - protein, 40 aa, Artificial Sequence
  Non-cyclic GFR-binding peptide
  MOD_RES (2)..(36)..(37): Xaa is C or S
  MOD_RES (14)..(15)..(16)..(17)..(18): Xaa is A or G
  MOD_RES (19)..(20)..(21)..(22): Xaa is A or G or absent
GXARVVMNEYQKYXXXXXXXXXIFLVSIPSLQTPAXXPKP

SEQ ID NO: 9975 - protein, 35 aa, Artificial Sequence
  Non-cyclic GFR-binding peptide
  MOD_RES (2)..(34): Xaa is C or S
GXSRVVMNNSLQEIVNSSDDYYLVTLPELKTPAXT

SEQ ID NO: 9976 - protein, 36 aa, Artificial Sequence
  Non-cyclic GFR-binding peptide
  MOD_RES (2)..(4): Xaa is C or S
  MOD_RES (15)..(16)..(17)..(18)..(19): Xaa is A or G
  MOD_RES (20)..(21)..(22)..(23): Xaa is A or G or absent
SXKXSRVIMEYQKYXXXXXXXXXIFLISIPSLAQPV

SEQ ID NO: 9977 - protein, 42 aa, Artificial Sequence
  Non-cyclic GFR-binding peptide
  MOD_RES (2)..(4)..(37)..(38): Xaa is C or S
  MOD_RES (15)..(16)..(17)..(18)..(19): Xaa is A or G
  MOD_RES (20)..(21)..(22)..(23): Xaa is A or G or absent
SXKXSKVVMEYQKYXXXXXXXXXIFLISIPSLDQPVXXPSAS

SEQ ID NO: 9978 - protein, 42 aa, Artificial Sequence
  Non-cyclic GFR-binding peptide
  MOD_RES (2)..(36)..(37): Xaa is C or S
  MOD_RES (14)..(15)..(16)..(17)..(18): Xaa is A or G
  MOD_RES (19)..(20)..(21)..(22): Xaa is A or G or absent
GXSRVVMNNSLQEXXXXXXXXXYYLVTLPELKTPAXXPKPVY

SEQ ID NO: 9979 - protein, 40 aa, Artificial Sequence
  Non-cyclic GFR-binding peptide
  MOD_RES (2)..(4)..(37)..(38): Xaa is C or S
  MOD_RES (15)..(16)..(17)..(18)..(19): Xaa is A or G
  MOD_RES (20)..(21)..(22)..(23): Xaa is A or G or absent
SXKXSKVIMEYQKYXXXXXXXXXIFLISIPSLDQSVXXPS

SEQ ID NO: 9980 - protein, 39 aa, Artificial Sequence
  Non-cyclic GFR-binding peptide
  MOD_RES (33)..(34): Xaa is C or S
  MOD_RES (11)..(12)..(13)..(14)..(15): Xaa is A or G
  MOD_RES (16)..(17)..(18)..(19): Xaa is A or G or absent
EVVMEEYQKYXXXXXXXXXIFLMSIPSLETPVXXAKPIS

SEQ ID NO: 9981 - protein, 36 aa, Artificial Sequence
  Non-cyclic GFR-binding peptide
  MOD_RES (1)..(3): Xaa is C or S
  MOD_RES (15)..(16)..(17)..(18)..(19): Xaa is A or G
  MOD_RES (20)..(21)..(22)..(23): Xaa is A or G or absent
XGXSEVVMDQYNKLXXXXXXXXXLYLISIASLRTPV

SEQ ID NO: 9982 - protein, 35 aa, Artificial Sequence
  Non-cyclic GFR-binding peptide
  MOD_RES (2)..(2): Xaa is C or S
  MOD_RES (14)..(15)..(16)..(17)..(18): Xaa is A or G
  MOD_RES (19)..(20)..(21)..(22): Xaa is A or G or absent
GXSRVVMNNSLQEXXXXXXXXXYYVVPLPELKTPA

SEQ ID NO: 9983 - protein, 34 aa, Artificial Sequence
  Non-cyclic GFR-binding peptide
  MOD_RES (1)..(32)..(33): Xaa is C or S
XSKVIMEYQKYIKPTKGIIFLISIPSLDQSVXXP

SEQ ID NO: 9984 - protein, 35 aa, Artificial Sequence
  Non-cyclic GFR-binding peptide
  MOD_RES (1)..(3): Xaa is C or S
  MOD_RES (14)..(15)..(16)..(17)..(18): Xaa is A or G
  MOD_RES (19)..(20)..(21)..(22): Xaa is A or G or absent
XKXSRVIMNSLQEXXXXXXXXXYYLITLPELAQPV

SEQ ID NO: 9985 - protein, 39 aa, Artificial Sequence
  Non-cyclic GFR-binding peptide
  MOD_RES (2)..(33)..(34): Xaa is C or S
KXSKVIMEYQKYIKPTKGIIFLISIPSLDQSVXXPSASA

SEQ ID NO: 9986 - protein, 36 aa, Artificial Sequence
  Non-cyclic GFR-binding peptide
  MOD_RES (31)..(31): Xaa is C or S
RVVMNNSLQEIVNSSDDYYVVPLPELKTPAXTPKTV

SEQ ID NO: 9987 - protein, 41 aa, Artificial Sequence
  Non-cyclic GFR-binding peptide
  MOD_RES (2)..(4)..(37)..(38): Xaa is C or S
  MOD_RES (15)..(16)..(17)..(18)..(19): Xaa is A or G
  MOD_RES (20)..(21)..(22)..(23): Xaa is A or G or absent
SXKXSKVIMEYQKYXXXXXXXXXIFLISIPSLDQSVXXPSA

SEQ ID NO: 9988 - protein, 35 aa, Artificial Sequence
  Non-cyclic GFR-binding peptide
  MOD_RES (1)..(3)..(35): Xaa is C or S
XGXSEVVMDNSLQEVVNNASDYYVIPLPELRTPVX

SEQ ID NO: 9989 - protein, 34 aa, Artificial Sequence
  Non-cyclic GFR-binding peptide
  MOD_RES (32)..(33): Xaa is C or S
GEVVMENSLQEVVKDYEDYYVMPLPELETPVXXA

SEQ ID NO: 9990 - protein, 33 aa, Artificial Sequence
  Non-cyclic GFR-binding peptide
  MOD_RES (31)..(32): Xaa is C or S
EVVMEEYQKYVVKDYEDIFLMSIPSLETPVXXA

SEQ ID NO: 9991 - protein, 34 aa, Artificial Sequence
  Non-cyclic GFR-binding peptide
  MOD_RES (1)..(32)..(33): Xaa is C or S
XSKVVMNSLQEVKPTRGVYYVIPLPELDQPVXXP

SEQ ID NO: 9992 - protein, 40 aa, Artificial Sequence
  Non-cyclic GFR-binding peptide
  MOD_RES (1)..(35)..(36): Xaa is C or S
  MOD_RES (13)..(14)..(15)..(16)..(17): Xaa is A or G
  MOD_RES (18)..(19)..(20)..(21): Xaa is A or G or absent
XGEVVMDNSLQEXXXXXXXXXYYVMPLPELETPVXXAKPI

SEQ ID NO: 9993 - protein, 32 aa, Artificial Sequence
  Non-cyclic GFR-binding peptide
  MOD_RES (1)..(1): Xaa is C or S
XGEVVMDEYQKYVVKENEDIFLMSIPSLETPV

SEQ ID NO: 9994 - protein, 39 aa, Artificial Sequence
  Non-cyclic GFR-binding peptide
  MOD_RES (2)..(4)..(36)..(37): Xaa is C or S
RXGXGEVVMEEYQKYVVKDYEDIFLMSIPSLETPVXXAK

SEQ ID NO: 9995 - protein, 38 aa, Artificial Sequence
  Non-cyclic GFR-binding peptide
  MOD_RES (2)..(34)..(35): Xaa is C or S
GXARVVMNNSLQEIVNSSDDYYVVPLPELQTPAXXPKP

SEQ ID NO: 9996 - protein, 33 aa, Artificial Sequence
  Non-cyclic GFR-binding peptide
  MOD_RES (33)..(33): Xaa is C or S
  MOD_RES (11)..(12)..(13)..(14)..(15): Xaa is A or G
  MOD_RES (16)..(17)..(18)..(19): Xaa is A or G or absent
SKVIMEYQKYXXXXXXXXXIFLISIPSLDQSVX

SEQ ID NO: 9997 - protein, 38 aa, Artificial Sequence
  Non-cyclic GFR-binding peptide
  MOD_RES (1)..(35)..(36): Xaa is C or S
  MOD_RES (13)..(14)..(15)..(16)..(17): Xaa is A or G
  MOD_RES (18)..(19)..(20)..(21): Xaa is A or G or absent
XGEVVMDNSLQEXXXXXXXXXYYVMPLPELETPVXXAK

SEQ ID NO: 9998 - protein, 36 aa, Artificial Sequence
  Non-cyclic GFR-binding peptide
  MOD_RES (1)..(3)..(34)..(35): Xaa is C or S
XKXSKVIMEYQKYIKPTKGIIFLISIPSLDQSVXXP

SEQ ID NO: 9999 - protein, 43 aa, Artificial Sequence
  Non-cyclic GFR-binding peptide
  MOD_RES (2)..(4)..(38)..(39): Xaa is C or S
  MOD_RES (16)..(17)..(18)..(19)..(20): Xaa is A or G
  MOD_RES (21)..(22)..(23)..(24): Xaa is A or G or absent
RXGXGEVVMEEYQKYXXXXXXXXXIFLMSIPSLETPVXXAKPI

SEQ ID NO: 10000 - protein, 37 aa, Artificial Sequence
  Non-cyclic GFR-binding peptide
  MOD_RES (32)..(32): Xaa is C or S
SRVVMNNSLQEIVNSSDDYYVVPLPELKTPAXTPKTV

SEQ ID NO: 10001 - protein, 36 aa, Artificial Sequence
  Non-cyclic GFR-binding peptide
  MOD_RES (1)..(3)..(35)..(36): Xaa is C or S
XGXGEVVMEEYQKYVVKDYEDIFLMSIPSLETPVXX

SEQ ID NO: 10002 - protein, 33 aa, Artificial Sequence
  Non-cyclic GFR-binding peptide
  MOD_RES (1)..(33): Xaa is C or S
XSEVVMDRYKKLVVNNASDFYLISIANLRTPVX

SEQ ID NO: 10003 - protein, 35 aa, Artificial Sequence
  Non-cyclic GFR-binding peptide
  MOD_RES (34)..(35): Xaa is C or S
  MOD_RES (12)..(13)..(14)..(15)..(16): Xaa is A or G
  MOD_RES (17)..(18)..(19)..(20): Xaa is A or G or absent
ARVVMNEYQKYXXXXXXXXXIFLVSIPSLQTPAXX

SEQ ID NO: 10004 - protein, 35 aa, Artificial Sequence
  Non-cyclic GFR-binding peptide
  MOD_RES (1)..(33)..(34): Xaa is C or S
XGEVVMDNSLQEVVKENEDYYLMTLPELETPVXXA

SEQ ID NO: 10005 - protein, 39 aa, Artificial Sequence
  Non-cyclic GFR-binding peptide
  MOD_RES (2)..(4)..(37)..(38): Xaa is C or S
  MOD_RES (15)..(16)..(17)..(18)..(19): Xaa is A or G
  MOD_RES (20)..(21)..(22)..(23): Xaa is A or G or absent
SXKXSKVVMEYQKYXXXXXXXXXIFLISIPSLDQPVXXP

SEQ ID NO: 10006 - protein, 37 aa, Artificial Sequence
  Non-cyclic GFR-binding peptide
  MOD_RES (2)..(4)..(37): Xaa is C or S
  MOD_RES (15)..(16)..(17)..(18)..(19): Xaa is A or G
  MOD_RES (20)..(21)..(22)..(23): Xaa is A or G or absent
SXKXSKVVMEYQKYXXXXXXXXXIFLISIPSLDQPVX

SEQ ID NO: 10007 - protein, 40 aa, Artificial Sequence
  Non-cyclic GFR-binding peptide
  MOD_RES (2)..(4)..(36)..(37): Xaa is C or S
RXGXGEVVMENSLQEVVKDYEDYYLMTLPELETPVXXAKP

SEQ ID NO: 10008 - protein, 37 aa, Artificial Sequence
  Non-cyclic GFR-binding peptide
  MOD_RES (1)..(34)..(35): Xaa is C or S
  MOD_RES (12)..(13)..(14)..(15)..(16): Xaa is A or G
  MOD_RES (17)..(18)..(19)..(20): Xaa is A or G or absent
XSKVIMNSLQEXXXXXXXXXYYVIPLPELDQSVXXPS

SEQ ID NO: 10009 - protein, 36 aa, Artificial Sequence
  Non-cyclic GFR-binding peptide
  MOD_RES (1)..(3)..(35)..(36): Xaa is C or S
XGXSEVVMDRYKKLVVNNASDFYLISIANLRTPVXX

SEQ ID NO: 10010 - protein, 35 aa, Artificial Sequence
  Non-cyclic GFR-binding peptide
  MOD_RES (33)..(34): Xaa is C or S
  MOD_RES (11)..(12)..(13)..(14)..(15): Xaa is A or G
  MOD_RES (16)..(17)..(18)..(19): Xaa is A or G or absent
EVVMDRYKKLXXXXXXXXXFYLISIANLRTPVXXT

SEQ ID NO: 10011 - protein, 38 aa, Artificial Sequence
  Non-cyclic GFR-binding peptide
  MOD_RES (2)..(34)..(35): Xaa is C or S
GXGEVVMENSLQEVVKDYEDYYLMTLPELETPVXXAKP

SEQ ID NO: 10012 - protein, 39 aa, Artificial Sequence
  Non-cyclic GFR-binding peptide
  MOD_RES (2)..(33)..(34): Xaa is C or S
KXSKVVMNSLQEVKPTRGVYYVIPLPELDQPVXXPSASA

SEQ ID NO: 10013 - protein, 41 aa, Artificial Sequence
  Non-cyclic GFR-binding peptide
  MOD_RES (2)..(4)..(38)..(39): Xaa is C or S
  MOD_RES (16)..(17)..(18)..(19)..(20): Xaa is A or G
  MOD_RES (21)..(22)..(23)..(24): Xaa is A or G or absent
RXGXGEVVMDNSLQEXXXXXXXXXYYLMTLPELETPVXXAK

SEQ ID NO: 10014 - protein, 36 aa, Artificial Sequence
  Non-cyclic GFR-binding peptide
  MOD_RES (2)..(33)..(34): Xaa is C or S
KXSKVVMNSLQEVKPTRGVYYVIPLPELDQPVXXPS

SEQ ID NO: 10015 - protein, 31 aa, Artificial Sequence
  Non-cyclic GFR-binding peptide
  MOD_RES (31)..(31): Xaa is C or S
EVVMDRYKKLVVNNASDFYLISIANLRTPVX

SEQ ID NO: 10016 - protein, 36 aa, Artificial Sequence
  Non-cyclic GFR-binding peptide
  MOD_RES (2)..(33)..(34): Xaa is C or S
KXSKVIMEYQKYIKPTKGIIFLISIPSLDQSVXXPS

SEQ ID NO: 10017 - protein, 40 aa, Artificial Sequence
  Non-cyclic GFR-binding peptide
  MOD_RES (2)..(4)..(36)..(37): Xaa is C or S
HXGXARVVMNNSLQEIVNSSDDYYLVTLPELQTPAXXPKP

SEQ ID NO: 10018 - protein, 37 aa, Artificial Sequence
  Non-cyclic GFR-binding peptide
  MOD_RES (1)..(35)..(36): Xaa is C or S
  MOD_RES (13)..(14)..(15)..(16)..(17): Xaa is A or G
  MOD_RES (18)..(19)..(20)..(21): Xaa is A or G or absent
XGEVVMDNSLQEXXXXXXXXXYYLMTLPELETPVXXA

SEQ ID NO: 10019 - protein, 39 aa, Artificial Sequence
  Non-cyclic GFR-binding peptide
  MOD_RES (1)..(3)..(37)..(38): Xaa is C or S
  MOD_RES (15)..(16)..(17)..(18)..(19): Xaa is A or G
  MOD_RES (20)..(21)..(22)..(23): Xaa is A or G or absent
XGXGEVVMENSLQEXXXXXXXXXYYLMTLPELETPVXXA

SEQ ID NO: 10020 - protein, 35 aa, Artificial Sequence
  Non-cyclic GFR-binding peptide
  MOD_RES (1)..(3)..(35): Xaa is C or S
XGXSRVVMNNSLQEIVNSSDDYYLVTLPELKTPAX

SEQ ID NO: 10021 - protein, 37 aa, Artificial Sequence
  Non-cyclic GFR-binding peptide
  MOD_RES (2)..(34)..(35): Xaa is C or S
GXGEVVMDNSLQEVVKENEDYYVMPLPELETPVXXAK

SEQ ID NO: 10022 - protein, 35 aa, Artificial Sequence
  Non-cyclic GFR-binding peptide
  MOD_RES (2)..(34)..(35): Xaa is C or S
GXARVVMNEYQKYIVNSSDDIFLVSIPSLQTPAXX

SEQ ID NO: 10023 - protein, 42 aa, Artificial Sequence
  Non-cyclic GFR-binding peptide
  MOD_RES (2)..(4)..(36)..(37): Xaa is C or S
HXGXARVVMNNSLQEIVNSSDDYYVVPLPELQTPAXXPKPVT

SEQ ID NO: 10024 - protein, 34 aa, Artificial Sequence
  Non-cyclic GFR-binding peptide
  MOD_RES (1)..(1): Xaa is C or S
  MOD_RES (13)..(14)..(15)..(16)..(17): Xaa is A or G
  MOD_RES (18)..(19)..(20)..(21): Xaa is A or G or absent
XGEVVMDEYQKYXXXXXXXXXIFLMSIPSLETPV

SEQ ID NO: 10025 - protein, 40 aa, Artificial Sequence
  Non-cyclic GFR-binding peptide
  MOD_RES (2)..(4)..(35)..(36): Xaa is C or S
SXKXSKVIMNSLQEIKPTKGIYYVIPLPELDQSVXXPSAS

SEQ ID NO: 10026 - protein, 40 aa, Artificial Sequence
  Non-cyclic GFR-binding peptide
  MOD_RES (1)..(3)..(37)..(38): Xaa is C or S
  MOD_RES (15)..(16)..(17)..(18)..(19): Xaa is A or G
  MOD_RES (20)..(21)..(22)..(23): Xaa is A or G or absent
XGXSRVVMNEYQKYXXXXXXXXXIFLVSIPSLKTPAXXPK

SEQ ID NO: 10027 - protein, 37 aa, Artificial Sequence
  Non-cyclic GFR-binding peptide
  MOD_RES (34)..(35): Xaa is C or S
  MOD_RES (12)..(13)..(14)..(15)..(16): Xaa is A or G
  MOD_RES (17)..(18)..(19)..(20): Xaa is A or G or absent
SEVVMDNSLQEXXXXXXXXXYYVIPLPELRTPVXXTP

SEQ ID NO: 10028 - protein, 39 aa, Artificial Sequence
  Non-cyclic GFR-binding peptide
  MOD_RES (2)..(4)..(36)..(37): Xaa is C or S
HXGXARVVMNEYQKYIVNSSDDIFLVSIPSLQTPAXXPK

SEQ ID NO: 10029 - protein, 35 aa, Artificial Sequence
  Non-cyclic GFR-binding peptide
  MOD_RES (34)..(35): Xaa is C or S
  MOD_RES (12)..(13)..(14)..(15)..(16): Xaa is A or G
  MOD_RES (17)..(18)..(19)..(20): Xaa is A or G or absent
GEVVMDNSLQEXXXXXXXXXYYLMTLPELETPVXX

SEQ ID NO: 10030 - protein, 36 aa, Artificial Sequence
  Non-cyclic GFR-binding peptide
  MOD_RES (1)..(3)..(36): Xaa is C or S
  MOD_RES (14)..(15)..(16)..(17)..(18): Xaa is A or G
  MOD_RES (19)..(20)..(21)..(22): Xaa is A or G or absent
XKXSRVIMNSLQEXXXXXXXXXYYLITLPELAQPVX

SEQ ID NO: 10031 - protein, 39 aa, Artificial Sequence
  Non-cyclic GFR-binding peptide
  MOD_RES (2)..(36)..(37): Xaa is C or S
  MOD_RES (14)..(15)..(16)..(17)..(18): Xaa is A or G
  MOD_RES (19)..(20)..(21)..(22): Xaa is A or G or absent
GXSRVVMNNSLQEXXXXXXXXXYYLVTLPELKTPAXXPK

SEQ ID NO: 10032 - protein, 41 aa, Artificial Sequence
  Non-cyclic GFR-binding peptide
  MOD_RES (1)..(3)..(36)..(37): Xaa is C or S
  MOD_RES (14)..(15)..(16)..(17)..(18): Xaa is A or G
  MOD_RES (19)..(20)..(21)..(22): Xaa is A or G or absent
XKXSKVIMNSLQEXXXXXXXXXYYVIPLPELDQSVXXPSAS

SEQ ID NO: 10033 - protein, 39 aa, Artificial Sequence
  Non-cyclic GFR-binding peptide
  MOD_RES (2)..(34)..(35): Xaa is C or S
GXSRVVMNNSLQEIVNSSDDYYLVTLPELKTPAXXPKPV

SEQ ID NO: 10034 - protein, 33 aa, Artificial Sequence
  Non-cyclic GFR-binding peptide
  MOD_RES (12)..(13)..(14)..(15)..(16): Xaa is A or G
  MOD_RES (17)..(18)..(19)..(20): Xaa is A or G or absent
SEVVMDNSLQEXXXXXXXXXYYLITLPELRTPV

SEQ ID NO: 10035 - protein, 36 aa, Artificial Sequence
  Non-cyclic GFR-binding peptide
  MOD_RES (1)..(3)..(35)..(36): Xaa is C or S
XGXARVVMNNSLQEIVNSSDDYYVVPLPELQTPAXX

SEQ ID NO: 10036 - protein, 37 aa, Artificial Sequence
  Non-cyclic GFR-binding peptide
  MOD_RES (1)..(3)..(37): Xaa is C or S
  MOD_RES (15)..(16)..(17)..(18)..(19): Xaa is A or G
  MOD_RES (20)..(21)..(22)..(23): Xaa is A or G or absent
XGXGEVVMDEYQKYXXXXXXXXXIFLMSIPSLETPVX

SEQ ID NO: 10037 - protein, 37 aa, Artificial Sequence
  Non-cyclic GFR-binding peptide
  MOD_RES (33)..(34): Xaa is C or S
  MOD_RES (11)..(12)..(13)..(14)..(15): Xaa is A or G
  MOD_RES (16)..(17)..(18)..(19): Xaa is A or G or absent
EVVMDNSLQEXXXXXXXXXYYLMTLPELETPVXXAKP

SEQ ID NO: 10038 - protein, 41 aa, Artificial Sequence
  Non-cyclic GFR-binding peptide
  MOD_RES (2)..(4)..(38)..(39): Xaa is C or S
  MOD_RES (16)..(17)..(18)..(19)..(20): Xaa is A or G
  MOD_RES (21)..(22)..(23)..(24): Xaa is A or G or absent
RXGXGEVVMENSLQEXXXXXXXXXYYVMPLPELETPVXXAK

SEQ ID NO: 10039 - protein, 37 aa, Artificial Sequence
  Non-cyclic GFR-binding peptide
  MOD_RES (1)..(34)..(35): Xaa is C or S
  MOD_RES (12)..(13)..(14)..(15)..(16): Xaa is A or G
  MOD_RES (17)..(18)..(19)..(20): Xaa is A or G or absent
XSKVVMEYQKYXXXXXXXXXIFLISIPSLDQPVXXPS

SEQ ID NO: 10040 - protein, 36 aa, Artificial Sequence
  Non-cyclic GFR-binding peptide
  MOD_RES (2)..(33)..(34): Xaa is C or S
KXSKVVMEYQKYVKPTRGVIFLISIPSLDQPVXXPS

SEQ ID NO: 10041 - protein, 44 aa, Artificial Sequence
  Non-cyclic GFR-binding peptide
  MOD_RES (2)..(4)..(38)..(39): Xaa is C or S
  MOD_RES (16)..(17)..(18)..(19)..(20): Xaa is A or G
  MOD_RES (21)..(22)..(23)..(24): Xaa is A or G or absent
RXGXGEVVMDEYQKYXXXXXXXXXIFLMSIPSLETPVXXAKPIK

SEQ ID NO: 10042 - protein, 33 aa, Artificial Sequence
  Non-cyclic GFR-binding peptide
  MOD_RES (2)..(2): Xaa is C or S
GXARVVMNNSLQEIVNSSDDYYLVTLPELQTPA

SEQ ID NO: 10043 - protein, 38 aa, Artificial Sequence
  Non-cyclic GFR-binding peptide
  MOD_RES (2)..(4)..(38): Xaa is C or S
  MOD_RES (16)..(17)..(18)..(19)..(20): Xaa is A or G
  MOD_RES (21)..(22)..(23)..(24): Xaa is A or G or absent
RXGXSEVVMDNSLQEXXXXXXXXXYYLITLPELRTPVX

SEQ ID NO: 10044 - protein, 38 aa, Artificial Sequence
  Non-cyclic GFR-binding peptide
  MOD_RES (1)..(35)..(36): Xaa is C or S
  MOD_RES (13)..(14)..(15)..(16)..(17): Xaa is A or G
  MOD_RES (18)..(19)..(20)..(21): Xaa is A or G or absent
XARVVMNEYQKYXXXXXXXXXIFLVSIPSLQTPAXXPK

SEQ ID NO: 10045 - protein, 38 aa, Artificial Sequence
  Non-cyclic GFR-binding peptide
  MOD_RES (33)..(34): Xaa is C or S
  MOD_RES (11)..(12)..(13)..(14)..(15): Xaa is A or G
  MOD_RES (16)..(17)..(18)..(19): Xaa is A or G or absent
SRVIMEYQKYXXXXXXXXXIFLISIPSLAQPVXXPAAS

SEQ ID NO: 10046 - protein, 37 aa, Artificial Sequence
  Non-cyclic GFR-binding peptide
  MOD_RES (2)..(34)..(35): Xaa is C or S
GXARVVMNEYQKYIVNSSDDIFLVSIPSLQTPAXXPK

SEQ ID NO: 10047 - protein, 40 aa, Artificial Sequence
  Non-cyclic GFR-binding peptide
  MOD_RES (2)..(35)..(36): Xaa is C or S
  MOD_RES (13)..(14)..(15)..(16)..(17): Xaa is A or G
  MOD_RES (18)..(19)..(20)..(21): Xaa is A or G or absent
KXSRVIMEYQKYXXXXXXXXXIFLISIPSLAQPVXXPAAS

SEQ ID NO: 10048 - protein, 37 aa, Artificial Sequence
  Non-cyclic GFR-binding peptide
  MOD_RES (1)..(35)..(36): Xaa is C or S
  MOD_RES (13)..(14)..(15)..(16)..(17): Xaa is A or G
  MOD_RES (18)..(19)..(20)..(21): Xaa is A or G or absent
XGEVVMENSLQEXXXXXXXXXYYVMPLPELETPVXXA

SEQ ID NO: 10049 - protein, 42 aa, Artificial Sequence
  Non-cyclic GFR-binding peptide
  MOD_RES (1)..(3)..(36)..(37): Xaa is C or S
  MOD_RES (14)..(15)..(16)..(17)..(18): Xaa is A or G
  MOD_RES (19)..(20)..(21)..(22): Xaa is A or G or absent
XKXSRVIMNSLQEXXXXXXXXXYYLITLPELAQPVXXPAASA

SEQ ID NO: 10050 - protein, 43 aa, Artificial Sequence
  Non-cyclic GFR-binding peptide
  MOD_RES (2)..(4)..(37)..(38): Xaa is C or S
  MOD_RES (15)..(16)..(17)..(18)..(19): Xaa is A or G
  MOD_RES (20)..(21)..(22)..(23): Xaa is A or G or absent
SXKXSRVIMNSLQEXXXXXXXXXYYLITLPELAQPVXXPAASA

SEQ ID NO: 10051 - protein, 38 aa, Artificial Sequence
  Non-cyclic GFR-binding peptide
  MOD_RES (2)..(36)..(37): Xaa is C or S
  MOD_RES (14)..(15)..(16)..(17)..(18): Xaa is A or G
  MOD_RES (19)..(20)..(21)..(22): Xaa is A or G or absent
GXGEVVMENSLQEXXXXXXXXXYYVMPLPELETPVXXA

SEQ ID NO: 10052 - protein, 32 aa, Artificial Sequence
  Non-cyclic GFR-binding peptide
  MOD_RES (31)..(32): Xaa is C or S
RVVMNNSLQEIVNSSDDYYVVPLPELKTPAXX

SEQ ID NO: 10053 - protein, 36 aa, Artificial Sequence
  Non-cyclic GFR-binding peptide
  MOD_RES (2)..(34)..(35): Xaa is C or S
GXARVVMNNSLQEIVNSSDDYYLVTLPELQTPAXXP

SEQ ID NO: 10054 - protein, 37 aa, Artificial Sequence
  Non-cyclic GFR-binding peptide
  MOD_RES (1)..(35)..(36): Xaa is C or S
  MOD_RES (13)..(14)..(15)..(16)..(17): Xaa is A or G
  MOD_RES (18)..(19)..(20)..(21): Xaa is A or G or absent
XSEVVMDNSLQEXXXXXXXXXYYVIPLPELRTPVXXT

SEQ ID NO: 10055 - protein, 34 aa, Artificial Sequence
  Non-cyclic GFR-binding peptide
  MOD_RES (1)..(3): Xaa is C or S
XGXGEVVMDNSLQEVVKENEDYYVMPLPELETPV

SEQ ID NO: 10056 - protein, 39 aa, Artificial Sequence
  Non-cyclic GFR-binding peptide
  MOD_RES (1)..(3)..(36)..(37): Xaa is C or S
  MOD_RES (14)..(15)..(16)..(17)..(18): Xaa is A or G
  MOD_RES (19)..(20)..(21)..(22): Xaa is A or G or absent
XKXSKVVMNSLQEXXXXXXXXXYYVIPLPELDQPVXXPS

SEQ ID NO: 10057 - protein, 37 aa, Artificial Sequence
  Non-cyclic GFR-binding peptide
  MOD_RES (31)..(32): Xaa is C or S
EVVMENSLQEVVKDYEDYYVMPLPELETPVXXAKPIS

SEQ ID NO: 10058 - protein, 36 aa, Artificial Sequence
  Non-cyclic GFR-binding peptide
  MOD_RES (1)..(3): Xaa is C or S
  MOD_RES (15)..(16)..(17)..(18)..(19): Xaa is A or G
  MOD_RES (20)..(21)..(22)..(23): Xaa is A or G or absent
XGXARVVMNEYQKYXXXXXXXXXIFLVSIPSLQTPA

SEQ ID NO: 10059 - protein, 33 aa, Artificial Sequence
  Non-cyclic GFR-binding peptide
  MOD_RES (31)..(32): Xaa is C or S
SKVIMNSLQEIKPTKGIYYVIPLPELDQSVXXP

SEQ ID NO: 10060 - protein, 41 aa, Artificial Sequence
  Non-cyclic GFR-binding peptide
  MOD_RES (2)..(36)..(37): Xaa is C or S
  MOD_RES (14)..(15)..(16)..(17)..(18): Xaa is A or G
  MOD_RES (19)..(20)..(21)..(22): Xaa is A or G or absent
GXGEVVMEEYQKYXXXXXXXXXIFLMSIPSLETPVXXAKPI

SEQ ID NO: 10061 - protein, 38 aa, Artificial Sequence
  Non-cyclic GFR-binding peptide
  MOD_RES (2)..(4)..(35)..(36): Xaa is C or S
SXKXSKVIMNSLQEIKPTKGIYYVIPLPELDQSVXXPS

SEQ ID NO: 10062 - protein, 40 aa, Artificial Sequence
  Non-cyclic GFR-binding peptide
  MOD_RES (34)..(35): Xaa is C or S
  MOD_RES (12)..(13)..(14)..(15)..(16): Xaa is A or G
  MOD_RES (17)..(18)..(19)..(20): Xaa is A or G or absent
GEVVMEEYQKYXXXXXXXXXIFLMSIPSLETPVXXAKPIS

SEQ ID NO: 10063 - protein, 38 aa, Artificial Sequence
  Non-cyclic GFR-binding peptide
  MOD_RES (34)..(35): Xaa is C or S
  MOD_RES (12)..(13)..(14)..(15)..(16): Xaa is A or G
  MOD_RES (17)..(18)..(19)..(20): Xaa is A or G or absent
ARVVMNEYQKYXXXXXXXXXIFLVSIPSLQTPAXXPKP

SEQ ID NO: 10064 - protein, 32 aa, Artificial Sequence
  Non-cyclic GFR-binding peptide
  MOD_RES (11)..(12)..(13)..(14)..(15): Xaa is A or G
  MOD_RES (16)..(17)..(18)..(19): Xaa is A or G or absent
RVVMNNSLQEXXXXXXXXXYYLVTLPELQTPA

SEQ ID NO: 10065 - protein, 34 aa, Artificial Sequence
  Non-cyclic GFR-binding peptide
  MOD_RES (31)..(32): Xaa is C or S
EVVMENSLQEVVKDYEDYYLMTLPELETPVXXAK

SEQ ID NO: 10066 - protein, 36 aa, Artificial Sequence
  Non-cyclic GFR-binding peptide
  MOD_RES (1)..(3)..(36): Xaa is C or S
  MOD_RES (14)..(15)..(16)..(17)..(18): Xaa is A or G
  MOD_RES (19)..(20)..(21)..(22): Xaa is A or G or absent
XKXSKVVMNSLQEXXXXXXXXXYYVIPLPELDQPVX

SEQ ID NO: 10067 - protein, 39 aa, Artificial Sequence
  Non-cyclic GFR-binding peptide
  MOD_RES (1)..(35)..(36): Xaa is C or S
  MOD_RES (13)..(14)..(15)..(16)..(17): Xaa is A or G
  MOD_RES (18)..(19)..(20)..(21): Xaa is A or G or absent
XSRVVMNEYQKYXXXXXXXXXIFLVSIPSLKTPAXXPKP

SEQ ID NO: 10068 - protein, 36 aa, Artificial Sequence
  Non-cyclic GFR-binding peptide
  MOD_RES (31)..(32): Xaa is C or S
SKVVMNSLQEVKPTRGVYYVIPLPELDQPVXXPSAS

SEQ ID NO: 10069 - protein, 37 aa, Artificial Sequence
  Non-cyclic GFR-binding peptide
  MOD_RES (2)..(34)..(35): Xaa is C or S
GXSEVVMDNSLQEVVNNASDYYLITLPELRTPVXXTP

SEQ ID NO: 10070 - protein, 41 aa, Artificial Sequence
  Non-cyclic GFR-binding peptide
  MOD_RES (1)..(3)..(37)..(38): Xaa is C or S
  MOD_RES (15)..(16)..(17)..(18)..(19): Xaa is A or G
  MOD_RES (20)..(21)..(22)..(23): Xaa is A or G or absent
XGXARVVMNNSLQEXXXXXXXXXYYLVTLPELQTPAXXPKP

SEQ ID NO: 10071 - protein, 34 aa, Artificial Sequence
  Non-cyclic GFR-binding peptide
  MOD_RES (1)..(3): Xaa is C or S
XGXGEVVMDEYQKYVVKENEDIFLMSIPSLETPV

SEQ ID NO: 10072 - protein, 40 aa, Artificial Sequence
  Non-cyclic GFR-binding peptide
  MOD_RES (2)..(4)..(38)..(39): Xaa is C or S
  MOD_RES (16)..(17)..(18)..(19)..(20): Xaa is A or G
  MOD_RES (21)..(22)..(23)..(24): Xaa is A or G or absent
RXGXSEVVMDQYNKLXXXXXXXXXLYLISIASLRTPVXXT

SEQ ID NO: 10073 - protein, 37 aa, Artificial Sequence
  Non-cyclic GFR-binding peptide
  MOD_RES (1)..(3)..(36)..(37): Xaa is C or S
  MOD_RES (14)..(15)..(16)..(17)..(18): Xaa is A or G
  MOD_RES (19)..(20)..(21)..(22): Xaa is A or G or absent
XKXSRVIMNSLQEXXXXXXXXXYYLITLPELAQPVXX

SEQ ID NO: 10074 - protein, 40 aa, Artificial Sequence
  Non-cyclic GFR-binding peptide
  MOD_RES (2)..(4)..(38)..(39): Xaa is C or S
  MOD_RES (16)..(17)..(18)..(19)..(20): Xaa is A or G
  MOD_RES (21)..(22)..(23)..(24): Xaa is A or G or absent
HXGXARVVMNNSLQEXXXXXXXXXYYVVPLPELQTPAXXP

SEQ ID NO: 10075 - protein, 35 aa, Artificial Sequence
  Non-cyclic GFR-binding peptide
  MOD_RES (31)..(31): Xaa is C or S
RVVMNEYQKYIVNSSDDIFLVSIPSLKTPAXTPKT

SEQ ID NO: 10076 - protein, 30 aa, Artificial Sequence; identical to SEQ ID NO: 2131
  Non-cyclic GFR-binding peptide

SEQ ID NO: 10077 - protein, 35 aa, Artificial Sequence
  Non-cyclic GFR-binding peptide
  MOD_RES (2)..(4): Xaa is C or S
RXGXSEVVMDRYKKLVVNNASDFYLISIANLRTPV

SEQ ID NO: 10078 - protein, 44 aa, Artificial Sequence
  Non-cyclic GFR-binding peptide
  MOD_RES (2)..(4)..(38)..(39): Xaa is C or S
  MOD_RES (16)..(17)..(18)..(19)..(20): Xaa is A or G
  MOD_RES (21)..(22)..(23)..(24): Xaa is A or G or absent
RXGXGEVVMEEYQKYXXXXXXXXXIFLMSIPSLETPVXXAKPIS

SEQ ID NO: 10079 - protein, 38 aa, Artificial Sequence
  Non-cyclic GFR-binding peptide
  MOD_RES (34)..(35): Xaa is C or S
  MOD_RES (12)..(13)..(14)..(15)..(16): Xaa is A or G
  MOD_RES (17)..(18)..(19)..(20): Xaa is A or G or absent
SEVVMDRYKKLXXXXXXXXXFYLISIANLRTPVXXTPP

SEQ ID NO: 10080 - protein, 43 aa, Artificial Sequence
  Non-cyclic GFR-binding peptide
  MOD_RES (2)..(4)..(38)..(39): Xaa is C or S
  MOD_RES (16)..(17)..(18)..(19)..(20): Xaa is A or G
  MOD_RES (21)..(22)..(23)..(24): Xaa is A or G or absent
HXGXARVVMNNSLQEXXXXXXXXXYYVVPLPELQTPAXXPKPV

SEQ ID NO: 10081 - protein, 37 aa, Artificial Sequence
  Non-cyclic GFR-binding peptide
  MOD_RES (34)..(35): Xaa is C or S
  MOD_RES (12)..(13)..(14)..(15)..(16): Xaa is A or G
  MOD_RES (17)..(18)..(19)..(20): Xaa is A or G or absent
GEVVMDEYQKYXXXXXXXXXIFLMSIPSLETPVXXAK

SEQ ID NO: 10082 - protein, 36 aa, Artificial Sequence
  Non-cyclic GFR-binding peptide
  MOD_RES (1)..(35)..(36): Xaa is C or S
  MOD_RES (13)..(14)..(15)..(16)..(17): Xaa is A or G
  MOD_RES (18)..(19)..(20)..(21): Xaa is A or G or absent
XARVVMNNSLQEXXXXXXXXXYYVVPLPELQTPAXX

SEQ ID NO: 10083 - protein, 34 aa, Artificial Sequence
  Non-cyclic GFR-binding peptide
  MOD_RES (1)..(34): Xaa is C or S
  MOD_RES (12)..(13)..(14)..(15)..(16): Xaa is A or G
  MOD_RES (17)..(18)..(19)..(20): Xaa is A or G or absent
XSRVIMEYQKYXXXXXXXXXIFLISIPSLAQPVX

SEQ ID NO: 10084 - protein, 44 aa, Artificial Sequence
  Non-cyclic GFR-binding peptide
  MOD_RES (2)..(4)..(38): Xaa is C or S
  MOD_RES (16)..(17)..(18)..(19)..(20): Xaa is A or G
  MOD_RES (21)..(22)..(23)..(24): Xaa is A or G or absent
HXGXSRVVMNNSLQEXXXXXXXXXYYVVPLPELKTPAXTPKTVH

SEQ ID NO: 10085 - protein, 39 aa, Artificial Sequence
  Non-cyclic GFR-binding peptide
  MOD_RES (2)..(33)..(34): Xaa is C or S
KXSKVIMNSLQEIKPTKGIYYVIPLPELDQSVXXPSASA

SEQ ID NO: 10086 - protein, 37 aa, Artificial Sequence
  Non-cyclic GFR-binding peptide
  MOD_RES (2)..(33)..(34): Xaa is C or S
KXSRVIMEYQKYVKPKRGVIFLISIPSLAQPVXXPAA

SEQ ID NO: 10087 - protein, 36 aa, Artificial Sequence
  Non-cyclic GFR-binding peptide
  MOD_RES (34)..(35): Xaa is C or S
  MOD_RES (12)..(13)..(14)..(15)..(16): Xaa is A or G
  MOD_RES (17)..(18)..(19)..(20): Xaa is A or G or absent
SEVVMDRYKKLXXXXXXXXXFYLISIANLRTPVXXT

SEQ ID NO: 10088 - protein, 37 aa, Artificial Sequence
  Non-cyclic GFR-binding peptide
  MOD_RES (33)..(34): Xaa is C or S
  MOD_RES (11)..(12)..(13)..(14)..(15): Xaa is A or G
  MOD_RES (16)..(17)..(18)..(19): Xaa is A or G or absent
EVVMDQYNKLXXXXXXXXXLYLISIASLRTPVXXTPP

SEQ ID NO: 10089 - protein, 40 aa, Artificial Sequence
  Non-cyclic GFR-binding peptide
  MOD_RES (2)..(36)..(37): Xaa is C or S
  MOD_RES (14)..(15)..(16)..(17)..(18): Xaa is A or G
  MOD_RES (19)..(20)..(21)..(22): Xaa is A or G or absent
GXGEVVMDNSLQEXXXXXXXXXYYVMPLPELETPVXXAKP

SEQ ID NO: 10090 - protein, 35 aa, Artificial Sequence
  Non-cyclic GFR-binding peptide
  MOD_RES (34)..(35): Xaa is C or S
  MOD_RES (12)..(13)..(14)..(15)..(16): Xaa is A or G
  MOD_RES (17)..(18)..(19)..(20): Xaa is A or G or absent
SRVVMNEYQKYXXXXXXXXXIFLVSIPSLKTPAXX

SEQ ID NO: 10091 - protein, 35 aa, Artificial Sequence
  Non-cyclic GFR-binding peptide
  MOD_RES (32)..(33): Xaa is C or S
SRVVMNNSLQEIVNSSDDYYLVTLPELKTPAXXPK

SEQ ID NO: 10092 - protein, 36 aa, Artificial Sequence
  Non-cyclic GFR-binding peptide
  MOD_RES (31)..(32): Xaa is C or S
SRVIMNSLQEVKPKRGVYYLITLPELAQPVXXPAAS

SEQ ID NO: 10093 - protein, 38 aa, Artificial Sequence
  Non-cyclic GFR-binding peptide
  MOD_RES (32)..(33): Xaa is C or S
SEVVMDNSLQEVVNNASDYYLITLPELRTPVXXTPPTS

SEQ ID NO: 10094 - protein, 41 aa, Artificial Sequence
  Non-cyclic GFR-binding peptide
  MOD_RES (2)..(4)..(35)..(36): Xaa is C or S
SXKXSRVIMNSLQEVKPKRGVYYLITLPELAQPVXXPAASA

SEQ ID NO: 10095 - protein, 41 aa, Artificial Sequence
  Non-cyclic GFR-binding peptide
  MOD_RES (2)..(36)..(37): Xaa is C or S
  MOD_RES (14)..(15)..(16)..(17)..(18): Xaa is A or G
  MOD_RES (19)..(20)..(21)..(22): Xaa is A or G or absent
GXGEVVMENSLQEXXXXXXXXXYYLMTLPELETPVXXAKPI

SEQ ID NO: 10096 - protein, 32 aa, Artificial Sequence
  Non-cyclic GFR-binding peptide
  MOD_RES (1)..(1): Xaa is C or S
XGEVVMDNSLQEVVKENEDYYVMPLPELETPV

SEQ ID NO: 10097 - protein, 32 aa, Artificial Sequence
  Non-cyclic GFR-binding peptide
  MOD_RES (32)..(32): Xaa is C or S
ARVVMNNSLQEIVNSSDDYYVVPLPELQTPAX

SEQ ID NO: 10098 - protein, 38 aa, Artificial Sequence
  Non-cyclic GFR-binding peptide
  MOD_RES (33)..(34): Xaa is C or S
  MOD_RES (11)..(12)..(13)..(14)..(15): Xaa is A or G
  MOD_RES (16)..(17)..(18)..(19): Xaa is A or G or absent
RVVMNEYQKYXXXXXXXXXIFLVSIPSLKTPAXXPKPV

SEQ ID NO: 10099 - protein, 39 aa, Artificial Sequence
  Non-cyclic GFR-binding peptide
  MOD_RES (2)..(4)..(36)..(37): Xaa is C or S
HXGXSRVVMNNSLQEIVNSSDDYYVVPLPELKTPAXXPK

SEQ ID NO: 10100 - protein, 38 aa, Artificial Sequence
  Non-cyclic GFR-binding peptide
  MOD_RES (2)..(4)..(36)..(37): Xaa is C or S
HXGXSRVVMNEYQKYIVNSSDDIFLVSIPSLKTPAXXP

SEQ ID NO: 10101 - protein, 40 aa, Artificial Sequence
  Non-cyclic GFR-binding peptide
  MOD_RES (2)..(4)..(36)..(37): Xaa is C or S
RXGXSEVVMDQYNKLVVNNASDLYLISIASLRTPVXXTPP

SEQ ID NO: 10102 - protein, 42 aa, Artificial Sequence
  Non-cyclic GFR-binding peptide
  MOD_RES (2)..(36)..(37): Xaa is C or S
  MOD_RES (14)..(15)..(16)..(17)..(18): Xaa is A or G
  MOD_RES (19)..(20)..(21)..(22): Xaa is A or G or absent
GXSRVVMNEYQKYXXXXXXXXXIFLVSIPSLKTPAXXPKPVY

SEQ ID NO: 10103 - protein, 43 aa, Artificial Sequence
  Non-cyclic GFR-binding peptide
  MOD_RES (1)..(3)..(37)..(38): Xaa is C or S
  MOD_RES (15)..(16)..(17)..(18)..(19): Xaa is A or G
  MOD_RES (20)..(21)..(22)..(23): Xaa is A or G or absent
XGXGEVVMENSLQEXXXXXXXXXYYVMPLPELETPVXXAKPIS

SEQ ID NO: 10104 - protein, 34 aa, Artificial Sequence
  Non-cyclic GFR-binding peptide
  MOD_RES (1)..(3): Xaa is C or S
XGXGEVVMENSLQEVVKDYEDYYLMTLPELETPV

SEQ ID NO: 10105 - protein, 34 aa, Artificial Sequence
  Non-cyclic GFR-binding peptide
  MOD_RES (1)..(32)..(33): Xaa is C or S
XSRVIMEYQKYVKPKRGVIFLISIPSLAQPVXXP

SEQ ID NO: 10106 - protein, 36 aa, Artificial Sequence
  Non-cyclic GFR-binding peptide
  MOD_RES (1)..(3)..(34)..(35): Xaa is C or S
XKXSKVVMNSLQEVKPTRGVYYVIPLPELDQPVXXP

SEQ ID NO: 10107 - protein, 42 aa, Artificial Sequence
  Non-cyclic GFR-binding peptide
  MOD_RES (2)..(4)..(36)..(37): Xaa is C or S
HXGXARVVMNNSLQEIVNSSDDYYLVTLPELQTPAXXPKPVT

SEQ ID NO: 10108 - protein, 33 aa, Artificial Sequence
  Non-cyclic GFR-binding peptide
  MOD_RES (33)..(33): Xaa is C or S
  MOD_RES (11)..(12)..(13)..(14)..(15): Xaa is A or G
  MOD_RES (16)..(17)..(18)..(19): Xaa is A or G or absent
EVVMDEYQKYXXXXXXXXXIFLMSIPSLETPVX

SEQ ID NO: 10109 - protein, 36 aa, Artificial Sequence
  Non-cyclic GFR-binding peptide
  MOD_RES (1)..(35)..(36): Xaa is C or S
  MOD_RES (13)..(14)..(15)..(16)..(17): Xaa is A or G
  MOD_RES (18)..(19)..(20)..(21): Xaa is A or G or absent
XGEVVMEEYQKYXXXXXXXXXIFLMSIPSLETPVXX

SEQ ID NO: 10110 - protein, 37 aa, Artificial Sequence
  Non-cyclic GFR-binding peptide
  MOD_RES (31)..(31): Xaa is C or S
RVVMNEYQKYIVNSSDDIFLVSIPSLKTPAXTPKTVH

SEQ ID NO: 10111 - protein, 38 aa, Artificial Sequence
  Non-cyclic GFR-binding peptide
  MOD_RES (2)..(4)..(36)..(37): Xaa is C or S
RXGXGEVVMDNSLQEVVKENEDYYVMPLPELETPVXXA

SEQ ID NO: 10112 - protein, 38 aa, Artificial Sequence
  Non-cyclic GFR-binding peptide
  MOD_RES (32)..(33): Xaa is C or S
GEVVMDEYQKYVVKENEDIFLMSIPSLETPVXXAKPIK

SEQ ID NO: 10113 - protein, 31 aa, Artificial Sequence
  Non-cyclic GFR-binding peptide
ARVVMNEYQKYIVNSSDDIFLVSIPSLQTPA

SEQ ID NO: 10114 - protein, 35 aa, Artificial Sequence
  Non-cyclic GFR-binding peptide
  MOD_RES (33)..(34): Xaa is C or S
  MOD_RES (11)..(12)..(13)..(14)..(15): Xaa is A or G
  MOD_RES (16)..(17)..(18)..(19): Xaa is A or G or absent
EVVMENSLQEXXXXXXXXXYYVMPLPELETPVXXA

SEQ ID NO: 10115 - protein, 36 aa, Artificial Sequence
  Non-cyclic GFR-binding peptide
  MOD_RES (1)..(33)..(34): Xaa is C or S
XGEVVMDEYQKYVVKENEDIFLMSIPSLETPVXXAK

SEQ ID NO: 10116 - protein, 40 aa, Artificial Sequence
  Non-cyclic GFR-binding peptide
  MOD_RES (2)..(4)..(38)..(39): Xaa is C or S
  MOD_RES (16)..(17)..(18)..(19)..(20): Xaa is A or G
  MOD_RES (21)..(22)..(23)..(24): Xaa is A or G or absent
RXGXSEVVMDNSLQEXXXXXXXXXYYLITLPELRTPVXXT

SEQ ID NO: 10117 - protein, 34 aa, Artificial Sequence
  Non-cyclic GFR-binding peptide
  MOD_RES (34)..(34): Xaa is C or S
  MOD_RES (12)..(13)..(14)..(15)..(16): Xaa is A or G
  MOD_RES (17)..(18)..(19)..(20): Xaa is A or G or absent
GEVVMEEYQKYXXXXXXXXXIFLMSIPSLETPVX

SEQ ID NO: 10118 - protein, 35 aa, Artificial Sequence
  Non-cyclic GFR-binding peptide
  MOD_RES (33)..(34): Xaa is C or S
  MOD_RES (11)..(12)..(13)..(14)..(15): Xaa is A or G
  MOD_RES (16)..(17)..(18)..(19): Xaa is A or G or absent
SRVIMNSLQEXXXXXXXXXYYLITLPELAQPVXXP

SEQ ID NO: 10119 - protein, 36 aa, Artificial Sequence
  Non-cyclic GFR-binding peptide
  MOD_RES (1)..(3)..(35): Xaa is C or S
XGXSRVVMNNSLQEIVNSSDDYYVVPLPELKTPAXT

SEQ ID NO: 10120 - protein, 36 aa, Artificial Sequence
  Non-cyclic GFR-binding peptide
  MOD_RES (34)..(35): Xaa is C or S
  MOD_RES (12)..(13)..(14)..(15)..(16): Xaa is A or G
  MOD_RES (17)..(18)..(19)..(20): Xaa is A or G or absent
SRVVMNNSLQEXXXXXXXXXYYLVTLPELKTPAXXP

SEQ ID NO: 10121 - protein, 37 aa, Artificial Sequence
  Non-cyclic GFR-binding peptide
  MOD_RES (2)..(4)..(36)..(37): Xaa is C or S
RXGXSEVVMDQYNKLVVNNASDLYLISIASLRTPVXX

SEQ ID NO: 10122 - protein, 31 aa, Artificial Sequence
  Non-cyclic GFR-binding peptide
  MOD_RES (31)..(31): Xaa is C or S
SRVIMEYQKYVKPKRGVIFLISIPSLAQPVX

SEQ ID NO: 10123 - protein, 37 aa, Artificial Sequence
  Non-cyclic GFR-binding peptide
  MOD_RES (2)..(4)..(35)..(36): Xaa is C or S
SXKXSRVIMNSLQEVKPKRGVYYLITLPELAQPVXXP

SEQ ID NO: 10124 - protein, 37 aa, Artificial Sequence
  Non-cyclic GFR-binding peptide
  MOD_RES (2)..(34)..(35): Xaa is C or S
GXARVVMNNSLQEIVNSSDDYYVVPLPELQTPAXXPK

SEQ ID NO: 10125 - protein, 30 aa, Artificial Sequence
  Non-cyclic GFR-binding peptide
EVVMDQYNKLVVNNASDLYLISIASLRTPV

SEQ ID NO: 10126 - protein, 36 aa, Artificial Sequence
  Non-cyclic GFR-binding peptide
  MOD_RES (1)..(3)..(35)..(36): Xaa is C or S
XGXSEVVMDNSLQEVVNNASDYYLITLPELRTPVXX

SEQ ID NO: 10127 - protein, 36 aa, Artificial Sequence
  Non-cyclic GFR-binding peptide
  MOD_RES (34)..(34): Xaa is C or S
  MOD_RES (12)..(13)..(14)..(15)..(16): Xaa is A or G
  MOD_RES (17)..(18)..(19)..(20): Xaa is A or G or absent
SRVVMNNSLQEXXXXXXXXXYYVVPLPELKTPAXTP

SEQ ID NO: 10128 - protein, 37 aa, Artificial Sequence
  Non-cyclic GFR-binding peptide
  MOD_RES (2)..(34)..(35): Xaa is C or S
GXGEVVMENSLQEVVKDYEDYYLMTLPELETPVXXAK

SEQ ID NO: 10129 - protein, 38 aa, Artificial Sequence
  Non-cyclic GFR-binding peptide
  MOD_RES (1)..(3)..(36)..(37): Xaa is C or S
  MOD_RES (14)..(15)..(16)..(17)..(18): Xaa is A or G
  MOD_RES (19)..(20)..(21)..(22): Xaa is A or G or absent
XKXSKVVMEYQKYXXXXXXXXXIFLISIPSLDQPVXXP

SEQ ID NO: 10130 - protein, 37 aa, Artificial Sequence
  Non-cyclic GFR-binding peptide
  MOD_RES (2)..(4): Xaa is C or S
  MOD_RES (16)..(17)..(18)..(19)..(20): Xaa is A or G
  MOD_RES (21)..(22)..(23)..(24): Xaa is A or G or absent
HXGXSRVVMNEYQKYXXXXXXXXXIFLVSIPSLKTPA

SEQ ID NO: 10131 - protein, 38 aa, Artificial Sequence
  Non-cyclic GFR-binding peptide
  MOD_RES (1)..(32)..(33): Xaa is C or S
XSKVIMNSLQEIKPTKGIYYVIPLPELDQSVXXPSASA

SEQ ID NO: 10132 - protein, 41 aa, Artificial Sequence
  Non-cyclic GFR-binding peptide
  MOD_RES (2)..(4)..(37)..(38): Xaa is C or S
  MOD_RES (15)..(16)..(17)..(18)..(19): Xaa is A or G
  MOD_RES (20)..(21)..(22)..(23): Xaa is A or G or absent
SXKXSKVVMNSLQEXXXXXXXXXYYVIPLPELDQPVXXPSA

SEQ ID NO: 10133 - protein, 31 aa, Artificial Sequence
  Non-cyclic GFR-binding peptide
  MOD_RES (31)..(31): Xaa is C or S
RVVMNNSLQEIVNSSDDYYVVPLPELQTPAX

SEQ ID NO: 10134 - protein, 38 aa, Artificial Sequence
  Non-cyclic GFR-binding peptide
  MOD_RES (32)..(33): Xaa is C or S
SRVVMNNSLQEIVNSSDDYYVVPLPELKTPAXXPKPVY

SEQ ID NO: 10135 - protein, 43 aa, Artificial Sequence
  Non-cyclic GFR-binding peptide
  MOD_RES (1)..(3)..(37)..(38): Xaa is C or S
  MOD_RES (15)..(16)..(17)..(18)..(19): Xaa is A or G
  MOD_RES (20)..(21)..(22)..(23): Xaa is A or G or absent
XGXSEVVMDNSLQEXXXXXXXXXYYVIPLPELRTPVXXTPPTS

SEQ ID NO: 10136 - protein, 36 aa, Artificial Sequence
  Non-cyclic GFR-binding peptide
  MOD_RES (1)..(33)..(34): Xaa is C or S
XSRVVMNNSLQEIVNSSDDYYVVPLPELKTPAXXPK

SEQ ID NO: 10137 - protein, 41 aa, Artificial Sequence
  Non-cyclic GFR-binding peptide
  MOD_RES (2)..(35)..(36): Xaa is C or S
  MOD_RES (13)..(14)..(15)..(16)..(17): Xaa is A or G
  MOD_RES (18)..(19)..(20)..(21): Xaa is A or G or absent
KXSRVIMEYQKYXXXXXXXXXIFLISIPSLAQPVXXPAASA

SEQ ID NO: 10138 - protein, 37 aa, Artificial Sequence
  Non-cyclic GFR-binding peptide
  MOD_RES (33)..(34): Xaa is C or S
  MOD_RES (11)..(12)..(13)..(14)..(15): Xaa is A or G
  MOD_RES (16)..(17)..(18)..(19): Xaa is A or G or absent
EVVMDNSLQEXXXXXXXXXYYVMPLPELETPVXXAKP

SEQ ID NO: 10139 - protein, 39 aa, Artificial Sequence
  Non-cyclic GFR-binding peptide
  MOD_RES (34)..(35): Xaa is C or S
  MOD_RES (12)..(13)..(14)..(15)..(16): Xaa is A or G
  MOD_RES (17)..(18)..(19)..(20): Xaa is A or G or absent
SRVVMNNSLQEXXXXXXXXXYYVVPLPELKTPAXXPKPV

SEQ ID NO: 10140 - protein, 38 aa, Artificial Sequence
  Non-cyclic GFR-binding peptide
  MOD_RES (1)..(3)..(35)..(36): Xaa is C or S
XGXSEVVMDRYKKLVVNNASDFYLISIANLRTPVXXTP

SEQ ID NO: 10141 - protein, 35 aa, Artificial Sequence
  Non-cyclic GFR-binding peptide
  MOD_RES (2)..(33)..(34): Xaa is C or S
KXSKVIMEYQKYIKPTKGIIFLISIPSLDQSVXXP

SEQ ID NO: 10142 - protein, 36 aa, Artificial Sequence
  Non-cyclic GFR-binding peptide
  MOD_RES (2)..(4)..(36): Xaa is C or S
RXGXSEVVMDRYKKLVVNNASDFYLISIANLRTPVX

SEQ ID NO: 10143 - protein, 35 aa, Artificial Sequence
  Non-cyclic GFR-binding peptide
  MOD_RES (1)..(33)..(34): Xaa is C or S
XSRVVMNNSLQEIVNSSDDYYLVTLPELKTPAXXP

SEQ ID NO: 10144 - protein, 36 aa, Artificial Sequence
  Non-cyclic GFR-binding peptide
  MOD_RES (2)..(4): Xaa is C or S
  MOD_RES (15)..(16)..(17)..(18)..(19): Xaa is A or G
  MOD_RES (20)..(21)..(22)..(23): Xaa is A or G or absent
SXKXSRVIMNSLQEXXXXXXXXXYYLITLPELAQPV

SEQ ID NO: 10145 - protein, 33 aa, Artificial Sequence
  Non-cyclic GFR-binding peptide
  MOD_RES (12)..(13)..(14)..(15)..(16): Xaa is A or G
  MOD_RES (17)..(18)..(19)..(20): Xaa is A or G or absent
GEVVMDEYQKYXXXXXXXXXIFLMSIPSLETPV

SEQ ID NO: 10146 - protein, 39 aa, Artificial Sequence
  Non-cyclic GFR-binding peptide
  MOD_RES (2)..(4)..(38): Xaa is C or S
  MOD_RES (16)..(17)..(18)..(19)..(20): Xaa is A or G
  MOD_RES (21)..(22)..(23)..(24): Xaa is A or G or absent
HXGXSRVVMNEYQKYXXXXXXXXXIFLVSIPSLKTPAXT

SEQ ID NO: 10147 - protein, 34 aa, Artificial Sequence
  Non-cyclic GFR-binding peptide
  MOD_RES (34)..(34): Xaa is C or S
  MOD_RES (12)..(13)..(14)..(15)..(16): Xaa is A or G
  MOD_RES (17)..(18)..(19)..(20): Xaa is A or G or absent
SRVVMNEYQKYXXXXXXXXXIFLVSIPSLKTPAX

SEQ ID NO: 10148 - protein, 33 aa, Artificial Sequence
  Non-cyclic GFR-binding peptide
  MOD_RES (32)..(33): Xaa is C or S
SRVVMNNSLQEIVNSSDDYYVVPLPELKTPAXX

SEQ ID NO: 10149 - protein, 35 aa, Artificial Sequence
  Non-cyclic GFR-binding peptide
  MOD_RES (1)..(34)..(35): Xaa is C or S
  MOD_RES (12)..(13)..(14)..(15)..(16): Xaa is A or G
  MOD_RES (17)..(18)..(19)..(20): Xaa is A or G or absent
XSKVVMNSLQEXXXXXXXXXYYVIPLPELDQPVXX

SEQ ID NO: 10150 - protein, 37 aa, Artificial Sequence
  Non-cyclic GFR-binding peptide
  MOD_RES (33)..(34): Xaa is C or S
  MOD_RES (11)..(12)..(13)..(14)..(15): Xaa is A or G
  MOD_RES (16)..(17)..(18)..(19): Xaa is A or G or absent
RVVMNNSLQEXXXXXXXXXYYLVTLPELKTPAXXPKP

SEQ ID NO: 10151 - protein, 35 aa, Artificial Sequence
  Non-cyclic GFR-binding peptide
  MOD_RES (1)..(3): Xaa is C or S
  MOD_RES (14)..(15)..(16)..(17)..(18): Xaa is A or G
  MOD_RES (19)..(20)..(21)..(22): Xaa is A or G or absent
XKXSKVVMNSLQEXXXXXXXXXYYVIPLPELDQPV

SEQ ID NO: 10152 - protein, 36 aa, Artificial Sequence
  Non-cyclic GFR-binding peptide
  MOD_RES (2)..(33)..(34): Xaa is C or S
KXSKVIMNSLQEIKPTKGIYYVIPLPELDQSVXXPS

SEQ ID NO: 10153 - protein, 36 aa, Artificial Sequence
  Non-cyclic GFR-binding peptide
  MOD_RES (32)..(33): Xaa is C or S
GEVVMDNSLQEVVKENEDYYLMTLPELETPVXXAKP

SEQ ID NO: 10154 - protein, 36 aa, Artificial Sequence
  Non-cyclic GFR-binding peptide
  MOD_RES (2)..(36): Xaa is C or S
  MOD_RES (14)..(15)..(16)..(17)..(18): Xaa is A or G
  MOD_RES (19)..(20)..(21)..(22): Xaa is A or G or absent
GXSEVVMDQYNKLXXXXXXXXXLYLISIASLRTPVX

SEQ ID NO: 10155 - protein, 38 aa, Artificial Sequence
  Non-cyclic GFR-binding peptide
  MOD_RES (2)..(36)..(37): Xaa is C or S
  MOD_RES (14)..(15)..(16)..(17)..(18): Xaa is A or G
  MOD_RES (19)..(20)..(21)..(22): Xaa is A or G or absent
GXARVVMNEYQKYXXXXXXXXXIFLVSIPSLQTPAXXP

SEQ ID NO: 10156 - protein, 41 aa, Artificial Sequence
  Non-cyclic GFR-binding peptide
  MOD_RES (2)..(4)..(35)..(36): Xaa is C or S
SXKXSKVIMEYQKYIKPTKGIIFLISIPSLDQSVXXPSASA

SEQ ID NO: 10157 - protein, 34 aa, Artificial Sequence
  Non-cyclic GFR-binding peptide
  MOD_RES (33)..(34): Xaa is C or S
  MOD_RES (11)..(12)..(13)..(14)..(15): Xaa is A or G
  MOD_RES (16)..(17)..(18)..(19): Xaa is A or G or absent
SKVVMEYQKYXXXXXXXXXIFLISIPSLDQPVXX

SEQ ID NO: 10158 - protein, 32 aa, Artificial Sequence
  Non-cyclic GFR-binding peptide
  MOD_RES (11)..(12)..(13)..(14)..(15): Xaa is A or G
  MOD_RES (16)..(17)..(18)..(19): Xaa is A or G or absent
RVVMNNSLQEXXXXXXXXXYYLVTLPELKTPA

SEQ ID NO: 10159 - protein, 34 aa, Artificial Sequence
  Non-cyclic GFR-binding peptide
  MOD_RES (1)..(33)..(34): Xaa is C or S
XGEVVMENSLQEVVKDYEDYYVMPLPELETPVXX

SEQ ID NO: 10160 - protein, 41 aa, Artificial Sequence
  Non-cyclic GFR-binding peptide
  MOD_RES (2)..(4)..(36)..(37): Xaa is C or S
RXGXGEVVMEEYQKYVVKDYEDIFLMSIPSLETPVXXAKPI

SEQ ID NO: 10161 - protein, 42 aa, Artificial Sequence
  Non-cyclic GFR-binding peptide
  MOD_RES (1)..(3)..(36)..(37): Xaa is C or S
  MOD_RES (14)..(15)..(16)..(17)..(18): Xaa is A or G
  MOD_RES (19)..(20)..(21)..(22): Xaa is A or G or absent
XKXSKVIMNSLQEXXXXXXXXXYYVIPLPELDQSVXXPSASA

SEQ ID NO: 10162 - protein, 37 aa, Artificial Sequence
  Non-cyclic GFR-binding peptide
  MOD_RES (2)..(4)..(36)..(37): Xaa is C or S
RXGXSEVVMDRYKKLVVNNASDFYLISIANLRTPVXX

SEQ ID NO: 10163 - protein, 36 aa, Artificial Sequence
  Non-cyclic GFR-binding peptide
  MOD_RES (32)..(33): Xaa is C or S
GEVVMDNSLQEVVKENEDYYVMPLPELETPVXXAKP

SEQ ID NO: 10164 - protein, 42 aa, Artificial Sequence
  Non-cyclic GFR-binding peptide
  MOD_RES (2)..(4)..(37)..(38): Xaa is C or S
  MOD_RES (15)..(16)..(17)..(18)..(19): Xaa is A or G
  MOD_RES (20)..(21)..(22)..(23): Xaa is A or G or absent
SXKXSRVIMNSLQEXXXXXXXXXYYLITLPELAQPVXXPAAS

SEQ ID NO: 10165 - protein, 41 aa, Artificial Sequence
  Non-cyclic GFR-binding peptide
  MOD_RES (1)..(3)..(37)..(38): Xaa is C or S
  MOD_RES (15)..(16)..(17)..(18)..(19): Xaa is A or G
  MOD_RES (20)..(21)..(22)..(23): Xaa is A or G or absent
XGXSRVVMNNSLQEXXXXXXXXXYYVVPLPELKTPAXXPKP

SEQ ID NO: 10166 - protein, 38 aa, Artificial Sequence
  Non-cyclic GFR-binding peptide
  MOD_RES (32)..(33): Xaa is C or S
GEVVMDNSLQEVVKENEDYYLMTLPELETPVXXAKPIK

SEQ ID NO: 10167 - protein, 32 aa, Artificial Sequence
  Non-cyclic GFR-binding peptide
  MOD_RES (32)..(32): Xaa is C or S
ARVVMNNSLQEIVNSSDDYYLVTLPELQTPAX

SEQ ID NO: 10168 - protein, 39 aa, Artificial Sequence
  Non-cyclic GFR-binding peptide
  MOD_RES (1)..(35)..(36): Xaa is C or S
  MOD_RES (13)..(14)..(15)..(16)..(17): Xaa is A or G
  MOD_RES (18)..(19)..(20)..(21): Xaa is A or G or absent
XARVVMNNSLQEXXXXXXXXXYYVVPLPELQTPAXXPKP

SEQ ID NO: 10169 - protein, 38 aa, Artificial Sequence
  Non-cyclic GFR-binding peptide
  MOD_RES (2)..(4)..(36): Xaa is C or S
HXGXSRVVMNNSLQEIVNSSDDYYVVPLPELKTPAXTP

SEQ ID NO: 10170 - protein, 41 aa, Artificial Sequence
  Non-cyclic GFR-binding peptide
  MOD_RES (1)..(35)..(36): Xaa is C or S
  MOD_RES (13)..(14)..(15)..(16)..(17): Xaa is A or G
  MOD_RES (18)..(19)..(20)..(21): Xaa is A or G or absent
XSRVVMNNSLQEXXXXXXXXXYYVVPLPELKTPAXXPKPVY

SEQ ID NO: 10171 - protein, 42 aa, Artificial Sequence
  Non-cyclic GFR-binding peptide
  MOD_RES (2)..(4)..(38): Xaa is C or S
  MOD_RES (16)..(17)..(18)..(19)..(20): Xaa is A or G
  MOD_RES (21)..(22)..(23)..(24): Xaa is A or G or absent
HXGXSRVVMNNSLQEXXXXXXXXXYYLVTLPELKTPAXTPKT

SEQ ID NO: 10172 - protein, 39 aa, Artificial Sequence
  Non-cyclic GFR-binding peptide
  MOD_RES (1)..(3)..(37): Xaa is C or S
  MOD_RES (15)..(16)..(17)..(18)..(19): Xaa is A or G
  MOD_RES (20)..(21)..(22)..(23): Xaa is A or G or absent
XGXSRVVMNEYQKYXXXXXXXXXIFLVSIPSLKTPAXTP

SEQ ID NO: 10173 - protein, 36 aa, Artificial Sequence
  Non-cyclic GFR-binding peptide
  MOD_RES (31)..(32): Xaa is C or S
EVVMDQYNKLVVNNASDLYLISIASLRTPVXXTPPT

SEQ ID NO: 10174 - protein, 39 aa, Artificial Sequence
  Non-cyclic GFR-binding peptide
  MOD_RES (2)..(4)..(38)..(39): Xaa is C or S
  MOD_RES (16)..(17)..(18)..(19)..(20): Xaa is A or G
  MOD_RES (21)..(22)..(23)..(24): Xaa is A or G or absent
RXGXSEVVMDQYNKLXXXXXXXXXLYLISIASLRTPVXX

SEQ ID NO: 10175 - protein, 38 aa, Artificial Sequence
  Non-cyclic GFR-binding peptide
  MOD_RES (1)..(35)..(36): Xaa is C or S
  MOD_RES (13)..(14)..(15)..(16)..(17): Xaa is A or G
  MOD_RES (18)..(19)..(20)..(21): Xaa is A or G or absent
XSEVVMDNSLQEXXXXXXXXXYYVIPLPELRTPVXXTP

SEQ ID NO: 10176 - protein, 40 aa, Artificial Sequence
  Non-cyclic GFR-binding peptide
  MOD_RES (1)..(3)..(34)..(35): Xaa is C or S
XKXSRVIMEYQKYVKPKRGVIFLISIPSLAQPVXXPAASA

SEQ ID NO: 10177 - protein, 31 aa, Artificial Sequence
  Non-cyclic GFR-binding peptide
SEVVMDQYNKLVVNNASDLYLISIASLRTPV

SEQ ID NO: 10178 - protein, 33 aa, Artificial Sequence
  Non-cyclic GFR-binding peptide
  MOD_RES (2)..(33): Xaa is C or S
KXSKVIMNSLQEIKPTKGIYYVIPLPELDQSVX

SEQ ID NO: 10179 - protein, 37 aa, Artificial Sequence
  Non-cyclic GFR-binding peptide
  MOD_RES (34)..(35): Xaa is C or S
  MOD_RES (12)..(13)..(14)..(15)..(16): Xaa is A or G
  MOD_RES (17)..(18)..(19)..(20): Xaa is A or G or absent
ARVVMNNSLQEXXXXXXXXXYYVVPLPELQTPAXXPK

SEQ ID NO: 10180 - protein, 36 aa, Artificial Sequence
  Non-cyclic GFR-binding peptide
  MOD_RES (1)..(3)..(35): Xaa is C or S
XGXSRVVMNEYQKYIVNSSDDIFLVSIPSLKTPAXT

SEQ ID NO: 10181 - protein, 39 aa, Artificial Sequence
  Non-cyclic GFR-binding peptide
  MOD_RES (2)..(36)..(37): Xaa is C or S
  MOD_RES (14)..(15)..(16)..(17)..(18): Xaa is A or G
  MOD_RES (19)..(20)..(21)..(22): Xaa is A or G or absent
GXSRVVMNEYQKYXXXXXXXXXIFLVSIPSLKTPAXXPK

SEQ ID NO: 10182 - protein, 38 aa, Artificial Sequence
  Non-cyclic GFR-binding peptide
  MOD_RES (1)..(3)..(35)..(36): Xaa is C or S
XGXGEVVMENSLQEVVKDYEDYYVMPLPELETPVXXAK

SEQ ID NO: 10183 - protein, 32 aa, Artificial Sequence
  Non-cyclic GFR-binding peptide
  MOD_RES (31)..(32): Xaa is C or S
RVVMNEYQKYIVNSSDDIFLVSIPSLQTPAXX

SEQ ID NO: 10184 - protein, 38 aa, Artificial Sequence
  Non-cyclic GFR-binding peptide
  MOD_RES (2)..(4)..(35)..(36): Xaa is C or S
SXKXSKVIMEYQKYIKPTKGIIFLISIPSLDQSVXXPS

SEQ ID NO: 10185 - protein, 38 aa, Artificial Sequence
  Non-cyclic GFR-binding peptide
  MOD_RES (32)..(33): Xaa is C or S
SEVVMDNSLQEVVNNASDYYVIPLPELRTPVXXTPPTS

SEQ ID NO: 10186 - protein, 35 aa, Artificial Sequence
  Non-cyclic GFR-binding peptide
  MOD_RES (2)..(33)..(34): Xaa is C or S
KXSKVVMNSLQEVKPTRGVYYVIPLPELDQPVXXP

SEQ ID NO: 10187 - protein, 37 aa, Artificial Sequence
  Non-cyclic GFR-binding peptide
  MOD_RES (32)..(32): Xaa is C or S
SRVVMNNSLQEIVNSSDDYYLVTLPELKTPAXTPKTV

SEQ ID NO: 10188 - protein, 35 aa, Artificial Sequence
  Non-cyclic GFR-binding peptide
  MOD_RES (31)..(32): Xaa is C or S
SKVIMEYQKYIKPTKGIIFLISIPSLDQSVXXPSA

SEQ ID NO: 10189 - protein, 41 aa, Artificial Sequence
  Non-cyclic GFR-binding peptide
  MOD_RES (2)..(4)..(36)..(37): Xaa is C or S
RXGXGEVVMENSLQEVVKDYEDYYLMTLPELETPVXXAKPI

SEQ ID NO: 10190 - protein, 37 aa, Artificial Sequence
  Non-cyclic GFR-binding peptide
  MOD_RES (34)..(35): Xaa is C or S
  MOD_RES (12)..(13)..(14)..(15)..(16): Xaa is A or G
  MOD_RES (17)..(18)..(19)..(20): Xaa is A or G or absent
SRVVMNNSLQEXXXXXXXXXYYVVPLPELKTPAXXPK

SEQ ID NO: 10191 - protein, 40 aa, Artificial Sequence
  Non-cyclic GFR-binding peptide
  MOD_RES (2)..(34)..(35): Xaa is C or S
GXGEVVMENSLQEVVKDYEDYYLMTLPELETPVXXAKPIS

SEQ ID NO: 10192 - protein, 35 aa, Artificial Sequence
  Non-cyclic GFR-binding peptide
  MOD_RES (2)..(2): Xaa is C or S
  MOD_RES (14)..(15)..(16)..(17)..(18): Xaa is A or G
  MOD_RES (19)..(20)..(21)..(22): Xaa is A or G or absent
GXGEVVMDNSLQEXXXXXXXXXYYVMPLPELETPV

SEQ ID NO: 10193 - protein, 32 aa, Artificial Sequence
  Non-cyclic GFR-binding peptide
  MOD_RES (11)..(12)..(13)..(14)..(15): Xaa is A or G
  MOD_RES (16)..(17)..(18)..(19): Xaa is A or G or absent
EVVMDNSLQEXXXXXXXXXYYLITLPELRTPV

SEQ ID NO: 10194 - protein, 40 aa, Artificial Sequence
  Non-cyclic GFR-binding peptide
  MOD_RES (2)..(34)..(35): Xaa is C or S
GXARVVMNNSLQEIVNSSDDYYLVTLPELQTPAXXPKPVT

SEQ ID NO: 10195 - protein, 33 aa, Artificial Sequence
  Non-cyclic GFR-binding peptide
  MOD_RES (32)..(33): Xaa is C or S
SRVVMNNSLQEIVNSSDDYYLVTLPELKTPAXX

SEQ ID NO: 10196 - protein, 35 aa, Artificial Sequence
  Non-cyclic GFR-binding peptide
  MOD_RES (2)..(2): Xaa is C or S
  MOD_RES (14)..(15)..(16)..(17)..(18): Xaa is A or G
  MOD_RES (19)..(20)..(21)..(22): Xaa is A or G or absent
GXSEVVMDQYNKLXXXXXXXXXLYLISIASLRTPV

SEQ ID NO: 10197 - protein, 35 aa, Artificial Sequence
  Non-cyclic GFR-binding peptide
  MOD_RES (1)..(35): Xaa is C or S
  MOD_RES (13)..(14)..(15)..(16)..(17): Xaa is A or G
  MOD_RES (18)..(19)..(20)..(21): Xaa is A or G or absent
XARVVMNNSLQEXXXXXXXXXYYVVPLPELQTPAX

SEQ ID NO: 10198 - protein, 39 aa, Artificial Sequence
  Non-cyclic GFR-binding peptide
  MOD_RES (2)..(33)..(34): Xaa is C or S
KXSKVVMEYQKYVKPTRGVIFLISIPSLDQPVXXPSASA

SEQ ID NO: 10199 - protein, 41 aa, Artificial Sequence
  Non-cyclic GFR-binding peptide
  MOD_RES (2)..(36)..(37): Xaa is C or S
  MOD_RES (14)..(15)..(16)..(17)..(18): Xaa is A or G
  MOD_RES (19)..(20)..(21)..(22): Xaa is A or G or absent
GXSRVVMNNSLQEXXXXXXXXXYYLVTLPELKTPAXXPKPV

SEQ ID NO: 10200 - protein, 35 aa, Artificial Sequence
  Non-cyclic GFR-binding peptide
  MOD_RES (1)..(35): Xaa is C or S
  MOD_RES (13)..(14)..(15)..(16)..(17): Xaa is A or G
  MOD_RES (18)..(19)..(20)..(21): Xaa is A or G or absent
XGEVVMEEYQKYXXXXXXXXXIFLMSIPSLETPVX

SEQ ID NO: 10201 - protein, 39 aa, Artificial Sequence
  Non-cyclic GFR-binding peptide
  MOD_RES (1)..(3)..(37)..(38): Xaa is C or S
  MOD_RES (15)..(16)..(17)..(18)..(19): Xaa is A or G
  MOD_RES (20)..(21)..(22)..(23): Xaa is A or G or absent
XGXSRVVMNEYQKYXXXXXXXXXIFLVSIPSLKTPAXXP

SEQ ID NO: 10202 - protein, 39 aa, Artificial Sequence
  Non-cyclic GFR-binding peptide
  MOD_RES (33)..(34): Xaa is C or S
  MOD_RES (11)..(12)..(13)..(14)..(15): Xaa is A or G
  MOD_RES (16)..(17)..(18)..(19): Xaa is A or G or absent
SKVVMNSLQEXXXXXXXXXYYVIPLPELDQPVXXPSASA

SEQ ID NO: 10203 - protein, 35 aa, Artificial Sequence
  Non-cyclic GFR-binding peptide
  MOD_RES (32)..(33): Xaa is C or S
GEVVMDEYQKYVVKENEDIFLMSIPSLETPVXXAK

SEQ ID NO: 10204 - protein, 42 aa, Artificial Sequence
  Non-cyclic GFR-binding peptide
  MOD_RES (2)..(36)..(37): Xaa is C or S
  MOD_RES (14)..(15)..(16)..(17)..(18): Xaa is A or G
  MOD_RES (19)..(20)..(21)..(22): Xaa is A or G or absent
GXSEVVMDNSLQEXXXXXXXXXYYLITLPELRTPVXXTPPTS

SEQ ID NO: 10205 - protein, 36 aa, Artificial Sequence
  Non-cyclic GFR-binding peptide
  MOD_RES (2)..(4)..(36): Xaa is C or S
RXGXSEVVMDNSLQEVVNNASDYYLITLPELRTPVX

SEQ ID NO: 10206 - protein, 37 aa, Artificial Sequence
  Non-cyclic GFR-binding peptide
  MOD_RES (1)..(3)..(35)..(36): Xaa is C or S
XGXSEVVMDQYNKLVVNNASDLYLISIASLRTPVXXT

SEQ ID NO: 10207 - protein, 38 aa, Artificial Sequence
  Non-cyclic GFR-binding peptide
  MOD_RES (1)..(3)..(37)..(38): Xaa is C or S
  MOD_RES (15)..(16)..(17)..(18)..(19): Xaa is A or G
  MOD_RES (20)..(21)..(22)..(23): Xaa is A or G or absent
XGXSEVVMDQYNKLXXXXXXXXXLYLISIASLRTPVXX

SEQ ID NO: 10208 - protein, 35 aa, Artificial Sequence
  Non-cyclic GFR-binding peptide
  MOD_RES (32)..(32): Xaa is C or S
SRVVMNNSLQEIVNSSDDYYVVPLPELKTPAXTPK

SEQ ID NO: 10209 - protein, 39 aa, Artificial Sequence
  Non-cyclic GFR-binding peptide
  MOD_RES (1)..(3)..(36)..(37): Xaa is C or S
  MOD_RES (14)..(15)..(16)..(17)..(18): Xaa is A or G
  MOD_RES (19)..(20)..(21)..(22): Xaa is A or G or absent
XKXSKVIMEYQKYXXXXXXXXXIFLISIPSLDQSVXXPS

SEQ ID NO: 10210 - protein, 36 aa, Artificial Sequence
  Non-cyclic GFR-binding peptide
  MOD_RES (2)..(4)..(36): Xaa is C or S
RXGXSEVVMDQYNKLVVNNASDLYLISIASLRTPVX

SEQ ID NO: 10211 - protein, 41 aa, Artificial Sequence
  Non-cyclic GFR-binding peptide
  MOD_RES (2)..(35)..(36): Xaa is C or S
  MOD_RES (13)..(14)..(15)..(16)..(17): Xaa is A or G
  MOD_RES (18)..(19)..(20)..(21): Xaa is A or G or absent
KXSKVIMEYQKYXXXXXXXXXIFLISIPSLDQSVXXPSASA

SEQ ID NO: 10212 - protein, 37 aa, Artificial Sequence
  Non-cyclic GFR-binding peptide
  MOD_RES (2)..(4)..(37): Xaa is C or S
  MOD_RES (15)..(16)..(17)..(18)..(19): Xaa is A or G
  MOD_RES (20)..(21)..(22)..(23): Xaa is A or G or absent
SXKXSRVIMEYQKYXXXXXXXXXIFLISIPSLAQPVX

SEQ ID NO: 10213 - protein, 33 aa, Artificial Sequence
  Non-cyclic GFR-binding peptide
  MOD_RES (33)..(33): Xaa is C or S
  MOD_RES (11)..(12)..(13)..(14)..(15): Xaa is A or G
  MOD_RES (16)..(17)..(18)..(19): Xaa is A or G or absent
EVVMDRYKKLXXXXXXXXXFYLISIANLRTPVX

SEQ ID NO: 10214 - protein, 36 aa, Artificial Sequence
  Non-cyclic GFR-binding peptide
  MOD_RES (2)..(34): Xaa is C or S
GXSRVVMNNSLQEIVNSSDDYYVVPLPELKTPAXTP

SEQ ID NO: 10215 - protein, 39 aa, Artificial Sequence
  Non-cyclic GFR-binding peptide
  MOD_RES (1)..(3)..(35): Xaa is C or S
XGXSRVVMNNSLQEIVNSSDDYYLVTLPELKTPAXTPKT

SEQ ID NO: 10216 - protein, 34 aa, Artificial Sequence
  Non-cyclic GFR-binding peptide
  MOD_RES (31)..(32): Xaa is C or S
EVVMDNSLQEVVKENEDYYLMTLPELETPVXXAK

SEQ ID NO: 10217 - protein, 32 aa, Artificial Sequence
  Non-cyclic GFR-binding peptide
  MOD_RES (11)..(12)..(13)..(14)..(15): Xaa is A or G
  MOD_RES (16)..(17)..(18)..(19): Xaa is A or G or absent
SKVVMEYQKYXXXXXXXXXIFLISIPSLDQPV

SEQ ID NO: 10218 - protein, 37 aa, Artificial Sequence
  Non-cyclic GFR-binding peptide
  MOD_RES (33)..(34): Xaa is C or S
  MOD_RES (11)..(12)..(13)..(14)..(15): Xaa is A or G
  MOD_RES (16)..(17)..(18)..(19): Xaa is A or G or absent
RVVMNNSLQEXXXXXXXXXYYVVPLPELKTPAXXPKP

SEQ ID NO: 10219 - protein, 42 aa, Artificial Sequence
  Non-cyclic GFR-binding peptide
  MOD_RES (2)..(36)..(37): Xaa is C or S
  MOD_RES (14)..(15)..(16)..(17)..(18): Xaa is A or G
  MOD_RES (19)..(20)..(21)..(22): Xaa is A or G or absent
GXGEVVMENSLQEXXXXXXXXXYYVMPLPELETPVXXAKPIS

SEQ ID NO: 10220 - protein, 33 aa, Artificial Sequence
  Non-cyclic GFR-binding peptide
  MOD_RES (1)..(32)..(33): Xaa is C or S
XSRVIMNSLQEVKPKRGVYYLITLPELAQPVXX

SEQ ID NO: 10221 - protein, 33 aa, Artificial Sequence
  Non-cyclic GFR-binding peptide
  MOD_RES (31)..(32): Xaa is C or S
SRVIMNSLQEVKPKRGVYYLITLPELAQPVXXP

SEQ ID NO: 10222 - protein, 40 aa, Artificial Sequence
  Non-cyclic GFR-binding peptide
  MOD_RES (1)..(3)..(35): Xaa is C or S
XGXSRVVMNEYQKYIVNSSDDIFLVSIPSLKTPAXTPKTV

SEQ ID NO: 10223 - protein, 38 aa, Artificial Sequence
  Non-cyclic GFR-binding peptide
  MOD_RES (1)..(33)..(34): Xaa is C or S
XSRVVMNNSLQEIVNSSDDYYVVPLPELKTPAXXPKPV

SEQ ID NO: 10224 - protein, 37 aa, Artificial Sequence
  Non-cyclic GFR-binding peptide
  MOD_RES (1)..(3)..(36)..(37): Xaa is C or S
  MOD_RES (14)..(15)..(16)..(17)..(18): Xaa is A or G
  MOD_RES (19)..(20)..(21)..(22): Xaa is A or G or absent
XKXSKVVMNSLQEXXXXXXXXXYYVIPLPELDQPVXX

SEQ ID NO: 10225 - protein, 36 aa, Artificial Sequence
  Non-cyclic GFR-binding peptide
  MOD_RES (32)..(33): Xaa is C or S
GEVVMENSLQEVVKDYEDYYLMTLPELETPVXXAKP

SEQ ID NO: 10226 - protein, 38 aa, Artificial Sequence
  Non-cyclic GFR-binding peptide
  MOD_RES (34)..(35): Xaa is C or S
  MOD_RES (12)..(13)..(14)..(15)..(16): Xaa is A or G
  MOD_RES (17)..(18)..(19)..(20): Xaa is A or G or absent
SRVVMNEYQKYXXXXXXXXXIFLVSIPSLKTPAXXPKP

SEQ ID NO: 10227 - protein, 40 aa, Artificial Sequence
  Non-cyclic GFR-binding peptide
  MOD_RES (34)..(34): Xaa is C or S
  MOD_RES (12)..(13)..(14)..(15)..(16): Xaa is A or G
  MOD_RES (17)..(18)..(19)..(20): Xaa is A or G or absent
SRVVMNNSLQEXXXXXXXXXYYVVPLPELKTPAXTPKTVH

SEQ ID NO: 10228 - protein, 38 aa, Artificial Sequence
  Non-cyclic GFR-binding peptide
  MOD_RES (2)..(34)..(35): Xaa is C or S
GXSEVVMDNSLQEVVNNASDYYLITLPELRTPVXXTPP

SEQ ID NO: 10229 - protein, 41 aa, Artificial Sequence
  Non-cyclic GFR-binding peptide
  MOD_RES (2)..(4)..(35)..(36): Xaa is C or S
SXKXSKVIMNSLQEIKPTKGIYYVIPLPELDQSVXXPSASA

SEQ ID NO: 10230 - protein, 33 aa, Artificial Sequence
  Non-cyclic GFR-binding peptide
  MOD_RES (2)..(33): Xaa is C or S
KXSRVIMNSLQEVKPKRGVYYLITLPELAQPVX

SEQ ID NO: 10231 - protein, 38 aa, Artificial Sequence
  Non-cyclic GFR-binding peptide
  MOD_RES (2)..(36)..(37): Xaa is C or S
  MOD_RES (14)..(15)..(16)..(17)..(18): Xaa is A or G
  MOD_RES (19)..(20)..(21)..(22): Xaa is A or G or absent
GXARVVMNNSLQEXXXXXXXXXYYLVTLPELQTPAXXP

SEQ ID NO: 10232 - protein, 30 aa, Artificial Sequence
  Non-cyclic GFR-binding peptide
EVVMDEYQKYVVKENEDIFLMSIPSLETPV

SEQ ID NO: 10233 - protein, 39 aa, Artificial Sequence
  Non-cyclic GFR-binding peptide
  MOD_RES (1)..(3)..(34)..(35): Xaa is C or S
XKXSRVIMEYQKYVKPKRGVIFLISIPSLAQPVXXPAAS

SEQ ID NO: 10234 - protein, 34 aa, Artificial Sequence
  Non-cyclic GFR-binding peptide
  MOD_RES (1)..(1): Xaa is C or S
  MOD_RES (13)..(14)..(15)..(16)..(17): Xaa is A or G
  MOD_RES (18)..(19)..(20)..(21): Xaa is A or G or absent
XSRVVMNNSLQEXXXXXXXXXYYLVTLPELKTPA

SEQ ID NO: 10235 - protein, 41 aa, Artificial Sequence
  Non-cyclic GFR-binding peptide
  MOD_RES (2)..(4)..(36)..(37): Xaa is C or S
HXGXARVVMNNSLQEIVNSSDDYYVVPLPELQTPAXXPKPV

SEQ ID NO: 10236 - protein, 40 aa, Artificial Sequence
  Non-cyclic GFR-binding peptide
  MOD_RES (1)..(3)..(37)..(38): Xaa is C or S
  MOD_RES (15)..(16)..(17)..(18)..(19): Xaa is A or G
  MOD_RES (20)..(21)..(22)..(23): Xaa is A or G or absent
XGXSEVVMDQYNKLXXXXXXXXXLYLISIASLRTPVXXTP

SEQ ID NO: 10237 - protein, 40 aa, Artificial Sequence
  Non-cyclic GFR-binding peptide
  MOD_RES (34)..(35): Xaa is C or S
  MOD_RES (12)..(13)..(14)..(15)..(16): Xaa is A or G
  MOD_RES (17)..(18)..(19)..(20): Xaa is A or G or absent
SEVVMDNSLQEXXXXXXXXXYYLITLPELRTPVXXTPPTS

SEQ ID NO: 10238 - protein, 36 aa, Artificial Sequence
  Non-cyclic GFR-binding peptide
  MOD_RES (34)..(35): Xaa is C or S
  MOD_RES (12)..(13)..(14)..(15)..(16): Xaa is A or G
  MOD_RES (17)..(18)..(19)..(20): Xaa is A or G or absent
ARVVMNNSLQEXXXXXXXXXYYLVTLPELQTPAXXP

SEQ ID NO: 10239 - protein, 36 aa, Artificial Sequence
  Non-cyclic GFR-binding peptide
  MOD_RES (1)..(3)..(35)..(36): Xaa is C or S
XGXARVVMNEYQKYIVNSSDDIFLVSIPSLQTPAXX

SEQ ID NO: 10240 - protein, 36 aa, Artificial Sequence
  Non-cyclic GFR-binding peptide
  MOD_RES (31)..(32): Xaa is C or S
EVVMENSLQEVVKDYEDYYVMPLPELETPVXXAKPI

SEQ ID NO: 10241 - protein, 36 aa, Artificial Sequence
  Non-cyclic GFR-binding peptide
  MOD_RES (31)..(32): Xaa is C or S
EVVMENSLQEVVKDYEDYYLMTLPELETPVXXAKPI

SEQ ID NO: 10242 - protein, 34 aa, Artificial Sequence
  Non-cyclic GFR-binding peptide
  MOD_RES (2)..(34): Xaa is C or S
GXSEVVMDNSLQEVVNNASDYYVIPLPELRTPVX

SEQ ID NO: 10243 - protein, 34 aa, Artificial Sequence
  Non-cyclic GFR-binding peptide
  MOD_RES (2)..(34): Xaa is C or S
GXGEVVMDNSLQEVVKENEDYYLMTLPELETPVX

SEQ ID NO: 10244 - protein, 36 aa, Artificial Sequence
  Non-cyclic GFR-binding peptide
  MOD_RES (1)..(32)..(33): Xaa is C or S
XSKVVMEYQKYVKPTRGVIFLISIPSLDQPVXXPSA

SEQ ID NO: 10245 - protein, 41 aa, Artificial Sequence
  Non-cyclic GFR-binding peptide
  MOD_RES (1)..(35)..(36): Xaa is C or S
  MOD_RES (13)..(14)..(15)..(16)..(17): Xaa is A or G
  MOD_RES (18)..(19)..(20)..(21): Xaa is A or G or absent
XSEVVMDNSLQEXXXXXXXXXYYVIPLPELRTPVXXTPPTS

SEQ ID NO: 10246 - protein, 40 aa, Artificial Sequence
  Non-cyclic GFR-binding peptide
  MOD_RES (2)..(4)..(38)..(39): Xaa is C or S
  MOD_RES (16)..(17)..(18)..(19)..(20): Xaa is A or G
  MOD_RES (21)..(22)..(23)..(24): Xaa is A or G or absent
HXGXARVVMNNSLQEXXXXXXXXXYYLVTLPELQTPAXXP

SEQ ID NO: 10247 - protein, 35 aa, Artificial Sequence
  Non-cyclic GFR-binding peptide
  MOD_RES (2)..(4)..(35): Xaa is C or S
SXKXSRVIMEYQKYVKPKRGVIFLISIPSLAQPVX

SEQ ID NO: 10248 - protein, 39 aa, Artificial Sequence
  Non-cyclic GFR-binding peptide
  MOD_RES (1)..(3)..(36)..(37): Xaa is C or S
  MOD_RES (14)..(15)..(16)..(17)..(18): Xaa is A or G
  MOD_RES (19)..(20)..(21)..(22): Xaa is A or G or absent
XKXSRVIMEYQKYXXXXXXXXXIFLISIPSLAQPVXXPA

SEQ ID NO: 10249 - protein, 34 aa, Artificial Sequence
  Non-cyclic GFR-binding peptide
  MOD_RES (31)..(32): Xaa is C or S
EVVMDNSLQEVVKENEDYYVMPLPELETPVXXAK

SEQ ID NO: 10250 - protein, 37 aa, Artificial Sequence
  Non-cyclic GFR-binding peptide
  MOD_RES (33)..(34): Xaa is C or S
  MOD_RES (11)..(12)..(13)..(14)..(15): Xaa is A or G
  MOD_RES (16)..(17)..(18)..(19): Xaa is A or G or absent
SKVIMNSLQEXXXXXXXXXYYVIPLPELDQSVXXPSA

SEQ ID NO: 10251 - protein, 38 aa, Artificial Sequence
  Non-cyclic GFR-binding peptide
  MOD_RES (2)..(35)..(36): Xaa is C or S
  MOD_RES (13)..(14)..(15)..(16)..(17): Xaa is A or G
  MOD_RES (18)..(19)..(20)..(21): Xaa is A or G or absent
KXSKVIMNSLQEXXXXXXXXXYYVIPLPELDQSVXXPS

SEQ ID NO: 10252 - protein, 36 aa, Artificial Sequence
  Non-cyclic GFR-binding peptide
  MOD_RES (1)..(35)..(36): Xaa is C or S
  MOD_RES (13)..(14)..(15)..(16)..(17): Xaa is A or G
  MOD_RES (18)..(19)..(20)..(21): Xaa is A or G or absent
XSEVVMDQYNKLXXXXXXXXXLYLISIASLRTPVXX

SEQ ID NO: 10253 - protein, 39 aa, Artificial Sequence
  Non-cyclic GFR-binding peptide
  MOD_RES (2)..(34)..(35): Xaa is C or S
GXARVVMNNSLQEIVNSSDDYYVVPLPELQTPAXXPKPV

SEQ ID NO: 10254 - protein, 35 aa, Artificial Sequence
  Non-cyclic GFR-binding peptide
  MOD_RES (2)..(34)..(35): Xaa is C or S
GXSEVVMDQYNKLVVNNASDLYLISIASLRTPVXX

SEQ ID NO: 10255 - protein, 40 aa, Artificial Sequence
  Non-cyclic GFR-binding peptide
  MOD_RES (1)..(35): Xaa is C or S
  MOD_RES (13)..(14)..(15)..(16)..(17): Xaa is A or G
  MOD_RES (18)..(19)..(20)..(21): Xaa is A or G or absent
XSRVVMNNSLQEXXXXXXXXXYYVVPLPELKTPAXTPKTV

SEQ ID NO: 10256 - protein, 34 aa, Artificial Sequence
  Non-cyclic GFR-binding peptide
  MOD_RES (2)..(33)..(34): Xaa is C or S
KXSRVIMNSLQEVKPKRGVYYLITLPELAQPVXX

SEQ ID NO: 10257 - protein, 39 aa, Artificial Sequence
  Non-cyclic GFR-binding peptide
  MOD_RES (34)..(35): Xaa is C or S
  MOD_RES (12)..(13)..(14)..(15)..(16): Xaa is A or G
  MOD_RES (17)..(18)..(19)..(20): Xaa is A or G or absent
ARVVMNNSLQEXXXXXXXXXYYVVPLPELQTPAXXPKPV

SEQ ID NO: 10258 - protein, 34 aa, Artificial Sequence
  Non-cyclic GFR-binding peptide
  MOD_RES (31)..(32): Xaa is C or S
EVVMDNSLQEVVNNASDYYVIPLPELRTPVXXTP

SEQ ID NO: 10259 - protein, 33 aa, Artificial Sequence
  Non-cyclic GFR-binding peptide
  MOD_RES (32)..(33): Xaa is C or S
SEVVMDNSLQEVVNNASDYYVIPLPELRTPVXX

SEQ ID NO: 10260 - protein, 37 aa, Artificial Sequence
  Non-cyclic GFR-binding peptide
  MOD_RES (1)..(3)..(37): Xaa is C or S
  MOD_RES (15)..(16)..(17)..(18)..(19): Xaa is A or G
  MOD_RES (20)..(21)..(22)..(23): Xaa is A or G or absent
XGXSRVVMNNSLQEXXXXXXXXXYYVVPLPELKTPAX

SEQ ID NO: 10261 - protein, 37 aa, Artificial Sequence
  Non-cyclic GFR-binding peptide
  MOD_RES (1)..(3)..(37): Xaa is C or S
  MOD_RES (15)..(16)..(17)..(18)..(19): Xaa is A or G
  MOD_RES (20)..(21)..(22)..(23): Xaa is A or G or absent
XGXSEVVMDRYKKLXXXXXXXXXFYLISIANLRTPVX

SEQ ID NO: 10262 - protein, 33 aa, Artificial Sequence
  Non-cyclic GFR-binding peptide
  MOD_RES (2)..(33): Xaa is C or S
KXSKVVMEYQKYVKPTRGVIFLISIPSLDQPVX

SEQ ID NO: 10263 - protein, 36 aa, Artificial Sequence
  Non-cyclic GFR-binding peptide
  MOD_RES (1)..(3): Xaa is C or S
  MOD_RES (15)..(16)..(17)..(18)..(19): Xaa is A or G
  MOD_RES (20)..(21)..(22)..(23): Xaa is A or G or absent
XGXSEVVMDNSLQEXXXXXXXXXYYVIPLPELRTPV

SEQ ID NO: 10264 - protein, 38 aa, Artificial Sequence
  Non-cyclic GFR-binding peptide
  MOD_RES (2)..(4)..(36): Xaa is C or S
HXGXSRVVMNNSLQEIVNSSDDYYLVTLPELKTPAXTP

SEQ ID NO: 10265 - protein, 35 aa, Artificial Sequence
  Non-cyclic GFR-binding peptide
  MOD_RES (32)..(32): Xaa is C or S
SRVVMNNSLQEIVNSSDDYYLVTLPELKTPAXTPK

SEQ ID NO: 10266 - protein, 35 aa, Artificial Sequence
  Non-cyclic GFR-binding peptide
  MOD_RES (1)..(3)..(35): Xaa is C or S
XGXGEVVMDNSLQEVVKENEDYYVMPLPELETPVX

SEQ ID NO: 10267 - protein, 38 aa, Artificial Sequence
  Non-cyclic GFR-binding peptide
  MOD_RES (2)..(33)..(34): Xaa is C or S
KXSKVIMEYQKYIKPTKGIIFLISIPSLDQSVXXPSAS

SEQ ID NO: 10268 - protein, 37 aa, Artificial Sequence
  Non-cyclic GFR-binding peptide
  MOD_RES (2)..(35)..(36): Xaa is C or S
  MOD_RES (13)..(14)..(15)..(16)..(17): Xaa is A or G
  MOD_RES (18)..(19)..(20)..(21): Xaa is A or G or absent
KXSKVIMNSLQEXXXXXXXXXYYVIPLPELDQSVXXP

SEQ ID NO: 10269 - protein, 34 aa, Artificial Sequence
  Non-cyclic GFR-binding peptide
  MOD_RES (33)..(34): Xaa is C or S
  MOD_RES (11)..(12)..(13)..(14)..(15): Xaa is A or G
  MOD_RES (16)..(17)..(18)..(19): Xaa is A or G or absent
EVVMDNSLQEXXXXXXXXXYYLITLPELRTPVXX

SEQ ID NO: 10270 - protein, 37 aa, Artificial Sequence
  Non-cyclic GFR-binding peptide
  MOD_RES (1)..(3)..(35)..(36): Xaa is C or S
XGXSRVVMNEYQKYIVNSSDDIFLVSIPSLKTPAXXP

SEQ ID NO: 10271 - protein, 43 aa, Artificial Sequence
  Non-cyclic GFR-binding peptide
  MOD_RES (1)..(3)..(37): Xaa is C or S
  MOD_RES (15)..(16)..(17)..(18)..(19): Xaa is A or G
  MOD_RES (20)..(21)..(22)..(23): Xaa is A or G or absent
XGXSRVVMNNSLQEXXXXXXXXXYYVVPLPELKTPAXTPKTVH

SEQ ID NO: 10272 - protein, 36 aa, Artificial Sequence
  Non-cyclic GFR-binding peptide
  MOD_RES (33)..(34): Xaa is C or S
  MOD_RES (11)..(12)..(13)..(14)..(15): Xaa is A or G
  MOD_RES (16)..(17)..(18)..(19): Xaa is A or G or absent
SKVIMNSLQEXXXXXXXXXYYVIPLPELDQSVXXPS

SEQ ID NO: 10273 - protein, 41 aa, Artificial Sequence
  Non-cyclic GFR-binding peptide
  MOD_RES (2)..(36)..(37): Xaa is C or S
  MOD_RES (14)..(15)..(16)..(17)..(18): Xaa is A or G
  MOD_RES (19)..(20)..(21)..(22): Xaa is A or G or absent
GXARVVMNNSLQEXXXXXXXXXYYVVPLPELQTPAXXPKPV

SEQ ID NO: 10274 - protein, 38 aa, Artificial Sequence
  Non-cyclic GFR-binding peptide
  MOD_RES (2)..(36)..(37): Xaa is C or S
  MOD_RES (14)..(15)..(16)..(17)..(18): Xaa is A or G
  MOD_RES (19)..(20)..(21)..(22): Xaa is A or G or absent
GXSRVVMNEYQKYXXXXXXXXXIFLVSIPSLKTPAXXP

SEQ ID NO: 10275 - protein, 35 aa, Artificial Sequence
  Non-cyclic GFR-binding peptide
  MOD_RES (1)..(35): Xaa is C or S
  MOD_RES (13)..(14)..(15)..(16)..(17): Xaa is A or G
  MOD_RES (18)..(19)..(20)..(21): Xaa is A or G or absent
XSRVVMNNSLQEXXXXXXXXXYYLVTLPELKTPAX

SEQ ID NO: 10276 - protein, 37 aa, Artificial Sequence
  Non-cyclic GFR-binding peptide
  MOD_RES (1)..(32)..(33): Xaa is C or S
XSKVVMEYQKYVKPTRGVIFLISIPSLDQPVXXPSAS

SEQ ID NO: 10277 - protein, 37 aa, Artificial Sequence
  Non-cyclic GFR-binding peptide
  MOD_RES (31)..(32): Xaa is C or S
EVVMENSLQEVVKDYEDYYLMTLPELETPVXXAKPIS

SEQ ID NO: 10278 - protein, 37 aa, Artificial Sequence
  Non-cyclic GFR-binding peptide
  MOD_RES (33)..(34): Xaa is C or S
  MOD_RES (11)..(12)..(13)..(14)..(15): Xaa is A or G
  MOD_RES (16)..(17)..(18)..(19): Xaa is A or G or absent
RVVMNEYQKYXXXXXXXXXIFLVSIPSLQTPAXXPKP

SEQ ID NO: 10279 - protein, 38 aa, Artificial Sequence
  Non-cyclic GFR-binding peptide
  MOD_RES (1)..(3)..(35)..(36): Xaa is C or S
XGXGEVVMEEYQKYVVKDYEDIFLMSIPSLETPVXXAK

SEQ ID NO: 10280 - protein, 35 aa, Artificial Sequence
  Non-cyclic GFR-binding peptide
  MOD_RES (34)..(34): Xaa is C or S
  MOD_RES (12)..(13)..(14)..(15)..(16): Xaa is A or G
  MOD_RES (17)..(18)..(19)..(20): Xaa is A or G or absent
SRVVMNEYQKYXXXXXXXXXIFLVSIPSLKTPAXT

SEQ ID NO: 10281 - protein, 40 aa, Artificial Sequence
  Non-cyclic GFR-binding peptide
  MOD_RES (34)..(35): Xaa is C or S
  MOD_RES (12)..(13)..(14)..(15)..(16): Xaa is A or G
  MOD_RES (17)..(18)..(19)..(20): Xaa is A or G or absent
GEVVMDEYQKYXXXXXXXXXIFLMSIPSLETPVXXAKPIK

SEQ ID NO: 10282 - protein, 41 aa, Artificial Sequence
  Non-cyclic GFR-binding peptide
  MOD_RES (1)..(3)..(37)..(38): Xaa is C or S
  MOD_RES (15)..(16)..(17)..(18)..(19): Xaa is A or G
  MOD_RES (20)..(21)..(22)..(23): Xaa is A or G or absent
XGXGEVVMDNSLQEXXXXXXXXXYYLMTLPELETPVXXAKP

SEQ ID NO: 10283 - protein, 36 aa, Artificial Sequence
  Non-cyclic GFR-binding peptide
  MOD_RES (32)..(33): Xaa is C or S
SRVVMNNSLQEIVNSSDDYYVVPLPELKTPAXXPKP

SEQ ID NO: 10284 - protein, 38 aa, Artificial Sequence
  Non-cyclic GFR-binding peptide
  MOD_RES (1)..(35)..(36): Xaa is C or S
  MOD_RES (13)..(14)..(15)..(16)..(17): Xaa is A or G
  MOD_RES (18)..(19)..(20)..(21): Xaa is A or G or absent
XSEVVMDRYKKLXXXXXXXXXFYLISIANLRTPVXXTP

SEQ ID NO: 10285 - protein, 36 aa, Artificial Sequence
  Non-cyclic GFR-binding peptide
  MOD_RES (1)..(33)..(34): Xaa is C or S
XSEVVMDNSLQEVVNNASDYYVIPLPELRTPVXXTP

SEQ ID NO: 10286 - protein, 38 aa, Artificial Sequence
  Non-cyclic GFR-binding peptide
  MOD_RES (2)..(36)..(37): Xaa is C or S
  MOD_RES (14)..(15)..(16)..(17)..(18): Xaa is A or G
  MOD_RES (19)..(20)..(21)..(22): Xaa is A or G or absent
GXGEVVMDNSLQEXXXXXXXXXYYVMPLPELETPVXXA

SEQ ID NO: 10287 - protein, 38 aa, Artificial Sequence
  Non-cyclic GFR-binding peptide
  MOD_RES (1)..(33)..(34): Xaa is C or S
XARVVMNEYQKYIVNSSDDIFLVSIPSLQTPAXXPKPV

SEQ ID NO: 10288 - protein, 39 aa, Artificial Sequence
  Non-cyclic GFR-binding peptide
  MOD_RES (2)..(36)..(37): Xaa is C or S
  MOD_RES (14)..(15)..(16)..(17)..(18): Xaa is A or G
  MOD_RES (19)..(20)..(21)..(22): Xaa is A or G or absent
GXGEVVMENSLQEXXXXXXXXXYYVMPLPELETPVXXAK

SEQ ID NO: 10289 - protein, 39 aa, Artificial Sequence
  Non-cyclic GFR-binding peptide
  MOD_RES (34)..(35): Xaa is C or S
  MOD_RES (12)..(13)..(14)..(15)..(16): Xaa is A or G
  MOD_RES (17)..(18)..(19)..(20): Xaa is A or G or absent
SEVVMDNSLQEXXXXXXXXXYYVIPLPELRTPVXXTPPT

SEQ ID NO: 10290 - protein, 41 aa, Artificial Sequence
  Non-cyclic GFR-binding peptide
  MOD_RES (2)..(35)..(36): Xaa is C or S
  MOD_RES (13)..(14)..(15)..(16)..(17): Xaa is A or G
  MOD_RES (18)..(19)..(20)..(21): Xaa is A or G or absent
KXSRVIMNSLQEXXXXXXXXXYYLITLPELAQPVXXPAASA

SEQ ID NO: 10291 - protein, 35 aa, Artificial Sequence
  Non-cyclic GFR-binding peptide
  MOD_RES (1)..(34)..(35): Xaa is C or S
  MOD_RES (12)..(13)..(14)..(15)..(16): Xaa is A or G
  MOD_RES (17)..(18)..(19)..(20): Xaa is A or G or absent
XSRVIMEYQKYXXXXXXXXXIFLISIPSLAQPVXX

SEQ ID NO: 10292 - protein, 40 aa, Artificial Sequence
  Non-cyclic GFR-binding peptide
  MOD_RES (1)..(35)..(36): Xaa is C or S
  MOD_RES (13)..(14)..(15)..(16)..(17): Xaa is A or G
  MOD_RES (18)..(19)..(20)..(21): Xaa is A or G or absent
XSEVVMDQYNKLXXXXXXXXXLYLISIASLRTPVXXTPPT

SEQ ID NO: 10293 - protein, 32 aa, Artificial Sequence
  Non-cyclic GFR-binding peptide
  MOD_RES (1)..(1): Xaa is C or S
XARVVMNNSLQEIVNSSDDYYVVPLPELQTPA

SEQ ID NO: 10294 - protein, 40 aa, Artificial Sequence
  Non-cyclic GFR-binding peptide
  MOD_RES (2)..(4)..(38)..(39): Xaa is C or S
  MOD_RES (16)..(17)..(18)..(19)..(20): Xaa is A or G
  MOD_RES (21)..(22)..(23)..(24): Xaa is A or G or absent
RXGXSEVVMDNSLQEXXXXXXXXXYYVIPLPELRTPVXXT

SEQ ID NO: 10295 - protein, 41 aa, Artificial Sequence
  Non-cyclic GFR-binding peptide
  MOD_RES (1)..(35)..(36): Xaa is C or S
  MOD_RES (13)..(14)..(15)..(16)..(17): Xaa is A or G
  MOD_RES (18)..(19)..(20)..(21): Xaa is A or G or absent
XGEVVMENSLQEXXXXXXXXXYYVMPLPELETPVXXAKPIS

SEQ ID NO: 10296 - protein, 33 aa, Artificial Sequence
  Non-cyclic GFR-binding peptide
  MOD_RES (31)..(32): Xaa is C or S
EVVMDEYQKYVVKENEDIFLMSIPSLETPVXXA

SEQ ID NO: 10297 - protein, 39 aa, Artificial Sequence
  Non-cyclic GFR-binding peptide
  MOD_RES (2)..(4)..(36)..(37): Xaa is C or S
HXGXARVVMNNSLQEIVNSSDDYYLVTLPELQTPAXXPK

SEQ ID NO: 10298 - protein, 34 aa, Artificial Sequence
  Non-cyclic GFR-binding peptide
  MOD_RES (31)..(32): Xaa is C or S
EVVMDNSLQEVVNNASDYYLITLPELRTPVXXTP

SEQ ID NO: 10299 - protein, 36 aa, Artificial Sequence
  Non-cyclic GFR-binding peptide
  MOD_RES (1)..(33)..(34): Xaa is C or S
XARVVMNNSLQEIVNSSDDYYVVPLPELQTPAXXPK

SEQ ID NO: 10300 - protein, 35 aa, Artificial Sequence
  Non-cyclic GFR-binding peptide
  MOD_RES (2)..(4): Xaa is C or S
RXGXGEVVMEEYQKYVVKDYEDIFLMSIPSLETPV

SEQ ID NO: 10301 - protein, 32 aa, Artificial Sequence
  Non-cyclic GFR-binding peptide
  MOD_RES (31)..(32): Xaa is C or S
SKVVMEYQKYVKPTRGVIFLISIPSLDQPVXX

SEQ ID NO: 10302 - protein, 34 aa, Artificial Sequence
  Non-cyclic GFR-binding peptide
  MOD_RES (1)..(33)..(34): Xaa is C or S
XGEVVMDEYQKYVVKENEDIFLMSIPSLETPVXX

SEQ ID NO: 10303 - protein, 31 aa, Artificial Sequence
  Non-cyclic GFR-binding peptide
  MOD_RES (31)..(31): Xaa is C or S
SKVVMNSLQEVKPTRGVYYVIPLPELDQPVX

SEQ ID NO: 10304 - protein, 34 aa, Artificial Sequence
  Non-cyclic GFR-binding peptide
  MOD_RES (31)..(31): Xaa is C or S
RVVMNEYQKYIVNSSDDIFLVSIPSLKTPAXTPK

SEQ ID NO: 10305 - protein, 35 aa, Artificial Sequence
  Non-cyclic GFR-binding peptide
  MOD_RES (1)..(33)..(34): Xaa is C or S
XARVVMNNSLQEIVNSSDDYYLVTLPELQTPAXXP

SEQ ID NO: 10306 - protein, 38 aa, Artificial Sequence
  Non-cyclic GFR-binding peptide
  MOD_RES (2)..(36)..(37): Xaa is C or S
  MOD_RES (14)..(15)..(16)..(17)..(18): Xaa is A or G
  MOD_RES (19)..(20)..(21)..(22): Xaa is A or G or absent
GXSEVVMDNSLQEXXXXXXXXXYYVIPLPELRTPVXXT

SEQ ID NO: 10307 - protein, 39 aa, Artificial Sequence
  Non-cyclic GFR-binding peptide
  MOD_RES (1)..(3)..(35)..(36): Xaa is C or S
XGXGEVVMDNSLQEVVKENEDYYVMPLPELETPVXXAKP

SEQ ID NO: 10308 - protein, 37 aa, Artificial Sequence
  Non-cyclic GFR-binding peptide
  MOD_RES (33)..(34): Xaa is C or S
  MOD_RES (11)..(12)..(13)..(14)..(15): Xaa is A or G
  MOD_RES (16)..(17)..(18)..(19): Xaa is A or G or absent
SKVIMEYQKYXXXXXXXXXIFLISIPSLDQSVXXPSA

SEQ ID NO: 10309 - protein, 40 aa, Artificial Sequence
  Non-cyclic GFR-binding peptide
  MOD_RES (2)..(4)..(38)..(39): Xaa is C or S
  MOD_RES (16)..(17)..(18)..(19)..(20): Xaa is A or G
  MOD_RES (21)..(22)..(23)..(24): Xaa is A or G or absent
RXGXGEVVMEEYQKYXXXXXXXXXIFLMSIPSLETPVXXA

SEQ ID NO: 10310 - protein, 40 aa, Artificial Sequence
  Non-cyclic GFR-binding peptide
  MOD_RES (34)..(35): Xaa is C or S
  MOD_RES (12)..(13)..(14)..(15)..(16): Xaa is A or G
  MOD_RES (17)..(18)..(19)..(20): Xaa is A or G or absent
ARVVMNNSLQEXXXXXXXXXYYVVPLPELQTPAXXPKPVT

SEQ ID NO: 10311 - protein, 38 aa, Artificial Sequence
  Non-cyclic GFR-binding peptide
  MOD_RES (1)..(3)..(37): Xaa is C or S
  MOD_RES (15)..(16)..(17)..(18)..(19): Xaa is A or G
  MOD_RES (20)..(21)..(22)..(23): Xaa is A or G or absent
XGXSRVVMNNSLQEXXXXXXXXXYYVVPLPELKTPAXT

SEQ ID NO: 10312 - protein, 37 aa, Artificial Sequence
  Non-cyclic GFR-binding peptide
  MOD_RES (2)..(4)..(36)..(37): Xaa is C or S
RXGXSEVVMDNSLQEVVNNASDYYLITLPELRTPVXX

SEQ ID NO: 10313 - protein, 37 aa, Artificial Sequence
  Non-cyclic GFR-binding peptide
  MOD_RES (2)..(34)..(35): Xaa is C or S
GXSEVVMDRYKKLVVNNASDFYLISIANLRTPVXXTP

SEQ ID NO: 10314 - protein, 36 aa, Artificial Sequence
  Non-cyclic GFR-binding peptide
  MOD_RES (1)..(32)..(33): Xaa is C or S
XSRVIMNSLQEVKPKRGVYYLITLPELAQPVXXPAA

SEQ ID NO: 10315 - protein, 36 aa, Artificial Sequence
  Non-cyclic GFR-binding peptide
  MOD_RES (2)..(35)..(36): Xaa is C or S
  MOD_RES (13)..(14)..(15)..(16)..(17): Xaa is A or G
  MOD_RES (18)..(19)..(20)..(21): Xaa is A or G or absent
KXSKVIMEYQKYXXXXXXXXXIFLISIPSLDQSVXX

SEQ ID NO: 10316 - protein, 34 aa, Artificial Sequence
  Non-cyclic GFR-binding peptide
  MOD_RES (2)..(2): Xaa is C or S
  MOD_RES (13)..(14)..(15)..(16)..(17): Xaa is A or G
  MOD_RES (18)..(19)..(20)..(21): Xaa is A or G or absent
KXSKVVMEYQKYXXXXXXXXXIFLISIPSLDQPV

SEQ ID NO: 10317 - protein, 36 aa, Artificial Sequence
  Non-cyclic GFR-binding peptide
  MOD_RES (32)..(33): Xaa is C or S
GEVVMENSLQEVVKDYEDYYVMPLPELETPVXXAKP

SEQ ID NO: 10318 - protein, 34 aa, Artificial Sequence
  Non-cyclic GFR-binding peptide
  MOD_RES (31)..(32): Xaa is C or S
EVVMENSLQEVVKDYEDYYVMPLPELETPVXXAK

SEQ ID NO: 10319 - protein, 35 aa, Artificial Sequence
  Non-cyclic GFR-binding peptide
  MOD_RES (2)..(35): Xaa is C or S
  MOD_RES (13)..(14)..(15)..(16)..(17): Xaa is A or G
  MOD_RES (18)..(19)..(20)..(21): Xaa is A or G or absent
KXSKVIMEYQKYXXXXXXXXXIFLISIPSLDQSVX

SEQ ID NO: 10320 - protein, 34 aa, Artificial Sequence
  Non-cyclic GFR-binding peptide
  MOD_RES (31)..(32): Xaa is C or S
EVVMDRYKKLVVNNASDFYLISIANLRTPVXXTP

SEQ ID NO: 10321 - protein, 39 aa, Artificial Sequence
  Non-cyclic GFR-binding peptide
  MOD_RES (2)..(4)..(38)..(39): Xaa is C or S
  MOD_RES (16)..(17)..(18)..(19)..(20): Xaa is A or G
  MOD_RES (21)..(22)..(23)..(24): Xaa is A or G or absent
RXGXSEVVMDNSLQEXXXXXXXXXYYLITLPELRTPVXX

SEQ ID NO: 10322 - protein, 33 aa, Artificial Sequence
  Non-cyclic GFR-binding peptide
  MOD_RES (1)..(33): Xaa is C or S
XGEVVMENSLQEVVKDYEDYYVMPLPELETPVX

SEQ ID NO: 10323 - protein, 36 aa, Artificial Sequence
  Non-cyclic GFR-binding peptide
  MOD_RES (1)..(33)..(34): Xaa is C or S
XGEVVMENSLQEVVKDYEDYYVMPLPELETPVXXAK

SEQ ID NO: 10324 - protein, 34 aa, Artificial Sequence
  Non-cyclic GFR-binding peptide
  MOD_RES (31)..(32): Xaa is C or S
RVVMNNSLQEIVNSSDDYYVVPLPELKTPAXXPK

SEQ ID NO: 10325 - protein, 36 aa, Artificial Sequence
  Non-cyclic GFR-binding peptide
  MOD_RES (31)..(32): Xaa is C or S
RVVMNNSLQEIVNSSDDYYVVPLPELKTPAXXPKPV

SEQ ID NO: 10326 - protein, 39 aa, Artificial Sequence
  Non-cyclic GFR-binding peptide
  MOD_RES (2)..(4)..(38)..(39): Xaa is C or S
  MOD_RES (16)..(17)..(18)..(19)..(20): Xaa is A or G
  MOD_RES (21)..(22)..(23)..(24): Xaa is A or G or absent
RXGXGEVVMDEYQKYXXXXXXXXXIFLMSIPSLETPVXX

SEQ ID NO: 10327 - protein, 36 aa, Artificial Sequence
  Non-cyclic GFR-binding peptide
  MOD_RES (2)..(34)..(35): Xaa is C or S
GXGEVVMDNSLQEVVKENEDYYLMTLPELETPVXXA

SEQ ID NO: 10328 - protein, 40 aa, Artificial Sequence
  Non-cyclic GFR-binding peptide
  MOD_RES (1)..(35)..(36): Xaa is C or S
  MOD_RES (13)..(14)..(15)..(16)..(17): Xaa is A or G
  MOD_RES (18)..(19)..(20)..(21): Xaa is A or G or absent
XSRVVMNNSLQEXXXXXXXXXYYVVPLPELKTPAXXPKPV

SEQ ID NO: 10329 - protein, 40 aa, Artificial Sequence
  Non-cyclic GFR-binding peptide
  MOD_RES (2)..(36)..(37): Xaa is C or S
  MOD_RES (14)..(15)..(16)..(17)..(18): Xaa is A or G
  MOD_RES (19)..(20)..(21)..(22): Xaa is A or G or absent
GXGEVVMENSLQEXXXXXXXXXYYVMPLPELETPVXXAKP

SEQ ID NO: 10330 - protein, 38 aa, Artificial Sequence
  Non-cyclic GFR-binding peptide
  MOD_RES (1)..(3)..(36)..(37): Xaa is C or S
  MOD_RES (14)..(15)..(16)..(17)..(18): Xaa is A or G
  MOD_RES (19)..(20)..(21)..(22): Xaa is A or G or absent
XKXSKVIMNSLQEXXXXXXXXXYYVIPLPELDQSVXXP

SEQ ID NO: 10331 - protein, 39 aa, Artificial Sequence
  Non-cyclic GFR-binding peptide
  MOD_RES (1)..(33)..(34): Xaa is C or S
XSEVVMDNSLQEVVNNASDYYVIPLPELRTPVXXTPPTS

SEQ ID NO: 10332 - protein, 35 aa, Artificial Sequence
  Non-cyclic GFR-binding peptide
  MOD_RES (34)..(35): Xaa is C or S
  MOD_RES (12)..(13)..(14)..(15)..(16): Xaa is A or G
  MOD_RES (17)..(18)..(19)..(20): Xaa is A or G or absent
SEVVMDNSLQEXXXXXXXXXYYLITLPELRTPVXX

SEQ ID NO: 10333 - protein, 41 aa, Artificial Sequence
  Non-cyclic GFR-binding peptide
  MOD_RES (2)..(4)..(35)..(36): Xaa is C or S
SXKXSKVVMNSLQEVKPTRGVYYVIPLPELDQPVXXPSASA

SEQ ID NO: 10334 - protein, 39 aa, Artificial Sequence
  Non-cyclic GFR-binding peptide
  MOD_RES (2)..(4)..(35)..(36): Xaa is C or S
SXKXSKVVMNSLQEVKPTRGVYYVIPLPELDQPVXXPSA

SEQ ID NO: 10335 - protein, 39 aa, Artificial Sequence
  Non-cyclic GFR-binding peptide
  MOD_RES (1)..(33)..(34): Xaa is C or S
XSRVVMNEYQKYIVNSSDDIFLVSIPSLKTPAXXPKPVY

SEQ ID NO: 10336 - protein, 44 aa, Artificial Sequence
  Non-cyclic GFR-binding peptide
  MOD_RES (2)..(4)..(38)..(39): Xaa is C or S
  MOD_RES (16)..(17)..(18)..(19)..(20): Xaa is A or G
  MOD_RES (21)..(22)..(23)..(24): Xaa is A or G or absent
RXGXSEVVMDNSLQEXXXXXXXXXYYLITLPELRTPVXXTPPTS

SEQ ID NO: 10337 - protein, 37 aa, Artificial Sequence
  Non-cyclic GFR-binding peptide
  MOD_RES (2)..(34)..(35): Xaa is C or S
GXSRVVMNNSLQEIVNSSDDYYVVPLPELKTPAXXPK

SEQ ID NO: 10338 - protein, 37 aa, Artificial Sequence
  Non-cyclic GFR-binding peptide
  MOD_RES (31)..(32): Xaa is C or S
SKVIMNSLQEIKPTKGIYYVIPLPELDQSVXXPSASA

SEQ ID NO: 10339 - protein, 38 aa, Artificial Sequence
  Non-cyclic GFR-binding peptide
  MOD_RES (34)..(35): Xaa is C or S
  MOD_RES (12)..(13)..(14)..(15)..(16): Xaa is A or G
  MOD_RES (17)..(18)..(19)..(20): Xaa is A or G or absent
GEVVMEEYQKYXXXXXXXXXIFLMSIPSLETPVXXAKP

SEQ ID NO: 10340 - protein, 32 aa, Artificial Sequence
  Non-cyclic GFR-binding peptide
  MOD_RES (32)..(32): Xaa is C or S
SEVVMDNSLQEVVNNASDYYLITLPELRTPVX

SEQ ID NO: 10341 - protein, 39 aa, Artificial Sequence
  Non-cyclic GFR-binding peptide
  MOD_RES (1)..(3)..(35)..(36): Xaa is C or S
XGXGEVVMENSLQEVVKDYEDYYLMTLPELETPVXXAKP

SEQ ID NO: 10342 - protein, 41 aa, Artificial Sequence
  Non-cyclic GFR-binding peptide
  MOD_RES (2)..(36)..(37): Xaa is C or S
  MOD_RES (14)..(15)..(16)..(17)..(18): Xaa is A or G
  MOD_RES (19)..(20)..(21)..(22): Xaa is A or G or absent
GXSRVVMNEYQKYXXXXXXXXXIFLVSIPSLKTPAXXPKPV

SEQ ID NO: 10343 - protein, 42 aa, Artificial Sequence
  Non-cyclic GFR-binding peptide
  MOD_RES (2)..(4)..(36)..(37): Xaa is C or S
RXGXSEVVMDQYNKLVVNNASDLYLISIASLRTPVXXTPPTS

SEQ ID NO: 10344 - protein, 35 aa, Artificial Sequence
  Non-cyclic GFR-binding peptide
  MOD_RES (1)..(35): Xaa is C or S
  MOD_RES (13)..(14)..(15)..(16)..(17): Xaa is A or G
  MOD_RES (18)..(19)..(20)..(21): Xaa is A or G or absent
XSEVVMDQYNKLXXXXXXXXXLYLISIASLRTPVX

SEQ ID NO: 10345 - protein, 32 aa, Artificial Sequence
  Non-cyclic GFR-binding peptide
  MOD_RES (1)..(1): Xaa is C or S
XGEVVMEEYQKYVVKDYEDIFLMSIPSLETPV

SEQ ID NO: 10346 - protein, 38 aa, Artificial Sequence
  Non-cyclic GFR-binding peptide
  MOD_RES (2)..(4)..(36)..(37): Xaa is C or S
RXGXSEVVMDQYNKLVVNNASDLYLISIASLRTPVXXT

SEQ ID NO: 10347 - protein, 39 aa, Artificial Sequence
  Non-cyclic GFR-binding peptide
  MOD_RES (2)..(4)..(38)..(39): Xaa is C or S
  MOD_RES (16)..(17)..(18)..(19)..(20): Xaa is A or G
  MOD_RES (21)..(22)..(23)..(24): Xaa is A or G or absent
HXGXARVVMNNSLQEXXXXXXXXXYYVVPLPELQTPAXX

SEQ ID NO: 10348 - protein, 41 aa, Artificial Sequence
  Non-cyclic GFR-binding peptide
  MOD_RES (1)..(3)..(37)..(38): Xaa is C or S
  MOD_RES (15)..(16)..(17)..(18)..(19): Xaa is A or G
  MOD_RES (20)..(21)..(22)..(23): Xaa is A or G or absent
XGXSEVVMDNSLQEXXXXXXXXXYYLITLPELRTPVXXTPP

SEQ ID NO: 10349 - protein, 43 aa, Artificial Sequence
  Non-cyclic GFR-binding peptide
  MOD_RES (1)..(3)..(37)..(38): Xaa is C or S
  MOD_RES (15)..(16)..(17)..(18)..(19): Xaa is A or G
  MOD_RES (20)..(21)..(22)..(23): Xaa is A or G or absent
XGXARVVMNNSLQEXXXXXXXXXYYVVPLPELQTPAXXPKPVT

SEQ ID NO: 10350 - protein, 34 aa, Artificial Sequence
  Non-cyclic GFR-binding peptide
  MOD_RES (33)..(34): Xaa is C or S
  MOD_RES (11)..(12)..(13)..(14)..(15): Xaa is A or G
  MOD_RES (16)..(17)..(18)..(19): Xaa is A or G or absent
SKVVMNSLQEXXXXXXXXXYYVIPLPELDQPVXX

SEQ ID NO: 10351 - protein, 35 aa, Artificial Sequence
  Non-cyclic GFR-binding peptide
  MOD_RES (2)..(34)..(35): Xaa is C or S
GXSRVVMNNSLQEIVNSSDDYYVVPLPELKTPAXX

SEQ ID NO: 10352 - protein, 33 aa, Artificial Sequence
  Non-cyclic GFR-binding peptide
  MOD_RES (33)..(33): Xaa is C or S
  MOD_RES (11)..(12)..(13)..(14)..(15): Xaa is A or G
  MOD_RES (16)..(17)..(18)..(19): Xaa is A or G or absent
EVVMDQYNKLXXXXXXXXXLYLISIASLRTPVX

SEQ ID NO: 10353 - protein, 33 aa, Artificial Sequence
  Non-cyclic GFR-binding peptide
  MOD_RES (32)..(32): Xaa is C or S
SRVVMNNSLQEIVNSSDDYYVVPLPELKTPAXT

SEQ ID NO: 10354 - protein, 39 aa, Artificial Sequence
  Non-cyclic GFR-binding peptide
  MOD_RES (2)..(33)..(34): Xaa is C or S
KXSRVIMNSLQEVKPKRGVYYLITLPELAQPVXXPAASA

SEQ ID NO: 10355 - protein, 34 aa, Artificial Sequence
  Non-cyclic GFR-binding peptide
  MOD_RES (2)..(4): Xaa is C or S
SXKXSRVIMEYQKYVKPKRGVIFLISIPSLAQPV

SEQ ID NO: 10356 - protein, 39 aa, Artificial Sequence
  Non-cyclic GFR-binding peptide
  MOD_RES (2)..(4)..(36)..(37): Xaa is C or S
RXGXSEVVMDQYNKLVVNNASDLYLISIASLRTPVXXTP

SEQ ID NO: 10357 - protein, 39 aa, Artificial Sequence
  Non-cyclic GFR-binding peptide
  MOD_RES (1)..(3)..(37)..(38): Xaa is C or S
  MOD_RES (15)..(16)..(17)..(18)..(19): Xaa is A or G
  MOD_RES (20)..(21)..(22)..(23): Xaa is A or G or absent
XGXARVVMNNSLQEXXXXXXXXXYYVVPLPELQTPAXXP

SEQ ID NO: 10358 - protein, 36 aa, Artificial Sequence
  Non-cyclic GFR-binding peptide
  MOD_RES (1)..(3)..(34)..(35): Xaa is C or S
XKXSRVIMNSLQEVKPKRGVYYLITLPELAQPVXXP

SEQ ID NO: 10359 - protein, 34 aa, Artificial Sequence
  Non-cyclic GFR-binding peptide
  MOD_RES (2)..(2): Xaa is C or S
  MOD_RES (13)..(14)..(15)..(16)..(17): Xaa is A or G
  MOD_RES (18)..(19)..(20)..(21): Xaa is A or G or absent
KXSKVIMNSLQEXXXXXXXXXYYVIPLPELDQSV

SEQ ID NO: 10360 - protein, 38 aa, Artificial Sequence
  Non-cyclic GFR-binding peptide
  MOD_RES (1)..(33)..(34): Xaa is C or S
XARVVMNNSLQEIVNSSDDYYVVPLPELQTPAXXPKPV

SEQ ID NO: 10361 - protein, 38 aa, Artificial Sequence
  Non-cyclic GFR-binding peptide
  MOD_RES (2)..(4)..(37)..(38): Xaa is C or S
  MOD_RES (15)..(16)..(17)..(18)..(19): Xaa is A or G
  MOD_RES (20)..(21)..(22)..(23): Xaa is A or G or absent
SXKXSRVIMNSLQEXXXXXXXXXYYLITLPELAQPVXX

SEQ ID NO: 10362 - protein, 37 aa, Artificial Sequence
  Non-cyclic GFR-binding peptide
  MOD_RES (1)..(33)..(34): Xaa is C or S
XSEVVMDNSLQEVVNNASDYYLITLPELRTPVXXTPP

SEQ ID NO: 10363 - protein, 35 aa, Artificial Sequence
  Non-cyclic GFR-binding peptide
  MOD_RES (1)..(32)..(33): Xaa is C or S
XSRVIMNSLQEVKPKRGVYYLITLPELAQPVXXPA

SEQ ID NO: 10364 - protein, 35 aa, Artificial Sequence
  Non-cyclic GFR-binding peptide
  MOD_RES (31)..(32): Xaa is C or S
EVVMDEYQKYVVKENEDIFLMSIPSLETPVXXAKP

SEQ ID NO: 10365 - protein, 32 aa, Artificial Sequence
  Non-cyclic GFR-binding peptide
  MOD_RES (1)..(32): Xaa is C or S
XSKVVMNSLQEVKPTRGVYYVIPLPELDQPVX

SEQ ID NO: 10366 - protein, 36 aa, Artificial Sequence
  Non-cyclic GFR-binding peptide
  MOD_RES (1)..(3)..(34)..(35): Xaa is C or S
XKXSKVIMNSLQEIKPTKGIYYVIPLPELDQSVXXP

SEQ ID NO: 10367 - protein, 31 aa, Artificial Sequence
  Non-cyclic GFR-binding peptide
  MOD_RES (1)..(1): Xaa is C or S
XSKVIMNSLQEIKPTKGIYYVIPLPELDQSV

SEQ ID NO: 10368 - protein, 37 aa, Artificial Sequence
  Non-cyclic GFR-binding peptide
  MOD_RES (1)..(3)..(35)..(36): Xaa is C or S
XGXARVVMNEYQKYIVNSSDDIFLVSIPSLQTPAXXP

SEQ ID NO: 10369 - protein, 40 aa, Artificial Sequence
  Non-cyclic GFR-binding peptide
  MOD_RES (2)..(4)..(36)..(37): Xaa is C or S
HXGXARVVMNNSLQEIVNSSDDYYVVPLPELQTPAXXPKP

SEQ ID NO: 10370 - protein, 41 aa, Artificial Sequence
  Non-cyclic GFR-binding peptide
  MOD_RES (2)..(4)..(36)..(37): Xaa is C or S
HXGXARVVMNNSLQEIVNSSDDYYLVTLPELQTPAXXPKPV

SEQ ID NO: 10371 - protein, 41 aa, Artificial Sequence
  Non-cyclic GFR-binding peptide
  MOD_RES (2)..(4)..(38)..(39): Xaa is C or S
  MOD_RES (16)..(17)..(18)..(19)..(20): Xaa is A or G
  MOD_RES (21)..(22)..(23)..(24): Xaa is A or G or absent
HXGXARVVMNEYQKYXXXXXXXXXIFLVSIPSLQTPAXXPK

SEQ ID NO: 10372 - protein, 41 aa, Artificial Sequence
  Non-cyclic GFR-binding peptide
  MOD_RES (1)..(3)..(36)..(37): Xaa is C or S
  MOD_RES (14)..(15)..(16)..(17)..(18): Xaa is A or G
  MOD_RES (19)..(20)..(21)..(22): Xaa is A or G or absent
XKXSKVVMEYQKYXXXXXXXXXIFLISIPSLDQPVXXPSAS

SEQ ID NO: 10373 - protein, 35 aa, Artificial Sequence
  Non-cyclic GFR-binding peptide
  MOD_RES (32)..(33): Xaa is C or S
SRVVMNEYQKYIVNSSDDIFLVSIPSLKTPAXXPK

SEQ ID NO: 10374 - protein, 37 aa, Artificial Sequence
  Non-cyclic GFR-binding peptide
  MOD_RES (2)..(36)..(37): Xaa is C or S
  MOD_RES (14)..(15)..(16)..(17)..(18): Xaa is A or G
  MOD_RES (19)..(20)..(21)..(22): Xaa is A or G or absent
GXGEVVMDNSLQEXXXXXXXXXYYLMTLPELETPVXX

SEQ ID NO: 10375 - protein, 40 aa, Artificial Sequence
  Non-cyclic GFR-binding peptide
  MOD_RES (2)..(4)..(36)..(37): Xaa is C or S
HXGXSRVVMNNSLQEIVNSSDDYYVVPLPELKTPAXXPKP

SEQ ID NO: 10376 - protein, 38 aa, Artificial Sequence
  Non-cyclic GFR-binding peptide
  MOD_RES (2)..(4)..(36)..(37): Xaa is C or S
RXGXGEVVMDEYQKYVVKENEDIFLMSIPSLETPVXXA

SEQ ID NO: 10377 - protein, 40 aa, Artificial Sequence
  Non-cyclic GFR-binding peptide
  MOD_RES (1)..(34)..(35): Xaa is C or S
  MOD_RES (12)..(13)..(14)..(15)..(16): Xaa is A or G
  MOD_RES (17)..(18)..(19)..(20): Xaa is A or G or absent
XSKVVMNSLQEXXXXXXXXXYYVIPLPELDQPVXXPSASA

SEQ ID NO: 10378 - protein, 39 aa, Artificial Sequence
  Non-cyclic GFR-binding peptide
  MOD_RES (33)..(34): Xaa is C or S
  MOD_RES (11)..(12)..(13)..(14)..(15): Xaa is A or G
  MOD_RES (16)..(17)..(18)..(19): Xaa is A or G or absent
RVVMNEYQKYXXXXXXXXXIFLVSIPSLQTPAXXPKPVT

SEQ ID NO: 10379 - protein, 37 aa, Artificial Sequence
  Non-cyclic GFR-binding peptide
  MOD_RES (1)..(35)..(36): Xaa is C or S
  MOD_RES (13)..(14)..(15)..(16)..(17): Xaa is A or G
  MOD_RES (18)..(19)..(20)..(21): Xaa is A or G or absent
XGEVVMENSLQEXXXXXXXXXYYLMTLPELETPVXXA

SEQ ID NO: 10380 - protein, 36 aa, Artificial Sequence
  Non-cyclic GFR-binding peptide
  MOD_RES (1)..(33)..(34): Xaa is C or S
XGEVVMEEYQKYVVKDYEDIFLMSIPSLETPVXXAK

SEQ ID NO: 10381 - protein, 37 aa, Artificial Sequence
  Non-cyclic GFR-binding peptide
  MOD_RES (34)..(34): Xaa is C or S
  MOD_RES (12)..(13)..(14)..(15)..(16): Xaa is A or G
  MOD_RES (17)..(18)..(19)..(20): Xaa is A or G or absent
SRVVMNNSLQEXXXXXXXXXYYVVPLPELKTPAXTPK

SEQ ID NO: 10382 - protein, 40 aa, Artificial Sequence
  Non-cyclic GFR-binding peptide
  MOD_RES (2)..(4)..(36)..(37): Xaa is C or S
RXGXGEVVMEEYQKYVVKDYEDIFLMSIPSLETPVXXAKP

SEQ ID NO: 10383 - protein, 35 aa, Artificial Sequence
  Non-cyclic GFR-binding peptide
  MOD_RES (2)..(34)..(35): Xaa is C or S
GXARVVMNNSLQEIVNSSDDYYVVPLPELQTPAXX

SEQ ID NO: 10384 - protein, 39 aa, Artificial Sequence
  Non-cyclic GFR-binding peptide
  MOD_RES (1)..(3)..(35)..(36): Xaa is C or S
XGXGEVVMDEYQKYVVKENEDIFLMSIPSLETPVXXAKP

SEQ ID NO: 10385 - protein, 35 aa, Artificial Sequence
  Non-cyclic GFR-binding peptide
  MOD_RES (33)..(34): Xaa is C or S
  MOD_RES (11)..(12)..(13)..(14)..(15): Xaa is A or G
  MOD_RES (16)..(17)..(18)..(19): Xaa is A or G or absent
EVVMDQYNKLXXXXXXXXXLYLISIASLRTPVXXT

SEQ ID NO: 10386 - protein, 37 aa, Artificial Sequence
  Non-cyclic GFR-binding peptide
  MOD_RES (32)..(33): Xaa is C or S
SEVVMDNSLQEVVNNASDYYVIPLPELRTPVXXTPPT

SEQ ID NO: 10387 - protein, 35 aa, Artificial Sequence
  Non-cyclic GFR-binding peptide
  MOD_RES (34)..(35): Xaa is C or S
  MOD_RES (12)..(13)..(14)..(15)..(16): Xaa is A or G
  MOD_RES (17)..(18)..(19)..(20): Xaa is A or G or absent
GEVVMEEYQKYXXXXXXXXXIFLMSIPSLETPVXX

SEQ ID NO: 10388 - protein, 41 aa, Artificial Sequence
  Non-cyclic GFR-binding peptide
  MOD_RES (2)..(36)..(37): Xaa is C or S
  MOD_RES (14)..(15)..(16)..(17)..(18): Xaa is A or G
  MOD_RES (19)..(20)..(21)..(22): Xaa is A or G or absent
GXSEVVMDNSLQEXXXXXXXXXYYVIPLPELRTPVXXTPPT

SEQ ID NO: 10389 - protein, 37 aa, Artificial Sequence
  Non-cyclic GFR-binding peptide
  MOD_RES (2)..(36)..(37): Xaa is C or S
  MOD_RES (14)..(15)..(16)..(17)..(18): Xaa is A or G
  MOD_RES (19)..(20)..(21)..(22): Xaa is A or G or absent
GXSRVVMNEYQKYXXXXXXXXXIFLVSIPSLKTPAXX

SEQ ID NO: 10390 - protein, 34 aa, Artificial Sequence
  Non-cyclic GFR-binding peptide
  MOD_RES (34)..(34): Xaa is C or S
  MOD_RES (12)..(13)..(14)..(15)..(16): Xaa is A or G
  MOD_RES (17)..(18)..(19)..(20): Xaa is A or G or absent
SRVVMNNSLQEXXXXXXXXXYYLVTLPELKTPAX

SEQ ID NO: 10391 - protein, 32 aa, Artificial Sequence
  Non-cyclic GFR-binding peptide
  MOD_RES (31)..(32): Xaa is C or S
EVVMENSLQEVVKDYEDYYVMPLPELETPVXX

SEQ ID NO: 10392 - protein, 32 aa, Artificial Sequence
  Non-cyclic GFR-binding peptide
  MOD_RES (2)..(2): Xaa is C or S
KXSRVIMNSLQEVKPKRGVYYLITLPELAQPV

SEQ ID NO: 10393 - protein, 36 aa, Artificial Sequence
  Non-cyclic GFR-binding peptide
  MOD_RES (1)..(3)..(34)..(35): Xaa is C or S
XKXSKVVMEYQKYVKPTRGVIFLISIPSLDQPVXXP

SEQ ID NO: 10394 - protein, 37 aa, Artificial Sequence
  Non-cyclic GFR-binding peptide
  MOD_RES (34)..(35): Xaa is C or S
  MOD_RES (12)..(13)..(14)..(15)..(16): Xaa is A or G
  MOD_RES (17)..(18)..(19)..(20): Xaa is A or G or absent
SEVVMDQYNKLXXXXXXXXXLYLISIASLRTPVXXTP

SEQ ID NO: 10395 - protein, 39 aa, Artificial Sequence
  Non-cyclic GFR-binding peptide
  MOD_RES (1)..(33)..(34): Xaa is C or S
XARVVMNNSLQEIVNSSDDYYVVPLPELQTPAXXPKPVT

SEQ ID NO: 10396 - protein, 36 aa, Artificial Sequence
  Non-cyclic GFR-binding peptide
  MOD_RES (2)..(36): Xaa is C or S
  MOD_RES (14)..(15)..(16)..(17)..(18): Xaa is A or G
  MOD_RES (19)..(20)..(21)..(22): Xaa is A or G or absent
GXSEVVMDNSLQEXXXXXXXXXYYLITLPELRTPVX

SEQ ID NO: 10397 - protein, 40 aa, Artificial Sequence
  Non-cyclic GFR-binding peptide
  MOD_RES (2)..(4)..(35)..(36): Xaa is C or S
SXKXSKVIMEYQKYIKPTKGIIFLISIPSLDQSVXXPSAS

SEQ ID NO: 10398 - protein, 39 aa, Artificial Sequence
  Non-cyclic GFR-binding peptide
  MOD_RES (2)..(4)..(35)..(36): Xaa is C or S
SXKXSKVVMEYQKYVKPTRGVIFLISIPSLDQPVXXPSA

SEQ ID NO: 10399 - protein, 36 aa, Artificial Sequence
  Non-cyclic GFR-binding peptide
  MOD_RES (33)..(34): Xaa is C or S
  MOD_RES (11)..(12)..(13)..(14)..(15): Xaa is A or G
  MOD_RES (16)..(17)..(18)..(19): Xaa is A or G or absent
SKVIMEYQKYXXXXXXXXXIFLISIPSLDQSVXXPS

SEQ ID NO: 10400 - protein, 38 aa, Artificial Sequence
  Non-cyclic GFR-binding peptide
  MOD_RES (2)..(4)..(38): Xaa is C or S
  MOD_RES (16)..(17)..(18)..(19)..(20): Xaa is A or G
  MOD_RES (21)..(22)..(23)..(24): Xaa is A or G or absent
HXGXSRVVMNEYQKYXXXXXXXXXIFLVSIPSLKTPAX

SEQ ID NO: 10401 - protein, 35 aa, Artificial Sequence
  Non-cyclic GFR-binding peptide
  MOD_RES (1)..(3): Xaa is C or S
  MOD_RES (14)..(15)..(16)..(17)..(18): Xaa is A or G
  MOD_RES (19)..(20)..(21)..(22): Xaa is A or G or absent
XKXSKVIMEYQKYXXXXXXXXXIFLISIPSLDQSV

SEQ ID NO: 10402 - protein, 30 aa, Artificial Sequence; identical to SEQ ID NO: 2099
  Non-cyclic GFR-binding peptide

SEQ ID NO: 10403 - protein, 38 aa, Artificial Sequence
  Non-cyclic GFR-binding peptide
  MOD_RES (1)..(35)..(36): Xaa is C or S
  MOD_RES (13)..(14)..(15)..(16)..(17): Xaa is A or G
  MOD_RES (18)..(19)..(20)..(21): Xaa is A or G or absent
XGEVVMENSLQEXXXXXXXXXYYVMPLPELETPVXXAK

SEQ ID NO: 10404 - protein, 44 aa, Artificial Sequence
  Non-cyclic GFR-binding peptide
  MOD_RES (2)..(4)..(38)..(39): Xaa is C or S
  MOD_RES (16)..(17)..(18)..(19)..(20): Xaa is A or G
  MOD_RES (21)..(22)..(23)..(24): Xaa is A or G or absent
HXGXARVVMNNSLQEXXXXXXXXXYYVVPLPELQTPAXXPKPVT

SEQ ID NO: 10405 - protein, 36 aa, Artificial Sequence
  Non-cyclic GFR-binding peptide
  MOD_RES (1)..(35)..(36): Xaa is C or S
  MOD_RES (13)..(14)..(15)..(16)..(17): Xaa is A or G
  MOD_RES (18)..(19)..(20)..(21): Xaa is A or G or absent
XSRVVMNNSLQEXXXXXXXXXYYLVTLPELKTPAXX

SEQ ID NO: 10406 - protein, 37 aa, Artificial Sequence
  Non-cyclic GFR-binding peptide
  MOD_RES (31)..(32): Xaa is C or S
EVVMDNSLQEVVNNASDYYLITLPELRTPVXXTPPTS

SEQ ID NO: 10407 - protein, 37 aa, Artificial Sequence
  Non-cyclic GFR-binding peptide
  MOD_RES (2)..(36)..(37): Xaa is C or S
  MOD_RES (14)..(15)..(16)..(17)..(18): Xaa is A or G
  MOD_RES (19)..(20)..(21)..(22): Xaa is A or G or absent
GXARVVMNNSLQEXXXXXXXXXYYLVTLPELQTPAXX

SEQ ID NO: 10408 - protein, 35 aa, Artificial Sequence
  Non-cyclic GFR-binding peptide
  MOD_RES (33)..(34): Xaa is C or S
  MOD_RES (11)..(12)..(13)..(14)..(15): Xaa is A or G
  MOD_RES (16)..(17)..(18)..(19): Xaa is A or G or absent
EVVMENSLQEXXXXXXXXXYYLMTLPELETPVXXA

SEQ ID NO: 10409 - protein, 38 aa, Artificial Sequence
  Non-cyclic GFR-binding peptide
  MOD_RES (2)..(4)..(36)..(37): Xaa is C or S
RXGXSEVVMDNSLQEVVNNASDYYLITLPELRTPVXXT

SEQ ID NO: 10410 - protein, 38 aa, Artificial Sequence
  Non-cyclic GFR-binding peptide
  MOD_RES (1)..(3)..(37)..(38): Xaa is C or S
  MOD_RES (15)..(16)..(17)..(18)..(19): Xaa is A or G
  MOD_RES (20)..(21)..(22)..(23): Xaa is A or G or absent
XGXGEVVMEEYQKYXXXXXXXXXIFLMSIPSLETPVXX

SEQ ID NO: 10411 - protein, 35 aa, Artificial Sequence
  Non-cyclic GFR-binding peptide
  MOD_RES (1)..(33)..(34): Xaa is C or S
XSEVVMDNSLQEVVNNASDYYLITLPELRTPVXXT

SEQ ID NO: 10412 - protein, 34 aa, Artificial Sequence
  Non-cyclic GFR-binding peptide
  MOD_RES (2)..(34): Xaa is C or S
GXSEVVMDQYNKLVVNNASDLYLISIASLRTPVX

SEQ ID NO: 10413 - protein, 41 aa, Artificial Sequence
  Non-cyclic GFR-binding peptide
  MOD_RES (1)..(35)..(36): Xaa is C or S
  MOD_RES (13)..(14)..(15)..(16)..(17): Xaa is A or G
  MOD_RES (18)..(19)..(20)..(21): Xaa is A or G or absent
XSEVVMDNSLQEXXXXXXXXXYYLITLPELRTPVXXTPPTS

SEQ ID NO: 10414 - protein, 34 aa, Artificial Sequence
  Non-cyclic GFR-binding peptide
  MOD_RES (32)..(33): Xaa is C or S
GEVVMDNSLQEVVKENEDYYVMPLPELETPVXXA

SEQ ID NO: 10415 - protein, 40 aa, Artificial Sequence
  Non-cyclic GFR-binding peptide
  MOD_RES (1)..(3)..(36)..(37): Xaa is C or S
  MOD_RES (14)..(15)..(16)..(17)..(18): Xaa is A or G
  MOD_RES (19)..(20)..(21)..(22): Xaa is A or G or absent
XKXSKVVMNSLQEXXXXXXXXXYYVIPLPELDQPVXXPSA

SEQ ID NO: 10416 - protein, 37 aa, Artificial Sequence
  Non-cyclic GFR-binding peptide
  MOD_RES (2)..(4)..(36)..(37): Xaa is C or S
RXGXSEVVMDNSLQEVVNNASDYYVIPLPELRTPVXX

SEQ ID NO: 10417 - protein, 36 aa, Artificial Sequence
  Non-cyclic GFR-binding peptide
  MOD_RES (1)..(35)..(36): Xaa is C or S
  MOD_RES (13)..(14)..(15)..(16)..(17): Xaa is A or G
  MOD_RES (18)..(19)..(20)..(21): Xaa is A or G or absent
XSRVVMNEYQKYXXXXXXXXXIFLVSIPSLKTPAXX

SEQ ID NO: 10418 - protein, 37 aa, Artificial Sequence
  Non-cyclic GFR-binding peptide
  MOD_RES (1)..(35)..(36): Xaa is C or S
  MOD_RES (13)..(14)..(15)..(16)..(17): Xaa is A or G
  MOD_RES (18)..(19)..(20)..(21): Xaa is A or G or absent
XGEVVMDNSLQEXXXXXXXXXYYVMPLPELETPVXXA

SEQ ID NO: 10419 - protein, 37 aa, Artificial Sequence
  Non-cyclic GFR-binding peptide
  MOD_RES (2)..(4): Xaa is C or S
  MOD_RES (16)..(17)..(18)..(19)..(20): Xaa is A or G
  MOD_RES (21)..(22)..(23)..(24): Xaa is A or G or absent
RXGXSEVVMDQYNKLXXXXXXXXXLYLISIASLRTPV

SEQ ID NO: 10420 - protein, 40 aa, Artificial Sequence
  Non-cyclic GFR-binding peptide
  MOD_RES (2)..(36)..(37): Xaa is C or S
  MOD_RES (14)..(15)..(16)..(17)..(18): Xaa is A or G
  MOD_RES (19)..(20)..(21)..(22): Xaa is A or G or absent
GXSEVVMDRYKKLXXXXXXXXXFYLISIANLRTPVXXTPP

SEQ ID NO: 10421 - protein, 30 aa, Artificial Sequence
  Non-cyclic GFR-binding peptide
RVVMNNSLQEIVNSSDDYYVVPLPELQTPA

SEQ ID NO: 10422 - protein, 31 aa, Artificial Sequence
  Non-cyclic GFR-binding peptide
  MOD_RES (1)..(1): Xaa is C or S
XSRVIMNSLQEVKPKRGVYYLITLPELAQPV

SEQ ID NO: 10423 - protein, 35 aa, Artificial Sequence
  Non-cyclic GFR-binding peptide
  MOD_RES (2)..(34)..(35): Xaa is C or S
GXGEVVMDNSLQEVVKENEDYYLMTLPELETPVXX

SEQ ID NO: 10424 - protein, 35 aa, Artificial Sequence
  Non-cyclic GFR-binding peptide
  MOD_RES (2)..(34)..(35): Xaa is C or S
GXSEVVMDRYKKLVVNNASDFYLISIANLRTPVXX

SEQ ID NO: 10425 - protein, 39 aa, Artificial Sequence
  Non-cyclic GFR-binding peptide
  MOD_RES (1)..(33): Xaa is C or S
XSRVVMNNSLQEIVNSSDDYYLVTLPELKTPAXTPKTVH

SEQ ID NO: 10426 - protein, 34 aa, Artificial Sequence
  Non-cyclic GFR-binding peptide
  MOD_RES (2)..(33)..(34): Xaa is C or S
KXSKVIMEYQKYIKPTKGIIFLISIPSLDQSVXX

SEQ ID NO: 10427 - protein, 33 aa, Artificial Sequence
  Non-cyclic GFR-binding peptide
  MOD_RES (33)..(33): Xaa is C or S
  MOD_RES (11)..(12)..(13)..(14)..(15): Xaa is A or G
  MOD_RES (16)..(17)..(18)..(19): Xaa is A or G or absent
RVVMNEYQKYXXXXXXXXXIFLVSIPSLKTPAX

SEQ ID NO: 10428 - protein, 32 aa, Artificial Sequence
  Non-cyclic GFR-binding peptide
  MOD_RES (1)..(1): Xaa is C or S
XGEVVMENSLQEVVKDYEDYYVMPLPELETPV

SEQ ID NO: 10429 - protein, 38 aa, Artificial Sequence
  Non-cyclic GFR-binding peptide
  MOD_RES (1)..(34)..(35): Xaa is C or S
  MOD_RES (12)..(13)..(14)..(15)..(16): Xaa is A or G
  MOD_RES (17)..(18)..(19)..(20): Xaa is A or G or absent
XSKVVMNSLQEXXXXXXXXXYYVIPLPELDQPVXXPSA

SEQ ID NO: 10430 - protein, 34 aa, Artificial Sequence
  Non-cyclic GFR-binding peptide
  MOD_RES (1)..(33)..(34): Xaa is C or S
XARVVMNEYQKYIVNSSDDIFLVSIPSLQTPAXX

SEQ ID NO: 10431 - protein, 41 aa, Artificial Sequence
  Non-cyclic GFR-binding peptide
  MOD_RES (2)..(36): Xaa is C or S
  MOD_RES (14)..(15)..(16)..(17)..(18): Xaa is A or G
  MOD_RES (19)..(20)..(21)..(22): Xaa is A or G or absent
GXSRVVMNNSLQEXXXXXXXXXYYLVTLPELKTPAXTPKTV

SEQ ID NO: 10432 - protein, 36 aa, Artificial Sequence
  Non-cyclic GFR-binding peptide
  MOD_RES (34)..(35): Xaa is C or S
  MOD_RES (12)..(13)..(14)..(15)..(16): Xaa is A or G
  MOD_RES (17)..(18)..(19)..(20): Xaa is A or G or absent
GEVVMDNSLQEXXXXXXXXXYYVMPLPELETPVXXA

SEQ ID NO: 10433 - protein, 37 aa, Artificial Sequence
  Non-cyclic GFR-binding peptide
  MOD_RES (1)..(3)..(35)..(36): Xaa is C or S
XGXSRVVMNNSLQEIVNSSDDYYVVPLPELKTPAXXP

SEQ ID NO: 10434 - protein, 34 aa, Artificial Sequence
  Non-cyclic GFR-binding peptide
  MOD_RES (1)..(34): Xaa is C or S
  MOD_RES (12)..(13)..(14)..(15)..(16): Xaa is A or G
  MOD_RES (17)..(18)..(19)..(20): Xaa is A or G or absent
XSRVIMNSLQEXXXXXXXXXYYLITLPELAQPVX

SEQ ID NO: 10435 - protein, 34 aa, Artificial Sequence
  Non-cyclic GFR-binding peptide
  MOD_RES (33)..(34): Xaa is C or S
  MOD_RES (11)..(12)..(13)..(14)..(15): Xaa is A or G
  MOD_RES (16)..(17)..(18)..(19): Xaa is A or G or absent
RVVMNNSLQEXXXXXXXXXYYLVTLPELQTPAXX

SEQ ID NO: 10436 - protein, 43 aa, Artificial Sequence
  Non-cyclic GFR-binding peptide
  MOD_RES (1)..(3)..(37)..(38): Xaa is C or S
  MOD_RES (15)..(16)..(17)..(18)..(19): Xaa is A or G
  MOD_RES (20)..(21)..(22)..(23): Xaa is A or G or absent
XGXSEVVMDQYNKLXXXXXXXXXLYLISIASLRTPVXXTPPTS

SEQ ID NO: 10437 - protein, 34 aa, Artificial Sequence
  Non-cyclic GFR-binding peptide
  MOD_RES (1)..(33): Xaa is C or S
XSRVVMNEYQKYIVNSSDDIFLVSIPSLKTPAXT

SEQ ID NO: 10438 - protein, 36 aa, Artificial Sequence
  Non-cyclic GFR-binding peptide
  MOD_RES (2)..(36): Xaa is C or S
  MOD_RES (14)..(15)..(16)..(17)..(18): Xaa is A or G
  MOD_RES (19)..(20)..(21)..(22): Xaa is A or G or absent
GXGEVVMEEYQKYXXXXXXXXXIFLMSIPSLETPVX

SEQ ID NO: 10439 - protein, 37 aa, Artificial Sequence
  Non-cyclic GFR-binding peptide
  MOD_RES (1)..(35)..(36): Xaa is C or S
  MOD_RES (13)..(14)..(15)..(16)..(17): Xaa is A or G
  MOD_RES (18)..(19)..(20)..(21): Xaa is A or G or absent
XGEVVMDEYQKYXXXXXXXXXIFLMSIPSLETPVXXA

SEQ ID NO: 10440 - protein, 37 aa, Artificial Sequence
  Non-cyclic GFR-binding peptide
  MOD_RES (34)..(35): Xaa is C or S
  MOD_RES (12)..(13)..(14)..(15)..(16): Xaa is A or G
  MOD_RES (17)..(18)..(19)..(20): Xaa is A or G or absent
GEVVMENSLQEXXXXXXXXXYYVMPLPELETPVXXAK

SEQ ID NO: 10441 - protein, 38 aa, Artificial Sequence
  Non-cyclic GFR-binding peptide
  MOD_RES (1)..(3)..(37)..(38): Xaa is C or S
  MOD_RES (15)..(16)..(17)..(18)..(19): Xaa is A or G
  MOD_RES (20)..(21)..(22)..(23): Xaa is A or G or absent
XGXARVVMNEYQKYXXXXXXXXXIFLVSIPSLQTPAXX

SEQ ID NO: 10442 - protein, 39 aa, Artificial Sequence
  Non-cyclic GFR-binding peptide
  MOD_RES (1)..(35)..(36): Xaa is C or S
  MOD_RES (13)..(14)..(15)..(16)..(17): Xaa is A or G
  MOD_RES (18)..(19)..(20)..(21): Xaa is A or G or absent
XSEVVMDQYNKLXXXXXXXXXLYLISIASLRTPVXXTPP

SEQ ID NO: 10443 - protein, 36 aa, Artificial Sequence
  Non-cyclic GFR-binding peptide
  MOD_RES (1)..(3): Xaa is C or S
  MOD_RES (15)..(16)..(17)..(18)..(19): Xaa is A or G
  MOD_RES (20)..(21)..(22)..(23): Xaa is A or G or absent
XGXSEVVMDNSLQEXXXXXXXXXYYLITLPELRTPV

SEQ ID NO: 10444 - protein, 32 aa, Artificial Sequence
  Non-cyclic GFR-binding peptide
  MOD_RES (31)..(32): Xaa is C or S
EVVMDNSLQEVVNNASDYYLITLPELRTPVXX

SEQ ID NO: 10445 - protein, 34 aa, Artificial Sequence
  Non-cyclic GFR-binding peptide
  MOD_RES (1)..(1): Xaa is C or S
  MOD_RES (13)..(14)..(15)..(16)..(17): Xaa is A or G
  MOD_RES (18)..(19)..(20)..(21): Xaa is A or G or absent
XSEVVMDQYNKLXXXXXXXXXLYLISIASLRTPV

SEQ ID NO: 10446 - protein, 41 aa, Artificial Sequence
  Non-cyclic GFR-binding peptide
  MOD_RES (2)..(36)..(37): Xaa is C or S
  MOD_RES (14)..(15)..(16)..(17)..(18): Xaa is A or G
  MOD_RES (19)..(20)..(21)..(22): Xaa is A or G or absent
GXGEVVMDNSLQEXXXXXXXXXYYLMTLPELETPVXXAKPI

SEQ ID NO: 10447 - protein, 39 aa, Artificial Sequence
  Non-cyclic GFR-binding peptide
  MOD_RES (2)..(36)..(37): Xaa is C or S
  MOD_RES (14)..(15)..(16)..(17)..(18): Xaa is A or G
  MOD_RES (19)..(20)..(21)..(22): Xaa is A or G or absent
GXSEVVMDRYKKLXXXXXXXXXFYLISIANLRTPVXXTP

SEQ ID NO: 10448 - protein, 38 aa, Artificial Sequence
  Non-cyclic GFR-binding peptide
  MOD_RES (2)..(4)..(38): Xaa is C or S
  MOD_RES (16)..(17)..(18)..(19)..(20): Xaa is A or G
  MOD_RES (21)..(22)..(23)..(24): Xaa is A or G or absent
RXGXSEVVMDNSLQEXXXXXXXXXYYVIPLPELRTPVX

SEQ ID NO: 10449 - protein, 38 aa, Artificial Sequence
  Non-cyclic GFR-binding peptide
  MOD_RES (1)..(3)..(35)..(36): Xaa is C or S
XGXGEVVMDNSLQEVVKENEDYYLMTLPELETPVXXAK

SEQ ID NO: 10450 - protein, 39 aa, Artificial Sequence
  Non-cyclic GFR-binding peptide
  MOD_RES (1)..(3)..(35)..(36): Xaa is C or S
XGXSEVVMDRYKKLVVNNASDFYLISIANLRTPVXXTPP

SEQ ID NO: 10451 - protein, 32 aa, Artificial Sequence
  Non-cyclic GFR-binding peptide
  MOD_RES (32)..(32): Xaa is C or S
SRVVMNNSLQEIVNSSDDYYLVTLPELKTPAX

SEQ ID NO: 10452 - protein, 40 aa, Artificial Sequence
  Non-cyclic GFR-binding peptide
  MOD_RES (2)..(34)..(35): Xaa is C or S
GXSRVVMNEYQKYIVNSSDDIFLVSIPSLKTPAXXPKPVY

SEQ ID NO: 10453 - protein, 41 aa, Artificial Sequence
  Non-cyclic GFR-binding peptide
  MOD_RES (2)..(4)..(38)..(39): Xaa is C or S
  MOD_RES (16)..(17)..(18)..(19)..(20): Xaa is A or G
  MOD_RES (21)..(22)..(23)..(24): Xaa is A or G or absent
RXGXGEVVMENSLQEXXXXXXXXXYYLMTLPELETPVXXAK

SEQ ID NO: 10454 - protein, 36 aa, Artificial Sequence
  Non-cyclic GFR-binding peptide
  MOD_RES (1)..(34)..(35): Xaa is C or S
  MOD_RES (12)..(13)..(14)..(15)..(16): Xaa is A or G
  MOD_RES (17)..(18)..(19)..(20): Xaa is A or G or absent
XSKVIMNSLQEXXXXXXXXXYYVIPLPELDQSVXXP

SEQ ID NO: 10455 - protein, 34 aa, Artificial Sequence
  Non-cyclic GFR-binding peptide
  MOD_RES (1)..(1): Xaa is C or S
  MOD_RES (13)..(14)..(15)..(16)..(17): Xaa is A or G
  MOD_RES (18)..(19)..(20)..(21): Xaa is A or G or absent
XSRVVMNNSLQEXXXXXXXXXYYVVPLPELKTPA

SEQ ID NO: 10456 - protein, 34 aa, Artificial Sequence
  Non-cyclic GFR-binding peptide
  MOD_RES (33)..(34): Xaa is C or S
  MOD_RES (11)..(12)..(13)..(14)..(15): Xaa is A or G
  MOD_RES (16)..(17)..(18)..(19): Xaa is A or G or absent
EVVMDNSLQEXXXXXXXXXYYVIPLPELRTPVXX

SEQ ID NO: 10457 - protein, 33 aa, Artificial Sequence
  Non-cyclic GFR-binding peptide
  MOD_RES (31)..(32): Xaa is C or S
SKVVMNSLQEVKPTRGVYYVIPLPELDQPVXXP

SEQ ID NO: 10458 - protein, 37 aa, Artificial Sequence
  Non-cyclic GFR-binding peptide
  MOD_RES (1)..(35)..(36): Xaa is C or S
  MOD_RES (13)..(14)..(15)..(16)..(17): Xaa is A or G
  MOD_RES (18)..(19)..(20)..(21): Xaa is A or G or absent
XSRVVMNNSLQEXXXXXXXXXYYVVPLPELKTPAXXP

SEQ ID NO: 10459 - protein, 37 aa, Artificial Sequence
  Non-cyclic GFR-binding peptide
  MOD_RES (1)..(3)..(35)..(36): Xaa is C or S
XGXARVVMNNSLQEIVNSSDDYYVVPLPELQTPAXXP

SEQ ID NO: 10460 - protein, 39 aa, Artificial Sequence
  Non-cyclic GFR-binding peptide
  MOD_RES (2)..(34)..(35): Xaa is C or S
GXSEVVMDNSLQEVVNNASDYYLITLPELRTPVXXTPPT

SEQ ID NO: 10461 - protein, 37 aa, Artificial Sequence
  Non-cyclic GFR-binding peptide
  MOD_RES (2)..(35)..(36): Xaa is C or S
  MOD_RES (13)..(14)..(15)..(16)..(17): Xaa is A or G
  MOD_RES (18)..(19)..(20)..(21): Xaa is A or G or absent
KXSKVVMNSLQEXXXXXXXXXYYVIPLPELDQPVXXP

SEQ ID NO: 10462 - protein, 38 aa, Artificial Sequence
  Non-cyclic GFR-binding peptide
  MOD_RES (2)..(4)..(36)..(37): Xaa is C or S
RXGXGEVVMDNSLQEVVKENEDYYLMTLPELETPVXXA

SEQ ID NO: 10463 - protein, 35 aa, Artificial Sequence
  Non-cyclic GFR-binding peptide
  MOD_RES (2)..(2): Xaa is C or S
  MOD_RES (14)..(15)..(16)..(17)..(18): Xaa is A or G
  MOD_RES (19)..(20)..(21)..(22): Xaa is A or G or absent
GXGEVVMENSLQEXXXXXXXXXYYLMTLPELETPV

SEQ ID NO: 10464 - protein, 34 aa, Artificial Sequence
  Non-cyclic GFR-binding peptide
  MOD_RES (1)..(1): Xaa is C or S
  MOD_RES (13)..(14)..(15)..(16)..(17): Xaa is A or G
  MOD_RES (18)..(19)..(20)..(21): Xaa is A or G or absent
XSRVVMNEYQKYXXXXXXXXXIFLVSIPSLKTPA

SEQ ID NO: 10465 - protein, 39 aa, Artificial Sequence
  Non-cyclic GFR-binding peptide
  MOD_RES (1)..(34)..(35): Xaa is C or S
  MOD_RES (12)..(13)..(14)..(15)..(16): Xaa is A or G
  MOD_RES (17)..(18)..(19)..(20): Xaa is A or G or absent
XSKVIMEYQKYXXXXXXXXXIFLISIPSLDQSVXXPSAS

SEQ ID NO: 10466 - protein, 40 aa, Artificial Sequence
  Non-cyclic GFR-binding peptide
  MOD_RES (2)..(4)..(38)..(39): Xaa is C or S
  MOD_RES (16)..(17)..(18)..(19)..(20): Xaa is A or G
  MOD_RES (21)..(22)..(23)..(24): Xaa is A or G or absent
HXGXSRVVMNNSLQEXXXXXXXXXYYVVPLPELKTPAXXP

SEQ ID NO: 10467 - protein, 37 aa, Artificial Sequence
  Non-cyclic GFR-binding peptide
  MOD_RES (1)..(3)..(37): Xaa is C or S
  MOD_RES (15)..(16)..(17)..(18)..(19): Xaa is A or G
  MOD_RES (20)..(21)..(22)..(23): Xaa is A or G or absent
XGXGEVVMEEYQKYXXXXXXXXXIFLMSIPSLETPVX

SEQ ID NO: 10468 - protein, 38 aa, Artificial Sequence
  Non-cyclic GFR-binding peptide
  MOD_RES (2)..(34): Xaa is C or S
GXSRVVMNNSLQEIVNSSDDYYVVPLPELKTPAXTPKT

SEQ ID NO: 10469 - protein, 33 aa, Artificial Sequence
  Non-cyclic GFR-binding peptide
  MOD_RES (33)..(33): Xaa is C or S
  MOD_RES (11)..(12)..(13)..(14)..(15): Xaa is A or G
  MOD_RES (16)..(17)..(18)..(19): Xaa is A or G or absent
RVVMNEYQKYXXXXXXXXXIFLVSIPSLQTPAX

SEQ ID NO: 10470 - protein, 33 aa, Artificial Sequence
  Non-cyclic GFR-binding peptide
  MOD_RES (2)..(2): Xaa is C or S
GXGEVVMEEYQKYVVKDYEDIFLMSIPSLETPV

SEQ ID NO: 10471 - protein, 32 aa, Artificial Sequence
  Non-cyclic GFR-binding peptide
  MOD_RES (1)..(1): Xaa is C or S
XARVVMNEYQKYIVNSSDDIFLVSIPSLQTPA

SEQ ID NO: 10472 - protein, 38 aa, Artificial Sequence
  Non-cyclic GFR-binding peptide
  MOD_RES (33)..(34): Xaa is C or S
  MOD_RES (11)..(12)..(13)..(14)..(15): Xaa is A or G
  MOD_RES (16)..(17)..(18)..(19): Xaa is A or G or absent
RVVMNEYQKYXXXXXXXXXIFLVSIPSLQTPAXXPKPV

SEQ ID NO: 10473 - protein, 38 aa, Artificial Sequence
  Non-cyclic GFR-binding peptide
  MOD_RES (2)..(34)..(35): Xaa is C or S
GXGEVVMDNSLQEVVKENEDYYVMPLPELETPVXXAKP

SEQ ID NO: 10474 - protein, 38 aa, Artificial Sequence
  Non-cyclic GFR-binding peptide
  MOD_RES (2)..(36): Xaa is C or S
  MOD_RES (14)..(15)..(16)..(17)..(18): Xaa is A or G
  MOD_RES (19)..(20)..(21)..(22): Xaa is A or G or absent
GXSRVVMNNSLQEXXXXXXXXXYYLVTLPELKTPAXTP

SEQ ID NO: 10475 - protein, 35 aa, Artificial Sequence
  Non-cyclic GFR-binding peptide
  MOD_RES (1)..(33): Xaa is C or S
XSRVVMNNSLQEIVNSSDDYYVVPLPELKTPAXTP

SEQ ID NO: 10476 - protein, 33 aa, Artificial Sequence
  Non-cyclic GFR-binding peptide
  MOD_RES (31)..(32): Xaa is C or S
RVVMNEYQKYIVNSSDDIFLVSIPSLKTPAXXP

SEQ ID NO: 10477 - protein, 32 aa, Artificial Sequence
  Non-cyclic GFR-binding peptide
  MOD_RES (11)..(12)..(13)..(14)..(15): Xaa is A or G
  MOD_RES (16)..(17)..(18)..(19): Xaa is A or G or absent
EVVMDNSLQEXXXXXXXXXYYLMTLPELETPV

SEQ ID NO: 10478 - protein, 38 aa, Artificial Sequence
  Non-cyclic GFR-binding peptide
  MOD_RES (32)..(32): Xaa is C or S
SRVVMNNSLQEIVNSSDDYYVVPLPELKTPAXTPKTVH

SEQ ID NO: 10479 - protein, 40 aa, Artificial Sequence
  Non-cyclic GFR-binding peptide
  MOD_RES (1)..(3)..(35)..(36): Xaa is C or S
XGXSEVVMDNSLQEVVNNASDYYLITLPELRTPVXXTPPT

SEQ ID NO: 10480 - protein, 35 aa, Artificial Sequence
  Non-cyclic GFR-binding peptide
  MOD_RES (32)..(33): Xaa is C or S
ARVVMNNSLQEIVNSSDDYYLVTLPELQTPAXXPK

SEQ ID NO: 10481 - protein, 35 aa, Artificial Sequence
  Non-cyclic GFR-binding peptide
  MOD_RES (2)..(35): Xaa is C or S
  MOD_RES (13)..(14)..(15)..(16)..(17): Xaa is A or G
  MOD_RES (18)..(19)..(20)..(21): Xaa is A or G or absent
KXSKVVMEYQKYXXXXXXXXXIFLISIPSLDQPVX

SEQ ID NO: 10482 - protein, 35 aa, Artificial Sequence
  Non-cyclic GFR-binding peptide
  MOD_RES (1)..(35): Xaa is C or S
  MOD_RES (13)..(14)..(15)..(16)..(17): Xaa is A or G
  MOD_RES (18)..(19)..(20)..(21): Xaa is A or G or absent
XSRVVMNEYQKYXXXXXXXXXIFLVSIPSLKTPAX

SEQ ID NO: 10483 - protein, 35 aa, Artificial Sequence
  Non-cyclic GFR-binding peptide
  MOD_RES (31)..(32): Xaa is C or S
SRVIMNSLQEVKPKRGVYYLITLPELAQPVXXPAA

SEQ ID NO: 10484 - protein, 35 aa, Artificial Sequence
  Non-cyclic GFR-binding peptide
  MOD_RES (2)..(33)..(34): Xaa is C or S
KXSKVIMNSLQEIKPTKGIYYVIPLPELDQSVXXP

SEQ ID NO: 10485 - protein, 44 aa, Artificial Sequence
  Non-cyclic GFR-binding peptide
  MOD_RES (2)..(4)..(38): Xaa is C or S
  MOD_RES (16)..(17)..(18)..(19)..(20): Xaa is A or G
  MOD_RES (21)..(22)..(23)..(24): Xaa is A or G or absent
HXGXSRVVMNNSLQEXXXXXXXXXYYLVTLPELKTPAXTPKTVH

SEQ ID NO: 10486 - protein, 40 aa, Artificial Sequence
  Non-cyclic GFR-binding peptide
  MOD_RES (2)..(4)..(36)..(37): Xaa is C or S
RXGXSEVVMDRYKKLVVNNASDFYLISIANLRTPVXXTPP

SEQ ID NO: 10487 - protein, 36 aa, Artificial Sequence
  Non-cyclic GFR-binding peptide
  MOD_RES (32)..(33): Xaa is C or S
SEVVMDNSLQEVVNNASDYYLITLPELRTPVXXTPP

SEQ ID NO: 10488 - protein, 42 aa, Artificial Sequence
  Non-cyclic GFR-binding peptide
  MOD_RES (2)..(4)..(38)..(39): Xaa is C or S
  MOD_RES (16)..(17)..(18)..(19)..(20): Xaa is A or G
  MOD_RES (21)..(22)..(23)..(24): Xaa is A or G or absent
RXGXSEVVMDNSLQEXXXXXXXXXYYVIPLPELRTPVXXTPP

SEQ ID NO: 10489 - protein, 36 aa, Artificial Sequence
  Non-cyclic GFR-binding peptide
  MOD_RES (2)..(35)..(36): Xaa is C or S
  MOD_RES (13)..(14)..(15)..(16)..(17): Xaa is A or G
  MOD_RES (18)..(19)..(20)..(21): Xaa is A or G or absent
KXSKVVMEYQKYXXXXXXXXXIFLISIPSLDQPVXX

SEQ ID NO: 10490 - protein, 35 aa, Artificial Sequence
  Non-cyclic GFR-binding peptide
  MOD_RES (2)..(33)..(34): Xaa is C or S
KXSRVIMNSLQEVKPKRGVYYLITLPELAQPVXXP

SEQ ID NO: 10491 - protein, 36 aa, Artificial Sequence
  Non-cyclic GFR-binding peptide
  MOD_RES (32)..(33): Xaa is C or S
GEVVMDEYQKYVVKENEDIFLMSIPSLETPVXXAKP

SEQ ID NO: 10492 - protein, 36 aa, Artificial Sequence
  Non-cyclic GFR-binding peptide
  MOD_RES (31)..(31): Xaa is C or S
RVVMNNSLQEIVNSSDDYYLVTLPELKTPAXTPKTV

SEQ ID NO: 10493 - protein, 38 aa, Artificial Sequence
  Non-cyclic GFR-binding peptide
  MOD_RES (1)..(3)..(37)..(38): Xaa is C or S
  MOD_RES (15)..(16)..(17)..(18)..(19): Xaa is A or G
  MOD_RES (20)..(21)..(22)..(23): Xaa is A or G or absent
XGXSEVVMDNSLQEXXXXXXXXXYYVIPLPELRTPVXX

SEQ ID NO: 10494 - protein, 31 aa, Artificial Sequence
  Non-cyclic GFR-binding peptide
  MOD_RES (31)..(31): Xaa is C or S
RVVMNEYQKYIVNSSDDIFLVSIPSLKTPAX

SEQ ID NO: 10495 - protein, 37 aa, Artificial Sequence
  Non-cyclic GFR-binding peptide
  MOD_RES (31)..(32): Xaa is C or S
SKVVMNSLQEVKPTRGVYYVIPLPELDQPVXXPSASA

SEQ ID NO: 10496 - protein, 42 aa, Artificial Sequence
  Non-cyclic GFR-binding peptide
  MOD_RES (2)..(36)..(37): Xaa is C or S
  MOD_RES (14)..(15)..(16)..(17)..(18): Xaa is A or G
  MOD_RES (19)..(20)..(21)..(22): Xaa is A or G or absent
GXARVVMNNSLQEXXXXXXXXXYYLVTLPELQTPAXXPKPVT

SEQ ID NO: 10497 - protein, 34 aa, Artificial Sequence
  Non-cyclic GFR-binding peptide
  MOD_RES (1)..(33)..(34): Xaa is C or S
XSEVVMDRYKKLVVNNASDFYLISIANLRTPVXX

SEQ ID NO: 10498 - protein, 35 aa, Artificial Sequence
  Non-cyclic GFR-binding peptide
  MOD_RES (33)..(34): Xaa is C or S
  MOD_RES (11)..(12)..(13)..(14)..(15): Xaa is A or G
  MOD_RES (16)..(17)..(18)..(19): Xaa is A or G or absent
SKVVMNSLQEXXXXXXXXXYYVIPLPELDQPVXXP

SEQ ID NO: 10499 - protein, 33 aa, Artificial Sequence
  Non-cyclic GFR-binding peptide
  MOD_RES (1)..(33): Xaa is C or S
XGEVVMDEYQKYVVKENEDIFLMSIPSLETPVX

SEQ ID NO: 10500 - protein, 39 aa, Artificial Sequence
  Non-cyclic GFR-binding peptide
  MOD_RES (2)..(36)..(37): Xaa is C or S
  MOD_RES (14)..(15)..(16)..(17)..(18): Xaa is A or G
  MOD_RES (19)..(20)..(21)..(22): Xaa is A or G or absent
GXARVVMNNSLQEXXXXXXXXXYYLVTLPELQTPAXXPK

SEQ ID NO: 10501 - protein, 32 aa, Artificial Sequence
  Non-cyclic GFR-binding peptide
  MOD_RES (1)..(32): Xaa is C or S
XSKVVMEYQKYVKPTRGVIFLISIPSLDQPVX

SEQ ID NO: 10502 - protein, 41 aa, Artificial Sequence
  Non-cyclic GFR-binding peptide
  MOD_RES (1)..(3)..(36)..(37): Xaa is C or S
  MOD_RES (14)..(15)..(16)..(17)..(18): Xaa is A or G
  MOD_RES (19)..(20)..(21)..(22): Xaa is A or G or absent
XKXSRVIMNSLQEXXXXXXXXXYYLITLPELAQPVXXPAAS

SEQ ID NO: 10503 - protein, 35 aa, Artificial Sequence
  Non-cyclic GFR-binding peptide
  MOD_RES (33)..(33): Xaa is C or S
  MOD_RES (11)..(12)..(13)..(14)..(15): Xaa is A or G
  MOD_RES (16)..(17)..(18)..(19): Xaa is A or G or absent
RVVMNNSLQEXXXXXXXXXYYVVPLPELKTPAXTP

SEQ ID NO: 10504 - protein, 40 aa, Artificial Sequence
  Non-cyclic GFR-binding peptide
  MOD_RES (2)..(36)..(37): Xaa is C or S
  MOD_RES (14)..(15)..(16)..(17)..(18): Xaa is A or G
  MOD_RES (19)..(20)..(21)..(22): Xaa is A or G or absent
GXARVVMNNSLQEXXXXXXXXXYYLVTLPELQTPAXXPKP

SEQ ID NO: 10505 - protein, 37 aa, Artificial Sequence
  Non-cyclic GFR-binding peptide
  MOD_RES (1)..(33)..(34): Xaa is C or S
XARVVMNEYQKYIVNSSDDIFLVSIPSLQTPAXXPKP

SEQ ID NO: 10506 - protein, 39 aa, Artificial Sequence
  Non-cyclic GFR-binding peptide
  MOD_RES (2)..(34)..(35): Xaa is C or S
GXGEVVMEEYQKYVVKDYEDIFLMSIPSLETPVXXAKPI

SEQ ID NO: 10507 - protein, 33 aa, Artificial Sequence
  Non-cyclic GFR-binding peptide
  MOD_RES (33)..(33): Xaa is C or S
  MOD_RES (11)..(12)..(13)..(14)..(15): Xaa is A or G
  MOD_RES (16)..(17)..(18)..(19): Xaa is A or G or absent
EVVMDNSLQEXXXXXXXXXYYVMPLPELETPVX

SEQ ID NO: 10508 - protein, 36 aa, Artificial Sequence
  Non-cyclic GFR-binding peptide
  MOD_RES (31)..(32): Xaa is C or S
SKVIMNSLQEIKPTKGIYYVIPLPELDQSVXXPSAS

SEQ ID NO: 10509 - protein, 37 aa, Artificial Sequence
  Non-cyclic GFR-binding peptide
  MOD_RES (31)..(32): Xaa is C or S
EVVMDEYQKYVVKENEDIFLMSIPSLETPVXXAKPIK

SEQ ID NO: 10510 - protein, 39 aa, Artificial Sequence
  Non-cyclic GFR-binding peptide
  MOD_RES (1)..(3)..(37)..(38): Xaa is C or S
  MOD_RES (15)..(16)..(17)..(18)..(19): Xaa is A or G
  MOD_RES (20)..(21)..(22)..(23): Xaa is A or G or absent
XGXSEVVMDNSLQEXXXXXXXXXYYLITLPELRTPVXXT

SEQ ID NO: 10511 - protein, 34 aa, Artificial Sequence
  Non-cyclic GFR-binding peptide
  MOD_RES (2)..(34): Xaa is C or S
GXSRVVMNEYQKYIVNSSDDIFLVSIPSLKTPAX

SEQ ID NO: 10512 - protein, 39 aa, Artificial Sequence
  Non-cyclic GFR-binding peptide
  MOD_RES (1)..(35): Xaa is C or S
  MOD_RES (13)..(14)..(15)..(16)..(17): Xaa is A or G
  MOD_RES (18)..(19)..(20)..(21): Xaa is A or G or absent
XSRVVMNNSLQEXXXXXXXXXYYVVPLPELKTPAXTPKT

SEQ ID NO: 10513 - protein, 36 aa, Artificial Sequence
  Non-cyclic GFR-binding peptide
  MOD_RES (32)..(33): Xaa is C or S
SEVVMDQYNKLVVNNASDLYLISIASLRTPVXXTPP

SEQ ID NO: 10514 - protein, 36 aa, Artificial Sequence
  Non-cyclic GFR-binding peptide
  MOD_RES (32)..(33): Xaa is C or S
GEVVMEEYQKYVVKDYEDIFLMSIPSLETPVXXAKP

SEQ ID NO: 10515 - protein, 42 aa, Artificial Sequence
  Non-cyclic GFR-binding peptide
  MOD_RES (1)..(3)..(36)..(37): Xaa is C or S
  MOD_RES (14)..(15)..(16)..(17)..(18): Xaa is A or G
  MOD_RES (19)..(20)..(21)..(22): Xaa is A or G or absent
XKXSKVVMEYQKYXXXXXXXXXIFLISIPSLDQPVXXPSASA

SEQ ID NO: 10516 - protein, 35 aa, Artificial Sequence
  Non-cyclic GFR-binding peptide
  MOD_RES (2)..(2): Xaa is C or S
  MOD_RES (14)..(15)..(16)..(17)..(18): Xaa is A or G
  MOD_RES (19)..(20)..(21)..(22): Xaa is A or G or absent
GXGEVVMENSLQEXXXXXXXXXYYVMPLPELETPV

SEQ ID NO: 10517 - protein, 37 aa, Artificial Sequence
  Non-cyclic GFR-binding peptide
  MOD_RES (33)..(34): Xaa is C or S
  MOD_RES (11)..(12)..(13)..(14)..(15): Xaa is A or G
  MOD_RES (16)..(17)..(18)..(19): Xaa is A or G or absent
RVVMNEYQKYXXXXXXXXXIFLVSIPSLKTPAXXPKP

SEQ ID NO: 10518 - protein, 36 aa, Artificial Sequence
  Non-cyclic GFR-binding peptide
  MOD_RES (1)..(3): Xaa is C or S
  MOD_RES (15)..(16)..(17)..(18)..(19): Xaa is A or G
  MOD_RES (20)..(21)..(22)..(23): Xaa is A or G or absent
XGXSRVVMNNSLQEXXXXXXXXXYYLVTLPELKTPA

SEQ ID NO: 10519 - protein, 37 aa, Artificial Sequence
  Non-cyclic GFR-binding peptide
  MOD_RES (1)..(3)..(37): Xaa is C or S
  MOD_RES (15)..(16)..(17)..(18)..(19): Xaa is A or G
  MOD_RES (20)..(21)..(22)..(23): Xaa is A or G or absent
XGXSRVVMNEYQKYXXXXXXXXXIFLVSIPSLKTPAX

SEQ ID NO: 10520 - protein, 31 aa, Artificial Sequence
  Non-cyclic GFR-binding peptide
  MOD_RES (31)..(31): Xaa is C or S
EVVMDNSLQEVVNNASDYYLITLPELRTPVX

SEQ ID NO: 10521 - protein, 34 aa, Artificial Sequence
  Non-cyclic GFR-binding peptide
  MOD_RES (31)..(32): Xaa is C or S
RVVMNEYQKYIVNSSDDIFLVSIPSLQTPAXXPK

SEQ ID NO: 10522 - protein, 40 aa, Artificial Sequence
  Non-cyclic GFR-binding peptide
  MOD_RES (1)..(3)..(35)..(36): Xaa is C or S
XGXSEVVMDQYNKLVVNNASDLYLISIASLRTPVXXTPPT

SEQ ID NO: 10523 - protein, 34 aa, Artificial Sequence
  Non-cyclic GFR-binding peptide
  MOD_RES (2)..(34): Xaa is C or S
GXARVVMNEYQKYIVNSSDDIFLVSIPSLQTPAX

SEQ ID NO: 10524 - protein, 33 aa, Artificial Sequence
  Non-cyclic GFR-binding peptide
  MOD_RES (1)..(33): Xaa is C or S
XSRVVMNNSLQEIVNSSDDYYLVTLPELKTPAX

SEQ ID NO: 10525 - protein, 43 aa, Artificial Sequence
  Non-cyclic GFR-binding peptide
  MOD_RES (2)..(4)..(38)..(39): Xaa is C or S
  MOD_RES (16)..(17)..(18)..(19)..(20): Xaa is A or G
  MOD_RES (21)..(22)..(23)..(24): Xaa is A or G or absent
RXGXSEVVMDQYNKLXXXXXXXXXLYLISIASLRTPVXXTPPT

SEQ ID NO: 10526 - protein, 39 aa, Artificial Sequence
  Non-cyclic GFR-binding peptide
  MOD_RES (2)..(34)..(35): Xaa is C or S
GXSEVVMDRYKKLVVNNASDFYLISIANLRTPVXXTPPT

SEQ ID NO: 10527 - protein, 38 aa, Artificial Sequence
  Non-cyclic GFR-binding peptide
  MOD_RES (2)..(34)..(35): Xaa is C or S
GXSRVVMNNSLQEIVNSSDDYYVVPLPELKTPAXXPKP

SEQ ID NO: 10528 - protein, 43 aa, Artificial Sequence
  Non-cyclic GFR-binding peptide
  MOD_RES (2)..(4)..(38)..(39): Xaa is C or S
  MOD_RES (16)..(17)..(18)..(19)..(20): Xaa is A or G
  MOD_RES (21)..(22)..(23)..(24): Xaa is A or G or absent
HXGXSRVVMNEYQKYXXXXXXXXXIFLVSIPSLKTPAXXPKPV

SEQ ID NO: 10529 - protein, 34 aa, Artificial Sequence
  Non-cyclic GFR-binding peptide
  MOD_RES (2)..(2): Xaa is C or S
  MOD_RES (13)..(14)..(15)..(16)..(17): Xaa is A or G
  MOD_RES (18)..(19)..(20)..(21): Xaa is A or G or absent
KXSKVVMNSLQEXXXXXXXXXYYVIPLPELDQPV

SEQ ID NO: 10530 - protein, 35 aa, Artificial Sequence
  Non-cyclic GFR-binding peptide
  MOD_RES (33)..(33): Xaa is C or S
  MOD_RES (11)..(12)..(13)..(14)..(15): Xaa is A or G
  MOD_RES (16)..(17)..(18)..(19): Xaa is A or G or absent
RVVMNNSLQEXXXXXXXXXYYLVTLPELKTPAXTP

SEQ ID NO: 10531 - protein, 44 aa, Artificial Sequence
  Non-cyclic GFR-binding peptide
  MOD_RES (2)..(4)..(38)..(39): Xaa is C or S
  MOD_RES (16)..(17)..(18)..(19)..(20): Xaa is A or G
  MOD_RES (21)..(22)..(23)..(24): Xaa is A or G or absent
HXGXSRVVMNNSLQEXXXXXXXXXYYVVPLPELKTPAXXPKPVY

SEQ ID NO: 10532 - protein, 31 aa, Artificial Sequence
  Non-cyclic GFR-binding peptide
  MOD_RES (1)..(1): Xaa is C or S
XSKVVMEYQKYVKPTRGVIFLISIPSLDQPV

SEQ ID NO: 10533 - protein, 39 aa, Artificial Sequence
  Non-cyclic GFR-binding peptide
  MOD_RES (1)..(35)..(36): Xaa is C or S
  MOD_RES (13)..(14)..(15)..(16)..(17): Xaa is A or G
  MOD_RES (18)..(19)..(20)..(21): Xaa is A or G or absent
XARVVMNNSLQEXXXXXXXXXYYLVTLPELQTPAXXPKP

SEQ ID NO: 10534 - protein, 35 aa, Artificial Sequence
  Non-cyclic GFR-binding peptide
  MOD_RES (1)..(3)..(35): Xaa is C or S
XGXARVVMNNSLQEIVNSSDDYYLVTLPELQTPAX

SEQ ID NO: 10535 - protein, 38 aa, Artificial Sequence
  Non-cyclic GFR-binding peptide
  MOD_RES (1)..(3)..(37)..(38): Xaa is C or S
  MOD_RES (15)..(16)..(17)..(18)..(19): Xaa is A or G
  MOD_RES (20)..(21)..(22)..(23): Xaa is A or G or absent
XGXSEVVMDNSLQEXXXXXXXXXYYLITLPELRTPVXX

SEQ ID NO: 10536 - protein, 38 aa, Artificial Sequence
  Non-cyclic GFR-binding peptide
  MOD_RES (1)..(33)..(34): Xaa is C or S
XGEVVMENSLQEVVKDYEDYYLMTLPELETPVXXAKPI

SEQ ID NO: 10537 - protein, 40 aa, Artificial Sequence
  Non-cyclic GFR-binding peptide
  MOD_RES (1)..(35): Xaa is C or S
  MOD_RES (13)..(14)..(15)..(16)..(17): Xaa is A or G
  MOD_RES (18)..(19)..(20)..(21): Xaa is A or G or absent
XSRVVMNNSLQEXXXXXXXXXYYLVTLPELKTPAXTPKTV

SEQ ID NO: 10538 - protein, 37 aa, Artificial Sequence
  Non-cyclic GFR-binding peptide
  MOD_RES (2)..(4)..(36)..(37): Xaa is C or S
RXGXGEVVMDNSLQEVVKENEDYYVMPLPELETPVXX

SEQ ID NO: 10539 - protein, 34 aa, Artificial Sequence
  Non-cyclic GFR-binding peptide
  MOD_RES (2)..(2): Xaa is C or S
  MOD_RES (13)..(14)..(15)..(16)..(17): Xaa is A or G
  MOD_RES (18)..(19)..(20)..(21): Xaa is A or G or absent
KXSKVIMEYQKYXXXXXXXXXIFLISIPSLDQSV

SEQ ID NO: 10540 - protein, 32 aa, Artificial Sequence
  Non-cyclic GFR-binding peptide
  MOD_RES (1)..(32): Xaa is C or S
XSKVIMEYQKYIKPTKGIIFLISIPSLDQSVX

SEQ ID NO: 10541 - protein, 39 aa, Artificial Sequence
  Non-cyclic GFR-binding peptide
  MOD_RES (2)..(36)..(37): Xaa is C or S
  MOD_RES (14)..(15)..(16)..(17)..(18): Xaa is A or G
  MOD_RES (19)..(20)..(21)..(22): Xaa is A or G or absent
GXARVVMNNSLQEXXXXXXXXXYYVVPLPELQTPAXXPK

SEQ ID NO: 10542 - protein, 42 aa, Artificial Sequence
  Non-cyclic GFR-binding peptide
  MOD_RES (2)..(4)..(38)..(39): Xaa is C or S
  MOD_RES (16)..(17)..(18)..(19)..(20): Xaa is A or G
  MOD_RES (21)..(22)..(23)..(24): Xaa is A or G or absent
HXGXSRVVMNEYQKYXXXXXXXXXIFLVSIPSLKTPAXXPKP

SEQ ID NO: 10543 - protein, 39 aa, Artificial Sequence
  Non-cyclic GFR-binding peptide
  MOD_RES (1)..(33)..(34): Xaa is C or S
XSEVVMDQYNKLVVNNASDLYLISIASLRTPVXXTPPTS

SEQ ID NO: 10544 - protein, 36 aa, Artificial Sequence
  Non-cyclic GFR-binding peptide
  MOD_RES (1)..(3)..(36): Xaa is C or S
  MOD_RES (14)..(15)..(16)..(17)..(18): Xaa is A or G
  MOD_RES (19)..(20)..(21)..(22): Xaa is A or G or absent
XKXSKVIMEYQKYXXXXXXXXXIFLISIPSLDQSVX

SEQ ID NO: 10545 - protein, 35 aa, Artificial Sequence
  Non-cyclic GFR-binding peptide
  MOD_RES (1)..(33)..(34): Xaa is C or S
XGEVVMENSLQEVVKDYEDYYLMTLPELETPVXXA

SEQ ID NO: 10546 - protein, 34 aa, Artificial Sequence
  Non-cyclic GFR-binding peptide
  MOD_RES (1)..(33)..(34): Xaa is C or S
XGEVVMEEYQKYVVKDYEDIFLMSIPSLETPVXX

SEQ ID NO: 10547 - protein, 40 aa, Artificial Sequence
  Non-cyclic GFR-binding peptide
  MOD_RES (2)..(4)..(38)..(39): Xaa is C or S
  MOD_RES (16)..(17)..(18)..(19)..(20): Xaa is A or G
  MOD_RES (21)..(22)..(23)..(24): Xaa is A or G or absent
HXGXSRVVMNEYQKYXXXXXXXXXIFLVSIPSLKTPAXXP

SEQ ID NO: 10548 - protein, 41 aa, Artificial Sequence
  Non-cyclic GFR-binding peptide
  MOD_RES (2)..(4)..(35)..(36): Xaa is C or S
SXKXSKVVMEYQKYVKPTRGVIFLISIPSLDQPVXXPSASA

SEQ ID NO: 10549 - protein, 41 aa, Artificial Sequence
  Non-cyclic GFR-binding peptide
  MOD_RES (1)..(3)..(37): Xaa is C or S
  MOD_RES (15)..(16)..(17)..(18)..(19): Xaa is A or G
  MOD_RES (20)..(21)..(22)..(23): Xaa is A or G or absent
XGXSRVVMNEYQKYXXXXXXXXXIFLVSIPSLKTPAXTPKT

SEQ ID NO: 10550 - protein, 31 aa, Artificial Sequence
  Non-cyclic GFR-binding peptide
  MOD_RES (31)..(31): Xaa is C or S
EVVMEEYQKYVVKDYEDIFLMSIPSLETPVX

SEQ ID NO: 10551 - protein, 40 aa, Artificial Sequence
  Non-cyclic GFR-binding peptide
  MOD_RES (1)..(3)..(37)..(38): Xaa is C or S
  MOD_RES (15)..(16)..(17)..(18)..(19): Xaa is A or G
  MOD_RES (20)..(21)..(22)..(23): Xaa is A or G or absent
XGXSEVVMDRYKKLXXXXXXXXXFYLISIANLRTPVXXTP

SEQ ID NO: 10552 - protein, 38 aa, Artificial Sequence
  Non-cyclic GFR-binding peptide
  MOD_RES (1)..(33)..(34): Xaa is C or S
XGEVVMDNSLQEVVKENEDYYLMTLPELETPVXXAKPI

SEQ ID NO: 10553 - protein, 38 aa, Artificial Sequence
  Non-cyclic GFR-binding peptide
  MOD_RES (34)..(35): Xaa is C or S
  MOD_RES (12)..(13)..(14)..(15)..(16): Xaa is A or G
  MOD_RES (17)..(18)..(19)..(20): Xaa is A or G or absent
GEVVMENSLQEXXXXXXXXXYYLMTLPELETPVXXAKP

SEQ ID NO: 10554 - protein, 33 aa, Artificial Sequence
  Non-cyclic GFR-binding peptide
  MOD_RES (31)..(32): Xaa is C or S
EVVMDRYKKLVVNNASDFYLISIANLRTPVXXT

SEQ ID NO: 10555 - protein, 35 aa, Artificial Sequence
  Non-cyclic GFR-binding peptide
  MOD_RES (2)..(33)..(34): Xaa is C or S
KXSKVVMEYQKYVKPTRGVIFLISIPSLDQPVXXP

SEQ ID NO: 10556 - protein, 38 aa, Artificial Sequence
  Non-cyclic GFR-binding peptide
  MOD_RES (1)..(3)..(35): Xaa is C or S
XGXSRVVMNNSLQEIVNSSDDYYLVTLPELKTPAXTPK

SEQ ID NO: 10557 - protein, 39 aa, Artificial Sequence
  Non-cyclic GFR-binding peptide
  MOD_RES (34)..(35): Xaa is C or S
  MOD_RES (12)..(13)..(14)..(15)..(16): Xaa is A or G
  MOD_RES (17)..(18)..(19)..(20): Xaa is A or G or absent
GEVVMDNSLQEXXXXXXXXXYYVMPLPELETPVXXAKPI

SEQ ID NO: 10558 - protein, 35 aa, Artificial Sequence
  Non-cyclic GFR-binding peptide
  MOD_RES (32)..(33): Xaa is C or S
GEVVMDNSLQEVVKENEDYYLMTLPELETPVXXAK

SEQ ID NO: 10559 - protein, 36 aa, Artificial Sequence
  Non-cyclic GFR-binding peptide
  MOD_RES (2)..(33)..(34): Xaa is C or S
KXSRVIMNSLQEVKPKRGVYYLITLPELAQPVXXPA

SEQ ID NO: 10560 - protein, 40 aa, Artificial Sequence
  Non-cyclic GFR-binding peptide
  MOD_RES (1)..(35)..(36): Xaa is C or S
  MOD_RES (13)..(14)..(15)..(16)..(17): Xaa is A or G
  MOD_RES (18)..(19)..(20)..(21): Xaa is A or G or absent
XGEVVMENSLQEXXXXXXXXXYYVMPLPELETPVXXAKPI

SEQ ID NO: 10561 - protein, 34 aa, Artificial Sequence
  Non-cyclic GFR-binding peptide
  MOD_RES (33)..(34): Xaa is C or S
  MOD_RES (11)..(12)..(13)..(14)..(15): Xaa is A or G
  MOD_RES (16)..(17)..(18)..(19): Xaa is A or G or absent
RVVMNNSLQEXXXXXXXXXYYVVPLPELQTPAXX

SEQ ID NO: 10562 - protein, 33 aa, Artificial Sequence
  Non-cyclic GFR-binding peptide
  MOD_RES (1)..(33): Xaa is C or S
XGEVVMEEYQKYVVKDYEDIFLMSIPSLETPVX

SEQ ID NO: 10563 - protein, 36 aa, Artificial Sequence
  Non-cyclic GFR-binding peptide
  MOD_RES (1)..(33)..(34): Xaa is C or S
XARVVMNEYQKYIVNSSDDIFLVSIPSLQTPAXXPK

SEQ ID NO: 10564 - protein, 33 aa, Artificial Sequence
  Non-cyclic GFR-binding peptide
  MOD_RES (2)..(33): Xaa is C or S
KXSKVIMEYQKYIKPTKGIIFLISIPSLDQSVX

SEQ ID NO: 10565 - protein, 40 aa, Artificial Sequence
  Non-cyclic GFR-binding peptide
  MOD_RES (2)..(4)..(38)..(39): Xaa is C or S
  MOD_RES (16)..(17)..(18)..(19)..(20): Xaa is A or G
  MOD_RES (21)..(22)..(23)..(24): Xaa is A or G or absent
RXGXGEVVMDEYQKYXXXXXXXXXIFLMSIPSLETPVXXA

SEQ ID NO: 10566 - protein, 34 aa, Artificial Sequence
  Non-cyclic GFR-binding peptide
  MOD_RES (32)..(33): Xaa is C or S
SEVVMDNSLQEVVNNASDYYVIPLPELRTPVXXT

SEQ ID NO: 10567 - protein, 35 aa, Artificial Sequence
  Non-cyclic GFR-binding peptide
  MOD_RES (31)..(32): Xaa is C or S
RVVMNEYQKYIVNSSDDIFLVSIPSLKTPAXXPKP

SEQ ID NO: 10568 - protein, 39 aa, Artificial Sequence
  Non-cyclic GFR-binding peptide
  MOD_RES (1)..(3)..(37)..(38): Xaa is C or S
  MOD_RES (15)..(16)..(17)..(18)..(19): Xaa is A or G
  MOD_RES (20)..(21)..(22)..(23): Xaa is A or G or absent
XGXSRVVMNNSLQEXXXXXXXXXYYVVPLPELKTPAXXP

SEQ ID NO: 10569 - protein, 33 aa, Artificial Sequence
  Non-cyclic GFR-binding peptide
  MOD_RES (12)..(13)..(14)..(15)..(16): Xaa is A or G
  MOD_RES (17)..(18)..(19)..(20): Xaa is A or G or absent
GEVVMEEYQKYXXXXXXXXXIFLMSIPSLETPV

SEQ ID NO: 10570 - protein, 42 aa, Artificial Sequence
  Non-cyclic GFR-binding peptide
  MOD_RES (2)..(4)..(38)..(39): Xaa is C or S
  MOD_RES (16)..(17)..(18)..(19)..(20): Xaa is A or G
  MOD_RES (21)..(22)..(23)..(24): Xaa is A or G or absent
RXGXGEVVMDEYQKYXXXXXXXXXIFLMSIPSLETPVXXAKP

SEQ ID NO: 10571 - protein, 39 aa, Artificial Sequence
  Non-cyclic GFR-binding peptide
  MOD_RES (33)..(34): Xaa is C or S
  MOD_RES (11)..(12)..(13)..(14)..(15): Xaa is A or G
  MOD_RES (16)..(17)..(18)..(19): Xaa is A or G or absent
SRVIMNSLQEXXXXXXXXXYYLITLPELAQPVXXPAASA

SEQ ID NO: 10572 - protein, 41 aa, Artificial Sequence
  Non-cyclic GFR-binding peptide
  MOD_RES (1)..(3)..(35)..(36): Xaa is C or S
XGXGEVVMDEYQKYVVKENEDIFLMSIPSLETPVXXAKPIK

SEQ ID NO: 10573 - protein, 39 aa, Artificial Sequence
  Non-cyclic GFR-binding peptide
  MOD_RES (2)..(4)..(36)..(37): Xaa is C or S
HXGXSRVVMNEYQKYIVNSSDDIFLVSIPSLKTPAXXPK

SEQ ID NO: 10574 - protein, 39 aa, Artificial Sequence
  Non-cyclic GFR-binding peptide
  MOD_RES (1)..(33)..(34): Xaa is C or S
XGEVVMDNSLQEVVKENEDYYLMTLPELETPVXXAKPIK

SEQ ID NO: 10575 - protein, 43 aa, Artificial Sequence
  Non-cyclic GFR-binding peptide
  MOD_RES (1)..(3)..(37)..(38): Xaa is C or S
  MOD_RES (15)..(16)..(17)..(18)..(19): Xaa is A or G
  MOD_RES (20)..(21)..(22)..(23): Xaa is A or G or absent
XGXSRVVMNNSLQEXXXXXXXXXYYVVPLPELKTPAXXPKPVY

SEQ ID NO: 10576 - protein, 34 aa, Artificial Sequence
  Non-cyclic GFR-binding peptide
  MOD_RES (2)..(4): Xaa is C or S
SXKXSKVVMEYQKYVKPTRGVIFLISIPSLDQPV

SEQ ID NO: 10577 - protein, 43 aa, Artificial Sequence
  Non-cyclic GFR-binding peptide
  MOD_RES (2)..(4)..(38)..(39): Xaa is C or S
  MOD_RES (16)..(17)..(18)..(19)..(20): Xaa is A or G
  MOD_RES (21)..(22)..(23)..(24): Xaa is A or G or absent
RXGXSEVVMDNSLQEXXXXXXXXXYYVIPLPELRTPVXXTPPT

SEQ ID NO: 10578 - protein, 33 aa, Artificial Sequence
  Non-cyclic GFR-binding peptide
  MOD_RES (1)..(1): Xaa is C or S
  MOD_RES (12)..(13)..(14)..(15)..(16): Xaa is A or G
  MOD_RES (17)..(18)..(19)..(20): Xaa is A or G or absent
XSKVIMEYQKYXXXXXXXXXIFLISIPSLDQSV

SEQ ID NO: 10579 - protein, 40 aa, Artificial Sequence
  Non-cyclic GFR-binding peptide
  MOD_RES (2)..(4)..(36)..(37): Xaa is C or S
HXGXSRVVMNNSLQEIVNSSDDYYLVTLPELKTPAXXPKP

SEQ ID NO: 10580 - protein, 37 aa, Artificial Sequence
  Non-cyclic GFR-binding peptide
  MOD_RES (1)..(33)..(34): Xaa is C or S
XGEVVMEEYQKYVVKDYEDIFLMSIPSLETPVXXAKP

SEQ ID NO: 10581 - protein, 35 aa, Artificial Sequence
  Non-cyclic GFR-binding peptide
  MOD_RES (2)..(35): Xaa is C or S
  MOD_RES (13)..(14)..(15)..(16)..(17): Xaa is A or G
  MOD_RES (18)..(19)..(20)..(21): Xaa is A or G or absent
KXSKVIMNSLQEXXXXXXXXXYYVIPLPELDQSVX

SEQ ID NO: 10582 - protein, 34 aa, Artificial Sequence
  Non-cyclic GFR-binding peptide
  MOD_RES (1)..(33)..(34): Xaa is C or S
XSRVVMNEYQKYIVNSSDDIFLVSIPSLKTPAXX

SEQ ID NO: 10583 - protein, 40 aa, Artificial Sequence
  Non-cyclic GFR-binding peptide
  MOD_RES (2)..(4)..(38)..(39): Xaa is C or S
  MOD_RES (16)..(17)..(18)..(19)..(20): Xaa is A or G
  MOD_RES (21)..(22)..(23)..(24): Xaa is A or G or absent
HXGXSRVVMNNSLQEXXXXXXXXXYYLVTLPELKTPAXXP

SEQ ID NO: 10584 - protein, 40 aa, Artificial Sequence
  Non-cyclic GFR-binding peptide
  MOD_RES (1)..(3)..(37): Xaa is C or S
  MOD_RES (15)..(16)..(17)..(18)..(19): Xaa is A or G
  MOD_RES (20)..(21)..(22)..(23): Xaa is A or G or absent
XGXSRVVMNNSLQEXXXXXXXXXYYLVTLPELKTPAXTPK

SEQ ID NO: 10585 - protein, 34 aa, Artificial Sequence
  Non-cyclic GFR-binding peptide
  MOD_RES (33)..(34): Xaa is C or S
  MOD_RES (11)..(12)..(13)..(14)..(15): Xaa is A or G
  MOD_RES (16)..(17)..(18)..(19): Xaa is A or G or absent
RVVMNNSLQEXXXXXXXXXYYVVPLPELKTPAXX

SEQ ID NO: 10586 - protein, 37 aa, Artificial Sequence
  Non-cyclic GFR-binding peptide
  MOD_RES (1)..(35)..(36): Xaa is C or S
  MOD_RES (13)..(14)..(15)..(16)..(17): Xaa is A or G
  MOD_RES (18)..(19)..(20)..(21): Xaa is A or G or absent
XSRVVMNNSLQEXXXXXXXXXYYLVTLPELKTPAXXP

SEQ ID NO: 10587 - protein, 36 aa, Artificial Sequence
  Non-cyclic GFR-binding peptide
  MOD_RES (1)..(32)..(33): Xaa is C or S
XSKVVMNSLQEVKPTRGVYYVIPLPELDQPVXXPSA

SEQ ID NO: 10588 - protein, 37 aa, Artificial Sequence
  Non-cyclic GFR-binding peptide
  MOD_RES (2)..(36): Xaa is C or S
  MOD_RES (14)..(15)..(16)..(17)..(18): Xaa is A or G
  MOD_RES (19)..(20)..(21)..(22): Xaa is A or G or absent
GXSRVVMNNSLQEXXXXXXXXXYYVVPLPELKTPAXT

SEQ ID NO: 10589 - protein, 32 aa, Artificial Sequence
  Non-cyclic GFR-binding peptide
  MOD_RES (31)..(32): Xaa is C or S
SKVIMEYQKYIKPTKGIIFLISIPSLDQSVXX

SEQ ID NO: 10590 - protein, 37 aa, Artificial Sequence
  Non-cyclic GFR-binding peptide
  MOD_RES (2)..(35)..(36): Xaa is C or S
  MOD_RES (13)..(14)..(15)..(16)..(17): Xaa is A or G
  MOD_RES (18)..(19)..(20)..(21): Xaa is A or G or absent
KXSRVIMEYQKYXXXXXXXXXIFLISIPSLAQPVXXP

SEQ ID NO: 10591 - protein, 32 aa, Artificial Sequence
  Non-cyclic GFR-binding peptide
  MOD_RES (11)..(12)..(13)..(14)..(15): Xaa is A or G
  MOD_RES (16)..(17)..(18)..(19): Xaa is A or G or absent
SKVVMNSLQEXXXXXXXXXYYVIPLPELDQPV

SEQ ID NO: 10592 - protein, 36 aa, Artificial Sequence
  Non-cyclic GFR-binding peptide
  MOD_RES (34)..(35): Xaa is C or S
  MOD_RES (12)..(13)..(14)..(15)..(16): Xaa is A or G
  MOD_RES (17)..(18)..(19)..(20): Xaa is A or G or absent
SEVVMDNSLQEXXXXXXXXXYYLITLPELRTPVXXT

SEQ ID NO: 10593 - protein, 31 aa, Artificial Sequence
  Non-cyclic GFR-binding peptide
ARVVMNNSLQEIVNSSDDYYVVPLPELQTPA

SEQ ID NO: 10594 - protein, 34 aa, Artificial Sequence
  Non-cyclic GFR-binding peptide
  MOD_RES (1)..(3): Xaa is C or S
XGXSRVVMNNSLQEIVNSSDDYYVVPLPELKTPA

SEQ ID NO: 10595 - protein, 37 aa, Artificial Sequence
  Non-cyclic GFR-binding peptide
  MOD_RES (1)..(3)..(35)..(36): Xaa is C or S
XGXSEVVMDRYKKLVVNNASDFYLISIANLRTPVXXT

SEQ ID NO: 10596 - protein, 38 aa, Artificial Sequence
  Non-cyclic GFR-binding peptide
  MOD_RES (32)..(32): Xaa is C or S
SRVVMNEYQKYIVNSSDDIFLVSIPSLKTPAXTPKTVH

SEQ ID NO: 10597 - protein, 39 aa, Artificial Sequence
  Non-cyclic GFR-binding peptide
  MOD_RES (33)..(34): Xaa is C or S
  MOD_RES (11)..(12)..(13)..(14)..(15): Xaa is A or G
  MOD_RES (16)..(17)..(18)..(19): Xaa is A or G or absent
RVVMNNSLQEXXXXXXXXXYYLVTLPELKTPAXXPKPVY

SEQ ID NO: 10598 - protein, 36 aa, Artificial Sequence
  Non-cyclic GFR-binding peptide
  MOD_RES (1)..(3): Xaa is C or S
  MOD_RES (15)..(16)..(17)..(18)..(19): Xaa is A or G
  MOD_RES (20)..(21)..(22)..(23): Xaa is A or G or absent
XGXSEVVMDRYKKLXXXXXXXXXFYLISIANLRTPV

SEQ ID NO: 10599 - protein, 41 aa, Artificial Sequence
  Non-cyclic GFR-binding peptide
  MOD_RES (2)..(4)..(38)..(39): Xaa is C or S
  MOD_RES (16)..(17)..(18)..(19)..(20): Xaa is A or G
  MOD_RES (21)..(22)..(23)..(24): Xaa is A or G or absent
RXGXSEVVMDNSLQEXXXXXXXXXYYLITLPELRTPVXXTP

SEQ ID NO: 10600 - protein, 33 aa, Artificial Sequence
  Non-cyclic GFR-binding peptide
  MOD_RES (2)..(2): Xaa is C or S
GXSEVVMDRYKKLVVNNASDFYLISIANLRTPV

SEQ ID NO: 10601 - protein, 38 aa, Artificial Sequence
  Non-cyclic GFR-binding peptide
  MOD_RES (34)..(35): Xaa is C or S
  MOD_RES (12)..(13)..(14)..(15)..(16): Xaa is A or G
  MOD_RES (17)..(18)..(19)..(20): Xaa is A or G or absent
GEVVMDNSLQEXXXXXXXXXYYLMTLPELETPVXXAKP

SEQ ID NO: 10602 - protein, 33 aa, Artificial Sequence
  Non-cyclic GFR-binding peptide
  MOD_RES (1)..(33): Xaa is C or S
XGEVVMDNSLQEVVKENEDYYVMPLPELETPVX

SEQ ID NO: 10603 - protein, 33 aa, Artificial Sequence
  Non-cyclic GFR-binding peptide
  MOD_RES (1)..(3): Xaa is C or S
XKXSKVVMNSLQEVKPTRGVYYVIPLPELDQPV

SEQ ID NO: 10604 - protein, 42 aa, Artificial Sequence
  Non-cyclic GFR-binding peptide
  MOD_RES (2)..(36)..(37): Xaa is C or S
  MOD_RES (14)..(15)..(16)..(17)..(18): Xaa is A or G
  MOD_RES (19)..(20)..(21)..(22): Xaa is A or G or absent
GXSEVVMDQYNKLXXXXXXXXXLYLISIASLRTPVXXTPPTS

SEQ ID NO: 10605 - protein, 33 aa, Artificial Sequence
  Non-cyclic GFR-binding peptide
  MOD_RES (31)..(32): Xaa is C or S
RVVMNNSLQEIVNSSDDYYVVPLPELKTPAXXP

SEQ ID NO: 10606 - protein, 43 aa, Artificial Sequence
  Non-cyclic GFR-binding peptide
  MOD_RES (2)..(4)..(38)..(39): Xaa is C or S
  MOD_RES (16)..(17)..(18)..(19)..(20): Xaa is A or G
  MOD_RES (21)..(22)..(23)..(24): Xaa is A or G or absent
RXGXGEVVMDNSLQEXXXXXXXXXYYVMPLPELETPVXXAKPI

SEQ ID NO: 10607 - protein, 33 aa, Artificial Sequence
  Non-cyclic GFR-binding peptide
  MOD_RES (2)..(2): Xaa is C or S
GXGEVVMDEYQKYVVKENEDIFLMSIPSLETPV

SEQ ID NO: 10608 - protein, 39 aa, Artificial Sequence
  Non-cyclic GFR-binding peptide
  MOD_RES (1)..(35)..(36): Xaa is C or S
  MOD_RES (13)..(14)..(15)..(16)..(17): Xaa is A or G
  MOD_RES (18)..(19)..(20)..(21): Xaa is A or G or absent
XSRVVMNNSLQEXXXXXXXXXYYLVTLPELKTPAXXPKP

SEQ ID NO: 10609 - protein, 38 aa, Artificial Sequence
  Non-cyclic GFR-binding peptide
  MOD_RES (2)..(4)..(38): Xaa is C or S
  MOD_RES (16)..(17)..(18)..(19)..(20): Xaa is A or G
  MOD_RES (21)..(22)..(23)..(24): Xaa is A or G or absent
RXGXGEVVMENSLQEXXXXXXXXXYYLMTLPELETPVX

SEQ ID NO: 10610 - protein, 36 aa, Artificial Sequence
  Non-cyclic GFR-binding peptide
  MOD_RES (32)..(33): Xaa is C or S
SRVVMNNSLQEIVNSSDDYYLVTLPELKTPAXXPKP

SEQ ID NO: 10611 - protein, 35 aa, Artificial Sequence
  Non-cyclic GFR-binding peptide
  MOD_RES (1)..(33): Xaa is C or S
XSRVVMNNSLQEIVNSSDDYYLVTLPELKTPAXTP

SEQ ID NO: 10612 - protein, 42 aa, Artificial Sequence
  Non-cyclic GFR-binding peptide
  MOD_RES (2)..(4)..(36)..(37): Xaa is C or S
RXGXGEVVMENSLQEVVKDYEDYYLMTLPELETPVXXAKPIS

SEQ ID NO: 10613 - protein, 38 aa, Artificial Sequence
  Non-cyclic GFR-binding peptide
  MOD_RES (32)..(33): Xaa is C or S
SRVVMNEYQKYIVNSSDDIFLVSIPSLKTPAXXPKPVY

SEQ ID NO: 10614 - protein, 38 aa, Artificial Sequence
  Non-cyclic GFR-binding peptide
  MOD_RES (2)..(4)..(38): Xaa is C or S
  MOD_RES (16)..(17)..(18)..(19)..(20): Xaa is A or G
  MOD_RES (21)..(22)..(23)..(24): Xaa is A or G or absent
RXGXGEVVMDEYQKYXXXXXXXXXIFLMSIPSLETPVX

SEQ ID NO: 10615 - protein, 32 aa, Artificial Sequence
  Non-cyclic GFR-binding peptide
  MOD_RES (11)..(12)..(13)..(14)..(15): Xaa is A or G
  MOD_RES (16)..(17)..(18)..(19): Xaa is A or G or absent
RVVMNEYQKYXXXXXXXXXIFLVSIPSLQTPA

SEQ ID NO: 10616 - protein, 39 aa, Artificial Sequence
  Non-cyclic GFR-binding peptide
  MOD_RES (2)..(4)..(36)..(37): Xaa is C or S
RXGXGEVVMDNSLQEVVKENEDYYVMPLPELETPVXXAK

SEQ ID NO: 10617 - protein, 34 aa, Artificial Sequence
  Non-cyclic GFR-binding peptide
  MOD_RES (1)..(33)..(34): Xaa is C or S
XSEVVMDNSLQEVVNNASDYYLITLPELRTPVXX

SEQ ID NO: 10618 - protein, 35 aa, Artificial Sequence
  Non-cyclic GFR-binding peptide
  MOD_RES (33)..(34): Xaa is C or S
  MOD_RES (11)..(12)..(13)..(14)..(15): Xaa is A or G
  MOD_RES (16)..(17)..(18)..(19): Xaa is A or G or absent
SRVIMEYQKYXXXXXXXXXIFLISIPSLAQPVXXP

SEQ ID NO: 10619 - protein, 38 aa, Artificial Sequence
  Non-cyclic GFR-binding peptide
  MOD_RES (1)..(32)..(33): Xaa is C or S
XSKVVMNSLQEVKPTRGVYYVIPLPELDQPVXXPSASA

SEQ ID NO: 10620 - protein, 40 aa, Artificial Sequence
  Non-cyclic GFR-binding peptide
  MOD_RES (2)..(4)..(36): Xaa is C or S
HXGXSRVVMNNSLQEIVNSSDDYYLVTLPELKTPAXTPKT

SEQ ID NO: 10621 - protein, 30 aa, Artificial Sequence
  Non-cyclic GFR-binding peptide
RVVMNEYQKYIVNSSDDIFLVSIPSLQTPA

SEQ ID NO: 10622 - protein, 37 aa, Artificial Sequence
  Non-cyclic GFR-binding peptide
  MOD_RES (31)..(32): Xaa is C or S
RVVMNEYQKYIVNSSDDIFLVSIPSLQTPAXXPKPVT

SEQ ID NO: 10623 - protein, 39 aa, Artificial Sequence
  Non-cyclic GFR-binding peptide
  MOD_RES (2)..(36): Xaa is C or S
  MOD_RES (14)..(15)..(16)..(17)..(18): Xaa is A or G
  MOD_RES (19)..(20)..(21)..(22): Xaa is A or G or absent
GXSRVVMNEYQKYXXXXXXXXXIFLVSIPSLKTPAXTPK

SEQ ID NO: 10624 - protein, 41 aa, Artificial Sequence
  Non-cyclic GFR-binding peptide
  MOD_RES (1)..(3)..(35)..(36): Xaa is C or S
XGXSRVVMNNSLQEIVNSSDDYYLVTLPELKTPAXXPKPVY

SEQ ID NO: 10625 - protein, 34 aa, Artificial Sequence
  Non-cyclic GFR-binding peptide
  MOD_RES (2)..(34): Xaa is C or S
GXGEVVMDEYQKYVVKENEDIFLMSIPSLETPVX

SEQ ID NO: 10626 - protein, 36 aa, Artificial Sequence
  Non-cyclic GFR-binding peptide
  MOD_RES (33)..(34): Xaa is C or S
  MOD_RES (11)..(12)..(13)..(14)..(15): Xaa is A or G
  MOD_RES (16)..(17)..(18)..(19): Xaa is A or G or absent
SRVIMEYQKYXXXXXXXXXIFLISIPSLAQPVXXPA

SEQ ID NO: 10627 - protein, 41 aa, Artificial Sequence
  Non-cyclic GFR-binding peptide
  MOD_RES (1)..(3)..(35)..(36): Xaa is C or S
XGXSRVVMNEYQKYIVNSSDDIFLVSIPSLKTPAXXPKPVY

SEQ ID NO: 10628 - protein, 38 aa, Artificial Sequence
  Non-cyclic GFR-binding peptide
  MOD_RES (1)..(3)..(36)..(37): Xaa is C or S
  MOD_RES (14)..(15)..(16)..(17)..(18): Xaa is A or G
  MOD_RES (19)..(20)..(21)..(22): Xaa is A or G or absent
XKXSRVIMNSLQEXXXXXXXXXYYLITLPELAQPVXXP

SEQ ID NO: 10629 - protein, 42 aa, Artificial Sequence
  Non-cyclic GFR-binding peptide
  MOD_RES (2)..(4)..(38)..(39): Xaa is C or S
  MOD_RES (16)..(17)..(18)..(19)..(20): Xaa is A or G
  MOD_RES (21)..(22)..(23)..(24): Xaa is A or G or absent
RXGXGEVVMEEYQKYXXXXXXXXXIFLMSIPSLETPVXXAKP

SEQ ID NO: 10630 - protein, 36 aa, Artificial Sequence
  Non-cyclic GFR-binding peptide
  MOD_RES (1)..(3): Xaa is C or S
  MOD_RES (15)..(16)..(17)..(18)..(19): Xaa is A or G
  MOD_RES (20)..(21)..(22)..(23): Xaa is A or G or absent
XGXSRVVMNEYQKYXXXXXXXXXIFLVSIPSLKTPA

SEQ ID NO: 10631 - protein, 36 aa, Artificial Sequence
  Non-cyclic GFR-binding peptide
  MOD_RES (33)..(34): Xaa is C or S
  MOD_RES (11)..(12)..(13)..(14)..(15): Xaa is A or G
  MOD_RES (16)..(17)..(18)..(19): Xaa is A or G or absent
EVVMDRYKKLXXXXXXXXXFYLISIANLRTPVXXTP

SEQ ID NO: 10632 - protein, 33 aa, Artificial Sequence
  Non-cyclic GFR-binding peptide
  MOD_RES (31)..(32): Xaa is C or S
SRVIMEYQKYVKPKRGVIFLISIPSLAQPVXXP

SEQ ID NO: 10633 - protein, 30 aa, Artificial Sequence
  Non-cyclic GFR-binding peptide
EVVMDRYKKLVVNNASDFYLISIANLRTPV

SEQ ID NO: 10634 - protein, 39 aa, Artificial Sequence
  Non-cyclic GFR-binding peptide
  MOD_RES (1)..(3)..(34)..(35): Xaa is C or S
XKXSKVIMNSLQEIKPTKGIYYVIPLPELDQSVXXPSAS

SEQ ID NO: 10635 - protein, 38 aa, Artificial Sequence
  Non-cyclic GFR-binding peptide
  MOD_RES (1)..(35)..(36): Xaa is C or S
  MOD_RES (13)..(14)..(15)..(16)..(17): Xaa is A or G
  MOD_RES (18)..(19)..(20)..(21): Xaa is A or G or absent
XARVVMNNSLQEXXXXXXXXXYYLVTLPELQTPAXXPK

SEQ ID NO: 10636 - protein, 38 aa, Artificial Sequence
  Non-cyclic GFR-binding peptide
  MOD_RES (1)..(35): Xaa is C or S
  MOD_RES (13)..(14)..(15)..(16)..(17): Xaa is A or G
  MOD_RES (18)..(19)..(20)..(21): Xaa is A or G or absent
XSRVVMNEYQKYXXXXXXXXXIFLVSIPSLKTPAXTPK

SEQ ID NO: 10637 - protein, 36 aa, Artificial Sequence
  Non-cyclic GFR-binding peptide
  MOD_RES (2)..(36): Xaa is C or S
  MOD_RES (14)..(15)..(16)..(17)..(18): Xaa is A or G
  MOD_RES (19)..(20)..(21)..(22): Xaa is A or G or absent
GXGEVVMDEYQKYXXXXXXXXXIFLMSIPSLETPVX

SEQ ID NO: 10638 - protein, 41 aa, Artificial Sequence
  Non-cyclic GFR-binding peptide
  MOD_RES (1)..(3)..(35)..(36): Xaa is C or S
XGXSEVVMDNSLQEVVNNASDYYLITLPELRTPVXXTPPTS

SEQ ID NO: 10639 - protein, 34 aa, Artificial Sequence
  Non-cyclic GFR-binding peptide
  MOD_RES (2)..(2): Xaa is C or S
  MOD_RES (13)..(14)..(15)..(16)..(17): Xaa is A or G
  MOD_RES (18)..(19)..(20)..(21): Xaa is A or G or absent
KXSRVIMNSLQEXXXXXXXXXYYLITLPELAQPV

SEQ ID NO: 10640 - protein, 37 aa, Artificial Sequence
  Non-cyclic GFR-binding peptide
  MOD_RES (31)..(32): Xaa is C or S
EVVMDNSLQEVVKENEDYYVMPLPELETPVXXAKPIK

SEQ ID NO: 10641 - protein, 33 aa, Artificial Sequence
  Non-cyclic GFR-binding peptide
  MOD_RES (32)..(33): Xaa is C or S
GEVVMDNSLQEVVKENEDYYLMTLPELETPVXX

SEQ ID NO: 10642 - protein, 38 aa, Artificial Sequence
  Non-cyclic GFR-binding peptide
  MOD_RES (34)..(34): Xaa is C or S
  MOD_RES (12)..(13)..(14)..(15)..(16): Xaa is A or G
  MOD_RES (17)..(18)..(19)..(20): Xaa is A or G or absent
SRVVMNNSLQEXXXXXXXXXYYLVTLPELKTPAXTPKT

SEQ ID NO: 10643 - protein, 35 aa, Artificial Sequence
  Non-cyclic GFR-binding peptide
  MOD_RES (1)..(3)..(34)..(35): Xaa is C or S
XKXSKVVMEYQKYVKPTRGVIFLISIPSLDQPVXX

SEQ ID NO: 10644 - protein, 36 aa, Artificial Sequence
  Non-cyclic GFR-binding peptide
  MOD_RES (2)..(36): Xaa is C or S
  MOD_RES (14)..(15)..(16)..(17)..(18): Xaa is A or G
  MOD_RES (19)..(20)..(21)..(22): Xaa is A or G or absent
GXSRVVMNEYQKYXXXXXXXXXIFLVSIPSLKTPAX

SEQ ID NO: 10645 - protein, 42 aa, Artificial Sequence
  Non-cyclic GFR-binding peptide
  MOD_RES (2)..(4)..(38)..(39): Xaa is C or S
  MOD_RES (16)..(17)..(18)..(19)..(20): Xaa is A or G
  MOD_RES (21)..(22)..(23)..(24): Xaa is A or G or absent
RXGXSEVVMDRYKKLXXXXXXXXXFYLISIANLRTPVXXTPP

SEQ ID NO: 10646 - protein, 41 aa, Artificial Sequence
  Non-cyclic GFR-binding peptide
  MOD_RES (1)..(35)..(36): Xaa is C or S
  MOD_RES (13)..(14)..(15)..(16)..(17): Xaa is A or G
  MOD_RES (18)..(19)..(20)..(21): Xaa is A or G or absent
XSRVVMNNSLQEXXXXXXXXXYYLVTLPELKTPAXXPKPVY

SEQ ID NO: 10647 - protein, 35 aa, Artificial Sequence
  Non-cyclic GFR-binding peptide
  MOD_RES (2)..(33)..(34): Xaa is C or S
KXSRVIMEYQKYVKPKRGVIFLISIPSLAQPVXXP

SEQ ID NO: 10648 - protein, 31 aa, Artificial Sequence
  Non-cyclic GFR-binding peptide
SEVVMDRYKKLVVNNASDFYLISIANLRTPV

SEQ ID NO: 10649 - protein, 36 aa, Artificial Sequence
  Non-cyclic GFR-binding peptide
  MOD_RES (2)..(4)..(35)..(36): Xaa is C or S
SXKXSKVVMNSLQEVKPTRGVYYVIPLPELDQPVXX

SEQ ID NO: 10650 - protein, 34 aa, Artificial Sequence
  Non-cyclic GFR-binding peptide
  MOD_RES (1)..(34): Xaa is C or S
  MOD_RES (12)..(13)..(14)..(15)..(16): Xaa is A or G
  MOD_RES (17)..(18)..(19)..(20): Xaa is A or G or absent
XSKVVMEYQKYXXXXXXXXXIFLISIPSLDQPVX

SEQ ID NO: 10651 - protein, 33 aa, Artificial Sequence
  Non-cyclic GFR-binding peptide
  MOD_RES (1)..(33): Xaa is C or S
XARVVMNNSLQEIVNSSDDYYLVTLPELQTPAX

SEQ ID NO: 10652 - protein, 39 aa, Artificial Sequence
  Non-cyclic GFR-binding peptide
  MOD_RES (1)..(33): Xaa is C or S
XSRVVMNNSLQEIVNSSDDYYVVPLPELKTPAXTPKTVH

SEQ ID NO: 10653 - protein, 39 aa, Artificial Sequence
  Non-cyclic GFR-binding peptide
  MOD_RES (1)..(35)..(36): Xaa is C or S
  MOD_RES (13)..(14)..(15)..(16)..(17): Xaa is A or G
  MOD_RES (18)..(19)..(20)..(21): Xaa is A or G or absent
XARVVMNEYQKYXXXXXXXXXIFLVSIPSLQTPAXXPKP

SEQ ID NO: 10654 - protein, 39 aa, Artificial Sequence
  Non-cyclic GFR-binding peptide
  MOD_RES (34)..(35): Xaa is C or S
  MOD_RES (12)..(13)..(14)..(15)..(16): Xaa is A or G
  MOD_RES (17)..(18)..(19)..(20): Xaa is A or G or absent
GEVVMDEYQKYXXXXXXXXXIFLMSIPSLETPVXXAKPI

SEQ ID NO: 10655 - protein, 36 aa, Artificial Sequence
  Non-cyclic GFR-binding peptide
  MOD_RES (31)..(32): Xaa is C or S
RVVMNNSLQEIVNSSDDYYLVTLPELKTPAXXPKPV

SEQ ID NO: 10656 - protein, 37 aa, Artificial Sequence
  Non-cyclic GFR-binding peptide
  MOD_RES (32)..(33): Xaa is C or S
SEVVMDNSLQEVVNNASDYYLITLPELRTPVXXTPPT

SEQ ID NO: 10657 - protein, 39 aa, Artificial Sequence
  Non-cyclic GFR-binding peptide
  MOD_RES (34)..(35): Xaa is C or S
  MOD_RES (12)..(13)..(14)..(15)..(16): Xaa is A or G
  MOD_RES (17)..(18)..(19)..(20): Xaa is A or G or absent
SEVVMDQYNKLXXXXXXXXXLYLISIASLRTPVXXTPPT

SEQ ID NO: 10658 - protein, 38 aa, Artificial Sequence
  Non-cyclic GFR-binding peptide
  MOD_RES (32)..(33): Xaa is C or S
GEVVMENSLQEVVKDYEDYYLMTLPELETPVXXAKPIS

SEQ ID NO: 10659 - protein, 37 aa, Artificial Sequence
  Non-cyclic GFR-binding peptide
  MOD_RES (2)..(34)..(35): Xaa is C or S
GXSEVVMDNSLQEVVNNASDYYVIPLPELRTPVXXTP

SEQ ID NO: 10660 - protein, 37 aa, Artificial Sequence
  Non-cyclic GFR-binding peptide
  MOD_RES (1)..(33)..(34): Xaa is C or S
XSRVVMNNSLQEIVNSSDDYYLVTLPELKTPAXXPKP

SEQ ID NO: 10661 - protein, 43 aa, Artificial Sequence
  Non-cyclic GFR-binding peptide
  MOD_RES (1)..(3)..(37)..(38): Xaa is C or S
  MOD_RES (15)..(16)..(17)..(18)..(19): Xaa is A or G
  MOD_RES (20)..(21)..(22)..(23): Xaa is A or G or absent
XGXGEVVMEEYQKYXXXXXXXXXIFLMSIPSLETPVXXAKPIS

SEQ ID NO: 10662 - protein, 37 aa, Artificial Sequence
  Non-cyclic GFR-binding peptide
  MOD_RES (1)..(3)..(34)..(35): Xaa is C or S
XKXSKVIMNSLQEIKPTKGIYYVIPLPELDQSVXXPS

SEQ ID NO: 10663 - protein, 41 aa, Artificial Sequence
  Non-cyclic GFR-binding peptide
  MOD_RES (2)..(4)..(38)..(39): Xaa is C or S
  MOD_RES (16)..(17)..(18)..(19)..(20): Xaa is A or G
  MOD_RES (21)..(22)..(23)..(24): Xaa is A or G or absent
HXGXSRVVMNNSLQEXXXXXXXXXYYVVPLPELKTPAXXPK

SEQ ID NO: 10664 - protein, 33 aa, Artificial Sequence
  Non-cyclic GFR-binding peptide
  MOD_RES (12)..(13)..(14)..(15)..(16): Xaa is A or G
  MOD_RES (17)..(18)..(19)..(20): Xaa is A or G or absent
GEVVMENSLQEXXXXXXXXXYYVMPLPELETPV

SEQ ID NO: 10665 - protein, 44 aa, Artificial Sequence
  Non-cyclic GFR-binding peptide
  MOD_RES (2)..(4)..(38)..(39): Xaa is C or S
  MOD_RES (16)..(17)..(18)..(19)..(20): Xaa is A or G
  MOD_RES (21)..(22)..(23)..(24): Xaa is A or G or absent
RXGXSEVVMDNSLQEXXXXXXXXXYYVIPLPELRTPVXXTPPTS

SEQ ID NO: 10666 - protein, 39 aa, Artificial Sequence
  Non-cyclic GFR-binding peptide
  MOD_RES (34)..(35): Xaa is C or S
  MOD_RES (12)..(13)..(14)..(15)..(16): Xaa is A or G
  MOD_RES (17)..(18)..(19)..(20): Xaa is A or G or absent
SEVVMDRYKKLXXXXXXXXXFYLISIANLRTPVXXTPPT

SEQ ID NO: 10667 - protein, 39 aa, Artificial Sequence
  Non-cyclic GFR-binding peptide
  MOD_RES (2)..(4)..(36): Xaa is C or S
HXGXSRVVMNNSLQEIVNSSDDYYVVPLPELKTPAXTPK

SEQ ID NO: 10668 - protein, 41 aa, Artificial Sequence
  Non-cyclic GFR-binding peptide
  MOD_RES (2)..(4)..(37)..(38): Xaa is C or S
  MOD_RES (15)..(16)..(17)..(18)..(19): Xaa is A or G
  MOD_RES (20)..(21)..(22)..(23): Xaa is A or G or absent
SXKXSKVVMEYQKYXXXXXXXXXIFLISIPSLDQPVXXPSA

SEQ ID NO: 10669 - protein, 36 aa, Artificial Sequence
  Non-cyclic GFR-binding peptide
  MOD_RES (31)..(32): Xaa is C or S
RVVMNNSLQEIVNSSDDYYVVPLPELQTPAXXPKPV

SEQ ID NO: 10670 - protein, 35 aa, Artificial Sequence
  Non-cyclic GFR-binding peptide
  MOD_RES (34)..(35): Xaa is C or S
  MOD_RES (12)..(13)..(14)..(15)..(16): Xaa is A or G
  MOD_RES (17)..(18)..(19)..(20): Xaa is A or G or absent
SRVVMNNSLQEXXXXXXXXXYYLVTLPELKTPAXX

SEQ ID NO: 10671 - protein, 39 aa, Artificial Sequence
  Non-cyclic GFR-binding peptide
  MOD_RES (2)..(4)..(35)..(36): Xaa is C or S
SXKXSKVIMEYQKYIKPTKGIIFLISIPSLDQSVXXPSA

SEQ ID NO: 10672 - protein, 35 aa, Artificial Sequence
  Non-cyclic GFR-binding peptide
  MOD_RES (34)..(35): Xaa is C or S
  MOD_RES (12)..(13)..(14)..(15)..(16): Xaa is A or G
  MOD_RES (17)..(18)..(19)..(20): Xaa is A or G or absent
SEVVMDQYNKLXXXXXXXXXLYLISIASLRTPVXX

SEQ ID NO: 10673 - protein, 40 aa, Artificial Sequence
  Non-cyclic GFR-binding peptide
  MOD_RES (1)..(3)..(37)..(38): Xaa is C or S
  MOD_RES (15)..(16)..(17)..(18)..(19): Xaa is A or G
  MOD_RES (20)..(21)..(22)..(23): Xaa is A or G or absent
XGXSRVVMNNSLQEXXXXXXXXXYYVVPLPELKTPAXXPK

SEQ ID NO: 10674 - protein, 32 aa, Artificial Sequence
  Non-cyclic GFR-binding peptide
  MOD_RES (31)..(32): Xaa is C or S
EVVMENSLQEVVKDYEDYYLMTLPELETPVXX

SEQ ID NO: 10675 - protein, 39 aa, Artificial Sequence
  Non-cyclic GFR-binding peptide
  MOD_RES (2)..(4)..(38)..(39): Xaa is C or S
  MOD_RES (16)..(17)..(18)..(19)..(20): Xaa is A or G
  MOD_RES (21)..(22)..(23)..(24): Xaa is A or G or absent
RXGXGEVVMEEYQKYXXXXXXXXXIFLMSIPSLETPVXX

SEQ ID NO: 10676 - protein, 39 aa, Artificial Sequence
  Non-cyclic GFR-binding peptide
  MOD_RES (2)..(4)..(36)..(37): Xaa is C or S
RXGXGEVVMENSLQEVVKDYEDYYVMPLPELETPVXXAK

SEQ ID NO: 10677 - protein, 35 aa, Artificial Sequence
  Non-cyclic GFR-binding peptide
  MOD_RES (2)..(4): Xaa is C or S
RXGXGEVVMENSLQEVVKDYEDYYLMTLPELETPV

SEQ ID NO: 10678 - protein, 38 aa, Artificial Sequence
  Non-cyclic GFR-binding peptide
  MOD_RES (1)..(34)..(35): Xaa is C or S
  MOD_RES (12)..(13)..(14)..(15)..(16): Xaa is A or G
  MOD_RES (17)..(18)..(19)..(20): Xaa is A or G or absent
XSRVIMNSLQEXXXXXXXXXYYLITLPELAQPVXXPAA

SEQ ID NO: 10679 - protein, 36 aa, Artificial Sequence
  Non-cyclic GFR-binding peptide
  MOD_RES (2)..(36): Xaa is C or S
  MOD_RES (14)..(15)..(16)..(17)..(18): Xaa is A or G
  MOD_RES (19)..(20)..(21)..(22): Xaa is A or G or absent
GXGEVVMDNSLQEXXXXXXXXXYYLMTLPELETPVX

SEQ ID NO: 10680 - protein, 42 aa, Artificial Sequence
  Non-cyclic GFR-binding peptide
  MOD_RES (2)..(4)..(36)..(37): Xaa is C or S
RXGXSEVVMDRYKKLVVNNASDFYLISIANLRTPVXXTPPTS

SEQ ID NO: 10681 - protein, 36 aa, Artificial Sequence
  Non-cyclic GFR-binding peptide
  MOD_RES (2)..(4)..(36): Xaa is C or S
HXGXARVVMNNSLQEIVNSSDDYYVVPLPELQTPAX

SEQ ID NO: 10682 - protein, 37 aa, Artificial Sequence
  Non-cyclic GFR-binding peptide
  MOD_RES (1)..(32)..(33): Xaa is C or S
XSKVIMNSLQEIKPTKGIYYVIPLPELDQSVXXPSAS

SEQ ID NO: 10683 - protein, 31 aa, Artificial Sequence
  Non-cyclic GFR-binding peptide
  MOD_RES (31)..(31): Xaa is C or S
SKVIMNSLQEIKPTKGIYYVIPLPELDQSVX

SEQ ID NO: 10684 - protein, 37 aa, Artificial Sequence
  Non-cyclic GFR-binding peptide
  MOD_RES (2)..(36)..(37): Xaa is C or S
  MOD_RES (14)..(15)..(16)..(17)..(18): Xaa is A or G
  MOD_RES (19)..(20)..(21)..(22): Xaa is A or G or absent
GXGEVVMENSLQEXXXXXXXXXYYVMPLPELETPVXX

SEQ ID NO: 10685 - protein, 39 aa, Artificial Sequence
  Non-cyclic GFR-binding peptide
  MOD_RES (2)..(34)..(35): Xaa is C or S
GXSEVVMDQYNKLVVNNASDLYLISIASLRTPVXXTPPT

SEQ ID NO: 10686 - protein, 38 aa, Artificial Sequence
  Non-cyclic GFR-binding peptide
  MOD_RES (33)..(34): Xaa is C or S
  MOD_RES (11)..(12)..(13)..(14)..(15): Xaa is A or G
  MOD_RES (16)..(17)..(18)..(19): Xaa is A or G or absent
RVVMNNSLQEXXXXXXXXXYYVVPLPELQTPAXXPKPV

SEQ ID NO: 10687 - protein, 35 aa, Artificial Sequence
  Non-cyclic GFR-binding peptide
  MOD_RES (2)..(4): Xaa is C or S
RXGXGEVVMDNSLQEVVKENEDYYLMTLPELETPV

SEQ ID NO: 10688 - protein, 36 aa, Artificial Sequence
  Non-cyclic GFR-binding peptide
  MOD_RES (1)..(35): Xaa is C or S
  MOD_RES (13)..(14)..(15)..(16)..(17): Xaa is A or G
  MOD_RES (18)..(19)..(20)..(21): Xaa is A or G or absent
XSRVVMNEYQKYXXXXXXXXXIFLVSIPSLKTPAXT

SEQ ID NO: 10689 - protein, 32 aa, Artificial Sequence
  Non-cyclic GFR-binding peptide
  MOD_RES (31)..(32): Xaa is C or S
SKVIMNSLQEIKPTKGIYYVIPLPELDQSVXX

SEQ ID NO: 10690 - protein, 32 aa, Artificial Sequence
  Non-cyclic GFR-binding peptide
  MOD_RES (1)..(1): Xaa is C or S
XSEVVMDNSLQEVVNNASDYYVIPLPELRTPV

SEQ ID NO: 10691 - protein, 35 aa, Artificial Sequence
  Non-cyclic GFR-binding peptide
  MOD_RES (33)..(33): Xaa is C or S
  MOD_RES (11)..(12)..(13)..(14)..(15): Xaa is A or G
  MOD_RES (16)..(17)..(18)..(19): Xaa is A or G or absent
RVVMNEYQKYXXXXXXXXXIFLVSIPSLKTPAXTP

SEQ ID NO: 10692 - protein, 39 aa, Artificial Sequence
  Non-cyclic GFR-binding peptide
  MOD_RES (1)..(3)..(35)..(36): Xaa is C or S
XGXARVVMNNSLQEIVNSSDDYYLVTLPELQTPAXXPKP

SEQ ID NO: 10693 - protein, 36 aa, Artificial Sequence
  Non-cyclic GFR-binding peptide
  MOD_RES (32)..(32): Xaa is C or S
SRVVMNNSLQEIVNSSDDYYLVTLPELKTPAXTPKT

SEQ ID NO: 10694 - protein, 34 aa, Artificial Sequence
  Non-cyclic GFR-binding peptide
  MOD_RES (1)..(33): Xaa is C or S
XSRVVMNNSLQEIVNSSDDYYVVPLPELKTPAXT

SEQ ID NO: 10695 - protein, 35 aa, Artificial Sequence
  Non-cyclic GFR-binding peptide
  MOD_RES (31)..(32): Xaa is C or S
EVVMENSLQEVVKDYEDYYVMPLPELETPVXXAKP

SEQ ID NO: 10696 - protein, 40 aa, Artificial Sequence
  Non-cyclic GFR-binding peptide
  MOD_RES (2)..(4)..(38): Xaa is C or S
  MOD_RES (16)..(17)..(18)..(19)..(20): Xaa is A or G
  MOD_RES (21)..(22)..(23)..(24): Xaa is A or G or absent
HXGXSRVVMNEYQKYXXXXXXXXXIFLVSIPSLKTPAXTP

SEQ ID NO: 10697 - protein, 33 aa, Artificial Sequence
  Non-cyclic GFR-binding peptide
  MOD_RES (12)..(13)..(14)..(15)..(16): Xaa is A or G
  MOD_RES (17)..(18)..(19)..(20): Xaa is A or G or absent
SRVVMNNSLQEXXXXXXXXXYYVVPLPELKTPA

SEQ ID NO: 10698 - protein, 43 aa, Artificial Sequence
  Non-cyclic GFR-binding peptide
  MOD_RES (1)..(3)..(37)..(38): Xaa is C or S
  MOD_RES (15)..(16)..(17)..(18)..(19): Xaa is A or G
  MOD_RES (20)..(21)..(22)..(23): Xaa is A or G or absent
XGXARVVMNEYQKYXXXXXXXXXIFLVSIPSLQTPAXXPKPVT

SEQ ID NO: 10699 - protein, 37 aa, Artificial Sequence
  Non-cyclic GFR-binding peptide
  MOD_RES (2)..(4)..(35)..(36): Xaa is C or S
SXKXSKVIMEYQKYIKPTKGIIFLISIPSLDQSVXXP

SEQ ID NO: 10700 - protein, 39 aa, Artificial Sequence
  Non-cyclic GFR-binding peptide
  MOD_RES (1)..(3)..(35)..(36): Xaa is C or S
XGXARVVMNEYQKYIVNSSDDIFLVSIPSLQTPAXXPKP

SEQ ID NO: 10701 - protein, 39 aa, Artificial Sequence
  Non-cyclic GFR-binding peptide
  MOD_RES (1)..(3)..(37)..(38): Xaa is C or S
  MOD_RES (15)..(16)..(17)..(18)..(19): Xaa is A or G
  MOD_RES (20)..(21)..(22)..(23): Xaa is A or G or absent
XGXGEVVMENSLQEXXXXXXXXXYYVMPLPELETPVXXA

SEQ ID NO: 10702 - protein, 37 aa, Artificial Sequence
  Non-cyclic GFR-binding peptide
  MOD_RES (1)..(35)..(36): Xaa is C or S
  MOD_RES (13)..(14)..(15)..(16)..(17): Xaa is A or G
  MOD_RES (18)..(19)..(20)..(21): Xaa is A or G or absent
XSEVVMDQYNKLXXXXXXXXXLYLISIASLRTPVXXT

SEQ ID NO: 10703 - protein, 33 aa, Artificial Sequence
  Non-cyclic GFR-binding peptide
  MOD_RES (12)..(13)..(14)..(15)..(16): Xaa is A or G
  MOD_RES (17)..(18)..(19)..(20): Xaa is A or G or absent
SEVVMDRYKKLXXXXXXXXXFYLISIANLRTPV

SEQ ID NO: 10704 - protein, 31 aa, Artificial Sequence
  Non-cyclic GFR-binding peptide
  MOD_RES (31)..(31): Xaa is C or S
SKVVMEYQKYVKPTRGVIFLISIPSLDQPVX

SEQ ID NO: 10705 - protein, 36 aa, Artificial Sequence
  Non-cyclic GFR-binding peptide
  MOD_RES (1)..(3): Xaa is C or S
  MOD_RES (15)..(16)..(17)..(18)..(19): Xaa is A or G
  MOD_RES (20)..(21)..(22)..(23): Xaa is A or G or absent
XGXGEVVMENSLQEXXXXXXXXXYYLMTLPELETPV

SEQ ID NO: 10706 - protein, 36 aa, Artificial Sequence
  Non-cyclic GFR-binding peptide
  MOD_RES (31)..(32): Xaa is C or S
RVVMNNSLQEIVNSSDDYYLVTLPELQTPAXXPKPV

SEQ ID NO: 10707 - protein, 33 aa, Artificial Sequence
  Non-cyclic GFR-binding peptide
  MOD_RES (12)..(13)..(14)..(15)..(16): Xaa is A or G
  MOD_RES (17)..(18)..(19)..(20): Xaa is A or G or absent
SEVVMDQYNKLXXXXXXXXXLYLISIASLRTPV

SEQ ID NO: 10708 - protein, 33 aa, Artificial Sequence
  Non-cyclic GFR-binding peptide
  MOD_RES (32)..(32): Xaa is C or S
SRVVMNNSLQEIVNSSDDYYLVTLPELKTPAXT

SEQ ID NO: 10709 - protein, 36 aa, Artificial Sequence
  Non-cyclic GFR-binding peptide
  MOD_RES (1)..(33): Xaa is C or S
XSRVVMNNSLQEIVNSSDDYYVVPLPELKTPAXTPK

SEQ ID NO: 10710 - protein, 37 aa, Artificial Sequence
  Non-cyclic GFR-binding peptide
  MOD_RES (2)..(36)..(37): Xaa is C or S
  MOD_RES (14)..(15)..(16)..(17)..(18): Xaa is A or G
  MOD_RES (19)..(20)..(21)..(22): Xaa is A or G or absent
GXSEVVMDNSLQEXXXXXXXXXYYLITLPELRTPVXX

SEQ ID NO: 10711 - protein, 40 aa, Artificial Sequence
  Non-cyclic GFR-binding peptide
  MOD_RES (34)..(35): Xaa is C or S
  MOD_RES (12)..(13)..(14)..(15)..(16): Xaa is A or G
  MOD_RES (17)..(18)..(19)..(20): Xaa is A or G or absent
SEVVMDRYKKLXXXXXXXXXFYLISIANLRTPVXXTPPTS

SEQ ID NO: 10712 - protein, 38 aa, Artificial Sequence
  Non-cyclic GFR-binding peptide
  MOD_RES (2)..(34): Xaa is C or S
GXSRVVMNNSLQEIVNSSDDYYLVTLPELKTPAXTPKT

SEQ ID NO: 10713 - protein, 33 aa, Artificial Sequence
  Non-cyclic GFR-binding peptide
  MOD_RES (31)..(32): Xaa is C or S
RVVMNEYQKYIVNSSDDIFLVSIPSLQTPAXXP

SEQ ID NO: 10714 - protein, 40 aa, Artificial Sequence
  Non-cyclic GFR-binding peptide
  MOD_RES (1)..(3)..(35)..(36): Xaa is C or S
XGXGEVVMENSLQEVVKDYEDYYLMTLPELETPVXXAKPI

SEQ ID NO: 10715 - protein, 32 aa, Artificial Sequence
  Non-cyclic GFR-binding peptide
  MOD_RES (32)..(32): Xaa is C or S
GEVVMDEYQKYVVKENEDIFLMSIPSLETPVX

SEQ ID NO: 10716 - protein, 33 aa, Artificial Sequence
  Non-cyclic GFR-binding peptide
  MOD_RES (12)..(13)..(14)..(15)..(16): Xaa is A or G
  MOD_RES (17)..(18)..(19)..(20): Xaa is A or G or absent
SRVVMNNSLQEXXXXXXXXXYYLVTLPELKTPA

SEQ ID NO: 10717 - protein, 39 aa, Artificial Sequence
  Non-cyclic GFR-binding peptide
  MOD_RES (1)..(34)..(35): Xaa is C or S
  MOD_RES (12)..(13)..(14)..(15)..(16): Xaa is A or G
  MOD_RES (17)..(18)..(19)..(20): Xaa is A or G or absent
XSKVIMNSLQEXXXXXXXXXYYVIPLPELDQSVXXPSAS

SEQ ID NO: 10718 - protein, 35 aa, Artificial Sequence
  Non-cyclic GFR-binding peptide
  MOD_RES (1)..(32)..(33): Xaa is C or S
XSKVIMEYQKYIKPTKGIIFLISIPSLDQSVXXPS

SEQ ID NO: 10719 - protein, 38 aa, Artificial Sequence
  Non-cyclic GFR-binding peptide
  MOD_RES (1)..(3)..(34)..(35): Xaa is C or S
XKXSKVVMNSLQEVKPTRGVYYVIPLPELDQPVXXPSA

SEQ ID NO: 10720 - protein, 35 aa, Artificial Sequence
  Non-cyclic GFR-binding peptide
  MOD_RES (32)..(33): Xaa is C or S
ARVVMNEYQKYIVNSSDDIFLVSIPSLQTPAXXPK

SEQ ID NO: 10721 - protein, 40 aa, Artificial Sequence
  Non-cyclic GFR-binding peptide
  MOD_RES (2)..(35)..(36): Xaa is C or S
  MOD_RES (13)..(14)..(15)..(16)..(17): Xaa is A or G
  MOD_RES (18)..(19)..(20)..(21): Xaa is A or G or absent
KXSKVIMEYQKYXXXXXXXXXIFLISIPSLDQSVXXPSAS

SEQ ID NO: 10722 - protein, 37 aa, Artificial Sequence
  Non-cyclic GFR-binding peptide
  MOD_RES (1)..(33)..(34): Xaa is C or S
XSRVVMNNSLQEIVNSSDDYYVVPLPELKTPAXXPKP

SEQ ID NO: 10723 - protein, 40 aa, Artificial Sequence
  Non-cyclic GFR-binding peptide
  MOD_RES (1)..(3)..(37)..(38): Xaa is C or S
  MOD_RES (15)..(16)..(17)..(18)..(19): Xaa is A or G
  MOD_RES (20)..(21)..(22)..(23): Xaa is A or G or absent
XGXARVVMNEYQKYXXXXXXXXXIFLVSIPSLQTPAXXPK

SEQ ID NO: 10724 - protein, 36 aa, Artificial Sequence
  Non-cyclic GFR-binding peptide
  MOD_RES (34)..(35): Xaa is C or S
  MOD_RES (12)..(13)..(14)..(15)..(16): Xaa is A or G
  MOD_RES (17)..(18)..(19)..(20): Xaa is A or G or absent
GEVVMENSLQEXXXXXXXXXYYLMTLPELETPVXXA

SEQ ID NO: 10725 - protein, 35 aa, Artificial Sequence
  Non-cyclic GFR-binding peptide
  MOD_RES (1)..(33): Xaa is C or S
XSRVVMNEYQKYIVNSSDDIFLVSIPSLKTPAXTP

SEQ ID NO: 10726 - protein, 35 aa, Artificial Sequence
  Non-cyclic GFR-binding peptide
  MOD_RES (2)..(2): Xaa is C or S
  MOD_RES (14)..(15)..(16)..(17)..(18): Xaa is A or G
  MOD_RES (19)..(20)..(21)..(22): Xaa is A or G or absent
GXARVVMNNSLQEXXXXXXXXXYYVVPLPELQTPA

SEQ ID NO: 10727 - protein, 42 aa, Artificial Sequence
  Non-cyclic GFR-binding peptide
  MOD_RES (2)..(36): Xaa is C or S
  MOD_RES (14)..(15)..(16)..(17)..(18): Xaa is A or G
  MOD_RES (19)..(20)..(21)..(22): Xaa is A or G or absent
GXSRVVMNNSLQEXXXXXXXXXYYLVTLPELKTPAXTPKTVH

SEQ ID NO: 10728 - protein, 40 aa, Artificial Sequence
  Non-cyclic GFR-binding peptide
  MOD_RES (1)..(3)..(35)..(36): Xaa is C or S
XGXGEVVMEEYQKYVVKDYEDIFLMSIPSLETPVXXAKPI

SEQ ID NO: 10729 - protein, 38 aa, Artificial Sequence
  Non-cyclic GFR-binding peptide
  MOD_RES (32)..(33): Xaa is C or S
GEVVMENSLQEVVKDYEDYYVMPLPELETPVXXAKPIS

SEQ ID NO: 10730 - protein, 39 aa, Artificial Sequence
  Non-cyclic GFR-binding peptide
  MOD_RES (33)..(34): Xaa is C or S
  MOD_RES (11)..(12)..(13)..(14)..(15): Xaa is A or G
  MOD_RES (16)..(17)..(18)..(19): Xaa is A or G or absent
RVVMNNSLQEXXXXXXXXXYYVVPLPELKTPAXXPKPVY

SEQ ID NO: 10731 - protein, 40 aa, Artificial Sequence
  Non-cyclic GFR-binding peptide
  MOD_RES (1)..(35)..(36): Xaa is C or S
  MOD_RES (13)..(14)..(15)..(16)..(17): Xaa is A or G
  MOD_RES (18)..(19)..(20)..(21): Xaa is A or G or absent
XGEVVMENSLQEXXXXXXXXXYYLMTLPELETPVXXAKPI

SEQ ID NO: 10732 - protein, 34 aa, Artificial Sequence
  Non-cyclic GFR-binding peptide
  MOD_RES (34)..(34): Xaa is C or S
  MOD_RES (12)..(13)..(14)..(15)..(16): Xaa is A or G
  MOD_RES (17)..(18)..(19)..(20): Xaa is A or G or absent
SEVVMDNSLQEXXXXXXXXXYYVIPLPELRTPVX

SEQ ID NO: 10733 - protein, 40 aa, Artificial Sequence
  Non-cyclic GFR-binding peptide
  MOD_RES (34)..(35): Xaa is C or S
  MOD_RES (12)..(13)..(14)..(15)..(16): Xaa is A or G
  MOD_RES (17)..(18)..(19)..(20): Xaa is A or G or absent
SEVVMDQYNKLXXXXXXXXXLYLISIASLRTPVXXTPPTS

SEQ ID NO: 10734 - protein, 37 aa, Artificial Sequence
  Non-cyclic GFR-binding peptide
  MOD_RES (1)..(33)..(34): Xaa is C or S
XGEVVMENSLQEVVKDYEDYYLMTLPELETPVXXAKP

SEQ ID NO: 10735 - protein, 31 aa, Artificial Sequence
  Non-cyclic GFR-binding peptide
SEVVMDNSLQEVVNNASDYYLITLPELRTPV

SEQ ID NO: 10736 - protein, 38 aa, Artificial Sequence
  Non-cyclic GFR-binding peptide
  MOD_RES (1)..(33)..(34): Xaa is C or S
XGEVVMDNSLQEVVKENEDYYVMPLPELETPVXXAKPI

SEQ ID NO: 10737 - protein, 42 aa, Artificial Sequence
  Non-cyclic GFR-binding peptide
  MOD_RES (2)..(4)..(36)..(37): Xaa is C or S
HXGXARVVMNEYQKYIVNSSDDIFLVSIPSLQTPAXXPKPVT

SEQ ID NO: 10738 - protein, 35 aa, Artificial Sequence
  Non-cyclic GFR-binding peptide
  MOD_RES (31)..(32): Xaa is C or S
SRVIMEYQKYVKPKRGVIFLISIPSLAQPVXXPAA

SEQ ID NO: 10739 - protein, 33 aa, Artificial Sequence
  Non-cyclic GFR-binding peptide
  MOD_RES (31)..(32): Xaa is C or S
EVVMDNSLQEVVNNASDYYVIPLPELRTPVXXT

SEQ ID NO: 10740 - protein, 36 aa, Artificial Sequence
  Non-cyclic GFR-binding peptide
  MOD_RES (2)..(34)..(35): Xaa is C or S
GXSEVVMDNSLQEVVNNASDYYVIPLPELRTPVXXT

SEQ ID NO: 10741 - protein, 38 aa, Artificial Sequence
  Non-cyclic GFR-binding peptide
  MOD_RES (1)..(34)..(35): Xaa is C or S
  MOD_RES (12)..(13)..(14)..(15)..(16): Xaa is A or G
  MOD_RES (17)..(18)..(19)..(20): Xaa is A or G or absent
XSKVIMNSLQEXXXXXXXXXYYVIPLPELDQSVXXPSA

SEQ ID NO: 10742 - protein, 34 aa, Artificial Sequence
  Non-cyclic GFR-binding peptide
  MOD_RES (34)..(34): Xaa is C or S
  MOD_RES (12)..(13)..(14)..(15)..(16): Xaa is A or G
  MOD_RES (17)..(18)..(19)..(20): Xaa is A or G or absent
SEVVMDNSLQEXXXXXXXXXYYLITLPELRTPVX

SEQ ID NO: 10743 - protein, 35 aa, Artificial Sequence
  Non-cyclic GFR-binding peptide
  MOD_RES (34)..(35): Xaa is C or S
  MOD_RES (12)..(13)..(14)..(15)..(16): Xaa is A or G
  MOD_RES (17)..(18)..(19)..(20): Xaa is A or G or absent
SEVVMDNSLQEXXXXXXXXXYYVIPLPELRTPVXX

SEQ ID NO: 10744 - protein, 36 aa, Artificial Sequence
  Non-cyclic GFR-binding peptide
  MOD_RES (2)..(34)..(35): Xaa is C or S
GXGEVVMENSLQEVVKDYEDYYLMTLPELETPVXXA

SEQ ID NO: 10745 - protein, 36 aa, Artificial Sequence
  Non-cyclic GFR-binding peptide
  MOD_RES (33)..(34): Xaa is C or S
  MOD_RES (11)..(12)..(13)..(14)..(15): Xaa is A or G
  MOD_RES (16)..(17)..(18)..(19): Xaa is A or G or absent
EVVMEEYQKYXXXXXXXXXIFLMSIPSLETPVXXAK

SEQ ID NO: 10746 - protein, 36 aa, Artificial Sequence
  Non-cyclic GFR-binding peptide
  MOD_RES (32)..(32): Xaa is C or S
SRVVMNEYQKYIVNSSDDIFLVSIPSLKTPAXTPKT

SEQ ID NO: 10747 - protein, 40 aa, Artificial Sequence
  Non-cyclic GFR-binding peptide
  MOD_RES (2)..(4)..(35)..(36): Xaa is C or S
SXKXSKVVMEYQKYVKPTRGVIFLISIPSLDQPVXXPSAS

SEQ ID NO: 10748 - protein, 40 aa, Artificial Sequence
  Non-cyclic GFR-binding peptide
  MOD_RES (2)..(34)..(35): Xaa is C or S
GXSEVVMDNSLQEVVNNASDYYVIPLPELRTPVXXTPPTS

SEQ ID NO: 10749 - protein, 34 aa, Artificial Sequence
  Non-cyclic GFR-binding peptide
  MOD_RES (33)..(34): Xaa is C or S
  MOD_RES (11)..(12)..(13)..(14)..(15): Xaa is A or G
  MOD_RES (16)..(17)..(18)..(19): Xaa is A or G or absent
RVVMNNSLQEXXXXXXXXXYYLVTLPELKTPAXX

SEQ ID NO: 10750 - protein, 34 aa, Artificial Sequence
  Non-cyclic GFR-binding peptide
  MOD_RES (32)..(33): Xaa is C or S
ARVVMNEYQKYIVNSSDDIFLVSIPSLQTPAXXP

SEQ ID NO: 10751 - protein, 38 aa, Artificial Sequence
  Non-cyclic GFR-binding peptide
  MOD_RES (2)..(34)..(35): Xaa is C or S
GXSEVVMDRYKKLVVNNASDFYLISIANLRTPVXXTPP

SEQ ID NO: 10752 - protein, 37 aa, Artificial Sequence
  Non-cyclic GFR-binding peptide
  MOD_RES (2)..(4)..(36)..(37): Xaa is C or S
RXGXGEVVMDEYQKYVVKENEDIFLMSIPSLETPVXX

SEQ ID NO: 10753 - protein, 31 aa, Artificial Sequence
  Non-cyclic GFR-binding peptide
GEVVMENSLQEVVKDYEDYYVMPLPELETPV

SEQ ID NO: 10754 - protein, 43 aa, Artificial Sequence
  Non-cyclic GFR-binding peptide
  MOD_RES (2)..(4)..(37)..(38): Xaa is C or S
  MOD_RES (15)..(16)..(17)..(18)..(19): Xaa is A or G
  MOD_RES (20)..(21)..(22)..(23): Xaa is A or G or absent
SXKXSKVVMNSLQEXXXXXXXXXYYVIPLPELDQPVXXPSASA

SEQ ID NO: 10755 - protein, 39 aa, Artificial Sequence
  Non-cyclic GFR-binding peptide
  MOD_RES (33)..(34): Xaa is C or S
  MOD_RES (11)..(12)..(13)..(14)..(15): Xaa is A or G
  MOD_RES (16)..(17)..(18)..(19): Xaa is A or G or absent
EVVMENSLQEXXXXXXXXXYYVMPLPELETPVXXAKPIS

SEQ ID NO: 10756 - protein, 39 aa, Artificial Sequence
  Non-cyclic GFR-binding peptide
  MOD_RES (33)..(34): Xaa is C or S
  MOD_RES (11)..(12)..(13)..(14)..(15): Xaa is A or G
  MOD_RES (16)..(17)..(18)..(19): Xaa is A or G or absent
SRVIMEYQKYXXXXXXXXXIFLISIPSLAQPVXXPAASA

SEQ ID NO: 10757 - protein, 34 aa, Artificial Sequence
  Non-cyclic GFR-binding peptide
  MOD_RES (31)..(32): Xaa is C or S
EVVMDQYNKLVVNNASDLYLISIASLRTPVXXTP

SEQ ID NO: 10758 - protein, 37 aa, Artificial Sequence
  Non-cyclic GFR-binding peptide
  MOD_RES (32)..(33): Xaa is C or S
GEVVMDEYQKYVVKENEDIFLMSIPSLETPVXXAKPI

SEQ ID NO: 10759 - protein, 31 aa, Artificial Sequence
  Non-cyclic GFR-binding peptide
  MOD_RES (31)..(31): Xaa is C or S
EVVMDNSLQEVVKENEDYYLMTLPELETPVX

SEQ ID NO: 10760 - protein, 38 aa, Artificial Sequence
  Non-cyclic GFR-binding peptide
  MOD_RES (1)..(3)..(37)..(38): Xaa is C or S
  MOD_RES (15)..(16)..(17)..(18)..(19): Xaa is A or G
  MOD_RES (20)..(21)..(22)..(23): Xaa is A or G or absent
XGXGEVVMDNSLQEXXXXXXXXXYYLMTLPELETPVXX

SEQ ID NO: 10761 - protein, 36 aa, Artificial Sequence
  Non-cyclic GFR-binding peptide
  MOD_RES (1)..(3)..(35)..(36): Xaa is C or S
XGXSRVVMNNSLQEIVNSSDDYYLVTLPELKTPAXX

SEQ ID NO: 10762 - protein, 41 aa, Artificial Sequence
  Non-cyclic GFR-binding peptide
  MOD_RES (1)..(3)..(37): Xaa is C or S
  MOD_RES (15)..(16)..(17)..(18)..(19): Xaa is A or G
  MOD_RES (20)..(21)..(22)..(23): Xaa is A or G or absent
XGXSRVVMNNSLQEXXXXXXXXXYYLVTLPELKTPAXTPKT

SEQ ID NO: 10763 - protein, 34 aa, Artificial Sequence
  Non-cyclic GFR-binding peptide
  MOD_RES (1)..(32)..(33): Xaa is C or S
XSKVIMNSLQEIKPTKGIYYVIPLPELDQSVXXP

SEQ ID NO: 10764 - protein, 38 aa, Artificial Sequence
  Non-cyclic GFR-binding peptide
  MOD_RES (2)..(35)..(36): Xaa is C or S
  MOD_RES (13)..(14)..(15)..(16)..(17): Xaa is A or G
  MOD_RES (18)..(19)..(20)..(21): Xaa is A or G or absent
KXSKVIMEYQKYXXXXXXXXXIFLISIPSLDQSVXXPS

SEQ ID NO: 10765 - protein, 37 aa, Artificial Sequence
  Non-cyclic GFR-binding peptide
  MOD_RES (31)..(32): Xaa is C or S
SKVIMEYQKYIKPTKGIIFLISIPSLDQSVXXPSASA

SEQ ID NO: 10766 - protein, 33 aa, Artificial Sequence
  Non-cyclic GFR-binding peptide
  MOD_RES (33)..(33): Xaa is C or S
  MOD_RES (11)..(12)..(13)..(14)..(15): Xaa is A or G
  MOD_RES (16)..(17)..(18)..(19): Xaa is A or G or absent
EVVMDNSLQEXXXXXXXXXYYVIPLPELRTPVX

SEQ ID NO: 10767 - protein, 39 aa, Artificial Sequence
  Non-cyclic GFR-binding peptide
  MOD_RES (1)..(34)..(35): Xaa is C or S
  MOD_RES (12)..(13)..(14)..(15)..(16): Xaa is A or G
  MOD_RES (17)..(18)..(19)..(20): Xaa is A or G or absent
XSKVVMNSLQEXXXXXXXXXYYVIPLPELDQPVXXPSAS

SEQ ID NO: 10768 - protein, 36 aa, Artificial Sequence
  Non-cyclic GFR-binding peptide
  MOD_RES (2)..(36): Xaa is C or S
  MOD_RES (14)..(15)..(16)..(17)..(18): Xaa is A or G
  MOD_RES (19)..(20)..(21)..(22): Xaa is A or G or absent
GXSRVVMNNSLQEXXXXXXXXXYYVVPLPELKTPAX

SEQ ID NO: 10769 - protein, 35 aa, Artificial Sequence
  Non-cyclic GFR-binding peptide
  MOD_RES (33)..(34): Xaa is C or S
  MOD_RES (11)..(12)..(13)..(14)..(15): Xaa is A or G
  MOD_RES (16)..(17)..(18)..(19): Xaa is A or G or absent
RVVMNEYQKYXXXXXXXXXIFLVSIPSLKTPAXXP

SEQ ID NO: 10770 - protein, 37 aa, Artificial Sequence
  Non-cyclic GFR-binding peptide
  MOD_RES (2)..(4)..(36)..(37): Xaa is C or S
RXGXGEVVMDNSLQEVVKENEDYYLMTLPELETPVXX

SEQ ID NO: 10771 - protein, 36 aa, Artificial Sequence
  Non-cyclic GFR-binding peptide
  MOD_RES (1)..(3)..(35)..(36): Xaa is C or S
XGXSRVVMNEYQKYIVNSSDDIFLVSIPSLKTPAXX

SEQ ID NO: 10772 - protein, 37 aa, Artificial Sequence
  Non-cyclic GFR-binding peptide
  MOD_RES (2)..(36)..(37): Xaa is C or S
  MOD_RES (14)..(15)..(16)..(17)..(18): Xaa is A or G
  MOD_RES (19)..(20)..(21)..(22): Xaa is A or G or absent
GXARVVMNNSLQEXXXXXXXXXYYVVPLPELQTPAXX

SEQ ID NO: 10773 - protein, 38 aa, Artificial Sequence
  Non-cyclic GFR-binding peptide
  MOD_RES (2)..(33)..(34): Xaa is C or S
KXSRVIMEYQKYVKPKRGVIFLISIPSLAQPVXXPAAS

SEQ ID NO: 10774 - protein, 38 aa, Artificial Sequence
  Non-cyclic GFR-binding peptide
  MOD_RES (1)..(33)..(34): Xaa is C or S
XARVVMNNSLQEIVNSSDDYYLVTLPELQTPAXXPKPV

SEQ ID NO: 10775 - protein, 39 aa, Artificial Sequence
  Non-cyclic GFR-binding peptide
  MOD_RES (2)..(4)..(37)..(38): Xaa is C or S
  MOD_RES (15)..(16)..(17)..(18)..(19): Xaa is A or G
  MOD_RES (20)..(21)..(22)..(23): Xaa is A or G or absent
SXKXSKVVMNSLQEXXXXXXXXXYYVIPLPELDQPVXXP

SEQ ID NO: 10776 - protein, 34 aa, Artificial Sequence
  Non-cyclic GFR-binding peptide
  MOD_RES (2)..(34): Xaa is C or S
GXGEVVMENSLQEVVKDYEDYYVMPLPELETPVX

SEQ ID NO: 10777 - protein, 36 aa, Artificial Sequence
  Non-cyclic GFR-binding peptide
  MOD_RES (34)..(35): Xaa is C or S
  MOD_RES (12)..(13)..(14)..(15)..(16): Xaa is A or G
  MOD_RES (17)..(18)..(19)..(20): Xaa is A or G or absent
GEVVMEEYQKYXXXXXXXXXIFLMSIPSLETPVXXA

SEQ ID NO: 10778 - protein, 34 aa, Artificial Sequence
  Non-cyclic GFR-binding peptide
  MOD_RES (33)..(34): Xaa is C or S
  MOD_RES (11)..(12)..(13)..(14)..(15): Xaa is A or G
  MOD_RES (16)..(17)..(18)..(19): Xaa is A or G or absent
EVVMEEYQKYXXXXXXXXXIFLMSIPSLETPVXX

SEQ ID NO: 10779 - protein, 34 aa, Artificial Sequence
  Non-cyclic GFR-binding peptide
  MOD_RES (31)..(32): Xaa is C or S
SKVIMEYQKYIKPTKGIIFLISIPSLDQSVXXPS

SEQ ID NO: 10780 - protein, 36 aa, Artificial Sequence
  Non-cyclic GFR-binding peptide
  MOD_RES (34)..(35): Xaa is C or S
  MOD_RES (12)..(13)..(14)..(15)..(16): Xaa is A or G
  MOD_RES (17)..(18)..(19)..(20): Xaa is A or G or absent
GEVVMENSLQEXXXXXXXXXYYVMPLPELETPVXXA

SEQ ID NO: 10781 - protein, 36 aa, Artificial Sequence
  Non-cyclic GFR-binding peptide
  MOD_RES (1)..(3): Xaa is C or S
  MOD_RES (15)..(16)..(17)..(18)..(19): Xaa is A or G
  MOD_RES (20)..(21)..(22)..(23): Xaa is A or G or absent
XGXGEVVMEEYQKYXXXXXXXXXIFLMSIPSLETPV

SEQ ID NO: 10782 - protein, 39 aa, Artificial Sequence
  Non-cyclic GFR-binding peptide
  MOD_RES (2)..(36)..(37): Xaa is C or S
  MOD_RES (14)..(15)..(16)..(17)..(18): Xaa is A or G
  MOD_RES (19)..(20)..(21)..(22): Xaa is A or G or absent
GXGEVVMDNSLQEXXXXXXXXXYYLMTLPELETPVXXAK

SEQ ID NO: 10783 - protein, 43 aa, Artificial Sequence
  Non-cyclic GFR-binding peptide
  MOD_RES (2)..(4)..(38): Xaa is C or S
  MOD_RES (16)..(17)..(18)..(19)..(20): Xaa is A or G
  MOD_RES (21)..(22)..(23)..(24): Xaa is A or G or absent
HXGXSRVVMNNSLQEXXXXXXXXXYYLVTLPELKTPAXTPKTV

SEQ ID NO: 10784 - protein, 40 aa, Artificial Sequence
  Non-cyclic GFR-binding peptide
  MOD_RES (1)..(35)..(36): Xaa is C or S
  MOD_RES (13)..(14)..(15)..(16)..(17): Xaa is A or G
  MOD_RES (18)..(19)..(20)..(21): Xaa is A or G or absent
XSEVVMDNSLQEXXXXXXXXXYYLITLPELRTPVXXTPPT

SEQ ID NO: 10785 - protein, 40 aa, Artificial Sequence
  Non-cyclic GFR-binding peptide
  MOD_RES (2)..(36)..(37): Xaa is C or S
  MOD_RES (14)..(15)..(16)..(17)..(18): Xaa is A or G
  MOD_RES (19)..(20)..(21)..(22): Xaa is A or G or absent
GXSRVVMNEYQKYXXXXXXXXXIFLVSIPSLKTPAXXPKP

SEQ ID NO: 10786 - protein, 39 aa, Artificial Sequence
  Non-cyclic GFR-binding peptide
  MOD_RES (2)..(34)..(35): Xaa is C or S
GXARVVMNNSLQEIVNSSDDYYLVTLPELQTPAXXPKPV

SEQ ID NO: 10787 - protein, 38 aa, Artificial Sequence
  Non-cyclic GFR-binding peptide
  MOD_RES (34)..(35): Xaa is C or S
  MOD_RES (12)..(13)..(14)..(15)..(16): Xaa is A or G
  MOD_RES (17)..(18)..(19)..(20): Xaa is A or G or absent
GEVVMDNSLQEXXXXXXXXXYYVMPLPELETPVXXAKP

SEQ ID NO: 10788 - protein, 38 aa, Artificial Sequence
  Non-cyclic GFR-binding peptide
  MOD_RES (2)..(34)..(35): Xaa is C or S
GXSEVVMDNSLQEVVNNASDYYVIPLPELRTPVXXTPP

SEQ ID NO: 10789 - protein, 40 aa, Artificial Sequence
  Non-cyclic GFR-binding peptide
  MOD_RES (1)..(35): Xaa is C or S
  MOD_RES (13)..(14)..(15)..(16)..(17): Xaa is A or G
  MOD_RES (18)..(19)..(20)..(21): Xaa is A or G or absent
XSRVVMNEYQKYXXXXXXXXXIFLVSIPSLKTPAXTPKTV

SEQ ID NO: 10790 - protein, 38 aa, Artificial Sequence
  Non-cyclic GFR-binding peptide
  MOD_RES (1)..(3)..(37)..(38): Xaa is C or S
  MOD_RES (15)..(16)..(17)..(18)..(19): Xaa is A or G
  MOD_RES (20)..(21)..(22)..(23): Xaa is A or G or absent
XGXGEVVMENSLQEXXXXXXXXXYYLMTLPELETPVXX

SEQ ID NO: 10791 - protein, 34 aa, Artificial Sequence
  Non-cyclic GFR-binding peptide
  MOD_RES (2)..(34): Xaa is C or S
GXSEVVMDRYKKLVVNNASDFYLISIANLRTPVX

SEQ ID NO: 10792 - protein, 37 aa, Artificial Sequence
  Non-cyclic GFR-binding peptide
  MOD_RES (1)..(35)..(36): Xaa is C or S
  MOD_RES (13)..(14)..(15)..(16)..(17): Xaa is A or G
  MOD_RES (18)..(19)..(20)..(21): Xaa is A or G or absent
XARVVMNEYQKYXXXXXXXXXIFLVSIPSLQTPAXXP

SEQ ID NO: 10793 - protein, 37 aa, Artificial Sequence
  Non-cyclic GFR-binding peptide
  MOD_RES (1)..(3)..(37): Xaa is C or S
  MOD_RES (15)..(16)..(17)..(18)..(19): Xaa is A or G
  MOD_RES (20)..(21)..(22)..(23): Xaa is A or G or absent
XGXSEVVMDNSLQEXXXXXXXXXYYLITLPELRTPVX

SEQ ID NO: 10794 - protein, 35 aa, Artificial Sequence
  Non-cyclic GFR-binding peptide
  MOD_RES (32)..(33): Xaa is C or S
GEVVMEEYQKYVVKDYEDIFLMSIPSLETPVXXAK

SEQ ID NO: 10795 - protein, 39 aa, Artificial Sequence
  Non-cyclic GFR-binding peptide
  MOD_RES (33)..(34): Xaa is C or S
  MOD_RES (11)..(12)..(13)..(14)..(15): Xaa is A or G
  MOD_RES (16)..(17)..(18)..(19): Xaa is A or G or absent
EVVMENSLQEXXXXXXXXXYYLMTLPELETPVXXAKPIS

SEQ ID NO: 10796 - protein, 41 aa, Artificial Sequence
  Non-cyclic GFR-binding peptide
  MOD_RES (1)..(3)..(37)..(38): Xaa is C or S
  MOD_RES (15)..(16)..(17)..(18)..(19): Xaa is A or G
  MOD_RES (20)..(21)..(22)..(23): Xaa is A or G or absent
XGXGEVVMEEYQKYXXXXXXXXXIFLMSIPSLETPVXXAKP

SEQ ID NO: 10797 - protein, 35 aa, Artificial Sequence
  Non-cyclic GFR-binding peptide
  MOD_RES (1)..(35): Xaa is C or S
  MOD_RES (13)..(14)..(15)..(16)..(17): Xaa is A or G
  MOD_RES (18)..(19)..(20)..(21): Xaa is A or G or absent
XGEVVMENSLQEXXXXXXXXXYYVMPLPELETPVX

SEQ ID NO: 10798 - protein, 42 aa, Artificial Sequence
  Non-cyclic GFR-binding peptide
  MOD_RES (2)..(36): Xaa is C or S
  MOD_RES (14)..(15)..(16)..(17)..(18): Xaa is A or G
  MOD_RES (19)..(20)..(21)..(22): Xaa is A or G or absent
GXSRVVMNEYQKYXXXXXXXXXIFLVSIPSLKTPAXTPKTVH

SEQ ID NO: 10799 - protein, 34 aa, Artificial Sequence
  Non-cyclic GFR-binding peptide
  MOD_RES (1)..(33)..(34): Xaa is C or S
XARVVMNNSLQEIVNSSDDYYVVPLPELQTPAXX

SEQ ID NO: 10800 - protein, 39 aa, Artificial Sequence
  Non-cyclic GFR-binding peptide
  MOD_RES (1)..(3)..(37)..(38): Xaa is C or S
  MOD_RES (15)..(16)..(17)..(18)..(19): Xaa is A or G
  MOD_RES (20)..(21)..(22)..(23): Xaa is A or G or absent
XGXSEVVMDQYNKLXXXXXXXXXLYLISIASLRTPVXXT

SEQ ID NO: 10801 - protein, 43 aa, Artificial Sequence
  Non-cyclic GFR-binding peptide
  MOD_RES (1)..(3)..(37)..(38): Xaa is C or S
  MOD_RES (15)..(16)..(17)..(18)..(19): Xaa is A or G
  MOD_RES (20)..(21)..(22)..(23): Xaa is A or G or absent
XGXARVVMNNSLQEXXXXXXXXXYYLVTLPELQTPAXXPKPVT

SEQ ID NO: 10802 - protein, 41 aa, Artificial Sequence
  Non-cyclic GFR-binding peptide
  MOD_RES (1)..(3)..(37)..(38): Xaa is C or S
  MOD_RES (15)..(16)..(17)..(18)..(19): Xaa is A or G
  MOD_RES (20)..(21)..(22)..(23): Xaa is A or G or absent
XGXGEVVMDEYQKYXXXXXXXXXIFLMSIPSLETPVXXAKP

SEQ ID NO: 10803 - protein, 41 aa, Artificial Sequence
  Non-cyclic GFR-binding peptide
  MOD_RES (1)..(3)..(35)..(36): Xaa is C or S
XGXGEVVMDNSLQEVVKENEDYYLMTLPELETPVXXAKPIK

SEQ ID NO: 10804 - protein, 32 aa, Artificial Sequence
  Non-cyclic GFR-binding peptide
  MOD_RES (31)..(32): Xaa is C or S
SRVIMNSLQEVKPKRGVYYLITLPELAQPVXX

SEQ ID NO: 10805 - protein, 38 aa, Artificial Sequence
  Non-cyclic GFR-binding peptide
  MOD_RES (1)..(33): Xaa is C or S
XSRVVMNNSLQEIVNSSDDYYLVTLPELKTPAXTPKTV

SEQ ID NO: 10806 - protein, 35 aa, Artificial Sequence
  Non-cyclic GFR-binding peptide
  MOD_RES (1)..(33)..(34): Xaa is C or S
XSEVVMDQYNKLVVNNASDLYLISIASLRTPVXXT

SEQ ID NO: 10807 - protein, 36 aa, Artificial Sequence
  Non-cyclic GFR-binding peptide
  MOD_RES (31)..(32): Xaa is C or S
RVVMNEYQKYIVNSSDDIFLVSIPSLQTPAXXPKPV

SEQ ID NO: 10808 - protein, 40 aa, Artificial Sequence
  Non-cyclic GFR-binding peptide
  MOD_RES (2)..(36)..(37): Xaa is C or S
  MOD_RES (14)..(15)..(16)..(17)..(18): Xaa is A or G
  MOD_RES (19)..(20)..(21)..(22): Xaa is A or G or absent
GXSRVVMNNSLQEXXXXXXXXXYYLVTLPELKTPAXXPKP

SEQ ID NO: 10809 - protein, 38 aa, Artificial Sequence
  Non-cyclic GFR-binding peptide
  MOD_RES (2)..(4)..(36)..(37): Xaa is C or S
RXGXSEVVMDNSLQEVVNNASDYYVIPLPELRTPVXXT

SEQ ID NO: 10810 - protein, 36 aa, Artificial Sequence
  Non-cyclic GFR-binding peptide
  MOD_RES (1)..(33)..(34): Xaa is C or S
XGEVVMENSLQEVVKDYEDYYLMTLPELETPVXXAK

SEQ ID NO: 10811 - protein, 30 aa, Artificial Sequence
  Non-cyclic GFR-binding peptide
RVVMNNSLQEIVNSSDDYYVVPLPELKTPA

SEQ ID NO: 10812 - protein, 33 aa, Artificial Sequence
  Non-cyclic GFR-binding peptide
  MOD_RES (12)..(13)..(14)..(15)..(16): Xaa is A or G
  MOD_RES (17)..(18)..(19)..(20): Xaa is A or G or absent
SRVVMNEYQKYXXXXXXXXXIFLVSIPSLKTPA

SEQ ID NO: 10813 - protein, 44 aa, Artificial Sequence
  Non-cyclic GFR-binding peptide
  MOD_RES (2)..(4)..(38)..(39): Xaa is C or S
  MOD_RES (16)..(17)..(18)..(19)..(20): Xaa is A or G
  MOD_RES (21)..(22)..(23)..(24): Xaa is A or G or absent
RXGXGEVVMDNSLQEXXXXXXXXXYYVMPLPELETPVXXAKPIK

SEQ ID NO: 10814 - protein, 36 aa, Artificial Sequence
  Non-cyclic GFR-binding peptide
  MOD_RES (2)..(35)..(36): Xaa is C or S
  MOD_RES (13)..(14)..(15)..(16)..(17): Xaa is A or G
  MOD_RES (18)..(19)..(20)..(21): Xaa is A or G or absent
KXSRVIMEYQKYXXXXXXXXXIFLISIPSLAQPVXX

SEQ ID NO: 10815 - protein, 40 aa, Artificial Sequence
  Non-cyclic GFR-binding peptide
  MOD_RES (2)..(35)..(36): Xaa is C or S
  MOD_RES (13)..(14)..(15)..(16)..(17): Xaa is A or G
  MOD_RES (18)..(19)..(20)..(21): Xaa is A or G or absent
KXSKVVMNSLQEXXXXXXXXXYYVIPLPELDQPVXXPSAS

SEQ ID NO: 10816 - protein, 37 aa, Artificial Sequence
  Non-cyclic GFR-binding peptide
  MOD_RES (2)..(4)..(36)..(37): Xaa is C or S
HXGXSRVVMNEYQKYIVNSSDDIFLVSIPSLKTPAXX

SEQ ID NO: 10817 - protein, 33 aa, Artificial Sequence
  Non-cyclic GFR-binding peptide
  MOD_RES (1)..(33): Xaa is C or S
XARVVMNNSLQEIVNSSDDYYVVPLPELQTPAX

SEQ ID NO: 10818 - protein, 36 aa, Artificial Sequence
  Non-cyclic GFR-binding peptide
  MOD_RES (1)..(3)..(35)..(36): Xaa is C or S
XGXSEVVMDNSLQEVVNNASDYYVIPLPELRTPVXX

SEQ ID NO: 10819 - protein, 38 aa, Artificial Sequence
  Non-cyclic GFR-binding peptide
  MOD_RES (1)..(32)..(33): Xaa is C or S
XSRVIMEYQKYVKPKRGVIFLISIPSLAQPVXXPAASA

SEQ ID NO: 10820 - protein, 33 aa, Artificial Sequence
  Non-cyclic GFR-binding peptide
  MOD_RES (1)..(3): Xaa is C or S
XKXSKVIMNSLQEIKPTKGIYYVIPLPELDQSV

SEQ ID NO: 10821 - protein, 31 aa, Artificial Sequence
  Non-cyclic GFR-binding peptide
GEVVMENSLQEVVKDYEDYYLMTLPELETPV

SEQ ID NO: 10822 - protein, 34 aa, Artificial Sequence
  Non-cyclic GFR-binding peptide
  MOD_RES (1)..(1): Xaa is C or S
  MOD_RES (13)..(14)..(15)..(16)..(17): Xaa is A or G
  MOD_RES (18)..(19)..(20)..(21): Xaa is A or G or absent
XGEVVMENSLQEXXXXXXXXXYYVMPLPELETPV

SEQ ID NO: 10823 - protein, 37 aa, Artificial Sequence
  Non-cyclic GFR-binding peptide
  MOD_RES (2)..(4)..(35)..(36): Xaa is C or S
SXKXSKVVMNSLQEVKPTRGVYYVIPLPELDQPVXXP

SEQ ID NO: 10824 - protein, 41 aa, Artificial Sequence
  Non-cyclic GFR-binding peptide
  MOD_RES (1)..(3)..(37): Xaa is C or S
  MOD_RES (15)..(16)..(17)..(18)..(19): Xaa is A or G
  MOD_RES (20)..(21)..(22)..(23): Xaa is A or G or absent
XGXSRVVMNNSLQEXXXXXXXXXYYVVPLPELKTPAXTPKT

SEQ ID NO: 10825 - protein, 36 aa, Artificial Sequence
  Non-cyclic GFR-binding peptide
  MOD_RES (1)..(34)..(35): Xaa is C or S
  MOD_RES (12)..(13)..(14)..(15)..(16): Xaa is A or G
  MOD_RES (17)..(18)..(19)..(20): Xaa is A or G or absent
XSKVVMEYQKYXXXXXXXXXIFLISIPSLDQPVXXP

SEQ ID NO: 10826 - protein, 35 aa, Artificial Sequence
  Non-cyclic GFR-binding peptide
  MOD_RES (31)..(32): Xaa is C or S
EVVMEEYQKYVVKDYEDIFLMSIPSLETPVXXAKP

SEQ ID NO: 10827 - protein, 40 aa, Artificial Sequence
  Non-cyclic GFR-binding peptide
  MOD_RES (2)..(4)..(36)..(37): Xaa is C or S
RXGXSEVVMDNSLQEVVNNASDYYVIPLPELRTPVXXTPP

SEQ ID NO: 10828 - protein, 33 aa, Artificial Sequence
  Non-cyclic GFR-binding peptide
  MOD_RES (1)..(1): Xaa is C or S
  MOD_RES (12)..(13)..(14)..(15)..(16): Xaa is A or G
  MOD_RES (17)..(18)..(19)..(20): Xaa is A or G or absent
XSKVVMEYQKYXXXXXXXXXIFLISIPSLDQPV

SEQ ID NO: 10829 - protein, 34 aa, Artificial Sequence
  Non-cyclic GFR-binding peptide
  MOD_RES (1)..(1): Xaa is C or S
  MOD_RES (13)..(14)..(15)..(16)..(17): Xaa is A or G
  MOD_RES (18)..(19)..(20)..(21): Xaa is A or G or absent
XSEVVMDRYKKLXXXXXXXXXFYLISIANLRTPV

SEQ ID NO: 10830 - protein, 34 aa, Artificial Sequence
  Non-cyclic GFR-binding peptide
  MOD_RES (1)..(1): Xaa is C or S
  MOD_RES (13)..(14)..(15)..(16)..(17): Xaa is A or G
  MOD_RES (18)..(19)..(20)..(21): Xaa is A or G or absent
XARVVMNNSLQEXXXXXXXXXYYVVPLPELQTPA

SEQ ID NO: 10831 - protein, 37 aa, Artificial Sequence
  Non-cyclic GFR-binding peptide
  MOD_RES (2)..(33)..(34): Xaa is C or S
KXSKVIMNSLQEIKPTKGIYYVIPLPELDQSVXXPSA

SEQ ID NO: 10832 - protein, 31 aa, Artificial Sequence
  Non-cyclic GFR-binding peptide
  MOD_RES (31)..(31): Xaa is C or S
SKVIMEYQKYIKPTKGIIFLISIPSLDQSVX

SEQ ID NO: 10833 - protein, 35 aa, Artificial Sequence
  Non-cyclic GFR-binding peptide
  MOD_RES (2)..(4): Xaa is C or S
HXGXSRVVMNEYQKYIVNSSDDIFLVSIPSLKTPA

SEQ ID NO: 10834 - protein, 34 aa, Artificial Sequence
  Non-cyclic GFR-binding peptide
  MOD_RES (32)..(33): Xaa is C or S
GEVVMEEYQKYVVKDYEDIFLMSIPSLETPVXXA

SEQ ID NO: 10835 - protein, 40 aa, Artificial Sequence
  Non-cyclic GFR-binding peptide
  MOD_RES (1)..(3)..(35)..(36): Xaa is C or S
XGXGEVVMDEYQKYVVKENEDIFLMSIPSLETPVXXAKPI

SEQ ID NO: 10836 - protein, 38 aa, Artificial Sequence
  Non-cyclic GFR-binding peptide
  MOD_RES (1)..(35)..(36): Xaa is C or S
  MOD_RES (13)..(14)..(15)..(16)..(17): Xaa is A or G
  MOD_RES (18)..(19)..(20)..(21): Xaa is A or G or absent
XSRVVMNEYQKYXXXXXXXXXIFLVSIPSLKTPAXXPK

SEQ ID NO: 10837 - protein, 40 aa, Artificial Sequence
  Non-cyclic GFR-binding peptide
  MOD_RES (1)..(3)..(35)..(36): Xaa is C or S
XGXGEVVMDNSLQEVVKENEDYYLMTLPELETPVXXAKPI

SEQ ID NO: 10838 - protein, 34 aa, Artificial Sequence
  Non-cyclic GFR-binding peptide
  MOD_RES (2)..(33)..(34): Xaa is C or S
KXSKVVMEYQKYVKPTRGVIFLISIPSLDQPVXX

SEQ ID NO: 10839 - protein, 39 aa, Artificial Sequence
  Non-cyclic GFR-binding peptide
  MOD_RES (33)..(33): Xaa is C or S
  MOD_RES (11)..(12)..(13)..(14)..(15): Xaa is A or G
  MOD_RES (16)..(17)..(18)..(19): Xaa is A or G or absent
RVVMNEYQKYXXXXXXXXXIFLVSIPSLKTPAXTPKTVH

SEQ ID NO: 10840 - protein, 36 aa, Artificial Sequence
  Non-cyclic GFR-binding peptide
  MOD_RES (1)..(35)..(36): Xaa is C or S
  MOD_RES (13)..(14)..(15)..(16)..(17): Xaa is A or G
  MOD_RES (18)..(19)..(20)..(21): Xaa is A or G or absent
XSEVVMDNSLQEXXXXXXXXXYYVIPLPELRTPVXX

SEQ ID NO: 10841 - protein, 37 aa, Artificial Sequence
  Non-cyclic GFR-binding peptide
  MOD_RES (1)..(34)..(35): Xaa is C or S
  MOD_RES (12)..(13)..(14)..(15)..(16): Xaa is A or G
  MOD_RES (17)..(18)..(19)..(20): Xaa is A or G or absent
XSRVIMEYQKYXXXXXXXXXIFLISIPSLAQPVXXPA

SEQ ID NO: 10842 - protein, 37 aa, Artificial Sequence
  Non-cyclic GFR-binding peptide
  MOD_RES (1)..(35): Xaa is C or S
  MOD_RES (13)..(14)..(15)..(16)..(17): Xaa is A or G
  MOD_RES (18)..(19)..(20)..(21): Xaa is A or G or absent
XSRVVMNNSLQEXXXXXXXXXYYLVTLPELKTPAXTP

SEQ ID NO: 10843 - protein, 38 aa, Artificial Sequence
  Non-cyclic GFR-binding peptide
  MOD_RES (33)..(34): Xaa is C or S
  MOD_RES (11)..(12)..(13)..(14)..(15): Xaa is A or G
  MOD_RES (16)..(17)..(18)..(19): Xaa is A or G or absent
EVVMDNSLQEXXXXXXXXXYYLMTLPELETPVXXAKPI

SEQ ID NO: 10844 - protein, 37 aa, Artificial Sequence
  Non-cyclic GFR-binding peptide
  MOD_RES (32)..(33): Xaa is C or S
SRVVMNEYQKYIVNSSDDIFLVSIPSLKTPAXXPKPV

SEQ ID NO: 10845 - protein, 34 aa, Artificial Sequence
  Non-cyclic GFR-binding peptide
  MOD_RES (1)..(33)..(34): Xaa is C or S
XGEVVMDNSLQEVVKENEDYYVMPLPELETPVXX

SEQ ID NO: 10846 - protein, 41 aa, Artificial Sequence
  Non-cyclic GFR-binding peptide
  MOD_RES (2)..(4)..(36): Xaa is C or S
HXGXSRVVMNEYQKYIVNSSDDIFLVSIPSLKTPAXTPKTV

SEQ ID NO: 10847 - protein, 39 aa, Artificial Sequence
  Non-cyclic GFR-binding peptide
  MOD_RES (2)..(34)..(35): Xaa is C or S
GXARVVMNEYQKYIVNSSDDIFLVSIPSLQTPAXXPKPV

SEQ ID NO: 10848 - protein, 41 aa, Artificial Sequence
  Non-cyclic GFR-binding peptide
  MOD_RES (1)..(35)..(36): Xaa is C or S
  MOD_RES (13)..(14)..(15)..(16)..(17): Xaa is A or G
  MOD_RES (18)..(19)..(20)..(21): Xaa is A or G or absent
XARVVMNEYQKYXXXXXXXXXIFLVSIPSLQTPAXXPKPVT

SEQ ID NO: 10849 - protein, 39 aa, Artificial Sequence
  Non-cyclic GFR-binding peptide
  MOD_RES (2)..(34)..(35): Xaa is C or S
GXSRVVMNNSLQEIVNSSDDYYVVPLPELKTPAXXPKPV

SEQ ID NO: 10850 - protein, 38 aa, Artificial Sequence
  Non-cyclic GFR-binding peptide
  MOD_RES (2)..(4)..(36)..(37): Xaa is C or S
HXGXSRVVMNNSLQEIVNSSDDYYLVTLPELKTPAXXP

SEQ ID NO: 10851 - protein, 38 aa, Artificial Sequence
  Non-cyclic GFR-binding peptide
  MOD_RES (1)..(3)..(37)..(38): Xaa is C or S
  MOD_RES (15)..(16)..(17)..(18)..(19): Xaa is A or G
  MOD_RES (20)..(21)..(22)..(23): Xaa is A or G or absent
XGXSRVVMNEYQKYXXXXXXXXXIFLVSIPSLKTPAXX

SEQ ID NO: 10852 - protein, 38 aa, Artificial Sequence
  Non-cyclic GFR-binding peptide
  MOD_RES (33)..(34): Xaa is C or S
  MOD_RES (11)..(12)..(13)..(14)..(15): Xaa is A or G
  MOD_RES (16)..(17)..(18)..(19): Xaa is A or G or absent
EVVMDNSLQEXXXXXXXXXYYVMPLPELETPVXXAKPI

SEQ ID NO: 10853 - protein, 36 aa, Artificial Sequence
  Non-cyclic GFR-binding peptide
  MOD_RES (31)..(32): Xaa is C or S
EVVMDNSLQEVVNNASDYYVIPLPELRTPVXXTPPT

SEQ ID NO: 10854 - protein, 34 aa, Artificial Sequence
  Non-cyclic GFR-binding peptide
  MOD_RES (33)..(34): Xaa is C or S
  MOD_RES (11)..(12)..(13)..(14)..(15): Xaa is A or G
  MOD_RES (16)..(17)..(18)..(19): Xaa is A or G or absent
SRVIMEYQKYXXXXXXXXXIFLISIPSLAQPVXX

SEQ ID NO: 10855 - protein, 36 aa, Artificial Sequence
  Non-cyclic GFR-binding peptide
  MOD_RES (1)..(3)..(35)..(36): Xaa is C or S
XGXSEVVMDQYNKLVVNNASDLYLISIASLRTPVXX

SEQ ID NO: 10856 - protein, 37 aa, Artificial Sequence
  Non-cyclic GFR-binding peptide
  MOD_RES (2)..(4): Xaa is C or S
  MOD_RES (16)..(17)..(18)..(19)..(20): Xaa is A or G
  MOD_RES (21)..(22)..(23)..(24): Xaa is A or G or absent
RXGXGEVVMDEYQKYXXXXXXXXXIFLMSIPSLETPV

SEQ ID NO: 10857 - protein, 39 aa, Artificial Sequence
  Non-cyclic GFR-binding peptide
  MOD_RES (2)..(36): Xaa is C or S
  MOD_RES (14)..(15)..(16)..(17)..(18): Xaa is A or G
  MOD_RES (19)..(20)..(21)..(22): Xaa is A or G or absent
GXSRVVMNNSLQEXXXXXXXXXYYVVPLPELKTPAXTPK

SEQ ID NO: 10858 - protein, 41 aa, Artificial Sequence
  Non-cyclic GFR-binding peptide
  MOD_RES (1)..(3)..(37)..(38): Xaa is C or S
  MOD_RES (15)..(16)..(17)..(18)..(19): Xaa is A or G
  MOD_RES (20)..(21)..(22)..(23): Xaa is A or G or absent
XGXSRVVMNNSLQEXXXXXXXXXYYLVTLPELKTPAXXPKP

SEQ ID NO: 10859 - protein, 35 aa, Artificial Sequence
  Non-cyclic GFR-binding peptide
  MOD_RES (2)..(4): Xaa is C or S
RXGXGEVVMDEYQKYVVKENEDIFLMSIPSLETPV

SEQ ID NO: 10860 - protein, 41 aa, Artificial Sequence
  Non-cyclic GFR-binding peptide
  MOD_RES (1)..(35): Xaa is C or S
  MOD_RES (13)..(14)..(15)..(16)..(17): Xaa is A or G
  MOD_RES (18)..(19)..(20)..(21): Xaa is A or G or absent
XSRVVMNEYQKYXXXXXXXXXIFLVSIPSLKTPAXTPKTVH

SEQ ID NO: 10861 - protein, 35 aa, Artificial Sequence
  Non-cyclic GFR-binding peptide
  MOD_RES (33)..(34): Xaa is C or S
  MOD_RES (11)..(12)..(13)..(14)..(15): Xaa is A or G
  MOD_RES (16)..(17)..(18)..(19): Xaa is A or G or absent
RVVMNNSLQEXXXXXXXXXYYVVPLPELKTPAXXP

SEQ ID NO: 10862 - protein, 32 aa, Artificial Sequence
  Non-cyclic GFR-binding peptide
  MOD_RES (1)..(1): Xaa is C or S
XSEVVMDNSLQEVVNNASDYYLITLPELRTPV

SEQ ID NO: 10863 - protein, 38 aa, Artificial Sequence
  Non-cyclic GFR-binding peptide
  MOD_RES (33)..(34): Xaa is C or S
  MOD_RES (11)..(12)..(13)..(14)..(15): Xaa is A or G
  MOD_RES (16)..(17)..(18)..(19): Xaa is A or G or absent
EVVMDNSLQEXXXXXXXXXYYVIPLPELRTPVXXTPPT

SEQ ID NO: 10864 - protein, 39 aa, Artificial Sequence
  Non-cyclic GFR-binding peptide
  MOD_RES (34)..(35): Xaa is C or S
  MOD_RES (12)..(13)..(14)..(15)..(16): Xaa is A or G
  MOD_RES (17)..(18)..(19)..(20): Xaa is A or G or absent
SRVVMNEYQKYXXXXXXXXXIFLVSIPSLKTPAXXPKPV

SEQ ID NO: 10865 - protein, 37 aa, Artificial Sequence
  Non-cyclic GFR-binding peptide
  MOD_RES (31)..(32): Xaa is C or S
EVVMDRYKKLVVNNASDFYLISIANLRTPVXXTPPTS

SEQ ID NO: 10866 - protein, 35 aa, Artificial Sequence
  Non-cyclic GFR-binding peptide
  MOD_RES (1)..(35): Xaa is C or S
  MOD_RES (13)..(14)..(15)..(16)..(17): Xaa is A or G
  MOD_RES (18)..(19)..(20)..(21): Xaa is A or G or absent
XGEVVMDEYQKYXXXXXXXXXIFLMSIPSLETPVX

SEQ ID NO: 10867 - protein, 33 aa, Artificial Sequence
  Non-cyclic GFR-binding peptide
  MOD_RES (33)..(33): Xaa is C or S
  MOD_RES (11)..(12)..(13)..(14)..(15): Xaa is A or G
  MOD_RES (16)..(17)..(18)..(19): Xaa is A or G or absent
RVVMNNSLQEXXXXXXXXXYYVVPLPELQTPAX

SEQ ID NO: 10868 - protein, 38 aa, Artificial Sequence
  Non-cyclic GFR-binding peptide
  MOD_RES (2)..(36)..(37): Xaa is C or S
  MOD_RES (14)..(15)..(16)..(17)..(18): Xaa is A or G
  MOD_RES (19)..(20)..(21)..(22): Xaa is A or G or absent
GXARVVMNNSLQEXXXXXXXXXYYVVPLPELQTPAXXP

SEQ ID NO: 10869 - protein, 41 aa, Artificial Sequence
  Non-cyclic GFR-binding peptide
  MOD_RES (1)..(3)..(35)..(36): Xaa is C or S
XGXARVVMNNSLQEIVNSSDDYYVVPLPELQTPAXXPKPVT

SEQ ID NO: 10870 - protein, 40 aa, Artificial Sequence
  Non-cyclic GFR-binding peptide
  MOD_RES (1)..(35)..(36): Xaa is C or S
  MOD_RES (13)..(14)..(15)..(16)..(17): Xaa is A or G
  MOD_RES (18)..(19)..(20)..(21): Xaa is A or G or absent
XARVVMNNSLQEXXXXXXXXXYYLVTLPELQTPAXXPKPV

SEQ ID NO: 10871 - protein, 40 aa, Artificial Sequence
  Non-cyclic GFR-binding peptide
  MOD_RES (1)..(3)..(35)..(36): Xaa is C or S
XGXSRVVMNEYQKYIVNSSDDIFLVSIPSLKTPAXXPKPV

SEQ ID NO: 10872 - protein, 39 aa, Artificial Sequence
  Non-cyclic GFR-binding peptide
  MOD_RES (2)..(4)..(36)..(37): Xaa is C or S
HXGXSRVVMNNSLQEIVNSSDDYYLVTLPELKTPAXXPK

SEQ ID NO: 10873 - protein, 33 aa, Artificial Sequence
  Non-cyclic GFR-binding peptide
  MOD_RES (31)..(32): Xaa is C or S
RVVMNNSLQEIVNSSDDYYVVPLPELQTPAXXP

SEQ ID NO: 10874 - protein, 40 aa, Artificial Sequence
  Non-cyclic GFR-binding peptide
  MOD_RES (1)..(3)..(35)..(36): Xaa is C or S
XGXARVVMNNSLQEIVNSSDDYYLVTLPELQTPAXXPKPV

SEQ ID NO: 10875 - protein, 39 aa, Artificial Sequence
  Non-cyclic GFR-binding peptide
  MOD_RES (1)..(33)..(34): Xaa is C or S
XSRVVMNNSLQEIVNSSDDYYVVPLPELKTPAXXPKPVY

SEQ ID NO: 10876 - protein, 39 aa, Artificial Sequence
  Non-cyclic GFR-binding peptide
  MOD_RES (2)..(34)..(35): Xaa is C or S
GXSRVVMNEYQKYIVNSSDDIFLVSIPSLKTPAXXPKPV

SEQ ID NO: 10877 - protein, 36 aa, Artificial Sequence
  Non-cyclic GFR-binding peptide
  MOD_RES (2)..(4)..(35)..(36): Xaa is C or S
SXKXSRVIMNSLQEVKPKRGVYYLITLPELAQPVXX

SEQ ID NO: 10878 - protein, 36 aa, Artificial Sequence
  Non-cyclic GFR-binding peptide
  MOD_RES (2)..(4)..(36): Xaa is C or S
RXGXGEVVMDNSLQEVVKENEDYYVMPLPELETPVX

SEQ ID NO: 10879 - protein, 42 aa, Artificial Sequence
  Non-cyclic GFR-binding peptide
  MOD_RES (2)..(4)..(38)..(39): Xaa is C or S
  MOD_RES (16)..(17)..(18)..(19)..(20): Xaa is A or G
  MOD_RES (21)..(22)..(23)..(24): Xaa is A or G or absent
HXGXARVVMNNSLQEXXXXXXXXXYYVVPLPELQTPAXXPKP

SEQ ID NO: 10880 - protein, 36 aa, Artificial Sequence
  Non-cyclic GFR-binding peptide
  MOD_RES (2)..(4)..(35)..(36): Xaa is C or S
SXKXSKVIMEYQKYIKPTKGIIFLISIPSLDQSVXX

SEQ ID NO: 10881 - protein, 38 aa, Artificial Sequence
  Non-cyclic GFR-binding peptide
  MOD_RES (1)..(3)..(35)..(36): Xaa is C or S
XGXSEVVMDNSLQEVVNNASDYYLITLPELRTPVXXTP

SEQ ID NO: 10882 - protein, 38 aa, Artificial Sequence
  Non-cyclic GFR-binding peptide
  MOD_RES (33)..(34): Xaa is C or S
  MOD_RES (11)..(12)..(13)..(14)..(15): Xaa is A or G
  MOD_RES (16)..(17)..(18)..(19): Xaa is A or G or absent
RVVMNNSLQEXXXXXXXXXYYLVTLPELQTPAXXPKPV

SEQ ID NO: 10883 - protein, 39 aa, Artificial Sequence
  Non-cyclic GFR-binding peptide
  MOD_RES (1)..(3)..(35)..(36): Xaa is C or S
XGXSEVVMDNSLQEVVNNASDYYLITLPELRTPVXXTPP

SEQ ID NO: 10884 - protein, 40 aa, Artificial Sequence
  Non-cyclic GFR-binding peptide
  MOD_RES (2)..(4)..(38)..(39): Xaa is C or S
  MOD_RES (16)..(17)..(18)..(19)..(20): Xaa is A or G
  MOD_RES (21)..(22)..(23)..(24): Xaa is A or G or absent
HXGXARVVMNEYQKYXXXXXXXXXIFLVSIPSLQTPAXXP

SEQ ID NO: 10885 - protein, 44 aa, Artificial Sequence
  Non-cyclic GFR-binding peptide
  MOD_RES (2)..(4)..(38): Xaa is C or S
  MOD_RES (16)..(17)..(18)..(19)..(20): Xaa is A or G
  MOD_RES (21)..(22)..(23)..(24): Xaa is A or G or absent
HXGXSRVVMNEYQKYXXXXXXXXXIFLVSIPSLKTPAXTPKTVH

SEQ ID NO: 10886 - protein, 33 aa, Artificial Sequence
  Non-cyclic GFR-binding peptide
  MOD_RES (2)..(2): Xaa is C or S
GXGEVVMDNSLQEVVKENEDYYLMTLPELETPV

SEQ ID NO: 10887 - protein, 41 aa, Artificial Sequence
  Non-cyclic GFR-binding peptide
  MOD_RES (2)..(4)..(38)..(39): Xaa is C or S
  MOD_RES (16)..(17)..(18)..(19)..(20): Xaa is A or G
  MOD_RES (21)..(22)..(23)..(24): Xaa is A or G or absent
HXGXSRVVMNEYQKYXXXXXXXXXIFLVSIPSLKTPAXXPK

SEQ ID NO: 10888 - protein, 42 aa, Artificial Sequence
  Non-cyclic GFR-binding peptide
  MOD_RES (2)..(4)..(38)..(39): Xaa is C or S
  MOD_RES (16)..(17)..(18)..(19)..(20): Xaa is A or G
  MOD_RES (21)..(22)..(23)..(24): Xaa is A or G or absent
RXGXGEVVMDNSLQEXXXXXXXXXYYLMTLPELETPVXXAKP

SEQ ID NO: 10889 - protein, 40 aa, Artificial Sequence
  Non-cyclic GFR-binding peptide
  MOD_RES (1)..(35)..(36): Xaa is C or S
  MOD_RES (13)..(14)..(15)..(16)..(17): Xaa is A or G
  MOD_RES (18)..(19)..(20)..(21): Xaa is A or G or absent
XGEVVMDEYQKYXXXXXXXXXIFLMSIPSLETPVXXAKPI

SEQ ID NO: 10890 - protein, 33 aa, Artificial Sequence
  Non-cyclic GFR-binding peptide
  MOD_RES (32)..(33): Xaa is C or S
GEVVMDEYQKYVVKENEDIFLMSIPSLETPVXX

SEQ ID NO: 10891 - protein, 33 aa, Artificial Sequence
  Non-cyclic GFR-binding peptide
  MOD_RES (1)..(32)..(33): Xaa is C or S
XSKVVMNSLQEVKPTRGVYYVIPLPELDQPVXX

SEQ ID NO: 10892 - protein, 35 aa, Artificial Sequence
  Non-cyclic GFR-binding peptide
  MOD_RES (1)..(32)..(33): Xaa is C or S
XSKVVMEYQKYVKPTRGVIFLISIPSLDQPVXXPS

SEQ ID NO: 10893 - protein, 41 aa, Artificial Sequence
  Non-cyclic GFR-binding peptide
  MOD_RES (2)..(4)..(36)..(37): Xaa is C or S
RXGXGEVVMENSLQEVVKDYEDYYVMPLPELETPVXXAKPI

SEQ ID NO: 10894 - protein, 32 aa, Artificial Sequence
  Non-cyclic GFR-binding peptide
  MOD_RES (11)..(12)..(13)..(14)..(15): Xaa is A or G
  MOD_RES (16)..(17)..(18)..(19): Xaa is A or G or absent
EVVMDNSLQEXXXXXXXXXYYVIPLPELRTPV

SEQ ID NO: 10895 - protein, 38 aa, Artificial Sequence
  Non-cyclic GFR-binding peptide
  MOD_RES (34)..(34): Xaa is C or S
  MOD_RES (12)..(13)..(14)..(15)..(16): Xaa is A or G
  MOD_RES (17)..(18)..(19)..(20): Xaa is A or G or absent
SRVVMNEYQKYXXXXXXXXXIFLVSIPSLKTPAXTPKT

SEQ ID NO: 10896 - protein, 32 aa, Artificial Sequence
  Non-cyclic GFR-binding peptide
  MOD_RES (31)..(32): Xaa is C or S
EVVMDQYNKLVVNNASDLYLISIASLRTPVXX

SEQ ID NO: 10897 - protein, 40 aa, Artificial Sequence
  Non-cyclic GFR-binding peptide
  MOD_RES (2)..(36): Xaa is C or S
  MOD_RES (14)..(15)..(16)..(17)..(18): Xaa is A or G
  MOD_RES (19)..(20)..(21)..(22): Xaa is A or G or absent
GXSRVVMNNSLQEXXXXXXXXXYYVVPLPELKTPAXTPKT

SEQ ID NO: 10898 - protein, 40 aa, Artificial Sequence
  Non-cyclic GFR-binding peptide
  MOD_RES (1)..(3)..(35)..(36): Xaa is C or S
XGXARVVMNEYQKYIVNSSDDIFLVSIPSLQTPAXXPKPV

SEQ ID NO: 10899 - protein, 35 aa, Artificial Sequence
  Non-cyclic GFR-binding peptide
  MOD_RES (33)..(34): Xaa is C or S
  MOD_RES (11)..(12)..(13)..(14)..(15): Xaa is A or G
  MOD_RES (16)..(17)..(18)..(19): Xaa is A or G or absent
SKVIMEYQKYXXXXXXXXXIFLISIPSLDQSVXXP

SEQ ID NO: 10900 - protein, 33 aa, Artificial Sequence
  Non-cyclic GFR-binding peptide
  MOD_RES (31)..(32): Xaa is C or S
RVVMNNSLQEIVNSSDDYYLVTLPELKTPAXXP

SEQ ID NO: 10901 - protein, 39 aa, Artificial Sequence
  Non-cyclic GFR-binding peptide
  MOD_RES (1)..(33)..(34): Xaa is C or S
XARVVMNEYQKYIVNSSDDIFLVSIPSLQTPAXXPKPVT

SEQ ID NO: 10902 - protein, 39 aa, Artificial Sequence
  Non-cyclic GFR-binding peptide
  MOD_RES (33)..(34): Xaa is C or S
  MOD_RES (11)..(12)..(13)..(14)..(15): Xaa is A or G
  MOD_RES (16)..(17)..(18)..(19): Xaa is A or G or absent
RVVMNNSLQEXXXXXXXXXYYLVTLPELQTPAXXPKPVT

SEQ ID NO: 10903 - protein, 33 aa, Artificial Sequence
  Non-cyclic GFR-binding peptide
  MOD_RES (1)..(33): Xaa is C or S
XSRVVMNEYQKYIVNSSDDIFLVSIPSLKTPAX

SEQ ID NO: 10904 - protein, 37 aa, Artificial Sequence
  Non-cyclic GFR-binding peptide
  MOD_RES (1)..(3)..(35)..(36): Xaa is C or S
XGXGEVVMDNSLQEVVKENEDYYLMTLPELETPVXXA

SEQ ID NO: 10905 - protein, 35 aa, Artificial Sequence
  Non-cyclic GFR-binding peptide
  MOD_RES (2)..(2): Xaa is C or S
  MOD_RES (14)..(15)..(16)..(17)..(18): Xaa is A or G
  MOD_RES (19)..(20)..(21)..(22): Xaa is A or G or absent
GXARVVMNEYQKYXXXXXXXXXIFLVSIPSLQTPA

SEQ ID NO: 10906 - protein, 39 aa, Artificial Sequence
  Non-cyclic GFR-binding peptide
  MOD_RES (1)..(34)..(35): Xaa is C or S
  MOD_RES (12)..(13)..(14)..(15)..(16): Xaa is A or G
  MOD_RES (17)..(18)..(19)..(20): Xaa is A or G or absent
XSRVIMNSLQEXXXXXXXXXYYLITLPELAQPVXXPAAS

SEQ ID NO: 10907 - protein, 40 aa, Artificial Sequence
  Non-cyclic GFR-binding peptide
  MOD_RES (2)..(4)..(36)..(37): Xaa is C or S
HXGXARVVMNEYQKYIVNSSDDIFLVSIPSLQTPAXXPKP

SEQ ID NO: 10908 - protein, 38 aa, Artificial Sequence
  Non-cyclic GFR-binding peptide
  MOD_RES (1)..(35)..(36): Xaa is C or S
  MOD_RES (13)..(14)..(15)..(16)..(17): Xaa is A or G
  MOD_RES (18)..(19)..(20)..(21): Xaa is A or G or absent
XSEVVMDQYNKLXXXXXXXXXLYLISIASLRTPVXXTP

SEQ ID NO: 10909 - protein, 35 aa, Artificial Sequence
  Non-cyclic GFR-binding peptide
  MOD_RES (32)..(33): Xaa is C or S
GEVVMENSLQEVVKDYEDYYVMPLPELETPVXXAK

SEQ ID NO: 10910 - protein, 33 aa, Artificial Sequence
  Non-cyclic GFR-binding peptide
  MOD_RES (2)..(2): Xaa is C or S
GXSRVVMNNSLQEIVNSSDDYYLVTLPELKTPA

SEQ ID NO: 10911 - protein, 35 aa, Artificial Sequence
  Non-cyclic GFR-binding peptide
  MOD_RES (33)..(34): Xaa is C or S
  MOD_RES (11)..(12)..(13)..(14)..(15): Xaa is A or G
  MOD_RES (16)..(17)..(18)..(19): Xaa is A or G or absent
EVVMDEYQKYXXXXXXXXXIFLMSIPSLETPVXXA

SEQ ID NO: 10912 - protein, 42 aa, Artificial Sequence
  Non-cyclic GFR-binding peptide
  MOD_RES (2)..(4)..(36)..(37): Xaa is C or S
RXGXGEVVMEEYQKYVVKDYEDIFLMSIPSLETPVXXAKPIS

SEQ ID NO: 10913 - protein, 41 aa, Artificial Sequence
  Non-cyclic GFR-binding peptide
  MOD_RES (2)..(4)..(36)..(37): Xaa is C or S
RXGXSEVVMDQYNKLVVNNASDLYLISIASLRTPVXXTPPT

SEQ ID NO: 10914 - protein, 38 aa, Artificial Sequence
  Non-cyclic GFR-binding peptide
  MOD_RES (33)..(34): Xaa is C or S
  MOD_RES (11)..(12)..(13)..(14)..(15): Xaa is A or G
  MOD_RES (16)..(17)..(18)..(19): Xaa is A or G or absent
SKVIMNSLQEXXXXXXXXXYYVIPLPELDQSVXXPSAS

SEQ ID NO: 10915 - protein, 37 aa, Artificial Sequence
  Non-cyclic GFR-binding peptide
  MOD_RES (1)..(35)..(36): Xaa is C or S
  MOD_RES (13)..(14)..(15)..(16)..(17): Xaa is A or G
  MOD_RES (18)..(19)..(20)..(21): Xaa is A or G or absent
XSEVVMDNSLQEXXXXXXXXXYYLITLPELRTPVXXT

SEQ ID NO: 10916 - protein, 40 aa, Artificial Sequence
  Non-cyclic GFR-binding peptide
  MOD_RES (2)..(34)..(35): Xaa is C or S
GXSEVVMDQYNKLVVNNASDLYLISIASLRTPVXXTPPTS

SEQ ID NO: 10917 - protein, 43 aa, Artificial Sequence
  Non-cyclic GFR-binding peptide
  MOD_RES (1)..(3)..(37)..(38): Xaa is C or S
  MOD_RES (15)..(16)..(17)..(18)..(19): Xaa is A or G
  MOD_RES (20)..(21)..(22)..(23): Xaa is A or G or absent
XGXGEVVMDEYQKYXXXXXXXXXIFLMSIPSLETPVXXAKPIK

SEQ ID NO: 10918 - protein, 36 aa, Artificial Sequence
  Non-cyclic GFR-binding peptide
  MOD_RES (33)..(34): Xaa is C or S
  MOD_RES (11)..(12)..(13)..(14)..(15): Xaa is A or G
  MOD_RES (16)..(17)..(18)..(19): Xaa is A or G or absent
EVVMDEYQKYXXXXXXXXXIFLMSIPSLETPVXXAK

SEQ ID NO: 10919 - protein, 33 aa, Artificial Sequence
  Non-cyclic GFR-binding peptide
  MOD_RES (33)..(33): Xaa is C or S
  MOD_RES (11)..(12)..(13)..(14)..(15): Xaa is A or G
  MOD_RES (16)..(17)..(18)..(19): Xaa is A or G or absent
EVVMDNSLQEXXXXXXXXXYYLITLPELRTPVX

SEQ ID NO: 10920 - protein, 32 aa, Artificial Sequence
  Non-cyclic GFR-binding peptide
  MOD_RES (1)..(1): Xaa is C or S
XSRVVMNEYQKYIVNSSDDIFLVSIPSLKTPA

SEQ ID NO: 10921 - protein, 43 aa, Artificial Sequence
  Non-cyclic GFR-binding peptide
  MOD_RES (2)..(4)..(38)..(39): Xaa is C or S
  MOD_RES (16)..(17)..(18)..(19)..(20): Xaa is A or G
  MOD_RES (21)..(22)..(23)..(24): Xaa is A or G or absent
HXGXARVVMNNSLQEXXXXXXXXXYYLVTLPELQTPAXXPKPV

SEQ ID NO: 10922 - protein, 37 aa, Artificial Sequence
  Non-cyclic GFR-binding peptide
  MOD_RES (1)..(3)..(35): Xaa is C or S
XGXSRVVMNNSLQEIVNSSDDYYVVPLPELKTPAXTP

SEQ ID NO: 10923 - protein, 34 aa, Artificial Sequence
  Non-cyclic GFR-binding peptide
  MOD_RES (1)..(33)..(34): Xaa is C or S
XARVVMNNSLQEIVNSSDDYYLVTLPELQTPAXX

SEQ ID NO: 10924 - protein, 39 aa, Artificial Sequence
  Non-cyclic GFR-binding peptide
  MOD_RES (1)..(34)..(35): Xaa is C or S
  MOD_RES (12)..(13)..(14)..(15)..(16): Xaa is A or G
  MOD_RES (17)..(18)..(19)..(20): Xaa is A or G or absent
XSRVIMEYQKYXXXXXXXXXIFLISIPSLAQPVXXPAAS

SEQ ID NO: 10925 - protein, 41 aa, Artificial Sequence
  Non-cyclic GFR-binding peptide
  MOD_RES (1)..(3)..(35): Xaa is C or S
XGXSRVVMNEYQKYIVNSSDDIFLVSIPSLKTPAXTPKTVH

SEQ ID NO: 10926 - protein, 37 aa, Artificial Sequence
  Non-cyclic GFR-binding peptide
  MOD_RES (2)..(36)..(37): Xaa is C or S
  MOD_RES (14)..(15)..(16)..(17)..(18): Xaa is A or G
  MOD_RES (19)..(20)..(21)..(22): Xaa is A or G or absent
GXSRVVMNNSLQEXXXXXXXXXYYLVTLPELKTPAXX

SEQ ID NO: 10927 - protein, 40 aa, Artificial Sequence
  Non-cyclic GFR-binding peptide
  MOD_RES (1)..(34)..(35): Xaa is C or S
  MOD_RES (12)..(13)..(14)..(15)..(16): Xaa is A or G
  MOD_RES (17)..(18)..(19)..(20): Xaa is A or G or absent
XSKVIMEYQKYXXXXXXXXXIFLISIPSLDQSVXXPSASA

SEQ ID NO: 10928 - protein, 31 aa, Artificial Sequence
  Non-cyclic GFR-binding peptide
ARVVMNNSLQEIVNSSDDYYLVTLPELQTPA

SEQ ID NO: 10929 - protein, 38 aa, Artificial Sequence
  Non-cyclic GFR-binding peptide
  MOD_RES (32)..(33): Xaa is C or S
SRVVMNNSLQEIVNSSDDYYLVTLPELKTPAXXPKPVY

SEQ ID NO: 10930 - protein, 39 aa, Artificial Sequence
  Non-cyclic GFR-binding peptide
  MOD_RES (1)..(35)..(36): Xaa is C or S
  MOD_RES (13)..(14)..(15)..(16)..(17): Xaa is A or G
  MOD_RES (18)..(19)..(20)..(21): Xaa is A or G or absent
XSRVVMNNSLQEXXXXXXXXXYYVVPLPELKTPAXXPKP

SEQ ID NO: 10931 - protein, 38 aa, Artificial Sequence
  Non-cyclic GFR-binding peptide
  MOD_RES (2)..(35)..(36): Xaa is C or S
  MOD_RES (13)..(14)..(15)..(16)..(17): Xaa is A or G
  MOD_RES (18)..(19)..(20)..(21): Xaa is A or G or absent
KXSKVVMNSLQEXXXXXXXXXYYVIPLPELDQPVXXPS

SEQ ID NO: 10932 - protein, 41 aa, Artificial Sequence
  Non-cyclic GFR-binding peptide
  MOD_RES (1)..(3)..(35)..(36): Xaa is C or S
XGXSEVVMDRYKKLVVNNASDFYLISIANLRTPVXXTPPTS

SEQ ID NO: 10933 - protein, 37 aa, Artificial Sequence
  Non-cyclic GFR-binding peptide
  MOD_RES (2)..(4)..(36)..(37): Xaa is C or S
HXGXARVVMNEYQKYIVNSSDDIFLVSIPSLQTPAXX

SEQ ID NO: 10934 - protein, 35 aa, Artificial Sequence
  Non-cyclic GFR-binding peptide
  MOD_RES (2)..(2): Xaa is C or S
  MOD_RES (14)..(15)..(16)..(17)..(18): Xaa is A or G
  MOD_RES (19)..(20)..(21)..(22): Xaa is A or G or absent
GXSEVVMDNSLQEXXXXXXXXXYYVIPLPELRTPV

SEQ ID NO: 10935 - protein, 36 aa, Artificial Sequence
  Non-cyclic GFR-binding peptide
  MOD_RES (2)..(34)..(35): Xaa is C or S
GXGEVVMEEYQKYVVKDYEDIFLMSIPSLETPVXXA

SEQ ID NO: 10936 - protein, 35 aa, Artificial Sequence
  Non-cyclic GFR-binding peptide
  MOD_RES (2)..(4): Xaa is C or S
RXGXSEVVMDQYNKLVVNNASDLYLISIASLRTPV

SEQ ID NO: 10937 - protein, 37 aa, Artificial Sequence
  Non-cyclic GFR-binding peptide
  MOD_RES (34)..(35): Xaa is C or S
  MOD_RES (12)..(13)..(14)..(15)..(16): Xaa is A or G
  MOD_RES (17)..(18)..(19)..(20): Xaa is A or G or absent
ARVVMNEYQKYXXXXXXXXXIFLVSIPSLQTPAXXPK

SEQ ID NO: 10938 - protein, 31 aa, Artificial Sequence
  Non-cyclic GFR-binding peptide
  MOD_RES (31)..(31): Xaa is C or S
EVVMENSLQEVVKDYEDYYLMTLPELETPVX

SEQ ID NO: 10939 - protein, 42 aa, Artificial Sequence
  Non-cyclic GFR-binding peptide
  MOD_RES (1)..(3)..(37)..(38): Xaa is C or S
  MOD_RES (15)..(16)..(17)..(18)..(19): Xaa is A or G
  MOD_RES (20)..(21)..(22)..(23): Xaa is A or G or absent
XGXSRVVMNNSLQEXXXXXXXXXYYVVPLPELKTPAXXPKPV

SEQ ID NO: 10940 - protein, 33 aa, Artificial Sequence
  Non-cyclic GFR-binding peptide
  MOD_RES (2)..(2): Xaa is C or S
GXARVVMNEYQKYIVNSSDDIFLVSIPSLQTPA

SEQ ID NO: 10941 - protein, 38 aa, Artificial Sequence
  Non-cyclic GFR-binding peptide
  MOD_RES (2)..(4)..(35)..(36): Xaa is C or S
SXKXSKVVMNSLQEVKPTRGVYYVIPLPELDQPVXXPS

SEQ ID NO: 10942 - protein, 34 aa, Artificial Sequence
  Non-cyclic GFR-binding peptide
  MOD_RES (34)..(34): Xaa is C or S
  MOD_RES (12)..(13)..(14)..(15)..(16): Xaa is A or G
  MOD_RES (17)..(18)..(19)..(20): Xaa is A or G or absent
SEVVMDQYNKLXXXXXXXXXLYLISIASLRTPVX

SEQ ID NO: 10943 - protein, 38 aa, Artificial Sequence
  Non-cyclic GFR-binding peptide
  MOD_RES (2)..(33)..(34): Xaa is C or S
KXSKVVMEYQKYVKPTRGVIFLISIPSLDQPVXXPSAS

SEQ ID NO: 10944 - protein, 36 aa, Artificial Sequence
  Non-cyclic GFR-binding peptide
  MOD_RES (2)..(4)..(36): Xaa is C or S
RXGXSEVVMDNSLQEVVNNASDYYVIPLPELRTPVX

SEQ ID NO: 10945 - protein, 41 aa, Artificial Sequence
  Non-cyclic GFR-binding peptide
  MOD_RES (2)..(4)..(36)..(37): Xaa is C or S
HXGXSRVVMNNSLQEIVNSSDDYYLVTLPELKTPAXXPKPV

SEQ ID NO: 10946 - protein, 36 aa, Artificial Sequence
  Non-cyclic GFR-binding peptide
  MOD_RES (33)..(34): Xaa is C or S
  MOD_RES (11)..(12)..(13)..(14)..(15): Xaa is A or G
  MOD_RES (16)..(17)..(18)..(19): Xaa is A or G or absent
RVVMNEYQKYXXXXXXXXXIFLVSIPSLKTPAXXPK

SEQ ID NO: 10947 - protein, 35 aa, Artificial Sequence
  Non-cyclic GFR-binding peptide
  MOD_RES (1)..(34)..(35): Xaa is C or S
  MOD_RES (12)..(13)..(14)..(15)..(16): Xaa is A or G
  MOD_RES (17)..(18)..(19)..(20): Xaa is A or G or absent
XSRVIMNSLQEXXXXXXXXXYYLITLPELAQPVXX

SEQ ID NO: 10948 - protein, 34 aa, Artificial Sequence
  Non-cyclic GFR-binding peptide
  MOD_RES (31)..(32): Xaa is C or S
SKVIMNSLQEIKPTKGIYYVIPLPELDQSVXXPS

SEQ ID NO: 10949 - protein, 34 aa, Artificial Sequence
  Non-cyclic GFR-binding peptide
  MOD_RES (34)..(34): Xaa is C or S
  MOD_RES (12)..(13)..(14)..(15)..(16): Xaa is A or G
  MOD_RES (17)..(18)..(19)..(20): Xaa is A or G or absent
SEVVMDRYKKLXXXXXXXXXFYLISIANLRTPVX

SEQ ID NO: 10950 - protein, 33 aa, Artificial Sequence
  Non-cyclic GFR-binding peptide
  MOD_RES (1)..(33): Xaa is C or S
XSEVVMDNSLQEVVNNASDYYLITLPELRTPVX

SEQ ID NO: 10951 - protein, 39 aa, Artificial Sequence
  Non-cyclic GFR-binding peptide
  MOD_RES (1)..(33)..(34): Xaa is C or S
XSEVVMDRYKKLVVNNASDFYLISIANLRTPVXXTPPTS

SEQ ID NO: 10952 - protein, 35 aa, Artificial Sequence
  Non-cyclic GFR-binding peptide
  MOD_RES (33)..(34): Xaa is C or S
  MOD_RES (11)..(12)..(13)..(14)..(15): Xaa is A or G
  MOD_RES (16)..(17)..(18)..(19): Xaa is A or G or absent
EVVMDNSLQEXXXXXXXXXYYLMTLPELETPVXXA

SEQ ID NO: 10953 - protein, 40 aa, Artificial Sequence
  Non-cyclic GFR-binding peptide
  MOD_RES (1)..(3)..(35): Xaa is C or S
XGXSRVVMNNSLQEIVNSSDDYYVVPLPELKTPAXTPKTV

SEQ ID NO: 10954 - protein, 39 aa, Artificial Sequence
  Non-cyclic GFR-binding peptide
  MOD_RES (1)..(35)..(36): Xaa is C or S
  MOD_RES (13)..(14)..(15)..(16)..(17): Xaa is A or G
  MOD_RES (18)..(19)..(20)..(21): Xaa is A or G or absent
XGEVVMEEYQKYXXXXXXXXXIFLMSIPSLETPVXXAKP

SEQ ID NO: 10955 - protein, 34 aa, Artificial Sequence
  Non-cyclic GFR-binding peptide
  MOD_RES (2)..(34): Xaa is C or S
GXGEVVMENSLQEVVKDYEDYYLMTLPELETPVX

SEQ ID NO: 10956 - protein, 37 aa, Artificial Sequence
  Non-cyclic GFR-binding peptide
  MOD_RES (1)..(34)..(35): Xaa is C or S
  MOD_RES (12)..(13)..(14)..(15)..(16): Xaa is A or G
  MOD_RES (17)..(18)..(19)..(20): Xaa is A or G or absent
XSRVIMNSLQEXXXXXXXXXYYLITLPELAQPVXXPA

SEQ ID NO: 10957 - protein, 42 aa, Artificial Sequence
  Non-cyclic GFR-binding peptide
  MOD_RES (1)..(3)..(37)..(38): Xaa is C or S
  MOD_RES (15)..(16)..(17)..(18)..(19): Xaa is A or G
  MOD_RES (20)..(21)..(22)..(23): Xaa is A or G or absent
XGXSRVVMNNSLQEXXXXXXXXXYYLVTLPELKTPAXXPKPV

SEQ ID NO: 10958 - protein, 40 aa, Artificial Sequence
  Non-cyclic GFR-binding peptide
  MOD_RES (2)..(4)..(36): Xaa is C or S
HXGXSRVVMNEYQKYIVNSSDDIFLVSIPSLKTPAXTPKT

SEQ ID NO: 10959 - protein, 38 aa, Artificial Sequence
  Non-cyclic GFR-binding peptide
  MOD_RES (1)..(35)..(36): Xaa is C or S
  MOD_RES (13)..(14)..(15)..(16)..(17): Xaa is A or G
  MOD_RES (18)..(19)..(20)..(21): Xaa is A or G or absent
XSEVVMDNSLQEXXXXXXXXXYYLITLPELRTPVXXTP

SEQ ID NO: 10960 - protein, 30 aa, Artificial Sequence
  Non-cyclic GFR-binding peptide
RVVMNEYQKYIVNSSDDIFLVSIPSLKTPA

SEQ ID NO: 10961 - protein, 35 aa, Artificial Sequence
  Non-cyclic GFR-binding peptide
  MOD_RES (2)..(4): Xaa is C or S
RXGXSEVVMDNSLQEVVNNASDYYLITLPELRTPV

SEQ ID NO: 10962 - protein, 34 aa, Artificial Sequence
  Non-cyclic GFR-binding peptide
  MOD_RES (1)..(3): Xaa is C or S
XGXSEVVMDNSLQEVVNNASDYYLITLPELRTPV

SEQ ID NO: 10963 - protein, 36 aa, Artificial Sequence
  Non-cyclic GFR-binding peptide
  MOD_RES (1)..(35)..(36): Xaa is C or S
  MOD_RES (13)..(14)..(15)..(16)..(17): Xaa is A or G
  MOD_RES (18)..(19)..(20)..(21): Xaa is A or G or absent
XGEVVMDNSLQEXXXXXXXXXYYLMTLPELETPVXX

SEQ ID NO: 10964 - protein, 39 aa, Artificial Sequence
  Non-cyclic GFR-binding peptide
  MOD_RES (1)..(3)..(37): Xaa is C or S
  MOD_RES (15)..(16)..(17)..(18)..(19): Xaa is A or G
  MOD_RES (20)..(21)..(22)..(23): Xaa is A or G or absent
XGXSRVVMNNSLQEXXXXXXXXXYYVVPLPELKTPAXTP

SEQ ID NO: 10965 - protein, 30 aa, Artificial Sequence; identical to SEQ ID NO: 2037
  Non-cyclic GFR-binding peptide

SEQ ID NO: 10966 - protein, 37 aa, Artificial Sequence
  Non-cyclic GFR-binding peptide
  MOD_RES (34)..(35): Xaa is C or S
  MOD_RES (12)..(13)..(14)..(15)..(16): Xaa is A or G
  MOD_RES (17)..(18)..(19)..(20): Xaa is A or G or absent
GEVVMDNSLQEXXXXXXXXXYYLMTLPELETPVXXAK

SEQ ID NO: 10967 - protein, 38 aa, Artificial Sequence
  Non-cyclic GFR-binding peptide
  MOD_RES (2)..(34): Xaa is C or S
GXSRVVMNEYQKYIVNSSDDIFLVSIPSLKTPAXTPKT

SEQ ID NO: 10968 - protein, 34 aa, Artificial Sequence
  Non-cyclic GFR-binding peptide
  MOD_RES (31)..(32): Xaa is C or S
SKVVMEYQKYVKPTRGVIFLISIPSLDQPVXXPS

SEQ ID NO: 10969 - protein, 35 aa, Artificial Sequence
  Non-cyclic GFR-binding peptide
  MOD_RES (33)..(34): Xaa is C or S
  MOD_RES (11)..(12)..(13)..(14)..(15): Xaa is A or G
  MOD_RES (16)..(17)..(18)..(19): Xaa is A or G or absent
EVVMDNSLQEXXXXXXXXXYYVMPLPELETPVXXA

SEQ ID NO: 10970 - protein, 41 aa, Artificial Sequence
  Non-cyclic GFR-binding peptide
  MOD_RES (1)..(3)..(35): Xaa is C or S
XGXSRVVMNNSLQEIVNSSDDYYLVTLPELKTPAXTPKTVH

SEQ ID NO: 10971 - protein, 37 aa, Artificial Sequence
  Non-cyclic GFR-binding peptide
  MOD_RES (1)..(3)..(37): Xaa is C or S
  MOD_RES (15)..(16)..(17)..(18)..(19): Xaa is A or G
  MOD_RES (20)..(21)..(22)..(23): Xaa is A or G or absent
XGXARVVMNNSLQEXXXXXXXXXYYVVPLPELQTPAX

SEQ ID NO: 10972 - protein, 38 aa, Artificial Sequence
  Non-cyclic GFR-binding peptide
  MOD_RES (1)..(35)..(36): Xaa is C or S
  MOD_RES (13)..(14)..(15)..(16)..(17): Xaa is A or G
  MOD_RES (18)..(19)..(20)..(21): Xaa is A or G or absent
XARVVMNNSLQEXXXXXXXXXYYVVPLPELQTPAXXPK

SEQ ID NO: 10973 - protein, 30 aa, Artificial Sequence; identical to SEQ ID NO: 2102
  Non-cyclic GFR-binding peptide

SEQ ID NO: 10974 - protein, 41 aa, Artificial Sequence
  Non-cyclic GFR-binding peptide
  MOD_RES (1)..(3)..(37)..(38): Xaa is C or S
  MOD_RES (15)..(16)..(17)..(18)..(19): Xaa is A or G
  MOD_RES (20)..(21)..(22)..(23): Xaa is A or G or absent
XGXSEVVMDRYKKLXXXXXXXXXFYLISIANLRTPVXXTPP

SEQ ID NO: 10975 - protein, 32 aa, Artificial Sequence
  Non-cyclic GFR-binding peptide
  MOD_RES (32)..(32): Xaa is C or S
SRVVMNEYQKYIVNSSDDIFLVSIPSLKTPAX

SEQ ID NO: 10976 - protein, 40 aa, Artificial Sequence
  Non-cyclic GFR-binding peptide
  MOD_RES (1)..(3)..(35)..(36): Xaa is C or S
XGXSRVVMNNSLQEIVNSSDDYYLVTLPELKTPAXXPKPV

SEQ ID NO: 10977 - protein, 38 aa, Artificial Sequence
  Non-cyclic GFR-binding peptide
  MOD_RES (2)..(36)..(37): Xaa is C or S
  MOD_RES (14)..(15)..(16)..(17)..(18): Xaa is A or G
  MOD_RES (19)..(20)..(21)..(22): Xaa is A or G or absent
GXSEVVMDQYNKLXXXXXXXXXLYLISIASLRTPVXXT

SEQ ID NO: 10978 - protein, 38 aa, Artificial Sequence
  Non-cyclic GFR-binding peptide
  MOD_RES (34)..(35): Xaa is C or S
  MOD_RES (12)..(13)..(14)..(15)..(16): Xaa is A or G
  MOD_RES (17)..(18)..(19)..(20): Xaa is A or G or absent
ARVVMNNSLQEXXXXXXXXXYYLVTLPELQTPAXXPKP

SEQ ID NO: 10979 - protein, 35 aa, Artificial Sequence
  Non-cyclic GFR-binding peptide
  MOD_RES (2)..(4): Xaa is C or S
HXGXSRVVMNNSLQEIVNSSDDYYLVTLPELKTPA

SEQ ID NO: 10980 - protein, 33 aa, Artificial Sequence
  Non-cyclic GFR-binding peptide
  MOD_RES (1)..(33): Xaa is C or S
XGEVVMDNSLQEVVKENEDYYLMTLPELETPVX

SEQ ID NO: 10981 - protein, 34 aa, Artificial Sequence
  Non-cyclic GFR-binding peptide
  MOD_RES (32)..(33): Xaa is C or S
ARVVMNNSLQEIVNSSDDYYLVTLPELQTPAXXP

SEQ ID NO: 10982 - protein, 36 aa, Artificial Sequence
  Non-cyclic GFR-binding peptide
  MOD_RES (1)..(3): Xaa is C or S
  MOD_RES (15)..(16)..(17)..(18)..(19): Xaa is A or G
  MOD_RES (20)..(21)..(22)..(23): Xaa is A or G or absent
XGXGEVVMDNSLQEXXXXXXXXXYYLMTLPELETPV

SEQ ID NO: 10983 - protein, 35 aa, Artificial Sequence
  Non-cyclic GFR-binding peptide
  MOD_RES (32)..(33): Xaa is C or S
ARVVMNNSLQEIVNSSDDYYVVPLPELQTPAXXPK

SEQ ID NO: 10984 - protein, 39 aa, Artificial Sequence
  Non-cyclic GFR-binding peptide
  MOD_RES (33)..(34): Xaa is C or S
  MOD_RES (11)..(12)..(13)..(14)..(15): Xaa is A or G
  MOD_RES (16)..(17)..(18)..(19): Xaa is A or G or absent
SKVIMEYQKYXXXXXXXXXIFLISIPSLDQSVXXPSASA

SEQ ID NO: 10985 - protein, 37 aa, Artificial Sequence
  Non-cyclic GFR-binding peptide
  MOD_RES (2)..(4)..(35)..(36): Xaa is C or S
SXKXSRVIMEYQKYVKPKRGVIFLISIPSLAQPVXXP

SEQ ID NO: 10986 - protein, 38 aa, Artificial Sequence
  Non-cyclic GFR-binding peptide
  MOD_RES (33)..(34): Xaa is C or S
  MOD_RES (11)..(12)..(13)..(14)..(15): Xaa is A or G
  MOD_RES (16)..(17)..(18)..(19): Xaa is A or G or absent
SKVIMEYQKYXXXXXXXXXIFLISIPSLDQSVXXPSAS

SEQ ID NO: 10987 - protein, 33 aa, Artificial Sequence
  Non-cyclic GFR-binding peptide
  MOD_RES (32)..(33): Xaa is C or S
GEVVMDNSLQEVVKENEDYYVMPLPELETPVXX

SEQ ID NO: 10988 - protein, 38 aa, Artificial Sequence
  Non-cyclic GFR-binding peptide
  MOD_RES (32)..(33): Xaa is C or S
GEVVMEEYQKYVVKDYEDIFLMSIPSLETPVXXAKPIS

SEQ ID NO: 10989 - protein, 37 aa, Artificial Sequence
  Non-cyclic GFR-binding peptide
  MOD_RES (31)..(32): Xaa is C or S
RVVMNEYQKYIVNSSDDIFLVSIPSLKTPAXXPKPVY

SEQ ID NO: 10990 - protein, 41 aa, Artificial Sequence
  Non-cyclic GFR-binding peptide
  MOD_RES (2)..(4)..(38)..(39): Xaa is C or S
  MOD_RES (16)..(17)..(18)..(19)..(20): Xaa is A or G
  MOD_RES (21)..(22)..(23)..(24): Xaa is A or G or absent
RXGXGEVVMDNSLQEXXXXXXXXXYYVMPLPELETPVXXAK

SEQ ID NO: 10991 - protein, 36 aa, Artificial Sequence
  Non-cyclic GFR-binding peptide
  MOD_RES (33)..(33): Xaa is C or S
  MOD_RES (11)..(12)..(13)..(14)..(15): Xaa is A or G
  MOD_RES (16)..(17)..(18)..(19): Xaa is A or G or absent
RVVMNNSLQEXXXXXXXXXYYLVTLPELKTPAXTPK

SEQ ID NO: 10992 - protein, 37 aa, Artificial Sequence
  Non-cyclic GFR-binding peptide
  MOD_RES (1)..(33): Xaa is C or S
XSRVVMNEYQKYIVNSSDDIFLVSIPSLKTPAXTPKT

SEQ ID NO: 10993 - protein, 35 aa, Artificial Sequence
  Non-cyclic GFR-binding peptide
  MOD_RES (31)..(31): Xaa is C or S
RVVMNNSLQEIVNSSDDYYLVTLPELKTPAXTPKT

SEQ ID NO: 10994 - protein, 36 aa, Artificial Sequence
  Non-cyclic GFR-binding peptide
  MOD_RES (1)..(33)..(34): Xaa is C or S
XSEVVMDRYKKLVVNNASDFYLISIANLRTPVXXTP

SEQ ID NO: 10995 - protein, 38 aa, Artificial Sequence
  Non-cyclic GFR-binding peptide
  MOD_RES (2)..(4)..(38): Xaa is C or S
  MOD_RES (16)..(17)..(18)..(19)..(20): Xaa is A or G
  MOD_RES (21)..(22)..(23)..(24): Xaa is A or G or absent
HXGXARVVMNNSLQEXXXXXXXXXYYLVTLPELQTPAX

SEQ ID NO: 10996 - protein, 42 aa, Artificial Sequence
  Non-cyclic GFR-binding peptide
  MOD_RES (1)..(3)..(37): Xaa is C or S
  MOD_RES (15)..(16)..(17)..(18)..(19): Xaa is A or G
  MOD_RES (20)..(21)..(22)..(23): Xaa is A or G or absent
XGXSRVVMNEYQKYXXXXXXXXXIFLVSIPSLKTPAXTPKTV

SEQ ID NO: 10997 - protein, 40 aa, Artificial Sequence
  Non-cyclic GFR-binding peptide
  MOD_RES (2)..(36)..(37): Xaa is C or S
  MOD_RES (14)..(15)..(16)..(17)..(18): Xaa is A or G
  MOD_RES (19)..(20)..(21)..(22): Xaa is A or G or absent
GXSEVVMDNSLQEXXXXXXXXXYYVIPLPELRTPVXXTPP

SEQ ID NO: 10998 - protein, 39 aa, Artificial Sequence
  Non-cyclic GFR-binding peptide
  MOD_RES (2)..(34)..(35): Xaa is C or S
GXSEVVMDNSLQEVVNNASDYYVIPLPELRTPVXXTPPT

SEQ ID NO: 10999 - protein, 35 aa, Artificial Sequence
  Non-cyclic GFR-binding peptide
  MOD_RES (2)..(34)..(35): Xaa is C or S
GXSRVVMNEYQKYIVNSSDDIFLVSIPSLKTPAXX

SEQ ID NO: 11000 - protein, 34 aa, Artificial Sequence
  Non-cyclic GFR-binding peptide
  MOD_RES (1)..(1): Xaa is C or S
  MOD_RES (13)..(14)..(15)..(16)..(17): Xaa is A or G
  MOD_RES (18)..(19)..(20)..(21): Xaa is A or G or absent
XARVVMNNSLQEXXXXXXXXXYYLVTLPELQTPA

SEQ ID NO: 11001 - protein, 36 aa, Artificial Sequence
  Non-cyclic GFR-binding peptide
  MOD_RES (1)..(3): Xaa is C or S
  MOD_RES (15)..(16)..(17)..(18)..(19): Xaa is A or G
  MOD_RES (20)..(21)..(22)..(23): Xaa is A or G or absent
XGXGEVVMDNSLQEXXXXXXXXXYYVMPLPELETPV

SEQ ID NO: 11002 - protein, 37 aa, Artificial Sequence
  Non-cyclic GFR-binding peptide
  MOD_RES (32)..(33): Xaa is C or S
SEVVMDQYNKLVVNNASDLYLISIASLRTPVXXTPPT

SEQ ID NO: 11003 - protein, 37 aa, Artificial Sequence
  Non-cyclic GFR-binding peptide
  MOD_RES (31)..(32): Xaa is C or S
EVVMDNSLQEVVKENEDYYLMTLPELETPVXXAKPIK

SEQ ID NO: 11004 - protein, 33 aa, Artificial Sequence
  Non-cyclic GFR-binding peptide
  MOD_RES (1)..(33): Xaa is C or S
XSEVVMDNSLQEVVNNASDYYVIPLPELRTPVX

SEQ ID NO: 11005 - protein, 33 aa, Artificial Sequence
  Non-cyclic GFR-binding peptide
  MOD_RES (1)..(32)..(33): Xaa is C or S
XSKVIMNSLQEIKPTKGIYYVIPLPELDQSVXX

SEQ ID NO: 11006 - protein, 43 aa, Artificial Sequence
  Non-cyclic GFR-binding peptide
  MOD_RES (2)..(4)..(38)..(39): Xaa is C or S
  MOD_RES (16)..(17)..(18)..(19)..(20): Xaa is A or G
  MOD_RES (21)..(22)..(23)..(24): Xaa is A or G or absent
RXGXSEVVMDRYKKLXXXXXXXXXFYLISIANLRTPVXXTPPT

SEQ ID NO: 11007 - protein, 41 aa, Artificial Sequence
  Non-cyclic GFR-binding peptide
  MOD_RES (1)..(3)..(35)..(36): Xaa is C or S
XGXGEVVMENSLQEVVKDYEDYYVMPLPELETPVXXAKPIS

SEQ ID NO: 11008 - protein, 40 aa, Artificial Sequence
  Non-cyclic GFR-binding peptide
  MOD_RES (2)..(4)..(37)..(38): Xaa is C or S
  MOD_RES (15)..(16)..(17)..(18)..(19): Xaa is A or G
  MOD_RES (20)..(21)..(22)..(23): Xaa is A or G or absent
SXKXSKVVMNSLQEXXXXXXXXXYYVIPLPELDQPVXXPS

SEQ ID NO: 11009 - protein, 36 aa, Artificial Sequence
  Non-cyclic GFR-binding peptide
  MOD_RES (1)..(3)..(35)..(36): Xaa is C or S
XGXGEVVMDNSLQEVVKENEDYYLMTLPELETPVXX

SEQ ID NO: 11010 - protein, 31 aa, Artificial Sequence
  Non-cyclic GFR-binding peptide
  MOD_RES (31)..(31): Xaa is C or S
EVVMDQYNKLVVNNASDLYLISIASLRTPVX

SEQ ID NO: 11011 - protein, 35 aa, Artificial Sequence
  Non-cyclic GFR-binding peptide
  MOD_RES (1)..(34)..(35): Xaa is C or S
  MOD_RES (12)..(13)..(14)..(15)..(16): Xaa is A or G
  MOD_RES (17)..(18)..(19)..(20): Xaa is A or G or absent
XSKVIMEYQKYXXXXXXXXXIFLISIPSLDQSVXX

SEQ ID NO: 11012 - protein, 30 aa, Artificial Sequence; identical to SEQ ID NO: 2038
  Non-cyclic GFR-binding peptide

SEQ ID NO: 11013 - protein, 38 aa, Artificial Sequence
  Non-cyclic GFR-binding peptide
  MOD_RES (1)..(33)..(34): Xaa is C or S
XSEVVMDRYKKLVVNNASDFYLISIANLRTPVXXTPPT

SEQ ID NO: 11014 - protein, 38 aa, Artificial Sequence
  Non-cyclic GFR-binding peptide
  MOD_RES (1)..(3)..(35)..(36): Xaa is C or S
XGXARVVMNEYQKYIVNSSDDIFLVSIPSLQTPAXXPK

SEQ ID NO: 11015 - protein, 38 aa, Artificial Sequence
  Non-cyclic GFR-binding peptide
  MOD_RES (1)..(33): Xaa is C or S
XSRVVMNNSLQEIVNSSDDYYVVPLPELKTPAXTPKTV

SEQ ID NO: 11016 - protein, 34 aa, Artificial Sequence
  Non-cyclic GFR-binding peptide
  MOD_RES (1)..(1): Xaa is C or S
  MOD_RES (13)..(14)..(15)..(16)..(17): Xaa is A or G
  MOD_RES (18)..(19)..(20)..(21): Xaa is A or G or absent
XGEVVMENSLQEXXXXXXXXXYYLMTLPELETPV

SEQ ID NO: 11017 - protein, 40 aa, Artificial Sequence
  Non-cyclic GFR-binding peptide
  MOD_RES (1)..(3)..(37)..(38): Xaa is C or S
  MOD_RES (15)..(16)..(17)..(18)..(19): Xaa is A or G
  MOD_RES (20)..(21)..(22)..(23): Xaa is A or G or absent
XGXSRVVMNNSLQEXXXXXXXXXYYLVTLPELKTPAXXPK

SEQ ID NO: 11018 - protein, 37 aa, Artificial Sequence
  Non-cyclic GFR-binding peptide
  MOD_RES (32)..(33): Xaa is C or S
SRVVMNNSLQEIVNSSDDYYVVPLPELKTPAXXPKPV

SEQ ID NO: 11019 - protein, 32 aa, Artificial Sequence
  Non-cyclic GFR-binding peptide
  MOD_RES (11)..(12)..(13)..(14)..(15): Xaa is A or G
  MOD_RES (16)..(17)..(18)..(19): Xaa is A or G or absent
RVVMNNSLQEXXXXXXXXXYYVVPLPELQTPA

SEQ ID NO: 11020 - protein, 43 aa, Artificial Sequence
  Non-cyclic GFR-binding peptide
  MOD_RES (1)..(3)..(37)..(38): Xaa is C or S
  MOD_RES (15)..(16)..(17)..(18)..(19): Xaa is A or G
  MOD_RES (20)..(21)..(22)..(23): Xaa is A or G or absent
XGXSRVVMNNSLQEXXXXXXXXXYYLVTLPELKTPAXXPKPVY

SEQ ID NO: 11021 - protein, 39 aa, Artificial Sequence
  Non-cyclic GFR-binding peptide
  MOD_RES (1)..(35)..(36): Xaa is C or S
  MOD_RES (13)..(14)..(15)..(16)..(17): Xaa is A or G
  MOD_RES (18)..(19)..(20)..(21): Xaa is A or G or absent
XGEVVMDNSLQEXXXXXXXXXYYVMPLPELETPVXXAKP

SEQ ID NO: 11022 - protein, 38 aa, Artificial Sequence
  Non-cyclic GFR-binding peptide
  MOD_RES (2)..(4)..(35)..(36): Xaa is C or S
SXKXSRVIMNSLQEVKPKRGVYYLITLPELAQPVXXPA

SEQ ID NO: 11023 - protein, 38 aa, Artificial Sequence
  Non-cyclic GFR-binding peptide
  MOD_RES (1)..(3)..(36)..(37): Xaa is C or S
  MOD_RES (14)..(15)..(16)..(17)..(18): Xaa is A or G
  MOD_RES (19)..(20)..(21)..(22): Xaa is A or G or absent
XKXSRVIMEYQKYXXXXXXXXXIFLISIPSLAQPVXXP

SEQ ID NO: 11024 - protein, 33 aa, Artificial Sequence
  Non-cyclic GFR-binding peptide
  MOD_RES (33)..(33): Xaa is C or S
  MOD_RES (11)..(12)..(13)..(14)..(15): Xaa is A or G
  MOD_RES (16)..(17)..(18)..(19): Xaa is A or G or absent
RVVMNNSLQEXXXXXXXXXYYLVTLPELQTPAX

SEQ ID NO: 11025 - protein, 37 aa, Artificial Sequence
  Non-cyclic GFR-binding peptide
  MOD_RES (1)..(3)..(35)..(36): Xaa is C or S
XGXGEVVMEEYQKYVVKDYEDIFLMSIPSLETPVXXA

SEQ ID NO: 11026 - protein, 37 aa, Artificial Sequence
  Non-cyclic GFR-binding peptide
  MOD_RES (1)..(3)..(35)..(36): Xaa is C or S
XGXGEVVMENSLQEVVKDYEDYYLMTLPELETPVXXA

SEQ ID NO: 11027 - protein, 33 aa, Artificial Sequence
  Non-cyclic GFR-binding peptide
  MOD_RES (2)..(2): Xaa is C or S
GXGEVVMENSLQEVVKDYEDYYVMPLPELETPV

SEQ ID NO: 11028 - protein, 37 aa, Artificial Sequence
  Non-cyclic GFR-binding peptide
  MOD_RES (2)..(36)..(37): Xaa is C or S
  MOD_RES (14)..(15)..(16)..(17)..(18): Xaa is A or G
  MOD_RES (19)..(20)..(21)..(22): Xaa is A or G or absent
GXSEVVMDQYNKLXXXXXXXXXLYLISIASLRTPVXX

SEQ ID NO: 11029 - protein, 37 aa, Artificial Sequence
  Non-cyclic GFR-binding peptide
  MOD_RES (2)..(34): Xaa is C or S
GXSRVVMNNSLQEIVNSSDDYYLVTLPELKTPAXTPK

SEQ ID NO: 11030 - protein, 36 aa, Artificial Sequence
  Non-cyclic GFR-binding peptide
  MOD_RES (34)..(35): Xaa is C or S
  MOD_RES (12)..(13)..(14)..(15)..(16): Xaa is A or G
  MOD_RES (17)..(18)..(19)..(20): Xaa is A or G or absent
SRVVMNEYQKYXXXXXXXXXIFLVSIPSLKTPAXXP

SEQ ID NO: 11031 - protein, 35 aa, Artificial Sequence
  Non-cyclic GFR-binding peptide
  MOD_RES (34)..(35): Xaa is C or S
  MOD_RES (12)..(13)..(14)..(15)..(16): Xaa is A or G
  MOD_RES (17)..(18)..(19)..(20): Xaa is A or G or absent
SEVVMDRYKKLXXXXXXXXXFYLISIANLRTPVXX

SEQ ID NO: 11032 - protein, 38 aa, Artificial Sequence
  Non-cyclic GFR-binding peptide
  MOD_RES (1)..(33)..(34): Xaa is C or S
XSRVVMNEYQKYIVNSSDDIFLVSIPSLKTPAXXPKPV

SEQ ID NO: 11033 - protein, 42 aa, Artificial Sequence
  Non-cyclic GFR-binding peptide
  MOD_RES (2)..(4)..(36): Xaa is C or S
HXGXSRVVMNNSLQEIVNSSDDYYVVPLPELKTPAXTPKTVH

SEQ ID NO: 11034 - protein, 39 aa, Artificial Sequence
  Non-cyclic GFR-binding peptide
  MOD_RES (2)..(4)..(38)..(39): Xaa is C or S
  MOD_RES (16)..(17)..(18)..(19)..(20): Xaa is A or G
  MOD_RES (21)..(22)..(23)..(24): Xaa is A or G or absent
HXGXSRVVMNNSLQEXXXXXXXXXYYVVPLPELKTPAXX

SEQ ID NO: 11035 - protein, 41 aa, Artificial Sequence
  Non-cyclic GFR-binding peptide
  MOD_RES (1)..(35)..(36): Xaa is C or S
  MOD_RES (13)..(14)..(15)..(16)..(17): Xaa is A or G
  MOD_RES (18)..(19)..(20)..(21): Xaa is A or G or absent
XGEVVMENSLQEXXXXXXXXXYYLMTLPELETPVXXAKPIS

SEQ ID NO: 11036 - protein, 38 aa, Artificial Sequence
  Non-cyclic GFR-binding peptide
  MOD_RES (33)..(34): Xaa is C or S
  MOD_RES (11)..(12)..(13)..(14)..(15): Xaa is A or G
  MOD_RES (16)..(17)..(18)..(19): Xaa is A or G or absent
EVVMDNSLQEXXXXXXXXXYYLITLPELRTPVXXTPPT

SEQ ID NO: 11037 - protein, 39 aa, Artificial Sequence
  Non-cyclic GFR-binding peptide
  MOD_RES (1)..(35)..(36): Xaa is C or S
  MOD_RES (13)..(14)..(15)..(16)..(17): Xaa is A or G
  MOD_RES (18)..(19)..(20)..(21): Xaa is A or G or absent
XSEVVMDRYKKLXXXXXXXXXFYLISIANLRTPVXXTPP

SEQ ID NO: 11038 - protein, 39 aa, Artificial Sequence
  Non-cyclic GFR-binding peptide
  MOD_RES (1)..(3)..(35)..(36): Xaa is C or S
XGXSRVVMNEYQKYIVNSSDDIFLVSIPSLKTPAXXPKP

SEQ ID NO: 11039 - protein, 37 aa, Artificial Sequence
  Non-cyclic GFR-binding peptide
  MOD_RES (31)..(32): Xaa is C or S
EVVMDQYNKLVVNNASDLYLISIASLRTPVXXTPPTS

SEQ ID NO: 11040 - protein, 38 aa, Artificial Sequence
  Non-cyclic GFR-binding peptide
  MOD_RES (1)..(3)..(35)..(36): Xaa is C or S
XGXARVVMNNSLQEIVNSSDDYYLVTLPELQTPAXXPK

SEQ ID NO: 11041 - protein, 42 aa, Artificial Sequence
  Non-cyclic GFR-binding peptide
  MOD_RES (2)..(4)..(38)..(39): Xaa is C or S
  MOD_RES (16)..(17)..(18)..(19)..(20): Xaa is A or G
  MOD_RES (21)..(22)..(23)..(24): Xaa is A or G or absent
RXGXSEVVMDQYNKLXXXXXXXXXLYLISIASLRTPVXXTPP

SEQ ID NO: 11042 - protein, 33 aa, Artificial Sequence
  Non-cyclic GFR-binding peptide
  MOD_RES (33)..(33): Xaa is C or S
  MOD_RES (11)..(12)..(13)..(14)..(15): Xaa is A or G
  MOD_RES (16)..(17)..(18)..(19): Xaa is A or G or absent
SKVVMNSLQEXXXXXXXXXYYVIPLPELDQPVX

SEQ ID NO: 11043 - protein, 37 aa, Artificial Sequence
  Non-cyclic GFR-binding peptide
  MOD_RES (1)..(3)..(35)..(36): Xaa is C or S
XGXGEVVMDEYQKYVVKENEDIFLMSIPSLETPVXXA

SEQ ID NO: 11044 - protein, 41 aa, Artificial Sequence
  Non-cyclic GFR-binding peptide
  MOD_RES (2)..(4)..(38): Xaa is C or S
  MOD_RES (16)..(17)..(18)..(19)..(20): Xaa is A or G
  MOD_RES (21)..(22)..(23)..(24): Xaa is A or G or absent
HXGXSRVVMNNSLQEXXXXXXXXXYYVVPLPELKTPAXTPK

SEQ ID NO: 11045 - protein, 36 aa, Artificial Sequence
  Non-cyclic GFR-binding peptide
  MOD_RES (1)..(3)..(35)..(36): Xaa is C or S
XGXGEVVMDEYQKYVVKENEDIFLMSIPSLETPVXX

SEQ ID NO: 11046 - protein, 36 aa, Artificial Sequence
  Non-cyclic GFR-binding peptide
  MOD_RES (1)..(33): Xaa is C or S
XSRVVMNNSLQEIVNSSDDYYLVTLPELKTPAXTPK

SEQ ID NO: 11047 - protein, 39 aa, Artificial Sequence
  Non-cyclic GFR-binding peptide
  MOD_RES (2)..(36)..(37): Xaa is C or S
  MOD_RES (14)..(15)..(16)..(17)..(18): Xaa is A or G
  MOD_RES (19)..(20)..(21)..(22): Xaa is A or G or absent
GXSEVVMDNSLQEXXXXXXXXXYYVIPLPELRTPVXXTP

SEQ ID NO: 11048 - protein, 36 aa, Artificial Sequence
  Non-cyclic GFR-binding peptide
  MOD_RES (2)..(36): Xaa is C or S
  MOD_RES (14)..(15)..(16)..(17)..(18): Xaa is A or G
  MOD_RES (19)..(20)..(21)..(22): Xaa is A or G or absent
GXGEVVMENSLQEXXXXXXXXXYYLMTLPELETPVX

SEQ ID NO: 11049 - protein, 37 aa, Artificial Sequence
  Non-cyclic GFR-binding peptide
  MOD_RES (31)..(32): Xaa is C or S
SRVIMNSLQEVKPKRGVYYLITLPELAQPVXXPAASA

SEQ ID NO: 11050 - protein, 37 aa, Artificial Sequence
  Non-cyclic GFR-binding peptide
  MOD_RES (1)..(33)..(34): Xaa is C or S
XSEVVMDRYKKLVVNNASDFYLISIANLRTPVXXTPP

SEQ ID NO: 11051 - protein, 41 aa, Artificial Sequence
  Non-cyclic GFR-binding peptide
  MOD_RES (2)..(4)..(37)..(38): Xaa is C or S
  MOD_RES (15)..(16)..(17)..(18)..(19): Xaa is A or G
  MOD_RES (20)..(21)..(22)..(23): Xaa is A or G or absent
SXKXSRVIMNSLQEXXXXXXXXXYYLITLPELAQPVXXPAA

SEQ ID NO: 11052 - protein, 37 aa, Artificial Sequence
  Non-cyclic GFR-binding peptide
  MOD_RES (1)..(3)..(34)..(35): Xaa is C or S
XKXSKVVMNSLQEVKPTRGVYYVIPLPELDQPVXXPS

SEQ ID NO: 11053 - protein, 34 aa, Artificial Sequence
  Non-cyclic GFR-binding peptide
  MOD_RES (2)..(4): Xaa is C or S
SXKXSKVIMNSLQEIKPTKGIYYVIPLPELDQSV

SEQ ID NO: 11054 - protein, 42 aa, Artificial Sequence
  Non-cyclic GFR-binding peptide
  MOD_RES (1)..(3)..(37)..(38): Xaa is C or S
  MOD_RES (15)..(16)..(17)..(18)..(19): Xaa is A or G
  MOD_RES (20)..(21)..(22)..(23): Xaa is A or G or absent
XGXGEVVMDEYQKYXXXXXXXXXIFLMSIPSLETPVXXAKPI

SEQ ID NO: 11055 - protein, 37 aa, Artificial Sequence
  Non-cyclic GFR-binding peptide
  MOD_RES (1)..(3)..(37): Xaa is C or S
  MOD_RES (15)..(16)..(17)..(18)..(19): Xaa is A or G
  MOD_RES (20)..(21)..(22)..(23): Xaa is A or G or absent
XGXARVVMNNSLQEXXXXXXXXXYYLVTLPELQTPAX

SEQ ID NO: 11056 - protein, 33 aa, Artificial Sequence
  Non-cyclic GFR-binding peptide
  MOD_RES (1)..(1): Xaa is C or S
  MOD_RES (12)..(13)..(14)..(15)..(16): Xaa is A or G
  MOD_RES (17)..(18)..(19)..(20): Xaa is A or G or absent
XSRVIMNSLQEXXXXXXXXXYYLITLPELAQPV

SEQ ID NO: 11057 - protein, 40 aa, Artificial Sequence
  Non-cyclic GFR-binding peptide
  MOD_RES (1)..(3)..(37)..(38): Xaa is C or S
  MOD_RES (15)..(16)..(17)..(18)..(19): Xaa is A or G
  MOD_RES (20)..(21)..(22)..(23): Xaa is A or G or absent
XGXGEVVMDEYQKYXXXXXXXXXIFLMSIPSLETPVXXAK

SEQ ID NO: 11058 - protein, 41 aa, Artificial Sequence
  Non-cyclic GFR-binding peptide
  MOD_RES (2)..(4)..(38)..(39): Xaa is C or S
  MOD_RES (16)..(17)..(18)..(19)..(20): Xaa is A or G
  MOD_RES (21)..(22)..(23)..(24): Xaa is A or G or absent
RXGXGEVVMDEYQKYXXXXXXXXXIFLMSIPSLETPVXXAK

SEQ ID NO: 11059 - protein, 35 aa, Artificial Sequence
  Non-cyclic GFR-binding peptide
  MOD_RES (1)..(35): Xaa is C or S
  MOD_RES (13)..(14)..(15)..(16)..(17): Xaa is A or G
  MOD_RES (18)..(19)..(20)..(21): Xaa is A or G or absent
XGEVVMENSLQEXXXXXXXXXYYLMTLPELETPVX

SEQ ID NO: 11060 - protein, 35 aa, Artificial Sequence
  Non-cyclic GFR-binding peptide
  MOD_RES (2)..(34)..(35): Xaa is C or S
GXGEVVMDNSLQEVVKENEDYYVMPLPELETPVXX

SEQ ID NO: 11061 - protein, 35 aa, Artificial Sequence
  Non-cyclic GFR-binding peptide
  MOD_RES (2)..(35): Xaa is C or S
  MOD_RES (13)..(14)..(15)..(16)..(17): Xaa is A or G
  MOD_RES (18)..(19)..(20)..(21): Xaa is A or G or absent
KXSRVIMNSLQEXXXXXXXXXYYLITLPELAQPVX

SEQ ID NO: 11062 - protein, 35 aa, Artificial Sequence
  Non-cyclic GFR-binding peptide
  MOD_RES (1)..(35): Xaa is C or S
  MOD_RES (13)..(14)..(15)..(16)..(17): Xaa is A or G
  MOD_RES (18)..(19)..(20)..(21): Xaa is A or G or absent
XARVVMNNSLQEXXXXXXXXXYYLVTLPELQTPAX

SEQ ID NO: 11063 - protein, 34 aa, Artificial Sequence
  Non-cyclic GFR-binding peptide
  MOD_RES (32)..(33): Xaa is C or S
GEVVMENSLQEVVKDYEDYYLMTLPELETPVXXA

SEQ ID NO: 11064 - protein, 42 aa, Artificial Sequence
  Non-cyclic GFR-binding peptide
  MOD_RES (1)..(3)..(37)..(38): Xaa is C or S
  MOD_RES (15)..(16)..(17)..(18)..(19): Xaa is A or G
  MOD_RES (20)..(21)..(22)..(23): Xaa is A or G or absent
XGXARVVMNEYQKYXXXXXXXXXIFLVSIPSLQTPAXXPKPV

SEQ ID NO: 11065 - protein, 31 aa, Artificial Sequence
  Non-cyclic GFR-binding peptide
GEVVMEEYQKYVVKDYEDIFLMSIPSLETPV

SEQ ID NO: 11066 - protein, 43 aa, Artificial Sequence
  Non-cyclic GFR-binding peptide
  MOD_RES (1)..(3)..(37): Xaa is C or S
  MOD_RES (15)..(16)..(17)..(18)..(19): Xaa is A or G
  MOD_RES (20)..(21)..(22)..(23): Xaa is A or G or absent
XGXSRVVMNEYQKYXXXXXXXXXIFLVSIPSLKTPAXTPKTVH

SEQ ID NO: 11067 - protein, 37 aa, Artificial Sequence
  Non-cyclic GFR-binding peptide
  MOD_RES (33)..(34): Xaa is C or S
  MOD_RES (11)..(12)..(13)..(14)..(15): Xaa is A or G
  MOD_RES (16)..(17)..(18)..(19): Xaa is A or G or absent
EVVMDNSLQEXXXXXXXXXYYLITLPELRTPVXXTPP

SEQ ID NO: 11068 - protein, 40 aa, Artificial Sequence
  Non-cyclic GFR-binding peptide
  MOD_RES (1)..(3)..(37)..(38): Xaa is C or S
  MOD_RES (15)..(16)..(17)..(18)..(19): Xaa is A or G
  MOD_RES (20)..(21)..(22)..(23): Xaa is A or G or absent
XGXSEVVMDNSLQEXXXXXXXXXYYLITLPELRTPVXXTP

SEQ ID NO: 11069 - protein, 33 aa, Artificial Sequence
  Non-cyclic GFR-binding peptide
  MOD_RES (12)..(13)..(14)..(15)..(16): Xaa is A or G
  MOD_RES (17)..(18)..(19)..(20): Xaa is A or G or absent
SEVVMDNSLQEXXXXXXXXXYYVIPLPELRTPV

SEQ ID NO: 11070 - protein, 38 aa, Artificial Sequence
  Non-cyclic GFR-binding peptide
  MOD_RES (32)..(32): Xaa is C or S
SRVVMNNSLQEIVNSSDDYYLVTLPELKTPAXTPKTVH

SEQ ID NO: 11071 - protein, 35 aa, Artificial Sequence
  Non-cyclic GFR-binding peptide
  MOD_RES (2)..(34)..(35): Xaa is C or S
GXARVVMNNSLQEIVNSSDDYYLVTLPELQTPAXX

SEQ ID NO: 11072 - protein, 32 aa, Artificial Sequence
  Non-cyclic GFR-binding peptide
  MOD_RES (32)..(32): Xaa is C or S
SRVVMNNSLQEIVNSSDDYYVVPLPELKTPAX

SEQ ID NO: 11073 - protein, 39 aa, Artificial Sequence
  Non-cyclic GFR-binding peptide
  MOD_RES (2)..(35)..(36): Xaa is C or S
  MOD_RES (13)..(14)..(15)..(16)..(17): Xaa is A or G
  MOD_RES (18)..(19)..(20)..(21): Xaa is A or G or absent
KXSKVVMNSLQEXXXXXXXXXYYVIPLPELDQPVXXPSA

SEQ ID NO: 11074 - protein, 39 aa, Artificial Sequence
  Non-cyclic GFR-binding peptide
  MOD_RES (33)..(34): Xaa is C or S
  MOD_RES (11)..(12)..(13)..(14)..(15): Xaa is A or G
  MOD_RES (16)..(17)..(18)..(19): Xaa is A or G or absent
RVVMNNSLQEXXXXXXXXXYYVVPLPELQTPAXXPKPVT

SEQ ID NO: 11075 - protein, 38 aa, Artificial Sequence
  Non-cyclic GFR-binding peptide
  MOD_RES (1)..(3)..(37)..(38): Xaa is C or S
  MOD_RES (15)..(16)..(17)..(18)..(19): Xaa is A or G
  MOD_RES (20)..(21)..(22)..(23): Xaa is A or G or absent
XGXSEVVMDRYKKLXXXXXXXXXFYLISIANLRTPVXX

SEQ ID NO: 11076 - protein, 39 aa, Artificial Sequence
  Non-cyclic GFR-binding peptide
  MOD_RES (1)..(33)..(34): Xaa is C or S
XSRVVMNNSLQEIVNSSDDYYLVTLPELKTPAXXPKPVY

SEQ ID NO: 11077 - protein, 42 aa, Artificial Sequence
  Non-cyclic GFR-binding peptide
  MOD_RES (2)..(36)..(37): Xaa is C or S
  MOD_RES (14)..(15)..(16)..(17)..(18): Xaa is A or G
  MOD_RES (19)..(20)..(21)..(22): Xaa is A or G or absent
GXGEVVMDNSLQEXXXXXXXXXYYVMPLPELETPVXXAKPIK

SEQ ID NO: 11078 - protein, 34 aa, Artificial Sequence
  Non-cyclic GFR-binding peptide
  MOD_RES (1)..(33)..(34): Xaa is C or S
XSEVVMDNSLQEVVNNASDYYVIPLPELRTPVXX

SEQ ID NO: 11079 - protein, 38 aa, Artificial Sequence
  Non-cyclic GFR-binding peptide
  MOD_RES (2)..(4)..(35)..(36): Xaa is C or S
SXKXSRVIMEYQKYVKPKRGVIFLISIPSLAQPVXXPA

SEQ ID NO: 11080 - protein, 40 aa, Artificial Sequence
  Non-cyclic GFR-binding peptide
  MOD_RES (1)..(35)..(36): Xaa is C or S
  MOD_RES (13)..(14)..(15)..(16)..(17): Xaa is A or G
  MOD_RES (18)..(19)..(20)..(21): Xaa is A or G or absent
XSEVVMDNSLQEXXXXXXXXXYYVIPLPELRTPVXXTPPT

SEQ ID NO: 11081 - protein, 37 aa, Artificial Sequence
  Non-cyclic GFR-binding peptide
  MOD_RES (1)..(3)..(36)..(37): Xaa is C or S
  MOD_RES (14)..(15)..(16)..(17)..(18): Xaa is A or G
  MOD_RES (19)..(20)..(21)..(22): Xaa is A or G or absent
XKXSKVIMNSLQEXXXXXXXXXYYVIPLPELDQSVXX

SEQ ID NO: 11082 - protein, 39 aa, Artificial Sequence
  Non-cyclic GFR-binding peptide
  MOD_RES (1)..(33)..(34): Xaa is C or S
XGEVVMEEYQKYVVKDYEDIFLMSIPSLETPVXXAKPIS

SEQ ID NO: 11083 - protein, 36 aa, Artificial Sequence
  Non-cyclic GFR-binding peptide
  MOD_RES (1)..(3)..(35)..(36): Xaa is C or S
XGXGEVVMENSLQEVVKDYEDYYLMTLPELETPVXX

SEQ ID NO: 11084 - protein, 36 aa, Artificial Sequence
  Non-cyclic GFR-binding peptide
  MOD_RES (33)..(34): Xaa is C or S
  MOD_RES (11)..(12)..(13)..(14)..(15): Xaa is A or G
  MOD_RES (16)..(17)..(18)..(19): Xaa is A or G or absent
EVVMENSLQEXXXXXXXXXYYVMPLPELETPVXXAK

SEQ ID NO: 11085 - protein, 42 aa, Artificial Sequence
  Non-cyclic GFR-binding peptide
  MOD_RES (2)..(4)..(37)..(38): Xaa is C or S
  MOD_RES (15)..(16)..(17)..(18)..(19): Xaa is A or G
  MOD_RES (20)..(21)..(22)..(23): Xaa is A or G or absent
SXKXSRVIMEYQKYXXXXXXXXXIFLISIPSLAQPVXXPAAS

SEQ ID NO: 11086 - protein, 39 aa, Artificial Sequence
  Non-cyclic GFR-binding peptide
  MOD_RES (2)..(35)..(36): Xaa is C or S
  MOD_RES (13)..(14)..(15)..(16)..(17): Xaa is A or G
  MOD_RES (18)..(19)..(20)..(21): Xaa is A or G or absent
KXSKVIMEYQKYXXXXXXXXXIFLISIPSLDQSVXXPSA

SEQ ID NO: 11087 - protein, 37 aa, Artificial Sequence
  Non-cyclic GFR-binding peptide
  MOD_RES (32)..(33): Xaa is C or S
SEVVMDRYKKLVVNNASDFYLISIANLRTPVXXTPPT

SEQ ID NO: 11088 - protein, 34 aa, Artificial Sequence
  Non-cyclic GFR-binding peptide
  MOD_RES (1)..(3): Xaa is C or S
XGXARVVMNNSLQEIVNSSDDYYVVPLPELQTPA

SEQ ID NO: 11089 - protein, 42 aa, Artificial Sequence
  Non-cyclic GFR-binding peptide
  MOD_RES (2)..(4)..(38)..(39): Xaa is C or S
  MOD_RES (16)..(17)..(18)..(19)..(20): Xaa is A or G
  MOD_RES (21)..(22)..(23)..(24): Xaa is A or G or absent
HXGXARVVMNEYQKYXXXXXXXXXIFLVSIPSLQTPAXXPKP

SEQ ID NO: 11090 - protein, 37 aa, Artificial Sequence
  Non-cyclic GFR-binding peptide
  MOD_RES (2)..(4)..(36): Xaa is C or S
HXGXSRVVMNNSLQEIVNSSDDYYVVPLPELKTPAXT

SEQ ID NO: 11091 - protein, 40 aa, Artificial Sequence
  Non-cyclic GFR-binding peptide
  MOD_RES (1)..(3)..(37)..(38): Xaa is C or S
  MOD_RES (15)..(16)..(17)..(18)..(19): Xaa is A or G
  MOD_RES (20)..(21)..(22)..(23): Xaa is A or G or absent
XGXSEVVMDNSLQEXXXXXXXXXYYVIPLPELRTPVXXTP

SEQ ID NO: 11092 - protein, 37 aa, Artificial Sequence
  Non-cyclic GFR-binding peptide
  MOD_RES (2)..(34): Xaa is C or S
GXSRVVMNEYQKYIVNSSDDIFLVSIPSLKTPAXTPK

SEQ ID NO: 11093 - protein, 39 aa, Artificial Sequence
  Non-cyclic GFR-binding peptide
  MOD_RES (2)..(33)..(34): Xaa is C or S
KXSRVIMEYQKYVKPKRGVIFLISIPSLAQPVXXPAASA

SEQ ID NO: 11094 - protein, 43 aa, Artificial Sequence
  Non-cyclic GFR-binding peptide
  MOD_RES (2)..(4)..(37)..(38): Xaa is C or S
  MOD_RES (15)..(16)..(17)..(18)..(19): Xaa is A or G
  MOD_RES (20)..(21)..(22)..(23): Xaa is A or G or absent
SXKXSKVIMEYQKYXXXXXXXXXIFLISIPSLDQSVXXPSASA

SEQ ID NO: 11095 - protein, 35 aa, Artificial Sequence
  Non-cyclic GFR-binding peptide
  MOD_RES (2)..(2): Xaa is C or S
  MOD_RES (14)..(15)..(16)..(17)..(18): Xaa is A or G
  MOD_RES (19)..(20)..(21)..(22): Xaa is A or G or absent
GXGEVVMEEYQKYXXXXXXXXXIFLMSIPSLETPV

SEQ ID NO: 11096 - protein, 37 aa, Artificial Sequence
  Non-cyclic GFR-binding peptide
  MOD_RES (1)..(3)..(37): Xaa is C or S
  MOD_RES (15)..(16)..(17)..(18)..(19): Xaa is A or G
  MOD_RES (20)..(21)..(22)..(23): Xaa is A or G or absent
XGXSEVVMDQYNKLXXXXXXXXXLYLISIASLRTPVX

SEQ ID NO: 11097 - protein, 37 aa, Artificial Sequence
  Non-cyclic GFR-binding peptide
  MOD_RES (2)..(4)..(36)..(37): Xaa is C or S
HXGXARVVMNNSLQEIVNSSDDYYLVTLPELQTPAXX

SEQ ID NO: 11098 - protein, 34 aa, Artificial Sequence
  Non-cyclic GFR-binding peptide
  MOD_RES (33)..(34): Xaa is C or S
  MOD_RES (11)..(12)..(13)..(14)..(15): Xaa is A or G
  MOD_RES (16)..(17)..(18)..(19): Xaa is A or G or absent
RVVMNEYQKYXXXXXXXXXIFLVSIPSLKTPAXX

SEQ ID NO: 11099 - protein, 35 aa, Artificial Sequence
  Non-cyclic GFR-binding peptide
  MOD_RES (2)..(34)..(35): Xaa is C or S
GXSRVVMNNSLQEIVNSSDDYYLVTLPELKTPAXX

SEQ ID NO: 11100 - protein, 38 aa, Artificial Sequence
  Non-cyclic GFR-binding peptide
  MOD_RES (1)..(3)..(35)..(36): Xaa is C or S
XGXSRVVMNEYQKYIVNSSDDIFLVSIPSLKTPAXXPK

SEQ ID NO: 11101 - protein, 36 aa, Artificial Sequence
  Non-cyclic GFR-binding peptide
  MOD_RES (33)..(33): Xaa is C or S
  MOD_RES (11)..(12)..(13)..(14)..(15): Xaa is A or G
  MOD_RES (16)..(17)..(18)..(19): Xaa is A or G or absent
RVVMNNSLQEXXXXXXXXXYYVVPLPELKTPAXTPK

SEQ ID NO: 11102 - protein, 42 aa, Artificial Sequence
  Non-cyclic GFR-binding peptide
  MOD_RES (2)..(36)..(37): Xaa is C or S
  MOD_RES (14)..(15)..(16)..(17)..(18): Xaa is A or G
  MOD_RES (19)..(20)..(21)..(22): Xaa is A or G or absent
GXARVVMNEYQKYXXXXXXXXXIFLVSIPSLQTPAXXPKPVT

SEQ ID NO: 11103 - protein, 36 aa, Artificial Sequence
  Non-cyclic GFR-binding peptide
  MOD_RES (34)..(35): Xaa is C or S
  MOD_RES (12)..(13)..(14)..(15)..(16): Xaa is A or G
  MOD_RES (17)..(18)..(19)..(20): Xaa is A or G or absent
SRVVMNNSLQEXXXXXXXXXYYVVPLPELKTPAXXP

SEQ ID NO: 11104 - protein, 43 aa, Artificial Sequence
  Non-cyclic GFR-binding peptide
  MOD_RES (2)..(4)..(38)..(39): Xaa is C or S
  MOD_RES (16)..(17)..(18)..(19)..(20): Xaa is A or G
  MOD_RES (21)..(22)..(23)..(24): Xaa is A or G or absent
RXGXGEVVMDEYQKYXXXXXXXXXIFLMSIPSLETPVXXAKPI

SEQ ID NO: 11105 - protein, 37 aa, Artificial Sequence
  Non-cyclic GFR-binding peptide
  MOD_RES (1)..(35): Xaa is C or S
  MOD_RES (13)..(14)..(15)..(16)..(17): Xaa is A or G
  MOD_RES (18)..(19)..(20)..(21): Xaa is A or G or absent
XSRVVMNNSLQEXXXXXXXXXYYVVPLPELKTPAXTP

SEQ ID NO: 11106 - protein, 36 aa, Artificial Sequence
  Non-cyclic GFR-binding peptide
  MOD_RES (1)..(35)..(36): Xaa is C or S
  MOD_RES (13)..(14)..(15)..(16)..(17): Xaa is A or G
  MOD_RES (18)..(19)..(20)..(21): Xaa is A or G or absent
XSEVVMDNSLQEXXXXXXXXXYYLITLPELRTPVXX

SEQ ID NO: 11107 - protein, 37 aa, Artificial Sequence
  Non-cyclic GFR-binding peptide
  MOD_RES (33)..(34): Xaa is C or S
  MOD_RES (11)..(12)..(13)..(14)..(15): Xaa is A or G
  MOD_RES (16)..(17)..(18)..(19): Xaa is A or G or absent
EVVMDNSLQEXXXXXXXXXYYVIPLPELRTPVXXTPP

SEQ ID NO: 11108 - protein, 36 aa, Artificial Sequence
  Non-cyclic GFR-binding peptide
  MOD_RES (33)..(34): Xaa is C or S
  MOD_RES (11)..(12)..(13)..(14)..(15): Xaa is A or G
  MOD_RES (16)..(17)..(18)..(19): Xaa is A or G or absent
EVVMENSLQEXXXXXXXXXYYLMTLPELETPVXXAK

SEQ ID NO: 11109 - protein, 39 aa, Artificial Sequence
  Non-cyclic GFR-binding peptide
  MOD_RES (2)..(35)..(36): Xaa is C or S
  MOD_RES (13)..(14)..(15)..(16)..(17): Xaa is A or G
  MOD_RES (18)..(19)..(20)..(21): Xaa is A or G or absent
KXSRVIMEYQKYXXXXXXXXXIFLISIPSLAQPVXXPAA

SEQ ID NO: 11110 - protein, 39 aa, Artificial Sequence
  Non-cyclic GFR-binding peptide
  MOD_RES (1)..(33)..(34): Xaa is C or S
XGEVVMDNSLQEVVKENEDYYVMPLPELETPVXXAKPIK

SEQ ID NO: 11111 - protein, 36 aa, Artificial Sequence
  Non-cyclic GFR-binding peptide
  MOD_RES (2)..(4)..(35)..(36): Xaa is C or S
SXKXSRVIMEYQKYVKPKRGVIFLISIPSLAQPVXX

SEQ ID NO: 11112 - protein, 38 aa, Artificial Sequence
  Non-cyclic GFR-binding peptide
  MOD_RES (2)..(36)..(37): Xaa is C or S
  MOD_RES (14)..(15)..(16)..(17)..(18): Xaa is A or G
  MOD_RES (19)..(20)..(21)..(22): Xaa is A or G or absent
GXSRVVMNNSLQEXXXXXXXXXYYLVTLPELKTPAXXP

SEQ ID NO: 11113 - protein, 32 aa, Artificial Sequence
  Non-cyclic GFR-binding peptide
  MOD_RES (32)..(32): Xaa is C or S
GEVVMDNSLQEVVKENEDYYVMPLPELETPVX

SEQ ID NO: 11114 - protein, 41 aa, Artificial Sequence
  Non-cyclic GFR-binding peptide
  MOD_RES (2)..(4)..(38): Xaa is C or S
  MOD_RES (16)..(17)..(18)..(19)..(20): Xaa is A or G
  MOD_RES (21)..(22)..(23)..(24): Xaa is A or G or absent
HXGXSRVVMNEYQKYXXXXXXXXXIFLVSIPSLKTPAXTPK

SEQ ID NO: 11115 - protein, 41 aa, Artificial Sequence
  Non-cyclic GFR-binding peptide
  MOD_RES (2)..(36)..(37): Xaa is C or S
  MOD_RES (14)..(15)..(16)..(17)..(18): Xaa is A or G
  MOD_RES (19)..(20)..(21)..(22): Xaa is A or G or absent
GXSEVVMDRYKKLXXXXXXXXXFYLISIANLRTPVXXTPPT

SEQ ID NO: 11116 - protein, 33 aa, Artificial Sequence
  Non-cyclic GFR-binding peptide
  MOD_RES (32)..(33): Xaa is C or S
SRVVMNEYQKYIVNSSDDIFLVSIPSLKTPAXX

SEQ ID NO: 11117 - protein, 34 aa, Artificial Sequence
  Non-cyclic GFR-binding peptide
  MOD_RES (31)..(32): Xaa is C or S
SKVVMNSLQEVKPTRGVYYVIPLPELDQPVXXPS

SEQ ID NO: 11118 - protein, 37 aa, Artificial Sequence
  Non-cyclic GFR-binding peptide
  MOD_RES (2)..(4)..(36)..(37): Xaa is C or S
RXGXGEVVMENSLQEVVKDYEDYYVMPLPELETPVXX

SEQ ID NO: 11119 - protein, 39 aa, Artificial Sequence
  Non-cyclic GFR-binding peptide
  MOD_RES (2)..(4)..(38)..(39): Xaa is C or S
  MOD_RES (16)..(17)..(18)..(19)..(20): Xaa is A or G
  MOD_RES (21)..(22)..(23)..(24): Xaa is A or G or absent
HXGXSRVVMNEYQKYXXXXXXXXXIFLVSIPSLKTPAXX

SEQ ID NO: 11120 - protein, 38 aa, Artificial Sequence
  Non-cyclic GFR-binding peptide
  MOD_RES (34)..(34): Xaa is C or S
  MOD_RES (12)..(13)..(14)..(15)..(16): Xaa is A or G
  MOD_RES (17)..(18)..(19)..(20): Xaa is A or G or absent
SRVVMNNSLQEXXXXXXXXXYYVVPLPELKTPAXTPKT

SEQ ID NO: 11121 - protein, 38 aa, Artificial Sequence
  Non-cyclic GFR-binding peptide
  MOD_RES (1)..(3)..(35)..(36): Xaa is C or S
XGXSRVVMNNSLQEIVNSSDDYYLVTLPELKTPAXXPK

SEQ ID NO: 11122 - protein, 36 aa, Artificial Sequence
  Non-cyclic GFR-binding peptide
  MOD_RES (1)..(33)..(35): Xaa is C or S
XAPTKLEPLPVVYYDDSSNVIEQLSNNMVVRSXGXH

SEQ ID NO: 11123 - protein, 35 aa, Artificial Sequence
  Non-cyclic GFR-binding peptide
  MOD_RES (2)..(3)..(35): Xaa is C or S
AXXVPTELEPLPMVYYDEYDKVVEQLSNEMVVEGX

SEQ ID NO: 11124 - protein, 34 aa, Artificial Sequence
  Non-cyclic GFR-binding peptide
  MOD_RES (1)..(33): Xaa is C or S
XAPTQLEPLTVLYYDDSSNVIEQLSNNMVVRAXG

SEQ ID NO: 11125 - protein, 40 aa, Artificial Sequence
  Non-cyclic GFR-binding peptide
  MOD_RES (6)..(7)..(39): Xaa is C or S
KIPKAXXVPTELEPLPMVYYDENEKVVEQLSNDMVVEGXG

SEQ ID NO: 11126 - protein, 35 aa, Artificial Sequence
  Non-cyclic GFR-binding peptide
  MOD_RES (2)..(3)..(35): Xaa is C or S
PXXAPTKLSPISVLFIDDSSNVIYKQYENMVVRSX

SEQ ID NO: 11127 - protein, 36 aa, Artificial Sequence
  Non-cyclic GFR-binding peptide
  MOD_RES (1)..(2)..(36): Xaa is C or S
  MOD_RES (16)..(17)..(18)..(19)..(20): Xaa is A or G
  MOD_RES (21)..(22)..(23)..(24): Xaa is A or G or absent
XXVPTELEPLPMVYYXXXXXXXXXEQLSNDMVVEGX

SEQ ID NO: 11128 - protein, 41 aa, Artificial Sequence
  Non-cyclic GFR-binding peptide
  MOD_RES (4)..(5)..(39)..(41): Xaa is C or S
  MOD_RES (19)..(20)..(21)..(22)..(23): Xaa is A or G
  MOD_RES (24)..(25)..(26)..(27): Xaa is A or G or absent
PKAXXVPTELEPLPMVYYXXXXXXXXXEQLSNEMVVEGXGX

SEQ ID NO: 11129 - protein, 35 aa, Artificial Sequence
  Non-cyclic GFR-binding peptide
  MOD_RES (2)..(3)..(35): Xaa is C or S
TXXVPTRLEPLPIVYYDSANNVVEQLSNDMVVESX

SEQ ID NO: 11130 - protein, 35 aa, Artificial Sequence
  Non-cyclic GFR-binding peptide
  MOD_RES (1)..(2)..(34): Xaa is C or S
XXVPTELEPLPMVYYDEYDKVVEQLSNEMVVEGXG

SEQ ID NO: 11131 - protein, 33 aa, Artificial Sequence
  Non-cyclic GFR-binding peptide
  MOD_RES (14)..(15)..(16)..(17)..(18): Xaa is A or G
  MOD_RES (19)..(20)..(21)..(22): Xaa is A or G or absent
VPTELEPLPMVYYXXXXXXXXXEQLSNDMVVEG

SEQ ID NO: 11132 - protein, 39 aa, Artificial Sequence
  Non-cyclic GFR-binding peptide
  MOD_RES (3)..(37)..(39): Xaa is C or S
  MOD_RES (17)..(18)..(19)..(20)..(21): Xaa is A or G
  MOD_RES (22)..(23)..(24)..(25): Xaa is A or G or absent
PTXAPTKLEPLTVLYYXXXXXXXXXEQLSNNMVVRSXGX

SEQ ID NO: 11133 - protein, 37 aa, Artificial Sequence
  Non-cyclic GFR-binding peptide
  MOD_RES (3)..(4)..(37): Xaa is C or S
  MOD_RES (18)..(19)..(20)..(21)..(22): Xaa is A or G
  MOD_RES (23)..(24)..(25)..(26): Xaa is A or G or absent
SPXXVSQDLSPISILFIXXXXXXXXXYKQYEMIVKSX

SEQ ID NO: 11134 - protein, 36 aa, Artificial Sequence
  Non-cyclic GFR-binding peptide
  MOD_RES (1)..(35): Xaa is C or S
  MOD_RES (15)..(16)..(17)..(18)..(19): Xaa is A or G
  MOD_RES (20)..(21)..(22)..(23): Xaa is A or G or absent
XVPTRLNAISILYFXXXXXXXXXLKKYRDMVVESXG

SEQ ID NO: 11135 - protein, 37 aa, Artificial Sequence
  Non-cyclic GFR-binding peptide
  MOD_RES (5)..(6): Xaa is C or S
IPKAXXVPTELEPLTMLYYDEYDKVVEQLSNEMVVEG

SEQ ID NO: 11136 - protein, 36 aa, Artificial Sequence
  Non-cyclic GFR-binding peptide
  MOD_RES (3)..(4): Xaa is C or S
  MOD_RES (18)..(19)..(20)..(21)..(22): Xaa is A or G
  MOD_RES (23)..(24)..(25)..(26): Xaa is A or G or absent
APXXVPQALEPLTILYYXXXXXXXXXEQLSNMIVRS

SEQ ID NO: 11137 - protein, 35 aa, Artificial Sequence
  Non-cyclic GFR-binding peptide
  MOD_RES (4)..(5): Xaa is C or S
PPTXXVPTRLEPLTILYYDSANNVVEQLSNDMVVE

SEQ ID NO: 11138 - protein, 41 aa, Artificial Sequence
  Non-cyclic GFR-binding peptide
  MOD_RES (5)..(6)..(39)..(41): Xaa is C or S
  MOD_RES (20)..(21)..(22)..(23)..(24): Xaa is A or G
  MOD_RES (25)..(26)..(27)..(28): Xaa is A or G or absent
SASPXXVPQDLEPLPIVYYXXXXXXXXXEQLSNMVVKSXKX

SEQ ID NO: 11139 - protein, 39 aa, Artificial Sequence
  Non-cyclic GFR-binding peptide
  MOD_RES (3)..(4)..(37)..(39): Xaa is C or S
  MOD_RES (18)..(19)..(20)..(21)..(22): Xaa is A or G
  MOD_RES (23)..(24)..(25)..(26): Xaa is A or G or absent
SPXXVSQDLEPLPIVYYXXXXXXXXXEQLSNMIVKSXKX

SEQ ID NO: 11140 - protein, 33 aa, Artificial Sequence
  Non-cyclic GFR-binding peptide
  MOD_RES (32)..(32): Xaa is C or S
APTKLSPISVLFIDDSSNVIYKQYENMVVRSXG

SEQ ID NO: 11141 - protein, 37 aa, Artificial Sequence
  Non-cyclic GFR-binding peptide
  MOD_RES (4)..(5)..(37): Xaa is C or S
PPTXXVPTRLEPLPIVYYDSANNVVEQLSNDMVVESX

SEQ ID NO: 11142 - protein, 41 aa, Artificial Sequence
  Non-cyclic GFR-binding peptide
  MOD_RES (6)..(7)..(39)..(41): Xaa is C or S
STPPTXXVPTRLSAISILYLDSANNVVLKNYQDMVVESXGX

SEQ ID NO: 11143 - protein, 36 aa, Artificial Sequence
  Non-cyclic GFR-binding peptide
  MOD_RES (34)..(36): Xaa is C or S
  MOD_RES (14)..(15)..(16)..(17)..(18): Xaa is A or G
  MOD_RES (19)..(20)..(21)..(22): Xaa is A or G or absent
VPTELEPLPMVYYXXXXXXXXXEQLSNEMVVEGXGX

SEQ ID NO: 11144 - protein, 38 aa, Artificial Sequence
  Non-cyclic GFR-binding peptide
  MOD_RES (1)..(35)..(37): Xaa is C or S
  MOD_RES (15)..(16)..(17)..(18)..(19): Xaa is A or G
  MOD_RES (20)..(21)..(22)..(23): Xaa is A or G or absent
XAPTKLEPLTVLYYXXXXXXXXXEQLSNNMVVRSXGXH

SEQ ID NO: 11145 - protein, 40 aa, Artificial Sequence
  Non-cyclic GFR-binding peptide
  MOD_RES (6)..(7)..(38)..(40): Xaa is C or S
ASASPXXVPQDLSPISILFIVGRTPKVYKQYEMVVKSXKX

SEQ ID NO: 11146 - protein, 35 aa, Artificial Sequence
  Non-cyclic GFR-binding peptide
  MOD_RES (32)..(34): Xaa is C or S
APTKLEPLPVVYYDDSSNVIEQLSNNMVVRSXGXH

SEQ ID NO: 11147 - protein, 34 aa, Artificial Sequence
  Non-cyclic GFR-binding peptide
  MOD_RES (34)..(34): Xaa is C or S
  MOD_RES (14)..(15)..(16)..(17)..(18): Xaa is A or G
  MOD_RES (19)..(20)..(21)..(22): Xaa is A or G or absent
APTQLSPISVLFIXXXXXXXXXYKQYENMVVRAX

SEQ ID NO: 11148 - protein, 38 aa, Artificial Sequence
  Non-cyclic GFR-binding peptide
  MOD_RES (5)..(6): Xaa is C or S
  MOD_RES (20)..(21)..(22)..(23)..(24): Xaa is A or G
  MOD_RES (25)..(26)..(27)..(28): Xaa is A or G or absent
IPKAXXVPTELEPLTMLYYXXXXXXXXXEQLSNEMVVE

SEQ ID NO: 11149 - protein, 31 aa, Artificial Sequence
  Non-cyclic GFR-binding peptide
APTKLEPLPVVYYDDSSNVIEQLSNNMVVRS

SEQ ID NO: 11150 - protein, 40 aa, Artificial Sequence
  Non-cyclic GFR-binding peptide
  MOD_RES (4)..(5)..(39): Xaa is C or S
  MOD_RES (19)..(20)..(21)..(22)..(23): Xaa is A or G
  MOD_RES (24)..(25)..(26)..(27): Xaa is A or G or absent
PKAXXVPTELSPISMLFIXXXXXXXXXYKQYEDMVVEGXG

SEQ ID NO: 11151 - protein, 32 aa, Artificial Sequence
  Non-cyclic GFR-binding peptide
  MOD_RES (32)..(32): Xaa is C or S
APTQLEPLTVLYYDDSSNVIEQLSNNMVVRAX

SEQ ID NO: 11152 - protein, 41 aa, Artificial Sequence
  Non-cyclic GFR-binding peptide
  MOD_RES (3)..(4)..(38)..(40): Xaa is C or S
  MOD_RES (18)..(19)..(20)..(21)..(22): Xaa is A or G
  MOD_RES (23)..(24)..(25)..(26): Xaa is A or G or absent
KPXXAPTQLEPLPVVYYXXXXXXXXXEQLSNNMVVRAXGXH

SEQ ID NO: 11153 - protein, 35 aa, Artificial Sequence
  Non-cyclic GFR-binding peptide
  MOD_RES (4)..(5): Xaa is C or S
PKAXXVPTELEPLTMLYYDENEKVVEQLSNDMVVE

SEQ ID NO: 11154 - protein, 42 aa, Artificial Sequence
  Non-cyclic GFR-binding peptide
  MOD_RES (5)..(6)..(39)..(41): Xaa is C or S
  MOD_RES (20)..(21)..(22)..(23)..(24): Xaa is A or G
  MOD_RES (25)..(26)..(27)..(28): Xaa is A or G or absent
SASPXXVSQDLEPLPIVYYXXXXXXXXXEQLSNMIVKSXKXS

SEQ ID NO: 11155 - protein, 36 aa, Artificial Sequence
  Non-cyclic GFR-binding peptide
  MOD_RES (1)..(34)..(36): Xaa is C or S
  MOD_RES (15)..(16)..(17)..(18)..(19): Xaa is A or G
  MOD_RES (20)..(21)..(22)..(23): Xaa is A or G or absent
XVPQALSPISILFIXXXXXXXXXYKQYEMIVRSXKX

SEQ ID NO: 11156 - protein, 37 aa, Artificial Sequence
  Non-cyclic GFR-binding peptide
  MOD_RES (1)..(35)..(37): Xaa is C or S
  MOD_RES (15)..(16)..(17)..(18)..(19): Xaa is A or G
  MOD_RES (20)..(21)..(22)..(23): Xaa is A or G or absent
XVPTRLEPLPIVYYXXXXXXXXXEQLSNDMVVESXGX

SEQ ID NO: 11157 - protein, 36 aa, Artificial Sequence
  Non-cyclic GFR-binding peptide
  MOD_RES (3)..(4)..(36): Xaa is C or S
PTXXVPTRLEPLTILYYDSANNVVEQLSNDMVVESX

SEQ ID NO: 11158 - protein, 37 aa, Artificial Sequence
  Non-cyclic GFR-binding peptide
  MOD_RES (1)..(2)..(36): Xaa is C or S
  MOD_RES (16)..(17)..(18)..(19)..(20): Xaa is A or G
  MOD_RES (21)..(22)..(23)..(24): Xaa is A or G or absent
XXAPTKLEPLPVVYYXXXXXXXXXEQLSNNMVVRSXG

SEQ ID NO: 11159 - protein, 39 aa, Artificial Sequence
  Non-cyclic GFR-binding peptide
  MOD_RES (2)..(36)..(38): Xaa is C or S
  MOD_RES (16)..(17)..(18)..(19)..(20): Xaa is A or G
  MOD_RES (21)..(22)..(23)..(24): Xaa is A or G or absent
TXAPTKLEPLTVLYYXXXXXXXXXEQLSNNMVVRSXGXH

SEQ ID NO: 11160 - protein, 37 aa, Artificial Sequence
  Non-cyclic GFR-binding peptide
  MOD_RES (34)..(36): Xaa is C or S
  MOD_RES (14)..(15)..(16)..(17)..(18): Xaa is A or G
  MOD_RES (19)..(20)..(21)..(22): Xaa is A or G or absent
APTKLEPLTVLYYXXXXXXXXXEQLSNNMVVRSXGXH

SEQ ID NO: 11161 - protein, 41 aa, Artificial Sequence
  Non-cyclic GFR-binding peptide
  MOD_RES (5)..(6)..(38)..(40): Xaa is C or S
IPKAXXVPTELSPISMLFIDENEKVVYKQYEDMVVEGXGXR

SEQ ID NO: 11162 - protein, 40 aa, Artificial Sequence
  Non-cyclic GFR-binding peptide
  MOD_RES (5)..(6)..(40): Xaa is C or S
  MOD_RES (20)..(21)..(22)..(23)..(24): Xaa is A or G
  MOD_RES (25)..(26)..(27)..(28): Xaa is A or G or absent
IPKAXXVPTELSPISMLFIXXXXXXXXXYKQYEEMVVEGX

SEQ ID NO: 11163 - protein, 32 aa, Artificial Sequence
  Non-cyclic GFR-binding peptide
  MOD_RES (1)..(2): Xaa is C or S
XXAPTKLSPISVLFIDDSSNVIYKQYENMVVR

SEQ ID NO: 11164 - protein, 40 aa, Artificial Sequence
  Non-cyclic GFR-binding peptide
  MOD_RES (5)..(6)..(37)..(39): Xaa is C or S
SAAPXXVPQALSPISILFIVGRKPKVYKQYEMIVRSXKXS

SEQ ID NO: 11165 - protein, 42 aa, Artificial Sequence
  Non-cyclic GFR-binding peptide
  MOD_RES (5)..(39)..(41): Xaa is C or S
  MOD_RES (19)..(20)..(21)..(22)..(23): Xaa is A or G
  MOD_RES (24)..(25)..(26)..(27): Xaa is A or G or absent
TKPTXAPTKLSPISVLFIXXXXXXXXXYKQYENMVVRSXGXH

SEQ ID NO: 11166 - protein, 36 aa, Artificial Sequence
  Non-cyclic GFR-binding peptide
  MOD_RES (2)..(3)..(36): Xaa is C or S
  MOD_RES (17)..(18)..(19)..(20)..(21): Xaa is A or G
  MOD_RES (22)..(23)..(24)..(25): Xaa is A or G or absent
PXXVPQALSPISILFIXXXXXXXXXYKQYEMIVRSX

SEQ ID NO: 11167 - protein, 32 aa, Artificial Sequence
  Non-cyclic GFR-binding peptide
  MOD_RES (1)..(1): Xaa is C or S
XVPTELEPLTMLYYDEYDKVVEQLSNEMVVEG

SEQ ID NO: 11168 - protein, 39 aa, Artificial Sequence
  Non-cyclic GFR-binding peptide
  MOD_RES (4)..(5)..(37)..(39): Xaa is C or S
PKPXXAPTKLEPLTVLYYDDSSNVIEQLSNNMVVRSXGX

SEQ ID NO: 11169 - protein, 38 aa, Artificial Sequence
  Non-cyclic GFR-binding peptide
  MOD_RES (4)..(38): Xaa is C or S
  MOD_RES (18)..(19)..(20)..(21)..(22): Xaa is A or G
  MOD_RES (23)..(24)..(25)..(26): Xaa is A or G or absent
KPTXAPTKLEPLTVLYYXXXXXXXXXEQLSNNMVVRSX

SEQ ID NO: 11170 - protein, 43 aa, Artificial Sequence
  Non-cyclic GFR-binding peptide
  MOD_RES (6)..(7)..(40)..(42): Xaa is C or S
  MOD_RES (21)..(22)..(23)..(24)..(25): Xaa is A or G
  MOD_RES (26)..(27)..(28)..(29): Xaa is A or G or absent
ASAAPXXVPQALSPISILFIXXXXXXXXXYKQYEMIVRSXKXS

SEQ ID NO: 11171 - protein, 31 aa, Artificial Sequence
  Non-cyclic GFR-binding peptide
  MOD_RES (1)..(1): Xaa is C or S
XAPTQLSPISVLFIDDSSNVIYKQYENMVVR

SEQ ID NO: 11172 - protein, 41 aa, Artificial Sequence
  Non-cyclic GFR-binding peptide
  MOD_RES (4)..(5)..(39)..(41): Xaa is C or S
  MOD_RES (19)..(20)..(21)..(22)..(23): Xaa is A or G
  MOD_RES (24)..(25)..(26)..(27): Xaa is A or G or absent
PPTXXVPTRLEPLPIVYYXXXXXXXXXEQLSNDMVVESXGX

SEQ ID NO: 11173 - protein, 32 aa, Artificial Sequence
  Non-cyclic GFR-binding peptide
  MOD_RES (1)..(2): Xaa is C or S
XXVPQALSPISILFIVGRKPKVYKQYEMIVRS

SEQ ID NO: 11174 - protein, 38 aa, Artificial Sequence
  Non-cyclic GFR-binding peptide
  MOD_RES (1)..(2)..(35)..(37): Xaa is C or S
  MOD_RES (16)..(17)..(18)..(19)..(20): Xaa is A or G
  MOD_RES (21)..(22)..(23)..(24): Xaa is A or G or absent
XXVPQDLEPLPIVYYXXXXXXXXXEQLSNMVVKSXKXS

SEQ ID NO: 11175 - protein, 39 aa, Artificial Sequence
  Non-cyclic GFR-binding peptide
  MOD_RES (7)..(7): Xaa is C or S
  MOD_RES (21)..(22)..(23)..(24)..(25): Xaa is A or G
  MOD_RES (26)..(27)..(28)..(29): Xaa is A or G or absent
HVTKPTXAPTKLEPLPVVYYXXXXXXXXXEQLSNNMVVR

SEQ ID NO: 11176 - protein, 35 aa, Artificial Sequence
  Non-cyclic GFR-binding peptide
  MOD_RES (2)..(3): Xaa is C or S
  MOD_RES (17)..(18)..(19)..(20)..(21): Xaa is A or G
  MOD_RES (22)..(23)..(24)..(25): Xaa is A or G or absent
PXXAPTQLEPLPVVYYXXXXXXXXXEQLSNNMVVR

SEQ ID NO: 11177 - protein, 37 aa, Artificial Sequence
  Non-cyclic GFR-binding peptide
  MOD_RES (3)..(4): Xaa is C or S
  MOD_RES (18)..(19)..(20)..(21)..(22): Xaa is A or G
  MOD_RES (23)..(24)..(25)..(26): Xaa is A or G or absent
KPXXAPTQLEPLTVLYYXXXXXXXXXEQLSNNMVVRA

SEQ ID NO: 11178 - protein, 34 aa, Artificial Sequence
  Non-cyclic GFR-binding peptide
  MOD_RES (4)..(4): Xaa is C or S
KPTXAPTKLEPLTVLYYDDSSNVIEQLSNNMVVR

SEQ ID NO: 11179 - protein, 44 aa, Artificial Sequence
  Non-cyclic GFR-binding peptide
  MOD_RES (6)..(7)..(41)..(43): Xaa is C or S
  MOD_RES (21)..(22)..(23)..(24)..(25): Xaa is A or G
  MOD_RES (26)..(27)..(28)..(29): Xaa is A or G or absent
TVPKPXXAPTQLSPISVLFIXXXXXXXXXYKQYENMVVRAXGXH

SEQ ID NO: 11180 - protein, 39 aa, Artificial Sequence
  Non-cyclic GFR-binding peptide
  MOD_RES (5)..(6): Xaa is C or S
  MOD_RES (20)..(21)..(22)..(23)..(24): Xaa is A or G
  MOD_RES (25)..(26)..(27)..(28): Xaa is A or G or absent
TPPTXXVPTRLEPLTILYYXXXXXXXXXEQLSNDMVVES

SEQ ID NO: 11181 - protein, 42 aa, Artificial Sequence
  Non-cyclic GFR-binding peptide
  MOD_RES (6)..(40)..(42): Xaa is C or S
  MOD_RES (20)..(21)..(22)..(23)..(24): Xaa is A or G
  MOD_RES (25)..(26)..(27)..(28): Xaa is A or G or absent
VTKPTXAPTKLEPLPVVYYXXXXXXXXXEQLSNNMVVRSXGX

SEQ ID NO: 11182 - protein, 39 aa, Artificial Sequence
  Non-cyclic GFR-binding peptide
  MOD_RES (2)..(3)..(36)..(38): Xaa is C or S
  MOD_RES (17)..(18)..(19)..(20)..(21): Xaa is A or G
  MOD_RES (22)..(23)..(24)..(25): Xaa is A or G or absent
PXXVSQDLEPLPIVYYXXXXXXXXXEQLSNMIVKSXKXS

SEQ ID NO: 11183 - protein, 41 aa, Artificial Sequence
  Non-cyclic GFR-binding peptide
  MOD_RES (4)..(5)..(39)..(41): Xaa is C or S
  MOD_RES (19)..(20)..(21)..(22)..(23): Xaa is A or G
  MOD_RES (24)..(25)..(26)..(27): Xaa is A or G or absent
PKPXXAPTQLSPISVLFIXXXXXXXXXYKQYENMVVRAXGX

SEQ ID NO: 11184 - protein, 37 aa, Artificial Sequence
  Non-cyclic GFR-binding peptide
  MOD_RES (1)..(34)..(36): Xaa is C or S
  MOD_RES (15)..(16)..(17)..(18)..(19): Xaa is A or G
  MOD_RES (20)..(21)..(22)..(23): Xaa is A or G or absent
XVSQDLEPLPIVYYXXXXXXXXXEQLSNMIVKSXKXS

SEQ ID NO: 11185 - protein, 38 aa, Artificial Sequence
  Non-cyclic GFR-binding peptide
  MOD_RES (5)..(6)..(38): Xaa is C or S
TPPTXXVPTRLSAISILYLDSANNVVLKNYQDMVVESX

SEQ ID NO: 11186 - protein, 39 aa, Artificial Sequence
  Non-cyclic GFR-binding peptide
  MOD_RES (4)..(5)..(39): Xaa is C or S
  MOD_RES (19)..(20)..(21)..(22)..(23): Xaa is A or G
  MOD_RES (24)..(25)..(26)..(27): Xaa is A or G or absent
PKAXXVPTELEPLTMLYYXXXXXXXXXEQLSNDMVVEGX

SEQ ID NO: 11187 - protein, 36 aa, Artificial Sequence
  Non-cyclic GFR-binding peptide
  MOD_RES (3)..(4): Xaa is C or S
  MOD_RES (18)..(19)..(20)..(21)..(22): Xaa is A or G
  MOD_RES (23)..(24)..(25)..(26): Xaa is A or G or absent
KPXXAPTQLEPLTVLYYXXXXXXXXXEQLSNNMVVR

SEQ ID NO: 11188 - protein, 38 aa, Artificial Sequence
  Non-cyclic GFR-binding peptide
  MOD_RES (1)..(2)..(36)..(38): Xaa is C or S
  MOD_RES (16)..(17)..(18)..(19)..(20): Xaa is A or G
  MOD_RES (21)..(22)..(23)..(24): Xaa is A or G or absent
XXVPTELEPLPMVYYXXXXXXXXXEQLSNDMVVEGXGX

SEQ ID NO: 11189 - protein, 39 aa, Artificial Sequence
  Non-cyclic GFR-binding peptide
  MOD_RES (6)..(38): Xaa is C or S
VTKPTXAPTKLSPISVLFIDDSSNVIYKQYENMVVRSXG

SEQ ID NO: 11190 - protein, 37 aa, Artificial Sequence
  Non-cyclic GFR-binding peptide
  MOD_RES (4)..(5): Xaa is C or S
  MOD_RES (19)..(20)..(21)..(22)..(23): Xaa is A or G
  MOD_RES (24)..(25)..(26)..(27): Xaa is A or G or absent
ASPXXVPQDLEPLPIVYYXXXXXXXXXEQLSNMVVKS

SEQ ID NO: 11191 - protein, 41 aa, Artificial Sequence
  Non-cyclic GFR-binding peptide
  MOD_RES (6)..(7)..(40): Xaa is C or S
  MOD_RES (21)..(22)..(23)..(24)..(25): Xaa is A or G
  MOD_RES (26)..(27)..(28)..(29): Xaa is A or G or absent
ASASPXXVSQDLEPLPIVYYXXXXXXXXXEQLSNMIVKSXK

SEQ ID NO: 11192 - protein, 35 aa, Artificial Sequence
  Non-cyclic GFR-binding peptide
  MOD_RES (1)..(2)..(33)..(35): Xaa is C or S
XXVSQDLEPLPIVYYIGKTPKIEQLSNMIVKSXKX

SEQ ID NO: 11193 - protein, 38 aa, Artificial Sequence
  Non-cyclic GFR-binding peptide
  MOD_RES (2)..(3)..(35)..(37): Xaa is C or S
AXXVPTELEPLPMVYYDEYDKVVEQLSNEMVVEGXGXR

SEQ ID NO: 11194 - protein, 35 aa, Artificial Sequence
  Non-cyclic GFR-binding peptide
  MOD_RES (33)..(35): Xaa is C or S
  MOD_RES (14)..(15)..(16)..(17)..(18): Xaa is A or G
  MOD_RES (19)..(20)..(21)..(22): Xaa is A or G or absent
VPQALSPISILFIXXXXXXXXXYKQYEMIVRSXKX

SEQ ID NO: 11195 - protein, 34 aa, Artificial Sequence
  Non-cyclic GFR-binding peptide
  MOD_RES (2)..(3): Xaa is C or S
PXXAPTQLEPLPVVYYDDSSNVIEQLSNNMVVRA

SEQ ID NO: 11196 - protein, 40 aa, Artificial Sequence
  Non-cyclic GFR-binding peptide
  MOD_RES (6)..(7)..(39): Xaa is C or S
STPPTXXVPTRLNAISILYFDSANNVVLKKYRDMVVESXG

SEQ ID NO: 11197 - protein, 38 aa, Artificial Sequence
  Non-cyclic GFR-binding peptide
  MOD_RES (1)..(2)..(35)..(37): Xaa is C or S
  MOD_RES (16)..(17)..(18)..(19)..(20): Xaa is A or G
  MOD_RES (21)..(22)..(23)..(24): Xaa is A or G or absent
XXVSQDLSPISILFIXXXXXXXXXYKQYEMIVKSXKXS

SEQ ID NO: 11198 - protein, 34 aa, Artificial Sequence
  Non-cyclic GFR-binding peptide
  MOD_RES (32)..(34): Xaa is C or S
APTQLSPISVLFIDDSSNVIYKQYENMVVRAXGX

SEQ ID NO: 11199 - protein, 41 aa, Artificial Sequence
  Non-cyclic GFR-binding peptide
  MOD_RES (7)..(41): Xaa is C or S
  MOD_RES (21)..(22)..(23)..(24)..(25): Xaa is A or G
  MOD_RES (26)..(27)..(28)..(29): Xaa is A or G or absent
HVTKPTXAPTKLEPLTVLYYXXXXXXXXXEQLSNNMVVRSX

SEQ ID NO: 11200 - protein, 30 aa, Artificial Sequence
  Non-cyclic GFR-binding peptide
VPTELEPLTMLYYDENEKVVEQLSNDMVVE

SEQ ID NO: 11201 - protein, 40 aa, Artificial Sequence
  Non-cyclic GFR-binding peptide
  MOD_RES (6)..(7): Xaa is C or S
  MOD_RES (21)..(22)..(23)..(24)..(25): Xaa is A or G
  MOD_RES (26)..(27)..(28)..(29): Xaa is A or G or absent
SIPKAXXVPTELEPLPMVYYXXXXXXXXXEQLSNEMVVEG

SEQ ID NO: 11202 - protein, 37 aa, Artificial Sequence
  Non-cyclic GFR-binding peptide
  MOD_RES (3)..(4)..(35)..(37): Xaa is C or S
APXXVPQALSPISILFIVGRKPKVYKQYEMIVRSXKX

SEQ ID NO: 11203 - protein, 32 aa, Artificial Sequence
  Non-cyclic GFR-binding peptide
  MOD_RES (14)..(15)..(16)..(17)..(18): Xaa is A or G
  MOD_RES (19)..(20)..(21)..(22): Xaa is A or G or absent
VPTELEPLTMLYYXXXXXXXXXEQLSNEMVVE

SEQ ID NO: 11204 - protein, 38 aa, Artificial Sequence
  Non-cyclic GFR-binding peptide
  MOD_RES (3)..(4)..(38): Xaa is C or S
  MOD_RES (18)..(19)..(20)..(21)..(22): Xaa is A or G
  MOD_RES (23)..(24)..(25)..(26): Xaa is A or G or absent
KAXXVPTELSPISMLFIXXXXXXXXXYKQYEEMVVEGX

SEQ ID NO: 11205 - protein, 38 aa, Artificial Sequence
  Non-cyclic GFR-binding peptide
  MOD_RES (2)..(3)..(35)..(37): Xaa is C or S
PXXAPTQLEPLPVVYYDDSSNVIEQLSNNMVVRAXGXH

SEQ ID NO: 11206 - protein, 37 aa, Artificial Sequence
  Non-cyclic GFR-binding peptide
  MOD_RES (1)..(35)..(37): Xaa is C or S
  MOD_RES (15)..(16)..(17)..(18)..(19): Xaa is A or G
  MOD_RES (20)..(21)..(22)..(23): Xaa is A or G or absent
XVPTELEPLTMLYYXXXXXXXXXEQLSNDMVVEGXGX

SEQ ID NO: 11207 - protein, 38 aa, Artificial Sequence
  Non-cyclic GFR-binding peptide
  MOD_RES (5)..(6): Xaa is C or S
  MOD_RES (20)..(21)..(22)..(23)..(24): Xaa is A or G
  MOD_RES (25)..(26)..(27)..(28): Xaa is A or G or absent
IPKAXXVPTELSPISMLFIXXXXXXXXXYKQYEDMVVE

SEQ ID NO: 11208 - protein, 31 aa, Artificial Sequence
  Non-cyclic GFR-binding peptide
  MOD_RES (1)..(1): Xaa is C or S
XAPTKLEPLPVVYYDDSSNVIEQLSNNMVVR

SEQ ID NO: 11209 - protein, 36 aa, Artificial Sequence
  Non-cyclic GFR-binding peptide
  MOD_RES (1)..(35): Xaa is C or S
  MOD_RES (15)..(16)..(17)..(18)..(19): Xaa is A or G
  MOD_RES (20)..(21)..(22)..(23): Xaa is A or G or absent
XAPTQLSPISVLFIXXXXXXXXXYKQYENMVVRAXG

SEQ ID NO: 11210 - protein, 39 aa, Artificial Sequence
  Non-cyclic GFR-binding peptide
  MOD_RES (6)..(7): Xaa is C or S
  MOD_RES (21)..(22)..(23)..(24)..(25): Xaa is A or G
  MOD_RES (26)..(27)..(28)..(29): Xaa is A or G or absent
YVPKPXXAPTKLSPISVLFIXXXXXXXXXYKQYENMVVR

SEQ ID NO: 11211 - protein, 36 aa, Artificial Sequence
  Non-cyclic GFR-binding peptide
  MOD_RES (1)..(35): Xaa is C or S
  MOD_RES (15)..(16)..(17)..(18)..(19): Xaa is A or G
  MOD_RES (20)..(21)..(22)..(23): Xaa is A or G or absent
XAPTQLEPLTVLYYXXXXXXXXXEQLSNNMVVRAXG

SEQ ID NO: 11212 - protein, 41 aa, Artificial Sequence
  Non-cyclic GFR-binding peptide
  MOD_RES (6)..(7)..(38)..(40): Xaa is C or S
ASAAPXXVPQALSPISILFIVGRKPKVYKQYEMIVRSXKXS

SEQ ID NO: 11213 - protein, 37 aa, Artificial Sequence
  Non-cyclic GFR-binding peptide
  MOD_RES (6)..(7): Xaa is C or S
ASASPXXVPQDLSPISILFIVGRTPKVYKQYEMVVKS

SEQ ID NO: 11214 - protein, 36 aa, Artificial Sequence
  Non-cyclic GFR-binding peptide
  MOD_RES (4)..(5): Xaa is C or S
PKPXXAPTQLEPLTVLYYDDSSNVIEQLSNNMVVRA

SEQ ID NO: 11215 - protein, 37 aa, Artificial Sequence
  Non-cyclic GFR-binding peptide
  MOD_RES (1)..(35)..(37): Xaa is C or S
  MOD_RES (15)..(16)..(17)..(18)..(19): Xaa is A or G
  MOD_RES (20)..(21)..(22)..(23): Xaa is A or G or absent
XVPTELEPLTMLYYXXXXXXXXXEQLSNEMVVEGXGX

SEQ ID NO: 11216 - protein, 38 aa, Artificial Sequence
  Non-cyclic GFR-binding peptide
  MOD_RES (5)..(6): Xaa is C or S
  MOD_RES (20)..(21)..(22)..(23)..(24): Xaa is A or G
  MOD_RES (25)..(26)..(27)..(28): Xaa is A or G or absent
TPPTXXVPTRLNAISILYFXXXXXXXXXLKKYRDMVVE

SEQ ID NO: 11217 - protein, 31 aa, Artificial Sequence
  Non-cyclic GFR-binding peptide
  MOD_RES (31)..(31): Xaa is C or S
VPQDLEPLPIVYYVGRTPKVEQLSNMVVKSX

SEQ ID NO: 11218 - protein, 32 aa, Artificial Sequence
  Non-cyclic GFR-binding peptide
  MOD_RES (14)..(15)..(16)..(17)..(18): Xaa is A or G
  MOD_RES (19)..(20)..(21)..(22): Xaa is A or G or absent
VPTELEPLPMVYYXXXXXXXXXEQLSNEMVVE

SEQ ID NO: 11219 - protein, 34 aa, Artificial Sequence
  Non-cyclic GFR-binding peptide
  MOD_RES (32)..(34): Xaa is C or S
VPTELEPLTMLYYDENEKVVEQLSNDMVVEGXGX

SEQ ID NO: 11220 - protein, 41 aa, Artificial Sequence
  Non-cyclic GFR-binding peptide
  MOD_RES (5)..(6)..(40): Xaa is C or S
  MOD_RES (20)..(21)..(22)..(23)..(24): Xaa is A or G
  MOD_RES (25)..(26)..(27)..(28): Xaa is A or G or absent
TPPTXXVPTRLEPLTILYYXXXXXXXXXEQLSNDMVVESXG

SEQ ID NO: 11221 - protein, 40 aa, Artificial Sequence
  Non-cyclic GFR-binding peptide
  MOD_RES (6)..(7): Xaa is C or S
  MOD_RES (21)..(22)..(23)..(24)..(25): Xaa is A or G
  MOD_RES (26)..(27)..(28)..(29): Xaa is A or G or absent
TVPKPXXAPTQLEPLTVLYYXXXXXXXXXEQLSNNMVVRA

SEQ ID NO: 11222 - protein, 34 aa, Artificial Sequence
  Non-cyclic GFR-binding peptide
  MOD_RES (33)..(33): Xaa is C or S
  MOD_RES (14)..(15)..(16)..(17)..(18): Xaa is A or G
  MOD_RES (19)..(20)..(21)..(22): Xaa is A or G or absent
VPQALSPISILFIXXXXXXXXXYKQYEMIVRSXK

SEQ ID NO: 11223 - protein, 34 aa, Artificial Sequence
  Non-cyclic GFR-binding peptide
  MOD_RES (1)..(1): Xaa is C or S
  MOD_RES (15)..(16)..(17)..(18)..(19): Xaa is A or G
  MOD_RES (20)..(21)..(22)..(23): Xaa is A or G or absent
XAPTQLEPLPVVYYXXXXXXXXXEQLSNNMVVRA

SEQ ID NO: 11224 - protein, 39 aa, Artificial Sequence
  Non-cyclic GFR-binding peptide
  MOD_RES (2)..(3)..(37)..(39): Xaa is C or S
  MOD_RES (17)..(18)..(19)..(20)..(21): Xaa is A or G
  MOD_RES (22)..(23)..(24)..(25): Xaa is A or G or absent
AXXVPTELSPISMLFIXXXXXXXXXYKQYEEMVVEGXGX

SEQ ID NO: 11225 - protein, 34 aa, Artificial Sequence
  Non-cyclic GFR-binding peptide
  MOD_RES (34)..(34): Xaa is C or S
  MOD_RES (14)..(15)..(16)..(17)..(18): Xaa is A or G
  MOD_RES (19)..(20)..(21)..(22): Xaa is A or G or absent
VPTRLEPLPIVYYXXXXXXXXXEQLSNDMVVESX

SEQ ID NO: 11226 - protein, 34 aa, Artificial Sequence
  Non-cyclic GFR-binding peptide
  MOD_RES (2)..(3): Xaa is C or S
TXXVPTRLNAISILYFDSANNVVLKKYRDMVVES

SEQ ID NO: 11227 - protein, 39 aa, Artificial Sequence
  Non-cyclic GFR-binding peptide
  MOD_RES (5)..(6): Xaa is C or S
  MOD_RES (20)..(21)..(22)..(23)..(24): Xaa is A or G
  MOD_RES (25)..(26)..(27)..(28): Xaa is A or G or absent
IPKAXXVPTELEPLTMLYYXXXXXXXXXEQLSNDMVVEG

SEQ ID NO: 11228 - protein, 41 aa, Artificial Sequence
  Non-cyclic GFR-binding peptide
  MOD_RES (5)..(6)..(38)..(40): Xaa is C or S
TPPTXXVPTRLEPLTILYYDSANNVVEQLSNDMVVESXGXR

SEQ ID NO: 11229 - protein, 33 aa, Artificial Sequence
  Non-cyclic GFR-binding peptide
  MOD_RES (1)..(33): Xaa is C or S
XVPTELEPLTMLYYDEYDKVVEQLSNEMVVEGX

SEQ ID NO: 11230 - protein, 35 aa, Artificial Sequence
  Non-cyclic GFR-binding peptide
  MOD_RES (2)..(3)..(35): Xaa is C or S
AXXVPTELSPISMLFIDEYDKVVYKQYEEMVVEGX

SEQ ID NO: 11231 - protein, 37 aa, Artificial Sequence
  Non-cyclic GFR-binding peptide
  MOD_RES (5)..(6): Xaa is C or S
IPKAXXVPTELEPLPMVYYDENEKVVEQLSNDMVVEG

SEQ ID NO: 11232 - protein, 38 aa, Artificial Sequence
  Non-cyclic GFR-binding peptide
  MOD_RES (5)..(6)..(38): Xaa is C or S
IPKAXXVPTELSPISMLFIDEYDKVVYKQYEEMVVEGX

SEQ ID NO: 11233 - protein, 37 aa, Artificial Sequence
  Non-cyclic GFR-binding peptide
  MOD_RES (3)..(4)..(35)..(37): Xaa is C or S
APXXVPQALEPLTILYYVGRKPKVEQLSNMIVRSXKX

SEQ ID NO: 11234 - protein, 35 aa, Artificial Sequence
  Non-cyclic GFR-binding peptide
  MOD_RES (3)..(4)..(35): Xaa is C or S
SPXXVSQDLEPLPIVYYIGKTPKIEQLSNMIVKSX

SEQ ID NO: 11235 - protein, 40 aa, Artificial Sequence
  Non-cyclic GFR-binding peptide
  MOD_RES (2)..(3)..(37)..(39): Xaa is C or S
  MOD_RES (17)..(18)..(19)..(20)..(21): Xaa is A or G
  MOD_RES (22)..(23)..(24)..(25): Xaa is A or G or absent
AXXVPTELEPLPMVYYXXXXXXXXXEQLSNEMVVEGXGXR

SEQ ID NO: 11236 - protein, 34 aa, Artificial Sequence
  Non-cyclic GFR-binding peptide
  MOD_RES (3)..(4): Xaa is C or S
KAXXVPTELSPISMLFIDENEKVVYKQYEDMVVE

SEQ ID NO: 11237 - protein, 40 aa, Artificial Sequence
  Non-cyclic GFR-binding peptide
  MOD_RES (5)..(6)..(40): Xaa is C or S
  MOD_RES (20)..(21)..(22)..(23)..(24): Xaa is A or G
  MOD_RES (25)..(26)..(27)..(28): Xaa is A or G or absent
VPKPXXAPTKLSPISVLFIXXXXXXXXXYKQYENMVVRSX

SEQ ID NO: 11238 - protein, 35 aa, Artificial Sequence
  Non-cyclic GFR-binding peptide
  MOD_RES (2)..(3): Xaa is C or S
  MOD_RES (17)..(18)..(19)..(20)..(21): Xaa is A or G
  MOD_RES (22)..(23)..(24)..(25): Xaa is A or G or absent
PXXAPTKLEPLTVLYYXXXXXXXXXEQLSNNMVVR

SEQ ID NO: 11239 - protein, 34 aa, Artificial Sequence
  Non-cyclic GFR-binding peptide
  MOD_RES (1)..(2)..(34): Xaa is C or S
XXVPTELEPLTMLYYDENEKVVEQLSNDMVVEGX

SEQ ID NO: 11240 - protein, 34 aa, Artificial Sequence
  Non-cyclic GFR-binding peptide
  MOD_RES (32)..(34): Xaa is C or S
VPTELSPISMLFIDEYDKVVYKQYEEMVVEGXGX

SEQ ID NO: 11241 - protein, 34 aa, Artificial Sequence
  Non-cyclic GFR-binding peptide
  MOD_RES (3)..(3): Xaa is C or S
PTXAPTKLEPLTVLYYDDSSNVIEQLSNNMVVRS

SEQ ID NO: 11242 - protein, 37 aa, Artificial Sequence
  Non-cyclic GFR-binding peptide
  MOD_RES (3)..(4)..(37): Xaa is C or S
  MOD_RES (18)..(19)..(20)..(21)..(22): Xaa is A or G
  MOD_RES (23)..(24)..(25)..(26): Xaa is A or G or absent
SPXXVPQDLEPLPIVYYXXXXXXXXXEQLSNMVVKSX

SEQ ID NO: 11243 - protein, 34 aa, Artificial Sequence
  Non-cyclic GFR-binding peptide
  MOD_RES (1)..(2)..(33): Xaa is C or S
XXVPQALSPISILFIVGRKPKVYKQYEMIVRSXK

SEQ ID NO: 11244 - protein, 40 aa, Artificial Sequence
  Non-cyclic GFR-binding peptide
  MOD_RES (7)..(7): Xaa is C or S
  MOD_RES (21)..(22)..(23)..(24)..(25): Xaa is A or G
  MOD_RES (26)..(27)..(28)..(29): Xaa is A or G or absent
HVTKPTXAPTKLSPISVLFIXXXXXXXXXYKQYENMVVRS

SEQ ID NO: 11245 - protein, 39 aa, Artificial Sequence
  Non-cyclic GFR-binding peptide
  MOD_RES (5)..(6): Xaa is C or S
  MOD_RES (20)..(21)..(22)..(23)..(24): Xaa is A or G
  MOD_RES (25)..(26)..(27)..(28): Xaa is A or G or absent
VPKPXXAPTQLEPLTVLYYXXXXXXXXXEQLSNNMVVRA

SEQ ID NO: 11246 - protein, 35 aa, Artificial Sequence
  Non-cyclic GFR-binding peptide
  MOD_RES (1)..(35): Xaa is C or S
  MOD_RES (15)..(16)..(17)..(18)..(19): Xaa is A or G
  MOD_RES (20)..(21)..(22)..(23): Xaa is A or G or absent
XVPTRLEPLTILYYXXXXXXXXXEQLSNDMVVESX

SEQ ID NO: 11247 - protein, 36 aa, Artificial Sequence
  Non-cyclic GFR-binding peptide
  MOD_RES (6)..(6): Xaa is C or S
VTKPTXAPTKLSPISVLFIDDSSNVIYKQYENMVVR

SEQ ID NO: 11248 - protein, 39 aa, Artificial Sequence
  Non-cyclic GFR-binding peptide
  MOD_RES (6)..(7): Xaa is C or S
  MOD_RES (21)..(22)..(23)..(24)..(25): Xaa is A or G
  MOD_RES (26)..(27)..(28)..(29): Xaa is A or G or absent
STPPTXXVPTRLSAISILYLXXXXXXXXXLKNYQDMVVE

SEQ ID NO: 11249 - protein, 41 aa, Artificial Sequence
  Non-cyclic GFR-binding peptide
  MOD_RES (5)..(6)..(38)..(40): Xaa is C or S
TPPTXXVPTRLNAISILYFDSANNVVLKKYRDMVVESXGXR

SEQ ID NO: 11250 - protein, 39 aa, Artificial Sequence
  Non-cyclic GFR-binding peptide
  MOD_RES (1)..(2)..(36)..(38): Xaa is C or S
  MOD_RES (16)..(17)..(18)..(19)..(20): Xaa is A or G
  MOD_RES (21)..(22)..(23)..(24): Xaa is A or G or absent
XXVPTELEPLPMVYYXXXXXXXXXEQLSNDMVVEGXGXR

SEQ ID NO: 11251 - protein, 37 aa, Artificial Sequence
  Non-cyclic GFR-binding peptide
  MOD_RES (2)..(3)..(36): Xaa is C or S
  MOD_RES (17)..(18)..(19)..(20)..(21): Xaa is A or G
  MOD_RES (22)..(23)..(24)..(25): Xaa is A or G or absent
PXXVSQDLSPISILFIXXXXXXXXXYKQYEMIVKSXK

SEQ ID NO: 11252 - protein, 34 aa, Artificial Sequence
  Non-cyclic GFR-binding peptide
  MOD_RES (1)..(2)..(34): Xaa is C or S
XXVPTELEPLTMLYYDEYDKVVEQLSNEMVVEGX

SEQ ID NO: 11253 - protein, 33 aa, Artificial Sequence
  Non-cyclic GFR-binding peptide
  MOD_RES (2)..(3): Xaa is C or S
TXXVPTRLSAISILYLDSANNVVLKNYQDMVVE

SEQ ID NO: 11254 - protein, 30 aa, Artificial Sequence
  Non-cyclic GFR-binding peptide
VPTELEPLPMVYYDENEKVVEQLSNDMVVE

SEQ ID NO: 11255 - protein, 37 aa, Artificial Sequence
  Non-cyclic GFR-binding peptide
  MOD_RES (1)..(2)..(35)..(37): Xaa is C or S
  MOD_RES (16)..(17)..(18)..(19)..(20): Xaa is A or G
  MOD_RES (21)..(22)..(23)..(24): Xaa is A or G or absent
XXVPQALSPISILFIXXXXXXXXXYKQYEMIVRSXKX

SEQ ID NO: 11256 - protein, 42 aa, Artificial Sequence
  Non-cyclic GFR-binding peptide
  MOD_RES (5)..(6)..(40)..(42): Xaa is C or S
  MOD_RES (20)..(21)..(22)..(23)..(24): Xaa is A or G
  MOD_RES (25)..(26)..(27)..(28): Xaa is A or G or absent
TPPTXXVPTRLSAISILYLXXXXXXXXXLKNYQDMVVESXGX

SEQ ID NO: 11257 - protein, 36 aa, Artificial Sequence
  Non-cyclic GFR-binding peptide
  MOD_RES (3)..(3): Xaa is C or S
  MOD_RES (17)..(18)..(19)..(20)..(21): Xaa is A or G
  MOD_RES (22)..(23)..(24)..(25): Xaa is A or G or absent
PTXAPTKLSPISVLFIXXXXXXXXXYKQYENMVVRS

SEQ ID NO: 11258 - protein, 39 aa, Artificial Sequence
  Non-cyclic GFR-binding peptide
  MOD_RES (5)..(6)..(38): Xaa is C or S
IPKAXXVPTELEPLTMLYYDENEKVVEQLSNDMVVEGXG

SEQ ID NO: 11259 - protein, 35 aa, Artificial Sequence
  Non-cyclic GFR-binding peptide
  MOD_RES (1)..(2): Xaa is C or S
  MOD_RES (16)..(17)..(18)..(19)..(20): Xaa is A or G
  MOD_RES (21)..(22)..(23)..(24): Xaa is A or G or absent
XXAPTQLEPLPVVYYXXXXXXXXXEQLSNNMVVRA

SEQ ID NO: 11260 - protein, 35 aa, Artificial Sequence
  Non-cyclic GFR-binding peptide
  MOD_RES (4)..(5): Xaa is C or S
PKPXXAPTKLEPLPVVYYDDSSNVIEQLSNNMVVR

SEQ ID NO: 11261 - protein, 35 aa, Artificial Sequence
  Non-cyclic GFR-binding peptide
  MOD_RES (2)..(3)..(35): Xaa is C or S
PXXAPTKLEPLPVVYYDDSSNVIEQLSNNMVVRSX

SEQ ID NO: 11262 - protein, 36 aa, Artificial Sequence
  Non-cyclic GFR-binding peptide
  MOD_RES (2)..(3)..(35): Xaa is C or S
AXXVPTELEPLPMVYYDEYDKVVEQLSNEMVVEGXG

SEQ ID NO: 11263 - protein, 36 aa, Artificial Sequence
  Non-cyclic GFR-binding peptide
  MOD_RES (2)..(3)..(35): Xaa is C or S
PXXAPTKLEPLPVVYYDDSSNVIEQLSNNMVVRSXG

SEQ ID NO: 11264 - protein, 34 aa, Artificial Sequence
  Non-cyclic GFR-binding peptide
  MOD_RES (32)..(34): Xaa is C or S
VPTRLNAISILYFDSANNVVLKKYRDMVVESXGX

SEQ ID NO: 11265 - protein, 32 aa, Artificial Sequence
  Non-cyclic GFR-binding peptide
  MOD_RES (14)..(15)..(16)..(17)..(18): Xaa is A or G
  MOD_RES (19)..(20)..(21)..(22): Xaa is A or G or absent
VPTELSPISMLFIXXXXXXXXXYKQYEDMVVE

SEQ ID NO: 11266 - protein, 39 aa, Artificial Sequence
  Non-cyclic GFR-binding peptide
  MOD_RES (4)..(5)..(37)..(39): Xaa is C or S
PKAXXVPTELEPLTMLYYDENEKVVEQLSNDMVVEGXGX

SEQ ID NO: 11267 - protein, 35 aa, Artificial Sequence
  Non-cyclic GFR-binding peptide
  MOD_RES (2)..(3)..(35): Xaa is C or S
TXXVPTRLNAISILYFDSANNVVLKKYRDMVVESX

SEQ ID NO: 11268 - protein, 35 aa, Artificial Sequence
  Non-cyclic GFR-binding peptide
  MOD_RES (2)..(3)..(35): Xaa is C or S
PXXAPTQLSPISVLFIDDSSNVIYKQYENMVVRAX

SEQ ID NO: 11269 - protein, 34 aa, Artificial Sequence
  Non-cyclic GFR-binding peptide
  MOD_RES (1)..(33): Xaa is C or S
XVPTELSPISMLFIDEYDKVVYKQYEEMVVEGXG

SEQ ID NO: 11270 - protein, 32 aa, Artificial Sequence
  Non-cyclic GFR-binding peptide
  MOD_RES (32)..(32): Xaa is C or S
VPTELEPLTMLYYDENEKVVEQLSNDMVVEGX

SEQ ID NO: 11271 - protein, 33 aa, Artificial Sequence
  Non-cyclic GFR-binding peptide
  MOD_RES (33)..(33): Xaa is C or S
  MOD_RES (14)..(15)..(16)..(17)..(18): Xaa is A or G
  MOD_RES (19)..(20)..(21)..(22): Xaa is A or G or absent
VPQALSPISILFIXXXXXXXXXYKQYEMIVRSX

SEQ ID NO: 11272 - protein, 32 aa, Artificial Sequence
  Non-cyclic GFR-binding peptide
  MOD_RES (31)..(31): Xaa is C or S
VPQALSPISILFIVGRKPKVYKQYEMIVRSXK

SEQ ID NO: 11273 - protein, 36 aa, Artificial Sequence
  Non-cyclic GFR-binding peptide
  MOD_RES (1)..(33)..(35): Xaa is C or S
XAPTQLSPISVLFIDDSSNVIYKQYENMVVRAXGXH

SEQ ID NO: 11274 - protein, 42 aa, Artificial Sequence
  Non-cyclic GFR-binding peptide
  MOD_RES (6)..(7)..(41): Xaa is C or S
  MOD_RES (21)..(22)..(23)..(24)..(25): Xaa is A or G
  MOD_RES (26)..(27)..(28)..(29): Xaa is A or G or absent
SIPKAXXVPTELEPLTMLYYXXXXXXXXXEQLSNEMVVEGXG

SEQ ID NO: 11275 - protein, 40 aa, Artificial Sequence
  Non-cyclic GFR-binding peptide
  MOD_RES (4)..(38)..(40): Xaa is C or S
  MOD_RES (18)..(19)..(20)..(21)..(22): Xaa is A or G
  MOD_RES (23)..(24)..(25)..(26): Xaa is A or G or absent
KPTXAPTKLEPLPVVYYXXXXXXXXXEQLSNNMVVRSXGX

SEQ ID NO: 11276 - protein, 43 aa, Artificial Sequence
  Non-cyclic GFR-binding peptide
  MOD_RES (6)..(7)..(40)..(42): Xaa is C or S
  MOD_RES (21)..(22)..(23)..(24)..(25): Xaa is A or G
  MOD_RES (26)..(27)..(28)..(29): Xaa is A or G or absent
ASASPXXVSQDLEPLPIVYYXXXXXXXXXEQLSNMIVKSXKXS

SEQ ID NO: 11277 - protein, 32 aa, Artificial Sequence
  Non-cyclic GFR-binding peptide
  MOD_RES (1)..(2): Xaa is C or S
XXVPTRLNAISILYFDSANNVVLKKYRDMVVE

SEQ ID NO: 11278 - protein, 36 aa, Artificial Sequence
  Non-cyclic GFR-binding peptide
  MOD_RES (33)..(35): Xaa is C or S
  MOD_RES (14)..(15)..(16)..(17)..(18): Xaa is A or G
  MOD_RES (19)..(20)..(21)..(22): Xaa is A or G or absent
VPQDLEPLPIVYYXXXXXXXXXEQLSNMVVKSXKXS

SEQ ID NO: 11279 - protein, 31 aa, Artificial Sequence
  Non-cyclic GFR-binding peptide
  MOD_RES (1)..(1): Xaa is C or S
XVPTELEPLPMVYYDEYDKVVEQLSNEMVVE

SEQ ID NO: 11280 - protein, 35 aa, Artificial Sequence
  Non-cyclic GFR-binding peptide
  MOD_RES (2)..(3)..(35): Xaa is C or S
AXXVPTELSPISMLFIDENEKVVYKQYEDMVVEGX

SEQ ID NO: 11281 - protein, 39 aa, Artificial Sequence
  Non-cyclic GFR-binding peptide
  MOD_RES (5)..(37)..(39): Xaa is C or S
TKPTXAPTKLSPISVLFIDDSSNVIYKQYENMVVRSXGX

SEQ ID NO: 11282 - protein, 41 aa, Artificial Sequence
  Non-cyclic GFR-binding peptide
  MOD_RES (6)..(38)..(40): Xaa is C or S
VTKPTXAPTKLEPLTVLYYDDSSNVIEQLSNNMVVRSXGXH

SEQ ID NO: 11283 - protein, 36 aa, Artificial Sequence
  Non-cyclic GFR-binding peptide
  MOD_RES (2)..(3)..(35): Xaa is C or S
PXXAPTKLSPISVLFIDDSSNVIYKQYENMVVRSXG

SEQ ID NO: 11284 - protein, 36 aa, Artificial Sequence
  Non-cyclic GFR-binding peptide
  MOD_RES (5)..(6): Xaa is C or S
IPKAXXVPTELSPISMLFIDEYDKVVYKQYEEMVVE

SEQ ID NO: 11285 - protein, 37 aa, Artificial Sequence
  Non-cyclic GFR-binding peptide
  MOD_RES (1)..(35)..(37): Xaa is C or S
  MOD_RES (15)..(16)..(17)..(18)..(19): Xaa is A or G
  MOD_RES (20)..(21)..(22)..(23): Xaa is A or G or absent
XAPTKLEPLTVLYYXXXXXXXXXEQLSNNMVVRSXGX

SEQ ID NO: 11286 - protein, 37 aa, Artificial Sequence
  Non-cyclic GFR-binding peptide
  MOD_RES (3)..(4): Xaa is C or S
  MOD_RES (18)..(19)..(20)..(21)..(22): Xaa is A or G
  MOD_RES (23)..(24)..(25)..(26): Xaa is A or G or absent
KPXXAPTKLEPLTVLYYXXXXXXXXXEQLSNNMVVRS

SEQ ID NO: 11287 - protein, 36 aa, Artificial Sequence
  Non-cyclic GFR-binding peptide
  MOD_RES (34)..(36): Xaa is C or S
  MOD_RES (14)..(15)..(16)..(17)..(18): Xaa is A or G
  MOD_RES (19)..(20)..(21)..(22): Xaa is A or G or absent
APTQLEPLTVLYYXXXXXXXXXEQLSNNMVVRAXGX

SEQ ID NO: 11288 - protein, 40 aa, Artificial Sequence
  Non-cyclic GFR-binding peptide
  MOD_RES (6)..(38)..(40): Xaa is C or S
VTKPTXAPTKLEPLTVLYYDDSSNVIEQLSNNMVVRSXGX

SEQ ID NO: 11289 - protein, 31 aa, Artificial Sequence
  Non-cyclic GFR-binding peptide
  MOD_RES (31)..(31): Xaa is C or S
VPQALSPISILFIVGRKPKVYKQYEMIVRSX

SEQ ID NO: 11290 - protein, 42 aa, Artificial Sequence
  Non-cyclic GFR-binding peptide
  MOD_RES (6)..(7)..(39)..(41): Xaa is C or S
KIPKAXXVPTELEPLPMVYYDENEKVVEQLSNDMVVEGXGXR

SEQ ID NO: 11291 - protein, 37 aa, Artificial Sequence
  Non-cyclic GFR-binding peptide
  MOD_RES (1)..(2)..(36): Xaa is C or S
  MOD_RES (16)..(17)..(18)..(19)..(20): Xaa is A or G
  MOD_RES (21)..(22)..(23)..(24): Xaa is A or G or absent
XXVPTELEPLPMVYYXXXXXXXXXEQLSNDMVVEGXG

SEQ ID NO: 11292 - protein, 42 aa, Artificial Sequence
  Non-cyclic GFR-binding peptide
  MOD_RES (6)..(7)..(40)..(42): Xaa is C or S
  MOD_RES (21)..(22)..(23)..(24)..(25): Xaa is A or G
  MOD_RES (26)..(27)..(28)..(29): Xaa is A or G or absent
ASASPXXVSQDLSPISILFIXXXXXXXXXYKQYEMIVKSXKX

SEQ ID NO: 11293 - protein, 36 aa, Artificial Sequence
  Non-cyclic GFR-binding peptide
  MOD_RES (1)..(2)..(33)..(35): Xaa is C or S
XXVSQDLEPLPIVYYIGKTPKIEQLSNMIVKSXKXS

SEQ ID NO: 11294 - protein, 33 aa, Artificial Sequence
  Non-cyclic GFR-binding peptide
  MOD_RES (31)..(33): Xaa is C or S
VPQALEPLTILYYVGRKPKVEQLSNMIVRSXKX

SEQ ID NO: 11295 - protein, 38 aa, Artificial Sequence
  Non-cyclic GFR-binding peptide
  MOD_RES (4)..(5): Xaa is C or S
  MOD_RES (19)..(20)..(21)..(22)..(23): Xaa is A or G
  MOD_RES (24)..(25)..(26)..(27): Xaa is A or G or absent
PKAXXVPTELEPLPMVYYXXXXXXXXXEQLSNEMVVEG

SEQ ID NO: 11296 - protein, 39 aa, Artificial Sequence
  Non-cyclic GFR-binding peptide
  MOD_RES (1)..(2)..(36)..(38): Xaa is C or S
  MOD_RES (16)..(17)..(18)..(19)..(20): Xaa is A or G
  MOD_RES (21)..(22)..(23)..(24): Xaa is A or G or absent
XXVPTELEPLTMLYYXXXXXXXXXEQLSNDMVVEGXGXR

SEQ ID NO: 11297 - protein, 36 aa, Artificial Sequence
  Non-cyclic GFR-binding peptide
  MOD_RES (5)..(6): Xaa is C or S
IPKAXXVPTELSPISMLFIDENEKVVYKQYEDMVVE

SEQ ID NO: 11298 - protein, 35 aa, Artificial Sequence
  Non-cyclic GFR-binding peptide
  MOD_RES (3)..(4): Xaa is C or S
PTXXVPTRLEPLTILYYDSANNVVEQLSNDMVVES

SEQ ID NO: 11299 - protein, 33 aa, Artificial Sequence
  Non-cyclic GFR-binding peptide
  MOD_RES (2)..(3): Xaa is C or S
TXXVPTRLEPLTILYYDSANNVVEQLSNDMVVE

SEQ ID NO: 11300 - protein, 36 aa, Artificial Sequence
  Non-cyclic GFR-binding peptide
  MOD_RES (3)..(4): Xaa is C or S
  MOD_RES (18)..(19)..(20)..(21)..(22): Xaa is A or G
  MOD_RES (23)..(24)..(25)..(26): Xaa is A or G or absent
PTXXVPTRLSAISILYLXXXXXXXXXLKNYQDMVVE

SEQ ID NO: 11301 - protein, 34 aa, Artificial Sequence
  Non-cyclic GFR-binding peptide
  MOD_RES (3)..(4): Xaa is C or S
KPXXAPTKLSPISVLFIDDSSNVIYKQYENMVVR

SEQ ID NO: 11302 - protein, 38 aa, Artificial Sequence
  Non-cyclic GFR-binding peptide
  MOD_RES (6)..(7)..(38): Xaa is C or S
ASASPXXVPQDLSPISILFIVGRTPKVYKQYEMVVKSX

SEQ ID NO: 11303 - protein, 37 aa, Artificial Sequence
  Non-cyclic GFR-binding peptide
  MOD_RES (6)..(7): Xaa is C or S
YVPKPXXAPTKLEPLTVLYYDDSSNVIEQLSNNMVVR

SEQ ID NO: 11304 - protein, 37 aa, Artificial Sequence
  Non-cyclic GFR-binding peptide
  MOD_RES (1)..(2)..(34)..(36): Xaa is C or S
XXAPTKLEPLTVLYYDDSSNVIEQLSNNMVVRSXGXH

SEQ ID NO: 11305 - protein, 38 aa, Artificial Sequence
  Non-cyclic GFR-binding peptide
  MOD_RES (3)..(4)..(37): Xaa is C or S
  MOD_RES (18)..(19)..(20)..(21)..(22): Xaa is A or G
  MOD_RES (23)..(24)..(25)..(26): Xaa is A or G or absent
APXXVPQALSPISILFIXXXXXXXXXYKQYEMIVRSXK

SEQ ID NO: 11306 - protein, 38 aa, Artificial Sequence
  Non-cyclic GFR-binding peptide
  MOD_RES (5)..(6)..(38): Xaa is C or S
IPKAXXVPTELEPLPMVYYDEYDKVVEQLSNEMVVEGX

SEQ ID NO: 11307 - protein, 33 aa, Artificial Sequence
  Non-cyclic GFR-binding peptide
  MOD_RES (2)..(3): Xaa is C or S
AXXVPTELEPLPMVYYDEYDKVVEQLSNEMVVE

SEQ ID NO: 11308 - protein, 38 aa, Artificial Sequence
  Non-cyclic GFR-binding peptide
  MOD_RES (4)..(5)..(36)..(38): Xaa is C or S
AAPXXVPQALEPLTILYYVGRKPKVEQLSNMIVRSXKX

SEQ ID NO: 11309 - protein, 36 aa, Artificial Sequence
  Non-cyclic GFR-binding peptide
  MOD_RES (3)..(4): Xaa is C or S
  MOD_RES (18)..(19)..(20)..(21)..(22): Xaa is A or G
  MOD_RES (23)..(24)..(25)..(26): Xaa is A or G or absent
KPXXAPTQLEPLPVVYYXXXXXXXXXEQLSNNMVVR

SEQ ID NO: 11310 - protein, 34 aa, Artificial Sequence
  Non-cyclic GFR-binding peptide
  MOD_RES (32)..(34): Xaa is C or S
VPTELEPLPMVYYDEYDKVVEQLSNEMVVEGXGX

SEQ ID NO: 11311 - protein, 35 aa, Artificial Sequence
  Non-cyclic GFR-binding peptide
  MOD_RES (1)..(32)..(34): Xaa is C or S
XVPQDLSPISILFIVGRTPKVYKQYEMVVKSXKXS

SEQ ID NO: 11312 - protein, 40 aa, Artificial Sequence
  Non-cyclic GFR-binding peptide
  MOD_RES (4)..(5)..(38)..(40): Xaa is C or S
  MOD_RES (19)..(20)..(21)..(22)..(23): Xaa is A or G
  MOD_RES (24)..(25)..(26)..(27): Xaa is A or G or absent
ASPXXVSQDLEPLPIVYYXXXXXXXXXEQLSNMIVKSXKX

SEQ ID NO: 11313 - protein, 36 aa, Artificial Sequence
  Non-cyclic GFR-binding peptide
  MOD_RES (4)..(5)..(36): Xaa is C or S
ASPXXVSQDLEPLPIVYYIGKTPKIEQLSNMIVKSX

SEQ ID NO: 11314 - protein, 40 aa, Artificial Sequence
  Non-cyclic GFR-binding peptide
  MOD_RES (5)..(6)..(38)..(40): Xaa is C or S
VPKPXXAPTKLEPLPVVYYDDSSNVIEQLSNNMVVRSXGX

SEQ ID NO: 11315 - protein, 40 aa, Artificial Sequence
  Non-cyclic GFR-binding peptide
  MOD_RES (4)..(5)..(37)..(39): Xaa is C or S
PKAXXVPTELEPLTMLYYDENEKVVEQLSNDMVVEGXGXR

SEQ ID NO: 11316 - protein, 36 aa, Artificial Sequence
  Non-cyclic GFR-binding peptide
  MOD_RES (2)..(3): Xaa is C or S
  MOD_RES (17)..(18)..(19)..(20)..(21): Xaa is A or G
  MOD_RES (22)..(23)..(24)..(25): Xaa is A or G or absent
AXXVPTELEPLTMLYYXXXXXXXXXEQLSNDMVVEG

SEQ ID NO: 11317 - protein, 35 aa, Artificial Sequence
  Non-cyclic GFR-binding peptide
  MOD_RES (2)..(3): Xaa is C or S
  MOD_RES (17)..(18)..(19)..(20)..(21): Xaa is A or G
  MOD_RES (22)..(23)..(24)..(25): Xaa is A or G or absent
PXXAPTQLEPLTVLYYXXXXXXXXXEQLSNNMVVR

SEQ ID NO: 11318 - protein, 35 aa, Artificial Sequence
  Non-cyclic GFR-binding peptide
  MOD_RES (1)..(33)..(35): Xaa is C or S
XVPTELEPLPMVYYDEYDKVVEQLSNEMVVEGXGX

SEQ ID NO: 11319 - protein, 38 aa, Artificial Sequence
  Non-cyclic GFR-binding peptide
  MOD_RES (1)..(35)..(37): Xaa is C or S
  MOD_RES (15)..(16)..(17)..(18)..(19): Xaa is A or G
  MOD_RES (20)..(21)..(22)..(23): Xaa is A or G or absent
XAPTKLEPLPVVYYXXXXXXXXXEQLSNNMVVRSXGXH

SEQ ID NO: 11320 - protein, 37 aa, Artificial Sequence
  Non-cyclic GFR-binding peptide
  MOD_RES (34)..(36): Xaa is C or S
  MOD_RES (14)..(15)..(16)..(17)..(18): Xaa is A or G
  MOD_RES (19)..(20)..(21)..(22): Xaa is A or G or absent
VPTELEPLPMVYYXXXXXXXXXEQLSNDMVVEGXGXR

SEQ ID NO: 11321 - protein, 36 aa, Artificial Sequence
  Non-cyclic GFR-binding peptide
  MOD_RES (2)..(34)..(36): Xaa is C or S
TXAPTKLEPLTVLYYDDSSNVIEQLSNNMVVRSXGX

SEQ ID NO: 11322 - protein, 39 aa, Artificial Sequence
  Non-cyclic GFR-binding peptide
  MOD_RES (6)..(7): Xaa is C or S
  MOD_RES (21)..(22)..(23)..(24)..(25): Xaa is A or G
  MOD_RES (26)..(27)..(28)..(29): Xaa is A or G or absent
ASASPXXVSQDLEPLPIVYYXXXXXXXXXEQLSNMIVKS

SEQ ID NO: 11323 - protein, 33 aa, Artificial Sequence
  Non-cyclic GFR-binding peptide
  MOD_RES (1)..(1): Xaa is C or S
  MOD_RES (15)..(16)..(17)..(18)..(19): Xaa is A or G
  MOD_RES (20)..(21)..(22)..(23): Xaa is A or G or absent
XVPQDLSPISILFIXXXXXXXXXYKQYEMVVKS

SEQ ID NO: 11324 - protein, 36 aa, Artificial Sequence
  Non-cyclic GFR-binding peptide
  MOD_RES (2)..(3)..(35): Xaa is C or S
TXXVPTRLNAISILYFDSANNVVLKKYRDMVVESXG

SEQ ID NO: 11325 - protein, 37 aa, Artificial Sequence
  Non-cyclic GFR-binding peptide
  MOD_RES (34)..(36): Xaa is C or S
  MOD_RES (14)..(15)..(16)..(17)..(18): Xaa is A or G
  MOD_RES (19)..(20)..(21)..(22): Xaa is A or G or absent
APTKLEPLPVVYYXXXXXXXXXEQLSNNMVVRSXGXH

SEQ ID NO: 11326 - protein, 38 aa, Artificial Sequence
  Non-cyclic GFR-binding peptide
  MOD_RES (2)..(3)..(37): Xaa is C or S
  MOD_RES (17)..(18)..(19)..(20)..(21): Xaa is A or G
  MOD_RES (22)..(23)..(24)..(25): Xaa is A or G or absent
AXXVPTELSPISMLFIXXXXXXXXXYKQYEEMVVEGXG

SEQ ID NO: 11327 - protein, 37 aa, Artificial Sequence
  Non-cyclic GFR-binding peptide
  MOD_RES (6)..(7): Xaa is C or S
SIPKAXXVPTELSPISMLFIDEYDKVVYKQYEEMVVE

SEQ ID NO: 11328 - protein, 35 aa, Artificial Sequence
  Non-cyclic GFR-binding peptide
  MOD_RES (1)..(32)..(34): Xaa is C or S
XVPQALEPLTILYYVGRKPKVEQLSNMIVRSXKXS

SEQ ID NO: 11329 - protein, 35 aa, Artificial Sequence
  Non-cyclic GFR-binding peptide
  MOD_RES (4)..(5): Xaa is C or S
PKPXXAPTQLSPISVLFIDDSSNVIYKQYENMVVR

SEQ ID NO: 11330 - protein, 40 aa, Artificial Sequence
  Non-cyclic GFR-binding peptide
  MOD_RES (4)..(5)..(39): Xaa is C or S
  MOD_RES (19)..(20)..(21)..(22)..(23): Xaa is A or G
  MOD_RES (24)..(25)..(26)..(27): Xaa is A or G or absent
PKAXXVPTELEPLTMLYYXXXXXXXXXEQLSNDMVVEGXG

SEQ ID NO: 11331 - protein, 35 aa, Artificial Sequence
  Non-cyclic GFR-binding peptide
  MOD_RES (1)..(35): Xaa is C or S
  MOD_RES (15)..(16)..(17)..(18)..(19): Xaa is A or G
  MOD_RES (20)..(21)..(22)..(23): Xaa is A or G or absent
XVPTRLNAISILYFXXXXXXXXXLKKYRDMVVESX

SEQ ID NO: 11332 - protein, 42 aa, Artificial Sequence
  Non-cyclic GFR-binding peptide
  MOD_RES (4)..(5)..(39)..(41): Xaa is C or S
  MOD_RES (19)..(20)..(21)..(22)..(23): Xaa is A or G
  MOD_RES (24)..(25)..(26)..(27): Xaa is A or G or absent
PKPXXAPTKLEPLTVLYYXXXXXXXXXEQLSNNMVVRSXGXH

SEQ ID NO: 11333 - protein, 41 aa, Artificial Sequence
  Non-cyclic GFR-binding peptide
  MOD_RES (6)..(7)..(41): Xaa is C or S
  MOD_RES (21)..(22)..(23)..(24)..(25): Xaa is A or G
  MOD_RES (26)..(27)..(28)..(29): Xaa is A or G or absent
KIPKAXXVPTELSPISMLFIXXXXXXXXXYKQYEDMVVEGX

SEQ ID NO: 11334 - protein, 35 aa, Artificial Sequence
  Non-cyclic GFR-binding peptide
  MOD_RES (1)..(35): Xaa is C or S
  MOD_RES (15)..(16)..(17)..(18)..(19): Xaa is A or G
  MOD_RES (20)..(21)..(22)..(23): Xaa is A or G or absent
XAPTQLSPISVLFIXXXXXXXXXYKQYENMVVRAX

SEQ ID NO: 11335 - protein, 36 aa, Artificial Sequence
  Non-cyclic GFR-binding peptide
  MOD_RES (4)..(4): Xaa is C or S
  MOD_RES (18)..(19)..(20)..(21)..(22): Xaa is A or G
  MOD_RES (23)..(24)..(25)..(26): Xaa is A or G or absent
KPTXAPTKLSPISVLFIXXXXXXXXXYKQYENMVVR

SEQ ID NO: 11336 - protein, 38 aa, Artificial Sequence
  Non-cyclic GFR-binding peptide
  MOD_RES (4)..(5)..(36)..(38): Xaa is C or S
ASPXXVSQDLEPLPIVYYIGKTPKIEQLSNMIVKSXKX

SEQ ID NO: 11337 - protein, 38 aa, Artificial Sequence
  Non-cyclic GFR-binding peptide
  MOD_RES (4)..(5): Xaa is C or S
  MOD_RES (19)..(20)..(21)..(22)..(23): Xaa is A or G
  MOD_RES (24)..(25)..(26)..(27): Xaa is A or G or absent
PPTXXVPTRLSAISILYLXXXXXXXXXLKNYQDMVVES

SEQ ID NO: 11338 - protein, 33 aa, Artificial Sequence
  Non-cyclic GFR-binding peptide
  MOD_RES (2)..(3): Xaa is C or S
PXXAPTQLEPLTVLYYDDSSNVIEQLSNNMVVR

SEQ ID NO: 11339 - protein, 38 aa, Artificial Sequence
  Non-cyclic GFR-binding peptide
  MOD_RES (4)..(5): Xaa is C or S
  MOD_RES (19)..(20)..(21)..(22)..(23): Xaa is A or G
  MOD_RES (24)..(25)..(26)..(27): Xaa is A or G or absent
PKPXXAPTQLEPLPVVYYXXXXXXXXXEQLSNNMVVRA

SEQ ID NO: 11340 - protein, 34 aa, Artificial Sequence
  Non-cyclic GFR-binding peptide
  MOD_RES (1)..(32)..(34): Xaa is C or S
XVPQALEPLTILYYVGRKPKVEQLSNMIVRSXKX

SEQ ID NO: 11341 - protein, 39 aa, Artificial Sequence
  Non-cyclic GFR-binding peptide
  MOD_RES (3)..(4)..(36)..(38): Xaa is C or S
PTXXVPTRLEPLPIVYYDSANNVVEQLSNDMVVESXGXR

SEQ ID NO: 11342 - protein, 39 aa, Artificial Sequence
  Non-cyclic GFR-binding peptide
  MOD_RES (3)..(4)..(38): Xaa is C or S
  MOD_RES (18)..(19)..(20)..(21)..(22): Xaa is A or G
  MOD_RES (23)..(24)..(25)..(26): Xaa is A or G or absent
KPXXAPTKLEPLPVVYYXXXXXXXXXEQLSNNMVVRSXG

SEQ ID NO: 11343 - protein, 38 aa, Artificial Sequence
  Non-cyclic GFR-binding peptide
  MOD_RES (6)..(7): Xaa is C or S
TVPKPXXAPTQLSPISVLFIDDSSNVIYKQYENMVVRA

SEQ ID NO: 11344 - protein, 31 aa, Artificial Sequence
  Non-cyclic GFR-binding peptide
VPTRLEPLPIVYYDSANNVVEQLSNDMVVES

SEQ ID NO: 11345 - protein, 41 aa, Artificial Sequence
  Non-cyclic GFR-binding peptide
  MOD_RES (5)..(6)..(38)..(40): Xaa is C or S
IPKAXXVPTELEPLTMLYYDENEKVVEQLSNDMVVEGXGXR

SEQ ID NO: 11346 - protein, 35 aa, Artificial Sequence
  Non-cyclic GFR-binding peptide
  MOD_RES (3)..(4): Xaa is C or S
PTXXVPTRLEPLPIVYYDSANNVVEQLSNDMVVES

SEQ ID NO: 11347 - protein, 31 aa, Artificial Sequence
  Non-cyclic GFR-binding peptide
  MOD_RES (1)..(1): Xaa is C or S
XVPQALEPLTILYYVGRKPKVEQLSNMIVRS

SEQ ID NO: 11348 - protein, 38 aa, Artificial Sequence
  Non-cyclic GFR-binding peptide
  MOD_RES (5)..(6): Xaa is C or S
  MOD_RES (20)..(21)..(22)..(23)..(24): Xaa is A or G
  MOD_RES (25)..(26)..(27)..(28): Xaa is A or G or absent
IPKAXXVPTELEPLPMVYYXXXXXXXXXEQLSNEMVVE

SEQ ID NO: 11349 - protein, 42 aa, Artificial Sequence
  Non-cyclic GFR-binding peptide
  MOD_RES (5)..(6)..(40)..(42): Xaa is C or S
  MOD_RES (20)..(21)..(22)..(23)..(24): Xaa is A or G
  MOD_RES (25)..(26)..(27)..(28): Xaa is A or G or absent
IPKAXXVPTELEPLPMVYYXXXXXXXXXEQLSNDMVVEGXGX

SEQ ID NO: 11350 - protein, 34 aa, Artificial Sequence
  Non-cyclic GFR-binding peptide
  MOD_RES (1)..(32)..(34): Xaa is C or S
XVSQDLEPLPIVYYIGKTPKIEQLSNMIVKSXKX

SEQ ID NO: 11351 - protein, 36 aa, Artificial Sequence
  Non-cyclic GFR-binding peptide
  MOD_RES (3)..(4): Xaa is C or S
  MOD_RES (18)..(19)..(20)..(21)..(22): Xaa is A or G
  MOD_RES (23)..(24)..(25)..(26): Xaa is A or G or absent
SPXXVPQDLEPLPIVYYXXXXXXXXXEQLSNMVVKS

SEQ ID NO: 11352 - protein, 38 aa, Artificial Sequence
  Non-cyclic GFR-binding peptide
  MOD_RES (4)..(5): Xaa is C or S
  MOD_RES (19)..(20)..(21)..(22)..(23): Xaa is A or G
  MOD_RES (24)..(25)..(26)..(27): Xaa is A or G or absent
PKAXXVPTELSPISMLFIXXXXXXXXXYKQYEDMVVEG

SEQ ID NO: 11353 - protein, 40 aa, Artificial Sequence
  Non-cyclic GFR-binding peptide
  MOD_RES (2)..(3)..(37)..(39): Xaa is C or S
  MOD_RES (17)..(18)..(19)..(20)..(21): Xaa is A or G
  MOD_RES (22)..(23)..(24)..(25): Xaa is A or G or absent
AXXVPTELEPLTMLYYXXXXXXXXXEQLSNDMVVEGXGXR

SEQ ID NO: 11354 - protein, 39 aa, Artificial Sequence
  Non-cyclic GFR-binding peptide
  MOD_RES (4)..(5)..(39): Xaa is C or S
  MOD_RES (19)..(20)..(21)..(22)..(23): Xaa is A or G
  MOD_RES (24)..(25)..(26)..(27): Xaa is A or G or absent
PKAXXVPTELEPLPMVYYXXXXXXXXXEQLSNEMVVEGX

SEQ ID NO: 11355 - protein, 41 aa, Artificial Sequence
  Non-cyclic GFR-binding peptide
  MOD_RES (5)..(6)..(38)..(40): Xaa is C or S
VPKPXXAPTKLSPISVLFIDDSSNVIYKQYENMVVRSXGXH

SEQ ID NO: 11356 - protein, 35 aa, Artificial Sequence
  Non-cyclic GFR-binding peptide
  MOD_RES (3)..(4)..(35): Xaa is C or S
APXXVPQALSPISILFIVGRKPKVYKQYEMIVRSX

SEQ ID NO: 11357 - protein, 39 aa, Artificial Sequence
  Non-cyclic GFR-binding peptide
  MOD_RES (5)..(6): Xaa is C or S
  MOD_RES (20)..(21)..(22)..(23)..(24): Xaa is A or G
  MOD_RES (25)..(26)..(27)..(28): Xaa is A or G or absent
VPKPXXAPTKLEPLTVLYYXXXXXXXXXEQLSNNMVVRS

SEQ ID NO: 11358 - protein, 41 aa, Artificial Sequence
  Non-cyclic GFR-binding peptide
  MOD_RES (6)..(7)..(41): Xaa is C or S
  MOD_RES (21)..(22)..(23)..(24)..(25): Xaa is A or G
  MOD_RES (26)..(27)..(28)..(29): Xaa is A or G or absent
YVPKPXXAPTKLSPISVLFIXXXXXXXXXYKQYENMVVRSX

SEQ ID NO: 11359 - protein, 33 aa, Artificial Sequence
  Non-cyclic GFR-binding peptide
  MOD_RES (1)..(2): Xaa is C or S
XXVPTRLSAISILYLDSANNVVLKNYQDMVVES

SEQ ID NO: 11360 - protein, 37 aa, Artificial Sequence
  Non-cyclic GFR-binding peptide
  MOD_RES (3)..(4): Xaa is C or S
  MOD_RES (18)..(19)..(20)..(21)..(22): Xaa is A or G
  MOD_RES (23)..(24)..(25)..(26): Xaa is A or G or absent
KPXXAPTKLSPISVLFIXXXXXXXXXYKQYENMVVRS

SEQ ID NO: 11361 - protein, 34 aa, Artificial Sequence
  Non-cyclic GFR-binding peptide
  MOD_RES (4)..(4): Xaa is C or S
KPTXAPTKLEPLPVVYYDDSSNVIEQLSNNMVVR

SEQ ID NO: 11362 - protein, 35 aa, Artificial Sequence
  Non-cyclic GFR-binding peptide
  MOD_RES (1)..(2): Xaa is C or S
  MOD_RES (16)..(17)..(18)..(19)..(20): Xaa is A or G
  MOD_RES (21)..(22)..(23)..(24): Xaa is A or G or absent
XXAPTKLEPLPVVYYXXXXXXXXXEQLSNNMVVRS

SEQ ID NO: 11363 - protein, 37 aa, Artificial Sequence
  Non-cyclic GFR-binding peptide
  MOD_RES (4)..(4): Xaa is C or S
  MOD_RES (18)..(19)..(20)..(21)..(22): Xaa is A or G
  MOD_RES (23)..(24)..(25)..(26): Xaa is A or G or absent
KPTXAPTKLSPISVLFIXXXXXXXXXYKQYENMVVRS

SEQ ID NO: 11364 - protein, 37 aa, Artificial Sequence
  Non-cyclic GFR-binding peptide
  MOD_RES (7)..(7): Xaa is C or S
HVTKPTXAPTKLEPLPVVYYDDSSNVIEQLSNNMVVR

SEQ ID NO: 11365 - protein, 32 aa, Artificial Sequence
  Non-cyclic GFR-binding peptide
  MOD_RES (1)..(1): Xaa is C or S
XVPTRLNAISILYFDSANNVVLKKYRDMVVES

SEQ ID NO: 11366 - protein, 41 aa, Artificial Sequence
  Non-cyclic GFR-binding peptide
  MOD_RES (6)..(7)..(40): Xaa is C or S
  MOD_RES (21)..(22)..(23)..(24)..(25): Xaa is A or G
  MOD_RES (26)..(27)..(28)..(29): Xaa is A or G or absent
ASASPXXVPQDLEPLPIVYYXXXXXXXXXEQLSNMVVKSXK

SEQ ID NO: 11367 - protein, 34 aa, Artificial Sequence
  Non-cyclic GFR-binding peptide
  MOD_RES (1)..(2): Xaa is C or S
  MOD_RES (16)..(17)..(18)..(19)..(20): Xaa is A or G
  MOD_RES (21)..(22)..(23)..(24): Xaa is A or G or absent
XXVPTELSPISMLFIXXXXXXXXXYKQYEDMVVE

SEQ ID NO: 11368 - protein, 34 aa, Artificial Sequence
  Non-cyclic GFR-binding peptide
  MOD_RES (2)..(34): Xaa is C or S
TXAPTKLEPLTVLYYDDSSNVIEQLSNNMVVRSX

SEQ ID NO: 11369 - protein, 42 aa, Artificial Sequence
  Non-cyclic GFR-binding peptide
  MOD_RES (6)..(7)..(41): Xaa is C or S
  MOD_RES (21)..(22)..(23)..(24)..(25): Xaa is A or G
  MOD_RES (26)..(27)..(28)..(29): Xaa is A or G or absent
STPPTXXVPTRLEPLPIVYYXXXXXXXXXEQLSNDMVVESXG

SEQ ID NO: 11370 - protein, 42 aa, Artificial Sequence
  Non-cyclic GFR-binding peptide
  MOD_RES (6)..(7)..(41): Xaa is C or S
  MOD_RES (21)..(22)..(23)..(24)..(25): Xaa is A or G
  MOD_RES (26)..(27)..(28)..(29): Xaa is A or G or absent
SIPKAXXVPTELSPISMLFIXXXXXXXXXYKQYEEMVVEGXG

SEQ ID NO: 11371 - protein, 36 aa, Artificial Sequence
  Non-cyclic GFR-binding peptide
  MOD_RES (3)..(4)..(36): Xaa is C or S
KAXXVPTELEPLTMLYYDENEKVVEQLSNDMVVEGX

SEQ ID NO: 11372 - protein, 33 aa, Artificial Sequence
  Non-cyclic GFR-binding peptide
  MOD_RES (2)..(3): Xaa is C or S
PXXVSQDLSPISILFIIGKTPKIYKQYEMIVKS

SEQ ID NO: 11373 - protein, 37 aa, Artificial Sequence
  Non-cyclic GFR-binding peptide
  MOD_RES (5)..(6)..(37): Xaa is C or S
SASPXXVSQDLSPISILFIIGKTPKIYKQYEMIVKSX

SEQ ID NO: 11374 - protein, 41 aa, Artificial Sequence
  Non-cyclic GFR-binding peptide
  MOD_RES (6)..(7)..(41): Xaa is C or S
  MOD_RES (21)..(22)..(23)..(24)..(25): Xaa is A or G
  MOD_RES (26)..(27)..(28)..(29): Xaa is A or G or absent
STPPTXXVPTRLSAISILYLXXXXXXXXXLKNYQDMVVESX

SEQ ID NO: 11375 - protein, 38 aa, Artificial Sequence
  Non-cyclic GFR-binding peptide
  MOD_RES (1)..(2)..(36)..(38): Xaa is C or S
  MOD_RES (16)..(17)..(18)..(19)..(20): Xaa is A or G
  MOD_RES (21)..(22)..(23)..(24): Xaa is A or G or absent
XXAPTQLEPLTVLYYXXXXXXXXXEQLSNNMVVRAXGX

SEQ ID NO: 11376 - protein, 32 aa, Artificial Sequence
  Non-cyclic GFR-binding peptide
  MOD_RES (14)..(15)..(16)..(17)..(18): Xaa is A or G
  MOD_RES (19)..(20)..(21)..(22): Xaa is A or G or absent
VPTRLNAISILYFXXXXXXXXXLKKYRDMVVE

SEQ ID NO: 11377 - protein, 34 aa, Artificial Sequence
  Non-cyclic GFR-binding peptide
  MOD_RES (1)..(1): Xaa is C or S
  MOD_RES (15)..(16)..(17)..(18)..(19): Xaa is A or G
  MOD_RES (20)..(21)..(22)..(23): Xaa is A or G or absent
XAPTKLEPLPVVYYXXXXXXXXXEQLSNNMVVRS

SEQ ID NO: 11378 - protein, 40 aa, Artificial Sequence
  Non-cyclic GFR-binding peptide
  MOD_RES (7)..(39): Xaa is C or S
HVTKPTXAPTKLEPLPVVYYDDSSNVIEQLSNNMVVRSXG

SEQ ID NO: 11379 - protein, 40 aa, Artificial Sequence
  Non-cyclic GFR-binding peptide
  MOD_RES (5)..(6)..(40): Xaa is C or S
  MOD_RES (20)..(21)..(22)..(23)..(24): Xaa is A or G
  MOD_RES (25)..(26)..(27)..(28): Xaa is A or G or absent
VPKPXXAPTQLEPLPVVYYXXXXXXXXXEQLSNNMVVRAX

SEQ ID NO: 11380 - protein, 31 aa, Artificial Sequence
  Non-cyclic GFR-binding peptide
APTKLEPLTVLYYDDSSNVIEQLSNNMVVRS

SEQ ID NO: 11381 - protein, 35 aa, Artificial Sequence
  Non-cyclic GFR-binding peptide
  MOD_RES (34)..(34): Xaa is C or S
  MOD_RES (14)..(15)..(16)..(17)..(18): Xaa is A or G
  MOD_RES (19)..(20)..(21)..(22): Xaa is A or G or absent
VPTELSPISMLFIXXXXXXXXXYKQYEDMVVEGXG

SEQ ID NO: 11382 - protein, 37 aa, Artificial Sequence
  Non-cyclic GFR-binding peptide
  MOD_RES (3)..(4): Xaa is C or S
  MOD_RES (18)..(19)..(20)..(21)..(22): Xaa is A or G
  MOD_RES (23)..(24)..(25)..(26): Xaa is A or G or absent
KAXXVPTELEPLPMVYYXXXXXXXXXEQLSNDMVVEG

SEQ ID NO: 11383 - protein, 38 aa, Artificial Sequence
  Non-cyclic GFR-binding peptide
  MOD_RES (1)..(35)..(37): Xaa is C or S
  MOD_RES (15)..(16)..(17)..(18)..(19): Xaa is A or G
  MOD_RES (20)..(21)..(22)..(23): Xaa is A or G or absent
XVPTELEPLPMVYYXXXXXXXXXEQLSNDMVVEGXGXR

SEQ ID NO: 11384 - protein, 36 aa, Artificial Sequence
  Non-cyclic GFR-binding peptide
  MOD_RES (1)..(2)..(34)..(36): Xaa is C or S
XXAPTQLEPLTVLYYDDSSNVIEQLSNNMVVRAXGX

SEQ ID NO: 11385 - protein, 39 aa, Artificial Sequence
  Non-cyclic GFR-binding peptide
  MOD_RES (5)..(6): Xaa is C or S
  MOD_RES (20)..(21)..(22)..(23)..(24): Xaa is A or G
  MOD_RES (25)..(26)..(27)..(28): Xaa is A or G or absent
IPKAXXVPTELSPISMLFIXXXXXXXXXYKQYEEMVVEG

SEQ ID NO: 11386 - protein, 34 aa, Artificial Sequence
  Non-cyclic GFR-binding peptide
  MOD_RES (1)..(2): Xaa is C or S
  MOD_RES (16)..(17)..(18)..(19)..(20): Xaa is A or G
  MOD_RES (21)..(22)..(23)..(24): Xaa is A or G or absent
XXVSQDLSPISILFIXXXXXXXXXYKQYEMIVKS

SEQ ID NO: 11387 - protein, 38 aa, Artificial Sequence
  Non-cyclic GFR-binding peptide
  MOD_RES (4)..(5)..(38): Xaa is C or S
  MOD_RES (19)..(20)..(21)..(22)..(23): Xaa is A or G
  MOD_RES (24)..(25)..(26)..(27): Xaa is A or G or absent
AAPXXVPQALSPISILFIXXXXXXXXXYKQYEMIVRSX

SEQ ID NO: 11388 - protein, 42 aa, Artificial Sequence
  Non-cyclic GFR-binding peptide
  MOD_RES (5)..(6)..(40)..(42): Xaa is C or S
  MOD_RES (20)..(21)..(22)..(23)..(24): Xaa is A or G
  MOD_RES (25)..(26)..(27)..(28): Xaa is A or G or absent
IPKAXXVPTELEPLPMVYYXXXXXXXXXEQLSNEMVVEGXGX

SEQ ID NO: 11389 - protein, 30 aa, Artificial Sequence
  Non-cyclic GFR-binding peptide
VPTELEPLTMLYYDEYDKVVEQLSNEMVVE

SEQ ID NO: 11390 - protein, 37 aa, Artificial Sequence
  Non-cyclic GFR-binding peptide
  MOD_RES (6)..(7): Xaa is C or S
YVPKPXXAPTKLEPLPVVYYDDSSNVIEQLSNNMVVR

SEQ ID NO: 11391 - protein, 36 aa, Artificial Sequence
  Non-cyclic GFR-binding peptide
  MOD_RES (1)..(33)..(35): Xaa is C or S
XAPTKLEPLTVLYYDDSSNVIEQLSNNMVVRSXGXH

SEQ ID NO: 11392 - protein, 40 aa, Artificial Sequence
  Non-cyclic GFR-binding peptide
  MOD_RES (6)..(7)..(39): Xaa is C or S
STPPTXXVPTRLEPLTILYYDSANNVVEQLSNDMVVESXG

SEQ ID NO: 11393 - protein, 40 aa, Artificial Sequence
  Non-cyclic GFR-binding peptide
  MOD_RES (4)..(5)..(39): Xaa is C or S
  MOD_RES (19)..(20)..(21)..(22)..(23): Xaa is A or G
  MOD_RES (24)..(25)..(26)..(27): Xaa is A or G or absent
PPTXXVPTRLSAISILYLXXXXXXXXXLKNYQDMVVESXG

SEQ ID NO: 11394 - protein, 35 aa, Artificial Sequence
  Non-cyclic GFR-binding peptide
  MOD_RES (1)..(2)..(33)..(35): Xaa is C or S
XXVPQALSPISILFIVGRKPKVYKQYEMIVRSXKX

SEQ ID NO: 11395 - protein, 41 aa, Artificial Sequence
  Non-cyclic GFR-binding peptide
  MOD_RES (5)..(6)..(39)..(41): Xaa is C or S
  MOD_RES (20)..(21)..(22)..(23)..(24): Xaa is A or G
  MOD_RES (25)..(26)..(27)..(28): Xaa is A or G or absent
SAAPXXVPQALSPISILFIXXXXXXXXXYKQYEMIVRSXKX

SEQ ID NO: 11396 - protein, 36 aa, Artificial Sequence
  Non-cyclic GFR-binding peptide
  MOD_RES (5)..(5): Xaa is C or S
TKPTXAPTKLEPLPVVYYDDSSNVIEQLSNNMVVRS

SEQ ID NO: 11397 - protein, 35 aa, Artificial Sequence
  Non-cyclic GFR-binding peptide
  MOD_RES (1)..(2)..(33)..(35): Xaa is C or S
XXVSQDLSPISILFIIGKTPKIYKQYEMIVKSXKX

SEQ ID NO: 11398 - protein, 36 aa, Artificial Sequence
  Non-cyclic GFR-binding peptide
  MOD_RES (3)..(4): Xaa is C or S
  MOD_RES (18)..(19)..(20)..(21)..(22): Xaa is A or G
  MOD_RES (23)..(24)..(25)..(26): Xaa is A or G or absent
SPXXVPQDLSPISILFIXXXXXXXXXYKQYEMVVKS

SEQ ID NO: 11399 - protein, 39 aa, Artificial Sequence
  Non-cyclic GFR-binding peptide
  MOD_RES (1)..(2)..(36)..(38): Xaa is C or S
  MOD_RES (16)..(17)..(18)..(19)..(20): Xaa is A or G
  MOD_RES (21)..(22)..(23)..(24): Xaa is A or G or absent
XXAPTKLEPLTVLYYXXXXXXXXXEQLSNNMVVRSXGXH

SEQ ID NO: 11400 - protein, 41 aa, Artificial Sequence
  Non-cyclic GFR-binding peptide
  MOD_RES (5)..(6)..(39)..(41): Xaa is C or S
  MOD_RES (20)..(21)..(22)..(23)..(24): Xaa is A or G
  MOD_RES (25)..(26)..(27)..(28): Xaa is A or G or absent
SASPXXVSQDLSPISILFIXXXXXXXXXYKQYEMIVKSXKX

SEQ ID NO: 11401 - protein, 41 aa, Artificial Sequence
  Non-cyclic GFR-binding peptide
  MOD_RES (4)..(38)..(40): Xaa is C or S
  MOD_RES (18)..(19)..(20)..(21)..(22): Xaa is A or G
  MOD_RES (23)..(24)..(25)..(26): Xaa is A or G or absent
KPTXAPTKLEPLTVLYYXXXXXXXXXEQLSNNMVVRSXGXH

SEQ ID NO: 11402 - protein, 35 aa, Artificial Sequence
  Non-cyclic GFR-binding peptide
  MOD_RES (1)..(2)..(33)..(35): Xaa is C or S
XXVPQDLEPLPIVYYVGRTPKVEQLSNMVVKSXKX

SEQ ID NO: 11403 - protein, 37 aa, Artificial Sequence
  Non-cyclic GFR-binding peptide
  MOD_RES (2)..(3)..(35)..(37): Xaa is C or S
TXXVPTRLEPLPIVYYDSANNVVEQLSNDMVVESXGX

SEQ ID NO: 11404 - protein, 36 aa, Artificial Sequence
  Non-cyclic GFR-binding peptide
  MOD_RES (2)..(3): Xaa is C or S
  MOD_RES (17)..(18)..(19)..(20)..(21): Xaa is A or G
  MOD_RES (22)..(23)..(24)..(25): Xaa is A or G or absent
AXXVPTELSPISMLFIXXXXXXXXXYKQYEDMVVEG

SEQ ID NO: 11405 - protein, 38 aa, Artificial Sequence
  Non-cyclic GFR-binding peptide
  MOD_RES (1)..(2)..(36)..(38): Xaa is C or S
  MOD_RES (16)..(17)..(18)..(19)..(20): Xaa is A or G
  MOD_RES (21)..(22)..(23)..(24): Xaa is A or G or absent
XXAPTKLEPLPVVYYXXXXXXXXXEQLSNNMVVRSXGX

SEQ ID NO: 11406 - protein, 38 aa, Artificial Sequence
  Non-cyclic GFR-binding peptide
  MOD_RES (4)..(5): Xaa is C or S
  MOD_RES (19)..(20)..(21)..(22)..(23): Xaa is A or G
  MOD_RES (24)..(25)..(26)..(27): Xaa is A or G or absent
PPTXXVPTRLEPLPIVYYXXXXXXXXXEQLSNDMVVES

SEQ ID NO: 11407 - protein, 38 aa, Artificial Sequence
  Non-cyclic GFR-binding peptide
  MOD_RES (3)..(37): Xaa is C or S
  MOD_RES (17)..(18)..(19)..(20)..(21): Xaa is A or G
  MOD_RES (22)..(23)..(24)..(25): Xaa is A or G or absent
PTXAPTKLEPLPVVYYXXXXXXXXXEQLSNNMVVRSXG

SEQ ID NO: 11408 - protein, 31 aa, Artificial Sequence
  Non-cyclic GFR-binding peptide
VPTELEPLTMLYYDENEKVVEQLSNDMVVEG

SEQ ID NO: 11409 - protein, 39 aa, Artificial Sequence
  Non-cyclic GFR-binding peptide
  MOD_RES (5)..(37)..(39): Xaa is C or S
TKPTXAPTKLEPLPVVYYDDSSNVIEQLSNNMVVRSXGX

SEQ ID NO: 11410 - protein, 37 aa, Artificial Sequence
  Non-cyclic GFR-binding peptide
  MOD_RES (5)..(37): Xaa is C or S
TKPTXAPTKLEPLTVLYYDDSSNVIEQLSNNMVVRSX

SEQ ID NO: 11411 - protein, 33 aa, Artificial Sequence
  Non-cyclic GFR-binding peptide
  MOD_RES (2)..(3): Xaa is C or S
PXXVPQDLSPISILFIVGRTPKVYKQYEMVVKS

SEQ ID NO: 11412 - protein, 38 aa, Artificial Sequence
  Non-cyclic GFR-binding peptide
  MOD_RES (6)..(7): Xaa is C or S
STPPTXXVPTRLSAISILYLDSANNVVLKNYQDMVVES

SEQ ID NO: 11413 - protein, 32 aa, Artificial Sequence
  Non-cyclic GFR-binding peptide
  MOD_RES (1)..(32): Xaa is C or S
XVPQALEPLTILYYVGRKPKVEQLSNMIVRSX

SEQ ID NO: 11414 - protein, 34 aa, Artificial Sequence
  Non-cyclic GFR-binding peptide
  MOD_RES (1)..(32)..(34): Xaa is C or S
XVSQDLSPISILFIIGKTPKIYKQYEMIVKSXKX

SEQ ID NO: 11415 - protein, 32 aa, Artificial Sequence
  Non-cyclic GFR-binding peptide
  MOD_RES (2)..(2): Xaa is C or S
TXAPTKLEPLTVLYYDDSSNVIEQLSNNMVVR

SEQ ID NO: 11416 - protein, 37 aa, Artificial Sequence
  Non-cyclic GFR-binding peptide
  MOD_RES (1)..(2)..(36): Xaa is C or S
  MOD_RES (16)..(17)..(18)..(19)..(20): Xaa is A or G
  MOD_RES (21)..(22)..(23)..(24): Xaa is A or G or absent
XXVPTRLEPLPIVYYXXXXXXXXXEQLSNDMVVESXG

SEQ ID NO: 11417 - protein, 34 aa, Artificial Sequence
  Non-cyclic GFR-binding peptide
  MOD_RES (1)..(32)..(34): Xaa is C or S
XVPQALSPISILFIVGRKPKVYKQYEMIVRSXKX

SEQ ID NO: 11418 - protein, 38 aa, Artificial Sequence
  Non-cyclic GFR-binding peptide
  MOD_RES (3)..(4)..(38): Xaa is C or S
  MOD_RES (18)..(19)..(20)..(21)..(22): Xaa is A or G
  MOD_RES (23)..(24)..(25)..(26): Xaa is A or G or absent
KAXXVPTELSPISMLFIXXXXXXXXXYKQYEDMVVEGX

SEQ ID NO: 11419 - protein, 35 aa, Artificial Sequence
  Non-cyclic GFR-binding peptide
  MOD_RES (34)..(34): Xaa is C or S
  MOD_RES (14)..(15)..(16)..(17)..(18): Xaa is A or G
  MOD_RES (19)..(20)..(21)..(22): Xaa is A or G or absent
APTQLEPLTVLYYXXXXXXXXXEQLSNNMVVRAXG

SEQ ID NO: 11420 - protein, 34 aa, Artificial Sequence
  Non-cyclic GFR-binding peptide
  MOD_RES (1)..(2): Xaa is C or S
  MOD_RES (16)..(17)..(18)..(19)..(20): Xaa is A or G
  MOD_RES (21)..(22)..(23)..(24): Xaa is A or G or absent
XXVPTELEPLPMVYYXXXXXXXXXEQLSNEMVVE

SEQ ID NO: 11421 - protein, 44 aa, Artificial Sequence
  Non-cyclic GFR-binding peptide
  MOD_RES (6)..(7)..(41)..(43): Xaa is C or S
  MOD_RES (21)..(22)..(23)..(24)..(25): Xaa is A or G
  MOD_RES (26)..(27)..(28)..(29): Xaa is A or G or absent
SIPKAXXVPTELEPLPMVYYXXXXXXXXXEQLSNEMVVEGXGXR

SEQ ID NO: 11422 - protein, 38 aa, Artificial Sequence
  Non-cyclic GFR-binding peptide
  MOD_RES (6)..(7): Xaa is C or S
TVPKPXXAPTQLEPLTVLYYDDSSNVIEQLSNNMVVRA

SEQ ID NO: 11423 - protein, 37 aa, Artificial Sequence
  Non-cyclic GFR-binding peptide
  MOD_RES (4)..(5)..(37): Xaa is C or S
PKAXXVPTELEPLPMVYYDENEKVVEQLSNDMVVEGX

SEQ ID NO: 11424 - protein, 37 aa, Artificial Sequence
  Non-cyclic GFR-binding peptide
  MOD_RES (2)..(3)..(35)..(37): Xaa is C or S
PXXAPTQLEPLTVLYYDDSSNVIEQLSNNMVVRAXGX

SEQ ID NO: 11425 - protein, 35 aa, Artificial Sequence
  Non-cyclic GFR-binding peptide
  MOD_RES (1)..(33)..(35): Xaa is C or S
XAPTQLEPLPVVYYDDSSNVIEQLSNNMVVRAXGX

SEQ ID NO: 11426 - protein, 36 aa, Artificial Sequence
  Non-cyclic GFR-binding peptide
  MOD_RES (2)..(3)..(35): Xaa is C or S
TXXVPTRLSAISILYLDSANNVVLKNYQDMVVESXG

SEQ ID NO: 11427 - protein, 37 aa, Artificial Sequence
  Non-cyclic GFR-binding peptide
  MOD_RES (2)..(3)..(35)..(37): Xaa is C or S
PXXAPTKLEPLTVLYYDDSSNVIEQLSNNMVVRSXGX

SEQ ID NO: 11428 - protein, 34 aa, Artificial Sequence
  Non-cyclic GFR-binding peptide
  MOD_RES (3)..(3): Xaa is C or S
PTXAPTKLEPLPVVYYDDSSNVIEQLSNNMVVRS

SEQ ID NO: 11429 - protein, 33 aa, Artificial Sequence
  Non-cyclic GFR-binding peptide
  MOD_RES (2)..(3): Xaa is C or S
AXXVPTELEPLTMLYYDEYDKVVEQLSNEMVVE

SEQ ID NO: 11430 - protein, 33 aa, Artificial Sequence
  Non-cyclic GFR-binding peptide
  MOD_RES (32)..(32): Xaa is C or S
VPTELEPLPMVYYDENEKVVEQLSNDMVVEGXG

SEQ ID NO: 11431 - protein, 38 aa, Artificial Sequence
  Non-cyclic GFR-binding peptide
  MOD_RES (6)..(6): Xaa is C or S
  MOD_RES (20)..(21)..(22)..(23)..(24): Xaa is A or G
  MOD_RES (25)..(26)..(27)..(28): Xaa is A or G or absent
VTKPTXAPTKLSPISVLFIXXXXXXXXXYKQYENMVVR

SEQ ID NO: 11432 - protein, 35 aa, Artificial Sequence
  Non-cyclic GFR-binding peptide
  MOD_RES (4)..(5): Xaa is C or S
PKAXXVPTELEPLPMVYYDENEKVVEQLSNDMVVE

SEQ ID NO: 11433 - protein, 36 aa, Artificial Sequence
  Non-cyclic GFR-binding peptide
  MOD_RES (2)..(36): Xaa is C or S
  MOD_RES (16)..(17)..(18)..(19)..(20): Xaa is A or G
  MOD_RES (21)..(22)..(23)..(24): Xaa is A or G or absent
TXAPTKLEPLPVVYYXXXXXXXXXEQLSNNMVVRSX

SEQ ID NO: 11434 - protein, 38 aa, Artificial Sequence
  Non-cyclic GFR-binding peptide
  MOD_RES (1)..(35)..(37): Xaa is C or S
  MOD_RES (15)..(16)..(17)..(18)..(19): Xaa is A or G
  MOD_RES (20)..(21)..(22)..(23): Xaa is A or G or absent
XVPTRLNAISILYFXXXXXXXXXLKKYRDMVVESXGXR

SEQ ID NO: 11435 - protein, 38 aa, Artificial Sequence
  Non-cyclic GFR-binding peptide
  MOD_RES (5)..(6)..(38): Xaa is C or S
VPKPXXAPTKLEPLTVLYYDDSSNVIEQLSNNMVVRSX

SEQ ID NO: 11436 - protein, 35 aa, Artificial Sequence
  Non-cyclic GFR-binding peptide
  MOD_RES (4)..(5): Xaa is C or S
PPTXXVPTRLEPLPIVYYDSANNVVEQLSNDMVVE

SEQ ID NO: 11437 - protein, 39 aa, Artificial Sequence
  Non-cyclic GFR-binding peptide
  MOD_RES (3)..(4)..(38): Xaa is C or S
  MOD_RES (18)..(19)..(20)..(21)..(22): Xaa is A or G
  MOD_RES (23)..(24)..(25)..(26): Xaa is A or G or absent
PTXXVPTRLSAISILYLXXXXXXXXXLKNYQDMVVESXG

SEQ ID NO: 11438 - protein, 36 aa, Artificial Sequence
  Non-cyclic GFR-binding peptide
  MOD_RES (33)..(35): Xaa is C or S
  MOD_RES (14)..(15)..(16)..(17)..(18): Xaa is A or G
  MOD_RES (19)..(20)..(21)..(22): Xaa is A or G or absent
VPQDLSPISILFIXXXXXXXXXYKQYEMVVKSXKXS

SEQ ID NO: 11439 - protein, 34 aa, Artificial Sequence
  Non-cyclic GFR-binding peptide
  MOD_RES (1)..(32)..(34): Xaa is C or S
XVPQDLEPLPIVYYVGRTPKVEQLSNMVVKSXKX

SEQ ID NO: 11440 - protein, 38 aa, Artificial Sequence
  Non-cyclic GFR-binding peptide
  MOD_RES (2)..(3)..(35)..(37): Xaa is C or S
PXXAPTQLEPLTVLYYDDSSNVIEQLSNNMVVRAXGXH

SEQ ID NO: 11441 - protein, 40 aa, Artificial Sequence
  Non-cyclic GFR-binding peptide
  MOD_RES (2)..(3)..(37)..(39): Xaa is C or S
  MOD_RES (17)..(18)..(19)..(20)..(21): Xaa is A or G
  MOD_RES (22)..(23)..(24)..(25): Xaa is A or G or absent
AXXVPTELEPLPMVYYXXXXXXXXXEQLSNDMVVEGXGXR

SEQ ID NO: 11442 - protein, 38 aa, Artificial Sequence
  Non-cyclic GFR-binding peptide
  MOD_RES (4)..(38): Xaa is C or S
  MOD_RES (18)..(19)..(20)..(21)..(22): Xaa is A or G
  MOD_RES (23)..(24)..(25)..(26): Xaa is A or G or absent
KPTXAPTKLEPLPVVYYXXXXXXXXXEQLSNNMVVRSX

SEQ ID NO: 11443 - protein, 33 aa, Artificial Sequence
  Non-cyclic GFR-binding peptide
  MOD_RES (14)..(15)..(16)..(17)..(18): Xaa is A or G
  MOD_RES (19)..(20)..(21)..(22): Xaa is A or G or absent
VPTELEPLTMLYYXXXXXXXXXEQLSNEMVVEG

SEQ ID NO: 11444 - protein, 41 aa, Artificial Sequence
  Non-cyclic GFR-binding peptide
  MOD_RES (5)..(6)..(38)..(40): Xaa is C or S
TPPTXXVPTRLEPLPIVYYDSANNVVEQLSNDMVVESXGXR

SEQ ID NO: 11445 - protein, 36 aa, Artificial Sequence
  Non-cyclic GFR-binding peptide
  MOD_RES (3)..(4)..(36): Xaa is C or S
PTXXVPTRLSAISILYLDSANNVVLKNYQDMVVESX

SEQ ID NO: 11446 - protein, 37 aa, Artificial Sequence
  Non-cyclic GFR-binding peptide
  MOD_RES (2)..(3)..(34)..(36): Xaa is C or S
PXXVSQDLEPLPIVYYIGKTPKIEQLSNMIVKSXKXS

SEQ ID NO: 11447 - protein, 38 aa, Artificial Sequence
  Non-cyclic GFR-binding peptide
  MOD_RES (5)..(6): Xaa is C or S
  MOD_RES (20)..(21)..(22)..(23)..(24): Xaa is A or G
  MOD_RES (25)..(26)..(27)..(28): Xaa is A or G or absent
TPPTXXVPTRLSAISILYLXXXXXXXXXLKNYQDMVVE

SEQ ID NO: 11448 - protein, 37 aa, Artificial Sequence
  Non-cyclic GFR-binding peptide
  MOD_RES (5)..(6): Xaa is C or S
IPKAXXVPTELSPISMLFIDEYDKVVYKQYEEMVVEG

SEQ ID NO: 11449 - protein, 41 aa, Artificial Sequence
  Non-cyclic GFR-binding peptide
  MOD_RES (3)..(4)..(38)..(40): Xaa is C or S
  MOD_RES (18)..(19)..(20)..(21)..(22): Xaa is A or G
  MOD_RES (23)..(24)..(25)..(26): Xaa is A or G or absent
KPXXAPTQLEPLTVLYYXXXXXXXXXEQLSNNMVVRAXGXH

SEQ ID NO: 11450 - protein, 39 aa, Artificial Sequence
  Non-cyclic GFR-binding peptide
  MOD_RES (4)..(5)..(37)..(39): Xaa is C or S
PKAXXVPTELSPISMLFIDEYDKVVYKQYEEMVVEGXGX

SEQ ID NO: 11451 - protein, 32 aa, Artificial Sequence
  Non-cyclic GFR-binding peptide
  MOD_RES (1)..(2): Xaa is C or S
XXVPTELEPLTMLYYDENEKVVEQLSNDMVVE

SEQ ID NO: 11452 - protein, 35 aa, Artificial Sequence
  Non-cyclic GFR-binding peptide
  MOD_RES (33)..(35): Xaa is C or S
  MOD_RES (14)..(15)..(16)..(17)..(18): Xaa is A or G
  MOD_RES (19)..(20)..(21)..(22): Xaa is A or G or absent
VPQDLSPISILFIXXXXXXXXXYKQYEMVVKSXKX

SEQ ID NO: 11453 - protein, 39 aa, Artificial Sequence
  Non-cyclic GFR-binding peptide
  MOD_RES (4)..(5)..(39): Xaa is C or S
  MOD_RES (19)..(20)..(21)..(22)..(23): Xaa is A or G
  MOD_RES (24)..(25)..(26)..(27): Xaa is A or G or absent
PPTXXVPTRLEPLTILYYXXXXXXXXXEQLSNDMVVESX

SEQ ID NO: 11454 - protein, 37 aa, Artificial Sequence
  Non-cyclic GFR-binding peptide
  MOD_RES (2)..(3)..(37): Xaa is C or S
  MOD_RES (17)..(18)..(19)..(20)..(21): Xaa is A or G
  MOD_RES (22)..(23)..(24)..(25): Xaa is A or G or absent
PXXAPTQLEPLPVVYYXXXXXXXXXEQLSNNMVVRAX

SEQ ID NO: 11455 - protein, 34 aa, Artificial Sequence
  Non-cyclic GFR-binding peptide
  MOD_RES (2)..(2): Xaa is C or S
  MOD_RES (16)..(17)..(18)..(19)..(20): Xaa is A or G
  MOD_RES (21)..(22)..(23)..(24): Xaa is A or G or absent
TXAPTKLEPLPVVYYXXXXXXXXXEQLSNNMVVR

SEQ ID NO: 11456 - protein, 38 aa, Artificial Sequence
  Non-cyclic GFR-binding peptide
  MOD_RES (6)..(7): Xaa is C or S
STPPTXXVPTRLNAISILYFDSANNVVLKKYRDMVVES

SEQ ID NO: 11457 - protein, 36 aa, Artificial Sequence
  Non-cyclic GFR-binding peptide
  MOD_RES (2)..(3)..(35): Xaa is C or S
TXXVPTRLEPLTILYYDSANNVVEQLSNDMVVESXG

SEQ ID NO: 11458 - protein, 34 aa, Artificial Sequence
  Non-cyclic GFR-binding peptide
  MOD_RES (1)..(33): Xaa is C or S
XVPTRLEPLTILYYDSANNVVEQLSNDMVVESXG

SEQ ID NO: 11459 - protein, 36 aa, Artificial Sequence
  Non-cyclic GFR-binding peptide
  MOD_RES (1)..(2)..(36): Xaa is C or S
  MOD_RES (16)..(17)..(18)..(19)..(20): Xaa is A or G
  MOD_RES (21)..(22)..(23)..(24): Xaa is A or G or absent
XXVPTELEPLPMVYYXXXXXXXXXEQLSNEMVVEGX

SEQ ID NO: 11460 - protein, 44 aa, Artificial Sequence
  Non-cyclic GFR-binding peptide
  MOD_RES (6)..(7)..(41)..(43): Xaa is C or S
  MOD_RES (21)..(22)..(23)..(24)..(25): Xaa is A or G
  MOD_RES (26)..(27)..(28)..(29): Xaa is A or G or absent
KIPKAXXVPTELEPLTMLYYXXXXXXXXXEQLSNDMVVEGXGXR

SEQ ID NO: 11461 - protein, 41 aa, Artificial Sequence
  Non-cyclic GFR-binding peptide
  MOD_RES (5)..(6)..(40): Xaa is C or S
  MOD_RES (20)..(21)..(22)..(23)..(24): Xaa is A or G
  MOD_RES (25)..(26)..(27)..(28): Xaa is A or G or absent
IPKAXXVPTELEPLPMVYYXXXXXXXXXEQLSNEMVVEGXG

SEQ ID NO: 11462 - protein, 33 aa, Artificial Sequence
  Non-cyclic GFR-binding peptide
  MOD_RES (1)..(2)..(33): Xaa is C or S
XXVPQALSPISILFIVGRKPKVYKQYEMIVRSX

SEQ ID NO: 11463 - protein, 38 aa, Artificial Sequence
  Non-cyclic GFR-binding peptide
  MOD_RES (4)..(5)..(36)..(38): Xaa is C or S
AAPXXVPQALSPISILFIVGRKPKVYKQYEMIVRSXKX

SEQ ID NO: 11464 - protein, 37 aa, Artificial Sequence
  Non-cyclic GFR-binding peptide
  MOD_RES (4)..(5)..(37): Xaa is C or S
PKAXXVPTELSPISMLFIDENEKVVYKQYEDMVVEGX

SEQ ID NO: 11465 - protein, 36 aa, Artificial Sequence
  Non-cyclic GFR-binding peptide
  MOD_RES (5)..(6): Xaa is C or S
TPPTXXVPTRLNAISILYFDSANNVVLKKYRDMVVE

SEQ ID NO: 11466 - protein, 38 aa, Artificial Sequence
  Non-cyclic GFR-binding peptide
  MOD_RES (4)..(36)..(38): Xaa is C or S
KPTXAPTKLEPLPVVYYDDSSNVIEQLSNNMVVRSXGX

SEQ ID NO: 11467 - protein, 39 aa, Artificial Sequence
  Non-cyclic GFR-binding peptide
  MOD_RES (3)..(4)..(36)..(38): Xaa is C or S
PTXXVPTRLEPLTILYYDSANNVVEQLSNDMVVESXGXR

SEQ ID NO: 11468 - protein, 42 aa, Artificial Sequence
  Non-cyclic GFR-binding peptide
  MOD_RES (6)..(7)..(39)..(41): Xaa is C or S
YVPKPXXAPTKLSPISVLFIDDSSNVIYKQYENMVVRSXGXH

SEQ ID NO: 11469 - protein, 38 aa, Artificial Sequence
  Non-cyclic GFR-binding peptide
  MOD_RES (3)..(4)..(36)..(38): Xaa is C or S
KAXXVPTELEPLTMLYYDEYDKVVEQLSNEMVVEGXGX

SEQ ID NO: 11470 - protein, 35 aa, Artificial Sequence
  Non-cyclic GFR-binding peptide
  MOD_RES (34)..(34): Xaa is C or S
  MOD_RES (14)..(15)..(16)..(17)..(18): Xaa is A or G
  MOD_RES (19)..(20)..(21)..(22): Xaa is A or G or absent
VPTRLNAISILYFXXXXXXXXXLKKYRDMVVESXG

SEQ ID NO: 11471 - protein, 42 aa, Artificial Sequence
  Non-cyclic GFR-binding peptide
  MOD_RES (7)..(39)..(41): Xaa is C or S
HVTKPTXAPTKLSPISVLFIDDSSNVIYKQYENMVVRSXGXH

SEQ ID NO: 11472 - protein, 40 aa, Artificial Sequence
  Non-cyclic GFR-binding peptide
  MOD_RES (6)..(7)..(39): Xaa is C or S
SIPKAXXVPTELSPISMLFIDEYDKVVYKQYEEMVVEGXG

SEQ ID NO: 11473 - protein, 41 aa, Artificial Sequence
  Non-cyclic GFR-binding peptide
  MOD_RES (4)..(5)..(39)..(41): Xaa is C or S
  MOD_RES (19)..(20)..(21)..(22)..(23): Xaa is A or G
  MOD_RES (24)..(25)..(26)..(27): Xaa is A or G or absent
PPTXXVPTRLSAISILYLXXXXXXXXXLKNYQDMVVESXGX

SEQ ID NO: 11474 - protein, 33 aa, Artificial Sequence
  Non-cyclic GFR-binding peptide
  MOD_RES (32)..(32): Xaa is C or S
APTKLEPLPVVYYDDSSNVIEQLSNNMVVRSXG

SEQ ID NO: 11475 - protein, 39 aa, Artificial Sequence
  Non-cyclic GFR-binding peptide
  MOD_RES (2)..(36)..(38): Xaa is C or S
  MOD_RES (16)..(17)..(18)..(19)..(20): Xaa is A or G
  MOD_RES (21)..(22)..(23)..(24): Xaa is A or G or absent
TXAPTKLEPLPVVYYXXXXXXXXXEQLSNNMVVRSXGXH

SEQ ID NO: 11476 - protein, 38 aa, Artificial Sequence
  Non-cyclic GFR-binding peptide
  MOD_RES (1)..(2)..(36)..(38): Xaa is C or S
  MOD_RES (16)..(17)..(18)..(19)..(20): Xaa is A or G
  MOD_RES (21)..(22)..(23)..(24): Xaa is A or G or absent
XXVPTELEPLPMVYYXXXXXXXXXEQLSNEMVVEGXGX

SEQ ID NO: 11477 - protein, 39 aa, Artificial Sequence
  Non-cyclic GFR-binding peptide
  MOD_RES (5)..(6)..(37)..(39): Xaa is C or S
SASPXXVPQDLSPISILFIVGRTPKVYKQYEMVVKSXKX

SEQ ID NO: 11478 - protein, 38 aa, Artificial Sequence
  Non-cyclic GFR-binding peptide
  MOD_RES (3)..(4)..(36)..(38): Xaa is C or S
KAXXVPTELEPLPMVYYDENEKVVEQLSNDMVVEGXGX

SEQ ID NO: 11479 - protein, 35 aa, Artificial Sequence
  Non-cyclic GFR-binding peptide
  MOD_RES (4)..(5): Xaa is C or S
PKAXXVPTELEPLTMLYYDEYDKVVEQLSNEMVVE

SEQ ID NO: 11480 - protein, 34 aa, Artificial Sequence
  Non-cyclic GFR-binding peptide
  MOD_RES (1)..(33): Xaa is C or S
XAPTKLEPLTVLYYDDSSNVIEQLSNNMVVRSXG

SEQ ID NO: 11481 - protein, 38 aa, Artificial Sequence
  Non-cyclic GFR-binding peptide
  MOD_RES (2)..(36)..(38): Xaa is C or S
  MOD_RES (16)..(17)..(18)..(19)..(20): Xaa is A or G
  MOD_RES (21)..(22)..(23)..(24): Xaa is A or G or absent
TXAPTKLSPISVLFIXXXXXXXXXYKQYENMVVRSXGX

SEQ ID NO: 11482 - protein, 38 aa, Artificial Sequence
  Non-cyclic GFR-binding peptide
  MOD_RES (5)..(6)..(38): Xaa is C or S
TPPTXXVPTRLEPLTILYYDSANNVVEQLSNDMVVESX

SEQ ID NO: 11483 - protein, 38 aa, Artificial Sequence
  Non-cyclic GFR-binding peptide
  MOD_RES (3)..(4)..(38): Xaa is C or S
  MOD_RES (18)..(19)..(20)..(21)..(22): Xaa is A or G
  MOD_RES (23)..(24)..(25)..(26): Xaa is A or G or absent
KAXXVPTELEPLTMLYYXXXXXXXXXEQLSNEMVVEGX

SEQ ID NO: 11484 - protein, 32 aa, Artificial Sequence
  Non-cyclic GFR-binding peptide
  MOD_RES (14)..(15)..(16)..(17)..(18): Xaa is A or G
  MOD_RES (19)..(20)..(21)..(22): Xaa is A or G or absent
VPTRLSAISILYLXXXXXXXXXLKNYQDMVVE

SEQ ID NO: 11485 - protein, 38 aa, Artificial Sequence
  Non-cyclic GFR-binding peptide
  MOD_RES (3)..(4)..(36)..(38): Xaa is C or S
KAXXVPTELSPISMLFIDENEKVVYKQYEDMVVEGXGX

SEQ ID NO: 11486 - protein, 33 aa, Artificial Sequence
  Non-cyclic GFR-binding peptide
  MOD_RES (1)..(1): Xaa is C or S
  MOD_RES (15)..(16)..(17)..(18)..(19): Xaa is A or G
  MOD_RES (20)..(21)..(22)..(23): Xaa is A or G or absent
XVPQALSPISILFIXXXXXXXXXYKQYEMIVRS

SEQ ID NO: 11487 - protein, 36 aa, Artificial Sequence
  Non-cyclic GFR-binding peptide
  MOD_RES (1)..(2)..(36): Xaa is C or S
  MOD_RES (16)..(17)..(18)..(19)..(20): Xaa is A or G
  MOD_RES (21)..(22)..(23)..(24): Xaa is A or G or absent
XXAPTQLSPISVLFIXXXXXXXXXYKQYENMVVRAX

SEQ ID NO: 11488 - protein, 32 aa, Artificial Sequence
  Non-cyclic GFR-binding peptide
  MOD_RES (14)..(15)..(16)..(17)..(18): Xaa is A or G
  MOD_RES (19)..(20)..(21)..(22): Xaa is A or G or absent
APTKLSPISVLFIXXXXXXXXXYKQYENMVVR

SEQ ID NO: 11489 - protein, 33 aa, Artificial Sequence
  Non-cyclic GFR-binding peptide
  MOD_RES (1)..(33): Xaa is C or S
XAPTKLEPLPVVYYDDSSNVIEQLSNNMVVRSX

SEQ ID NO: 11490 - protein, 38 aa, Artificial Sequence
  Non-cyclic GFR-binding peptide
  MOD_RES (6)..(6): Xaa is C or S
  MOD_RES (20)..(21)..(22)..(23)..(24): Xaa is A or G
  MOD_RES (25)..(26)..(27)..(28): Xaa is A or G or absent
VTKPTXAPTKLEPLTVLYYXXXXXXXXXEQLSNNMVVR

SEQ ID NO: 11491 - protein, 39 aa, Artificial Sequence
  Non-cyclic GFR-binding peptide
  MOD_RES (6)..(7)..(39): Xaa is C or S
SIPKAXXVPTELEPLTMLYYDEYDKVVEQLSNEMVVEGX

SEQ ID NO: 11492 - protein, 36 aa, Artificial Sequence
  Non-cyclic GFR-binding peptide
  MOD_RES (4)..(5): Xaa is C or S
PKPXXAPTQLEPLPVVYYDDSSNVIEQLSNNMVVRA

SEQ ID NO: 11493 - protein, 42 aa, Artificial Sequence
  Non-cyclic GFR-binding peptide
  MOD_RES (4)..(5)..(39)..(41): Xaa is C or S
  MOD_RES (19)..(20)..(21)..(22)..(23): Xaa is A or G
  MOD_RES (24)..(25)..(26)..(27): Xaa is A or G or absent
PKAXXVPTELEPLPMVYYXXXXXXXXXEQLSNEMVVEGXGXR

SEQ ID NO: 11494 - protein, 32 aa, Artificial Sequence
  Non-cyclic GFR-binding peptide
  MOD_RES (14)..(15)..(16)..(17)..(18): Xaa is A or G
  MOD_RES (19)..(20)..(21)..(22): Xaa is A or G or absent
VSQDLSPISILFIXXXXXXXXXYKQYEMIVKS

SEQ ID NO: 11495 - protein, 40 aa, Artificial Sequence
  Non-cyclic GFR-binding peptide
  MOD_RES (4)..(5)..(37)..(39): Xaa is C or S
PKAXXVPTELEPLPMVYYDENEKVVEQLSNDMVVEGXGXR

SEQ ID NO: 11496 - protein, 39 aa, Artificial Sequence
  Non-cyclic GFR-binding peptide
  MOD_RES (2)..(3)..(36)..(38): Xaa is C or S
  MOD_RES (17)..(18)..(19)..(20)..(21): Xaa is A or G
  MOD_RES (22)..(23)..(24)..(25): Xaa is A or G or absent
PXXVPQALEPLTILYYXXXXXXXXXEQLSNMIVRSXKXS

SEQ ID NO: 11497 - protein, 35 aa, Artificial Sequence
  Non-cyclic GFR-binding peptide
  MOD_RES (1)..(32)..(34): Xaa is C or S
XVPQDLEPLPIVYYVGRTPKVEQLSNMVVKSXKXS

SEQ ID NO: 11498 - protein, 36 aa, Artificial Sequence
  Non-cyclic GFR-binding peptide
  MOD_RES (4)..(5): Xaa is C or S
PPTXXVPTRLNAISILYFDSANNVVLKKYRDMVVES

SEQ ID NO: 11499 - protein, 34 aa, Artificial Sequence
  Non-cyclic GFR-binding peptide
  MOD_RES (31)..(33): Xaa is C or S
VPQALEPLTILYYVGRKPKVEQLSNMIVRSXKXS

SEQ ID NO: 11500 - protein, 37 aa, Artificial Sequence
  Non-cyclic GFR-binding peptide
  MOD_RES (1)..(34)..(36): Xaa is C or S
  MOD_RES (15)..(16)..(17)..(18)..(19): Xaa is A or G
  MOD_RES (20)..(21)..(22)..(23): Xaa is A or G or absent
XVPQALEPLTILYYXXXXXXXXXEQLSNMIVRSXKXS

SEQ ID NO: 11501 - protein, 37 aa, Artificial Sequence
  Non-cyclic GFR-binding peptide
  MOD_RES (34)..(36): Xaa is C or S
  MOD_RES (14)..(15)..(16)..(17)..(18): Xaa is A or G
  MOD_RES (19)..(20)..(21)..(22): Xaa is A or G or absent
VPTELEPLPMVYYXXXXXXXXXEQLSNEMVVEGXGXR

SEQ ID NO: 11502 - protein, 33 aa, Artificial Sequence
  Non-cyclic GFR-binding peptide
  MOD_RES (32)..(32): Xaa is C or S
VPTRLEPLPIVYYDSANNVVEQLSNDMVVESXG

SEQ ID NO: 11503 - protein, 35 aa, Artificial Sequence
  Non-cyclic GFR-binding peptide
  MOD_RES (2)..(3)..(35): Xaa is C or S
AXXVPTELEPLPMVYYDENEKVVEQLSNDMVVEGX

SEQ ID NO: 11504 - protein, 40 aa, Artificial Sequence
  Non-cyclic GFR-binding peptide
  MOD_RES (4)..(5)..(37)..(39): Xaa is C or S
PKPXXAPTKLSPISVLFIDDSSNVIYKQYENMVVRSXGXH

SEQ ID NO: 11505 - protein, 32 aa, Artificial Sequence
  Non-cyclic GFR-binding peptide
  MOD_RES (31)..(31): Xaa is C or S
VPQDLSPISILFIVGRTPKVYKQYEMVVKSXK

SEQ ID NO: 11506 - protein, 36 aa, Artificial Sequence
  Non-cyclic GFR-binding peptide
  MOD_RES (1)..(2)..(35): Xaa is C or S
  MOD_RES (16)..(17)..(18)..(19)..(20): Xaa is A or G
  MOD_RES (21)..(22)..(23)..(24): Xaa is A or G or absent
XXVPQDLEPLPIVYYXXXXXXXXXEQLSNMVVKSXK

SEQ ID NO: 11507 - protein, 36 aa, Artificial Sequence
  Non-cyclic GFR-binding peptide
  MOD_RES (1)..(2)..(36): Xaa is C or S
  MOD_RES (16)..(17)..(18)..(19)..(20): Xaa is A or G
  MOD_RES (21)..(22)..(23)..(24): Xaa is A or G or absent
XXVPTRLNAISILYFXXXXXXXXXLKKYRDMVVESX

SEQ ID NO: 11508 - protein, 34 aa, Artificial Sequence
  Non-cyclic GFR-binding peptide
  MOD_RES (1)..(2): Xaa is C or S
  MOD_RES (16)..(17)..(18)..(19)..(20): Xaa is A or G
  MOD_RES (21)..(22)..(23)..(24): Xaa is A or G or absent
XXVPTRLNAISILYFXXXXXXXXXLKKYRDMVVE

SEQ ID NO: 11509 - protein, 36 aa, Artificial Sequence
  Non-cyclic GFR-binding peptide
  MOD_RES (2)..(3): Xaa is C or S
  MOD_RES (17)..(18)..(19)..(20)..(21): Xaa is A or G
  MOD_RES (22)..(23)..(24)..(25): Xaa is A or G or absent
TXXVPTRLEPLPIVYYXXXXXXXXXEQLSNDMVVES

SEQ ID NO: 11510 - protein, 33 aa, Artificial Sequence
  Non-cyclic GFR-binding peptide
  MOD_RES (1)..(32): Xaa is C or S
XVPQALSPISILFIVGRKPKVYKQYEMIVRSXK

SEQ ID NO: 11511 - protein, 36 aa, Artificial Sequence
  Non-cyclic GFR-binding peptide
  MOD_RES (4)..(5): Xaa is C or S
PKPXXAPTKLSPISVLFIDDSSNVIYKQYENMVVRS

SEQ ID NO: 11512 - protein, 36 aa, Artificial Sequence
  Non-cyclic GFR-binding peptide
  MOD_RES (2)..(3)..(35): Xaa is C or S
PXXAPTQLSPISVLFIDDSSNVIYKQYENMVVRAXG

SEQ ID NO: 11513 - protein, 35 aa, Artificial Sequence
  Non-cyclic GFR-binding peptide
  MOD_RES (2)..(3): Xaa is C or S
  MOD_RES (17)..(18)..(19)..(20)..(21): Xaa is A or G
  MOD_RES (22)..(23)..(24)..(25): Xaa is A or G or absent
PXXVSQDLEPLPIVYYXXXXXXXXXEQLSNMIVKS

SEQ ID NO: 11514 - protein, 42 aa, Artificial Sequence
  Non-cyclic GFR-binding peptide
  MOD_RES (6)..(7)..(39)..(41): Xaa is C or S
YVPKPXXAPTKLEPLPVVYYDDSSNVIEQLSNNMVVRSXGXH

SEQ ID NO: 11515 - protein, 34 aa, Artificial Sequence
  Non-cyclic GFR-binding peptide
  MOD_RES (3)..(3): Xaa is C or S
PTXAPTKLSPISVLFIDDSSNVIYKQYENMVVRS

SEQ ID NO: 11516 - protein, 39 aa, Artificial Sequence
  Non-cyclic GFR-binding peptide
  MOD_RES (6)..(38): Xaa is C or S
VTKPTXAPTKLEPLPVVYYDDSSNVIEQLSNNMVVRSXG

SEQ ID NO: 11517 - protein, 34 aa, Artificial Sequence
  Non-cyclic GFR-binding peptide
  MOD_RES (1)..(2): Xaa is C or S
  MOD_RES (16)..(17)..(18)..(19)..(20): Xaa is A or G
  MOD_RES (21)..(22)..(23)..(24): Xaa is A or G or absent
XXVPQALEPLTILYYXXXXXXXXXEQLSNMIVRS

SEQ ID NO: 11518 - protein, 35 aa, Artificial Sequence
  Non-cyclic GFR-binding peptide
  MOD_RES (32)..(34): Xaa is C or S
VPTELEPLPMVYYDEYDKVVEQLSNEMVVEGXGXR

SEQ ID NO: 11519 - protein, 36 aa, Artificial Sequence
  Non-cyclic GFR-binding peptide
  MOD_RES (1)..(33)..(35): Xaa is C or S
XAPTQLEPLTVLYYDDSSNVIEQLSNNMVVRAXGXH

SEQ ID NO: 11520 - protein, 36 aa, Artificial Sequence
  Non-cyclic GFR-binding peptide
  MOD_RES (2)..(3): Xaa is C or S
  MOD_RES (17)..(18)..(19)..(20)..(21): Xaa is A or G
  MOD_RES (22)..(23)..(24)..(25): Xaa is A or G or absent
PXXAPTQLEPLPVVYYXXXXXXXXXEQLSNNMVVRA

SEQ ID NO: 11521 - protein, 37 aa, Artificial Sequence
  Non-cyclic GFR-binding peptide
  MOD_RES (6)..(7): Xaa is C or S
TVPKPXXAPTQLEPLPVVYYDDSSNVIEQLSNNMVVR

SEQ ID NO: 11522 - protein, 36 aa, Artificial Sequence
  Non-cyclic GFR-binding peptide
  MOD_RES (4)..(5): Xaa is C or S
PKPXXAPTQLSPISVLFIDDSSNVIYKQYENMVVRA

SEQ ID NO: 11523 - protein, 36 aa, Artificial Sequence
  Non-cyclic GFR-binding peptide
  MOD_RES (5)..(6): Xaa is C or S
VPKPXXAPTKLSPISVLFIDDSSNVIYKQYENMVVR

SEQ ID NO: 11524 - protein, 33 aa, Artificial Sequence
  Non-cyclic GFR-binding peptide
  MOD_RES (32)..(32): Xaa is C or S
VPTELEPLTMLYYDEYDKVVEQLSNEMVVEGXG

SEQ ID NO: 11525 - protein, 34 aa, Artificial Sequence
  Non-cyclic GFR-binding peptide
  MOD_RES (1)..(2)..(34): Xaa is C or S
XXAPTKLEPLTVLYYDDSSNVIEQLSNNMVVRSX

SEQ ID NO: 11526 - protein, 37 aa, Artificial Sequence
  Non-cyclic GFR-binding peptide
  MOD_RES (4)..(36): Xaa is C or S
KPTXAPTKLEPLPVVYYDDSSNVIEQLSNNMVVRSXG

SEQ ID NO: 11527 - protein, 37 aa, Artificial Sequence
  Non-cyclic GFR-binding peptide
  MOD_RES (1)..(35)..(37): Xaa is C or S
  MOD_RES (15)..(16)..(17)..(18)..(19): Xaa is A or G
  MOD_RES (20)..(21)..(22)..(23): Xaa is A or G or absent
XAPTQLSPISVLFIXXXXXXXXXYKQYENMVVRAXGX

SEQ ID NO: 11528 - protein, 37 aa, Artificial Sequence
  Non-cyclic GFR-binding peptide
  MOD_RES (5)..(6): Xaa is C or S
IPKAXXVPTELEPLTMLYYDENEKVVEQLSNDMVVEG

SEQ ID NO: 11529 - protein, 36 aa, Artificial Sequence
  Non-cyclic GFR-binding peptide
  MOD_RES (1)..(34)..(36): Xaa is C or S
  MOD_RES (15)..(16)..(17)..(18)..(19): Xaa is A or G
  MOD_RES (20)..(21)..(22)..(23): Xaa is A or G or absent
XVSQDLEPLPIVYYXXXXXXXXXEQLSNMIVKSXKX

SEQ ID NO: 11530 - protein, 38 aa, Artificial Sequence
  Non-cyclic GFR-binding peptide
  MOD_RES (6)..(6): Xaa is C or S
  MOD_RES (20)..(21)..(22)..(23)..(24): Xaa is A or G
  MOD_RES (25)..(26)..(27)..(28): Xaa is A or G or absent
VTKPTXAPTKLEPLPVVYYXXXXXXXXXEQLSNNMVVR

SEQ ID NO: 11531 - protein, 36 aa, Artificial Sequence
  Non-cyclic GFR-binding peptide
  MOD_RES (1)..(2)..(36): Xaa is C or S
  MOD_RES (16)..(17)..(18)..(19)..(20): Xaa is A or G
  MOD_RES (21)..(22)..(23)..(24): Xaa is A or G or absent
XXAPTKLEPLPVVYYXXXXXXXXXEQLSNNMVVRSX

SEQ ID NO: 11532 - protein, 35 aa, Artificial Sequence
  Non-cyclic GFR-binding peptide
  MOD_RES (1)..(33)..(35): Xaa is C or S
XAPTQLSPISVLFIDDSSNVIYKQYENMVVRAXGX

SEQ ID NO: 11533 - protein, 39 aa, Artificial Sequence
  Non-cyclic GFR-binding peptide
  MOD_RES (3)..(4)..(37)..(39): Xaa is C or S
  MOD_RES (18)..(19)..(20)..(21)..(22): Xaa is A or G
  MOD_RES (23)..(24)..(25)..(26): Xaa is A or G or absent
APXXVPQALEPLTILYYXXXXXXXXXEQLSNMIVRSXKX

SEQ ID NO: 11534 - protein, 35 aa, Artificial Sequence
  Non-cyclic GFR-binding peptide
  MOD_RES (32)..(34): Xaa is C or S
APTQLSPISVLFIDDSSNVIYKQYENMVVRAXGXH

SEQ ID NO: 11535 - protein, 37 aa, Artificial Sequence
  Non-cyclic GFR-binding peptide
  MOD_RES (4)..(5): Xaa is C or S
  MOD_RES (19)..(20)..(21)..(22)..(23): Xaa is A or G
  MOD_RES (24)..(25)..(26)..(27): Xaa is A or G or absent
ASPXXVPQDLSPISILFIXXXXXXXXXYKQYEMVVKS

SEQ ID NO: 11536 - protein, 39 aa, Artificial Sequence
  Non-cyclic GFR-binding peptide
  MOD_RES (3)..(4)..(37)..(39): Xaa is C or S
  MOD_RES (18)..(19)..(20)..(21)..(22): Xaa is A or G
  MOD_RES (23)..(24)..(25)..(26): Xaa is A or G or absent
SPXXVPQDLSPISILFIXXXXXXXXXYKQYEMVVKSXKX

SEQ ID NO: 11537 - protein, 39 aa, Artificial Sequence
  Non-cyclic GFR-binding peptide
  MOD_RES (2)..(3)..(37)..(39): Xaa is C or S
  MOD_RES (17)..(18)..(19)..(20)..(21): Xaa is A or G
  MOD_RES (22)..(23)..(24)..(25): Xaa is A or G or absent
PXXAPTKLEPLTVLYYXXXXXXXXXEQLSNNMVVRSXGX

SEQ ID NO: 11538 - protein, 33 aa, Artificial Sequence
  Non-cyclic GFR-binding peptide
  MOD_RES (1)..(1): Xaa is C or S
  MOD_RES (15)..(16)..(17)..(18)..(19): Xaa is A or G
  MOD_RES (20)..(21)..(22)..(23): Xaa is A or G or absent
XVPTELSPISMLFIXXXXXXXXXYKQYEEMVVE

SEQ ID NO: 11539 - protein, 38 aa, Artificial Sequence
  Non-cyclic GFR-binding peptide
  MOD_RES (2)..(3)..(37): Xaa is C or S
  MOD_RES (17)..(18)..(19)..(20)..(21): Xaa is A or G
  MOD_RES (22)..(23)..(24)..(25): Xaa is A or G or absent
AXXVPTELEPLTMLYYXXXXXXXXXEQLSNDMVVEGXG

SEQ ID NO: 11540 - protein, 39 aa, Artificial Sequence
  Non-cyclic GFR-binding peptide
  MOD_RES (3)..(4)..(38): Xaa is C or S
  MOD_RES (18)..(19)..(20)..(21)..(22): Xaa is A or G
  MOD_RES (23)..(24)..(25)..(26): Xaa is A or G or absent
KAXXVPTELEPLTMLYYXXXXXXXXXEQLSNEMVVEGXG

SEQ ID NO: 11541 - protein, 39 aa, Artificial Sequence
  Non-cyclic GFR-binding peptide
  MOD_RES (5)..(6)..(37)..(39): Xaa is C or S
SASPXXVPQDLEPLPIVYYVGRTPKVEQLSNMVVKSXKX

SEQ ID NO: 11542 - protein, 34 aa, Artificial Sequence
  Non-cyclic GFR-binding peptide
  MOD_RES (1)..(2): Xaa is C or S
  MOD_RES (16)..(17)..(18)..(19)..(20): Xaa is A or G
  MOD_RES (21)..(22)..(23)..(24): Xaa is A or G or absent
XXVPTELEPLTMLYYXXXXXXXXXEQLSNEMVVE

SEQ ID NO: 11543 - protein, 33 aa, Artificial Sequence
  Non-cyclic GFR-binding peptide
  MOD_RES (2)..(3): Xaa is C or S
AXXVPTELEPLPMVYYDENEKVVEQLSNDMVVE

SEQ ID NO: 11544 - protein, 40 aa, Artificial Sequence
  Non-cyclic GFR-binding peptide
  MOD_RES (6)..(7)..(40): Xaa is C or S
  MOD_RES (21)..(22)..(23)..(24)..(25): Xaa is A or G
  MOD_RES (26)..(27)..(28)..(29): Xaa is A or G or absent
ASASPXXVPQDLSPISILFIXXXXXXXXXYKQYEMVVKSX

SEQ ID NO: 11545 - protein, 44 aa, Artificial Sequence
  Non-cyclic GFR-binding peptide
  MOD_RES (6)..(7)..(41)..(43): Xaa is C or S
  MOD_RES (21)..(22)..(23)..(24)..(25): Xaa is A or G
  MOD_RES (26)..(27)..(28)..(29): Xaa is A or G or absent
YVPKPXXAPTKLSPISVLFIXXXXXXXXXYKQYENMVVRSXGXH

SEQ ID NO: 11546 - protein, 40 aa, Artificial Sequence
  Non-cyclic GFR-binding peptide
  MOD_RES (5)..(39): Xaa is C or S
  MOD_RES (19)..(20)..(21)..(22)..(23): Xaa is A or G
  MOD_RES (24)..(25)..(26)..(27): Xaa is A or G or absent
TKPTXAPTKLSPISVLFIXXXXXXXXXYKQYENMVVRSXG

SEQ ID NO: 11547 - protein, 34 aa, Artificial Sequence
  Non-cyclic GFR-binding peptide
  MOD_RES (1)..(1): Xaa is C or S
  MOD_RES (15)..(16)..(17)..(18)..(19): Xaa is A or G
  MOD_RES (20)..(21)..(22)..(23): Xaa is A or G or absent
XVPTELEPLPMVYYXXXXXXXXXEQLSNEMVVEG

SEQ ID NO: 11548 - protein, 38 aa, Artificial Sequence
  Non-cyclic GFR-binding peptide
  MOD_RES (2)..(3)..(37): Xaa is C or S
  MOD_RES (17)..(18)..(19)..(20)..(21): Xaa is A or G
  MOD_RES (22)..(23)..(24)..(25): Xaa is A or G or absent
TXXVPTRLEPLTILYYXXXXXXXXXEQLSNDMVVESXG

SEQ ID NO: 11549 - protein, 38 aa, Artificial Sequence
  Non-cyclic GFR-binding peptide
  MOD_RES (1)..(2)..(36)..(38): Xaa is C or S
  MOD_RES (16)..(17)..(18)..(19)..(20): Xaa is A or G
  MOD_RES (21)..(22)..(23)..(24): Xaa is A or G or absent
XXAPTKLEPLTVLYYXXXXXXXXXEQLSNNMVVRSXGX

SEQ ID NO: 11550 - protein, 40 aa, Artificial Sequence
  Non-cyclic GFR-binding peptide
  MOD_RES (3)..(4)..(37)..(39): Xaa is C or S
  MOD_RES (18)..(19)..(20)..(21)..(22): Xaa is A or G
  MOD_RES (23)..(24)..(25)..(26): Xaa is A or G or absent
APXXVPQALEPLTILYYXXXXXXXXXEQLSNMIVRSXKXS

SEQ ID NO: 11551 - protein, 32 aa, Artificial Sequence
  Non-cyclic GFR-binding peptide
  MOD_RES (1)..(2): Xaa is C or S
XXVPQDLEPLPIVYYVGRTPKVEQLSNMVVKS

SEQ ID NO: 11552 - protein, 35 aa, Artificial Sequence
  Non-cyclic GFR-binding peptide
  MOD_RES (1)..(2)..(35): Xaa is C or S
  MOD_RES (16)..(17)..(18)..(19)..(20): Xaa is A or G
  MOD_RES (21)..(22)..(23)..(24): Xaa is A or G or absent
XXVPQDLSPISILFIXXXXXXXXXYKQYEMVVKSX

SEQ ID NO: 11553 - protein, 39 aa, Artificial Sequence
  Non-cyclic GFR-binding peptide
  MOD_RES (2)..(3)..(37)..(39): Xaa is C or S
  MOD_RES (17)..(18)..(19)..(20)..(21): Xaa is A or G
  MOD_RES (22)..(23)..(24)..(25): Xaa is A or G or absent
AXXVPTELSPISMLFIXXXXXXXXXYKQYEDMVVEGXGX

SEQ ID NO: 11554 - protein, 37 aa, Artificial Sequence
  Non-cyclic GFR-binding peptide
  MOD_RES (3)..(4): Xaa is C or S
  MOD_RES (18)..(19)..(20)..(21)..(22): Xaa is A or G
  MOD_RES (23)..(24)..(25)..(26): Xaa is A or G or absent
PTXXVPTRLNAISILYFXXXXXXXXXLKKYRDMVVES

SEQ ID NO: 11555 - protein, 34 aa, Artificial Sequence
  Non-cyclic GFR-binding peptide
  MOD_RES (3)..(4): Xaa is C or S
KAXXVPTELSPISMLFIDEYDKVVYKQYEEMVVE

SEQ ID NO: 11556 - protein, 41 aa, Artificial Sequence
  Non-cyclic GFR-binding peptide
  MOD_RES (6)..(7)..(41): Xaa is C or S
  MOD_RES (21)..(22)..(23)..(24)..(25): Xaa is A or G
  MOD_RES (26)..(27)..(28)..(29): Xaa is A or G or absent
TVPKPXXAPTQLEPLTVLYYXXXXXXXXXEQLSNNMVVRAX

SEQ ID NO: 11557 - protein, 36 aa, Artificial Sequence
  Non-cyclic GFR-binding peptide
  MOD_RES (5)..(6): Xaa is C or S
SASPXXVPQDLSPISILFIVGRTPKVYKQYEMVVKS

SEQ ID NO: 11558 - protein, 32 aa, Artificial Sequence
  Non-cyclic GFR-binding peptide
  MOD_RES (1)..(32): Xaa is C or S
XVSQDLEPLPIVYYIGKTPKIEQLSNMIVKSX

SEQ ID NO: 11559 - protein, 42 aa, Artificial Sequence
  Non-cyclic GFR-binding peptide
  MOD_RES (4)..(5)..(39)..(41): Xaa is C or S
  MOD_RES (19)..(20)..(21)..(22)..(23): Xaa is A or G
  MOD_RES (24)..(25)..(26)..(27): Xaa is A or G or absent
PKPXXAPTKLEPLPVVYYXXXXXXXXXEQLSNNMVVRSXGXH

SEQ ID NO: 11560 - protein, 37 aa, Artificial Sequence
  Non-cyclic GFR-binding peptide
  MOD_RES (6)..(7): Xaa is C or S
ASAAPXXVPQALSPISILFIVGRKPKVYKQYEMIVRS

SEQ ID NO: 11561 - protein, 33 aa, Artificial Sequence
  Non-cyclic GFR-binding peptide
  MOD_RES (2)..(2): Xaa is C or S
TXAPTKLSPISVLFIDDSSNVIYKQYENMVVRS

SEQ ID NO: 11562 - protein, 32 aa, Artificial Sequence
  Non-cyclic GFR-binding peptide
  MOD_RES (32)..(32): Xaa is C or S
APTKLEPLTVLYYDDSSNVIEQLSNNMVVRSX

SEQ ID NO: 11563 - protein, 35 aa, Artificial Sequence
  Non-cyclic GFR-binding peptide
  MOD_RES (2)..(34): Xaa is C or S
TXAPTKLEPLPVVYYDDSSNVIEQLSNNMVVRSXG

SEQ ID NO: 11564 - protein, 40 aa, Artificial Sequence
  Non-cyclic GFR-binding peptide
  MOD_RES (6)..(7): Xaa is C or S
  MOD_RES (21)..(22)..(23)..(24)..(25): Xaa is A or G
  MOD_RES (26)..(27)..(28)..(29): Xaa is A or G or absent
TVPKPXXAPTQLSPISVLFIXXXXXXXXXYKQYENMVVRA

SEQ ID NO: 11565 - protein, 35 aa, Artificial Sequence
  Non-cyclic GFR-binding peptide
  MOD_RES (32)..(34): Xaa is C or S
APTQLEPLTVLYYDDSSNVIEQLSNNMVVRAXGXH

SEQ ID NO: 11566 - protein, 37 aa, Artificial Sequence
  Non-cyclic GFR-binding peptide
  MOD_RES (3)..(4): Xaa is C or S
  MOD_RES (18)..(19)..(20)..(21)..(22): Xaa is A or G
  MOD_RES (23)..(24)..(25)..(26): Xaa is A or G or absent
KAXXVPTELEPLTMLYYXXXXXXXXXEQLSNEMVVEG

SEQ ID NO: 11567 - protein, 41 aa, Artificial Sequence
  Non-cyclic GFR-binding peptide
  MOD_RES (5)..(6)..(40): Xaa is C or S
  MOD_RES (20)..(21)..(22)..(23)..(24): Xaa is A or G
  MOD_RES (25)..(26)..(27)..(28): Xaa is A or G or absent
VPKPXXAPTQLEPLTVLYYXXXXXXXXXEQLSNNMVVRAXG

SEQ ID NO: 11568 - protein, 40 aa, Artificial Sequence
  Non-cyclic GFR-binding peptide
  MOD_RES (4)..(5)..(39): Xaa is C or S
  MOD_RES (19)..(20)..(21)..(22)..(23): Xaa is A or G
  MOD_RES (24)..(25)..(26)..(27): Xaa is A or G or absent
PKPXXAPTQLEPLPVVYYXXXXXXXXXEQLSNNMVVRAXG

SEQ ID NO: 11569 - protein, 40 aa, Artificial Sequence
  Non-cyclic GFR-binding peptide
  MOD_RES (4)..(5)..(38)..(40): Xaa is C or S
  MOD_RES (19)..(20)..(21)..(22)..(23): Xaa is A or G
  MOD_RES (24)..(25)..(26)..(27): Xaa is A or G or absent
AAPXXVPQALEPLTILYYXXXXXXXXXEQLSNMIVRSXKX

SEQ ID NO: 11570 - protein, 35 aa, Artificial Sequence
  Non-cyclic GFR-binding peptide
  MOD_RES (33)..(35): Xaa is C or S
  MOD_RES (14)..(15)..(16)..(17)..(18): Xaa is A or G
  MOD_RES (19)..(20)..(21)..(22): Xaa is A or G or absent
VSQDLEPLPIVYYXXXXXXXXXEQLSNMIVKSXKX

SEQ ID NO: 11571 - protein, 37 aa, Artificial Sequence
  Non-cyclic GFR-binding peptide
  MOD_RES (5)..(6)..(37): Xaa is C or S
SASPXXVPQDLEPLPIVYYVGRTPKVEQLSNMVVKSX

SEQ ID NO: 11572 - protein, 35 aa, Artificial Sequence
  Non-cyclic GFR-binding peptide
  MOD_RES (1)..(2)..(33)..(35): Xaa is C or S
XXVPQALEPLTILYYVGRKPKVEQLSNMIVRSXKX

SEQ ID NO: 11573 - protein, 35 aa, Artificial Sequence
  Non-cyclic GFR-binding peptide
  MOD_RES (1)..(2): Xaa is C or S
  MOD_RES (16)..(17)..(18)..(19)..(20): Xaa is A or G
  MOD_RES (21)..(22)..(23)..(24): Xaa is A or G or absent
XXVPTELEPLPMVYYXXXXXXXXXEQLSNEMVVEG

SEQ ID NO: 11574 - protein, 36 aa, Artificial Sequence
  Non-cyclic GFR-binding peptide
  MOD_RES (1)..(33)..(35): Xaa is C or S
XVPTELEPLPMVYYDEYDKVVEQLSNEMVVEGXGXR

SEQ ID NO: 11575 - protein, 42 aa, Artificial Sequence
  Non-cyclic GFR-binding peptide
  MOD_RES (6)..(7)..(41): Xaa is C or S
  MOD_RES (21)..(22)..(23)..(24)..(25): Xaa is A or G
  MOD_RES (26)..(27)..(28)..(29): Xaa is A or G or absent
TVPKPXXAPTQLEPLPVVYYXXXXXXXXXEQLSNNMVVRAXG

SEQ ID NO: 11576 - protein, 34 aa, Artificial Sequence
  Non-cyclic GFR-binding peptide
  MOD_RES (1)..(2): Xaa is C or S
  MOD_RES (16)..(17)..(18)..(19)..(20): Xaa is A or G
  MOD_RES (21)..(22)..(23)..(24): Xaa is A or G or absent
XXVSQDLEPLPIVYYXXXXXXXXXEQLSNMIVKS

SEQ ID NO: 11577 - protein, 35 aa, Artificial Sequence
  Non-cyclic GFR-binding peptide
  MOD_RES (1)..(2)..(34): Xaa is C or S
XXVPTELSPISMLFIDENEKVVYKQYEDMVVEGXG

SEQ ID NO: 11578 - protein, 39 aa, Artificial Sequence
  Non-cyclic GFR-binding peptide
  MOD_RES (5)..(39): Xaa is C or S
  MOD_RES (19)..(20)..(21)..(22)..(23): Xaa is A or G
  MOD_RES (24)..(25)..(26)..(27): Xaa is A or G or absent
TKPTXAPTKLSPISVLFIXXXXXXXXXYKQYENMVVRSX

SEQ ID NO: 11579 - protein, 39 aa, Artificial Sequence
  Non-cyclic GFR-binding peptide
  MOD_RES (5)..(6)..(37)..(39): Xaa is C or S
SASPXXVSQDLSPISILFIIGKTPKIYKQYEMIVKSXKX

SEQ ID NO: 11580 - protein, 30 aa, Artificial Sequence; identical to SEQ ID NO: 1078
  Non-cyclic GFR-binding peptide

SEQ ID NO: 11581 - protein, 36 aa, Artificial Sequence
  Non-cyclic GFR-binding peptide
  MOD_RES (3)..(3): Xaa is C or S
  MOD_RES (17)..(18)..(19)..(20)..(21): Xaa is A or G
  MOD_RES (22)..(23)..(24)..(25): Xaa is A or G or absent
PTXAPTKLEPLTVLYYXXXXXXXXXEQLSNNMVVRS

SEQ ID NO: 11582 - protein, 39 aa, Artificial Sequence
  Non-cyclic GFR-binding peptide
  MOD_RES (7)..(7): Xaa is C or S
  MOD_RES (21)..(22)..(23)..(24)..(25): Xaa is A or G
  MOD_RES (26)..(27)..(28)..(29): Xaa is A or G or absent
HVTKPTXAPTKLEPLTVLYYXXXXXXXXXEQLSNNMVVR

SEQ ID NO: 11583 - protein, 32 aa, Artificial Sequence
  Non-cyclic GFR-binding peptide
  MOD_RES (1)..(1): Xaa is C or S
XVPTELEPLTMLYYDENEKVVEQLSNDMVVEG

SEQ ID NO: 11584 - protein, 43 aa, Artificial Sequence
  Non-cyclic GFR-binding peptide
  MOD_RES (6)..(7)..(41)..(43): Xaa is C or S
  MOD_RES (21)..(22)..(23)..(24)..(25): Xaa is A or G
  MOD_RES (26)..(27)..(28)..(29): Xaa is A or G or absent
YVPKPXXAPTKLSPISVLFIXXXXXXXXXYKQYENMVVRSXGX

SEQ ID NO: 11585 - protein, 41 aa, Artificial Sequence
  Non-cyclic GFR-binding peptide
  MOD_RES (5)..(6)..(38)..(40): Xaa is C or S
IPKAXXVPTELEPLPMVYYDENEKVVEQLSNDMVVEGXGXR

SEQ ID NO: 11586 - protein, 39 aa, Artificial Sequence
  Non-cyclic GFR-binding peptide
  MOD_RES (1)..(2)..(36)..(38): Xaa is C or S
  MOD_RES (16)..(17)..(18)..(19)..(20): Xaa is A or G
  MOD_RES (21)..(22)..(23)..(24): Xaa is A or G or absent
XXVPTELEPLPMVYYXXXXXXXXXEQLSNEMVVEGXGXR

SEQ ID NO: 11587 - protein, 42 aa, Artificial Sequence
  Non-cyclic GFR-binding peptide
  MOD_RES (4)..(5)..(39)..(41): Xaa is C or S
  MOD_RES (19)..(20)..(21)..(22)..(23): Xaa is A or G
  MOD_RES (24)..(25)..(26)..(27): Xaa is A or G or absent
PKAXXVPTELEPLPMVYYXXXXXXXXXEQLSNDMVVEGXGXR

SEQ ID NO: 11588 - protein, 33 aa, Artificial Sequence
  Non-cyclic GFR-binding peptide
  MOD_RES (1)..(33): Xaa is C or S
XAPTQLSPISVLFIDDSSNVIYKQYENMVVRAX

SEQ ID NO: 11589 - protein, 43 aa, Artificial Sequence
  Non-cyclic GFR-binding peptide
  MOD_RES (5)..(6)..(40)..(42): Xaa is C or S
  MOD_RES (20)..(21)..(22)..(23)..(24): Xaa is A or G
  MOD_RES (25)..(26)..(27)..(28): Xaa is A or G or absent
IPKAXXVPTELEPLTMLYYXXXXXXXXXEQLSNEMVVEGXGXR

SEQ ID NO: 11590 - protein, 39 aa, Artificial Sequence
  Non-cyclic GFR-binding peptide
  MOD_RES (2)..(3)..(37)..(39): Xaa is C or S
  MOD_RES (17)..(18)..(19)..(20)..(21): Xaa is A or G
  MOD_RES (22)..(23)..(24)..(25): Xaa is A or G or absent
TXXVPTRLEPLPIVYYXXXXXXXXXEQLSNDMVVESXGX

SEQ ID NO: 11591 - protein, 39 aa, Artificial Sequence
  Non-cyclic GFR-binding peptide
  MOD_RES (3)..(4)..(36)..(38): Xaa is C or S
KAXXVPTELSPISMLFIDENEKVVYKQYEDMVVEGXGXR

SEQ ID NO: 11592 - protein, 41 aa, Artificial Sequence
  Non-cyclic GFR-binding peptide
  MOD_RES (4)..(5)..(39)..(41): Xaa is C or S
  MOD_RES (19)..(20)..(21)..(22)..(23): Xaa is A or G
  MOD_RES (24)..(25)..(26)..(27): Xaa is A or G or absent
PKAXXVPTELEPLPMVYYXXXXXXXXXEQLSNDMVVEGXGX

SEQ ID NO: 11593 - protein, 37 aa, Artificial Sequence
  Non-cyclic GFR-binding peptide
  MOD_RES (34)..(36): Xaa is C or S
  MOD_RES (14)..(15)..(16)..(17)..(18): Xaa is A or G
  MOD_RES (19)..(20)..(21)..(22): Xaa is A or G or absent
VPTELSPISMLFIXXXXXXXXXYKQYEEMVVEGXGXR

SEQ ID NO: 11594 - protein, 35 aa, Artificial Sequence
  Non-cyclic GFR-binding peptide
  MOD_RES (5)..(5): Xaa is C or S
TKPTXAPTKLEPLPVVYYDDSSNVIEQLSNNMVVR

SEQ ID NO: 11595 - protein, 42 aa, Artificial Sequence
  Non-cyclic GFR-binding peptide
  MOD_RES (6)..(7)..(39)..(41): Xaa is C or S
STPPTXXVPTRLEPLPIVYYDSANNVVEQLSNDMVVESXGXR

SEQ ID NO: 11596 - protein, 42 aa, Artificial Sequence
  Non-cyclic GFR-binding peptide
  MOD_RES (6)..(7)..(39)..(41): Xaa is C or S
YVPKPXXAPTKLEPLTVLYYDDSSNVIEQLSNNMVVRSXGXH

SEQ ID NO: 11597 - protein, 36 aa, Artificial Sequence
  Non-cyclic GFR-binding peptide
  MOD_RES (34)..(36): Xaa is C or S
  MOD_RES (14)..(15)..(16)..(17)..(18): Xaa is A or G
  MOD_RES (19)..(20)..(21)..(22): Xaa is A or G or absent
APTKLEPLPVVYYXXXXXXXXXEQLSNNMVVRSXGX

SEQ ID NO: 11598 - protein, 40 aa, Artificial Sequence
  Non-cyclic GFR-binding peptide
  MOD_RES (3)..(37)..(39): Xaa is C or S
  MOD_RES (17)..(18)..(19)..(20)..(21): Xaa is A or G
  MOD_RES (22)..(23)..(24)..(25): Xaa is A or G or absent
PTXAPTKLEPLPVVYYXXXXXXXXXEQLSNNMVVRSXGXH

SEQ ID NO: 11599 - protein, 38 aa, Artificial Sequence
  Non-cyclic GFR-binding peptide
  MOD_RES (4)..(5)..(37): Xaa is C or S
PKAXXVPTELSPISMLFIDEYDKVVYKQYEEMVVEGXG

SEQ ID NO: 11600 - protein, 35 aa, Artificial Sequence
  Non-cyclic GFR-binding peptide
  MOD_RES (1)..(33)..(35): Xaa is C or S
XAPTKLEPLPVVYYDDSSNVIEQLSNNMVVRSXGX

SEQ ID NO: 11601 - protein, 35 aa, Artificial Sequence
  Non-cyclic GFR-binding peptide
  MOD_RES (2)..(3)..(35): Xaa is C or S
PXXAPTQLEPLPVVYYDDSSNVIEQLSNNMVVRAX

SEQ ID NO: 11602 - protein, 38 aa, Artificial Sequence
  Non-cyclic GFR-binding peptide
  MOD_RES (4)..(36)..(38): Xaa is C or S
KPTXAPTKLSPISVLFIDDSSNVIYKQYENMVVRSXGX

SEQ ID NO: 11603 - protein, 40 aa, Artificial Sequence
  Non-cyclic GFR-binding peptide
  MOD_RES (6)..(7)..(39): Xaa is C or S
YVPKPXXAPTKLEPLTVLYYDDSSNVIEQLSNNMVVRSXG

SEQ ID NO: 11604 - protein, 40 aa, Artificial Sequence
  Non-cyclic GFR-binding peptide
  MOD_RES (3)..(4)..(38)..(40): Xaa is C or S
  MOD_RES (18)..(19)..(20)..(21)..(22): Xaa is A or G
  MOD_RES (23)..(24)..(25)..(26): Xaa is A or G or absent
KAXXVPTELSPISMLFIXXXXXXXXXYKQYEEMVVEGXGX

SEQ ID NO: 11605 - protein, 36 aa, Artificial Sequence
  Non-cyclic GFR-binding peptide
  MOD_RES (2)..(3)..(36): Xaa is C or S
  MOD_RES (17)..(18)..(19)..(20)..(21): Xaa is A or G
  MOD_RES (22)..(23)..(24)..(25): Xaa is A or G or absent
PXXVPQALEPLTILYYXXXXXXXXXEQLSNMIVRSX

SEQ ID NO: 11606 - protein, 37 aa, Artificial Sequence
  Non-cyclic GFR-binding peptide
  MOD_RES (4)..(5)..(37): Xaa is C or S
PKAXXVPTELEPLPMVYYDEYDKVVEQLSNEMVVEGX

SEQ ID NO: 11607 - protein, 40 aa, Artificial Sequence
  Non-cyclic GFR-binding peptide
  MOD_RES (6)..(7)..(38)..(40): Xaa is C or S
ASASPXXVPQDLEPLPIVYYVGRTPKVEQLSNMVVKSXKX

SEQ ID NO: 11608 - protein, 35 aa, Artificial Sequence
  Non-cyclic GFR-binding peptide
  MOD_RES (1)..(33)..(35): Xaa is C or S
XAPTKLSPISVLFIDDSSNVIYKQYENMVVRSXGX

SEQ ID NO: 11609 - protein, 32 aa, Artificial Sequence
  Non-cyclic GFR-binding peptide
  MOD_RES (1)..(2): Xaa is C or S
XXVPTELSPISMLFIDEYDKVVYKQYEEMVVE

SEQ ID NO: 11610 - protein, 39 aa, Artificial Sequence
  Non-cyclic GFR-binding peptide
  MOD_RES (2)..(3)..(36)..(38): Xaa is C or S
  MOD_RES (17)..(18)..(19)..(20)..(21): Xaa is A or G
  MOD_RES (22)..(23)..(24)..(25): Xaa is A or G or absent
PXXVSQDLSPISILFIXXXXXXXXXYKQYEMIVKSXKXS

SEQ ID NO: 11611 - protein, 38 aa, Artificial Sequence
  Non-cyclic GFR-binding peptide
  MOD_RES (5)..(6)..(37): Xaa is C or S
SAAPXXVPQALEPLTILYYVGRKPKVEQLSNMIVRSXK

SEQ ID NO: 11612 - protein, 37 aa, Artificial Sequence
  Non-cyclic GFR-binding peptide
  MOD_RES (34)..(36): Xaa is C or S
  MOD_RES (14)..(15)..(16)..(17)..(18): Xaa is A or G
  MOD_RES (19)..(20)..(21)..(22): Xaa is A or G or absent
APTQLEPLTVLYYXXXXXXXXXEQLSNNMVVRAXGXH

SEQ ID NO: 11613 - protein, 35 aa, Artificial Sequence
  Non-cyclic GFR-binding peptide
  MOD_RES (1)..(33)..(35): Xaa is C or S
XVPTRLSAISILYLDSANNVVLKNYQDMVVESXGX

SEQ ID NO: 11614 - protein, 37 aa, Artificial Sequence
  Non-cyclic GFR-binding peptide
  MOD_RES (4)..(5): Xaa is C or S
  MOD_RES (19)..(20)..(21)..(22)..(23): Xaa is A or G
  MOD_RES (24)..(25)..(26)..(27): Xaa is A or G or absent
PKAXXVPTELSPISMLFIXXXXXXXXXYKQYEDMVVE

SEQ ID NO: 11615 - protein, 39 aa, Artificial Sequence
  Non-cyclic GFR-binding peptide
  MOD_RES (6)..(7): Xaa is C or S
  MOD_RES (21)..(22)..(23)..(24)..(25): Xaa is A or G
  MOD_RES (26)..(27)..(28)..(29): Xaa is A or G or absent
STPPTXXVPTRLEPLPIVYYXXXXXXXXXEQLSNDMVVE

SEQ ID NO: 11616 - protein, 40 aa, Artificial Sequence
  Non-cyclic GFR-binding peptide
  MOD_RES (4)..(5)..(38)..(40): Xaa is C or S
  MOD_RES (19)..(20)..(21)..(22)..(23): Xaa is A or G
  MOD_RES (24)..(25)..(26)..(27): Xaa is A or G or absent
ASPXXVPQDLSPISILFIXXXXXXXXXYKQYEMVVKSXKX

SEQ ID NO: 11617 - protein, 42 aa, Artificial Sequence
  Non-cyclic GFR-binding peptide
  MOD_RES (6)..(7)..(41): Xaa is C or S
  MOD_RES (21)..(22)..(23)..(24)..(25): Xaa is A or G
  MOD_RES (26)..(27)..(28)..(29): Xaa is A or G or absent
KIPKAXXVPTELSPISMLFIXXXXXXXXXYKQYEDMVVEGXG

SEQ ID NO: 11618 - protein, 31 aa, Artificial Sequence
  Non-cyclic GFR-binding peptide
  MOD_RES (31)..(31): Xaa is C or S
VSQDLSPISILFIIGKTPKIYKQYEMIVKSX

SEQ ID NO: 11619 - protein, 36 aa, Artificial Sequence
  Non-cyclic GFR-binding peptide
  MOD_RES (2)..(36): Xaa is C or S
  MOD_RES (16)..(17)..(18)..(19)..(20): Xaa is A or G
  MOD_RES (21)..(22)..(23)..(24): Xaa is A or G or absent
TXAPTKLEPLTVLYYXXXXXXXXXEQLSNNMVVRSX

SEQ ID NO: 11620 - protein, 37 aa, Artificial Sequence
  Non-cyclic GFR-binding peptide
  MOD_RES (5)..(6): Xaa is C or S
VPKPXXAPTKLEPLTVLYYDDSSNVIEQLSNNMVVRS

SEQ ID NO: 11621 - protein, 37 aa, Artificial Sequence
  Non-cyclic GFR-binding peptide
  MOD_RES (34)..(36): Xaa is C or S
  MOD_RES (14)..(15)..(16)..(17)..(18): Xaa is A or G
  MOD_RES (19)..(20)..(21)..(22): Xaa is A or G or absent
VPTELEPLTMLYYXXXXXXXXXEQLSNDMVVEGXGXR

SEQ ID NO: 11622 - protein, 36 aa, Artificial Sequence
  Non-cyclic GFR-binding peptide
  MOD_RES (2)..(3)..(35): Xaa is C or S
AXXVPTELSPISMLFIDENEKVVYKQYEDMVVEGXG

SEQ ID NO: 11623 - protein, 37 aa, Artificial Sequence
  Non-cyclic GFR-binding peptide
  MOD_RES (4)..(5)..(36): Xaa is C or S
ASPXXVPQDLEPLPIVYYVGRTPKVEQLSNMVVKSXK

SEQ ID NO: 11624 - protein, 35 aa, Artificial Sequence
  Non-cyclic GFR-binding peptide
  MOD_RES (1)..(35): Xaa is C or S
  MOD_RES (15)..(16)..(17)..(18)..(19): Xaa is A or G
  MOD_RES (20)..(21)..(22)..(23): Xaa is A or G or absent
XAPTKLEPLPVVYYXXXXXXXXXEQLSNNMVVRSX

SEQ ID NO: 11625 - protein, 34 aa, Artificial Sequence
  Non-cyclic GFR-binding peptide
  MOD_RES (1)..(34): Xaa is C or S
  MOD_RES (15)..(16)..(17)..(18)..(19): Xaa is A or G
  MOD_RES (20)..(21)..(22)..(23): Xaa is A or G or absent
XVSQDLEPLPIVYYXXXXXXXXXEQLSNMIVKSX

SEQ ID NO: 11626 - protein, 34 aa, Artificial Sequence
  Non-cyclic GFR-binding peptide
  MOD_RES (3)..(4): Xaa is C or S
APXXVPQALEPLTILYYVGRKPKVEQLSNMIVRS

SEQ ID NO: 11627 - protein, 41 aa, Artificial Sequence
  Non-cyclic GFR-binding peptide
  MOD_RES (6)..(40): Xaa is C or S
  MOD_RES (20)..(21)..(22)..(23)..(24): Xaa is A or G
  MOD_RES (25)..(26)..(27)..(28): Xaa is A or G or absent
VTKPTXAPTKLEPLPVVYYXXXXXXXXXEQLSNNMVVRSXG

SEQ ID NO: 11628 - protein, 37 aa, Artificial Sequence
  Non-cyclic GFR-binding peptide
  MOD_RES (4)..(5)..(37): Xaa is C or S
PPTXXVPTRLSAISILYLDSANNVVLKNYQDMVVESX

SEQ ID NO: 11629 - protein, 39 aa, Artificial Sequence
  Non-cyclic GFR-binding peptide
  MOD_RES (6)..(7): Xaa is C or S
  MOD_RES (21)..(22)..(23)..(24)..(25): Xaa is A or G
  MOD_RES (26)..(27)..(28)..(29): Xaa is A or G or absent
STPPTXXVPTRLNAISILYFXXXXXXXXXLKKYRDMVVE

SEQ ID NO: 11630 - protein, 40 aa, Artificial Sequence
  Non-cyclic GFR-binding peptide
  MOD_RES (6)..(7)..(40): Xaa is C or S
  MOD_RES (21)..(22)..(23)..(24)..(25): Xaa is A or G
  MOD_RES (26)..(27)..(28)..(29): Xaa is A or G or absent
ASAAPXXVPQALSPISILFIXXXXXXXXXYKQYEMIVRSX

SEQ ID NO: 11631 - protein, 36 aa, Artificial Sequence
  Non-cyclic GFR-binding peptide
  MOD_RES (3)..(4)..(36): Xaa is C or S
KPXXAPTKLEPLTVLYYDDSSNVIEQLSNNMVVRSX

SEQ ID NO: 11632 - protein, 39 aa, Artificial Sequence
  Non-cyclic GFR-binding peptide
  MOD_RES (6)..(7)..(39): Xaa is C or S
TVPKPXXAPTQLEPLTVLYYDDSSNVIEQLSNNMVVRAX

SEQ ID NO: 11633 - protein, 35 aa, Artificial Sequence
  Non-cyclic GFR-binding peptide
  MOD_RES (1)..(34): Xaa is C or S
  MOD_RES (15)..(16)..(17)..(18)..(19): Xaa is A or G
  MOD_RES (20)..(21)..(22)..(23): Xaa is A or G or absent
XVPQDLEPLPIVYYXXXXXXXXXEQLSNMVVKSXK

SEQ ID NO: 11634 - protein, 36 aa, Artificial Sequence
  Non-cyclic GFR-binding peptide
  MOD_RES (3)..(4): Xaa is C or S
  MOD_RES (18)..(19)..(20)..(21)..(22): Xaa is A or G
  MOD_RES (23)..(24)..(25)..(26): Xaa is A or G or absent
KPXXAPTKLEPLPVVYYXXXXXXXXXEQLSNNMVVR

SEQ ID NO: 11635 - protein, 39 aa, Artificial Sequence
  Non-cyclic GFR-binding peptide
  MOD_RES (5)..(6)..(38): Xaa is C or S
IPKAXXVPTELEPLTMLYYDEYDKVVEQLSNEMVVEGXG

SEQ ID NO: 11636 - protein, 35 aa, Artificial Sequence
  Non-cyclic GFR-binding peptide
  MOD_RES (34)..(34): Xaa is C or S
  MOD_RES (14)..(15)..(16)..(17)..(18): Xaa is A or G
  MOD_RES (19)..(20)..(21)..(22): Xaa is A or G or absent
APTKLEPLTVLYYXXXXXXXXXEQLSNNMVVRSXG

SEQ ID NO: 11637 - protein, 37 aa, Artificial Sequence
  Non-cyclic GFR-binding peptide
  MOD_RES (2)..(36): Xaa is C or S
  MOD_RES (16)..(17)..(18)..(19)..(20): Xaa is A or G
  MOD_RES (21)..(22)..(23)..(24): Xaa is A or G or absent
TXAPTKLEPLTVLYYXXXXXXXXXEQLSNNMVVRSXG

SEQ ID NO: 11638 - protein, 37 aa, Artificial Sequence
  Non-cyclic GFR-binding peptide
  MOD_RES (1)..(2)..(34)..(36): Xaa is C or S
XXAPTKLEPLPVVYYDDSSNVIEQLSNNMVVRSXGXH

SEQ ID NO: 11639 - protein, 40 aa, Artificial Sequence
  Non-cyclic GFR-binding peptide
  MOD_RES (5)..(6)..(38)..(40): Xaa is C or S
TPPTXXVPTRLEPLPIVYYDSANNVVEQLSNDMVVESXGX

SEQ ID NO: 11640 - protein, 36 aa, Artificial Sequence
  Non-cyclic GFR-binding peptide
  MOD_RES (3)..(4): Xaa is C or S
  MOD_RES (18)..(19)..(20)..(21)..(22): Xaa is A or G
  MOD_RES (23)..(24)..(25)..(26): Xaa is A or G or absent
KAXXVPTELEPLTMLYYXXXXXXXXXEQLSNDMVVE

SEQ ID NO: 11641 - protein, 35 aa, Artificial Sequence
  Non-cyclic GFR-binding peptide
  MOD_RES (1)..(33)..(35): Xaa is C or S
XVPTRLEPLTILYYDSANNVVEQLSNDMVVESXGX

SEQ ID NO: 11642 - protein, 35 aa, Artificial Sequence
  Non-cyclic GFR-binding peptide
  MOD_RES (2)..(2): Xaa is C or S
  MOD_RES (16)..(17)..(18)..(19)..(20): Xaa is A or G
  MOD_RES (21)..(22)..(23)..(24): Xaa is A or G or absent
TXAPTKLEPLPVVYYXXXXXXXXXEQLSNNMVVRS

SEQ ID NO: 11643 - protein, 40 aa, Artificial Sequence
  Non-cyclic GFR-binding peptide
  MOD_RES (4)..(5)..(39): Xaa is C or S
  MOD_RES (19)..(20)..(21)..(22)..(23): Xaa is A or G
  MOD_RES (24)..(25)..(26)..(27): Xaa is A or G or absent
PKAXXVPTELEPLTMLYYXXXXXXXXXEQLSNEMVVEGXG

SEQ ID NO: 11644 - protein, 36 aa, Artificial Sequence
  Non-cyclic GFR-binding peptide
  MOD_RES (5)..(6): Xaa is C or S
SAAPXXVPQALSPISILFIVGRKPKVYKQYEMIVRS

SEQ ID NO: 11645 - protein, 41 aa, Artificial Sequence
  Non-cyclic GFR-binding peptide
  MOD_RES (5)..(6)..(38)..(40): Xaa is C or S
VPKPXXAPTQLSPISVLFIDDSSNVIYKQYENMVVRAXGXH

SEQ ID NO: 11646 - protein, 40 aa, Artificial Sequence
  Non-cyclic GFR-binding peptide
  MOD_RES (6)..(7)..(38)..(40): Xaa is C or S
ASASPXXVSQDLSPISILFIIGKTPKIYKQYEMIVKSXKX

SEQ ID NO: 11647 - protein, 42 aa, Artificial Sequence
  Non-cyclic GFR-binding peptide
  MOD_RES (6)..(7)..(40)..(42): Xaa is C or S
  MOD_RES (21)..(22)..(23)..(24)..(25): Xaa is A or G
  MOD_RES (26)..(27)..(28)..(29): Xaa is A or G or absent
ASASPXXVPQDLEPLPIVYYXXXXXXXXXEQLSNMVVKSXKX

SEQ ID NO: 11648 - protein, 41 aa, Artificial Sequence
  Non-cyclic GFR-binding peptide
  MOD_RES (3)..(4)..(38)..(40): Xaa is C or S
  MOD_RES (18)..(19)..(20)..(21)..(22): Xaa is A or G
  MOD_RES (23)..(24)..(25)..(26): Xaa is A or G or absent
PTXXVPTRLSAISILYLXXXXXXXXXLKNYQDMVVESXGXR

SEQ ID NO: 11649 - protein, 37 aa, Artificial Sequence
  Non-cyclic GFR-binding peptide
  MOD_RES (3)..(4): Xaa is C or S
  MOD_RES (18)..(19)..(20)..(21)..(22): Xaa is A or G
  MOD_RES (23)..(24)..(25)..(26): Xaa is A or G or absent
KAXXVPTELSPISMLFIXXXXXXXXXYKQYEEMVVEG

SEQ ID NO: 11650 - protein, 40 aa, Artificial Sequence
  Non-cyclic GFR-binding peptide
  MOD_RES (6)..(7)..(38)..(40): Xaa is C or S
ASASPXXVSQDLEPLPIVYYIGKTPKIEQLSNMIVKSXKX

SEQ ID NO: 11651 - protein, 36 aa, Artificial Sequence
  Non-cyclic GFR-binding peptide
  MOD_RES (3)..(4): Xaa is C or S
  MOD_RES (18)..(19)..(20)..(21)..(22): Xaa is A or G
  MOD_RES (23)..(24)..(25)..(26): Xaa is A or G or absent
KAXXVPTELEPLPMVYYXXXXXXXXXEQLSNDMVVE

SEQ ID NO: 11652 - protein, 38 aa, Artificial Sequence
  Non-cyclic GFR-binding peptide
  MOD_RES (5)..(6): Xaa is C or S
  MOD_RES (20)..(21)..(22)..(23)..(24): Xaa is A or G
  MOD_RES (25)..(26)..(27)..(28): Xaa is A or G or absent
SAAPXXVPQALEPLTILYYXXXXXXXXXEQLSNMIVRS

SEQ ID NO: 11653 - protein, 35 aa, Artificial Sequence
  Non-cyclic GFR-binding peptide
  MOD_RES (3)..(4): Xaa is C or S
KAXXVPTELEPLTMLYYDEYDKVVEQLSNEMVVEG

SEQ ID NO: 11654 - protein, 36 aa, Artificial Sequence
  Non-cyclic GFR-binding peptide
  MOD_RES (3)..(4): Xaa is C or S
  MOD_RES (18)..(19)..(20)..(21)..(22): Xaa is A or G
  MOD_RES (23)..(24)..(25)..(26): Xaa is A or G or absent
KPXXAPTKLEPLTVLYYXXXXXXXXXEQLSNNMVVR

SEQ ID NO: 11655 - protein, 35 aa, Artificial Sequence
  Non-cyclic GFR-binding peptide
  MOD_RES (1)..(32)..(34): Xaa is C or S
XVSQDLSPISILFIIGKTPKIYKQYEMIVKSXKXS

SEQ ID NO: 11656 - protein, 37 aa, Artificial Sequence
  Non-cyclic GFR-binding peptide
  MOD_RES (2)..(3)..(36): Xaa is C or S
  MOD_RES (17)..(18)..(19)..(20)..(21): Xaa is A or G
  MOD_RES (22)..(23)..(24)..(25): Xaa is A or G or absent
PXXVPQDLSPISILFIXXXXXXXXXYKQYEMVVKSXK

SEQ ID NO: 11657 - protein, 33 aa, Artificial Sequence
  Non-cyclic GFR-binding peptide
  MOD_RES (31)..(33): Xaa is C or S
VPQALSPISILFIVGRKPKVYKQYEMIVRSXKX

SEQ ID NO: 11658 - protein, 35 aa, Artificial Sequence
  Non-cyclic GFR-binding peptide
  MOD_RES (4)..(5): Xaa is C or S
PPTXXVPTRLSAISILYLDSANNVVLKNYQDMVVE

SEQ ID NO: 11659 - protein, 38 aa, Artificial Sequence
  Non-cyclic GFR-binding peptide
  MOD_RES (2)..(3)..(36)..(38): Xaa is C or S
  MOD_RES (17)..(18)..(19)..(20)..(21): Xaa is A or G
  MOD_RES (22)..(23)..(24)..(25): Xaa is A or G or absent
PXXVSQDLSPISILFIXXXXXXXXXYKQYEMIVKSXKX

SEQ ID NO: 11660 - protein, 36 aa, Artificial Sequence
  Non-cyclic GFR-binding peptide
  MOD_RES (33)..(35): Xaa is C or S
  MOD_RES (14)..(15)..(16)..(17)..(18): Xaa is A or G
  MOD_RES (19)..(20)..(21)..(22): Xaa is A or G or absent
VSQDLSPISILFIXXXXXXXXXYKQYEMIVKSXKXS

SEQ ID NO: 11661 - protein, 37 aa, Artificial Sequence
  Non-cyclic GFR-binding peptide
  MOD_RES (2)..(3)..(37): Xaa is C or S
  MOD_RES (17)..(18)..(19)..(20)..(21): Xaa is A or G
  MOD_RES (22)..(23)..(24)..(25): Xaa is A or G or absent
PXXAPTKLSPISVLFIXXXXXXXXXYKQYENMVVRSX

SEQ ID NO: 11662 - protein, 35 aa, Artificial Sequence
  Non-cyclic GFR-binding peptide
  MOD_RES (32)..(34): Xaa is C or S
APTQLEPLPVVYYDDSSNVIEQLSNNMVVRAXGXH

SEQ ID NO: 11663 - protein, 32 aa, Artificial Sequence
  Non-cyclic GFR-binding peptide
  MOD_RES (14)..(15)..(16)..(17)..(18): Xaa is A or G
  MOD_RES (19)..(20)..(21)..(22): Xaa is A or G or absent
VPTELSPISMLFIXXXXXXXXXYKQYEEMVVE

SEQ ID NO: 11664 - protein, 36 aa, Artificial Sequence
  Non-cyclic GFR-binding peptide
  MOD_RES (4)..(5)..(36): Xaa is C or S
ASPXXVSQDLSPISILFIIGKTPKIYKQYEMIVKSX

SEQ ID NO: 11665 - protein, 36 aa, Artificial Sequence
  Non-cyclic GFR-binding peptide
  MOD_RES (34)..(36): Xaa is C or S
  MOD_RES (14)..(15)..(16)..(17)..(18): Xaa is A or G
  MOD_RES (19)..(20)..(21)..(22): Xaa is A or G or absent
APTQLEPLPVVYYXXXXXXXXXEQLSNNMVVRAXGX

SEQ ID NO: 11666 - protein, 36 aa, Artificial Sequence
  Non-cyclic GFR-binding peptide
  MOD_RES (3)..(4): Xaa is C or S
  MOD_RES (18)..(19)..(20)..(21)..(22): Xaa is A or G
  MOD_RES (23)..(24)..(25)..(26): Xaa is A or G or absent
KPXXAPTQLSPISVLFIXXXXXXXXXYKQYENMVVR

SEQ ID NO: 11667 - protein, 36 aa, Artificial Sequence
  Non-cyclic GFR-binding peptide
  MOD_RES (2)..(3): Xaa is C or S
  MOD_RES (17)..(18)..(19)..(20)..(21): Xaa is A or G
  MOD_RES (22)..(23)..(24)..(25): Xaa is A or G or absent
PXXAPTQLSPISVLFIXXXXXXXXXYKQYENMVVRA

SEQ ID NO: 11668 - protein, 38 aa, Artificial Sequence
  Non-cyclic GFR-binding peptide
  MOD_RES (4)..(5)..(37): Xaa is C or S
PKPXXAPTKLSPISVLFIDDSSNVIYKQYENMVVRSXG

SEQ ID NO: 11669 - protein, 32 aa, Artificial Sequence
  Non-cyclic GFR-binding peptide
  MOD_RES (14)..(15)..(16)..(17)..(18): Xaa is A or G
  MOD_RES (19)..(20)..(21)..(22): Xaa is A or G or absent
VPQALSPISILFIXXXXXXXXXYKQYEMIVRS

SEQ ID NO: 11670 - protein, 41 aa, Artificial Sequence
  Non-cyclic GFR-binding peptide
  MOD_RES (5)..(6)..(40): Xaa is C or S
  MOD_RES (20)..(21)..(22)..(23)..(24): Xaa is A or G
  MOD_RES (25)..(26)..(27)..(28): Xaa is A or G or absent
IPKAXXVPTELEPLPMVYYXXXXXXXXXEQLSNDMVVEGXG

SEQ ID NO: 11671 - protein, 38 aa, Artificial Sequence
  Non-cyclic GFR-binding peptide
  MOD_RES (1)..(2)..(36)..(38): Xaa is C or S
  MOD_RES (16)..(17)..(18)..(19)..(20): Xaa is A or G
  MOD_RES (21)..(22)..(23)..(24): Xaa is A or G or absent
XXVPTELSPISMLFIXXXXXXXXXYKQYEDMVVEGXGX

SEQ ID NO: 11672 - protein, 39 aa, Artificial Sequence
  Non-cyclic GFR-binding peptide
  MOD_RES (7)..(39): Xaa is C or S
HVTKPTXAPTKLSPISVLFIDDSSNVIYKQYENMVVRSX

SEQ ID NO: 11673 - protein, 42 aa, Artificial Sequence
  Non-cyclic GFR-binding peptide
  MOD_RES (5)..(6)..(40)..(42): Xaa is C or S
  MOD_RES (20)..(21)..(22)..(23)..(24): Xaa is A or G
  MOD_RES (25)..(26)..(27)..(28): Xaa is A or G or absent
TPPTXXVPTRLEPLTILYYXXXXXXXXXEQLSNDMVVESXGX

SEQ ID NO: 11674 - protein, 36 aa, Artificial Sequence
  Non-cyclic GFR-binding peptide
  MOD_RES (1)..(33)..(35): Xaa is C or S
XVPTELEPLTMLYYDEYDKVVEQLSNEMVVEGXGXR

SEQ ID NO: 11675 - protein, 42 aa, Artificial Sequence
  Non-cyclic GFR-binding peptide
  MOD_RES (6)..(7)..(39)..(41): Xaa is C or S
KIPKAXXVPTELSPISMLFIDENEKVVYKQYEDMVVEGXGXR

SEQ ID NO: 11676 - protein, 39 aa, Artificial Sequence
  Non-cyclic GFR-binding peptide
  MOD_RES (4)..(5)..(36)..(38): Xaa is C or S
AAPXXVPQALSPISILFIVGRKPKVYKQYEMIVRSXKXS

SEQ ID NO: 11677 - protein, 38 aa, Artificial Sequence
  Non-cyclic GFR-binding peptide
  MOD_RES (1)..(2)..(35)..(37): Xaa is C or S
  MOD_RES (16)..(17)..(18)..(19)..(20): Xaa is A or G
  MOD_RES (21)..(22)..(23)..(24): Xaa is A or G or absent
XXVSQDLEPLPIVYYXXXXXXXXXEQLSNMIVKSXKXS

SEQ ID NO: 11678 - protein, 33 aa, Artificial Sequence
  Non-cyclic GFR-binding peptide
  MOD_RES (33)..(33): Xaa is C or S
  MOD_RES (14)..(15)..(16)..(17)..(18): Xaa is A or G
  MOD_RES (19)..(20)..(21)..(22): Xaa is A or G or absent
VSQDLEPLPIVYYXXXXXXXXXEQLSNMIVKSX

SEQ ID NO: 11679 - protein, 38 aa, Artificial Sequence
  Non-cyclic GFR-binding peptide
  MOD_RES (5)..(6)..(38): Xaa is C or S
TPPTXXVPTRLEPLPIVYYDSANNVVEQLSNDMVVESX

SEQ ID NO: 11680 - protein, 38 aa, Artificial Sequence
  Non-cyclic GFR-binding peptide
  MOD_RES (1)..(2)..(35)..(37): Xaa is C or S
  MOD_RES (16)..(17)..(18)..(19)..(20): Xaa is A or G
  MOD_RES (21)..(22)..(23)..(24): Xaa is A or G or absent
XXVPQDLSPISILFIXXXXXXXXXYKQYEMVVKSXKXS

SEQ ID NO: 11681 - protein, 33 aa, Artificial Sequence
  Non-cyclic GFR-binding peptide
  MOD_RES (1)..(2): Xaa is C or S
XXAPTQLEPLTVLYYDDSSNVIEQLSNNMVVRA

SEQ ID NO: 11682 - protein, 37 aa, Artificial Sequence
  Non-cyclic GFR-binding peptide
  MOD_RES (2)..(3)..(35)..(37): Xaa is C or S
AXXVPTELEPLPMVYYDEYDKVVEQLSNEMVVEGXGX

SEQ ID NO: 11683 - protein, 32 aa, Artificial Sequence
  Non-cyclic GFR-binding peptide
  MOD_RES (1)..(1): Xaa is C or S
XVPTRLSAISILYLDSANNVVLKNYQDMVVES

SEQ ID NO: 11684 - protein, 37 aa, Artificial Sequence
  Non-cyclic GFR-binding peptide
  MOD_RES (5)..(6): Xaa is C or S
VPKPXXAPTQLEPLTVLYYDDSSNVIEQLSNNMVVRA

SEQ ID NO: 11685 - protein, 37 aa, Artificial Sequence
  Non-cyclic GFR-binding peptide
  MOD_RES (34)..(36): Xaa is C or S
  MOD_RES (14)..(15)..(16)..(17)..(18): Xaa is A or G
  MOD_RES (19)..(20)..(21)..(22): Xaa is A or G or absent
VPTELEPLTMLYYXXXXXXXXXEQLSNEMVVEGXGXR

SEQ ID NO: 11686 - protein, 42 aa, Artificial Sequence
  Non-cyclic GFR-binding peptide
  MOD_RES (5)..(6)..(40)..(42): Xaa is C or S
  MOD_RES (20)..(21)..(22)..(23)..(24): Xaa is A or G
  MOD_RES (25)..(26)..(27)..(28): Xaa is A or G or absent
IPKAXXVPTELSPISMLFIXXXXXXXXXYKQYEEMVVEGXGX

SEQ ID NO: 11687 - protein, 35 aa, Artificial Sequence
  Non-cyclic GFR-binding peptide
  MOD_RES (1)..(2)..(34): Xaa is C or S
XXVPTELEPLTMLYYDEYDKVVEQLSNEMVVEGXG

SEQ ID NO: 11688 - protein, 37 aa, Artificial Sequence
  Non-cyclic GFR-binding peptide
  MOD_RES (4)..(5)..(37): Xaa is C or S
PKPXXAPTQLEPLPVVYYDDSSNVIEQLSNNMVVRAX

SEQ ID NO: 11689 - protein, 39 aa, Artificial Sequence
  Non-cyclic GFR-binding peptide
  MOD_RES (6)..(7)..(39): Xaa is C or S
STPPTXXVPTRLEPLTILYYDSANNVVEQLSNDMVVESX

SEQ ID NO: 11690 - protein, 36 aa, Artificial Sequence
  Non-cyclic GFR-binding peptide
  MOD_RES (2)..(3)..(34)..(36): Xaa is C or S
PXXVPQALSPISILFIVGRKPKVYKQYEMIVRSXKX

SEQ ID NO: 11691 - protein, 39 aa, Artificial Sequence
  Non-cyclic GFR-binding peptide
  MOD_RES (6)..(7): Xaa is C or S
  MOD_RES (21)..(22)..(23)..(24)..(25): Xaa is A or G
  MOD_RES (26)..(27)..(28)..(29): Xaa is A or G or absent
STPPTXXVPTRLEPLTILYYXXXXXXXXXEQLSNDMVVE

SEQ ID NO: 11692 - protein, 37 aa, Artificial Sequence
  Non-cyclic GFR-binding peptide
  MOD_RES (4)..(5): Xaa is C or S
  MOD_RES (19)..(20)..(21)..(22)..(23): Xaa is A or G
  MOD_RES (24)..(25)..(26)..(27): Xaa is A or G or absent
PKAXXVPTELEPLTMLYYXXXXXXXXXEQLSNEMVVE

SEQ ID NO: 11693 - protein, 30 aa, Artificial Sequence
  Non-cyclic GFR-binding peptide
VPTELSPISMLFIDEYDKVVYKQYEEMVVE

SEQ ID NO: 11694 - protein, 38 aa, Artificial Sequence
  Non-cyclic GFR-binding peptide
  MOD_RES (4)..(5)..(37): Xaa is C or S
PKAXXVPTELEPLPMVYYDEYDKVVEQLSNEMVVEGXG

SEQ ID NO: 11695 - protein, 36 aa, Artificial Sequence
  Non-cyclic GFR-binding peptide
  MOD_RES (1)..(2)..(35): Xaa is C or S
  MOD_RES (16)..(17)..(18)..(19)..(20): Xaa is A or G
  MOD_RES (21)..(22)..(23)..(24): Xaa is A or G or absent
XXVSQDLEPLPIVYYXXXXXXXXXEQLSNMIVKSXK

SEQ ID NO: 11696 - protein, 37 aa, Artificial Sequence
  Non-cyclic GFR-binding peptide
  MOD_RES (3)..(4)..(36): Xaa is C or S
PTXXVPTRLSAISILYLDSANNVVLKNYQDMVVESXG

SEQ ID NO: 11697 - protein, 33 aa, Artificial Sequence
  Non-cyclic GFR-binding peptide
  MOD_RES (3)..(3): Xaa is C or S
PTXAPTKLSPISVLFIDDSSNVIYKQYENMVVR

SEQ ID NO: 11698 - protein, 41 aa, Artificial Sequence
  Non-cyclic GFR-binding peptide
  MOD_RES (6)..(7)..(39)..(41): Xaa is C or S
SIPKAXXVPTELSPISMLFIDEYDKVVYKQYEEMVVEGXGX

SEQ ID NO: 11699 - protein, 43 aa, Artificial Sequence
  Non-cyclic GFR-binding peptide
  MOD_RES (5)..(6)..(40)..(42): Xaa is C or S
  MOD_RES (20)..(21)..(22)..(23)..(24): Xaa is A or G
  MOD_RES (25)..(26)..(27)..(28): Xaa is A or G or absent
VPKPXXAPTKLEPLPVVYYXXXXXXXXXEQLSNNMVVRSXGXH

SEQ ID NO: 11700 - protein, 43 aa, Artificial Sequence
  Non-cyclic GFR-binding peptide
  MOD_RES (6)..(7)..(41)..(43): Xaa is C or S
  MOD_RES (21)..(22)..(23)..(24)..(25): Xaa is A or G
  MOD_RES (26)..(27)..(28)..(29): Xaa is A or G or absent
STPPTXXVPTRLEPLTILYYXXXXXXXXXEQLSNDMVVESXGX

SEQ ID NO: 11701 - protein, 33 aa, Artificial Sequence
  Non-cyclic GFR-binding peptide
  MOD_RES (33)..(33): Xaa is C or S
  MOD_RES (14)..(15)..(16)..(17)..(18): Xaa is A or G
  MOD_RES (19)..(20)..(21)..(22): Xaa is A or G or absent
VPQDLEPLPIVYYXXXXXXXXXEQLSNMVVKSX

SEQ ID NO: 11702 - protein, 40 aa, Artificial Sequence
  Non-cyclic GFR-binding peptide
  MOD_RES (6)..(7)..(39): Xaa is C or S
TVPKPXXAPTQLSPISVLFIDDSSNVIYKQYENMVVRAXG

SEQ ID NO: 11703 - protein, 32 aa, Artificial Sequence
  Non-cyclic GFR-binding peptide
  MOD_RES (31)..(31): Xaa is C or S
VSQDLEPLPIVYYIGKTPKIEQLSNMIVKSXK

SEQ ID NO: 11704 - protein, 38 aa, Artificial Sequence
  Non-cyclic GFR-binding peptide
  MOD_RES (6)..(7): Xaa is C or S
TVPKPXXAPTQLEPLPVVYYDDSSNVIEQLSNNMVVRA

SEQ ID NO: 11705 - protein, 34 aa, Artificial Sequence
  Non-cyclic GFR-binding peptide
  MOD_RES (1)..(32)..(34): Xaa is C or S
XVPQDLSPISILFIVGRTPKVYKQYEMVVKSXKX

SEQ ID NO: 11706 - protein, 35 aa, Artificial Sequence
  Non-cyclic GFR-binding peptide
  MOD_RES (4)..(4): Xaa is C or S
KPTXAPTKLSPISVLFIDDSSNVIYKQYENMVVRS

SEQ ID NO: 11707 - protein, 35 aa, Artificial Sequence
  Non-cyclic GFR-binding peptide
  MOD_RES (4)..(5): Xaa is C or S
ASPXXVPQDLSPISILFIVGRTPKVYKQYEMVVKS

SEQ ID NO: 11708 - protein, 39 aa, Artificial Sequence
  Non-cyclic GFR-binding peptide
  MOD_RES (3)..(4)..(38): Xaa is C or S
  MOD_RES (18)..(19)..(20)..(21)..(22): Xaa is A or G
  MOD_RES (23)..(24)..(25)..(26): Xaa is A or G or absent
KPXXAPTQLSPISVLFIXXXXXXXXXYKQYENMVVRAXG

SEQ ID NO: 11709 - protein, 33 aa, Artificial Sequence
  Non-cyclic GFR-binding peptide
  MOD_RES (1)..(1): Xaa is C or S
  MOD_RES (15)..(16)..(17)..(18)..(19): Xaa is A or G
  MOD_RES (20)..(21)..(22)..(23): Xaa is A or G or absent
XVPTELEPLTMLYYXXXXXXXXXEQLSNDMVVE

SEQ ID NO: 11710 - protein, 31 aa, Artificial Sequence
  Non-cyclic GFR-binding peptide
VPTELEPLPMVYYDENEKVVEQLSNDMVVEG

SEQ ID NO: 11711 - protein, 39 aa, Artificial Sequence
  Non-cyclic GFR-binding peptide
  MOD_RES (5)..(6): Xaa is C or S
  MOD_RES (20)..(21)..(22)..(23)..(24): Xaa is A or G
  MOD_RES (25)..(26)..(27)..(28): Xaa is A or G or absent
IPKAXXVPTELEPLTMLYYXXXXXXXXXEQLSNEMVVEG

SEQ ID NO: 11712 - protein, 40 aa, Artificial Sequence
  Non-cyclic GFR-binding peptide
  MOD_RES (6)..(7)..(39): Xaa is C or S
KIPKAXXVPTELEPLTMLYYDENEKVVEQLSNDMVVEGXG

SEQ ID NO: 11713 - protein, 36 aa, Artificial Sequence
  Non-cyclic GFR-binding peptide
  MOD_RES (1)..(35): Xaa is C or S
  MOD_RES (15)..(16)..(17)..(18)..(19): Xaa is A or G
  MOD_RES (20)..(21)..(22)..(23): Xaa is A or G or absent
XVPTRLEPLPIVYYXXXXXXXXXEQLSNDMVVESXG

SEQ ID NO: 11714 - protein, 32 aa, Artificial Sequence
  Non-cyclic GFR-binding peptide
  MOD_RES (14)..(15)..(16)..(17)..(18): Xaa is A or G
  MOD_RES (19)..(20)..(21)..(22): Xaa is A or G or absent
VPTELEPLPMVYYXXXXXXXXXEQLSNDMVVE

SEQ ID NO: 11715 - protein, 39 aa, Artificial Sequence
  Non-cyclic GFR-binding peptide
  MOD_RES (5)..(6)..(38): Xaa is C or S
IPKAXXVPTELEPLPMVYYDENEKVVEQLSNDMVVEGXG

SEQ ID NO: 11716 - protein, 35 aa, Artificial Sequence
  Non-cyclic GFR-binding peptide
  MOD_RES (1)..(2): Xaa is C or S
  MOD_RES (16)..(17)..(18)..(19)..(20): Xaa is A or G
  MOD_RES (21)..(22)..(23)..(24): Xaa is A or G or absent
XXVPTELEPLTMLYYXXXXXXXXXEQLSNEMVVEG

SEQ ID NO: 11717 - protein, 38 aa, Artificial Sequence
  Non-cyclic GFR-binding peptide
  MOD_RES (4)..(5)..(37): Xaa is C or S
PKPXXAPTQLEPLTVLYYDDSSNVIEQLSNNMVVRAXG

SEQ ID NO: 11718 - protein, 40 aa, Artificial Sequence
  Non-cyclic GFR-binding peptide
  MOD_RES (5)..(6)..(38)..(40): Xaa is C or S
TPPTXXVPTRLNAISILYFDSANNVVLKKYRDMVVESXGX

SEQ ID NO: 11719 - protein, 39 aa, Artificial Sequence
  Non-cyclic GFR-binding peptide
  MOD_RES (1)..(2)..(36)..(38): Xaa is C or S
  MOD_RES (16)..(17)..(18)..(19)..(20): Xaa is A or G
  MOD_RES (21)..(22)..(23)..(24): Xaa is A or G or absent
XXVPTRLNAISILYFXXXXXXXXXLKKYRDMVVESXGXR

SEQ ID NO: 11720 - protein, 38 aa, Artificial Sequence
  Non-cyclic GFR-binding peptide
  MOD_RES (3)..(4)..(38): Xaa is C or S
  MOD_RES (18)..(19)..(20)..(21)..(22): Xaa is A or G
  MOD_RES (23)..(24)..(25)..(26): Xaa is A or G or absent
KPXXAPTKLEPLPVVYYXXXXXXXXXEQLSNNMVVRSX

SEQ ID NO: 11721 - protein, 34 aa, Artificial Sequence
  Non-cyclic GFR-binding peptide
  MOD_RES (1)..(34): Xaa is C or S
  MOD_RES (15)..(16)..(17)..(18)..(19): Xaa is A or G
  MOD_RES (20)..(21)..(22)..(23): Xaa is A or G or absent
XVSQDLSPISILFIXXXXXXXXXYKQYEMIVKSX

SEQ ID NO: 11722 - protein, 39 aa, Artificial Sequence
  Non-cyclic GFR-binding peptide
  MOD_RES (2)..(3)..(37)..(39): Xaa is C or S
  MOD_RES (17)..(18)..(19)..(20)..(21): Xaa is A or G
  MOD_RES (22)..(23)..(24)..(25): Xaa is A or G or absent
PXXAPTQLEPLTVLYYXXXXXXXXXEQLSNNMVVRAXGX

SEQ ID NO: 11723 - protein, 39 aa, Artificial Sequence
  Non-cyclic GFR-binding peptide
  MOD_RES (1)..(2)..(36)..(38): Xaa is C or S
  MOD_RES (16)..(17)..(18)..(19)..(20): Xaa is A or G
  MOD_RES (21)..(22)..(23)..(24): Xaa is A or G or absent
XXAPTQLSPISVLFIXXXXXXXXXYKQYENMVVRAXGXH

SEQ ID NO: 11724 - protein, 38 aa, Artificial Sequence
  Non-cyclic GFR-binding peptide
  MOD_RES (3)..(35)..(37): Xaa is C or S
PTXAPTKLSPISVLFIDDSSNVIYKQYENMVVRSXGXH

SEQ ID NO: 11725 - protein, 39 aa, Artificial Sequence
  Non-cyclic GFR-binding peptide
  MOD_RES (4)..(38): Xaa is C or S
  MOD_RES (18)..(19)..(20)..(21)..(22): Xaa is A or G
  MOD_RES (23)..(24)..(25)..(26): Xaa is A or G or absent
KPTXAPTKLEPLTVLYYXXXXXXXXXEQLSNNMVVRSXG

SEQ ID NO: 11726 - protein, 39 aa, Artificial Sequence
  Non-cyclic GFR-binding peptide
  MOD_RES (5)..(6)..(39): Xaa is C or S
  MOD_RES (20)..(21)..(22)..(23)..(24): Xaa is A or G
  MOD_RES (25)..(26)..(27)..(28): Xaa is A or G or absent
SASPXXVPQDLSPISILFIXXXXXXXXXYKQYEMVVKSX

SEQ ID NO: 11727 - protein, 40 aa, Artificial Sequence
  Non-cyclic GFR-binding peptide
  MOD_RES (4)..(5)..(37)..(39): Xaa is C or S
PPTXXVPTRLEPLTILYYDSANNVVEQLSNDMVVESXGXR

SEQ ID NO: 11728 - protein, 36 aa, Artificial Sequence
  Non-cyclic GFR-binding peptide
  MOD_RES (4)..(36): Xaa is C or S
KPTXAPTKLSPISVLFIDDSSNVIYKQYENMVVRSX

SEQ ID NO: 11729 - protein, 37 aa, Artificial Sequence
  Non-cyclic GFR-binding peptide
  MOD_RES (4)..(5)..(37): Xaa is C or S
PKAXXVPTELEPLTMLYYDENEKVVEQLSNDMVVEGX

SEQ ID NO: 11730 - protein, 36 aa, Artificial Sequence
  Non-cyclic GFR-binding peptide
  MOD_RES (1)..(35): Xaa is C or S
  MOD_RES (15)..(16)..(17)..(18)..(19): Xaa is A or G
  MOD_RES (20)..(21)..(22)..(23): Xaa is A or G or absent
XVPTELEPLPMVYYXXXXXXXXXEQLSNDMVVEGXG

SEQ ID NO: 11731 - protein, 33 aa, Artificial Sequence
  Non-cyclic GFR-binding peptide
  MOD_RES (1)..(2): Xaa is C or S
XXVPTELEPLTMLYYDEYDKVVEQLSNEMVVEG

SEQ ID NO: 11732 - protein, 40 aa, Artificial Sequence
  Non-cyclic GFR-binding peptide
  MOD_RES (5)..(39): Xaa is C or S
  MOD_RES (19)..(20)..(21)..(22)..(23): Xaa is A or G
  MOD_RES (24)..(25)..(26)..(27): Xaa is A or G or absent
TKPTXAPTKLEPLTVLYYXXXXXXXXXEQLSNNMVVRSXG

SEQ ID NO: 11733 - protein, 34 aa, Artificial Sequence
  Non-cyclic GFR-binding peptide
  MOD_RES (1)..(1): Xaa is C or S
  MOD_RES (15)..(16)..(17)..(18)..(19): Xaa is A or G
  MOD_RES (20)..(21)..(22)..(23): Xaa is A or G or absent
XVPTELEPLPMVYYXXXXXXXXXEQLSNDMVVEG

SEQ ID NO: 11734 - protein, 37 aa, Artificial Sequence
  Non-cyclic GFR-binding peptide
  MOD_RES (5)..(37): Xaa is C or S
TKPTXAPTKLEPLPVVYYDDSSNVIEQLSNNMVVRSX

SEQ ID NO: 11735 - protein, 36 aa, Artificial Sequence
  Non-cyclic GFR-binding peptide
  MOD_RES (5)..(6): Xaa is C or S
SASPXXVSQDLSPISILFIIGKTPKIYKQYEMIVKS

SEQ ID NO: 11736 - protein, 42 aa, Artificial Sequence
  Non-cyclic GFR-binding peptide
  MOD_RES (5)..(6)..(39)..(41): Xaa is C or S
  MOD_RES (20)..(21)..(22)..(23)..(24): Xaa is A or G
  MOD_RES (25)..(26)..(27)..(28): Xaa is A or G or absent
SASPXXVPQDLEPLPIVYYXXXXXXXXXEQLSNMVVKSXKXS

SEQ ID NO: 11737 - protein, 35 aa, Artificial Sequence
  Non-cyclic GFR-binding peptide
  MOD_RES (4)..(5): Xaa is C or S
ASPXXVPQDLEPLPIVYYVGRTPKVEQLSNMVVKS

SEQ ID NO: 11738 - protein, 41 aa, Artificial Sequence
  Non-cyclic GFR-binding peptide
  MOD_RES (6)..(7)..(41): Xaa is C or S
  MOD_RES (21)..(22)..(23)..(24)..(25): Xaa is A or G
  MOD_RES (26)..(27)..(28)..(29): Xaa is A or G or absent
KIPKAXXVPTELEPLTMLYYXXXXXXXXXEQLSNDMVVEGX

SEQ ID NO: 11739 - protein, 38 aa, Artificial Sequence
  Non-cyclic GFR-binding peptide
  MOD_RES (3)..(4)..(37): Xaa is C or S
  MOD_RES (18)..(19)..(20)..(21)..(22): Xaa is A or G
  MOD_RES (23)..(24)..(25)..(26): Xaa is A or G or absent
SPXXVPQDLSPISILFIXXXXXXXXXYKQYEMVVKSXK

SEQ ID NO: 11740 - protein, 40 aa, Artificial Sequence
  Non-cyclic GFR-binding peptide
  MOD_RES (7)..(7): Xaa is C or S
  MOD_RES (21)..(22)..(23)..(24)..(25): Xaa is A or G
  MOD_RES (26)..(27)..(28)..(29): Xaa is A or G or absent
HVTKPTXAPTKLEPLTVLYYXXXXXXXXXEQLSNNMVVRS

SEQ ID NO: 11741 - protein, 37 aa, Artificial Sequence
  Non-cyclic GFR-binding peptide
  MOD_RES (1)..(2)..(34)..(36): Xaa is C or S
XXVPTELEPLTMLYYDEYDKVVEQLSNEMVVEGXGXR

SEQ ID NO: 11742 - protein, 39 aa, Artificial Sequence
  Non-cyclic GFR-binding peptide
  MOD_RES (1)..(2)..(36)..(38): Xaa is C or S
  MOD_RES (16)..(17)..(18)..(19)..(20): Xaa is A or G
  MOD_RES (21)..(22)..(23)..(24): Xaa is A or G or absent
XXVPTRLEPLPIVYYXXXXXXXXXEQLSNDMVVESXGXR

SEQ ID NO: 11743 - protein, 44 aa, Artificial Sequence
  Non-cyclic GFR-binding peptide
  MOD_RES (6)..(7)..(41)..(43): Xaa is C or S
  MOD_RES (21)..(22)..(23)..(24)..(25): Xaa is A or G
  MOD_RES (26)..(27)..(28)..(29): Xaa is A or G or absent
STPPTXXVPTRLNAISILYFXXXXXXXXXLKKYRDMVVESXGXR

SEQ ID NO: 11744 - protein, 41 aa, Artificial Sequence
  Non-cyclic GFR-binding peptide
  MOD_RES (6)..(7)..(39)..(41): Xaa is C or S
TVPKPXXAPTQLEPLTVLYYDDSSNVIEQLSNNMVVRAXGX

SEQ ID NO: 11745 - protein, 38 aa, Artificial Sequence
  Non-cyclic GFR-binding peptide
  MOD_RES (3)..(4)..(35)..(37): Xaa is C or S
SPXXVPQDLSPISILFIVGRTPKVYKQYEMVVKSXKXS

SEQ ID NO: 11746 - protein, 32 aa, Artificial Sequence
  Non-cyclic GFR-binding peptide
  MOD_RES (1)..(2): Xaa is C or S
XXVPTELSPISMLFIDENEKVVYKQYEDMVVE

SEQ ID NO: 11747 - protein, 37 aa, Artificial Sequence
  Non-cyclic GFR-binding peptide
  MOD_RES (6)..(7): Xaa is C or S
STPPTXXVPTRLEPLPIVYYDSANNVVEQLSNDMVVE

SEQ ID NO: 11748 - protein, 37 aa, Artificial Sequence
  Non-cyclic GFR-binding peptide
  MOD_RES (1)..(35)..(37): Xaa is C or S
  MOD_RES (15)..(16)..(17)..(18)..(19): Xaa is A or G
  MOD_RES (20)..(21)..(22)..(23): Xaa is A or G or absent
XVPTELEPLPMVYYXXXXXXXXXEQLSNDMVVEGXGX

SEQ ID NO: 11749 - protein, 34 aa, Artificial Sequence
  Non-cyclic GFR-binding peptide
  MOD_RES (1)..(2)..(34): Xaa is C or S
XXAPTKLEPLPVVYYDDSSNVIEQLSNNMVVRSX

SEQ ID NO: 11750 - protein, 38 aa, Artificial Sequence
  Non-cyclic GFR-binding peptide
  MOD_RES (2)..(3)..(35)..(37): Xaa is C or S
PXXAPTKLEPLPVVYYDDSSNVIEQLSNNMVVRSXGXH

SEQ ID NO: 11751 - protein, 33 aa, Artificial Sequence
  Non-cyclic GFR-binding peptide
  MOD_RES (3)..(3): Xaa is C or S
PTXAPTKLEPLPVVYYDDSSNVIEQLSNNMVVR

SEQ ID NO: 11752 - protein, 38 aa, Artificial Sequence
  Non-cyclic GFR-binding peptide
  MOD_RES (2)..(3)..(35)..(37): Xaa is C or S
PXXAPTQLSPISVLFIDDSSNVIYKQYENMVVRAXGXH

SEQ ID NO: 11753 - protein, 40 aa, Artificial Sequence
  Non-cyclic GFR-binding peptide
  MOD_RES (6)..(7): Xaa is C or S
  MOD_RES (21)..(22)..(23)..(24)..(25): Xaa is A or G
  MOD_RES (26)..(27)..(28)..(29): Xaa is A or G or absent
STPPTXXVPTRLEPLPIVYYXXXXXXXXXEQLSNDMVVES

SEQ ID NO: 11754 - protein, 36 aa, Artificial Sequence
  Non-cyclic GFR-binding peptide
  MOD_RES (3)..(4)..(35): Xaa is C or S
APXXVPQALSPISILFIVGRKPKVYKQYEMIVRSXK

SEQ ID NO: 11755 - protein, 39 aa, Artificial Sequence
  Non-cyclic GFR-binding peptide
  MOD_RES (4)..(5)..(39): Xaa is C or S
  MOD_RES (19)..(20)..(21)..(22)..(23): Xaa is A or G
  MOD_RES (24)..(25)..(26)..(27): Xaa is A or G or absent
PPTXXVPTRLEPLPIVYYXXXXXXXXXEQLSNDMVVESX

SEQ ID NO: 11756 - protein, 41 aa, Artificial Sequence
  Non-cyclic GFR-binding peptide
  MOD_RES (6)..(7)..(39)..(41): Xaa is C or S
SIPKAXXVPTELEPLTMLYYDEYDKVVEQLSNEMVVEGXGX

SEQ ID NO: 11757 - protein, 41 aa, Artificial Sequence
  Non-cyclic GFR-binding peptide
  MOD_RES (4)..(5)..(39)..(41): Xaa is C or S
  MOD_RES (19)..(20)..(21)..(22)..(23): Xaa is A or G
  MOD_RES (24)..(25)..(26)..(27): Xaa is A or G or absent
PKPXXAPTQLEPLPVVYYXXXXXXXXXEQLSNNMVVRAXGX

SEQ ID NO: 11758 - protein, 39 aa, Artificial Sequence
  Non-cyclic GFR-binding peptide
  MOD_RES (4)..(5)..(36)..(38): Xaa is C or S
ASPXXVSQDLEPLPIVYYIGKTPKIEQLSNMIVKSXKXS

SEQ ID NO: 11759 - protein, 34 aa, Artificial Sequence
  Non-cyclic GFR-binding peptide
  MOD_RES (3)..(4): Xaa is C or S
KPXXAPTQLEPLTVLYYDDSSNVIEQLSNNMVVR

SEQ ID NO: 11760 - protein, 34 aa, Artificial Sequence
  Non-cyclic GFR-binding peptide
  MOD_RES (3)..(4): Xaa is C or S
KPXXAPTQLEPLPVVYYDDSSNVIEQLSNNMVVR

SEQ ID NO: 11761 - protein, 40 aa, Artificial Sequence
  Non-cyclic GFR-binding peptide
  MOD_RES (3)..(37)..(39): Xaa is C or S
  MOD_RES (17)..(18)..(19)..(20)..(21): Xaa is A or G
  MOD_RES (22)..(23)..(24)..(25): Xaa is A or G or absent
PTXAPTKLEPLTVLYYXXXXXXXXXEQLSNNMVVRSXGXH

SEQ ID NO: 11762 - protein, 42 aa, Artificial Sequence
  Non-cyclic GFR-binding peptide
  MOD_RES (5)..(6)..(40)..(42): Xaa is C or S
  MOD_RES (20)..(21)..(22)..(23)..(24): Xaa is A or G
  MOD_RES (25)..(26)..(27)..(28): Xaa is A or G or absent
TPPTXXVPTRLNAISILYFXXXXXXXXXLKKYRDMVVESXGX

SEQ ID NO: 11763 - protein, 39 aa, Artificial Sequence
  Non-cyclic GFR-binding peptide
  MOD_RES (2)..(3)..(37)..(39): Xaa is C or S
  MOD_RES (17)..(18)..(19)..(20)..(21): Xaa is A or G
  MOD_RES (22)..(23)..(24)..(25): Xaa is A or G or absent
AXXVPTELEPLPMVYYXXXXXXXXXEQLSNDMVVEGXGX

SEQ ID NO: 11764 - protein, 38 aa, Artificial Sequence
  Non-cyclic GFR-binding peptide
  MOD_RES (2)..(3)..(35)..(37): Xaa is C or S
AXXVPTELSPISMLFIDEYDKVVYKQYEEMVVEGXGXR

SEQ ID NO: 11765 - protein, 38 aa, Artificial Sequence
  Non-cyclic GFR-binding peptide
  MOD_RES (4)..(5)..(38): Xaa is C or S
  MOD_RES (19)..(20)..(21)..(22)..(23): Xaa is A or G
  MOD_RES (24)..(25)..(26)..(27): Xaa is A or G or absent
ASPXXVSQDLSPISILFIXXXXXXXXXYKQYEMIVKSX

SEQ ID NO: 11766 - protein, 40 aa, Artificial Sequence
  Non-cyclic GFR-binding peptide
  MOD_RES (6)..(7): Xaa is C or S
  MOD_RES (21)..(22)..(23)..(24)..(25): Xaa is A or G
  MOD_RES (26)..(27)..(28)..(29): Xaa is A or G or absent
YVPKPXXAPTKLSPISVLFIXXXXXXXXXYKQYENMVVRS

SEQ ID NO: 11767 - protein, 42 aa, Artificial Sequence
  Non-cyclic GFR-binding peptide
  MOD_RES (6)..(7)..(41): Xaa is C or S
  MOD_RES (21)..(22)..(23)..(24)..(25): Xaa is A or G
  MOD_RES (26)..(27)..(28)..(29): Xaa is A or G or absent
STPPTXXVPTRLNAISILYFXXXXXXXXXLKKYRDMVVESXG

SEQ ID NO: 11768 - protein, 36 aa, Artificial Sequence
  Non-cyclic GFR-binding peptide
  MOD_RES (3)..(4)..(36): Xaa is C or S
KPXXAPTQLEPLTVLYYDDSSNVIEQLSNNMVVRAX

SEQ ID NO: 11769 - protein, 38 aa, Artificial Sequence
  Non-cyclic GFR-binding peptide
  MOD_RES (5)..(6): Xaa is C or S
  MOD_RES (20)..(21)..(22)..(23)..(24): Xaa is A or G
  MOD_RES (25)..(26)..(27)..(28): Xaa is A or G or absent
IPKAXXVPTELSPISMLFIXXXXXXXXXYKQYEEMVVE

SEQ ID NO: 11770 - protein, 36 aa, Artificial Sequence
  Non-cyclic GFR-binding peptide
  MOD_RES (2)..(3)..(35): Xaa is C or S
PXXAPTQLEPLPVVYYDDSSNVIEQLSNNMVVRAXG

SEQ ID NO: 11771 - protein, 42 aa, Artificial Sequence
  Non-cyclic GFR-binding peptide
  MOD_RES (6)..(7)..(39)..(41): Xaa is C or S
STPPTXXVPTRLEPLTILYYDSANNVVEQLSNDMVVESXGXR

SEQ ID NO: 11772 - protein, 32 aa, Artificial Sequence
  Non-cyclic GFR-binding peptide
  MOD_RES (32)..(32): Xaa is C or S
VPTRLNAISILYFDSANNVVLKKYRDMVVESX

SEQ ID NO: 11773 - protein, 33 aa, Artificial Sequence
  Non-cyclic GFR-binding peptide
  MOD_RES (32)..(32): Xaa is C or S
APTQLEPLPVVYYDDSSNVIEQLSNNMVVRAXG

SEQ ID NO: 11774 - protein, 32 aa, Artificial Sequence
  Non-cyclic GFR-binding peptide
  MOD_RES (1)..(1): Xaa is C or S
XVPTRLEPLPIVYYDSANNVVEQLSNDMVVES

SEQ ID NO: 11775 - protein, 40 aa, Artificial Sequence
  Non-cyclic GFR-binding peptide
  MOD_RES (5)..(6)..(39): Xaa is C or S
  MOD_RES (20)..(21)..(22)..(23)..(24): Xaa is A or G
  MOD_RES (25)..(26)..(27)..(28): Xaa is A or G or absent
SAAPXXVPQALEPLTILYYXXXXXXXXXEQLSNMIVRSXK

SEQ ID NO: 11776 - protein, 40 aa, Artificial Sequence
  Non-cyclic GFR-binding peptide
  MOD_RES (6)..(7)..(39): Xaa is C or S
SIPKAXXVPTELEPLPMVYYDEYDKVVEQLSNEMVVEGXG

SEQ ID NO: 11777 - protein, 37 aa, Artificial Sequence
  Non-cyclic GFR-binding peptide
  MOD_RES (6)..(6): Xaa is C or S
VTKPTXAPTKLSPISVLFIDDSSNVIYKQYENMVVRS

SEQ ID NO: 11778 - protein, 39 aa, Artificial Sequence
  Non-cyclic GFR-binding peptide
  MOD_RES (4)..(5)..(39): Xaa is C or S
  MOD_RES (19)..(20)..(21)..(22)..(23): Xaa is A or G
  MOD_RES (24)..(25)..(26)..(27): Xaa is A or G or absent
PKAXXVPTELSPISMLFIXXXXXXXXXYKQYEDMVVEGX

SEQ ID NO: 11779 - protein, 32 aa, Artificial Sequence
  Non-cyclic GFR-binding peptide
  MOD_RES (2)..(2): Xaa is C or S
TXAPTKLEPLPVVYYDDSSNVIEQLSNNMVVR

SEQ ID NO: 11780 - protein, 35 aa, Artificial Sequence
  Non-cyclic GFR-binding peptide
  MOD_RES (2)..(2): Xaa is C or S
  MOD_RES (16)..(17)..(18)..(19)..(20): Xaa is A or G
  MOD_RES (21)..(22)..(23)..(24): Xaa is A or G or absent
TXAPTKLEPLTVLYYXXXXXXXXXEQLSNNMVVRS

SEQ ID NO: 11781 - protein, 35 aa, Artificial Sequence
  Non-cyclic GFR-binding peptide
  MOD_RES (4)..(5): Xaa is C or S
PPTXXVPTRLNAISILYFDSANNVVLKKYRDMVVE

SEQ ID NO: 11782 - protein, 33 aa, Artificial Sequence
  Non-cyclic GFR-binding peptide
  MOD_RES (2)..(3): Xaa is C or S
AXXVPTELEPLTMLYYDENEKVVEQLSNDMVVE

SEQ ID NO: 11783 - protein, 36 aa, Artificial Sequence
  Non-cyclic GFR-binding peptide
  MOD_RES (1)..(35): Xaa is C or S
  MOD_RES (15)..(16)..(17)..(18)..(19): Xaa is A or G
  MOD_RES (20)..(21)..(22)..(23): Xaa is A or G or absent
XAPTKLEPLTVLYYXXXXXXXXXEQLSNNMVVRSXG

SEQ ID NO: 11784 - protein, 33 aa, Artificial Sequence
  Non-cyclic GFR-binding peptide
  MOD_RES (14)..(15)..(16)..(17)..(18): Xaa is A or G
  MOD_RES (19)..(20)..(21)..(22): Xaa is A or G or absent
APTQLEPLTVLYYXXXXXXXXXEQLSNNMVVRA

SEQ ID NO: 11785 - protein, 34 aa, Artificial Sequence
  Non-cyclic GFR-binding peptide
  MOD_RES (2)..(2): Xaa is C or S
  MOD_RES (16)..(17)..(18)..(19)..(20): Xaa is A or G
  MOD_RES (21)..(22)..(23)..(24): Xaa is A or G or absent
TXAPTKLEPLTVLYYXXXXXXXXXEQLSNNMVVR

SEQ ID NO: 11786 - protein, 32 aa, Artificial Sequence
  Non-cyclic GFR-binding peptide
  MOD_RES (31)..(31): Xaa is C or S
VSQDLSPISILFIIGKTPKIYKQYEMIVKSXK

SEQ ID NO: 11787 - protein, 42 aa, Artificial Sequence
  Non-cyclic GFR-binding peptide
  MOD_RES (5)..(6)..(39)..(41): Xaa is C or S
  MOD_RES (20)..(21)..(22)..(23)..(24): Xaa is A or G
  MOD_RES (25)..(26)..(27)..(28): Xaa is A or G or absent
SASPXXVSQDLSPISILFIXXXXXXXXXYKQYEMIVKSXKXS

SEQ ID NO: 11788 - protein, 41 aa, Artificial Sequence
  Non-cyclic GFR-binding peptide
  MOD_RES (6)..(7)..(39)..(41): Xaa is C or S
STPPTXXVPTRLEPLPIVYYDSANNVVEQLSNDMVVESXGX

SEQ ID NO: 11789 - protein, 37 aa, Artificial Sequence
  Non-cyclic GFR-binding peptide
  MOD_RES (3)..(4)..(36): Xaa is C or S
KAXXVPTELEPLTMLYYDENEKVVEQLSNDMVVEGXG

SEQ ID NO: 11790 - protein, 39 aa, Artificial Sequence
  Non-cyclic GFR-binding peptide
  MOD_RES (3)..(4)..(36)..(38): Xaa is C or S
KAXXVPTELEPLTMLYYDENEKVVEQLSNDMVVEGXGXR

SEQ ID NO: 11791 - protein, 41 aa, Artificial Sequence
  Non-cyclic GFR-binding peptide
  MOD_RES (6)..(7)..(39)..(41): Xaa is C or S
TVPKPXXAPTQLSPISVLFIDDSSNVIYKQYENMVVRAXGX

SEQ ID NO: 11792 - protein, 39 aa, Artificial Sequence
  Non-cyclic GFR-binding peptide
  MOD_RES (2)..(3)..(37)..(39): Xaa is C or S
  MOD_RES (17)..(18)..(19)..(20)..(21): Xaa is A or G
  MOD_RES (22)..(23)..(24)..(25): Xaa is A or G or absent
PXXAPTQLSPISVLFIXXXXXXXXXYKQYENMVVRAXGX

SEQ ID NO: 11793 - protein, 36 aa, Artificial Sequence
  Non-cyclic GFR-binding peptide
  MOD_RES (1)..(33)..(35): Xaa is C or S
XVPTELSPISMLFIDENEKVVYKQYEDMVVEGXGXR

SEQ ID NO: 11794 - protein, 30 aa, Artificial Sequence; identical to SEQ ID NO: 981
  Non-cyclic GFR-binding peptide

SEQ ID NO: 11795 - protein, 35 aa, Artificial Sequence
  Non-cyclic GFR-binding peptide
  MOD_RES (1)..(33)..(35): Xaa is C or S
XVPTELSPISMLFIDENEKVVYKQYEDMVVEGXGX

SEQ ID NO: 11796 - protein, 40 aa, Artificial Sequence
  Non-cyclic GFR-binding peptide
  MOD_RES (5)..(6)..(40): Xaa is C or S
  MOD_RES (20)..(21)..(22)..(23)..(24): Xaa is A or G
  MOD_RES (25)..(26)..(27)..(28): Xaa is A or G or absent
VPKPXXAPTQLSPISVLFIXXXXXXXXXYKQYENMVVRAX

SEQ ID NO: 11797 - protein, 38 aa, Artificial Sequence
  Non-cyclic GFR-binding peptide
  MOD_RES (4)..(5)..(36)..(38): Xaa is C or S
ASPXXVSQDLSPISILFIIGKTPKIYKQYEMIVKSXKX

SEQ ID NO: 11798 - protein, 37 aa, Artificial Sequence
  Non-cyclic GFR-binding peptide
  MOD_RES (4)..(4): Xaa is C or S
  MOD_RES (18)..(19)..(20)..(21)..(22): Xaa is A or G
  MOD_RES (23)..(24)..(25)..(26): Xaa is A or G or absent
KPTXAPTKLEPLTVLYYXXXXXXXXXEQLSNNMVVRS

SEQ ID NO: 11799 - protein, 43 aa, Artificial Sequence
  Non-cyclic GFR-binding peptide
  MOD_RES (6)..(7)..(41)..(43): Xaa is C or S
  MOD_RES (21)..(22)..(23)..(24)..(25): Xaa is A or G
  MOD_RES (26)..(27)..(28)..(29): Xaa is A or G or absent
STPPTXXVPTRLNAISILYFXXXXXXXXXLKKYRDMVVESXGX

SEQ ID NO: 11800 - protein, 35 aa, Artificial Sequence
  Non-cyclic GFR-binding peptide
  MOD_RES (1)..(35): Xaa is C or S
  MOD_RES (15)..(16)..(17)..(18)..(19): Xaa is A or G
  MOD_RES (20)..(21)..(22)..(23): Xaa is A or G or absent
XVPTELEPLTMLYYXXXXXXXXXEQLSNDMVVEGX

SEQ ID NO: 11801 - protein, 36 aa, Artificial Sequence
  Non-cyclic GFR-binding peptide
  MOD_RES (1)..(33)..(35): Xaa is C or S
XVPTELEPLTMLYYDENEKVVEQLSNDMVVEGXGXR

SEQ ID NO: 11802 - protein, 41 aa, Artificial Sequence
  Non-cyclic GFR-binding peptide
  MOD_RES (5)..(6)..(40): Xaa is C or S
  MOD_RES (20)..(21)..(22)..(23)..(24): Xaa is A or G
  MOD_RES (25)..(26)..(27)..(28): Xaa is A or G or absent
TPPTXXVPTRLSAISILYLXXXXXXXXXLKNYQDMVVESXG

SEQ ID NO: 11803 - protein, 35 aa, Artificial Sequence
  Non-cyclic GFR-binding peptide
  MOD_RES (1)..(2)..(34): Xaa is C or S
XXVPTRLEPLTILYYDSANNVVEQLSNDMVVESXG

SEQ ID NO: 11804 - protein, 42 aa, Artificial Sequence
  Non-cyclic GFR-binding peptide
  MOD_RES (5)..(6)..(40)..(42): Xaa is C or S
  MOD_RES (20)..(21)..(22)..(23)..(24): Xaa is A or G
  MOD_RES (25)..(26)..(27)..(28): Xaa is A or G or absent
VPKPXXAPTQLEPLTVLYYXXXXXXXXXEQLSNNMVVRAXGX

SEQ ID NO: 11805 - protein, 40 aa, Artificial Sequence
  Non-cyclic GFR-binding peptide
  MOD_RES (3)..(4)..(38)..(40): Xaa is C or S
  MOD_RES (18)..(19)..(20)..(21)..(22): Xaa is A or G
  MOD_RES (23)..(24)..(25)..(26): Xaa is A or G or absent
KAXXVPTELEPLTMLYYXXXXXXXXXEQLSNDMVVEGXGX

SEQ ID NO: 11806 - protein, 37 aa, Artificial Sequence
  Non-cyclic GFR-binding peptide
  MOD_RES (1)..(2)..(36): Xaa is C or S
  MOD_RES (16)..(17)..(18)..(19)..(20): Xaa is A or G
  MOD_RES (21)..(22)..(23)..(24): Xaa is A or G or absent
XXVPTELEPLTMLYYXXXXXXXXXEQLSNEMVVEGXG

SEQ ID NO: 11807 - protein, 38 aa, Artificial Sequence
  Non-cyclic GFR-binding peptide
  MOD_RES (5)..(6): Xaa is C or S
  MOD_RES (20)..(21)..(22)..(23)..(24): Xaa is A or G
  MOD_RES (25)..(26)..(27)..(28): Xaa is A or G or absent
VPKPXXAPTKLEPLPVVYYXXXXXXXXXEQLSNNMVVR

SEQ ID NO: 11808 - protein, 34 aa, Artificial Sequence
  Non-cyclic GFR-binding peptide
  MOD_RES (32)..(34): Xaa is C or S
APTKLEPLTVLYYDDSSNVIEQLSNNMVVRSXGX

SEQ ID NO: 11809 - protein, 43 aa, Artificial Sequence
  Non-cyclic GFR-binding peptide
  MOD_RES (6)..(7)..(41)..(43): Xaa is C or S
  MOD_RES (21)..(22)..(23)..(24)..(25): Xaa is A or G
  MOD_RES (26)..(27)..(28)..(29): Xaa is A or G or absent
KIPKAXXVPTELEPLTMLYYXXXXXXXXXEQLSNDMVVEGXGX

SEQ ID NO: 11810 - protein, 32 aa, Artificial Sequence
  Non-cyclic GFR-binding peptide
  MOD_RES (32)..(32): Xaa is C or S
APTKLEPLPVVYYDDSSNVIEQLSNNMVVRSX

SEQ ID NO: 11811 - protein, 37 aa, Artificial Sequence
  Non-cyclic GFR-binding peptide
  MOD_RES (2)..(3)..(35)..(37): Xaa is C or S
TXXVPTRLEPLTILYYDSANNVVEQLSNDMVVESXGX

SEQ ID NO: 11812 - protein, 36 aa, Artificial Sequence
  Non-cyclic GFR-binding peptide
  MOD_RES (1)..(33)..(35): Xaa is C or S
XAPTKLSPISVLFIDDSSNVIYKQYENMVVRSXGXH

SEQ ID NO: 11813 - protein, 38 aa, Artificial Sequence
  Non-cyclic GFR-binding peptide
  MOD_RES (6)..(7): Xaa is C or S
KIPKAXXVPTELEPLPMVYYDENEKVVEQLSNDMVVEG

SEQ ID NO: 11814 - protein, 36 aa, Artificial Sequence
  Non-cyclic GFR-binding peptide
  MOD_RES (2)..(3)..(36): Xaa is C or S
  MOD_RES (17)..(18)..(19)..(20)..(21): Xaa is A or G
  MOD_RES (22)..(23)..(24)..(25): Xaa is A or G or absent
PXXVSQDLSPISILFIXXXXXXXXXYKQYEMIVKSX

SEQ ID NO: 11815 - protein, 37 aa, Artificial Sequence
  Non-cyclic GFR-binding peptide
  MOD_RES (2)..(34)..(36): Xaa is C or S
TXAPTKLSPISVLFIDDSSNVIYKQYENMVVRSXGXH

SEQ ID NO: 11816 - protein, 39 aa, Artificial Sequence
  Non-cyclic GFR-binding peptide
  MOD_RES (5)..(6): Xaa is C or S
  MOD_RES (20)..(21)..(22)..(23)..(24): Xaa is A or G
  MOD_RES (25)..(26)..(27)..(28): Xaa is A or G or absent
VPKPXXAPTQLSPISVLFIXXXXXXXXXYKQYENMVVRA

SEQ ID NO: 11817 - protein, 43 aa, Artificial Sequence
  Non-cyclic GFR-binding peptide
  MOD_RES (7)..(41)..(43): Xaa is C or S
  MOD_RES (21)..(22)..(23)..(24)..(25): Xaa is A or G
  MOD_RES (26)..(27)..(28)..(29): Xaa is A or G or absent
HVTKPTXAPTKLEPLTVLYYXXXXXXXXXEQLSNNMVVRSXGX

SEQ ID NO: 11818 - protein, 31 aa, Artificial Sequence
  Non-cyclic GFR-binding peptide
  MOD_RES (1)..(1): Xaa is C or S
XVPTELEPLPMVYYDENEKVVEQLSNDMVVE

SEQ ID NO: 11819 - protein, 38 aa, Artificial Sequence
  Non-cyclic GFR-binding peptide
  MOD_RES (4)..(5): Xaa is C or S
  MOD_RES (19)..(20)..(21)..(22)..(23): Xaa is A or G
  MOD_RES (24)..(25)..(26)..(27): Xaa is A or G or absent
PKPXXAPTKLEPLTVLYYXXXXXXXXXEQLSNNMVVRS

SEQ ID NO: 11820 - protein, 34 aa, Artificial Sequence
  Non-cyclic GFR-binding peptide
  MOD_RES (32)..(34): Xaa is C or S
APTKLSPISVLFIDDSSNVIYKQYENMVVRSXGX

SEQ ID NO: 11821 - protein, 41 aa, Artificial Sequence
  Non-cyclic GFR-binding peptide
  MOD_RES (6)..(7)..(39)..(41): Xaa is C or S
KIPKAXXVPTELEPLPMVYYDENEKVVEQLSNDMVVEGXGX

SEQ ID NO: 11822 - protein, 30 aa, Artificial Sequence
  Non-cyclic GFR-binding peptide
VPTELEPLPMVYYDEYDKVVEQLSNEMVVE

SEQ ID NO: 11823 - protein, 33 aa, Artificial Sequence
  Non-cyclic GFR-binding peptide
  MOD_RES (1)..(2): Xaa is C or S
XXVPTRLNAISILYFDSANNVVLKKYRDMVVES

SEQ ID NO: 11824 - protein, 36 aa, Artificial Sequence
  Non-cyclic GFR-binding peptide
  MOD_RES (3)..(35): Xaa is C or S
PTXAPTKLEPLTVLYYDDSSNVIEQLSNNMVVRSXG

SEQ ID NO: 11825 - protein, 36 aa, Artificial Sequence
  Non-cyclic GFR-binding peptide
  MOD_RES (1)..(2)..(36): Xaa is C or S
  MOD_RES (16)..(17)..(18)..(19)..(20): Xaa is A or G
  MOD_RES (21)..(22)..(23)..(24): Xaa is A or G or absent
XXVPTELEPLTMLYYXXXXXXXXXEQLSNEMVVEGX

SEQ ID NO: 11826 - protein, 35 aa, Artificial Sequence
  Non-cyclic GFR-binding peptide
  MOD_RES (1)..(33)..(35): Xaa is C or S
XVPTELEPLTMLYYDENEKVVEQLSNDMVVEGXGX

SEQ ID NO: 11827 - protein, 43 aa, Artificial Sequence
  Non-cyclic GFR-binding peptide
  MOD_RES (5)..(6)..(40)..(42): Xaa is C or S
  MOD_RES (20)..(21)..(22)..(23)..(24): Xaa is A or G
  MOD_RES (25)..(26)..(27)..(28): Xaa is A or G or absent
TPPTXXVPTRLEPLTILYYXXXXXXXXXEQLSNDMVVESXGXR

SEQ ID NO: 11828 - protein, 36 aa, Artificial Sequence
  Non-cyclic GFR-binding peptide
  MOD_RES (2)..(3)..(35): Xaa is C or S
PXXAPTKLEPLTVLYYDDSSNVIEQLSNNMVVRSXG

SEQ ID NO: 11829 - protein, 40 aa, Artificial Sequence
  Non-cyclic GFR-binding peptide
  MOD_RES (6)..(7)..(39): Xaa is C or S
TVPKPXXAPTQLEPLPVVYYDDSSNVIEQLSNNMVVRAXG

SEQ ID NO: 11830 - protein, 39 aa, Artificial Sequence
  Non-cyclic GFR-binding peptide
  MOD_RES (1)..(2)..(36)..(38): Xaa is C or S
  MOD_RES (16)..(17)..(18)..(19)..(20): Xaa is A or G
  MOD_RES (21)..(22)..(23)..(24): Xaa is A or G or absent
XXAPTQLEPLTVLYYXXXXXXXXXEQLSNNMVVRAXGXH

SEQ ID NO: 11831 - protein, 32 aa, Artificial Sequence
  Non-cyclic GFR-binding peptide
  MOD_RES (31)..(31): Xaa is C or S
VPQDLEPLPIVYYVGRTPKVEQLSNMVVKSXK

SEQ ID NO: 11832 - protein, 37 aa, Artificial Sequence
  Non-cyclic GFR-binding peptide
  MOD_RES (7)..(7): Xaa is C or S
HVTKPTXAPTKLEPLTVLYYDDSSNVIEQLSNNMVVR

SEQ ID NO: 11833 - protein, 37 aa, Artificial Sequence
  Non-cyclic GFR-binding peptide
  MOD_RES (3)..(4)..(36): Xaa is C or S
KAXXVPTELSPISMLFIDEYDKVVYKQYEEMVVEGXG

SEQ ID NO: 11834 - protein, 41 aa, Artificial Sequence
  Non-cyclic GFR-binding peptide
  MOD_RES (6)..(7)..(40): Xaa is C or S
  MOD_RES (21)..(22)..(23)..(24)..(25): Xaa is A or G
  MOD_RES (26)..(27)..(28)..(29): Xaa is A or G or absent
ASASPXXVPQDLSPISILFIXXXXXXXXXYKQYEMVVKSXK

SEQ ID NO: 11835 - protein, 37 aa, Artificial Sequence
  Non-cyclic GFR-binding peptide
  MOD_RES (3)..(4)..(36): Xaa is C or S
KPXXAPTKLSPISVLFIDDSSNVIYKQYENMVVRSXG

SEQ ID NO: 11836 - protein, 40 aa, Artificial Sequence
  Non-cyclic GFR-binding peptide
  MOD_RES (4)..(5)..(38)..(40): Xaa is C or S
  MOD_RES (19)..(20)..(21)..(22)..(23): Xaa is A or G
  MOD_RES (24)..(25)..(26)..(27): Xaa is A or G or absent
AAPXXVPQALSPISILFIXXXXXXXXXYKQYEMIVRSXKX

SEQ ID NO: 11837 - protein, 37 aa, Artificial Sequence
  Non-cyclic GFR-binding peptide
  MOD_RES (2)..(3)..(34)..(36): Xaa is C or S
PXXVPQDLSPISILFIVGRTPKVYKQYEMVVKSXKXS

SEQ ID NO: 11838 - protein, 34 aa, Artificial Sequence
  Non-cyclic GFR-binding peptide
  MOD_RES (1)..(1): Xaa is C or S
  MOD_RES (15)..(16)..(17)..(18)..(19): Xaa is A or G
  MOD_RES (20)..(21)..(22)..(23): Xaa is A or G or absent
XVPTELEPLTMLYYXXXXXXXXXEQLSNEMVVEG

SEQ ID NO: 11839 - protein, 35 aa, Artificial Sequence
  Non-cyclic GFR-binding peptide
  MOD_RES (4)..(5): Xaa is C or S
PKPXXAPTQLEPLTVLYYDDSSNVIEQLSNNMVVR

SEQ ID NO: 11840 - protein, 37 aa, Artificial Sequence
  Non-cyclic GFR-binding peptide
  MOD_RES (2)..(34)..(36): Xaa is C or S
TXAPTKLEPLTVLYYDDSSNVIEQLSNNMVVRSXGXH

SEQ ID NO: 11841 - protein, 41 aa, Artificial Sequence
  Non-cyclic GFR-binding peptide
  MOD_RES (4)..(5)..(38)..(40): Xaa is C or S
  MOD_RES (19)..(20)..(21)..(22)..(23): Xaa is A or G
  MOD_RES (24)..(25)..(26)..(27): Xaa is A or G or absent
ASPXXVSQDLEPLPIVYYXXXXXXXXXEQLSNMIVKSXKXS

SEQ ID NO: 11842 - protein, 38 aa, Artificial Sequence
  Non-cyclic GFR-binding peptide
  MOD_RES (4)..(5)..(38): Xaa is C or S
  MOD_RES (19)..(20)..(21)..(22)..(23): Xaa is A or G
  MOD_RES (24)..(25)..(26)..(27): Xaa is A or G or absent
ASPXXVPQDLSPISILFIXXXXXXXXXYKQYEMVVKSX

SEQ ID NO: 11843 - protein, 37 aa, Artificial Sequence
  Non-cyclic GFR-binding peptide
  MOD_RES (2)..(3)..(37): Xaa is C or S
  MOD_RES (17)..(18)..(19)..(20)..(21): Xaa is A or G
  MOD_RES (22)..(23)..(24)..(25): Xaa is A or G or absent
AXXVPTELSPISMLFIXXXXXXXXXYKQYEEMVVEGX

SEQ ID NO: 11844 - protein, 40 aa, Artificial Sequence
  Non-cyclic GFR-binding peptide
  MOD_RES (6)..(7): Xaa is C or S
  MOD_RES (21)..(22)..(23)..(24)..(25): Xaa is A or G
  MOD_RES (26)..(27)..(28)..(29): Xaa is A or G or absent
KIPKAXXVPTELEPLPMVYYXXXXXXXXXEQLSNDMVVEG

SEQ ID NO: 11845 - protein, 34 aa, Artificial Sequence
  Non-cyclic GFR-binding peptide
  MOD_RES (1)..(33): Xaa is C or S
XVPTELEPLPMVYYDENEKVVEQLSNDMVVEGXG

SEQ ID NO: 11846 - protein, 36 aa, Artificial Sequence
  Non-cyclic GFR-binding peptide
  MOD_RES (1)..(2)..(36): Xaa is C or S
  MOD_RES (16)..(17)..(18)..(19)..(20): Xaa is A or G
  MOD_RES (21)..(22)..(23)..(24): Xaa is A or G or absent
XXAPTQLEPLTVLYYXXXXXXXXXEQLSNNMVVRAX

SEQ ID NO: 11847 - protein, 40 aa, Artificial Sequence
  Non-cyclic GFR-binding peptide
  MOD_RES (6)..(7): Xaa is C or S
  MOD_RES (21)..(22)..(23)..(24)..(25): Xaa is A or G
  MOD_RES (26)..(27)..(28)..(29): Xaa is A or G or absent
KIPKAXXVPTELEPLTMLYYXXXXXXXXXEQLSNDMVVEG

SEQ ID NO: 11848 - protein, 40 aa, Artificial Sequence
  Non-cyclic GFR-binding peptide
  MOD_RES (7)..(39): Xaa is C or S
HVTKPTXAPTKLEPLTVLYYDDSSNVIEQLSNNMVVRSXG

SEQ ID NO: 11849 - protein, 37 aa, Artificial Sequence
  Non-cyclic GFR-binding peptide
  MOD_RES (34)..(36): Xaa is C or S
  MOD_RES (14)..(15)..(16)..(17)..(18): Xaa is A or G
  MOD_RES (19)..(20)..(21)..(22): Xaa is A or G or absent
APTQLEPLPVVYYXXXXXXXXXEQLSNNMVVRAXGXH

SEQ ID NO: 11850 - protein, 39 aa, Artificial Sequence
  Non-cyclic GFR-binding peptide
  MOD_RES (6)..(7)..(39): Xaa is C or S
KIPKAXXVPTELSPISMLFIDENEKVVYKQYEDMVVEGX

SEQ ID NO: 11851 - protein, 37 aa, Artificial Sequence
  Non-cyclic GFR-binding peptide
  MOD_RES (1)..(2)..(36): Xaa is C or S
  MOD_RES (16)..(17)..(18)..(19)..(20): Xaa is A or G
  MOD_RES (21)..(22)..(23)..(24): Xaa is A or G or absent
XXVPTELSPISMLFIXXXXXXXXXYKQYEEMVVEGXG

SEQ ID NO: 11852 - protein, 38 aa, Artificial Sequence
  Non-cyclic GFR-binding peptide
  MOD_RES (4)..(5)..(37): Xaa is C or S
PPTXXVPTRLSAISILYLDSANNVVLKNYQDMVVESXG

SEQ ID NO: 11853 - protein, 37 aa, Artificial Sequence
  Non-cyclic GFR-binding peptide
  MOD_RES (3)..(4)..(36): Xaa is C or S
KAXXVPTELEPLPMVYYDEYDKVVEQLSNEMVVEGXG

SEQ ID NO: 11854 - protein, 39 aa, Artificial Sequence
  Non-cyclic GFR-binding peptide
  MOD_RES (3)..(4)..(38): Xaa is C or S
  MOD_RES (18)..(19)..(20)..(21)..(22): Xaa is A or G
  MOD_RES (23)..(24)..(25)..(26): Xaa is A or G or absent
KAXXVPTELEPLPMVYYXXXXXXXXXEQLSNDMVVEGXG

SEQ ID NO: 11855 - protein, 36 aa, Artificial Sequence
  Non-cyclic GFR-binding peptide
  MOD_RES (5)..(6): Xaa is C or S
IPKAXXVPTELEPLTMLYYDENEKVVEQLSNDMVVE

SEQ ID NO: 11856 - protein, 37 aa, Artificial Sequence
  Non-cyclic GFR-binding peptide
  MOD_RES (1)..(2)..(34)..(36): Xaa is C or S
XXAPTQLEPLPVVYYDDSSNVIEQLSNNMVVRAXGXH

SEQ ID NO: 11857 - protein, 37 aa, Artificial Sequence
  Non-cyclic GFR-binding peptide
  MOD_RES (2)..(3)..(37): Xaa is C or S
  MOD_RES (17)..(18)..(19)..(20)..(21): Xaa is A or G
  MOD_RES (22)..(23)..(24)..(25): Xaa is A or G or absent
TXXVPTRLNAISILYFXXXXXXXXXLKKYRDMVVESX

SEQ ID NO: 11858 - protein, 30 aa, Artificial Sequence
  Non-cyclic GFR-binding peptide
APTKLEPLTVLYYDDSSNVIEQLSNNMVVR

SEQ ID NO: 11859 - protein, 38 aa, Artificial Sequence
  Non-cyclic GFR-binding peptide
  MOD_RES (1)..(2)..(36)..(38): Xaa is C or S
  MOD_RES (16)..(17)..(18)..(19)..(20): Xaa is A or G
  MOD_RES (21)..(22)..(23)..(24): Xaa is A or G or absent
XXAPTQLEPLPVVYYXXXXXXXXXEQLSNNMVVRAXGX

SEQ ID NO: 11860 - protein, 39 aa, Artificial Sequence
  Non-cyclic GFR-binding peptide
  MOD_RES (3)..(4)..(36)..(38): Xaa is C or S
KPXXAPTQLEPLPVVYYDDSSNVIEQLSNNMVVRAXGXH

SEQ ID NO: 11861 - protein, 39 aa, Artificial Sequence
  Non-cyclic GFR-binding peptide
  MOD_RES (6)..(7): Xaa is C or S
  MOD_RES (21)..(22)..(23)..(24)..(25): Xaa is A or G
  MOD_RES (26)..(27)..(28)..(29): Xaa is A or G or absent
KIPKAXXVPTELSPISMLFIXXXXXXXXXYKQYEDMVVE

SEQ ID NO: 11862 - protein, 43 aa, Artificial Sequence
  Non-cyclic GFR-binding peptide
  MOD_RES (5)..(6)..(40)..(42): Xaa is C or S
  MOD_RES (20)..(21)..(22)..(23)..(24): Xaa is A or G
  MOD_RES (25)..(26)..(27)..(28): Xaa is A or G or absent
IPKAXXVPTELEPLTMLYYXXXXXXXXXEQLSNDMVVEGXGXR

SEQ ID NO: 11863 - protein, 42 aa, Artificial Sequence
  Non-cyclic GFR-binding peptide
  MOD_RES (6)..(7)..(39)..(41): Xaa is C or S
SIPKAXXVPTELEPLPMVYYDEYDKVVEQLSNEMVVEGXGXR

SEQ ID NO: 11864 - protein, 37 aa, Artificial Sequence
  Non-cyclic GFR-binding peptide
  MOD_RES (3)..(4)..(36): Xaa is C or S
KPXXAPTKLEPLTVLYYDDSSNVIEQLSNNMVVRSXG

SEQ ID NO: 11865 - protein, 34 aa, Artificial Sequence
  Non-cyclic GFR-binding peptide
  MOD_RES (1)..(2)..(33): Xaa is C or S
XXVSQDLEPLPIVYYIGKTPKIEQLSNMIVKSXK

SEQ ID NO: 11866 - protein, 38 aa, Artificial Sequence
  Non-cyclic GFR-binding peptide
  MOD_RES (5)..(6)..(37): Xaa is C or S
SASPXXVSQDLEPLPIVYYIGKTPKIEQLSNMIVKSXK

SEQ ID NO: 11867 - protein, 37 aa, Artificial Sequence
  Non-cyclic GFR-binding peptide
  MOD_RES (5)..(5): Xaa is C or S
  MOD_RES (19)..(20)..(21)..(22)..(23): Xaa is A or G
  MOD_RES (24)..(25)..(26)..(27): Xaa is A or G or absent
TKPTXAPTKLEPLTVLYYXXXXXXXXXEQLSNNMVVR

SEQ ID NO: 11868 - protein, 34 aa, Artificial Sequence
  Non-cyclic GFR-binding peptide
  MOD_RES (2)..(3): Xaa is C or S
PXXAPTKLEPLTVLYYDDSSNVIEQLSNNMVVRS

SEQ ID NO: 11869 - protein, 37 aa, Artificial Sequence
  Non-cyclic GFR-binding peptide
  MOD_RES (4)..(5)..(37): Xaa is C or S
PKPXXAPTQLEPLTVLYYDDSSNVIEQLSNNMVVRAX

SEQ ID NO: 11870 - protein, 42 aa, Artificial Sequence
  Non-cyclic GFR-binding peptide
  MOD_RES (7)..(39)..(41): Xaa is C or S
HVTKPTXAPTKLEPLTVLYYDDSSNVIEQLSNNMVVRSXGXH

SEQ ID NO: 11871 - protein, 33 aa, Artificial Sequence
  Non-cyclic GFR-binding peptide
  MOD_RES (1)..(2): Xaa is C or S
XXAPTQLEPLPVVYYDDSSNVIEQLSNNMVVRA

SEQ ID NO: 11872 - protein, 40 aa, Artificial Sequence
  Non-cyclic GFR-binding peptide
  MOD_RES (5)..(6)..(38)..(40): Xaa is C or S
IPKAXXVPTELEPLPMVYYDENEKVVEQLSNDMVVEGXGX

SEQ ID NO: 11873 - protein, 31 aa, Artificial Sequence
  Non-cyclic GFR-binding peptide
  MOD_RES (1)..(1): Xaa is C or S
XAPTQLEPLTVLYYDDSSNVIEQLSNNMVVR

SEQ ID NO: 11874 - protein, 35 aa, Artificial Sequence
  Non-cyclic GFR-binding peptide
  MOD_RES (2)..(3): Xaa is C or S
  MOD_RES (17)..(18)..(19)..(20)..(21): Xaa is A or G
  MOD_RES (22)..(23)..(24)..(25): Xaa is A or G or absent
AXXVPTELSPISMLFIXXXXXXXXXYKQYEEMVVE

SEQ ID NO: 11875 - protein, 42 aa, Artificial Sequence
  Non-cyclic GFR-binding peptide
  MOD_RES (6)..(40)..(42): Xaa is C or S
  MOD_RES (20)..(21)..(22)..(23)..(24): Xaa is A or G
  MOD_RES (25)..(26)..(27)..(28): Xaa is A or G or absent
VTKPTXAPTKLEPLTVLYYXXXXXXXXXEQLSNNMVVRSXGX

SEQ ID NO: 11876 - protein, 36 aa, Artificial Sequence
  Non-cyclic GFR-binding peptide
  MOD_RES (3)..(4): Xaa is C or S
  MOD_RES (18)..(19)..(20)..(21)..(22): Xaa is A or G
  MOD_RES (23)..(24)..(25)..(26): Xaa is A or G or absent
PTXXVPTRLEPLTILYYXXXXXXXXXEQLSNDMVVE

SEQ ID NO: 11877 - protein, 37 aa, Artificial Sequence
  Non-cyclic GFR-binding peptide
  MOD_RES (1)..(2)..(34)..(36): Xaa is C or S
XXVPTELSPISMLFIDEYDKVVYKQYEEMVVEGXGXR

SEQ ID NO: 11878 - protein, 40 aa, Artificial Sequence
  Non-cyclic GFR-binding peptide
  MOD_RES (5)..(6)..(39): Xaa is C or S
  MOD_RES (20)..(21)..(22)..(23)..(24): Xaa is A or G
  MOD_RES (25)..(26)..(27)..(28): Xaa is A or G or absent
SASPXXVPQDLSPISILFIXXXXXXXXXYKQYEMVVKSXK

SEQ ID NO: 11879 - protein, 37 aa, Artificial Sequence
  Non-cyclic GFR-binding peptide
  MOD_RES (4)..(5): Xaa is C or S
  MOD_RES (19)..(20)..(21)..(22)..(23): Xaa is A or G
  MOD_RES (24)..(25)..(26)..(27): Xaa is A or G or absent
PKAXXVPTELEPLPMVYYXXXXXXXXXEQLSNEMVVE

SEQ ID NO: 11880 - protein, 33 aa, Artificial Sequence
  Non-cyclic GFR-binding peptide
  MOD_RES (1)..(1): Xaa is C or S
  MOD_RES (15)..(16)..(17)..(18)..(19): Xaa is A or G
  MOD_RES (20)..(21)..(22)..(23): Xaa is A or G or absent
XAPTKLEPLTVLYYXXXXXXXXXEQLSNNMVVR

SEQ ID NO: 11881 - protein, 40 aa, Artificial Sequence
  Non-cyclic GFR-binding peptide
  MOD_RES (5)..(6)..(37)..(39): Xaa is C or S
SASPXXVPQDLEPLPIVYYVGRTPKVEQLSNMVVKSXKXS

SEQ ID NO: 11882 - protein, 36 aa, Artificial Sequence
  Non-cyclic GFR-binding peptide
  MOD_RES (33)..(35): Xaa is C or S
  MOD_RES (14)..(15)..(16)..(17)..(18): Xaa is A or G
  MOD_RES (19)..(20)..(21)..(22): Xaa is A or G or absent
VSQDLEPLPIVYYXXXXXXXXXEQLSNMIVKSXKXS

SEQ ID NO: 11883 - protein, 42 aa, Artificial Sequence
  Non-cyclic GFR-binding peptide
  MOD_RES (5)..(6)..(40)..(42): Xaa is C or S
  MOD_RES (20)..(21)..(22)..(23)..(24): Xaa is A or G
  MOD_RES (25)..(26)..(27)..(28): Xaa is A or G or absent
IPKAXXVPTELEPLTMLYYXXXXXXXXXEQLSNEMVVEGXGX

SEQ ID NO: 11884 - protein, 32 aa, Artificial Sequence
  Non-cyclic GFR-binding peptide
  MOD_RES (32)..(32): Xaa is C or S
VPTELEPLTMLYYDEYDKVVEQLSNEMVVEGX

SEQ ID NO: 11885 - protein, 32 aa, Artificial Sequence
  Non-cyclic GFR-binding peptide
  MOD_RES (14)..(15)..(16)..(17)..(18): Xaa is A or G
  MOD_RES (19)..(20)..(21)..(22): Xaa is A or G or absent
APTKLEPLPVVYYXXXXXXXXXEQLSNNMVVR

SEQ ID NO: 11886 - protein, 36 aa, Artificial Sequence
  Non-cyclic GFR-binding peptide
  MOD_RES (1)..(34)..(36): Xaa is C or S
  MOD_RES (15)..(16)..(17)..(18)..(19): Xaa is A or G
  MOD_RES (20)..(21)..(22)..(23): Xaa is A or G or absent
XVPQDLSPISILFIXXXXXXXXXYKQYEMVVKSXKX

SEQ ID NO: 11887 - protein, 36 aa, Artificial Sequence
  Non-cyclic GFR-binding peptide
  MOD_RES (5)..(6): Xaa is C or S
TPPTXXVPTRLEPLTILYYDSANNVVEQLSNDMVVE

SEQ ID NO: 11888 - protein, 32 aa, Artificial Sequence
  Non-cyclic GFR-binding peptide
  MOD_RES (1)..(2): Xaa is C or S
XXVPTELEPLPMVYYDENEKVVEQLSNDMVVE

SEQ ID NO: 11889 - protein, 38 aa, Artificial Sequence
  Non-cyclic GFR-binding peptide
  MOD_RES (4)..(5)..(36)..(38): Xaa is C or S
ASPXXVPQDLSPISILFIVGRTPKVYKQYEMVVKSXKX

SEQ ID NO: 11890 - protein, 40 aa, Artificial Sequence
  Non-cyclic GFR-binding peptide
  MOD_RES (4)..(5)..(39): Xaa is C or S
  MOD_RES (19)..(20)..(21)..(22)..(23): Xaa is A or G
  MOD_RES (24)..(25)..(26)..(27): Xaa is A or G or absent
PKPXXAPTKLEPLPVVYYXXXXXXXXXEQLSNNMVVRSXG

SEQ ID NO: 11891 - protein, 33 aa, Artificial Sequence
  Non-cyclic GFR-binding peptide
  MOD_RES (31)..(33): Xaa is C or S
VPQDLSPISILFIVGRTPKVYKQYEMVVKSXKX

SEQ ID NO: 11892 - protein, 36 aa, Artificial Sequence
  Non-cyclic GFR-binding peptide
  MOD_RES (34)..(36): Xaa is C or S
  MOD_RES (14)..(15)..(16)..(17)..(18): Xaa is A or G
  MOD_RES (19)..(20)..(21)..(22): Xaa is A or G or absent
VPTELSPISMLFIXXXXXXXXXYKQYEDMVVEGXGX

SEQ ID NO: 11893 - protein, 38 aa, Artificial Sequence
  Non-cyclic GFR-binding peptide
  MOD_RES (5)..(6): Xaa is C or S
  MOD_RES (20)..(21)..(22)..(23)..(24): Xaa is A or G
  MOD_RES (25)..(26)..(27)..(28): Xaa is A or G or absent
VPKPXXAPTKLEPLTVLYYXXXXXXXXXEQLSNNMVVR

SEQ ID NO: 11894 - protein, 40 aa, Artificial Sequence
  Non-cyclic GFR-binding peptide
  MOD_RES (5)..(6)..(40): Xaa is C or S
  MOD_RES (20)..(21)..(22)..(23)..(24): Xaa is A or G
  MOD_RES (25)..(26)..(27)..(28): Xaa is A or G or absent
VPKPXXAPTKLEPLTVLYYXXXXXXXXXEQLSNNMVVRSX

SEQ ID NO: 11895 - protein, 34 aa, Artificial Sequence
  Non-cyclic GFR-binding peptide
  MOD_RES (2)..(3): Xaa is C or S
AXXVPTELSPISMLFIDENEKVVYKQYEDMVVEG

SEQ ID NO: 11896 - protein, 32 aa, Artificial Sequence
  Non-cyclic GFR-binding peptide
  MOD_RES (1)..(32): Xaa is C or S
XVPQALSPISILFIVGRKPKVYKQYEMIVRSX

SEQ ID NO: 11897 - protein, 42 aa, Artificial Sequence
  Non-cyclic GFR-binding peptide
  MOD_RES (5)..(6)..(40)..(42): Xaa is C or S
  MOD_RES (20)..(21)..(22)..(23)..(24): Xaa is A or G
  MOD_RES (25)..(26)..(27)..(28): Xaa is A or G or absent
IPKAXXVPTELEPLTMLYYXXXXXXXXXEQLSNDMVVEGXGX

SEQ ID NO: 11898 - protein, 37 aa, Artificial Sequence
  Non-cyclic GFR-binding peptide
  MOD_RES (3)..(4)..(36): Xaa is C or S
KPXXAPTQLEPLTVLYYDDSSNVIEQLSNNMVVRAXG

SEQ ID NO: 11899 - protein, 41 aa, Artificial Sequence
  Non-cyclic GFR-binding peptide
  MOD_RES (4)..(5)..(38)..(40): Xaa is C or S
  MOD_RES (19)..(20)..(21)..(22)..(23): Xaa is A or G
  MOD_RES (24)..(25)..(26)..(27): Xaa is A or G or absent
AAPXXVPQALSPISILFIXXXXXXXXXYKQYEMIVRSXKXS

SEQ ID NO: 11900 - protein, 39 aa, Artificial Sequence
  Non-cyclic GFR-binding peptide
  MOD_RES (5)..(39): Xaa is C or S
  MOD_RES (19)..(20)..(21)..(22)..(23): Xaa is A or G
  MOD_RES (24)..(25)..(26)..(27): Xaa is A or G or absent
TKPTXAPTKLEPLTVLYYXXXXXXXXXEQLSNNMVVRSX

SEQ ID NO: 11901 - protein, 38 aa, Artificial Sequence
  Non-cyclic GFR-binding peptide
  MOD_RES (1)..(35)..(37): Xaa is C or S
  MOD_RES (15)..(16)..(17)..(18)..(19): Xaa is A or G
  MOD_RES (20)..(21)..(22)..(23): Xaa is A or G or absent
XAPTQLEPLPVVYYXXXXXXXXXEQLSNNMVVRAXGXH

SEQ ID NO: 11902 - protein, 38 aa, Artificial Sequence
  Non-cyclic GFR-binding peptide
  MOD_RES (5)..(6): Xaa is C or S
  MOD_RES (20)..(21)..(22)..(23)..(24): Xaa is A or G
  MOD_RES (25)..(26)..(27)..(28): Xaa is A or G or absent
SASPXXVPQDLEPLPIVYYXXXXXXXXXEQLSNMVVKS

SEQ ID NO: 11903 - protein, 40 aa, Artificial Sequence
  Non-cyclic GFR-binding peptide
  MOD_RES (6)..(7): Xaa is C or S
  MOD_RES (21)..(22)..(23)..(24)..(25): Xaa is A or G
  MOD_RES (26)..(27)..(28)..(29): Xaa is A or G or absent
SIPKAXXVPTELEPLTMLYYXXXXXXXXXEQLSNEMVVEG

SEQ ID NO: 11904 - protein, 41 aa, Artificial Sequence
  Non-cyclic GFR-binding peptide
  MOD_RES (3)..(4)..(38)..(40): Xaa is C or S
  MOD_RES (18)..(19)..(20)..(21)..(22): Xaa is A or G
  MOD_RES (23)..(24)..(25)..(26): Xaa is A or G or absent
KPXXAPTKLEPLTVLYYXXXXXXXXXEQLSNNMVVRSXGXH

SEQ ID NO: 11905 - protein, 32 aa, Artificial Sequence
  Non-cyclic GFR-binding peptide
  MOD_RES (2)..(2): Xaa is C or S
TXAPTKLSPISVLFIDDSSNVIYKQYENMVVR

SEQ ID NO: 11906 - protein, 37 aa, Artificial Sequence
  Non-cyclic GFR-binding peptide
  MOD_RES (1)..(34)..(36): Xaa is C or S
  MOD_RES (15)..(16)..(17)..(18)..(19): Xaa is A or G
  MOD_RES (20)..(21)..(22)..(23): Xaa is A or G or absent
XVSQDLSPISILFIXXXXXXXXXYKQYEMIVKSXKXS

SEQ ID NO: 11907 - protein, 37 aa, Artificial Sequence
  Non-cyclic GFR-binding peptide
  MOD_RES (3)..(35)..(37): Xaa is C or S
PTXAPTKLSPISVLFIDDSSNVIYKQYENMVVRSXGX

SEQ ID NO: 11908 - protein, 37 aa, Artificial Sequence
  Non-cyclic GFR-binding peptide
  MOD_RES (4)..(5): Xaa is C or S
  MOD_RES (19)..(20)..(21)..(22)..(23): Xaa is A or G
  MOD_RES (24)..(25)..(26)..(27): Xaa is A or G or absent
AAPXXVPQALSPISILFIXXXXXXXXXYKQYEMIVRS

SEQ ID NO: 11909 - protein, 37 aa, Artificial Sequence
  Non-cyclic GFR-binding peptide
  MOD_RES (5)..(5): Xaa is C or S
  MOD_RES (19)..(20)..(21)..(22)..(23): Xaa is A or G
  MOD_RES (24)..(25)..(26)..(27): Xaa is A or G or absent
TKPTXAPTKLEPLPVVYYXXXXXXXXXEQLSNNMVVR

SEQ ID NO: 11910 - protein, 40 aa, Artificial Sequence
  Non-cyclic GFR-binding peptide
  MOD_RES (2)..(3)..(37)..(39): Xaa is C or S
  MOD_RES (17)..(18)..(19)..(20)..(21): Xaa is A or G
  MOD_RES (22)..(23)..(24)..(25): Xaa is A or G or absent
TXXVPTRLNAISILYFXXXXXXXXXLKKYRDMVVESXGXR

SEQ ID NO: 11911 - protein, 37 aa, Artificial Sequence
  Non-cyclic GFR-binding peptide
  MOD_RES (4)..(5)..(36): Xaa is C or S
ASPXXVPQDLSPISILFIVGRTPKVYKQYEMVVKSXK

SEQ ID NO: 11912 - protein, 36 aa, Artificial Sequence
  Non-cyclic GFR-binding peptide
  MOD_RES (3)..(4): Xaa is C or S
  MOD_RES (18)..(19)..(20)..(21)..(22): Xaa is A or G
  MOD_RES (23)..(24)..(25)..(26): Xaa is A or G or absent
PTXXVPTRLEPLPIVYYXXXXXXXXXEQLSNDMVVE

SEQ ID NO: 11913 - protein, 40 aa, Artificial Sequence
  Non-cyclic GFR-binding peptide
  MOD_RES (6)..(7): Xaa is C or S
  MOD_RES (21)..(22)..(23)..(24)..(25): Xaa is A or G
  MOD_RES (26)..(27)..(28)..(29): Xaa is A or G or absent
YVPKPXXAPTKLEPLPVVYYXXXXXXXXXEQLSNNMVVRS

SEQ ID NO: 11914 - protein, 37 aa, Artificial Sequence
  Non-cyclic GFR-binding peptide
  MOD_RES (1)..(2)..(36): Xaa is C or S
  MOD_RES (16)..(17)..(18)..(19)..(20): Xaa is A or G
  MOD_RES (21)..(22)..(23)..(24): Xaa is A or G or absent
XXVPTRLNAISILYFXXXXXXXXXLKKYRDMVVESXG

SEQ ID NO: 11915 - protein, 41 aa, Artificial Sequence
  Non-cyclic GFR-binding peptide
  MOD_RES (6)..(7)..(41): Xaa is C or S
  MOD_RES (21)..(22)..(23)..(24)..(25): Xaa is A or G
  MOD_RES (26)..(27)..(28)..(29): Xaa is A or G or absent
SIPKAXXVPTELSPISMLFIXXXXXXXXXYKQYEEMVVEGX

SEQ ID NO: 11916 - protein, 39 aa, Artificial Sequence
  Non-cyclic GFR-binding peptide
  MOD_RES (3)..(4)..(38): Xaa is C or S
  MOD_RES (18)..(19)..(20)..(21)..(22): Xaa is A or G
  MOD_RES (23)..(24)..(25)..(26): Xaa is A or G or absent
KAXXVPTELSPISMLFIXXXXXXXXXYKQYEDMVVEGXG

SEQ ID NO: 11917 - protein, 39 aa, Artificial Sequence
  Non-cyclic GFR-binding peptide
  MOD_RES (4)..(5)..(36)..(38): Xaa is C or S
AAPXXVPQALEPLTILYYVGRKPKVEQLSNMIVRSXKXS

SEQ ID NO: 11918 - protein, 40 aa, Artificial Sequence
  Non-cyclic GFR-binding peptide
  MOD_RES (5)..(6)..(38)..(40): Xaa is C or S
VPKPXXAPTQLEPLPVVYYDDSSNVIEQLSNNMVVRAXGX

SEQ ID NO: 11919 - protein, 43 aa, Artificial Sequence
  Non-cyclic GFR-binding peptide
  MOD_RES (6)..(7)..(41)..(43): Xaa is C or S
  MOD_RES (21)..(22)..(23)..(24)..(25): Xaa is A or G
  MOD_RES (26)..(27)..(28)..(29): Xaa is A or G or absent
KIPKAXXVPTELEPLPMVYYXXXXXXXXXEQLSNDMVVEGXGX

SEQ ID NO: 11920 - protein, 33 aa, Artificial Sequence
  Non-cyclic GFR-binding peptide
  MOD_RES (14)..(15)..(16)..(17)..(18): Xaa is A or G
  MOD_RES (19)..(20)..(21)..(22): Xaa is A or G or absent
APTQLEPLPVVYYXXXXXXXXXEQLSNNMVVRA

SEQ ID NO: 11921 - protein, 32 aa, Artificial Sequence
  Non-cyclic GFR-binding peptide
  MOD_RES (1)..(2): Xaa is C or S
XXAPTQLEPLTVLYYDDSSNVIEQLSNNMVVR

SEQ ID NO: 11922 - protein, 42 aa, Artificial Sequence
  Non-cyclic GFR-binding peptide
  MOD_RES (4)..(5)..(39)..(41): Xaa is C or S
  MOD_RES (19)..(20)..(21)..(22)..(23): Xaa is A or G
  MOD_RES (24)..(25)..(26)..(27): Xaa is A or G or absent
PKPXXAPTQLEPLTVLYYXXXXXXXXXEQLSNNMVVRAXGXH

SEQ ID NO: 11923 - protein, 34 aa, Artificial Sequence
  Non-cyclic GFR-binding peptide
  MOD_RES (2)..(3): Xaa is C or S
PXXAPTKLEPLPVVYYDDSSNVIEQLSNNMVVRS

SEQ ID NO: 11924 - protein, 40 aa, Artificial Sequence
  Non-cyclic GFR-binding peptide
  MOD_RES (7)..(39): Xaa is C or S
HVTKPTXAPTKLSPISVLFIDDSSNVIYKQYENMVVRSXG

SEQ ID NO: 11925 - protein, 38 aa, Artificial Sequence
  Non-cyclic GFR-binding peptide
  MOD_RES (6)..(7)..(38): Xaa is C or S
ASASPXXVSQDLSPISILFIIGKTPKIYKQYEMIVKSX

SEQ ID NO: 11926 - protein, 41 aa, Artificial Sequence
  Non-cyclic GFR-binding peptide
  MOD_RES (6)..(7)..(39)..(41): Xaa is C or S
YVPKPXXAPTKLEPLPVVYYDDSSNVIEQLSNNMVVRSXGX

SEQ ID NO: 11927 - protein, 35 aa, Artificial Sequence
  Non-cyclic GFR-binding peptide
  MOD_RES (1)..(33)..(35): Xaa is C or S
XVPTELSPISMLFIDEYDKVVYKQYEEMVVEGXGX

SEQ ID NO: 11928 - protein, 34 aa, Artificial Sequence
  Non-cyclic GFR-binding peptide
  MOD_RES (31)..(33): Xaa is C or S
VPQDLEPLPIVYYVGRTPKVEQLSNMVVKSXKXS

SEQ ID NO: 11929 - protein, 40 aa, Artificial Sequence
  Non-cyclic GFR-binding peptide
  MOD_RES (4)..(5)..(38)..(40): Xaa is C or S
  MOD_RES (19)..(20)..(21)..(22)..(23): Xaa is A or G
  MOD_RES (24)..(25)..(26)..(27): Xaa is A or G or absent
ASPXXVSQDLSPISILFIXXXXXXXXXYKQYEMIVKSXKX

SEQ ID NO: 11930 - protein, 38 aa, Artificial Sequence
  Non-cyclic GFR-binding peptide
  MOD_RES (2)..(36)..(38): Xaa is C or S
  MOD_RES (16)..(17)..(18)..(19)..(20): Xaa is A or G
  MOD_RES (21)..(22)..(23)..(24): Xaa is A or G or absent
TXAPTKLEPLTVLYYXXXXXXXXXEQLSNNMVVRSXGX

SEQ ID NO: 11931 - protein, 40 aa, Artificial Sequence
  Non-cyclic GFR-binding peptide
  MOD_RES (3)..(4)..(38)..(40): Xaa is C or S
  MOD_RES (18)..(19)..(20)..(21)..(22): Xaa is A or G
  MOD_RES (23)..(24)..(25)..(26): Xaa is A or G or absent
KAXXVPTELEPLPMVYYXXXXXXXXXEQLSNEMVVEGXGX

SEQ ID NO: 11932 - protein, 36 aa, Artificial Sequence
  Non-cyclic GFR-binding peptide
  MOD_RES (1)..(2)..(34)..(36): Xaa is C or S
XXAPTKLEPLPVVYYDDSSNVIEQLSNNMVVRSXGX

SEQ ID NO: 11933 - protein, 36 aa, Artificial Sequence
  Non-cyclic GFR-binding peptide
  MOD_RES (3)..(35): Xaa is C or S
PTXAPTKLSPISVLFIDDSSNVIYKQYENMVVRSXG

SEQ ID NO: 11934 - protein, 39 aa, Artificial Sequence
  Non-cyclic GFR-binding peptide
  MOD_RES (6)..(7)..(39): Xaa is C or S
SIPKAXXVPTELEPLPMVYYDEYDKVVEQLSNEMVVEGX

SEQ ID NO: 11935 - protein, 35 aa, Artificial Sequence
  Non-cyclic GFR-binding peptide
  MOD_RES (34)..(34): Xaa is C or S
  MOD_RES (14)..(15)..(16)..(17)..(18): Xaa is A or G
  MOD_RES (19)..(20)..(21)..(22): Xaa is A or G or absent
VPTELEPLTMLYYXXXXXXXXXEQLSNDMVVEGXG

SEQ ID NO: 11936 - protein, 39 aa, Artificial Sequence
  Non-cyclic GFR-binding peptide
  MOD_RES (4)..(5)..(37)..(39): Xaa is C or S
PKAXXVPTELEPLPMVYYDEYDKVVEQLSNEMVVEGXGX

SEQ ID NO: 11937 - protein, 37 aa, Artificial Sequence
  Non-cyclic GFR-binding peptide
  MOD_RES (34)..(36): Xaa is C or S
  MOD_RES (14)..(15)..(16)..(17)..(18): Xaa is A or G
  MOD_RES (19)..(20)..(21)..(22): Xaa is A or G or absent
APTQLSPISVLFIXXXXXXXXXYKQYENMVVRAXGXH

SEQ ID NO: 11938 - protein, 38 aa, Artificial Sequence
  Non-cyclic GFR-binding peptide
  MOD_RES (4)..(5): Xaa is C or S
  MOD_RES (19)..(20)..(21)..(22)..(23): Xaa is A or G
  MOD_RES (24)..(25)..(26)..(27): Xaa is A or G or absent
PPTXXVPTRLEPLTILYYXXXXXXXXXEQLSNDMVVES

SEQ ID NO: 11939 - protein, 42 aa, Artificial Sequence
  Non-cyclic GFR-binding peptide
  MOD_RES (5)..(6)..(40)..(42): Xaa is C or S
  MOD_RES (20)..(21)..(22)..(23)..(24): Xaa is A or G
  MOD_RES (25)..(26)..(27)..(28): Xaa is A or G or absent
VPKPXXAPTQLEPLPVVYYXXXXXXXXXEQLSNNMVVRAXGX

SEQ ID NO: 11940 - protein, 33 aa, Artificial Sequence
  Non-cyclic GFR-binding peptide
  MOD_RES (31)..(33): Xaa is C or S
VSQDLSPISILFIIGKTPKIYKQYEMIVKSXKX

SEQ ID NO: 11941 - protein, 35 aa, Artificial Sequence
  Non-cyclic GFR-binding peptide
  MOD_RES (1)..(33)..(35): Xaa is C or S
XVPTELEPLTMLYYDEYDKVVEQLSNEMVVEGXGX

SEQ ID NO: 11942 - protein, 37 aa, Artificial Sequence
  Non-cyclic GFR-binding peptide
  MOD_RES (3)..(35)..(37): Xaa is C or S
PTXAPTKLEPLTVLYYDDSSNVIEQLSNNMVVRSXGX

SEQ ID NO: 11943 - protein, 34 aa, Artificial Sequence
  Non-cyclic GFR-binding peptide
  MOD_RES (34)..(34): Xaa is C or S
  MOD_RES (14)..(15)..(16)..(17)..(18): Xaa is A or G
  MOD_RES (19)..(20)..(21)..(22): Xaa is A or G or absent
VPTELEPLTMLYYXXXXXXXXXEQLSNDMVVEGX

SEQ ID NO: 11944 - protein, 43 aa, Artificial Sequence
  Non-cyclic GFR-binding peptide
  MOD_RES (5)..(6)..(40)..(42): Xaa is C or S
  MOD_RES (20)..(21)..(22)..(23)..(24): Xaa is A or G
  MOD_RES (25)..(26)..(27)..(28): Xaa is A or G or absent
VPKPXXAPTKLEPLTVLYYXXXXXXXXXEQLSNNMVVRSXGXH

SEQ ID NO: 11945 - protein, 42 aa, Artificial Sequence
  Non-cyclic GFR-binding peptide
  MOD_RES (5)..(6)..(40)..(42): Xaa is C or S
  MOD_RES (20)..(21)..(22)..(23)..(24): Xaa is A or G
  MOD_RES (25)..(26)..(27)..(28): Xaa is A or G or absent
VPKPXXAPTKLSPISVLFIXXXXXXXXXYKQYENMVVRSXGX

SEQ ID NO: 11946 - protein, 40 aa, Artificial Sequence
  Non-cyclic GFR-binding peptide
  MOD_RES (3)..(4)..(38)..(40): Xaa is C or S
  MOD_RES (18)..(19)..(20)..(21)..(22): Xaa is A or G
  MOD_RES (23)..(24)..(25)..(26): Xaa is A or G or absent
KAXXVPTELEPLPMVYYXXXXXXXXXEQLSNDMVVEGXGX

SEQ ID NO: 11947 - protein, 36 aa, Artificial Sequence
  Non-cyclic GFR-binding peptide
  MOD_RES (1)..(33)..(35): Xaa is C or S
XVPTELSPISMLFIDEYDKVVYKQYEEMVVEGXGXR

SEQ ID NO: 11948 - protein, 40 aa, Artificial Sequence
  Non-cyclic GFR-binding peptide
  MOD_RES (3)..(4)..(38)..(40): Xaa is C or S
  MOD_RES (18)..(19)..(20)..(21)..(22): Xaa is A or G
  MOD_RES (23)..(24)..(25)..(26): Xaa is A or G or absent
KAXXVPTELEPLTMLYYXXXXXXXXXEQLSNEMVVEGXGX

SEQ ID NO: 11949 - protein, 38 aa, Artificial Sequence
  Non-cyclic GFR-binding peptide
  MOD_RES (3)..(4)..(36)..(38): Xaa is C or S
KPXXAPTQLEPLPVVYYDDSSNVIEQLSNNMVVRAXGX

SEQ ID NO: 11950 - protein, 37 aa, Artificial Sequence
  Non-cyclic GFR-binding peptide
  MOD_RES (1)..(2)..(35)..(37): Xaa is C or S
  MOD_RES (16)..(17)..(18)..(19)..(20): Xaa is A or G
  MOD_RES (21)..(22)..(23)..(24): Xaa is A or G or absent
XXVPQDLSPISILFIXXXXXXXXXYKQYEMVVKSXKX

SEQ ID NO: 11951 - protein, 41 aa, Artificial Sequence
  Non-cyclic GFR-binding peptide
  MOD_RES (6)..(7)..(41): Xaa is C or S
  MOD_RES (21)..(22)..(23)..(24)..(25): Xaa is A or G
  MOD_RES (26)..(27)..(28)..(29): Xaa is A or G or absent
TVPKPXXAPTQLEPLPVVYYXXXXXXXXXEQLSNNMVVRAX

SEQ ID NO: 11952 - protein, 38 aa, Artificial Sequence
  Non-cyclic GFR-binding peptide
  MOD_RES (5)..(6): Xaa is C or S
  MOD_RES (20)..(21)..(22)..(23)..(24): Xaa is A or G
  MOD_RES (25)..(26)..(27)..(28): Xaa is A or G or absent
SASPXXVPQDLSPISILFIXXXXXXXXXYKQYEMVVKS

SEQ ID NO: 11953 - protein, 32 aa, Artificial Sequence
  Non-cyclic GFR-binding peptide
  MOD_RES (1)..(2): Xaa is C or S
XXAPTKLEPLTVLYYDDSSNVIEQLSNNMVVR

SEQ ID NO: 11954 - protein, 42 aa, Artificial Sequence
  Non-cyclic GFR-binding peptide
  MOD_RES (5)..(39)..(41): Xaa is C or S
  MOD_RES (19)..(20)..(21)..(22)..(23): Xaa is A or G
  MOD_RES (24)..(25)..(26)..(27): Xaa is A or G or absent
TKPTXAPTKLEPLPVVYYXXXXXXXXXEQLSNNMVVRSXGXH

SEQ ID NO: 11955 - protein, 35 aa, Artificial Sequence
  Non-cyclic GFR-binding peptide
  MOD_RES (1)..(34): Xaa is C or S
  MOD_RES (15)..(16)..(17)..(18)..(19): Xaa is A or G
  MOD_RES (20)..(21)..(22)..(23): Xaa is A or G or absent
XVPQALSPISILFIXXXXXXXXXYKQYEMIVRSXK

SEQ ID NO: 11956 - protein, 37 aa, Artificial Sequence
  Non-cyclic GFR-binding peptide
  MOD_RES (1)..(2)..(36): Xaa is C or S
  MOD_RES (16)..(17)..(18)..(19)..(20): Xaa is A or G
  MOD_RES (21)..(22)..(23)..(24): Xaa is A or G or absent
XXAPTQLSPISVLFIXXXXXXXXXYKQYENMVVRAXG

SEQ ID NO: 11957 - protein, 36 aa, Artificial Sequence
  Non-cyclic GFR-binding peptide
  MOD_RES (2)..(3)..(35): Xaa is C or S
AXXVPTELEPLPMVYYDENEKVVEQLSNDMVVEGXG

SEQ ID NO: 11958 - protein, 38 aa, Artificial Sequence
  Non-cyclic GFR-binding peptide
  MOD_RES (6)..(7)..(38): Xaa is C or S
ASAAPXXVPQALEPLTILYYVGRKPKVEQLSNMIVRSX

SEQ ID NO: 11959 - protein, 35 aa, Artificial Sequence
  Non-cyclic GFR-binding peptide
  MOD_RES (32)..(34): Xaa is C or S
VPTELEPLPMVYYDENEKVVEQLSNDMVVEGXGXR

SEQ ID NO: 11960 - protein, 40 aa, Artificial Sequence
  Non-cyclic GFR-binding peptide
  MOD_RES (5)..(6)..(38)..(40): Xaa is C or S
IPKAXXVPTELEPLPMVYYDEYDKVVEQLSNEMVVEGXGX

SEQ ID NO: 11961 - protein, 40 aa, Artificial Sequence
  Non-cyclic GFR-binding peptide
  MOD_RES (5)..(6)..(40): Xaa is C or S
  MOD_RES (20)..(21)..(22)..(23)..(24): Xaa is A or G
  MOD_RES (25)..(26)..(27)..(28): Xaa is A or G or absent
TPPTXXVPTRLNAISILYFXXXXXXXXXLKKYRDMVVESX

SEQ ID NO: 11962 - protein, 33 aa, Artificial Sequence
  Non-cyclic GFR-binding peptide
  MOD_RES (1)..(2)..(33): Xaa is C or S
XXVSQDLSPISILFIIGKTPKIYKQYEMIVKSX

SEQ ID NO: 11963 - protein, 37 aa, Artificial Sequence
  Non-cyclic GFR-binding peptide
  MOD_RES (4)..(5): Xaa is C or S
  MOD_RES (19)..(20)..(21)..(22)..(23): Xaa is A or G
  MOD_RES (24)..(25)..(26)..(27): Xaa is A or G or absent
PPTXXVPTRLNAISILYFXXXXXXXXXLKKYRDMVVE

SEQ ID NO: 11964 - protein, 37 aa, Artificial Sequence
  Non-cyclic GFR-binding peptide
  MOD_RES (1)..(2)..(36): Xaa is C or S
  MOD_RES (16)..(17)..(18)..(19)..(20): Xaa is A or G
  MOD_RES (21)..(22)..(23)..(24): Xaa is A or G or absent
XXVPTELSPISMLFIXXXXXXXXXYKQYEDMVVEGXG

SEQ ID NO: 11965 - protein, 39 aa, Artificial Sequence
  Non-cyclic GFR-binding peptide
  MOD_RES (4)..(5)..(38): Xaa is C or S
  MOD_RES (19)..(20)..(21)..(22)..(23): Xaa is A or G
  MOD_RES (24)..(25)..(26)..(27): Xaa is A or G or absent
AAPXXVPQALEPLTILYYXXXXXXXXXEQLSNMIVRSXK

SEQ ID NO: 11966 - protein, 39 aa, Artificial Sequence
  Non-cyclic GFR-binding peptide
  MOD_RES (1)..(2)..(36)..(38): Xaa is C or S
  MOD_RES (16)..(17)..(18)..(19)..(20): Xaa is A or G
  MOD_RES (21)..(22)..(23)..(24): Xaa is A or G or absent
XXVPTELEPLTMLYYXXXXXXXXXEQLSNEMVVEGXGXR

SEQ ID NO: 11967 - protein, 34 aa, Artificial Sequence
  Non-cyclic GFR-binding peptide
  MOD_RES (34)..(34): Xaa is C or S
  MOD_RES (14)..(15)..(16)..(17)..(18): Xaa is A or G
  MOD_RES (19)..(20)..(21)..(22): Xaa is A or G or absent
VPTELSPISMLFIXXXXXXXXXYKQYEEMVVEGX

SEQ ID NO: 11968 - protein, 35 aa, Artificial Sequence
  Non-cyclic GFR-binding peptide
  MOD_RES (1)..(2): Xaa is C or S
  MOD_RES (16)..(17)..(18)..(19)..(20): Xaa is A or G
  MOD_RES (21)..(22)..(23)..(24): Xaa is A or G or absent
XXVPTELEPLPMVYYXXXXXXXXXEQLSNDMVVEG

SEQ ID NO: 11969 - protein, 39 aa, Artificial Sequence
  Non-cyclic GFR-binding peptide
  MOD_RES (5)..(6): Xaa is C or S
  MOD_RES (20)..(21)..(22)..(23)..(24): Xaa is A or G
  MOD_RES (25)..(26)..(27)..(28): Xaa is A or G or absent
IPKAXXVPTELEPLPMVYYXXXXXXXXXEQLSNEMVVEG

SEQ ID NO: 11970 - protein, 36 aa, Artificial Sequence
  Non-cyclic GFR-binding peptide
  MOD_RES (5)..(6): Xaa is C or S
IPKAXXVPTELEPLPMVYYDENEKVVEQLSNDMVVE

SEQ ID NO: 11971 - protein, 34 aa, Artificial Sequence
  Non-cyclic GFR-binding peptide
  MOD_RES (32)..(34): Xaa is C or S
VPTRLSAISILYLDSANNVVLKNYQDMVVESXGX

SEQ ID NO: 11972 - protein, 42 aa, Artificial Sequence
  Non-cyclic GFR-binding peptide
  MOD_RES (4)..(5)..(39)..(41): Xaa is C or S
  MOD_RES (19)..(20)..(21)..(22)..(23): Xaa is A or G
  MOD_RES (24)..(25)..(26)..(27): Xaa is A or G or absent
PPTXXVPTRLEPLTILYYXXXXXXXXXEQLSNDMVVESXGXR

SEQ ID NO: 11973 - protein, 40 aa, Artificial Sequence
  Non-cyclic GFR-binding peptide
  MOD_RES (6)..(7): Xaa is C or S
  MOD_RES (21)..(22)..(23)..(24)..(25): Xaa is A or G
  MOD_RES (26)..(27)..(28)..(29): Xaa is A or G or absent
YVPKPXXAPTKLEPLTVLYYXXXXXXXXXEQLSNNMVVRS

SEQ ID NO: 11974 - protein, 43 aa, Artificial Sequence
  Non-cyclic GFR-binding peptide
  MOD_RES (6)..(40)..(42): Xaa is C or S
  MOD_RES (20)..(21)..(22)..(23)..(24): Xaa is A or G
  MOD_RES (25)..(26)..(27)..(28): Xaa is A or G or absent
VTKPTXAPTKLSPISVLFIXXXXXXXXXYKQYENMVVRSXGXH

SEQ ID NO: 11975 - protein, 32 aa, Artificial Sequence
  Non-cyclic GFR-binding peptide
  MOD_RES (1)..(2): Xaa is C or S
XXAPTQLEPLPVVYYDDSSNVIEQLSNNMVVR

SEQ ID NO: 11976 - protein, 40 aa, Artificial Sequence
  Non-cyclic GFR-binding peptide
  MOD_RES (4)..(5)..(39): Xaa is C or S
  MOD_RES (19)..(20)..(21)..(22)..(23): Xaa is A or G
  MOD_RES (24)..(25)..(26)..(27): Xaa is A or G or absent
PPTXXVPTRLEPLTILYYXXXXXXXXXEQLSNDMVVESXG

SEQ ID NO: 11977 - protein, 37 aa, Artificial Sequence
  Non-cyclic GFR-binding peptide
  MOD_RES (3)..(4)..(36): Xaa is C or S
KAXXVPTELSPISMLFIDENEKVVYKQYEDMVVEGXG

SEQ ID NO: 11978 - protein, 40 aa, Artificial Sequence
  Non-cyclic GFR-binding peptide
  MOD_RES (6)..(7)..(39): Xaa is C or S
YVPKPXXAPTKLEPLPVVYYDDSSNVIEQLSNNMVVRSXG

SEQ ID NO: 11979 - protein, 36 aa, Artificial Sequence
  Non-cyclic GFR-binding peptide
  MOD_RES (4)..(5)..(36): Xaa is C or S
AAPXXVPQALSPISILFIVGRKPKVYKQYEMIVRSX

SEQ ID NO: 11980 - protein, 42 aa, Artificial Sequence
  Non-cyclic GFR-binding peptide
  MOD_RES (6)..(7)..(41): Xaa is C or S
  MOD_RES (21)..(22)..(23)..(24)..(25): Xaa is A or G
  MOD_RES (26)..(27)..(28)..(29): Xaa is A or G or absent
KIPKAXXVPTELEPLTMLYYXXXXXXXXXEQLSNDMVVEGXG

SEQ ID NO: 11981 - protein, 38 aa, Artificial Sequence
  Non-cyclic GFR-binding peptide
  MOD_RES (2)..(3)..(37): Xaa is C or S
  MOD_RES (17)..(18)..(19)..(20)..(21): Xaa is A or G
  MOD_RES (22)..(23)..(24)..(25): Xaa is A or G or absent
AXXVPTELEPLTMLYYXXXXXXXXXEQLSNEMVVEGXG

SEQ ID NO: 11982 - protein, 33 aa, Artificial Sequence
  Non-cyclic GFR-binding peptide
  MOD_RES (1)..(2): Xaa is C or S
XXAPTQLSPISVLFIDDSSNVIYKQYENMVVRA

SEQ ID NO: 11983 - protein, 33 aa, Artificial Sequence
  Non-cyclic GFR-binding peptide
  MOD_RES (1)..(2): Xaa is C or S
XXVPTRLEPLTILYYDSANNVVEQLSNDMVVES

SEQ ID NO: 11984 - protein, 33 aa, Artificial Sequence
  Non-cyclic GFR-binding peptide
  MOD_RES (1)..(1): Xaa is C or S
  MOD_RES (15)..(16)..(17)..(18)..(19): Xaa is A or G
  MOD_RES (20)..(21)..(22)..(23): Xaa is A or G or absent
XVPTELEPLPMVYYXXXXXXXXXEQLSNEMVVE

SEQ ID NO: 11985 - protein, 40 aa, Artificial Sequence
  Non-cyclic GFR-binding peptide
  MOD_RES (3)..(4)..(37)..(39): Xaa is C or S
  MOD_RES (18)..(19)..(20)..(21)..(22): Xaa is A or G
  MOD_RES (23)..(24)..(25)..(26): Xaa is A or G or absent
APXXVPQALSPISILFIXXXXXXXXXYKQYEMIVRSXKXS

SEQ ID NO: 11986 - protein, 37 aa, Artificial Sequence
  Non-cyclic GFR-binding peptide
  MOD_RES (5)..(6): Xaa is C or S
VPKPXXAPTQLSPISVLFIDDSSNVIYKQYENMVVRA

SEQ ID NO: 11987 - protein, 33 aa, Artificial Sequence
  Non-cyclic GFR-binding peptide
  MOD_RES (14)..(15)..(16)..(17)..(18): Xaa is A or G
  MOD_RES (19)..(20)..(21)..(22): Xaa is A or G or absent
APTQLSPISVLFIXXXXXXXXXYKQYENMVVRA

SEQ ID NO: 11988 - protein, 39 aa, Artificial Sequence
  Non-cyclic GFR-binding peptide
  MOD_RES (4)..(5)..(37)..(39): Xaa is C or S
PKPXXAPTQLEPLPVVYYDDSSNVIEQLSNNMVVRAXGX

SEQ ID NO: 11989 - protein, 34 aa, Artificial Sequence
  Non-cyclic GFR-binding peptide
  MOD_RES (1)..(2): Xaa is C or S
  MOD_RES (16)..(17)..(18)..(19)..(20): Xaa is A or G
  MOD_RES (21)..(22)..(23)..(24): Xaa is A or G or absent
XXVPTELEPLPMVYYXXXXXXXXXEQLSNDMVVE

SEQ ID NO: 11990 - protein, 33 aa, Artificial Sequence
  Non-cyclic GFR-binding peptide
  MOD_RES (32)..(32): Xaa is C or S
VPTRLEPLTILYYDSANNVVEQLSNDMVVESXG

SEQ ID NO: 11991 - protein, 36 aa, Artificial Sequence
  Non-cyclic GFR-binding peptide
  MOD_RES (1)..(2)..(36): Xaa is C or S
  MOD_RES (16)..(17)..(18)..(19)..(20): Xaa is A or G
  MOD_RES (21)..(22)..(23)..(24): Xaa is A or G or absent
XXVPTELSPISMLFIXXXXXXXXXYKQYEDMVVEGX

SEQ ID NO: 11992 - protein, 41 aa, Artificial Sequence
  Non-cyclic GFR-binding peptide
  MOD_RES (7)..(41): Xaa is C or S
  MOD_RES (21)..(22)..(23)..(24)..(25): Xaa is A or G
  MOD_RES (26)..(27)..(28)..(29): Xaa is A or G or absent
HVTKPTXAPTKLEPLPVVYYXXXXXXXXXEQLSNNMVVRSX

SEQ ID NO: 11993 - protein, 34 aa, Artificial Sequence
  Non-cyclic GFR-binding peptide
  MOD_RES (3)..(4): Xaa is C or S
APXXVPQALSPISILFIVGRKPKVYKQYEMIVRS

SEQ ID NO: 11994 - protein, 42 aa, Artificial Sequence
  Non-cyclic GFR-binding peptide
  MOD_RES (6)..(7)..(39)..(41): Xaa is C or S
KIPKAXXVPTELEPLTMLYYDENEKVVEQLSNDMVVEGXGXR

SEQ ID NO: 11995 - protein, 38 aa, Artificial Sequence
  Non-cyclic GFR-binding peptide
  MOD_RES (1)..(35)..(37): Xaa is C or S
  MOD_RES (15)..(16)..(17)..(18)..(19): Xaa is A or G
  MOD_RES (20)..(21)..(22)..(23): Xaa is A or G or absent
XAPTQLSPISVLFIXXXXXXXXXYKQYENMVVRAXGXH

SEQ ID NO: 11996 - protein, 39 aa, Artificial Sequence
  Non-cyclic GFR-binding peptide
  MOD_RES (3)..(4)..(36)..(38): Xaa is C or S
KAXXVPTELEPLTMLYYDEYDKVVEQLSNEMVVEGXGXR

SEQ ID NO: 11997 - protein, 38 aa, Artificial Sequence
  Non-cyclic GFR-binding peptide
  MOD_RES (5)..(6)..(37): Xaa is C or S
SASPXXVPQDLEPLPIVYYVGRTPKVEQLSNMVVKSXK

SEQ ID NO: 11998 - protein, 38 aa, Artificial Sequence
  Non-cyclic GFR-binding peptide
  MOD_RES (3)..(4)..(36)..(38): Xaa is C or S
KPXXAPTKLEPLPVVYYDDSSNVIEQLSNNMVVRSXGX

SEQ ID NO: 11999 - protein, 37 aa, Artificial Sequence
  Non-cyclic GFR-binding peptide
  MOD_RES (3)..(37): Xaa is C or S
  MOD_RES (17)..(18)..(19)..(20)..(21): Xaa is A or G
  MOD_RES (22)..(23)..(24)..(25): Xaa is A or G or absent
PTXAPTKLSPISVLFIXXXXXXXXXYKQYENMVVRSX

SEQ ID NO: 12000 - protein, 35 aa, Artificial Sequence
  Non-cyclic GFR-binding peptide
  MOD_RES (3)..(4): Xaa is C or S
KPXXAPTKLEPLPVVYYDDSSNVIEQLSNNMVVRS

SEQ ID NO: 12001 - protein, 34 aa, Artificial Sequence
  Non-cyclic GFR-binding peptide
  MOD_RES (1)..(2): Xaa is C or S
  MOD_RES (16)..(17)..(18)..(19)..(20): Xaa is A or G
  MOD_RES (21)..(22)..(23)..(24): Xaa is A or G or absent
XXAPTQLSPISVLFIXXXXXXXXXYKQYENMVVR

SEQ ID NO: 12002 - protein, 38 aa, Artificial Sequence
  Non-cyclic GFR-binding peptide
  MOD_RES (2)..(3)..(37): Xaa is C or S
  MOD_RES (17)..(18)..(19)..(20)..(21): Xaa is A or G
  MOD_RES (22)..(23)..(24)..(25): Xaa is A or G or absent
TXXVPTRLNAISILYFXXXXXXXXXLKKYRDMVVESXG

SEQ ID NO: 12003 - protein, 40 aa, Artificial Sequence
  Non-cyclic GFR-binding peptide
  MOD_RES (6)..(7)..(40): Xaa is C or S
  MOD_RES (21)..(22)..(23)..(24)..(25): Xaa is A or G
  MOD_RES (26)..(27)..(28)..(29): Xaa is A or G or absent
ASASPXXVSQDLEPLPIVYYXXXXXXXXXEQLSNMIVKSX

SEQ ID NO: 12004 - protein, 34 aa, Artificial Sequence
  Non-cyclic GFR-binding peptide
  MOD_RES (1)..(1): Xaa is C or S
  MOD_RES (15)..(16)..(17)..(18)..(19): Xaa is A or G
  MOD_RES (20)..(21)..(22)..(23): Xaa is A or G or absent
XAPTQLSPISVLFIXXXXXXXXXYKQYENMVVRA

SEQ ID NO: 12005 - protein, 35 aa, Artificial Sequence
  Non-cyclic GFR-binding peptide
  MOD_RES (1)..(2)..(34): Xaa is C or S
XXVPTELSPISMLFIDEYDKVVYKQYEEMVVEGXG

SEQ ID NO: 12006 - protein, 35 aa, Artificial Sequence
  Non-cyclic GFR-binding peptide
  MOD_RES (4)..(5): Xaa is C or S
ASPXXVSQDLEPLPIVYYIGKTPKIEQLSNMIVKS

SEQ ID NO: 12007 - protein, 37 aa, Artificial Sequence
  Non-cyclic GFR-binding peptide
  MOD_RES (3)..(4): Xaa is C or S
  MOD_RES (18)..(19)..(20)..(21)..(22): Xaa is A or G
  MOD_RES (23)..(24)..(25)..(26): Xaa is A or G or absent
PTXXVPTRLEPLTILYYXXXXXXXXXEQLSNDMVVES

SEQ ID NO: 12008 - protein, 37 aa, Artificial Sequence
  Non-cyclic GFR-binding peptide
  MOD_RES (3)..(4)..(35)..(37): Xaa is C or S
SPXXVPQDLSPISILFIVGRTPKVYKQYEMVVKSXKX

SEQ ID NO: 12009 - protein, 34 aa, Artificial Sequence
  Non-cyclic GFR-binding peptide
  MOD_RES (32)..(34): Xaa is C or S
VPTRLEPLPIVYYDSANNVVEQLSNDMVVESXGX

SEQ ID NO: 12010 - protein, 34 aa, Artificial Sequence
  Non-cyclic GFR-binding peptide
  MOD_RES (34)..(34): Xaa is C or S
  MOD_RES (14)..(15)..(16)..(17)..(18): Xaa is A or G
  MOD_RES (19)..(20)..(21)..(22): Xaa is A or G or absent
VPTRLEPLTILYYXXXXXXXXXEQLSNDMVVESX

SEQ ID NO: 12011 - protein, 39 aa, Artificial Sequence
  Non-cyclic GFR-binding peptide
  MOD_RES (4)..(5)..(38): Xaa is C or S
  MOD_RES (19)..(20)..(21)..(22)..(23): Xaa is A or G
  MOD_RES (24)..(25)..(26)..(27): Xaa is A or G or absent
ASPXXVPQDLSPISILFIXXXXXXXXXYKQYEMVVKSXK

SEQ ID NO: 12012 - protein, 39 aa, Artificial Sequence
  Non-cyclic GFR-binding peptide
  MOD_RES (4)..(5)..(37)..(39): Xaa is C or S
PPTXXVPTRLSAISILYLDSANNVVLKNYQDMVVESXGX

SEQ ID NO: 12013 - protein, 37 aa, Artificial Sequence
  Non-cyclic GFR-binding peptide
  MOD_RES (34)..(36): Xaa is C or S
  MOD_RES (14)..(15)..(16)..(17)..(18): Xaa is A or G
  MOD_RES (19)..(20)..(21)..(22): Xaa is A or G or absent
VPTRLEPLPIVYYXXXXXXXXXEQLSNDMVVESXGXR

SEQ ID NO: 12014 - protein, 40 aa, Artificial Sequence
  Non-cyclic GFR-binding peptide
  MOD_RES (5)..(37)..(39): Xaa is C or S
TKPTXAPTKLEPLPVVYYDDSSNVIEQLSNNMVVRSXGXH

SEQ ID NO: 12015 - protein, 38 aa, Artificial Sequence
  Non-cyclic GFR-binding peptide
  MOD_RES (1)..(35)..(37): Xaa is C or S
  MOD_RES (15)..(16)..(17)..(18)..(19): Xaa is A or G
  MOD_RES (20)..(21)..(22)..(23): Xaa is A or G or absent
XVPTRLSAISILYLXXXXXXXXXLKNYQDMVVESXGXR

SEQ ID NO: 12016 - protein, 35 aa, Artificial Sequence
  Non-cyclic GFR-binding peptide
  MOD_RES (3)..(4): Xaa is C or S
PTXXVPTRLSAISILYLDSANNVVLKNYQDMVVES

SEQ ID NO: 12017 - protein, 39 aa, Artificial Sequence
  Non-cyclic GFR-binding peptide
  MOD_RES (4)..(5)..(37)..(39): Xaa is C or S
PKPXXAPTKLEPLPVVYYDDSSNVIEQLSNNMVVRSXGX

SEQ ID NO: 12018 - protein, 39 aa, Artificial Sequence
  Non-cyclic GFR-binding peptide
  MOD_RES (5)..(6)..(38): Xaa is C or S
IPKAXXVPTELSPISMLFIDENEKVVYKQYEDMVVEGXG

SEQ ID NO: 12019 - protein, 41 aa, Artificial Sequence
  Non-cyclic GFR-binding peptide
  MOD_RES (6)..(7)..(41): Xaa is C or S
  MOD_RES (21)..(22)..(23)..(24)..(25): Xaa is A or G
  MOD_RES (26)..(27)..(28)..(29): Xaa is A or G or absent
KIPKAXXVPTELEPLPMVYYXXXXXXXXXEQLSNDMVVEGX

SEQ ID NO: 12020 - protein, 37 aa, Artificial Sequence
  Non-cyclic GFR-binding peptide
  MOD_RES (1)..(2)..(35)..(37): Xaa is C or S
  MOD_RES (16)..(17)..(18)..(19)..(20): Xaa is A or G
  MOD_RES (21)..(22)..(23)..(24): Xaa is A or G or absent
XXVSQDLSPISILFIXXXXXXXXXYKQYEMIVKSXKX

SEQ ID NO: 12021 - protein, 37 aa, Artificial Sequence
  Non-cyclic GFR-binding peptide
  MOD_RES (5)..(6)..(37): Xaa is C or S
SAAPXXVPQALEPLTILYYVGRKPKVEQLSNMIVRSX

SEQ ID NO: 12022 - protein, 42 aa, Artificial Sequence
  Non-cyclic GFR-binding peptide
  MOD_RES (7)..(41): Xaa is C or S
  MOD_RES (21)..(22)..(23)..(24)..(25): Xaa is A or G
  MOD_RES (26)..(27)..(28)..(29): Xaa is A or G or absent
HVTKPTXAPTKLEPLPVVYYXXXXXXXXXEQLSNNMVVRSXG

SEQ ID NO: 12023 - protein, 41 aa, Artificial Sequence
  Non-cyclic GFR-binding peptide
  MOD_RES (7)..(39)..(41): Xaa is C or S
HVTKPTXAPTKLEPLPVVYYDDSSNVIEQLSNNMVVRSXGX

SEQ ID NO: 12024 - protein, 35 aa, Artificial Sequence
  Non-cyclic GFR-binding peptide
  MOD_RES (4)..(5): Xaa is C or S
PKPXXAPTQLEPLPVVYYDDSSNVIEQLSNNMVVR

SEQ ID NO: 12025 - protein, 33 aa, Artificial Sequence
  Non-cyclic GFR-binding peptide
  MOD_RES (14)..(15)..(16)..(17)..(18): Xaa is A or G
  MOD_RES (19)..(20)..(21)..(22): Xaa is A or G or absent
VPTELEPLTMLYYXXXXXXXXXEQLSNDMVVEG

SEQ ID NO: 12026 - protein, 38 aa, Artificial Sequence
  Non-cyclic GFR-binding peptide
  MOD_RES (4)..(5)..(37): Xaa is C or S
PKPXXAPTKLEPLTVLYYDDSSNVIEQLSNNMVVRSXG

SEQ ID NO: 12027 - protein, 30 aa, Artificial Sequence
  Non-cyclic GFR-binding peptide
APTQLEPLTVLYYDDSSNVIEQLSNNMVVR

SEQ ID NO: 12028 - protein, 38 aa, Artificial Sequence
  Non-cyclic GFR-binding peptide
  MOD_RES (2)..(3)..(36)..(38): Xaa is C or S
  MOD_RES (17)..(18)..(19)..(20)..(21): Xaa is A or G
  MOD_RES (22)..(23)..(24)..(25): Xaa is A or G or absent
PXXVPQDLEPLPIVYYXXXXXXXXXEQLSNMVVKSXKX

SEQ ID NO: 12029 - protein, 43 aa, Artificial Sequence
  Non-cyclic GFR-binding peptide
  MOD_RES (5)..(6)..(40)..(42): Xaa is C or S
  MOD_RES (20)..(21)..(22)..(23)..(24): Xaa is A or G
  MOD_RES (25)..(26)..(27)..(28): Xaa is A or G or absent
IPKAXXVPTELEPLPMVYYXXXXXXXXXEQLSNEMVVEGXGXR

SEQ ID NO: 12030 - protein, 35 aa, Artificial Sequence
  Non-cyclic GFR-binding peptide
  MOD_RES (1)..(2)..(34): Xaa is C or S
XXVPTRLEPLPIVYYDSANNVVEQLSNDMVVESXG

SEQ ID NO: 12031 - protein, 41 aa, Artificial Sequence
  Non-cyclic GFR-binding peptide
  MOD_RES (3)..(4)..(38)..(40): Xaa is C or S
  MOD_RES (18)..(19)..(20)..(21)..(22): Xaa is A or G
  MOD_RES (23)..(24)..(25)..(26): Xaa is A or G or absent
PTXXVPTRLNAISILYFXXXXXXXXXLKKYRDMVVESXGXR

SEQ ID NO: 12032 - protein, 41 aa, Artificial Sequence
  Non-cyclic GFR-binding peptide
  MOD_RES (3)..(4)..(38)..(40): Xaa is C or S
  MOD_RES (18)..(19)..(20)..(21)..(22): Xaa is A or G
  MOD_RES (23)..(24)..(25)..(26): Xaa is A or G or absent
PTXXVPTRLEPLPIVYYXXXXXXXXXEQLSNDMVVESXGXR

SEQ ID NO: 12033 - protein, 37 aa, Artificial Sequence
  Non-cyclic GFR-binding peptide
  MOD_RES (5)..(6): Xaa is C or S
IPKAXXVPTELEPLPMVYYDEYDKVVEQLSNEMVVEG

SEQ ID NO: 12034 - protein, 37 aa, Artificial Sequence
  Non-cyclic GFR-binding peptide
  MOD_RES (1)..(35)..(37): Xaa is C or S
  MOD_RES (15)..(16)..(17)..(18)..(19): Xaa is A or G
  MOD_RES (20)..(21)..(22)..(23): Xaa is A or G or absent
XVPTELEPLPMVYYXXXXXXXXXEQLSNEMVVEGXGX

SEQ ID NO: 12035 - protein, 31 aa, Artificial Sequence
  Non-cyclic GFR-binding peptide
  MOD_RES (1)..(1): Xaa is C or S
XVPTELSPISMLFIDENEKVVYKQYEDMVVE

SEQ ID NO: 12036 - protein, 38 aa, Artificial Sequence
  Non-cyclic GFR-binding peptide
  MOD_RES (4)..(5): Xaa is C or S
  MOD_RES (19)..(20)..(21)..(22)..(23): Xaa is A or G
  MOD_RES (24)..(25)..(26)..(27): Xaa is A or G or absent
PKPXXAPTKLEPLPVVYYXXXXXXXXXEQLSNNMVVRS

SEQ ID NO: 12037 - protein, 39 aa, Artificial Sequence
  Non-cyclic GFR-binding peptide
  MOD_RES (2)..(3)..(37)..(39): Xaa is C or S
  MOD_RES (17)..(18)..(19)..(20)..(21): Xaa is A or G
  MOD_RES (22)..(23)..(24)..(25): Xaa is A or G or absent
AXXVPTELEPLTMLYYXXXXXXXXXEQLSNDMVVEGXGX

SEQ ID NO: 12038 - protein, 34 aa, Artificial Sequence
  Non-cyclic GFR-binding peptide
  MOD_RES (2)..(3)..(34): Xaa is C or S
PXXVPQDLSPISILFIVGRTPKVYKQYEMVVKSX

SEQ ID NO: 12039 - protein, 41 aa, Artificial Sequence
  Non-cyclic GFR-binding peptide
  MOD_RES (5)..(6)..(40): Xaa is C or S
  MOD_RES (20)..(21)..(22)..(23)..(24): Xaa is A or G
  MOD_RES (25)..(26)..(27)..(28): Xaa is A or G or absent
VPKPXXAPTKLEPLPVVYYXXXXXXXXXEQLSNNMVVRSXG

SEQ ID NO: 12040 - protein, 32 aa, Artificial Sequence
  Non-cyclic GFR-binding peptide
  MOD_RES (1)..(1): Xaa is C or S
XVPTELSPISMLFIDEYDKVVYKQYEEMVVEG

SEQ ID NO: 12041 - protein, 35 aa, Artificial Sequence
  Non-cyclic GFR-binding peptide
  MOD_RES (3)..(4): Xaa is C or S
PTXXVPTRLNAISILYFDSANNVVLKKYRDMVVES

SEQ ID NO: 12042 - protein, 39 aa, Artificial Sequence
  Non-cyclic GFR-binding peptide
  MOD_RES (4)..(36)..(38): Xaa is C or S
KPTXAPTKLSPISVLFIDDSSNVIYKQYENMVVRSXGXH

SEQ ID NO: 12043 - protein, 35 aa, Artificial Sequence
  Non-cyclic GFR-binding peptide
  MOD_RES (2)..(3): Xaa is C or S
  MOD_RES (17)..(18)..(19)..(20)..(21): Xaa is A or G
  MOD_RES (22)..(23)..(24)..(25): Xaa is A or G or absent
PXXVPQDLSPISILFIXXXXXXXXXYKQYEMVVKS

SEQ ID NO: 12044 - protein, 34 aa, Artificial Sequence
  Non-cyclic GFR-binding peptide
  MOD_RES (31)..(33): Xaa is C or S
VSQDLSPISILFIIGKTPKIYKQYEMIVKSXKXS

SEQ ID NO: 12045 - protein, 35 aa, Artificial Sequence
  Non-cyclic GFR-binding peptide
  MOD_RES (1)..(2)..(35): Xaa is C or S
  MOD_RES (16)..(17)..(18)..(19)..(20): Xaa is A or G
  MOD_RES (21)..(22)..(23)..(24): Xaa is A or G or absent
XXVSQDLEPLPIVYYXXXXXXXXXEQLSNMIVKSX

SEQ ID NO: 12046 - protein, 38 aa, Artificial Sequence
  Non-cyclic GFR-binding peptide
  MOD_RES (5)..(6)..(38): Xaa is C or S
IPKAXXVPTELSPISMLFIDENEKVVYKQYEDMVVEGX

SEQ ID NO: 12047 - protein, 40 aa, Artificial Sequence
  Non-cyclic GFR-binding peptide
  MOD_RES (4)..(5)..(37)..(39): Xaa is C or S
PKAXXVPTELEPLPMVYYDEYDKVVEQLSNEMVVEGXGXR

SEQ ID NO: 12048 - protein, 33 aa, Artificial Sequence
  Non-cyclic GFR-binding peptide
  MOD_RES (1)..(2): Xaa is C or S
XXVPTELEPLPMVYYDEYDKVVEQLSNEMVVEG

SEQ ID NO: 12049 - protein, 38 aa, Artificial Sequence
  Non-cyclic GFR-binding peptide
  MOD_RES (6)..(38): Xaa is C or S
VTKPTXAPTKLSPISVLFIDDSSNVIYKQYENMVVRSX

SEQ ID NO: 12050 - protein, 38 aa, Artificial Sequence
  Non-cyclic GFR-binding peptide
  MOD_RES (3)..(4)..(36)..(38): Xaa is C or S
PTXXVPTRLSAISILYLDSANNVVLKNYQDMVVESXGX

SEQ ID NO: 12051 - protein, 36 aa, Artificial Sequence
  Non-cyclic GFR-binding peptide
  MOD_RES (1)..(35): Xaa is C or S
  MOD_RES (15)..(16)..(17)..(18)..(19): Xaa is A or G
  MOD_RES (20)..(21)..(22)..(23): Xaa is A or G or absent
XVPTELEPLPMVYYXXXXXXXXXEQLSNEMVVEGXG

SEQ ID NO: 12052 - protein, 37 aa, Artificial Sequence
  Non-cyclic GFR-binding peptide
  MOD_RES (2)..(3)..(37): Xaa is C or S
  MOD_RES (17)..(18)..(19)..(20)..(21): Xaa is A or G
  MOD_RES (22)..(23)..(24)..(25): Xaa is A or G or absent
PXXAPTQLEPLTVLYYXXXXXXXXXEQLSNNMVVRAX

SEQ ID NO: 12053 - protein, 41 aa, Artificial Sequence
  Non-cyclic GFR-binding peptide
  MOD_RES (4)..(5)..(39)..(41): Xaa is C or S
  MOD_RES (19)..(20)..(21)..(22)..(23): Xaa is A or G
  MOD_RES (24)..(25)..(26)..(27): Xaa is A or G or absent
PKAXXVPTELEPLTMLYYXXXXXXXXXEQLSNEMVVEGXGX

SEQ ID NO: 12054 - protein, 37 aa, Artificial Sequence
  Non-cyclic GFR-binding peptide
  MOD_RES (34)..(36): Xaa is C or S
  MOD_RES (14)..(15)..(16)..(17)..(18): Xaa is A or G
  MOD_RES (19)..(20)..(21)..(22): Xaa is A or G or absent
VPTRLNAISILYFXXXXXXXXXLKKYRDMVVESXGXR

SEQ ID NO: 12055 - protein, 35 aa, Artificial Sequence
  Non-cyclic GFR-binding peptide
  MOD_RES (1)..(35): Xaa is C or S
  MOD_RES (15)..(16)..(17)..(18)..(19): Xaa is A or G
  MOD_RES (20)..(21)..(22)..(23): Xaa is A or G or absent
XVPTRLEPLPIVYYXXXXXXXXXEQLSNDMVVESX

SEQ ID NO: 12056 - protein, 39 aa, Artificial Sequence
  Non-cyclic GFR-binding peptide
  MOD_RES (6)..(38): Xaa is C or S
VTKPTXAPTKLEPLTVLYYDDSSNVIEQLSNNMVVRSXG

SEQ ID NO: 12057 - protein, 33 aa, Artificial Sequence
  Non-cyclic GFR-binding peptide
  MOD_RES (3)..(3): Xaa is C or S
PTXAPTKLEPLTVLYYDDSSNVIEQLSNNMVVR

SEQ ID NO: 12058 - protein, 36 aa, Artificial Sequence
  Non-cyclic GFR-binding peptide
  MOD_RES (3)..(4)..(36): Xaa is C or S
KPXXAPTKLSPISVLFIDDSSNVIYKQYENMVVRSX

SEQ ID NO: 12059 - protein, 44 aa, Artificial Sequence
  Non-cyclic GFR-binding peptide
  MOD_RES (6)..(7)..(41)..(43): Xaa is C or S
  MOD_RES (21)..(22)..(23)..(24)..(25): Xaa is A or G
  MOD_RES (26)..(27)..(28)..(29): Xaa is A or G or absent
YVPKPXXAPTKLEPLTVLYYXXXXXXXXXEQLSNNMVVRSXGXH

SEQ ID NO: 12060 - protein, 41 aa, Artificial Sequence
  Non-cyclic GFR-binding peptide
  MOD_RES (6)..(7)..(41): Xaa is C or S
  MOD_RES (21)..(22)..(23)..(24)..(25): Xaa is A or G
  MOD_RES (26)..(27)..(28)..(29): Xaa is A or G or absent
STPPTXXVPTRLNAISILYFXXXXXXXXXLKKYRDMVVESX

SEQ ID NO: 12061 - protein, 41 aa, Artificial Sequence
  Non-cyclic GFR-binding peptide
  MOD_RES (3)..(4)..(38)..(40): Xaa is C or S
  MOD_RES (18)..(19)..(20)..(21)..(22): Xaa is A or G
  MOD_RES (23)..(24)..(25)..(26): Xaa is A or G or absent
KAXXVPTELSPISMLFIXXXXXXXXXYKQYEEMVVEGXGXR

SEQ ID NO: 12062 - protein, 39 aa, Artificial Sequence
  Non-cyclic GFR-binding peptide
  MOD_RES (5)..(6)..(37)..(39): Xaa is C or S
SAAPXXVPQALEPLTILYYVGRKPKVEQLSNMIVRSXKX

SEQ ID NO: 12063 - protein, 34 aa, Artificial Sequence
  Non-cyclic GFR-binding peptide
  MOD_RES (1)..(2)..(34): Xaa is C or S
XXVPTRLSAISILYLDSANNVVLKNYQDMVVESX

SEQ ID NO: 12064 - protein, 34 aa, Artificial Sequence
  Non-cyclic GFR-binding peptide
  MOD_RES (1)..(1): Xaa is C or S
  MOD_RES (15)..(16)..(17)..(18)..(19): Xaa is A or G
  MOD_RES (20)..(21)..(22)..(23): Xaa is A or G or absent
XAPTQLEPLTVLYYXXXXXXXXXEQLSNNMVVRA

SEQ ID NO: 12065 - protein, 42 aa, Artificial Sequence
  Non-cyclic GFR-binding peptide
  MOD_RES (6)..(7)..(40)..(42): Xaa is C or S
  MOD_RES (21)..(22)..(23)..(24)..(25): Xaa is A or G
  MOD_RES (26)..(27)..(28)..(29): Xaa is A or G or absent
ASAAPXXVPQALSPISILFIXXXXXXXXXYKQYEMIVRSXKX

SEQ ID NO: 12066 - protein, 40 aa, Artificial Sequence
  Non-cyclic GFR-binding peptide
  MOD_RES (6)..(7)..(40): Xaa is C or S
  MOD_RES (21)..(22)..(23)..(24)..(25): Xaa is A or G
  MOD_RES (26)..(27)..(28)..(29): Xaa is A or G or absent
ASAAPXXVPQALEPLTILYYXXXXXXXXXEQLSNMIVRSX

SEQ ID NO: 12067 - protein, 38 aa, Artificial Sequence
  Non-cyclic GFR-binding peptide
  MOD_RES (1)..(35)..(37): Xaa is C or S
  MOD_RES (15)..(16)..(17)..(18)..(19): Xaa is A or G
  MOD_RES (20)..(21)..(22)..(23): Xaa is A or G or absent
XVPTELEPLPMVYYXXXXXXXXXEQLSNEMVVEGXGXR

SEQ ID NO: 12068 - protein, 42 aa, Artificial Sequence
  Non-cyclic GFR-binding peptide
  MOD_RES (4)..(5)..(39)..(41): Xaa is C or S
  MOD_RES (19)..(20)..(21)..(22)..(23): Xaa is A or G
  MOD_RES (24)..(25)..(26)..(27): Xaa is A or G or absent
PKAXXVPTELEPLTMLYYXXXXXXXXXEQLSNEMVVEGXGXR

SEQ ID NO: 12069 - protein, 37 aa, Artificial Sequence
  Non-cyclic GFR-binding peptide
  MOD_RES (2)..(36): Xaa is C or S
  MOD_RES (16)..(17)..(18)..(19)..(20): Xaa is A or G
  MOD_RES (21)..(22)..(23)..(24): Xaa is A or G or absent
TXAPTKLSPISVLFIXXXXXXXXXYKQYENMVVRSXG

SEQ ID NO: 12070 - protein, 35 aa, Artificial Sequence
  Non-cyclic GFR-binding peptide
  MOD_RES (34)..(34): Xaa is C or S
  MOD_RES (14)..(15)..(16)..(17)..(18): Xaa is A or G
  MOD_RES (19)..(20)..(21)..(22): Xaa is A or G or absent
APTKLSPISVLFIXXXXXXXXXYKQYENMVVRSXG

SEQ ID NO: 12071 - protein, 41 aa, Artificial Sequence
  Non-cyclic GFR-binding peptide
  MOD_RES (5)..(6)..(40): Xaa is C or S
  MOD_RES (20)..(21)..(22)..(23)..(24): Xaa is A or G
  MOD_RES (25)..(26)..(27)..(28): Xaa is A or G or absent
VPKPXXAPTQLSPISVLFIXXXXXXXXXYKQYENMVVRAXG

SEQ ID NO: 12072 - protein, 39 aa, Artificial Sequence
  Non-cyclic GFR-binding peptide
  MOD_RES (4)..(5)..(37)..(39): Xaa is C or S
PPTXXVPTRLEPLPIVYYDSANNVVEQLSNDMVVESXGX

SEQ ID NO: 12073 - protein, 40 aa, Artificial Sequence
  Non-cyclic GFR-binding peptide
  MOD_RES (5)..(6)..(39): Xaa is C or S
  MOD_RES (20)..(21)..(22)..(23)..(24): Xaa is A or G
  MOD_RES (25)..(26)..(27)..(28): Xaa is A or G or absent
SASPXXVSQDLEPLPIVYYXXXXXXXXXEQLSNMIVKSXK

SEQ ID NO: 12074 - protein, 38 aa, Artificial Sequence
  Non-cyclic GFR-binding peptide
  MOD_RES (3)..(4)..(38): Xaa is C or S
  MOD_RES (18)..(19)..(20)..(21)..(22): Xaa is A or G
  MOD_RES (23)..(24)..(25)..(26): Xaa is A or G or absent
KAXXVPTELEPLTMLYYXXXXXXXXXEQLSNDMVVEGX

SEQ ID NO: 12075 - protein, 34 aa, Artificial Sequence
  Non-cyclic GFR-binding peptide
  MOD_RES (2)..(3): Xaa is C or S
TXXVPTRLEPLTILYYDSANNVVEQLSNDMVVES

SEQ ID NO: 12076 - protein, 39 aa, Artificial Sequence
  Non-cyclic GFR-binding peptide
  MOD_RES (6)..(6): Xaa is C or S
  MOD_RES (20)..(21)..(22)..(23)..(24): Xaa is A or G
  MOD_RES (25)..(26)..(27)..(28): Xaa is A or G or absent
VTKPTXAPTKLEPLTVLYYXXXXXXXXXEQLSNNMVVRS

SEQ ID NO: 12077 - protein, 34 aa, Artificial Sequence
  Non-cyclic GFR-binding peptide
  MOD_RES (3)..(4): Xaa is C or S
KPXXAPTKLEPLTVLYYDDSSNVIEQLSNNMVVR

SEQ ID NO: 12078 - protein, 31 aa, Artificial Sequence
  Non-cyclic GFR-binding peptide
  MOD_RES (1)..(1): Xaa is C or S
XAPTKLEPLTVLYYDDSSNVIEQLSNNMVVR

SEQ ID NO: 12079 - protein, 33 aa, Artificial Sequence
  Non-cyclic GFR-binding peptide
  MOD_RES (1)..(2): Xaa is C or S
XXVPTELSPISMLFIDEYDKVVYKQYEEMVVEG

SEQ ID NO: 12080 - protein, 34 aa, Artificial Sequence
  Non-cyclic GFR-binding peptide
  MOD_RES (32)..(34): Xaa is C or S
APTQLEPLTVLYYDDSSNVIEQLSNNMVVRAXGX

SEQ ID NO: 12081 - protein, 38 aa, Artificial Sequence
  Non-cyclic GFR-binding peptide
  MOD_RES (3)..(4)..(36)..(38): Xaa is C or S
PTXXVPTRLEPLPIVYYDSANNVVEQLSNDMVVESXGX

SEQ ID NO: 12082 - protein, 38 aa, Artificial Sequence
  Non-cyclic GFR-binding peptide
  MOD_RES (2)..(3)..(37): Xaa is C or S
  MOD_RES (17)..(18)..(19)..(20)..(21): Xaa is A or G
  MOD_RES (22)..(23)..(24)..(25): Xaa is A or G or absent
AXXVPTELSPISMLFIXXXXXXXXXYKQYEDMVVEGXG

SEQ ID NO: 12083 - protein, 38 aa, Artificial Sequence
  Non-cyclic GFR-binding peptide
  MOD_RES (1)..(35)..(37): Xaa is C or S
  MOD_RES (15)..(16)..(17)..(18)..(19): Xaa is A or G
  MOD_RES (20)..(21)..(22)..(23): Xaa is A or G or absent
XVPTELEPLTMLYYXXXXXXXXXEQLSNDMVVEGXGXR

SEQ ID NO: 12084 - protein, 34 aa, Artificial Sequence
  Non-cyclic GFR-binding peptide
  MOD_RES (2)..(3): Xaa is C or S
PXXAPTKLSPISVLFIDDSSNVIYKQYENMVVRS

SEQ ID NO: 12085 - protein, 40 aa, Artificial Sequence
  Non-cyclic GFR-binding peptide
  MOD_RES (4)..(5)..(37)..(39): Xaa is C or S
PKAXXVPTELSPISMLFIDENEKVVYKQYEDMVVEGXGXR

SEQ ID NO: 12086 - protein, 40 aa, Artificial Sequence
  Non-cyclic GFR-binding peptide
  MOD_RES (4)..(5)..(39): Xaa is C or S
  MOD_RES (19)..(20)..(21)..(22)..(23): Xaa is A or G
  MOD_RES (24)..(25)..(26)..(27): Xaa is A or G or absent
PKAXXVPTELSPISMLFIXXXXXXXXXYKQYEEMVVEGXG

SEQ ID NO: 12087 - protein, 43 aa, Artificial Sequence
  Non-cyclic GFR-binding peptide
  MOD_RES (5)..(6)..(40)..(42): Xaa is C or S
  MOD_RES (20)..(21)..(22)..(23)..(24): Xaa is A or G
  MOD_RES (25)..(26)..(27)..(28): Xaa is A or G or absent
VPKPXXAPTQLSPISVLFIXXXXXXXXXYKQYENMVVRAXGXH

SEQ ID NO: 12088 - protein, 38 aa, Artificial Sequence
  Non-cyclic GFR-binding peptide
  MOD_RES (4)..(5)..(37): Xaa is C or S
PKAXXVPTELEPLTMLYYDENEKVVEQLSNDMVVEGXG

SEQ ID NO: 12089 - protein, 37 aa, Artificial Sequence
  Non-cyclic GFR-binding peptide
  MOD_RES (3)..(4)..(35)..(37): Xaa is C or S
SPXXVSQDLSPISILFIIGKTPKIYKQYEMIVKSXKX

SEQ ID NO: 12090 - protein, 34 aa, Artificial Sequence
  Non-cyclic GFR-binding peptide
  MOD_RES (1)..(2)..(33): Xaa is C or S
XXVPQDLEPLPIVYYVGRTPKVEQLSNMVVKSXK

SEQ ID NO: 12091 - protein, 39 aa, Artificial Sequence
  Non-cyclic GFR-binding peptide
  MOD_RES (3)..(4)..(36)..(38): Xaa is C or S
PTXXVPTRLNAISILYFDSANNVVLKKYRDMVVESXGXR

SEQ ID NO: 12092 - protein, 39 aa, Artificial Sequence
  Non-cyclic GFR-binding peptide
  MOD_RES (3)..(4)..(38): Xaa is C or S
  MOD_RES (18)..(19)..(20)..(21)..(22): Xaa is A or G
  MOD_RES (23)..(24)..(25)..(26): Xaa is A or G or absent
KAXXVPTELSPISMLFIXXXXXXXXXYKQYEEMVVEGXG

SEQ ID NO: 12093 - protein, 34 aa, Artificial Sequence
  Non-cyclic GFR-binding peptide
  MOD_RES (1)..(2): Xaa is C or S
  MOD_RES (16)..(17)..(18)..(19)..(20): Xaa is A or G
  MOD_RES (21)..(22)..(23)..(24): Xaa is A or G or absent
XXVPTRLSAISILYLXXXXXXXXXLKNYQDMVVE

SEQ ID NO: 12094 - protein, 35 aa, Artificial Sequence
  Non-cyclic GFR-binding peptide
  MOD_RES (3)..(4)..(35): Xaa is C or S
SPXXVPQDLEPLPIVYYVGRTPKVEQLSNMVVKSX

SEQ ID NO: 12095 - protein, 37 aa, Artificial Sequence
  Non-cyclic GFR-binding peptide
  MOD_RES (5)..(5): Xaa is C or S
  MOD_RES (19)..(20)..(21)..(22)..(23): Xaa is A or G
  MOD_RES (24)..(25)..(26)..(27): Xaa is A or G or absent
TKPTXAPTKLSPISVLFIXXXXXXXXXYKQYENMVVR

SEQ ID NO: 12096 - protein, 41 aa, Artificial Sequence
  Non-cyclic GFR-binding peptide
  MOD_RES (5)..(6)..(40): Xaa is C or S
  MOD_RES (20)..(21)..(22)..(23)..(24): Xaa is A or G
  MOD_RES (25)..(26)..(27)..(28): Xaa is A or G or absent
IPKAXXVPTELSPISMLFIXXXXXXXXXYKQYEDMVVEGXG

SEQ ID NO: 12097 - protein, 42 aa, Artificial Sequence
  Non-cyclic GFR-binding peptide
  MOD_RES (5)..(6)..(40)..(42): Xaa is C or S
  MOD_RES (20)..(21)..(22)..(23)..(24): Xaa is A or G
  MOD_RES (25)..(26)..(27)..(28): Xaa is A or G or absent
TPPTXXVPTRLEPLPIVYYXXXXXXXXXEQLSNDMVVESXGX

SEQ ID NO: 12098 - protein, 34 aa, Artificial Sequence
  Non-cyclic GFR-binding peptide
  MOD_RES (1)..(33): Xaa is C or S
XAPTKLEPLPVVYYDDSSNVIEQLSNNMVVRSXG

SEQ ID NO: 12099 - protein, 35 aa, Artificial Sequence
  Non-cyclic GFR-binding peptide
  MOD_RES (4)..(5): Xaa is C or S
PKPXXAPTKLEPLTVLYYDDSSNVIEQLSNNMVVR

SEQ ID NO: 12100 - protein, 36 aa, Artificial Sequence
  Non-cyclic GFR-binding peptide
  MOD_RES (1)..(2)..(34)..(36): Xaa is C or S
XXVPTELEPLPMVYYDEYDKVVEQLSNEMVVEGXGX

SEQ ID NO: 12101 - protein, 39 aa, Artificial Sequence
  Non-cyclic GFR-binding peptide
  MOD_RES (4)..(5)..(38): Xaa is C or S
  MOD_RES (19)..(20)..(21)..(22)..(23): Xaa is A or G
  MOD_RES (24)..(25)..(26)..(27): Xaa is A or G or absent
ASPXXVSQDLEPLPIVYYXXXXXXXXXEQLSNMIVKSXK

SEQ ID NO: 12102 - protein, 41 aa, Artificial Sequence
  Non-cyclic GFR-binding peptide
  MOD_RES (6)..(40): Xaa is C or S
  MOD_RES (20)..(21)..(22)..(23)..(24): Xaa is A or G
  MOD_RES (25)..(26)..(27)..(28): Xaa is A or G or absent
VTKPTXAPTKLSPISVLFIXXXXXXXXXYKQYENMVVRSXG

SEQ ID NO: 12103 - protein, 38 aa, Artificial Sequence
  Non-cyclic GFR-binding peptide
  MOD_RES (2)..(3)..(35)..(37): Xaa is C or S
TXXVPTRLNAISILYFDSANNVVLKKYRDMVVESXGXR

SEQ ID NO: 12104 - protein, 42 aa, Artificial Sequence
  Non-cyclic GFR-binding peptide
  MOD_RES (6)..(7)..(41): Xaa is C or S
  MOD_RES (21)..(22)..(23)..(24)..(25): Xaa is A or G
  MOD_RES (26)..(27)..(28)..(29): Xaa is A or G or absent
YVPKPXXAPTKLEPLPVVYYXXXXXXXXXEQLSNNMVVRSXG

SEQ ID NO: 12105 - protein, 33 aa, Artificial Sequence
  Non-cyclic GFR-binding peptide
  MOD_RES (1)..(2)..(33): Xaa is C or S
XXVPQDLSPISILFIVGRTPKVYKQYEMVVKSX

SEQ ID NO: 12106 - protein, 37 aa, Artificial Sequence
  Non-cyclic GFR-binding peptide
  MOD_RES (4)..(5): Xaa is C or S
  MOD_RES (19)..(20)..(21)..(22)..(23): Xaa is A or G
  MOD_RES (24)..(25)..(26)..(27): Xaa is A or G or absent
AAPXXVPQALEPLTILYYXXXXXXXXXEQLSNMIVRS

SEQ ID NO: 12107 - protein, 43 aa, Artificial Sequence
  Non-cyclic GFR-binding peptide
  MOD_RES (6)..(7)..(40)..(42): Xaa is C or S
  MOD_RES (21)..(22)..(23)..(24)..(25): Xaa is A or G
  MOD_RES (26)..(27)..(28)..(29): Xaa is A or G or absent
ASASPXXVPQDLSPISILFIXXXXXXXXXYKQYEMVVKSXKXS

SEQ ID NO: 12108 - protein, 36 aa, Artificial Sequence
  Non-cyclic GFR-binding peptide
  MOD_RES (2)..(3): Xaa is C or S
  MOD_RES (17)..(18)..(19)..(20)..(21): Xaa is A or G
  MOD_RES (22)..(23)..(24)..(25): Xaa is A or G or absent
TXXVPTRLSAISILYLXXXXXXXXXLKNYQDMVVES

SEQ ID NO: 12109 - protein, 44 aa, Artificial Sequence
  Non-cyclic GFR-binding peptide
  MOD_RES (6)..(7)..(41)..(43): Xaa is C or S
  MOD_RES (21)..(22)..(23)..(24)..(25): Xaa is A or G
  MOD_RES (26)..(27)..(28)..(29): Xaa is A or G or absent
STPPTXXVPTRLSAISILYLXXXXXXXXXLKNYQDMVVESXGXR

SEQ ID NO: 12110 - protein, 37 aa, Artificial Sequence
  Non-cyclic GFR-binding peptide
  MOD_RES (4)..(5): Xaa is C or S
  MOD_RES (19)..(20)..(21)..(22)..(23): Xaa is A or G
  MOD_RES (24)..(25)..(26)..(27): Xaa is A or G or absent
PKPXXAPTQLEPLPVVYYXXXXXXXXXEQLSNNMVVR

SEQ ID NO: 12111 - protein, 38 aa, Artificial Sequence
  Non-cyclic GFR-binding peptide
  MOD_RES (3)..(4)..(38): Xaa is C or S
  MOD_RES (18)..(19)..(20)..(21)..(22): Xaa is A or G
  MOD_RES (23)..(24)..(25)..(26): Xaa is A or G or absent
KPXXAPTKLEPLTVLYYXXXXXXXXXEQLSNNMVVRSX

SEQ ID NO: 12112 - protein, 35 aa, Artificial Sequence
  Non-cyclic GFR-binding peptide
  MOD_RES (2)..(34): Xaa is C or S
TXAPTKLSPISVLFIDDSSNVIYKQYENMVVRSXG

SEQ ID NO: 12113 - protein, 38 aa, Artificial Sequence
  Non-cyclic GFR-binding peptide
  MOD_RES (1)..(2)..(35)..(37): Xaa is C or S
  MOD_RES (16)..(17)..(18)..(19)..(20): Xaa is A or G
  MOD_RES (21)..(22)..(23)..(24): Xaa is A or G or absent
XXVPQALSPISILFIXXXXXXXXXYKQYEMIVRSXKXS

SEQ ID NO: 12114 - protein, 37 aa, Artificial Sequence
  Non-cyclic GFR-binding peptide
  MOD_RES (4)..(5): Xaa is C or S
  MOD_RES (19)..(20)..(21)..(22)..(23): Xaa is A or G
  MOD_RES (24)..(25)..(26)..(27): Xaa is A or G or absent
PKAXXVPTELSPISMLFIXXXXXXXXXYKQYEEMVVE

SEQ ID NO: 12115 - protein, 35 aa, Artificial Sequence
  Non-cyclic GFR-binding peptide
  MOD_RES (3)..(4): Xaa is C or S
KAXXVPTELEPLPMVYYDENEKVVEQLSNDMVVEG

SEQ ID NO: 12116 - protein, 34 aa, Artificial Sequence
  Non-cyclic GFR-binding peptide
  MOD_RES (2)..(2): Xaa is C or S
  MOD_RES (16)..(17)..(18)..(19)..(20): Xaa is A or G
  MOD_RES (21)..(22)..(23)..(24): Xaa is A or G or absent
TXAPTKLSPISVLFIXXXXXXXXXYKQYENMVVR

SEQ ID NO: 12117 - protein, 40 aa, Artificial Sequence
  Non-cyclic GFR-binding peptide
  MOD_RES (5)..(6)..(37)..(39): Xaa is C or S
SAAPXXVPQALEPLTILYYVGRKPKVEQLSNMIVRSXKXS

SEQ ID NO: 12118 - protein, 41 aa, Artificial Sequence
  Non-cyclic GFR-binding peptide
  MOD_RES (4)..(5)..(39)..(41): Xaa is C or S
  MOD_RES (19)..(20)..(21)..(22)..(23): Xaa is A or G
  MOD_RES (24)..(25)..(26)..(27): Xaa is A or G or absent
PKPXXAPTKLSPISVLFIXXXXXXXXXYKQYENMVVRSXGX

SEQ ID NO: 12119 - protein, 36 aa, Artificial Sequence
  Non-cyclic GFR-binding peptide
  MOD_RES (2)..(3)..(36): Xaa is C or S
  MOD_RES (17)..(18)..(19)..(20)..(21): Xaa is A or G
  MOD_RES (22)..(23)..(24)..(25): Xaa is A or G or absent
PXXVPQDLEPLPIVYYXXXXXXXXXEQLSNMVVKSX

SEQ ID NO: 12120 - protein, 39 aa, Artificial Sequence
  Non-cyclic GFR-binding peptide
  MOD_RES (6)..(7): Xaa is C or S
  MOD_RES (21)..(22)..(23)..(24)..(25): Xaa is A or G
  MOD_RES (26)..(27)..(28)..(29): Xaa is A or G or absent
ASASPXXVPQDLSPISILFIXXXXXXXXXYKQYEMVVKS

SEQ ID NO: 12121 - protein, 38 aa, Artificial Sequence
  Non-cyclic GFR-binding peptide
  MOD_RES (4)..(5)..(37): Xaa is C or S
PKAXXVPTELSPISMLFIDENEKVVYKQYEDMVVEGXG

SEQ ID NO: 12122 - protein, 33 aa, Artificial Sequence
  Non-cyclic GFR-binding peptide
  MOD_RES (1)..(1): Xaa is C or S
  MOD_RES (15)..(16)..(17)..(18)..(19): Xaa is A or G
  MOD_RES (20)..(21)..(22)..(23): Xaa is A or G or absent
XVPTELEPLTMLYYXXXXXXXXXEQLSNEMVVE

SEQ ID NO: 12123 - protein, 33 aa, Artificial Sequence
  Non-cyclic GFR-binding peptide
  MOD_RES (1)..(33): Xaa is C or S
XVPTRLSAISILYLDSANNVVLKNYQDMVVESX

SEQ ID NO: 12124 - protein, 38 aa, Artificial Sequence
  Non-cyclic GFR-binding peptide
  MOD_RES (3)..(37): Xaa is C or S
  MOD_RES (17)..(18)..(19)..(20)..(21): Xaa is A or G
  MOD_RES (22)..(23)..(24)..(25): Xaa is A or G or absent
PTXAPTKLSPISVLFIXXXXXXXXXYKQYENMVVRSXG

SEQ ID NO: 12125 - protein, 34 aa, Artificial Sequence
  Non-cyclic GFR-binding peptide
  MOD_RES (1)..(2): Xaa is C or S
  MOD_RES (16)..(17)..(18)..(19)..(20): Xaa is A or G
  MOD_RES (21)..(22)..(23)..(24): Xaa is A or G or absent
XXVPTELEPLTMLYYXXXXXXXXXEQLSNDMVVE

SEQ ID NO: 12126 - protein, 41 aa, Artificial Sequence
  Non-cyclic GFR-binding peptide
  MOD_RES (5)..(6)..(38)..(40): Xaa is C or S
VPKPXXAPTKLEPLPVVYYDDSSNVIEQLSNNMVVRSXGXH

SEQ ID NO: 12127 - protein, 36 aa, Artificial Sequence
  Non-cyclic GFR-binding peptide
  MOD_RES (1)..(2)..(35): Xaa is C or S
  MOD_RES (16)..(17)..(18)..(19)..(20): Xaa is A or G
  MOD_RES (21)..(22)..(23)..(24): Xaa is A or G or absent
XXVPQALEPLTILYYXXXXXXXXXEQLSNMIVRSXK

SEQ ID NO: 12128 - protein, 40 aa, Artificial Sequence
  Non-cyclic GFR-binding peptide
  MOD_RES (3)..(4)..(38)..(40): Xaa is C or S
  MOD_RES (18)..(19)..(20)..(21)..(22): Xaa is A or G
  MOD_RES (23)..(24)..(25)..(26): Xaa is A or G or absent
KPXXAPTQLEPLTVLYYXXXXXXXXXEQLSNNMVVRAXGX

SEQ ID NO: 12129 - protein, 39 aa, Artificial Sequence
  Non-cyclic GFR-binding peptide
  MOD_RES (5)..(6)..(38): Xaa is C or S
IPKAXXVPTELEPLPMVYYDEYDKVVEQLSNEMVVEGXG

SEQ ID NO: 12130 - protein, 32 aa, Artificial Sequence
  Non-cyclic GFR-binding peptide
  MOD_RES (32)..(32): Xaa is C or S
VPTRLSAISILYLDSANNVVLKNYQDMVVESX

SEQ ID NO: 12131 - protein, 43 aa, Artificial Sequence
  Non-cyclic GFR-binding peptide
  MOD_RES (6)..(7)..(41)..(43): Xaa is C or S
  MOD_RES (21)..(22)..(23)..(24)..(25): Xaa is A or G
  MOD_RES (26)..(27)..(28)..(29): Xaa is A or G or absent
SIPKAXXVPTELEPLTMLYYXXXXXXXXXEQLSNEMVVEGXGX

SEQ ID NO: 12132 - protein, 39 aa, Artificial Sequence
  Non-cyclic GFR-binding peptide
  MOD_RES (6)..(6): Xaa is C or S
  MOD_RES (20)..(21)..(22)..(23)..(24): Xaa is A or G
  MOD_RES (25)..(26)..(27)..(28): Xaa is A or G or absent
VTKPTXAPTKLEPLPVVYYXXXXXXXXXEQLSNNMVVRS

SEQ ID NO: 12133 - protein, 38 aa, Artificial Sequence
  Non-cyclic GFR-binding peptide
  MOD_RES (2)..(3)..(37): Xaa is C or S
  MOD_RES (17)..(18)..(19)..(20)..(21): Xaa is A or G
  MOD_RES (22)..(23)..(24)..(25): Xaa is A or G or absent
PXXAPTKLEPLPVVYYXXXXXXXXXEQLSNNMVVRSXG

SEQ ID NO: 12134 - protein, 44 aa, Artificial Sequence
  Non-cyclic GFR-binding peptide
  MOD_RES (6)..(7)..(41)..(43): Xaa is C or S
  MOD_RES (21)..(22)..(23)..(24)..(25): Xaa is A or G
  MOD_RES (26)..(27)..(28)..(29): Xaa is A or G or absent
SIPKAXXVPTELEPLTMLYYXXXXXXXXXEQLSNEMVVEGXGXR

SEQ ID NO: 12135 - protein, 34 aa, Artificial Sequence
  Non-cyclic GFR-binding peptide
  MOD_RES (2)..(3): Xaa is C or S
AXXVPTELEPLTMLYYDENEKVVEQLSNDMVVEG

SEQ ID NO: 12136 - protein, 37 aa, Artificial Sequence
  Non-cyclic GFR-binding peptide
  MOD_RES (4)..(5)..(37): Xaa is C or S
PKPXXAPTKLSPISVLFIDDSSNVIYKQYENMVVRSX

SEQ ID NO: 12137 - protein, 32 aa, Artificial Sequence
  Non-cyclic GFR-binding peptide
  MOD_RES (14)..(15)..(16)..(17)..(18): Xaa is A or G
  MOD_RES (19)..(20)..(21)..(22): Xaa is A or G or absent
VPQALEPLTILYYXXXXXXXXXEQLSNMIVRS

SEQ ID NO: 12138 - protein, 40 aa, Artificial Sequence
  Non-cyclic GFR-binding peptide
  MOD_RES (4)..(38)..(40): Xaa is C or S
  MOD_RES (18)..(19)..(20)..(21)..(22): Xaa is A or G
  MOD_RES (23)..(24)..(25)..(26): Xaa is A or G or absent
KPTXAPTKLSPISVLFIXXXXXXXXXYKQYENMVVRSXGX

SEQ ID NO: 12139 - protein, 37 aa, Artificial Sequence
  Non-cyclic GFR-binding peptide
  MOD_RES (4)..(5): Xaa is C or S
  MOD_RES (19)..(20)..(21)..(22)..(23): Xaa is A or G
  MOD_RES (24)..(25)..(26)..(27): Xaa is A or G or absent
PKPXXAPTQLEPLTVLYYXXXXXXXXXEQLSNNMVVR

SEQ ID NO: 12140 - protein, 34 aa, Artificial Sequence
  Non-cyclic GFR-binding peptide
  MOD_RES (1)..(1): Xaa is C or S
  MOD_RES (15)..(16)..(17)..(18)..(19): Xaa is A or G
  MOD_RES (20)..(21)..(22)..(23): Xaa is A or G or absent
XVPTELSPISMLFIXXXXXXXXXYKQYEDMVVEG

SEQ ID NO: 12141 - protein, 38 aa, Artificial Sequence
  Non-cyclic GFR-binding peptide
  MOD_RES (1)..(35)..(37): Xaa is C or S
  MOD_RES (15)..(16)..(17)..(18)..(19): Xaa is A or G
  MOD_RES (20)..(21)..(22)..(23): Xaa is A or G or absent
XVPTELSPISMLFIXXXXXXXXXYKQYEEMVVEGXGXR

SEQ ID NO: 12142 - protein, 40 aa, Artificial Sequence
  Non-cyclic GFR-binding peptide
  MOD_RES (2)..(3)..(37)..(39): Xaa is C or S
  MOD_RES (17)..(18)..(19)..(20)..(21): Xaa is A or G
  MOD_RES (22)..(23)..(24)..(25): Xaa is A or G or absent
AXXVPTELEPLTMLYYXXXXXXXXXEQLSNEMVVEGXGXR

SEQ ID NO: 12143 - protein, 31 aa, Artificial Sequence
  Non-cyclic GFR-binding peptide
APTKLSPISVLFIDDSSNVIYKQYENMVVRS

SEQ ID NO: 12144 - protein, 40 aa, Artificial Sequence
  Non-cyclic GFR-binding peptide
  MOD_RES (6)..(7)..(39): Xaa is C or S
KIPKAXXVPTELSPISMLFIDENEKVVYKQYEDMVVEGXG

SEQ ID NO: 12145 - protein, 34 aa, Artificial Sequence
  Non-cyclic GFR-binding peptide
  MOD_RES (1)..(34): Xaa is C or S
  MOD_RES (15)..(16)..(17)..(18)..(19): Xaa is A or G
  MOD_RES (20)..(21)..(22)..(23): Xaa is A or G or absent
XVPQDLEPLPIVYYXXXXXXXXXEQLSNMVVKSX

SEQ ID NO: 12146 - protein, 35 aa, Artificial Sequence
  Non-cyclic GFR-binding peptide
  MOD_RES (32)..(34): Xaa is C or S
VPTRLEPLPIVYYDSANNVVEQLSNDMVVESXGXR

SEQ ID NO: 12147 - protein, 40 aa, Artificial Sequence
  Non-cyclic GFR-binding peptide
  MOD_RES (6)..(7)..(38)..(40): Xaa is C or S
ASAAPXXVPQALEPLTILYYVGRKPKVEQLSNMIVRSXKX

SEQ ID NO: 12148 - protein, 33 aa, Artificial Sequence
  Non-cyclic GFR-binding peptide
  MOD_RES (1)..(32): Xaa is C or S
XVPQDLEPLPIVYYVGRTPKVEQLSNMVVKSXK

SEQ ID NO: 12149 - protein, 32 aa, Artificial Sequence
  Non-cyclic GFR-binding peptide
  MOD_RES (1)..(1): Xaa is C or S
XAPTQLSPISVLFIDDSSNVIYKQYENMVVRA

SEQ ID NO: 12150 - protein, 34 aa, Artificial Sequence
  Non-cyclic GFR-binding peptide
  MOD_RES (2)..(3)..(34): Xaa is C or S
PXXVPQALEPLTILYYVGRKPKVEQLSNMIVRSX

SEQ ID NO: 12151 - protein, 37 aa, Artificial Sequence
  Non-cyclic GFR-binding peptide
  MOD_RES (6)..(7): Xaa is C or S
TVPKPXXAPTQLEPLTVLYYDDSSNVIEQLSNNMVVR

SEQ ID NO: 12152 - protein, 37 aa, Artificial Sequence
  Non-cyclic GFR-binding peptide
  MOD_RES (5)..(6): Xaa is C or S
VPKPXXAPTQLEPLPVVYYDDSSNVIEQLSNNMVVRA

SEQ ID NO: 12153 - protein, 35 aa, Artificial Sequence
  Non-cyclic GFR-binding peptide
  MOD_RES (2)..(3): Xaa is C or S
  MOD_RES (17)..(18)..(19)..(20)..(21): Xaa is A or G
  MOD_RES (22)..(23)..(24)..(25): Xaa is A or G or absent
TXXVPTRLEPLTILYYXXXXXXXXXEQLSNDMVVE

SEQ ID NO: 12154 - protein, 39 aa, Artificial Sequence
  Non-cyclic GFR-binding peptide
  MOD_RES (4)..(5)..(39): Xaa is C or S
  MOD_RES (19)..(20)..(21)..(22)..(23): Xaa is A or G
  MOD_RES (24)..(25)..(26)..(27): Xaa is A or G or absent
PKAXXVPTELEPLTMLYYXXXXXXXXXEQLSNEMVVEGX

SEQ ID NO: 12155 - protein, 32 aa, Artificial Sequence
  Non-cyclic GFR-binding peptide
  MOD_RES (1)..(1): Xaa is C or S
XVPTELEPLPMVYYDEYDKVVEQLSNEMVVEG

SEQ ID NO: 12156 - protein, 31 aa, Artificial Sequence
  Non-cyclic GFR-binding peptide
VPTELSPISMLFIDENEKVVYKQYEDMVVEG

SEQ ID NO: 12157 - protein, 44 aa, Artificial Sequence
  Non-cyclic GFR-binding peptide
  MOD_RES (6)..(7)..(41)..(43): Xaa is C or S
  MOD_RES (21)..(22)..(23)..(24)..(25): Xaa is A or G
  MOD_RES (26)..(27)..(28)..(29): Xaa is A or G or absent
TVPKPXXAPTQLEPLTVLYYXXXXXXXXXEQLSNNMVVRAXGXH

SEQ ID NO: 12158 - protein, 36 aa, Artificial Sequence
  Non-cyclic GFR-binding peptide
  MOD_RES (1)..(35): Xaa is C or S
  MOD_RES (15)..(16)..(17)..(18)..(19): Xaa is A or G
  MOD_RES (20)..(21)..(22)..(23): Xaa is A or G or absent
XAPTQLEPLPVVYYXXXXXXXXXEQLSNNMVVRAXG

SEQ ID NO: 12159 - protein, 38 aa, Artificial Sequence
  Non-cyclic GFR-binding peptide
  MOD_RES (4)..(5)..(37): Xaa is C or S
PKPXXAPTQLSPISVLFIDDSSNVIYKQYENMVVRAXG

SEQ ID NO: 12160 - protein, 37 aa, Artificial Sequence
  Non-cyclic GFR-binding peptide
  MOD_RES (2)..(3)..(35)..(37): Xaa is C or S
AXXVPTELEPLPMVYYDENEKVVEQLSNDMVVEGXGX

SEQ ID NO: 12161 - protein, 32 aa, Artificial Sequence
  Non-cyclic GFR-binding peptide
  MOD_RES (14)..(15)..(16)..(17)..(18): Xaa is A or G
  MOD_RES (19)..(20)..(21)..(22): Xaa is A or G or absent
VSQDLEPLPIVYYXXXXXXXXXEQLSNMIVKS

SEQ ID NO: 12162 - protein, 37 aa, Artificial Sequence
  Non-cyclic GFR-binding peptide
  MOD_RES (4)..(5)..(36): Xaa is C or S
AAPXXVPQALEPLTILYYVGRKPKVEQLSNMIVRSXK

SEQ ID NO: 12163 - protein, 33 aa, Artificial Sequence
  Non-cyclic GFR-binding peptide
  MOD_RES (1)..(1): Xaa is C or S
  MOD_RES (15)..(16)..(17)..(18)..(19): Xaa is A or G
  MOD_RES (20)..(21)..(22)..(23): Xaa is A or G or absent
XVPQALEPLTILYYXXXXXXXXXEQLSNMIVRS

SEQ ID NO: 12164 - protein, 33 aa, Artificial Sequence
  Non-cyclic GFR-binding peptide
  MOD_RES (1)..(1): Xaa is C or S
  MOD_RES (15)..(16)..(17)..(18)..(19): Xaa is A or G
  MOD_RES (20)..(21)..(22)..(23): Xaa is A or G or absent
XVSQDLEPLPIVYYXXXXXXXXXEQLSNMIVKS

SEQ ID NO: 12165 - protein, 39 aa, Artificial Sequence
  Non-cyclic GFR-binding peptide
  MOD_RES (6)..(6): Xaa is C or S
  MOD_RES (20)..(21)..(22)..(23)..(24): Xaa is A or G
  MOD_RES (25)..(26)..(27)..(28): Xaa is A or G or absent
VTKPTXAPTKLSPISVLFIXXXXXXXXXYKQYENMVVRS

SEQ ID NO: 12166 - protein, 40 aa, Artificial Sequence
  Non-cyclic GFR-binding peptide
  MOD_RES (3)..(4)..(37)..(39): Xaa is C or S
  MOD_RES (18)..(19)..(20)..(21)..(22): Xaa is A or G
  MOD_RES (23)..(24)..(25)..(26): Xaa is A or G or absent
SPXXVSQDLEPLPIVYYXXXXXXXXXEQLSNMIVKSXKXS

SEQ ID NO: 12167 - protein, 34 aa, Artificial Sequence
  Non-cyclic GFR-binding peptide
  MOD_RES (2)..(3): Xaa is C or S
TXXVPTRLSAISILYLDSANNVVLKNYQDMVVES

SEQ ID NO: 12168 - protein, 39 aa, Artificial Sequence
  Non-cyclic GFR-binding peptide
  MOD_RES (2)..(3)..(36)..(38): Xaa is C or S
  MOD_RES (17)..(18)..(19)..(20)..(21): Xaa is A or G
  MOD_RES (22)..(23)..(24)..(25): Xaa is A or G or absent
PXXVPQALSPISILFIXXXXXXXXXYKQYEMIVRSXKXS

SEQ ID NO: 12169 - protein, 35 aa, Artificial Sequence
  Non-cyclic GFR-binding peptide
  MOD_RES (2)..(3): Xaa is C or S
  MOD_RES (17)..(18)..(19)..(20)..(21): Xaa is A or G
  MOD_RES (22)..(23)..(24)..(25): Xaa is A or G or absent
PXXAPTQLSPISVLFIXXXXXXXXXYKQYENMVVR

SEQ ID NO: 12170 - protein, 38 aa, Artificial Sequence
  Non-cyclic GFR-binding peptide
  MOD_RES (2)..(3)..(35)..(37): Xaa is C or S
AXXVPTELEPLTMLYYDEYDKVVEQLSNEMVVEGXGXR

SEQ ID NO: 12171 - protein, 37 aa, Artificial Sequence
  Non-cyclic GFR-binding peptide
  MOD_RES (4)..(5)..(36): Xaa is C or S
ASPXXVSQDLSPISILFIIGKTPKIYKQYEMIVKSXK

SEQ ID NO: 12172 - protein, 39 aa, Artificial Sequence
  Non-cyclic GFR-binding peptide
  MOD_RES (4)..(36)..(38): Xaa is C or S
KPTXAPTKLEPLTVLYYDDSSNVIEQLSNNMVVRSXGXH

SEQ ID NO: 12173 - protein, 40 aa, Artificial Sequence
  Non-cyclic GFR-binding peptide
  MOD_RES (3)..(4)..(38)..(40): Xaa is C or S
  MOD_RES (18)..(19)..(20)..(21)..(22): Xaa is A or G
  MOD_RES (23)..(24)..(25)..(26): Xaa is A or G or absent
KPXXAPTQLEPLPVVYYXXXXXXXXXEQLSNNMVVRAXGX

SEQ ID NO: 12174 - protein, 34 aa, Artificial Sequence
  Non-cyclic GFR-binding peptide
  MOD_RES (1)..(1): Xaa is C or S
  MOD_RES (15)..(16)..(17)..(18)..(19): Xaa is A or G
  MOD_RES (20)..(21)..(22)..(23): Xaa is A or G or absent
XVPTELEPLTMLYYXXXXXXXXXEQLSNDMVVEG

SEQ ID NO: 12175 - protein, 36 aa, Artificial Sequence
  Non-cyclic GFR-binding peptide
  MOD_RES (1)..(2)..(33)..(35): Xaa is C or S
XXVPQDLSPISILFIVGRTPKVYKQYEMVVKSXKXS

SEQ ID NO: 12176 - protein, 41 aa, Artificial Sequence
  Non-cyclic GFR-binding peptide
  MOD_RES (6)..(38)..(40): Xaa is C or S
VTKPTXAPTKLEPLPVVYYDDSSNVIEQLSNNMVVRSXGXH

SEQ ID NO: 12177 - protein, 34 aa, Artificial Sequence
  Non-cyclic GFR-binding peptide
  MOD_RES (34)..(34): Xaa is C or S
  MOD_RES (14)..(15)..(16)..(17)..(18): Xaa is A or G
  MOD_RES (19)..(20)..(21)..(22): Xaa is A or G or absent
VPTELEPLPMVYYXXXXXXXXXEQLSNDMVVEGX

SEQ ID NO: 12178 - protein, 36 aa, Artificial Sequence
  Non-cyclic GFR-binding peptide
  MOD_RES (4)..(5): Xaa is C or S
PPTXXVPTRLEPLPIVYYDSANNVVEQLSNDMVVES

SEQ ID NO: 12179 - protein, 40 aa, Artificial Sequence
  Non-cyclic GFR-binding peptide
  MOD_RES (5)..(6)..(40): Xaa is C or S
  MOD_RES (20)..(21)..(22)..(23)..(24): Xaa is A or G
  MOD_RES (25)..(26)..(27)..(28): Xaa is A or G or absent
IPKAXXVPTELEPLTMLYYXXXXXXXXXEQLSNDMVVEGX

SEQ ID NO: 12180 - protein, 33 aa, Artificial Sequence
  Non-cyclic GFR-binding peptide
  MOD_RES (32)..(32): Xaa is C or S
VPTRLSAISILYLDSANNVVLKNYQDMVVESXG

SEQ ID NO: 12181 - protein, 35 aa, Artificial Sequence
  Non-cyclic GFR-binding peptide
  MOD_RES (34)..(34): Xaa is C or S
  MOD_RES (14)..(15)..(16)..(17)..(18): Xaa is A or G
  MOD_RES (19)..(20)..(21)..(22): Xaa is A or G or absent
VPTRLEPLTILYYXXXXXXXXXEQLSNDMVVESXG

SEQ ID NO: 12182 - protein, 36 aa, Artificial Sequence
  Non-cyclic GFR-binding peptide
  MOD_RES (1)..(2)..(34)..(36): Xaa is C or S
XXVPTELEPLPMVYYDENEKVVEQLSNDMVVEGXGX

SEQ ID NO: 12183 - protein, 34 aa, Artificial Sequence
  Non-cyclic GFR-binding peptide
  MOD_RES (1)..(33): Xaa is C or S
XAPTQLEPLPVVYYDDSSNVIEQLSNNMVVRAXG

SEQ ID NO: 12184 - protein, 35 aa, Artificial Sequence
  Non-cyclic GFR-binding peptide
  MOD_RES (1)..(2): Xaa is C or S
  MOD_RES (16)..(17)..(18)..(19)..(20): Xaa is A or G
  MOD_RES (21)..(22)..(23)..(24): Xaa is A or G or absent
XXAPTQLEPLTVLYYXXXXXXXXXEQLSNNMVVRA

SEQ ID NO: 12185 - protein, 37 aa, Artificial Sequence
  Non-cyclic GFR-binding peptide
  MOD_RES (1)..(34)..(36): Xaa is C or S
  MOD_RES (15)..(16)..(17)..(18)..(19): Xaa is A or G
  MOD_RES (20)..(21)..(22)..(23): Xaa is A or G or absent
XVPQDLEPLPIVYYXXXXXXXXXEQLSNMVVKSXKXS

SEQ ID NO: 12186 - protein, 35 aa, Artificial Sequence
  Non-cyclic GFR-binding peptide
  MOD_RES (1)..(35): Xaa is C or S
  MOD_RES (15)..(16)..(17)..(18)..(19): Xaa is A or G
  MOD_RES (20)..(21)..(22)..(23): Xaa is A or G or absent
XVPTELEPLPMVYYXXXXXXXXXEQLSNDMVVEGX

SEQ ID NO: 12187 - protein, 35 aa, Artificial Sequence
  Non-cyclic GFR-binding peptide
  MOD_RES (2)..(3): Xaa is C or S
  MOD_RES (17)..(18)..(19)..(20)..(21): Xaa is A or G
  MOD_RES (22)..(23)..(24)..(25): Xaa is A or G or absent
TXXVPTRLEPLPIVYYXXXXXXXXXEQLSNDMVVE

SEQ ID NO: 12188 - protein, 39 aa, Artificial Sequence
  Non-cyclic GFR-binding peptide
  MOD_RES (6)..(7): Xaa is C or S
  MOD_RES (21)..(22)..(23)..(24)..(25): Xaa is A or G
  MOD_RES (26)..(27)..(28)..(29): Xaa is A or G or absent
KIPKAXXVPTELEPLPMVYYXXXXXXXXXEQLSNDMVVE

SEQ ID NO: 12189 - protein, 39 aa, Artificial Sequence
  Non-cyclic GFR-binding peptide
  MOD_RES (6)..(7): Xaa is C or S
  MOD_RES (21)..(22)..(23)..(24)..(25): Xaa is A or G
  MOD_RES (26)..(27)..(28)..(29): Xaa is A or G or absent
KIPKAXXVPTELEPLTMLYYXXXXXXXXXEQLSNDMVVE

SEQ ID NO: 12190 - protein, 35 aa, Artificial Sequence
  Non-cyclic GFR-binding peptide
  MOD_RES (1)..(2): Xaa is C or S
  MOD_RES (16)..(17)..(18)..(19)..(20): Xaa is A or G
  MOD_RES (21)..(22)..(23)..(24): Xaa is A or G or absent
XXVPTELSPISMLFIXXXXXXXXXYKQYEDMVVEG

SEQ ID NO: 12191 - protein, 39 aa, Artificial Sequence
  Non-cyclic GFR-binding peptide
  MOD_RES (2)..(3)..(37)..(39): Xaa is C or S
  MOD_RES (17)..(18)..(19)..(20)..(21): Xaa is A or G
  MOD_RES (22)..(23)..(24)..(25): Xaa is A or G or absent
TXXVPTRLNAISILYFXXXXXXXXXLKKYRDMVVESXGX

SEQ ID NO: 12192 - protein, 32 aa, Artificial Sequence
  Non-cyclic GFR-binding peptide
  MOD_RES (1)..(2): Xaa is C or S
XXVPTRLEPLPIVYYDSANNVVEQLSNDMVVE

SEQ ID NO: 12193 - protein, 38 aa, Artificial Sequence
  Non-cyclic GFR-binding peptide
  MOD_RES (3)..(4)..(37): Xaa is C or S
  MOD_RES (18)..(19)..(20)..(21)..(22): Xaa is A or G
  MOD_RES (23)..(24)..(25)..(26): Xaa is A or G or absent
APXXVPQALEPLTILYYXXXXXXXXXEQLSNMIVRSXK

SEQ ID NO: 12194 - protein, 35 aa, Artificial Sequence
  Non-cyclic GFR-binding peptide
  MOD_RES (1)..(33)..(35): Xaa is C or S
XVPTRLNAISILYFDSANNVVLKKYRDMVVESXGX

SEQ ID NO: 12195 - protein, 39 aa, Artificial Sequence
  Non-cyclic GFR-binding peptide
  MOD_RES (3)..(4)..(38): Xaa is C or S
  MOD_RES (18)..(19)..(20)..(21)..(22): Xaa is A or G
  MOD_RES (23)..(24)..(25)..(26): Xaa is A or G or absent
PTXXVPTRLEPLTILYYXXXXXXXXXEQLSNDMVVESXG

SEQ ID NO: 12196 - protein, 37 aa, Artificial Sequence
  Non-cyclic GFR-binding peptide
  MOD_RES (2)..(3)..(36): Xaa is C or S
  MOD_RES (17)..(18)..(19)..(20)..(21): Xaa is A or G
  MOD_RES (22)..(23)..(24)..(25): Xaa is A or G or absent
PXXVPQALEPLTILYYXXXXXXXXXEQLSNMIVRSXK

SEQ ID NO: 12197 - protein, 31 aa, Artificial Sequence
  Non-cyclic GFR-binding peptide
  MOD_RES (1)..(1): Xaa is C or S
XVPTRLEPLPIVYYDSANNVVEQLSNDMVVE

SEQ ID NO: 12198 - protein, 40 aa, Artificial Sequence
  Non-cyclic GFR-binding peptide
  MOD_RES (4)..(5)..(39): Xaa is C or S
  MOD_RES (19)..(20)..(21)..(22)..(23): Xaa is A or G
  MOD_RES (24)..(25)..(26)..(27): Xaa is A or G or absent
PKPXXAPTQLSPISVLFIXXXXXXXXXYKQYENMVVRAXG

SEQ ID NO: 12199 - protein, 35 aa, Artificial Sequence
  Non-cyclic GFR-binding peptide
  MOD_RES (2)..(34): Xaa is C or S
TXAPTKLEPLTVLYYDDSSNVIEQLSNNMVVRSXG

SEQ ID NO: 12200 - protein, 36 aa, Artificial Sequence
  Non-cyclic GFR-binding peptide
  MOD_RES (33)..(35): Xaa is C or S
  MOD_RES (14)..(15)..(16)..(17)..(18): Xaa is A or G
  MOD_RES (19)..(20)..(21)..(22): Xaa is A or G or absent
VPQALSPISILFIXXXXXXXXXYKQYEMIVRSXKXS

SEQ ID NO: 12201 - protein, 42 aa, Artificial Sequence
  Non-cyclic GFR-binding peptide
  MOD_RES (5)..(6)..(39)..(41): Xaa is C or S
  MOD_RES (20)..(21)..(22)..(23)..(24): Xaa is A or G
  MOD_RES (25)..(26)..(27)..(28): Xaa is A or G or absent
SASPXXVPQDLSPISILFIXXXXXXXXXYKQYEMVVKSXKXS

SEQ ID NO: 12202 - protein, 42 aa, Artificial Sequence
  Non-cyclic GFR-binding peptide
  MOD_RES (6)..(7)..(41): Xaa is C or S
  MOD_RES (21)..(22)..(23)..(24)..(25): Xaa is A or G
  MOD_RES (26)..(27)..(28)..(29): Xaa is A or G or absent
YVPKPXXAPTKLEPLTVLYYXXXXXXXXXEQLSNNMVVRSXG

SEQ ID NO: 12203 - protein, 40 aa, Artificial Sequence
  Non-cyclic GFR-binding peptide
  MOD_RES (3)..(4)..(37)..(39): Xaa is C or S
  MOD_RES (18)..(19)..(20)..(21)..(22): Xaa is A or G
  MOD_RES (23)..(24)..(25)..(26): Xaa is A or G or absent
SPXXVSQDLSPISILFIXXXXXXXXXYKQYEMIVKSXKXS

SEQ ID NO: 12204 - protein, 39 aa, Artificial Sequence
  Non-cyclic GFR-binding peptide
  MOD_RES (6)..(7): Xaa is C or S
  MOD_RES (21)..(22)..(23)..(24)..(25): Xaa is A or G
  MOD_RES (26)..(27)..(28)..(29): Xaa is A or G or absent
SIPKAXXVPTELSPISMLFIXXXXXXXXXYKQYEEMVVE

SEQ ID NO: 12205 - protein, 36 aa, Artificial Sequence
  Non-cyclic GFR-binding peptide
  MOD_RES (34)..(36): Xaa is C or S
  MOD_RES (14)..(15)..(16)..(17)..(18): Xaa is A or G
  MOD_RES (19)..(20)..(21)..(22): Xaa is A or G or absent
VPTRLSAISILYLXXXXXXXXXLKNYQDMVVESXGX

SEQ ID NO: 12206 - protein, 35 aa, Artificial Sequence
  Non-cyclic GFR-binding peptide
  MOD_RES (34)..(34): Xaa is C or S
  MOD_RES (14)..(15)..(16)..(17)..(18): Xaa is A or G
  MOD_RES (19)..(20)..(21)..(22): Xaa is A or G or absent
APTKLEPLPVVYYXXXXXXXXXEQLSNNMVVRSXG

SEQ ID NO: 12207 - protein, 34 aa, Artificial Sequence
  Non-cyclic GFR-binding peptide
  MOD_RES (2)..(3)..(34): Xaa is C or S
PXXVSQDLSPISILFIIGKTPKIYKQYEMIVKSX

SEQ ID NO: 12208 - protein, 35 aa, Artificial Sequence
  Non-cyclic GFR-binding peptide
  MOD_RES (33)..(35): Xaa is C or S
  MOD_RES (14)..(15)..(16)..(17)..(18): Xaa is A or G
  MOD_RES (19)..(20)..(21)..(22): Xaa is A or G or absent
VPQALEPLTILYYXXXXXXXXXEQLSNMIVRSXKX

SEQ ID NO: 12209 - protein, 39 aa, Artificial Sequence
  Non-cyclic GFR-binding peptide
  MOD_RES (6)..(7)..(38): Xaa is C or S
ASASPXXVSQDLSPISILFIIGKTPKIYKQYEMIVKSXK

SEQ ID NO: 12210 - protein, 36 aa, Artificial Sequence
  Non-cyclic GFR-binding peptide
  MOD_RES (6)..(6): Xaa is C or S
VTKPTXAPTKLEPLPVVYYDDSSNVIEQLSNNMVVR

SEQ ID NO: 12211 - protein, 41 aa, Artificial Sequence
  Non-cyclic GFR-binding peptide
  MOD_RES (4)..(5)..(38)..(40): Xaa is C or S
  MOD_RES (19)..(20)..(21)..(22)..(23): Xaa is A or G
  MOD_RES (24)..(25)..(26)..(27): Xaa is A or G or absent
ASPXXVSQDLSPISILFIXXXXXXXXXYKQYEMIVKSXKXS

SEQ ID NO: 12212 - protein, 35 aa, Artificial Sequence
  Non-cyclic GFR-binding peptide
  MOD_RES (1)..(33)..(35): Xaa is C or S
XVPTRLEPLPIVYYDSANNVVEQLSNDMVVESXGX

SEQ ID NO: 12213 - protein, 34 aa, Artificial Sequence
  Non-cyclic GFR-binding peptide
  MOD_RES (2)..(3): Xaa is C or S
AXXVPTELEPLPMVYYDEYDKVVEQLSNEMVVEG

SEQ ID NO: 12214 - protein, 33 aa, Artificial Sequence
  Non-cyclic GFR-binding peptide
  MOD_RES (2)..(3): Xaa is C or S
AXXVPTELSPISMLFIDEYDKVVYKQYEEMVVE

SEQ ID NO: 12215 - protein, 34 aa, Artificial Sequence
  Non-cyclic GFR-binding peptide
  MOD_RES (2)..(3)..(34): Xaa is C or S
PXXVPQDLEPLPIVYYVGRTPKVEQLSNMVVKSX

SEQ ID NO: 12216 - protein, 40 aa, Artificial Sequence
  Non-cyclic GFR-binding peptide
  MOD_RES (5)..(6)..(40): Xaa is C or S
  MOD_RES (20)..(21)..(22)..(23)..(24): Xaa is A or G
  MOD_RES (25)..(26)..(27)..(28): Xaa is A or G or absent
IPKAXXVPTELEPLPMVYYXXXXXXXXXEQLSNDMVVEGX

SEQ ID NO: 12217 - protein, 32 aa, Artificial Sequence
  Non-cyclic GFR-binding peptide
  MOD_RES (32)..(32): Xaa is C or S
VPTELSPISMLFIDENEKVVYKQYEDMVVEGX

SEQ ID NO: 12218 - protein, 39 aa, Artificial Sequence
  Non-cyclic GFR-binding peptide
  MOD_RES (3)..(4)..(36)..(38): Xaa is C or S
KAXXVPTELSPISMLFIDEYDKVVYKQYEEMVVEGXGXR

SEQ ID NO: 12219 - protein, 38 aa, Artificial Sequence
  Non-cyclic GFR-binding peptide
  MOD_RES (4)..(5)..(37): Xaa is C or S
PKPXXAPTQLEPLPVVYYDDSSNVIEQLSNNMVVRAXG

SEQ ID NO: 12220 - protein, 33 aa, Artificial Sequence
  Non-cyclic GFR-binding peptide
  MOD_RES (1)..(1): Xaa is C or S
  MOD_RES (15)..(16)..(17)..(18)..(19): Xaa is A or G
  MOD_RES (20)..(21)..(22)..(23): Xaa is A or G or absent
XVSQDLSPISILFIXXXXXXXXXYKQYEMIVKS

SEQ ID NO: 12221 - protein, 38 aa, Artificial Sequence
  Non-cyclic GFR-binding peptide
  MOD_RES (3)..(4)..(38): Xaa is C or S
  MOD_RES (18)..(19)..(20)..(21)..(22): Xaa is A or G
  MOD_RES (23)..(24)..(25)..(26): Xaa is A or G or absent
KAXXVPTELEPLPMVYYXXXXXXXXXEQLSNDMVVEGX

SEQ ID NO: 12222 - protein, 36 aa, Artificial Sequence
  Non-cyclic GFR-binding peptide
  MOD_RES (2)..(3)..(34)..(36): Xaa is C or S
PXXVSQDLSPISILFIIGKTPKIYKQYEMIVKSXKX

SEQ ID NO: 12223 - protein, 43 aa, Artificial Sequence
  Non-cyclic GFR-binding peptide
  MOD_RES (5)..(6)..(40)..(42): Xaa is C or S
  MOD_RES (20)..(21)..(22)..(23)..(24): Xaa is A or G
  MOD_RES (25)..(26)..(27)..(28): Xaa is A or G or absent
IPKAXXVPTELSPISMLFIXXXXXXXXXYKQYEEMVVEGXGXR

SEQ ID NO: 12224 - protein, 37 aa, Artificial Sequence
  Non-cyclic GFR-binding peptide
  MOD_RES (6)..(6): Xaa is C or S
VTKPTXAPTKLEPLPVVYYDDSSNVIEQLSNNMVVRS

SEQ ID NO: 12225 - protein, 36 aa, Artificial Sequence
  Non-cyclic GFR-binding peptide
  MOD_RES (1)..(2)..(34)..(36): Xaa is C or S
XXVPTELSPISMLFIDEYDKVVYKQYEEMVVEGXGX

SEQ ID NO: 12226 - protein, 33 aa, Artificial Sequence
  Non-cyclic GFR-binding peptide
  MOD_RES (1)..(33): Xaa is C or S
XVPTRLNAISILYFDSANNVVLKKYRDMVVESX

SEQ ID NO: 12227 - protein, 35 aa, Artificial Sequence
  Non-cyclic GFR-binding peptide
  MOD_RES (1)..(2): Xaa is C or S
  MOD_RES (16)..(17)..(18)..(19)..(20): Xaa is A or G
  MOD_RES (21)..(22)..(23)..(24): Xaa is A or G or absent
XXAPTQLSPISVLFIXXXXXXXXXYKQYENMVVRA

SEQ ID NO: 12228 - protein, 35 aa, Artificial Sequence
  Non-cyclic GFR-binding peptide
  MOD_RES (2)..(3)..(35): Xaa is C or S
AXXVPTELEPLTMLYYDENEKVVEQLSNDMVVEGX

SEQ ID NO: 12229 - protein, 39 aa, Artificial Sequence
  Non-cyclic GFR-binding peptide
  MOD_RES (2)..(3)..(36)..(38): Xaa is C or S
  MOD_RES (17)..(18)..(19)..(20)..(21): Xaa is A or G
  MOD_RES (22)..(23)..(24)..(25): Xaa is A or G or absent
PXXVPQDLSPISILFIXXXXXXXXXYKQYEMVVKSXKXS

SEQ ID NO: 12230 - protein, 37 aa, Artificial Sequence
  Non-cyclic GFR-binding peptide
  MOD_RES (1)..(34)..(36): Xaa is C or S
  MOD_RES (15)..(16)..(17)..(18)..(19): Xaa is A or G
  MOD_RES (20)..(21)..(22)..(23): Xaa is A or G or absent
XVPQDLSPISILFIXXXXXXXXXYKQYEMVVKSXKXS

SEQ ID NO: 12231 - protein, 40 aa, Artificial Sequence
  Non-cyclic GFR-binding peptide
  MOD_RES (4)..(5)..(37)..(39): Xaa is C or S
PKAXXVPTELEPLTMLYYDEYDKVVEQLSNEMVVEGXGXR

SEQ ID NO: 12232 - protein, 37 aa, Artificial Sequence
  Non-cyclic GFR-binding peptide
  MOD_RES (3)..(4)..(37): Xaa is C or S
  MOD_RES (18)..(19)..(20)..(21)..(22): Xaa is A or G
  MOD_RES (23)..(24)..(25)..(26): Xaa is A or G or absent
SPXXVSQDLEPLPIVYYXXXXXXXXXEQLSNMIVKSX

SEQ ID NO: 12233 - protein, 36 aa, Artificial Sequence
  Non-cyclic GFR-binding peptide
  MOD_RES (1)..(2)..(34)..(36): Xaa is C or S
XXVPTRLNAISILYFDSANNVVLKKYRDMVVESXGX

SEQ ID NO: 12234 - protein, 35 aa, Artificial Sequence
  Non-cyclic GFR-binding peptide
  MOD_RES (2)..(3): Xaa is C or S
  MOD_RES (17)..(18)..(19)..(20)..(21): Xaa is A or G
  MOD_RES (22)..(23)..(24)..(25): Xaa is A or G or absent
TXXVPTRLNAISILYFXXXXXXXXXLKKYRDMVVE

SEQ ID NO: 12235 - protein, 38 aa, Artificial Sequence
  Non-cyclic GFR-binding peptide
  MOD_RES (4)..(5)..(37): Xaa is C or S
PKAXXVPTELEPLTMLYYDEYDKVVEQLSNEMVVEGXG

SEQ ID NO: 12236 - protein, 39 aa, Artificial Sequence
  Non-cyclic GFR-binding peptide
  MOD_RES (6)..(7)..(38): Xaa is C or S
ASASPXXVPQDLEPLPIVYYVGRTPKVEQLSNMVVKSXK

SEQ ID NO: 12237 - protein, 41 aa, Artificial Sequence
  Non-cyclic GFR-binding peptide
  MOD_RES (3)..(4)..(38)..(40): Xaa is C or S
  MOD_RES (18)..(19)..(20)..(21)..(22): Xaa is A or G
  MOD_RES (23)..(24)..(25)..(26): Xaa is A or G or absent
KAXXVPTELEPLTMLYYXXXXXXXXXEQLSNDMVVEGXGXR

SEQ ID NO: 12238 - protein, 36 aa, Artificial Sequence
  Non-cyclic GFR-binding peptide
  MOD_RES (3)..(4)..(35): Xaa is C or S
SPXXVPQDLEPLPIVYYVGRTPKVEQLSNMVVKSXK

SEQ ID NO: 12239 - protein, 36 aa, Artificial Sequence
  Non-cyclic GFR-binding peptide
  MOD_RES (3)..(4)..(36): Xaa is C or S
KAXXVPTELEPLPMVYYDENEKVVEQLSNDMVVEGX

SEQ ID NO: 12240 - protein, 31 aa, Artificial Sequence
  Non-cyclic GFR-binding peptide
  MOD_RES (1)..(1): Xaa is C or S
XVPTRLNAISILYFDSANNVVLKKYRDMVVE

SEQ ID NO: 12241 - protein, 36 aa, Artificial Sequence
  Non-cyclic GFR-binding peptide
  MOD_RES (3)..(4)..(35): Xaa is C or S
SPXXVSQDLSPISILFIIGKTPKIYKQYEMIVKSXK

SEQ ID NO: 12242 - protein, 40 aa, Artificial Sequence
  Non-cyclic GFR-binding peptide
  MOD_RES (4)..(5)..(37)..(39): Xaa is C or S
PKPXXAPTQLEPLTVLYYDDSSNVIEQLSNNMVVRAXGXH

SEQ ID NO: 12243 - protein, 37 aa, Artificial Sequence
  Non-cyclic GFR-binding peptide
  MOD_RES (2)..(3)..(37): Xaa is C or S
  MOD_RES (17)..(18)..(19)..(20)..(21): Xaa is A or G
  MOD_RES (22)..(23)..(24)..(25): Xaa is A or G or absent
AXXVPTELEPLTMLYYXXXXXXXXXEQLSNDMVVEGX

SEQ ID NO: 12244 - protein, 39 aa, Artificial Sequence
  Non-cyclic GFR-binding peptide
  MOD_RES (2)..(3)..(37)..(39): Xaa is C or S
  MOD_RES (17)..(18)..(19)..(20)..(21): Xaa is A or G
  MOD_RES (22)..(23)..(24)..(25): Xaa is A or G or absent
AXXVPTELEPLTMLYYXXXXXXXXXEQLSNEMVVEGXGX

SEQ ID NO: 12245 - protein, 35 aa, Artificial Sequence
  Non-cyclic GFR-binding peptide
  MOD_RES (1)..(33)..(35): Xaa is C or S
XAPTKLEPLTVLYYDDSSNVIEQLSNNMVVRSXGX

SEQ ID NO: 12246 - protein, 37 aa, Artificial Sequence
  Non-cyclic GFR-binding peptide
  MOD_RES (3)..(4)..(36): Xaa is C or S
KAXXVPTELEPLPMVYYDENEKVVEQLSNDMVVEGXG

SEQ ID NO: 12247 - protein, 35 aa, Artificial Sequence
  Non-cyclic GFR-binding peptide
  MOD_RES (1)..(2)..(34): Xaa is C or S
XXAPTQLSPISVLFIDDSSNVIYKQYENMVVRAXG

SEQ ID NO: 12248 - protein, 42 aa, Artificial Sequence
  Non-cyclic GFR-binding peptide
  MOD_RES (6)..(7)..(39)..(41): Xaa is C or S
TVPKPXXAPTQLEPLPVVYYDDSSNVIEQLSNNMVVRAXGXH

SEQ ID NO: 12249 - protein, 34 aa, Artificial Sequence
  Non-cyclic GFR-binding peptide
  MOD_RES (34)..(34): Xaa is C or S
  MOD_RES (14)..(15)..(16)..(17)..(18): Xaa is A or G
  MOD_RES (19)..(20)..(21)..(22): Xaa is A or G or absent
VPTELSPISMLFIXXXXXXXXXYKQYEDMVVEGX

SEQ ID NO: 12250 - protein, 40 aa, Artificial Sequence
  Non-cyclic GFR-binding peptide
  MOD_RES (5)..(6)..(37)..(39): Xaa is C or S
SASPXXVSQDLEPLPIVYYIGKTPKIEQLSNMIVKSXKXS

SEQ ID NO: 12251 - protein, 40 aa, Artificial Sequence
  Non-cyclic GFR-binding peptide
  MOD_RES (3)..(4)..(38)..(40): Xaa is C or S
  MOD_RES (18)..(19)..(20)..(21)..(22): Xaa is A or G
  MOD_RES (23)..(24)..(25)..(26): Xaa is A or G or absent
KPXXAPTKLSPISVLFIXXXXXXXXXYKQYENMVVRSXGX

SEQ ID NO: 12252 - protein, 37 aa, Artificial Sequence
  Non-cyclic GFR-binding peptide
  MOD_RES (3)..(4): Xaa is C or S
  MOD_RES (18)..(19)..(20)..(21)..(22): Xaa is A or G
  MOD_RES (23)..(24)..(25)..(26): Xaa is A or G or absent
PTXXVPTRLEPLPIVYYXXXXXXXXXEQLSNDMVVES

SEQ ID NO: 12253 - protein, 39 aa, Artificial Sequence
  Non-cyclic GFR-binding peptide
  MOD_RES (3)..(4)..(36)..(38): Xaa is C or S
KPXXAPTQLSPISVLFIDDSSNVIYKQYENMVVRAXGXH

SEQ ID NO: 12254 - protein, 35 aa, Artificial Sequence
  Non-cyclic GFR-binding peptide
  MOD_RES (1)..(2): Xaa is C or S
  MOD_RES (16)..(17)..(18)..(19)..(20): Xaa is A or G
  MOD_RES (21)..(22)..(23)..(24): Xaa is A or G or absent
XXVPTELEPLTMLYYXXXXXXXXXEQLSNDMVVEG

SEQ ID NO: 12255 - protein, 36 aa, Artificial Sequence
  Non-cyclic GFR-binding peptide
  MOD_RES (1)..(34)..(36): Xaa is C or S
  MOD_RES (15)..(16)..(17)..(18)..(19): Xaa is A or G
  MOD_RES (20)..(21)..(22)..(23): Xaa is A or G or absent
XVPQALEPLTILYYXXXXXXXXXEQLSNMIVRSXKX

SEQ ID NO: 12256 - protein, 39 aa, Artificial Sequence
  Non-cyclic GFR-binding peptide
  MOD_RES (3)..(4)..(38): Xaa is C or S
  MOD_RES (18)..(19)..(20)..(21)..(22): Xaa is A or G
  MOD_RES (23)..(24)..(25)..(26): Xaa is A or G or absent
KPXXAPTKLEPLTVLYYXXXXXXXXXEQLSNNMVVRSXG

SEQ ID NO: 12257 - protein, 41 aa, Artificial Sequence
  Non-cyclic GFR-binding peptide
  MOD_RES (5)..(6)..(39)..(41): Xaa is C or S
  MOD_RES (20)..(21)..(22)..(23)..(24): Xaa is A or G
  MOD_RES (25)..(26)..(27)..(28): Xaa is A or G or absent
SASPXXVSQDLEPLPIVYYXXXXXXXXXEQLSNMIVKSXKX

SEQ ID NO: 12258 - protein, 39 aa, Artificial Sequence
  Non-cyclic GFR-binding peptide
  MOD_RES (5)..(6)..(38): Xaa is C or S
VPKPXXAPTKLEPLTVLYYDDSSNVIEQLSNNMVVRSXG

SEQ ID NO: 12259 - protein, 33 aa, Artificial Sequence
  Non-cyclic GFR-binding peptide
  MOD_RES (14)..(15)..(16)..(17)..(18): Xaa is A or G
  MOD_RES (19)..(20)..(21)..(22): Xaa is A or G or absent
VPTRLEPLTILYYXXXXXXXXXEQLSNDMVVES

SEQ ID NO: 12260 - protein, 36 aa, Artificial Sequence
  Non-cyclic GFR-binding peptide
  MOD_RES (1)..(2)..(34)..(36): Xaa is C or S
XXAPTQLEPLPVVYYDDSSNVIEQLSNNMVVRAXGX

SEQ ID NO: 12261 - protein, 37 aa, Artificial Sequence
  Non-cyclic GFR-binding peptide
  MOD_RES (1)..(35)..(37): Xaa is C or S
  MOD_RES (15)..(16)..(17)..(18)..(19): Xaa is A or G
  MOD_RES (20)..(21)..(22)..(23): Xaa is A or G or absent
XVPTELSPISMLFIXXXXXXXXXYKQYEDMVVEGXGX

SEQ ID NO: 12262 - protein, 37 aa, Artificial Sequence
  Non-cyclic GFR-binding peptide
  MOD_RES (4)..(5): Xaa is C or S
  MOD_RES (19)..(20)..(21)..(22)..(23): Xaa is A or G
  MOD_RES (24)..(25)..(26)..(27): Xaa is A or G or absent
PKAXXVPTELEPLTMLYYXXXXXXXXXEQLSNDMVVE

SEQ ID NO: 12263 - protein, 41 aa, Artificial Sequence
  Non-cyclic GFR-binding peptide
  MOD_RES (3)..(4)..(38)..(40): Xaa is C or S
  MOD_RES (18)..(19)..(20)..(21)..(22): Xaa is A or G
  MOD_RES (23)..(24)..(25)..(26): Xaa is A or G or absent
KAXXVPTELEPLPMVYYXXXXXXXXXEQLSNEMVVEGXGXR

SEQ ID NO: 12264 - protein, 37 aa, Artificial Sequence
  Non-cyclic GFR-binding peptide
  MOD_RES (3)..(4)..(37): Xaa is C or S
  MOD_RES (18)..(19)..(20)..(21)..(22): Xaa is A or G
  MOD_RES (23)..(24)..(25)..(26): Xaa is A or G or absent
SPXXVPQDLSPISILFIXXXXXXXXXYKQYEMVVKSX

SEQ ID NO: 12265 - protein, 36 aa, Artificial Sequence
  Non-cyclic GFR-binding peptide
  MOD_RES (3)..(4)..(35): Xaa is C or S
SPXXVPQDLSPISILFIVGRTPKVYKQYEMVVKSXK

SEQ ID NO: 12266 - protein, 44 aa, Artificial Sequence
  Non-cyclic GFR-binding peptide
  MOD_RES (6)..(7)..(41)..(43): Xaa is C or S
  MOD_RES (21)..(22)..(23)..(24)..(25): Xaa is A or G
  MOD_RES (26)..(27)..(28)..(29): Xaa is A or G or absent
KIPKAXXVPTELSPISMLFIXXXXXXXXXYKQYEDMVVEGXGXR

SEQ ID NO: 12267 - protein, 33 aa, Artificial Sequence
  Non-cyclic GFR-binding peptide
  MOD_RES (32)..(32): Xaa is C or S
APTQLEPLTVLYYDDSSNVIEQLSNNMVVRAXG

SEQ ID NO: 12268 - protein, 38 aa, Artificial Sequence
  Non-cyclic GFR-binding peptide
  MOD_RES (1)..(35)..(37): Xaa is C or S
  MOD_RES (15)..(16)..(17)..(18)..(19): Xaa is A or G
  MOD_RES (20)..(21)..(22)..(23): Xaa is A or G or absent
XVPTRLEPLTILYYXXXXXXXXXEQLSNDMVVESXGXR

SEQ ID NO: 12269 - protein, 38 aa, Artificial Sequence
  Non-cyclic GFR-binding peptide
  MOD_RES (3)..(4)..(38): Xaa is C or S
  MOD_RES (18)..(19)..(20)..(21)..(22): Xaa is A or G
  MOD_RES (23)..(24)..(25)..(26): Xaa is A or G or absent
KPXXAPTQLSPISVLFIXXXXXXXXXYKQYENMVVRAX

SEQ ID NO: 12270 - protein, 38 aa, Artificial Sequence
  Non-cyclic GFR-binding peptide
  MOD_RES (5)..(6): Xaa is C or S
  MOD_RES (20)..(21)..(22)..(23)..(24): Xaa is A or G
  MOD_RES (25)..(26)..(27)..(28): Xaa is A or G or absent
SAAPXXVPQALSPISILFIXXXXXXXXXYKQYEMIVRS

SEQ ID NO: 12271 - protein, 37 aa, Artificial Sequence
  Non-cyclic GFR-binding peptide
  MOD_RES (3)..(4)..(36): Xaa is C or S
KPXXAPTQLSPISVLFIDDSSNVIYKQYENMVVRAXG

SEQ ID NO: 12272 - protein, 40 aa, Artificial Sequence
  Non-cyclic GFR-binding peptide
  MOD_RES (5)..(6)..(39): Xaa is C or S
  MOD_RES (20)..(21)..(22)..(23)..(24): Xaa is A or G
  MOD_RES (25)..(26)..(27)..(28): Xaa is A or G or absent
SAAPXXVPQALSPISILFIXXXXXXXXXYKQYEMIVRSXK

SEQ ID NO: 12273 - protein, 37 aa, Artificial Sequence
  Non-cyclic GFR-binding peptide
  MOD_RES (2)..(3)..(37): Xaa is C or S
  MOD_RES (17)..(18)..(19)..(20)..(21): Xaa is A or G
  MOD_RES (22)..(23)..(24)..(25): Xaa is A or G or absent
AXXVPTELEPLPMVYYXXXXXXXXXEQLSNEMVVEGX

SEQ ID NO: 12274 - protein, 42 aa, Artificial Sequence
  Non-cyclic GFR-binding peptide
  MOD_RES (6)..(7)..(40)..(42): Xaa is C or S
  MOD_RES (21)..(22)..(23)..(24)..(25): Xaa is A or G
  MOD_RES (26)..(27)..(28)..(29): Xaa is A or G or absent
ASAAPXXVPQALEPLTILYYXXXXXXXXXEQLSNMIVRSXKX

SEQ ID NO: 12275 - protein, 43 aa, Artificial Sequence
  Non-cyclic GFR-binding peptide
  MOD_RES (6)..(7)..(40)..(42): Xaa is C or S
  MOD_RES (21)..(22)..(23)..(24)..(25): Xaa is A or G
  MOD_RES (26)..(27)..(28)..(29): Xaa is A or G or absent
ASAAPXXVPQALEPLTILYYXXXXXXXXXEQLSNMIVRSXKXS

SEQ ID NO: 12276 - protein, 38 aa, Artificial Sequence
  Non-cyclic GFR-binding peptide
  MOD_RES (2)..(3)..(37): Xaa is C or S
  MOD_RES (17)..(18)..(19)..(20)..(21): Xaa is A or G
  MOD_RES (22)..(23)..(24)..(25): Xaa is A or G or absent
AXXVPTELEPLPMVYYXXXXXXXXXEQLSNEMVVEGXG

SEQ ID NO: 12277 - protein, 32 aa, Artificial Sequence
  Non-cyclic GFR-binding peptide
  MOD_RES (1)..(2): Xaa is C or S
XXAPTKLEPLPVVYYDDSSNVIEQLSNNMVVR

SEQ ID NO: 12278 - protein, 36 aa, Artificial Sequence
  Non-cyclic GFR-binding peptide
  MOD_RES (2)..(3)..(35): Xaa is C or S
PXXAPTQLEPLTVLYYDDSSNVIEQLSNNMVVRAXG

SEQ ID NO: 12279 - protein, 37 aa, Artificial Sequence
  Non-cyclic GFR-binding peptide
  MOD_RES (2)..(3)..(37): Xaa is C or S
  MOD_RES (17)..(18)..(19)..(20)..(21): Xaa is A or G
  MOD_RES (22)..(23)..(24)..(25): Xaa is A or G or absent
TXXVPTRLEPLPIVYYXXXXXXXXXEQLSNDMVVESX

SEQ ID NO: 12280 - protein, 34 aa, Artificial Sequence
  Non-cyclic GFR-binding peptide
  MOD_RES (32)..(34): Xaa is C or S
VPTELEPLPMVYYDENEKVVEQLSNDMVVEGXGX

SEQ ID NO: 12281 - protein, 39 aa, Artificial Sequence
  Non-cyclic GFR-binding peptide
  MOD_RES (3)..(4)..(37)..(39): Xaa is C or S
  MOD_RES (18)..(19)..(20)..(21)..(22): Xaa is A or G
  MOD_RES (23)..(24)..(25)..(26): Xaa is A or G or absent
SPXXVPQDLEPLPIVYYXXXXXXXXXEQLSNMVVKSXKX

SEQ ID NO: 12282 - protein, 37 aa, Artificial Sequence
  Non-cyclic GFR-binding peptide
  MOD_RES (6)..(7): Xaa is C or S
SIPKAXXVPTELEPLPMVYYDEYDKVVEQLSNEMVVE

SEQ ID NO: 12283 - protein, 36 aa, Artificial Sequence
  Non-cyclic GFR-binding peptide
  MOD_RES (34)..(36): Xaa is C or S
  MOD_RES (14)..(15)..(16)..(17)..(18): Xaa is A or G
  MOD_RES (19)..(20)..(21)..(22): Xaa is A or G or absent
APTQLSPISVLFIXXXXXXXXXYKQYENMVVRAXGX

SEQ ID NO: 12284 - protein, 33 aa, Artificial Sequence
  Non-cyclic GFR-binding peptide
  MOD_RES (2)..(3): Xaa is C or S
PXXVSQDLEPLPIVYYIGKTPKIEQLSNMIVKS

SEQ ID NO: 12285 - protein, 41 aa, Artificial Sequence
  Non-cyclic GFR-binding peptide
  MOD_RES (5)..(6)..(40): Xaa is C or S
  MOD_RES (20)..(21)..(22)..(23)..(24): Xaa is A or G
  MOD_RES (25)..(26)..(27)..(28): Xaa is A or G or absent
IPKAXXVPTELSPISMLFIXXXXXXXXXYKQYEEMVVEGXG

SEQ ID NO: 12286 - protein, 38 aa, Artificial Sequence
  Non-cyclic GFR-binding peptide
  MOD_RES (3)..(4)..(35)..(37): Xaa is C or S
SPXXVSQDLEPLPIVYYIGKTPKIEQLSNMIVKSXKXS

SEQ ID NO: 12287 - protein, 40 aa, Artificial Sequence
  Non-cyclic GFR-binding peptide
  MOD_RES (6)..(7): Xaa is C or S
  MOD_RES (21)..(22)..(23)..(24)..(25): Xaa is A or G
  MOD_RES (26)..(27)..(28)..(29): Xaa is A or G or absent
SIPKAXXVPTELSPISMLFIXXXXXXXXXYKQYEEMVVEG

SEQ ID NO: 12288 - protein, 38 aa, Artificial Sequence
  Non-cyclic GFR-binding peptide
  MOD_RES (4)..(5): Xaa is C or S
  MOD_RES (19)..(20)..(21)..(22)..(23): Xaa is A or G
  MOD_RES (24)..(25)..(26)..(27): Xaa is A or G or absent
PKPXXAPTQLSPISVLFIXXXXXXXXXYKQYENMVVRA

SEQ ID NO: 12289 - protein, 32 aa, Artificial Sequence
  Non-cyclic GFR-binding peptide
  MOD_RES (14)..(15)..(16)..(17)..(18): Xaa is A or G
  MOD_RES (19)..(20)..(21)..(22): Xaa is A or G or absent
APTQLEPLTVLYYXXXXXXXXXEQLSNNMVVR

SEQ ID NO: 12290 - protein, 34 aa, Artificial Sequence
  Non-cyclic GFR-binding peptide
  MOD_RES (3)..(4): Xaa is C or S
KAXXVPTELEPLTMLYYDEYDKVVEQLSNEMVVE

SEQ ID NO: 12291 - protein, 36 aa, Artificial Sequence
  Non-cyclic GFR-binding peptide
  MOD_RES (1)..(34)..(36): Xaa is C or S
  MOD_RES (15)..(16)..(17)..(18)..(19): Xaa is A or G
  MOD_RES (20)..(21)..(22)..(23): Xaa is A or G or absent
XVPQDLEPLPIVYYXXXXXXXXXEQLSNMVVKSXKX

SEQ ID NO: 12292 - protein, 39 aa, Artificial Sequence
  Non-cyclic GFR-binding peptide
  MOD_RES (4)..(5)..(39): Xaa is C or S
  MOD_RES (19)..(20)..(21)..(22)..(23): Xaa is A or G
  MOD_RES (24)..(25)..(26)..(27): Xaa is A or G or absent
PKPXXAPTKLSPISVLFIXXXXXXXXXYKQYENMVVRSX

SEQ ID NO: 12293 - protein, 36 aa, Artificial Sequence
  Non-cyclic GFR-binding peptide
  MOD_RES (5)..(6): Xaa is C or S
SASPXXVPQDLEPLPIVYYVGRTPKVEQLSNMVVKS

SEQ ID NO: 12294 - protein, 37 aa, Artificial Sequence
  Non-cyclic GFR-binding peptide
  MOD_RES (3)..(4)..(36): Xaa is C or S
PTXXVPTRLEPLTILYYDSANNVVEQLSNDMVVESXG

SEQ ID NO: 12295 - protein, 41 aa, Artificial Sequence
  Non-cyclic GFR-binding peptide
  MOD_RES (4)..(5)..(39)..(41): Xaa is C or S
  MOD_RES (19)..(20)..(21)..(22)..(23): Xaa is A or G
  MOD_RES (24)..(25)..(26)..(27): Xaa is A or G or absent
PKPXXAPTQLEPLTVLYYXXXXXXXXXEQLSNNMVVRAXGX

SEQ ID NO: 12296 - protein, 34 aa, Artificial Sequence
  Non-cyclic GFR-binding peptide
  MOD_RES (32)..(34): Xaa is C or S
VPTELSPISMLFIDENEKVVYKQYEDMVVEGXGX

SEQ ID NO: 12297 - protein, 40 aa, Artificial Sequence
  Non-cyclic GFR-binding peptide
  MOD_RES (2)..(3)..(37)..(39): Xaa is C or S
  MOD_RES (17)..(18)..(19)..(20)..(21): Xaa is A or G
  MOD_RES (22)..(23)..(24)..(25): Xaa is A or G or absent
TXXVPTRLSAISILYLXXXXXXXXXLKNYQDMVVESXGXR

SEQ ID NO: 12298 - protein, 37 aa, Artificial Sequence
  Non-cyclic GFR-binding peptide
  MOD_RES (1)..(2)..(35)..(37): Xaa is C or S
  MOD_RES (16)..(17)..(18)..(19)..(20): Xaa is A or G
  MOD_RES (21)..(22)..(23)..(24): Xaa is A or G or absent
XXVPQALEPLTILYYXXXXXXXXXEQLSNMIVRSXKX

SEQ ID NO: 12299 - protein, 40 aa, Artificial Sequence
  Non-cyclic GFR-binding peptide
  MOD_RES (2)..(3)..(37)..(39): Xaa is C or S
  MOD_RES (17)..(18)..(19)..(20)..(21): Xaa is A or G
  MOD_RES (22)..(23)..(24)..(25): Xaa is A or G or absent
PXXAPTQLEPLPVVYYXXXXXXXXXEQLSNNMVVRAXGXH

SEQ ID NO: 12300 - protein, 35 aa, Artificial Sequence
  Non-cyclic GFR-binding peptide
  MOD_RES (5)..(5): Xaa is C or S
TKPTXAPTKLSPISVLFIDDSSNVIYKQYENMVVR

SEQ ID NO: 12301 - protein, 30 aa, Artificial Sequence; identical to SEQ ID NO: 1076
  Non-cyclic GFR-binding peptide

SEQ ID NO: 12302 - protein, 35 aa, Artificial Sequence
  Non-cyclic GFR-binding peptide
  MOD_RES (32)..(34): Xaa is C or S
VPTRLNAISILYFDSANNVVLKKYRDMVVESXGXR

SEQ ID NO: 12303 - protein, 44 aa, Artificial Sequence
  Non-cyclic GFR-binding peptide
  MOD_RES (6)..(7)..(41)..(43): Xaa is C or S
  MOD_RES (21)..(22)..(23)..(24)..(25): Xaa is A or G
  MOD_RES (26)..(27)..(28)..(29): Xaa is A or G or absent
SIPKAXXVPTELSPISMLFIXXXXXXXXXYKQYEEMVVEGXGXR

SEQ ID NO: 12304 - protein, 38 aa, Artificial Sequence
  Non-cyclic GFR-binding peptide
  MOD_RES (4)..(5): Xaa is C or S
  MOD_RES (19)..(20)..(21)..(22)..(23): Xaa is A or G
  MOD_RES (24)..(25)..(26)..(27): Xaa is A or G or absent
PPTXXVPTRLNAISILYFXXXXXXXXXLKKYRDMVVES

SEQ ID NO: 12305 - protein, 43 aa, Artificial Sequence
  Non-cyclic GFR-binding peptide
  MOD_RES (5)..(6)..(40)..(42): Xaa is C or S
  MOD_RES (20)..(21)..(22)..(23)..(24): Xaa is A or G
  MOD_RES (25)..(26)..(27)..(28): Xaa is A or G or absent
VPKPXXAPTQLEPLPVVYYXXXXXXXXXEQLSNNMVVRAXGXH

SEQ ID NO: 12306 - protein, 37 aa, Artificial Sequence
  Non-cyclic GFR-binding peptide
  MOD_RES (3)..(4): Xaa is C or S
  MOD_RES (18)..(19)..(20)..(21)..(22): Xaa is A or G
  MOD_RES (23)..(24)..(25)..(26): Xaa is A or G or absent
KAXXVPTELSPISMLFIXXXXXXXXXYKQYEDMVVEG

SEQ ID NO: 12307 - protein, 36 aa, Artificial Sequence
  Non-cyclic GFR-binding peptide
  MOD_RES (1)..(2)..(36): Xaa is C or S
  MOD_RES (16)..(17)..(18)..(19)..(20): Xaa is A or G
  MOD_RES (21)..(22)..(23)..(24): Xaa is A or G or absent
XXAPTQLEPLPVVYYXXXXXXXXXEQLSNNMVVRAX

SEQ ID NO: 12308 - protein, 34 aa, Artificial Sequence
  Non-cyclic GFR-binding peptide
  MOD_RES (1)..(34): Xaa is C or S
  MOD_RES (15)..(16)..(17)..(18)..(19): Xaa is A or G
  MOD_RES (20)..(21)..(22)..(23): Xaa is A or G or absent
XVPQALSPISILFIXXXXXXXXXYKQYEMIVRSX

SEQ ID NO: 12309 - protein, 44 aa, Artificial Sequence
  Non-cyclic GFR-binding peptide
  MOD_RES (7)..(41)..(43): Xaa is C or S
  MOD_RES (21)..(22)..(23)..(24)..(25): Xaa is A or G
  MOD_RES (26)..(27)..(28)..(29): Xaa is A or G or absent
HVTKPTXAPTKLEPLPVVYYXXXXXXXXXEQLSNNMVVRSXGXH

SEQ ID NO: 12310 - protein, 39 aa, Artificial Sequence
  Non-cyclic GFR-binding peptide
  MOD_RES (6)..(7)..(38): Xaa is C or S
ASASPXXVSQDLEPLPIVYYIGKTPKIEQLSNMIVKSXK

SEQ ID NO: 12311 - protein, 37 aa, Artificial Sequence
  Non-cyclic GFR-binding peptide
  MOD_RES (4)..(5)..(36): Xaa is C or S
AAPXXVPQALSPISILFIVGRKPKVYKQYEMIVRSXK

SEQ ID NO: 12312 - protein, 36 aa, Artificial Sequence
  Non-cyclic GFR-binding peptide
  MOD_RES (2)..(3): Xaa is C or S
  MOD_RES (17)..(18)..(19)..(20)..(21): Xaa is A or G
  MOD_RES (22)..(23)..(24)..(25): Xaa is A or G or absent
TXXVPTRLNAISILYFXXXXXXXXXLKKYRDMVVES

SEQ ID NO: 12313 - protein, 37 aa, Artificial Sequence
  Non-cyclic GFR-binding peptide
  MOD_RES (4)..(5): Xaa is C or S
  MOD_RES (19)..(20)..(21)..(22)..(23): Xaa is A or G
  MOD_RES (24)..(25)..(26)..(27): Xaa is A or G or absent
PPTXXVPTRLSAISILYLXXXXXXXXXLKNYQDMVVE

SEQ ID NO: 12314 - protein, 40 aa, Artificial Sequence
  Non-cyclic GFR-binding peptide
  MOD_RES (4)..(5)..(39): Xaa is C or S
  MOD_RES (19)..(20)..(21)..(22)..(23): Xaa is A or G
  MOD_RES (24)..(25)..(26)..(27): Xaa is A or G or absent
PKAXXVPTELEPLPMVYYXXXXXXXXXEQLSNDMVVEGXG

SEQ ID NO: 12315 - protein, 35 aa, Artificial Sequence
  Non-cyclic GFR-binding peptide
  MOD_RES (1)..(2): Xaa is C or S
  MOD_RES (16)..(17)..(18)..(19)..(20): Xaa is A or G
  MOD_RES (21)..(22)..(23)..(24): Xaa is A or G or absent
XXAPTKLSPISVLFIXXXXXXXXXYKQYENMVVRS

SEQ ID NO: 12316 - protein, 35 aa, Artificial Sequence
  Non-cyclic GFR-binding peptide
  MOD_RES (3)..(4): Xaa is C or S
KPXXAPTKLEPLTVLYYDDSSNVIEQLSNNMVVRS

SEQ ID NO: 12317 - protein, 36 aa, Artificial Sequence
  Non-cyclic GFR-binding peptide
  MOD_RES (5)..(6): Xaa is C or S
SAAPXXVPQALEPLTILYYVGRKPKVEQLSNMIVRS

SEQ ID NO: 12318 - protein, 38 aa, Artificial Sequence
  Non-cyclic GFR-binding peptide
  MOD_RES (6)..(7): Xaa is C or S
STPPTXXVPTRLEPLTILYYDSANNVVEQLSNDMVVES

SEQ ID NO: 12319 - protein, 41 aa, Artificial Sequence
  Non-cyclic GFR-binding peptide
  MOD_RES (6)..(7)..(38)..(40): Xaa is C or S
ASAAPXXVPQALEPLTILYYVGRKPKVEQLSNMIVRSXKXS

SEQ ID NO: 12320 - protein, 41 aa, Artificial Sequence
  Non-cyclic GFR-binding peptide
  MOD_RES (5)..(6)..(40): Xaa is C or S
  MOD_RES (20)..(21)..(22)..(23)..(24): Xaa is A or G
  MOD_RES (25)..(26)..(27)..(28): Xaa is A or G or absent
IPKAXXVPTELEPLTMLYYXXXXXXXXXEQLSNEMVVEGXG

SEQ ID NO: 12321 - protein, 32 aa, Artificial Sequence
  Non-cyclic GFR-binding peptide
  MOD_RES (32)..(32): Xaa is C or S
VPTELEPLPMVYYDENEKVVEQLSNDMVVEGX

SEQ ID NO: 12322 - protein, 32 aa, Artificial Sequence
  Non-cyclic GFR-binding peptide
  MOD_RES (1)..(1): Xaa is C or S
XAPTQLEPLPVVYYDDSSNVIEQLSNNMVVRA

SEQ ID NO: 12323 - protein, 38 aa, Artificial Sequence
  Non-cyclic GFR-binding peptide
  MOD_RES (5)..(6): Xaa is C or S
  MOD_RES (20)..(21)..(22)..(23)..(24): Xaa is A or G
  MOD_RES (25)..(26)..(27)..(28): Xaa is A or G or absent
VPKPXXAPTKLSPISVLFIXXXXXXXXXYKQYENMVVR

SEQ ID NO: 12324 - protein, 39 aa, Artificial Sequence
  Non-cyclic GFR-binding peptide
  MOD_RES (3)..(4)..(36)..(38): Xaa is C or S
KPXXAPTKLEPLPVVYYDDSSNVIEQLSNNMVVRSXGXH

SEQ ID NO: 12325 - protein, 38 aa, Artificial Sequence
  Non-cyclic GFR-binding peptide
  MOD_RES (2)..(3)..(35)..(37): Xaa is C or S
PXXAPTKLSPISVLFIDDSSNVIYKQYENMVVRSXGXH

SEQ ID NO: 12326 - protein, 40 aa, Artificial Sequence
  Non-cyclic GFR-binding peptide
  MOD_RES (4)..(5)..(37)..(39): Xaa is C or S
PPTXXVPTRLSAISILYLDSANNVVLKNYQDMVVESXGXR

SEQ ID NO: 12327 - protein, 42 aa, Artificial Sequence
  Non-cyclic GFR-binding peptide
  MOD_RES (6)..(7)..(41): Xaa is C or S
  MOD_RES (21)..(22)..(23)..(24)..(25): Xaa is A or G
  MOD_RES (26)..(27)..(28)..(29): Xaa is A or G or absent
YVPKPXXAPTKLSPISVLFIXXXXXXXXXYKQYENMVVRSXG

SEQ ID NO: 12328 - protein, 43 aa, Artificial Sequence
  Non-cyclic GFR-binding peptide
  MOD_RES (6)..(7)..(41)..(43): Xaa is C or S
  MOD_RES (21)..(22)..(23)..(24)..(25): Xaa is A or G
  MOD_RES (26)..(27)..(28)..(29): Xaa is A or G or absent
SIPKAXXVPTELEPLPMVYYXXXXXXXXXEQLSNEMVVEGXGX

SEQ ID NO: 12329 - protein, 34 aa, Artificial Sequence
  Non-cyclic GFR-binding peptide
  MOD_RES (32)..(34): Xaa is C or S
VPTELEPLTMLYYDEYDKVVEQLSNEMVVEGXGX

SEQ ID NO: 12330 - protein, 34 aa, Artificial Sequence
  Non-cyclic GFR-binding peptide
  MOD_RES (2)..(3)..(34): Xaa is C or S
PXXVPQALSPISILFIVGRKPKVYKQYEMIVRSX

SEQ ID NO: 12331 - protein, 36 aa, Artificial Sequence
  Non-cyclic GFR-binding peptide
  MOD_RES (2)..(3)..(34)..(36): Xaa is C or S
PXXVPQDLEPLPIVYYVGRTPKVEQLSNMVVKSXKX

SEQ ID NO: 12332 - protein, 42 aa, Artificial Sequence
  Non-cyclic GFR-binding peptide
  MOD_RES (6)..(7)..(39)..(41): Xaa is C or S
TVPKPXXAPTQLEPLTVLYYDDSSNVIEQLSNNMVVRAXGXH

SEQ ID NO: 12333 - protein, 33 aa, Artificial Sequence
  Non-cyclic GFR-binding peptide
  MOD_RES (1)..(1): Xaa is C or S
  MOD_RES (15)..(16)..(17)..(18)..(19): Xaa is A or G
  MOD_RES (20)..(21)..(22)..(23): Xaa is A or G or absent
XVPTELSPISMLFIXXXXXXXXXYKQYEDMVVE

SEQ ID NO: 12334 - protein, 36 aa, Artificial Sequence
  Non-cyclic GFR-binding peptide
  MOD_RES (1)..(2)..(36): Xaa is C or S
  MOD_RES (16)..(17)..(18)..(19)..(20): Xaa is A or G
  MOD_RES (21)..(22)..(23)..(24): Xaa is A or G or absent
XXVPTELSPISMLFIXXXXXXXXXYKQYEEMVVEGX

SEQ ID NO: 12335 - protein, 37 aa, Artificial Sequence
  Non-cyclic GFR-binding peptide
  MOD_RES (7)..(7): Xaa is C or S
HVTKPTXAPTKLSPISVLFIDDSSNVIYKQYENMVVR

SEQ ID NO: 12336 - protein, 38 aa, Artificial Sequence
  Non-cyclic GFR-binding peptide
  MOD_RES (2)..(3)..(35)..(37): Xaa is C or S
AXXVPTELEPLPMVYYDENEKVVEQLSNDMVVEGXGXR

SEQ ID NO: 12337 - protein, 38 aa, Artificial Sequence
  Non-cyclic GFR-binding peptide
  MOD_RES (6)..(7): Xaa is C or S
KIPKAXXVPTELSPISMLFIDENEKVVYKQYEDMVVEG

SEQ ID NO: 12338 - protein, 31 aa, Artificial Sequence
  Non-cyclic GFR-binding peptide
APTQLSPISVLFIDDSSNVIYKQYENMVVRA

SEQ ID NO: 12339 - protein, 35 aa, Artificial Sequence
  Non-cyclic GFR-binding peptide
  MOD_RES (2)..(3): Xaa is C or S
  MOD_RES (17)..(18)..(19)..(20)..(21): Xaa is A or G
  MOD_RES (22)..(23)..(24)..(25): Xaa is A or G or absent
AXXVPTELEPLPMVYYXXXXXXXXXEQLSNEMVVE

SEQ ID NO: 12340 - protein, 36 aa, Artificial Sequence
  Non-cyclic GFR-binding peptide
  MOD_RES (3)..(4)..(36): Xaa is C or S
KAXXVPTELSPISMLFIDENEKVVYKQYEDMVVEGX

SEQ ID NO: 12341 - protein, 40 aa, Artificial Sequence
  Non-cyclic GFR-binding peptide
  MOD_RES (2)..(3)..(37)..(39): Xaa is C or S
  MOD_RES (17)..(18)..(19)..(20)..(21): Xaa is A or G
  MOD_RES (22)..(23)..(24)..(25): Xaa is A or G or absent
TXXVPTRLEPLTILYYXXXXXXXXXEQLSNDMVVESXGXR

SEQ ID NO: 12342 - protein, 34 aa, Artificial Sequence
  Non-cyclic GFR-binding peptide
  MOD_RES (1)..(1): Xaa is C or S
  MOD_RES (15)..(16)..(17)..(18)..(19): Xaa is A or G
  MOD_RES (20)..(21)..(22)..(23): Xaa is A or G or absent
XVPTELSPISMLFIXXXXXXXXXYKQYEEMVVEG

SEQ ID NO: 12343 - protein, 35 aa, Artificial Sequence
  Non-cyclic GFR-binding peptide
  MOD_RES (2)..(3): Xaa is C or S
  MOD_RES (17)..(18)..(19)..(20)..(21): Xaa is A or G
  MOD_RES (22)..(23)..(24)..(25): Xaa is A or G or absent
PXXVPQALEPLTILYYXXXXXXXXXEQLSNMIVRS

SEQ ID NO: 12344 - protein, 36 aa, Artificial Sequence
  Non-cyclic GFR-binding peptide
  MOD_RES (2)..(34)..(36): Xaa is C or S
TXAPTKLEPLPVVYYDDSSNVIEQLSNNMVVRSXGX

SEQ ID NO: 12345 - protein, 36 aa, Artificial Sequence
  Non-cyclic GFR-binding peptide
  MOD_RES (2)..(3): Xaa is C or S
  MOD_RES (17)..(18)..(19)..(20)..(21): Xaa is A or G
  MOD_RES (22)..(23)..(24)..(25): Xaa is A or G or absent
PXXAPTKLEPLTVLYYXXXXXXXXXEQLSNNMVVRS

SEQ ID NO: 12346 - protein, 37 aa, Artificial Sequence
  Non-cyclic GFR-binding peptide
  MOD_RES (1)..(2)..(34)..(36): Xaa is C or S
XXVPTRLSAISILYLDSANNVVLKNYQDMVVESXGXR

SEQ ID NO: 12347 - protein, 31 aa, Artificial Sequence
  Non-cyclic GFR-binding peptide
  MOD_RES (1)..(1): Xaa is C or S
XVPQALSPISILFIVGRKPKVYKQYEMIVRS

SEQ ID NO: 12348 - protein, 37 aa, Artificial Sequence
  Non-cyclic GFR-binding peptide
  MOD_RES (2)..(3)..(34)..(36): Xaa is C or S
PXXVPQALEPLTILYYVGRKPKVEQLSNMIVRSXKXS

SEQ ID NO: 12349 - protein, 37 aa, Artificial Sequence
  Non-cyclic GFR-binding peptide
  MOD_RES (3)..(4)..(36): Xaa is C or S
KPXXAPTQLEPLPVVYYDDSSNVIEQLSNNMVVRAXG

SEQ ID NO: 12350 - protein, 30 aa, Artificial Sequence
  Non-cyclic GFR-binding peptide
VPTRLSAISILYLDSANNVVLKNYQDMVVE

SEQ ID NO: 12351 - protein, 36 aa, Artificial Sequence
  Non-cyclic GFR-binding peptide
  MOD_RES (1)..(2)..(34)..(36): Xaa is C or S
XXVPTRLEPLTILYYDSANNVVEQLSNDMVVESXGX

SEQ ID NO: 12352 - protein, 36 aa, Artificial Sequence
  Non-cyclic GFR-binding peptide
  MOD_RES (3)..(3): Xaa is C or S
  MOD_RES (17)..(18)..(19)..(20)..(21): Xaa is A or G
  MOD_RES (22)..(23)..(24)..(25): Xaa is A or G or absent
PTXAPTKLEPLPVVYYXXXXXXXXXEQLSNNMVVRS

SEQ ID NO: 12353 - protein, 37 aa, Artificial Sequence
  Non-cyclic GFR-binding peptide
  MOD_RES (3)..(4)..(36): Xaa is C or S
KAXXVPTELEPLTMLYYDEYDKVVEQLSNEMVVEGXG

SEQ ID NO: 12354 - protein, 38 aa, Artificial Sequence
  Non-cyclic GFR-binding peptide
  MOD_RES (2)..(3)..(36)..(38): Xaa is C or S
  MOD_RES (17)..(18)..(19)..(20)..(21): Xaa is A or G
  MOD_RES (22)..(23)..(24)..(25): Xaa is A or G or absent
PXXVPQDLSPISILFIXXXXXXXXXYKQYEMVVKSXKX

SEQ ID NO: 12355 - protein, 37 aa, Artificial Sequence
  Non-cyclic GFR-binding peptide
  MOD_RES (34)..(36): Xaa is C or S
  MOD_RES (14)..(15)..(16)..(17)..(18): Xaa is A or G
  MOD_RES (19)..(20)..(21)..(22): Xaa is A or G or absent
APTKLSPISVLFIXXXXXXXXXYKQYENMVVRSXGXH

SEQ ID NO: 12356 - protein, 38 aa, Artificial Sequence
  Non-cyclic GFR-binding peptide
  MOD_RES (6)..(7)..(38): Xaa is C or S
ASASPXXVSQDLEPLPIVYYIGKTPKIEQLSNMIVKSX

SEQ ID NO: 12357 - protein, 41 aa, Artificial Sequence
  Non-cyclic GFR-binding peptide
  MOD_RES (4)..(5)..(38)..(40): Xaa is C or S
  MOD_RES (19)..(20)..(21)..(22)..(23): Xaa is A or G
  MOD_RES (24)..(25)..(26)..(27): Xaa is A or G or absent
ASPXXVPQDLEPLPIVYYXXXXXXXXXEQLSNMVVKSXKXS

SEQ ID NO: 12358 - protein, 31 aa, Artificial Sequence
  Non-cyclic GFR-binding peptide
  MOD_RES (1)..(1): Xaa is C or S
XAPTQLEPLPVVYYDDSSNVIEQLSNNMVVR

SEQ ID NO: 12359 - protein, 38 aa, Artificial Sequence
  Non-cyclic GFR-binding peptide
  MOD_RES (6)..(7): Xaa is C or S
YVPKPXXAPTKLEPLPVVYYDDSSNVIEQLSNNMVVRS

SEQ ID NO: 12360 - protein, 43 aa, Artificial Sequence
  Non-cyclic GFR-binding peptide
  MOD_RES (6)..(7)..(41)..(43): Xaa is C or S
  MOD_RES (21)..(22)..(23)..(24)..(25): Xaa is A or G
  MOD_RES (26)..(27)..(28)..(29): Xaa is A or G or absent
STPPTXXVPTRLEPLPIVYYXXXXXXXXXEQLSNDMVVESXGX

SEQ ID NO: 12361 - protein, 36 aa, Artificial Sequence
  Non-cyclic GFR-binding peptide
  MOD_RES (3)..(4)..(36): Xaa is C or S
KPXXAPTKLEPLPVVYYDDSSNVIEQLSNNMVVRSX

SEQ ID NO: 12362 - protein, 41 aa, Artificial Sequence
  Non-cyclic GFR-binding peptide
  MOD_RES (6)..(7)..(40): Xaa is C or S
  MOD_RES (21)..(22)..(23)..(24)..(25): Xaa is A or G
  MOD_RES (26)..(27)..(28)..(29): Xaa is A or G or absent
ASAAPXXVPQALSPISILFIXXXXXXXXXYKQYEMIVRSXK

SEQ ID NO: 12363 - protein, 37 aa, Artificial Sequence
  Non-cyclic GFR-binding peptide
  MOD_RES (4)..(5): Xaa is C or S
  MOD_RES (19)..(20)..(21)..(22)..(23): Xaa is A or G
  MOD_RES (24)..(25)..(26)..(27): Xaa is A or G or absent
PKAXXVPTELEPLPMVYYXXXXXXXXXEQLSNDMVVE

SEQ ID NO: 12364 - protein, 39 aa, Artificial Sequence
  Non-cyclic GFR-binding peptide
  MOD_RES (5)..(6): Xaa is C or S
  MOD_RES (20)..(21)..(22)..(23)..(24): Xaa is A or G
  MOD_RES (25)..(26)..(27)..(28): Xaa is A or G or absent
VPKPXXAPTKLEPLPVVYYXXXXXXXXXEQLSNNMVVRS

SEQ ID NO: 12365 - protein, 38 aa, Artificial Sequence
  Non-cyclic GFR-binding peptide
  MOD_RES (3)..(4)..(36)..(38): Xaa is C or S
PTXXVPTRLNAISILYFDSANNVVLKKYRDMVVESXGX

SEQ ID NO: 12366 - protein, 35 aa, Artificial Sequence
  Non-cyclic GFR-binding peptide
  MOD_RES (2)..(3)..(34): Xaa is C or S
PXXVSQDLSPISILFIIGKTPKIYKQYEMIVKSXK

SEQ ID NO: 12367 - protein, 36 aa, Artificial Sequence
  Non-cyclic GFR-binding peptide
  MOD_RES (1)..(33)..(35): Xaa is C or S
XVPTRLNAISILYFDSANNVVLKKYRDMVVESXGXR

SEQ ID NO: 12368 - protein, 36 aa, Artificial Sequence
  Non-cyclic GFR-binding peptide
  MOD_RES (33)..(35): Xaa is C or S
  MOD_RES (14)..(15)..(16)..(17)..(18): Xaa is A or G
  MOD_RES (19)..(20)..(21)..(22): Xaa is A or G or absent
VPQALEPLTILYYXXXXXXXXXEQLSNMIVRSXKXS

SEQ ID NO: 12369 - protein, 33 aa, Artificial Sequence
  Non-cyclic GFR-binding peptide
  MOD_RES (14)..(15)..(16)..(17)..(18): Xaa is A or G
  MOD_RES (19)..(20)..(21)..(22): Xaa is A or G or absent
VPTELSPISMLFIXXXXXXXXXYKQYEDMVVEG

SEQ ID NO: 12370 - protein, 39 aa, Artificial Sequence
  Non-cyclic GFR-binding peptide
  MOD_RES (2)..(36)..(38): Xaa is C or S
  MOD_RES (16)..(17)..(18)..(19)..(20): Xaa is A or G
  MOD_RES (21)..(22)..(23)..(24): Xaa is A or G or absent
TXAPTKLSPISVLFIXXXXXXXXXYKQYENMVVRSXGXH

SEQ ID NO: 12371 - protein, 34 aa, Artificial Sequence
  Non-cyclic GFR-binding peptide
  MOD_RES (1)..(1): Xaa is C or S
  MOD_RES (15)..(16)..(17)..(18)..(19): Xaa is A or G
  MOD_RES (20)..(21)..(22)..(23): Xaa is A or G or absent
XAPTKLSPISVLFIXXXXXXXXXYKQYENMVVRS

SEQ ID NO: 12372 - protein, 33 aa, Artificial Sequence
  Non-cyclic GFR-binding peptide
  MOD_RES (1)..(2): Xaa is C or S
XXAPTKLEPLPVVYYDDSSNVIEQLSNNMVVRS

SEQ ID NO: 12373 - protein, 35 aa, Artificial Sequence
  Non-cyclic GFR-binding peptide
  MOD_RES (1)..(2)..(35): Xaa is C or S
  MOD_RES (16)..(17)..(18)..(19)..(20): Xaa is A or G
  MOD_RES (21)..(22)..(23)..(24): Xaa is A or G or absent
XXVPQDLEPLPIVYYXXXXXXXXXEQLSNMVVKSX

SEQ ID NO: 12374 - protein, 37 aa, Artificial Sequence
  Non-cyclic GFR-binding peptide
  MOD_RES (4)..(5): Xaa is C or S
  MOD_RES (19)..(20)..(21)..(22)..(23): Xaa is A or G
  MOD_RES (24)..(25)..(26)..(27): Xaa is A or G or absent
PKPXXAPTKLEPLTVLYYXXXXXXXXXEQLSNNMVVR

SEQ ID NO: 12375 - protein, 35 aa, Artificial Sequence
  Non-cyclic GFR-binding peptide
  MOD_RES (33)..(35): Xaa is C or S
  MOD_RES (14)..(15)..(16)..(17)..(18): Xaa is A or G
  MOD_RES (19)..(20)..(21)..(22): Xaa is A or G or absent
VPQDLEPLPIVYYXXXXXXXXXEQLSNMVVKSXKX

SEQ ID NO: 12376 - protein, 36 aa, Artificial Sequence
  Non-cyclic GFR-binding peptide
  MOD_RES (3)..(4)..(35): Xaa is C or S
SPXXVSQDLEPLPIVYYIGKTPKIEQLSNMIVKSXK

SEQ ID NO: 12377 - protein, 36 aa, Artificial Sequence
  Non-cyclic GFR-binding peptide
  MOD_RES (4)..(5): Xaa is C or S
PKAXXVPTELEPLTMLYYDENEKVVEQLSNDMVVEG

SEQ ID NO: 12378 - protein, 36 aa, Artificial Sequence
  Non-cyclic GFR-binding peptide
  MOD_RES (1)..(35): Xaa is C or S
  MOD_RES (15)..(16)..(17)..(18)..(19): Xaa is A or G
  MOD_RES (20)..(21)..(22)..(23): Xaa is A or G or absent
XVPTRLSAISILYLXXXXXXXXXLKNYQDMVVESXG

SEQ ID NO: 12379 - protein, 38 aa, Artificial Sequence
  Non-cyclic GFR-binding peptide
  MOD_RES (2)..(3)..(37): Xaa is C or S
  MOD_RES (17)..(18)..(19)..(20)..(21): Xaa is A or G
  MOD_RES (22)..(23)..(24)..(25): Xaa is A or G or absent
PXXAPTQLSPISVLFIXXXXXXXXXYKQYENMVVRAXG

SEQ ID NO: 12380 - protein, 41 aa, Artificial Sequence
  Non-cyclic GFR-binding peptide
  MOD_RES (6)..(7)..(38)..(40): Xaa is C or S
ASASPXXVSQDLSPISILFIIGKTPKIYKQYEMIVKSXKXS

SEQ ID NO: 12381 - protein, 34 aa, Artificial Sequence
  Non-cyclic GFR-binding peptide
  MOD_RES (1)..(2): Xaa is C or S
  MOD_RES (16)..(17)..(18)..(19)..(20): Xaa is A or G
  MOD_RES (21)..(22)..(23)..(24): Xaa is A or G or absent
XXVPQDLSPISILFIXXXXXXXXXYKQYEMVVKS

SEQ ID NO: 12382 - protein, 32 aa, Artificial Sequence
  Non-cyclic GFR-binding peptide
  MOD_RES (14)..(15)..(16)..(17)..(18): Xaa is A or G
  MOD_RES (19)..(20)..(21)..(22): Xaa is A or G or absent
APTKLEPLTVLYYXXXXXXXXXEQLSNNMVVR

SEQ ID NO: 12383 - protein, 34 aa, Artificial Sequence
  Non-cyclic GFR-binding peptide
  MOD_RES (1)..(2)..(34): Xaa is C or S
XXVPTELEPLPMVYYDEYDKVVEQLSNEMVVEGX

SEQ ID NO: 12384 - protein, 41 aa, Artificial Sequence
  Non-cyclic GFR-binding peptide
  MOD_RES (5)..(6)..(38)..(40): Xaa is C or S
IPKAXXVPTELSPISMLFIDEYDKVVYKQYEEMVVEGXGXR

SEQ ID NO: 12385 - protein, 42 aa, Artificial Sequence
  Non-cyclic GFR-binding peptide
  MOD_RES (6)..(7)..(40)..(42): Xaa is C or S
  MOD_RES (21)..(22)..(23)..(24)..(25): Xaa is A or G
  MOD_RES (26)..(27)..(28)..(29): Xaa is A or G or absent
ASASPXXVSQDLEPLPIVYYXXXXXXXXXEQLSNMIVKSXKX

SEQ ID NO: 12386 - protein, 37 aa, Artificial Sequence
  Non-cyclic GFR-binding peptide
  MOD_RES (1)..(2)..(34)..(36): Xaa is C or S
XXVPTRLNAISILYFDSANNVVLKKYRDMVVESXGXR

SEQ ID NO: 12387 - protein, 36 aa, Artificial Sequence
  Non-cyclic GFR-binding peptide
  MOD_RES (4)..(5): Xaa is C or S
PKAXXVPTELEPLPMVYYDENEKVVEQLSNDMVVEG

SEQ ID NO: 12388 - protein, 42 aa, Artificial Sequence
  Non-cyclic GFR-binding peptide
  MOD_RES (5)..(6)..(39)..(41): Xaa is C or S
  MOD_RES (20)..(21)..(22)..(23)..(24): Xaa is A or G
  MOD_RES (25)..(26)..(27)..(28): Xaa is A or G or absent
SAAPXXVPQALEPLTILYYXXXXXXXXXEQLSNMIVRSXKXS

SEQ ID NO: 12389 - protein, 41 aa, Artificial Sequence
  Non-cyclic GFR-binding peptide
  MOD_RES (4)..(5)..(39)..(41): Xaa is C or S
  MOD_RES (19)..(20)..(21)..(22)..(23): Xaa is A or G
  MOD_RES (24)..(25)..(26)..(27): Xaa is A or G or absent
PKPXXAPTKLEPLPVVYYXXXXXXXXXEQLSNNMVVRSXGX

SEQ ID NO: 12390 - protein, 38 aa, Artificial Sequence
  Non-cyclic GFR-binding peptide
  MOD_RES (6)..(7): Xaa is C or S
KIPKAXXVPTELEPLTMLYYDENEKVVEQLSNDMVVEG

SEQ ID NO: 12391 - protein, 32 aa, Artificial Sequence
  Non-cyclic GFR-binding peptide
  MOD_RES (1)..(1): Xaa is C or S
XAPTQLEPLTVLYYDDSSNVIEQLSNNMVVRA

SEQ ID NO: 12392 - protein, 39 aa, Artificial Sequence
  Non-cyclic GFR-binding peptide
  MOD_RES (4)..(5)..(39): Xaa is C or S
  MOD_RES (19)..(20)..(21)..(22)..(23): Xaa is A or G
  MOD_RES (24)..(25)..(26)..(27): Xaa is A or G or absent
PKPXXAPTQLEPLPVVYYXXXXXXXXXEQLSNNMVVRAX

SEQ ID NO: 12393 - protein, 38 aa, Artificial Sequence
  Non-cyclic GFR-binding peptide
  MOD_RES (3)..(35)..(37): Xaa is C or S
PTXAPTKLEPLPVVYYDDSSNVIEQLSNNMVVRSXGXH

SEQ ID NO: 12394 - protein, 41 aa, Artificial Sequence
  Non-cyclic GFR-binding peptide
  MOD_RES (6)..(7)..(41): Xaa is C or S
  MOD_RES (21)..(22)..(23)..(24)..(25): Xaa is A or G
  MOD_RES (26)..(27)..(28)..(29): Xaa is A or G or absent
YVPKPXXAPTKLEPLPVVYYXXXXXXXXXEQLSNNMVVRSX

SEQ ID NO: 12395 - protein, 42 aa, Artificial Sequence
  Non-cyclic GFR-binding peptide
  MOD_RES (5)..(39)..(41): Xaa is C or S
  MOD_RES (19)..(20)..(21)..(22)..(23): Xaa is A or G
  MOD_RES (24)..(25)..(26)..(27): Xaa is A or G or absent
TKPTXAPTKLEPLTVLYYXXXXXXXXXEQLSNNMVVRSXGXH

SEQ ID NO: 12396 - protein, 39 aa, Artificial Sequence
  Non-cyclic GFR-binding peptide
  MOD_RES (3)..(37)..(39): Xaa is C or S
  MOD_RES (17)..(18)..(19)..(20)..(21): Xaa is A or G
  MOD_RES (22)..(23)..(24)..(25): Xaa is A or G or absent
PTXAPTKLSPISVLFIXXXXXXXXXYKQYENMVVRSXGX

SEQ ID NO: 12397 - protein, 36 aa, Artificial Sequence
  Non-cyclic GFR-binding peptide
  MOD_RES (5)..(6): Xaa is C or S
TPPTXXVPTRLSAISILYLDSANNVVLKNYQDMVVE

SEQ ID NO: 12398 - protein, 39 aa, Artificial Sequence
  Non-cyclic GFR-binding peptide
  MOD_RES (1)..(2)..(36)..(38): Xaa is C or S
  MOD_RES (16)..(17)..(18)..(19)..(20): Xaa is A or G
  MOD_RES (21)..(22)..(23)..(24): Xaa is A or G or absent
XXVPTRLSAISILYLXXXXXXXXXLKNYQDMVVESXGXR

SEQ ID NO: 12399 - protein, 38 aa, Artificial Sequence
  Non-cyclic GFR-binding peptide
  MOD_RES (3)..(4)..(38): Xaa is C or S
  MOD_RES (18)..(19)..(20)..(21)..(22): Xaa is A or G
  MOD_RES (23)..(24)..(25)..(26): Xaa is A or G or absent
PTXXVPTRLEPLPIVYYXXXXXXXXXEQLSNDMVVESX

SEQ ID NO: 12400 - protein, 40 aa, Artificial Sequence
  Non-cyclic GFR-binding peptide
  MOD_RES (6)..(7)..(38)..(40): Xaa is C or S
ASAAPXXVPQALSPISILFIVGRKPKVYKQYEMIVRSXKX

SEQ ID NO: 12401 - protein, 31 aa, Artificial Sequence
  Non-cyclic GFR-binding peptide
VPTRLSAISILYLDSANNVVLKNYQDMVVES

SEQ ID NO: 12402 - protein, 33 aa, Artificial Sequence
  Non-cyclic GFR-binding peptide
  MOD_RES (1)..(32): Xaa is C or S
XVSQDLEPLPIVYYIGKTPKIEQLSNMIVKSXK

SEQ ID NO: 12403 - protein, 37 aa, Artificial Sequence
  Non-cyclic GFR-binding peptide
  MOD_RES (3)..(4): Xaa is C or S
  MOD_RES (18)..(19)..(20)..(21)..(22): Xaa is A or G
  MOD_RES (23)..(24)..(25)..(26): Xaa is A or G or absent
KPXXAPTQLEPLPVVYYXXXXXXXXXEQLSNNMVVRA

SEQ ID NO: 12404 - protein, 36 aa, Artificial Sequence
  Non-cyclic GFR-binding peptide
  MOD_RES (2)..(34)..(36): Xaa is C or S
TXAPTKLSPISVLFIDDSSNVIYKQYENMVVRSXGX

SEQ ID NO: 12405 - protein, 39 aa, Artificial Sequence
  Non-cyclic GFR-binding peptide
  MOD_RES (3)..(4)..(38): Xaa is C or S
  MOD_RES (18)..(19)..(20)..(21)..(22): Xaa is A or G
  MOD_RES (23)..(24)..(25)..(26): Xaa is A or G or absent
KPXXAPTKLSPISVLFIXXXXXXXXXYKQYENMVVRSXG

SEQ ID NO: 12406 - protein, 38 aa, Artificial Sequence
  Non-cyclic GFR-binding peptide
  MOD_RES (3)..(4)..(36)..(38): Xaa is C or S
KAXXVPTELEPLPMVYYDEYDKVVEQLSNEMVVEGXGX

SEQ ID NO: 12407 - protein, 32 aa, Artificial Sequence
  Non-cyclic GFR-binding peptide
  MOD_RES (1)..(2): Xaa is C or S
XXAPTQLSPISVLFIDDSSNVIYKQYENMVVR

SEQ ID NO: 12408 - protein, 38 aa, Artificial Sequence
  Non-cyclic GFR-binding peptide
  MOD_RES (3)..(4)..(35)..(37): Xaa is C or S
SPXXVSQDLSPISILFIIGKTPKIYKQYEMIVKSXKXS

SEQ ID NO: 12409 - protein, 38 aa, Artificial Sequence
  Non-cyclic GFR-binding peptide
  MOD_RES (6)..(7): Xaa is C or S
STPPTXXVPTRLEPLPIVYYDSANNVVEQLSNDMVVES

SEQ ID NO: 12410 - protein, 35 aa, Artificial Sequence
  Non-cyclic GFR-binding peptide
  MOD_RES (2)..(3)..(34): Xaa is C or S
PXXVPQDLEPLPIVYYVGRTPKVEQLSNMVVKSXK

SEQ ID NO: 12411 - protein, 37 aa, Artificial Sequence
  Non-cyclic GFR-binding peptide
  MOD_RES (6)..(6): Xaa is C or S
VTKPTXAPTKLEPLTVLYYDDSSNVIEQLSNNMVVRS

SEQ ID NO: 12412 - protein, 35 aa, Artificial Sequence
  Non-cyclic GFR-binding peptide
  MOD_RES (4)..(5): Xaa is C or S
ASPXXVSQDLSPISILFIIGKTPKIYKQYEMIVKS

SEQ ID NO: 12413 - protein, 41 aa, Artificial Sequence
  Non-cyclic GFR-binding peptide
  MOD_RES (5)..(6)..(38)..(40): Xaa is C or S
IPKAXXVPTELEPLTMLYYDEYDKVVEQLSNEMVVEGXGXR

SEQ ID NO: 12414 - protein, 37 aa, Artificial Sequence
  Non-cyclic GFR-binding peptide
  MOD_RES (3)..(4): Xaa is C or S
  MOD_RES (18)..(19)..(20)..(21)..(22): Xaa is A or G
  MOD_RES (23)..(24)..(25)..(26): Xaa is A or G or absent
KPXXAPTKLEPLPVVYYXXXXXXXXXEQLSNNMVVRS

SEQ ID NO: 12415 - protein, 40 aa, Artificial Sequence
  Non-cyclic GFR-binding peptide
  MOD_RES (6)..(7)..(39): Xaa is C or S
SIPKAXXVPTELEPLTMLYYDEYDKVVEQLSNEMVVEGXG

SEQ ID NO: 12416 - protein, 35 aa, Artificial Sequence
  Non-cyclic GFR-binding peptide
  MOD_RES (34)..(34): Xaa is C or S
  MOD_RES (14)..(15)..(16)..(17)..(18): Xaa is A or G
  MOD_RES (19)..(20)..(21)..(22): Xaa is A or G or absent
VPTELEPLPMVYYXXXXXXXXXEQLSNDMVVEGXG

SEQ ID NO: 12417 - protein, 32 aa, Artificial Sequence
  Non-cyclic GFR-binding peptide
  MOD_RES (14)..(15)..(16)..(17)..(18): Xaa is A or G
  MOD_RES (19)..(20)..(21)..(22): Xaa is A or G or absent
VPTRLEPLTILYYXXXXXXXXXEQLSNDMVVE

SEQ ID NO: 12418 - protein, 40 aa, Artificial Sequence
  Non-cyclic GFR-binding peptide
  MOD_RES (6)..(7)..(39): Xaa is C or S
TVPKPXXAPTQLEPLTVLYYDDSSNVIEQLSNNMVVRAXG

SEQ ID NO: 12419 - protein, 33 aa, Artificial Sequence
  Non-cyclic GFR-binding peptide
  MOD_RES (1)..(2): Xaa is C or S
XXAPTKLEPLTVLYYDDSSNVIEQLSNNMVVRS

SEQ ID NO: 12420 - protein, 35 aa, Artificial Sequence
  Non-cyclic GFR-binding peptide
  MOD_RES (34)..(34): Xaa is C or S
  MOD_RES (14)..(15)..(16)..(17)..(18): Xaa is A or G
  MOD_RES (19)..(20)..(21)..(22): Xaa is A or G or absent
VPTRLSAISILYLXXXXXXXXXLKNYQDMVVESXG

SEQ ID NO: 12421 - protein, 35 aa, Artificial Sequence
  Non-cyclic GFR-binding peptide
  MOD_RES (1)..(35): Xaa is C or S
  MOD_RES (15)..(16)..(17)..(18)..(19): Xaa is A or G
  MOD_RES (20)..(21)..(22)..(23): Xaa is A or G or absent
XAPTQLEPLPVVYYXXXXXXXXXEQLSNNMVVRAX

SEQ ID NO: 12422 - protein, 39 aa, Artificial Sequence
  Non-cyclic GFR-binding peptide
  MOD_RES (6)..(7)..(38): Xaa is C or S
ASASPXXVPQDLSPISILFIVGRTPKVYKQYEMVVKSXK

SEQ ID NO: 12423 - protein, 41 aa, Artificial Sequence
  Non-cyclic GFR-binding peptide
  MOD_RES (5)..(6)..(40): Xaa is C or S
  MOD_RES (20)..(21)..(22)..(23)..(24): Xaa is A or G
  MOD_RES (25)..(26)..(27)..(28): Xaa is A or G or absent
VPKPXXAPTKLEPLTVLYYXXXXXXXXXEQLSNNMVVRSXG

SEQ ID NO: 12424 - protein, 35 aa, Artificial Sequence
  Non-cyclic GFR-binding peptide
  MOD_RES (1)..(35): Xaa is C or S
  MOD_RES (15)..(16)..(17)..(18)..(19): Xaa is A or G
  MOD_RES (20)..(21)..(22)..(23): Xaa is A or G or absent
XVPTELSPISMLFIXXXXXXXXXYKQYEEMVVEGX

SEQ ID NO: 12425 - protein, 39 aa, Artificial Sequence
  Non-cyclic GFR-binding peptide
  MOD_RES (2)..(3)..(37)..(39): Xaa is C or S
  MOD_RES (17)..(18)..(19)..(20)..(21): Xaa is A or G
  MOD_RES (22)..(23)..(24)..(25): Xaa is A or G or absent
PXXAPTKLSPISVLFIXXXXXXXXXYKQYENMVVRSXGX

SEQ ID NO: 12426 - protein, 39 aa, Artificial Sequence
  Non-cyclic GFR-binding peptide
  MOD_RES (6)..(7): Xaa is C or S
  MOD_RES (21)..(22)..(23)..(24)..(25): Xaa is A or G
  MOD_RES (26)..(27)..(28)..(29): Xaa is A or G or absent
ASASPXXVPQDLEPLPIVYYXXXXXXXXXEQLSNMVVKS

SEQ ID NO: 12427 - protein, 35 aa, Artificial Sequence
  Non-cyclic GFR-binding peptide
  MOD_RES (3)..(4): Xaa is C or S
KAXXVPTELSPISMLFIDENEKVVYKQYEDMVVEG

SEQ ID NO: 12428 - protein, 42 aa, Artificial Sequence
  Non-cyclic GFR-binding peptide
  MOD_RES (6)..(7)..(41): Xaa is C or S
  MOD_RES (21)..(22)..(23)..(24)..(25): Xaa is A or G
  MOD_RES (26)..(27)..(28)..(29): Xaa is A or G or absent
STPPTXXVPTRLEPLTILYYXXXXXXXXXEQLSNDMVVESXG

SEQ ID NO: 12429 - protein, 36 aa, Artificial Sequence
  Non-cyclic GFR-binding peptide
  MOD_RES (1)..(33)..(35): Xaa is C or S
XVPTRLEPLTILYYDSANNVVEQLSNDMVVESXGXR

SEQ ID NO: 12430 - protein, 37 aa, Artificial Sequence
  Non-cyclic GFR-binding peptide
  MOD_RES (2)..(3)..(35)..(37): Xaa is C or S
TXXVPTRLSAISILYLDSANNVVLKNYQDMVVESXGX

SEQ ID NO: 12431 - protein, 38 aa, Artificial Sequence
  Non-cyclic GFR-binding peptide
  MOD_RES (1)..(2)..(36)..(38): Xaa is C or S
  MOD_RES (16)..(17)..(18)..(19)..(20): Xaa is A or G
  MOD_RES (21)..(22)..(23)..(24): Xaa is A or G or absent
XXVPTRLSAISILYLXXXXXXXXXLKNYQDMVVESXGX

SEQ ID NO: 12432 - protein, 35 aa, Artificial Sequence
  Non-cyclic GFR-binding peptide
  MOD_RES (4)..(4): Xaa is C or S
KPTXAPTKLEPLPVVYYDDSSNVIEQLSNNMVVRS

SEQ ID NO: 12433 - protein, 39 aa, Artificial Sequence
  Non-cyclic GFR-binding peptide
  MOD_RES (3)..(4)..(37)..(39): Xaa is C or S
  MOD_RES (18)..(19)..(20)..(21)..(22): Xaa is A or G
  MOD_RES (23)..(24)..(25)..(26): Xaa is A or G or absent
SPXXVSQDLSPISILFIXXXXXXXXXYKQYEMIVKSXKX

SEQ ID NO: 12434 - protein, 36 aa, Artificial Sequence
  Non-cyclic GFR-binding peptide
  MOD_RES (1)..(33)..(35): Xaa is C or S
XVPTRLSAISILYLDSANNVVLKNYQDMVVESXGXR

SEQ ID NO: 12435 - protein, 41 aa, Artificial Sequence
  Non-cyclic GFR-binding peptide
  MOD_RES (6)..(7)..(40): Xaa is C or S
  MOD_RES (21)..(22)..(23)..(24)..(25): Xaa is A or G
  MOD_RES (26)..(27)..(28)..(29): Xaa is A or G or absent
ASASPXXVSQDLSPISILFIXXXXXXXXXYKQYEMIVKSXK

SEQ ID NO: 12436 - protein, 37 aa, Artificial Sequence
  Non-cyclic GFR-binding peptide
  MOD_RES (1)..(34)..(36): Xaa is C or S
  MOD_RES (15)..(16)..(17)..(18)..(19): Xaa is A or G
  MOD_RES (20)..(21)..(22)..(23): Xaa is A or G or absent
XVPQALSPISILFIXXXXXXXXXYKQYEMIVRSXKXS

SEQ ID NO: 12437 - protein, 33 aa, Artificial Sequence
  Non-cyclic GFR-binding peptide
  MOD_RES (1)..(1): Xaa is C or S
  MOD_RES (15)..(16)..(17)..(18)..(19): Xaa is A or G
  MOD_RES (20)..(21)..(22)..(23): Xaa is A or G or absent
XVPTRLNAISILYFXXXXXXXXXLKKYRDMVVE

SEQ ID NO: 12438 - protein, 36 aa, Artificial Sequence
  Non-cyclic GFR-binding peptide
  MOD_RES (3)..(35): Xaa is C or S
PTXAPTKLEPLPVVYYDDSSNVIEQLSNNMVVRSXG

SEQ ID NO: 12439 - protein, 39 aa, Artificial Sequence
  Non-cyclic GFR-binding peptide
  MOD_RES (5)..(37)..(39): Xaa is C or S
TKPTXAPTKLEPLTVLYYDDSSNVIEQLSNNMVVRSXGX

SEQ ID NO: 12440 - protein, 34 aa, Artificial Sequence
  Non-cyclic GFR-binding peptide
  MOD_RES (3)..(4): Xaa is C or S
KAXXVPTELEPLTMLYYDENEKVVEQLSNDMVVE

SEQ ID NO: 12441 - protein, 32 aa, Artificial Sequence
  Non-cyclic GFR-binding peptide
  MOD_RES (14)..(15)..(16)..(17)..(18): Xaa is A or G
  MOD_RES (19)..(20)..(21)..(22): Xaa is A or G or absent
VPQDLSPISILFIXXXXXXXXXYKQYEMVVKS

SEQ ID NO: 12442 - protein, 37 aa, Artificial Sequence
  Non-cyclic GFR-binding peptide
  MOD_RES (4)..(5): Xaa is C or S
  MOD_RES (19)..(20)..(21)..(22)..(23): Xaa is A or G
  MOD_RES (24)..(25)..(26)..(27): Xaa is A or G or absent
PKPXXAPTKLEPLPVVYYXXXXXXXXXEQLSNNMVVR

SEQ ID NO: 12443 - protein, 42 aa, Artificial Sequence
  Non-cyclic GFR-binding peptide
  MOD_RES (6)..(7)..(41): Xaa is C or S
  MOD_RES (21)..(22)..(23)..(24)..(25): Xaa is A or G
  MOD_RES (26)..(27)..(28)..(29): Xaa is A or G or absent
SIPKAXXVPTELEPLPMVYYXXXXXXXXXEQLSNEMVVEGXG

SEQ ID NO: 12444 - protein, 33 aa, Artificial Sequence
  Non-cyclic GFR-binding peptide
  MOD_RES (1)..(2)..(33): Xaa is C or S
XXVPQALEPLTILYYVGRKPKVEQLSNMIVRSX

SEQ ID NO: 12445 - protein, 33 aa, Artificial Sequence
  Non-cyclic GFR-binding peptide
  MOD_RES (2)..(3): Xaa is C or S
PXXVPQALEPLTILYYVGRKPKVEQLSNMIVRS

SEQ ID NO: 12446 - protein, 40 aa, Artificial Sequence
  Non-cyclic GFR-binding peptide
  MOD_RES (6)..(38)..(40): Xaa is C or S
VTKPTXAPTKLSPISVLFIDDSSNVIYKQYENMVVRSXGX

SEQ ID NO: 12447 - protein, 38 aa, Artificial Sequence
  Non-cyclic GFR-binding peptide
  MOD_RES (5)..(6)..(38): Xaa is C or S
VPKPXXAPTKLEPLPVVYYDDSSNVIEQLSNNMVVRSX

SEQ ID NO: 12448 - protein, 37 aa, Artificial Sequence
  Non-cyclic GFR-binding peptide
  MOD_RES (1)..(2)..(35)..(37): Xaa is C or S
  MOD_RES (16)..(17)..(18)..(19)..(20): Xaa is A or G
  MOD_RES (21)..(22)..(23)..(24): Xaa is A or G or absent
XXVPQDLEPLPIVYYXXXXXXXXXEQLSNMVVKSXKX

SEQ ID NO: 12449 - protein, 36 aa, Artificial Sequence
  Non-cyclic GFR-binding peptide
  MOD_RES (4)..(5): Xaa is C or S
PKAXXVPTELEPLTMLYYDEYDKVVEQLSNEMVVEG

SEQ ID NO: 12450 - protein, 38 aa, Artificial Sequence
  Non-cyclic GFR-binding peptide
  MOD_RES (4)..(5): Xaa is C or S
  MOD_RES (19)..(20)..(21)..(22)..(23): Xaa is A or G
  MOD_RES (24)..(25)..(26)..(27): Xaa is A or G or absent
PKPXXAPTKLSPISVLFIXXXXXXXXXYKQYENMVVRS

SEQ ID NO: 12451 - protein, 40 aa, Artificial Sequence
  Non-cyclic GFR-binding peptide
  MOD_RES (7)..(7): Xaa is C or S
  MOD_RES (21)..(22)..(23)..(24)..(25): Xaa is A or G
  MOD_RES (26)..(27)..(28)..(29): Xaa is A or G or absent
HVTKPTXAPTKLEPLPVVYYXXXXXXXXXEQLSNNMVVRS

SEQ ID NO: 12452 - protein, 38 aa, Artificial Sequence
  Non-cyclic GFR-binding peptide
  MOD_RES (4)..(5)..(37): Xaa is C or S
PPTXXVPTRLEPLTILYYDSANNVVEQLSNDMVVESXG

SEQ ID NO: 12453 - protein, 41 aa, Artificial Sequence
  Non-cyclic GFR-binding peptide
  MOD_RES (6)..(7)..(38)..(40): Xaa is C or S
ASASPXXVSQDLEPLPIVYYIGKTPKIEQLSNMIVKSXKXS

SEQ ID NO: 12454 - protein, 33 aa, Artificial Sequence
  Non-cyclic GFR-binding peptide
  MOD_RES (1)..(32): Xaa is C or S
XVPQALEPLTILYYVGRKPKVEQLSNMIVRSXK

SEQ ID NO: 12455 - protein, 38 aa, Artificial Sequence
  Non-cyclic GFR-binding peptide
  MOD_RES (2)..(3)..(37): Xaa is C or S
  MOD_RES (17)..(18)..(19)..(20)..(21): Xaa is A or G
  MOD_RES (22)..(23)..(24)..(25): Xaa is A or G or absent
PXXAPTQLEPLTVLYYXXXXXXXXXEQLSNNMVVRAXG

SEQ ID NO: 12456 - protein, 30 aa, Artificial Sequence
  Non-cyclic GFR-binding peptide
VPTELSPISMLFIDENEKVVYKQYEDMVVE

SEQ ID NO: 12457 - protein, 39 aa, Artificial Sequence
  Non-cyclic GFR-binding peptide
  MOD_RES (5)..(6)..(37)..(39): Xaa is C or S
SAAPXXVPQALSPISILFIVGRKPKVYKQYEMIVRSXKX

SEQ ID NO: 12458 - protein, 34 aa, Artificial Sequence
  Non-cyclic GFR-binding peptide
  MOD_RES (34)..(34): Xaa is C or S
  MOD_RES (14)..(15)..(16)..(17)..(18): Xaa is A or G
  MOD_RES (19)..(20)..(21)..(22): Xaa is A or G or absent
APTKLEPLTVLYYXXXXXXXXXEQLSNNMVVRSX

SEQ ID NO: 12459 - protein, 41 aa, Artificial Sequence
  Non-cyclic GFR-binding peptide
  MOD_RES (5)..(6)..(38)..(40): Xaa is C or S
VPKPXXAPTQLEPLPVVYYDDSSNVIEQLSNNMVVRAXGXH

SEQ ID NO: 12460 - protein, 40 aa, Artificial Sequence
  Non-cyclic GFR-binding peptide
  MOD_RES (3)..(4)..(38)..(40): Xaa is C or S
  MOD_RES (18)..(19)..(20)..(21)..(22): Xaa is A or G
  MOD_RES (23)..(24)..(25)..(26): Xaa is A or G or absent
PTXXVPTRLSAISILYLXXXXXXXXXLKNYQDMVVESXGX

SEQ ID NO: 12461 - protein, 40 aa, Artificial Sequence
  Non-cyclic GFR-binding peptide
  MOD_RES (6)..(7): Xaa is C or S
  MOD_RES (21)..(22)..(23)..(24)..(25): Xaa is A or G
  MOD_RES (26)..(27)..(28)..(29): Xaa is A or G or absent
STPPTXXVPTRLEPLTILYYXXXXXXXXXEQLSNDMVVES

SEQ ID NO: 12462 - protein, 36 aa, Artificial Sequence
  Non-cyclic GFR-binding peptide
  MOD_RES (2)..(3): Xaa is C or S
  MOD_RES (17)..(18)..(19)..(20)..(21): Xaa is A or G
  MOD_RES (22)..(23)..(24)..(25): Xaa is A or G or absent
PXXAPTQLEPLTVLYYXXXXXXXXXEQLSNNMVVRA

SEQ ID NO: 12463 - protein, 36 aa, Artificial Sequence
  Non-cyclic GFR-binding peptide
  MOD_RES (1)..(2)..(34)..(36): Xaa is C or S
XXAPTQLSPISVLFIDDSSNVIYKQYENMVVRAXGX

SEQ ID NO: 12464 - protein, 36 aa, Artificial Sequence
  Non-cyclic GFR-binding peptide
  MOD_RES (5)..(6): Xaa is C or S
IPKAXXVPTELEPLPMVYYDEYDKVVEQLSNEMVVE

SEQ ID NO: 12465 - protein, 36 aa, Artificial Sequence
  Non-cyclic GFR-binding peptide
  MOD_RES (5)..(6): Xaa is C or S
IPKAXXVPTELEPLTMLYYDEYDKVVEQLSNEMVVE

SEQ ID NO: 12466 - protein, 37 aa, Artificial Sequence
  Non-cyclic GFR-binding peptide
  MOD_RES (34)..(36): Xaa is C or S
  MOD_RES (14)..(15)..(16)..(17)..(18): Xaa is A or G
  MOD_RES (19)..(20)..(21)..(22): Xaa is A or G or absent
VPTRLEPLTILYYXXXXXXXXXEQLSNDMVVESXGXR

SEQ ID NO: 12467 - protein, 34 aa, Artificial Sequence
  Non-cyclic GFR-binding peptide
  MOD_RES (1)..(33): Xaa is C or S
XVPTRLEPLPIVYYDSANNVVEQLSNDMVVESXG

SEQ ID NO: 12468 - protein, 34 aa, Artificial Sequence
  Non-cyclic GFR-binding peptide
  MOD_RES (1)..(33): Xaa is C or S
XVPTELEPLTMLYYDENEKVVEQLSNDMVVEGXG

SEQ ID NO: 12469 - protein, 36 aa, Artificial Sequence
  Non-cyclic GFR-binding peptide
  MOD_RES (4)..(5)..(36): Xaa is C or S
ASPXXVPQDLSPISILFIVGRTPKVYKQYEMVVKSX

SEQ ID NO: 12470 - protein, 41 aa, Artificial Sequence
  Non-cyclic GFR-binding peptide
  MOD_RES (6)..(7)..(41): Xaa is C or S
  MOD_RES (21)..(22)..(23)..(24)..(25): Xaa is A or G
  MOD_RES (26)..(27)..(28)..(29): Xaa is A or G or absent
STPPTXXVPTRLEPLPIVYYXXXXXXXXXEQLSNDMVVESX

SEQ ID NO: 12471 - protein, 40 aa, Artificial Sequence
  Non-cyclic GFR-binding peptide
  MOD_RES (2)..(3)..(37)..(39): Xaa is C or S
  MOD_RES (17)..(18)..(19)..(20)..(21): Xaa is A or G
  MOD_RES (22)..(23)..(24)..(25): Xaa is A or G or absent
PXXAPTQLEPLTVLYYXXXXXXXXXEQLSNNMVVRAXGXH

SEQ ID NO: 12472 - protein, 35 aa, Artificial Sequence
  Non-cyclic GFR-binding peptide
  MOD_RES (1)..(32)..(34): Xaa is C or S
XVPQALSPISILFIVGRKPKVYKQYEMIVRSXKXS

SEQ ID NO: 12473 - protein, 39 aa, Artificial Sequence
  Non-cyclic GFR-binding peptide
  MOD_RES (3)..(4)..(37)..(39): Xaa is C or S
  MOD_RES (18)..(19)..(20)..(21)..(22): Xaa is A or G
  MOD_RES (23)..(24)..(25)..(26): Xaa is A or G or absent
APXXVPQALSPISILFIXXXXXXXXXYKQYEMIVRSXKX

SEQ ID NO: 12474 - protein, 34 aa, Artificial Sequence
  Non-cyclic GFR-binding peptide
  MOD_RES (3)..(4): Xaa is C or S
KAXXVPTELEPLPMVYYDENEKVVEQLSNDMVVE

SEQ ID NO: 12475 - protein, 37 aa, Artificial Sequence
  Non-cyclic GFR-binding peptide
  MOD_RES (4)..(5): Xaa is C or S
  MOD_RES (19)..(20)..(21)..(22)..(23): Xaa is A or G
  MOD_RES (24)..(25)..(26)..(27): Xaa is A or G or absent
ASPXXVSQDLEPLPIVYYXXXXXXXXXEQLSNMIVKS

SEQ ID NO: 12476 - protein, 38 aa, Artificial Sequence
  Non-cyclic GFR-binding peptide
  MOD_RES (3)..(4)..(37): Xaa is C or S
  MOD_RES (18)..(19)..(20)..(21)..(22): Xaa is A or G
  MOD_RES (23)..(24)..(25)..(26): Xaa is A or G or absent
SPXXVSQDLEPLPIVYYXXXXXXXXXEQLSNMIVKSXK

SEQ ID NO: 12477 - protein, 36 aa, Artificial Sequence
  Non-cyclic GFR-binding peptide
  MOD_RES (1)..(2)..(36): Xaa is C or S
  MOD_RES (16)..(17)..(18)..(19)..(20): Xaa is A or G
  MOD_RES (21)..(22)..(23)..(24): Xaa is A or G or absent
XXVPTRLSAISILYLXXXXXXXXXLKNYQDMVVESX

SEQ ID NO: 12478 - protein, 39 aa, Artificial Sequence
  Non-cyclic GFR-binding peptide
  MOD_RES (5)..(6)..(38): Xaa is C or S
VPKPXXAPTQLEPLPVVYYDDSSNVIEQLSNNMVVRAXG

SEQ ID NO: 12479 - protein, 35 aa, Artificial Sequence
  Non-cyclic GFR-binding peptide
  MOD_RES (1)..(2)..(34): Xaa is C or S
XXVPTRLSAISILYLDSANNVVLKNYQDMVVESXG

SEQ ID NO: 12480 - protein, 40 aa, Artificial Sequence
  Non-cyclic GFR-binding peptide
  MOD_RES (6)..(40): Xaa is C or S
  MOD_RES (20)..(21)..(22)..(23)..(24): Xaa is A or G
  MOD_RES (25)..(26)..(27)..(28): Xaa is A or G or absent
VTKPTXAPTKLEPLPVVYYXXXXXXXXXEQLSNNMVVRSX

SEQ ID NO: 12481 - protein, 34 aa, Artificial Sequence
  Non-cyclic GFR-binding peptide
  MOD_RES (1)..(2)..(33): Xaa is C or S
XXVPQALEPLTILYYVGRKPKVEQLSNMIVRSXK

SEQ ID NO: 12482 - protein, 39 aa, Artificial Sequence
  Non-cyclic GFR-binding peptide
  MOD_RES (5)..(6): Xaa is C or S
  MOD_RES (20)..(21)..(22)..(23)..(24): Xaa is A or G
  MOD_RES (25)..(26)..(27)..(28): Xaa is A or G or absent
VPKPXXAPTQLEPLPVVYYXXXXXXXXXEQLSNNMVVRA

SEQ ID NO: 12483 - protein, 34 aa, Artificial Sequence
  Non-cyclic GFR-binding peptide
  MOD_RES (3)..(4): Xaa is C or S
PTXXVPTRLEPLPIVYYDSANNVVEQLSNDMVVE

SEQ ID NO: 12484 - protein, 33 aa, Artificial Sequence
  Non-cyclic GFR-binding peptide
  MOD_RES (1)..(2): Xaa is C or S
XXVPTRLEPLPIVYYDSANNVVEQLSNDMVVES

SEQ ID NO: 12485 - protein, 37 aa, Artificial Sequence
  Non-cyclic GFR-binding peptide
  MOD_RES (1)..(35)..(37): Xaa is C or S
  MOD_RES (15)..(16)..(17)..(18)..(19): Xaa is A or G
  MOD_RES (20)..(21)..(22)..(23): Xaa is A or G or absent
XAPTKLEPLPVVYYXXXXXXXXXEQLSNNMVVRSXGX

SEQ ID NO: 12486 - protein, 37 aa, Artificial Sequence
  Non-cyclic GFR-binding peptide
  MOD_RES (1)..(35)..(37): Xaa is C or S
  MOD_RES (15)..(16)..(17)..(18)..(19): Xaa is A or G
  MOD_RES (20)..(21)..(22)..(23): Xaa is A or G or absent
XVPTRLNAISILYFXXXXXXXXXLKKYRDMVVESXGX

SEQ ID NO: 12487 - protein, 33 aa, Artificial Sequence
  Non-cyclic GFR-binding peptide
  MOD_RES (1)..(32): Xaa is C or S
XVPQDLSPISILFIVGRTPKVYKQYEMVVKSXK

SEQ ID NO: 12488 - protein, 36 aa, Artificial Sequence
  Non-cyclic GFR-binding peptide
  MOD_RES (34)..(36): Xaa is C or S
  MOD_RES (14)..(15)..(16)..(17)..(18): Xaa is A or G
  MOD_RES (19)..(20)..(21)..(22): Xaa is A or G or absent
VPTRLEPLPIVYYXXXXXXXXXEQLSNDMVVESXGX

SEQ ID NO: 12489 - protein, 38 aa, Artificial Sequence
  Non-cyclic GFR-binding peptide
  MOD_RES (3)..(35)..(37): Xaa is C or S
PTXAPTKLEPLTVLYYDDSSNVIEQLSNNMVVRSXGXH

SEQ ID NO: 12490 - protein, 35 aa, Artificial Sequence
  Non-cyclic GFR-binding peptide
  MOD_RES (4)..(4): Xaa is C or S
KPTXAPTKLEPLTVLYYDDSSNVIEQLSNNMVVRS

SEQ ID NO: 12491 - protein, 35 aa, Artificial Sequence
  Non-cyclic GFR-binding peptide
  MOD_RES (1)..(33)..(35): Xaa is C or S
XVPTELEPLPMVYYDENEKVVEQLSNDMVVEGXGX

SEQ ID NO: 12492 - protein, 38 aa, Artificial Sequence
  Non-cyclic GFR-binding peptide
  MOD_RES (5)..(6)..(37): Xaa is C or S
SASPXXVSQDLSPISILFIIGKTPKIYKQYEMIVKSXK

SEQ ID NO: 12493 - protein, 37 aa, Artificial Sequence
  Non-cyclic GFR-binding peptide
  MOD_RES (2)..(3)..(36): Xaa is C or S
  MOD_RES (17)..(18)..(19)..(20)..(21): Xaa is A or G
  MOD_RES (22)..(23)..(24)..(25): Xaa is A or G or absent
PXXVSQDLEPLPIVYYXXXXXXXXXEQLSNMIVKSXK

SEQ ID NO: 12494 - protein, 34 aa, Artificial Sequence
  Non-cyclic GFR-binding peptide
  MOD_RES (1)..(2): Xaa is C or S
  MOD_RES (16)..(17)..(18)..(19)..(20): Xaa is A or G
  MOD_RES (21)..(22)..(23)..(24): Xaa is A or G or absent
XXVPTRLEPLTILYYXXXXXXXXXEQLSNDMVVE

SEQ ID NO: 12495 - protein, 37 aa, Artificial Sequence
  Non-cyclic GFR-binding peptide
  MOD_RES (2)..(3)..(35)..(37): Xaa is C or S
PXXAPTKLSPISVLFIDDSSNVIYKQYENMVVRSXGX

SEQ ID NO: 12496 - protein, 43 aa, Artificial Sequence
  Non-cyclic GFR-binding peptide
  MOD_RES (7)..(41)..(43): Xaa is C or S
  MOD_RES (21)..(22)..(23)..(24)..(25): Xaa is A or G
  MOD_RES (26)..(27)..(28)..(29): Xaa is A or G or absent
HVTKPTXAPTKLEPLPVVYYXXXXXXXXXEQLSNNMVVRSXGX

SEQ ID NO: 12497 - protein, 36 aa, Artificial Sequence
  Non-cyclic GFR-binding peptide
  MOD_RES (3)..(4): Xaa is C or S
  MOD_RES (18)..(19)..(20)..(21)..(22): Xaa is A or G
  MOD_RES (23)..(24)..(25)..(26): Xaa is A or G or absent
SPXXVSQDLEPLPIVYYXXXXXXXXXEQLSNMIVKS

SEQ ID NO: 12498 - protein, 41 aa, Artificial Sequence
  Non-cyclic GFR-binding peptide
  MOD_RES (5)..(6)..(40): Xaa is C or S
  MOD_RES (20)..(21)..(22)..(23)..(24): Xaa is A or G
  MOD_RES (25)..(26)..(27)..(28): Xaa is A or G or absent
VPKPXXAPTQLEPLPVVYYXXXXXXXXXEQLSNNMVVRAXG

SEQ ID NO: 12499 - protein, 38 aa, Artificial Sequence
  Non-cyclic GFR-binding peptide
  MOD_RES (2)..(3)..(37): Xaa is C or S
  MOD_RES (17)..(18)..(19)..(20)..(21): Xaa is A or G
  MOD_RES (22)..(23)..(24)..(25): Xaa is A or G or absent
PXXAPTKLSPISVLFIXXXXXXXXXYKQYENMVVRSXG

SEQ ID NO: 12500 - protein, 35 aa, Artificial Sequence
  Non-cyclic GFR-binding peptide
  MOD_RES (1)..(35): Xaa is C or S
  MOD_RES (15)..(16)..(17)..(18)..(19): Xaa is A or G
  MOD_RES (20)..(21)..(22)..(23): Xaa is A or G or absent
XAPTKLEPLTVLYYXXXXXXXXXEQLSNNMVVRSX

SEQ ID NO: 12501 - protein, 37 aa, Artificial Sequence
  Non-cyclic GFR-binding peptide
  MOD_RES (5)..(6)..(37): Xaa is C or S
SASPXXVPQDLSPISILFIVGRTPKVYKQYEMVVKSX

SEQ ID NO: 12502 - protein, 37 aa, Artificial Sequence
  Non-cyclic GFR-binding peptide
  MOD_RES (6)..(7): Xaa is C or S
SIPKAXXVPTELEPLTMLYYDEYDKVVEQLSNEMVVE

SEQ ID NO: 12503 - protein, 37 aa, Artificial Sequence
  Non-cyclic GFR-binding peptide
  MOD_RES (4)..(5): Xaa is C or S
  MOD_RES (19)..(20)..(21)..(22)..(23): Xaa is A or G
  MOD_RES (24)..(25)..(26)..(27): Xaa is A or G or absent
PKPXXAPTQLSPISVLFIXXXXXXXXXYKQYENMVVR

SEQ ID NO: 12504 - protein, 38 aa, Artificial Sequence
  Non-cyclic GFR-binding peptide
  MOD_RES (3)..(4)..(36)..(38): Xaa is C or S
KAXXVPTELSPISMLFIDEYDKVVYKQYEEMVVEGXGX

SEQ ID NO: 12505 - protein, 35 aa, Artificial Sequence
  Non-cyclic GFR-binding peptide
  MOD_RES (2)..(2): Xaa is C or S
  MOD_RES (16)..(17)..(18)..(19)..(20): Xaa is A or G
  MOD_RES (21)..(22)..(23)..(24): Xaa is A or G or absent
TXAPTKLSPISVLFIXXXXXXXXXYKQYENMVVRS

SEQ ID NO: 12506 - protein, 40 aa, Artificial Sequence
  Non-cyclic GFR-binding peptide
  MOD_RES (6)..(7): Xaa is C or S
  MOD_RES (21)..(22)..(23)..(24)..(25): Xaa is A or G
  MOD_RES (26)..(27)..(28)..(29): Xaa is A or G or absent
KIPKAXXVPTELSPISMLFIXXXXXXXXXYKQYEDMVVEG

SEQ ID NO: 12507 - protein, 41 aa, Artificial Sequence
  Non-cyclic GFR-binding peptide
  MOD_RES (4)..(5)..(39)..(41): Xaa is C or S
  MOD_RES (19)..(20)..(21)..(22)..(23): Xaa is A or G
  MOD_RES (24)..(25)..(26)..(27): Xaa is A or G or absent
PKAXXVPTELEPLTMLYYXXXXXXXXXEQLSNDMVVEGXGX

SEQ ID NO: 12508 - protein, 36 aa, Artificial Sequence
  Non-cyclic GFR-binding peptide
  MOD_RES (4)..(5): Xaa is C or S
PKPXXAPTKLEPLPVVYYDDSSNVIEQLSNNMVVRS

SEQ ID NO: 12509 - protein, 38 aa, Artificial Sequence
  Non-cyclic GFR-binding peptide
  MOD_RES (3)..(4)..(38): Xaa is C or S
  MOD_RES (18)..(19)..(20)..(21)..(22): Xaa is A or G
  MOD_RES (23)..(24)..(25)..(26): Xaa is A or G or absent
PTXXVPTRLNAISILYFXXXXXXXXXLKKYRDMVVESX

SEQ ID NO: 12510 - protein, 36 aa, Artificial Sequence
  Non-cyclic GFR-binding peptide
  MOD_RES (3)..(4)..(36): Xaa is C or S
PTXXVPTRLEPLPIVYYDSANNVVEQLSNDMVVESX

SEQ ID NO: 12511 - protein, 38 aa, Artificial Sequence
  Non-cyclic GFR-binding peptide
  MOD_RES (2)..(3)..(37): Xaa is C or S
  MOD_RES (17)..(18)..(19)..(20)..(21): Xaa is A or G
  MOD_RES (22)..(23)..(24)..(25): Xaa is A or G or absent
AXXVPTELEPLPMVYYXXXXXXXXXEQLSNDMVVEGXG

SEQ ID NO: 12512 - protein, 38 aa, Artificial Sequence
  Non-cyclic GFR-binding peptide
  MOD_RES (5)..(6)..(38): Xaa is C or S
VPKPXXAPTQLSPISVLFIDDSSNVIYKQYENMVVRAX

SEQ ID NO: 12513 - protein, 39 aa, Artificial Sequence
  Non-cyclic GFR-binding peptide
  MOD_RES (3)..(4)..(38): Xaa is C or S
  MOD_RES (18)..(19)..(20)..(21)..(22): Xaa is A or G
  MOD_RES (23)..(24)..(25)..(26): Xaa is A or G or absent
KAXXVPTELEPLPMVYYXXXXXXXXXEQLSNEMVVEGXG

SEQ ID NO: 12514 - protein, 39 aa, Artificial Sequence
  Non-cyclic GFR-binding peptide
  MOD_RES (5)..(6): Xaa is C or S
  MOD_RES (20)..(21)..(22)..(23)..(24): Xaa is A or G
  MOD_RES (25)..(26)..(27)..(28): Xaa is A or G or absent
TPPTXXVPTRLEPLPIVYYXXXXXXXXXEQLSNDMVVES

SEQ ID NO: 12515 - protein, 41 aa, Artificial Sequence
  Non-cyclic GFR-binding peptide
  MOD_RES (6)..(7)..(40): Xaa is C or S
  MOD_RES (21)..(22)..(23)..(24)..(25): Xaa is A or G
  MOD_RES (26)..(27)..(28)..(29): Xaa is A or G or absent
ASAAPXXVPQALEPLTILYYXXXXXXXXXEQLSNMIVRSXK

SEQ ID NO: 12516 - protein, 35 aa, Artificial Sequence
  Non-cyclic GFR-binding peptide
  MOD_RES (1)..(2)..(35): Xaa is C or S
  MOD_RES (16)..(17)..(18)..(19)..(20): Xaa is A or G
  MOD_RES (21)..(22)..(23)..(24): Xaa is A or G or absent
XXVPQALSPISILFIXXXXXXXXXYKQYEMIVRSX

SEQ ID NO: 12517 - protein, 40 aa, Artificial Sequence
  Non-cyclic GFR-binding peptide
  MOD_RES (5)..(6)..(40): Xaa is C or S
  MOD_RES (20)..(21)..(22)..(23)..(24): Xaa is A or G
  MOD_RES (25)..(26)..(27)..(28): Xaa is A or G or absent
TPPTXXVPTRLSAISILYLXXXXXXXXXLKNYQDMVVESX

SEQ ID NO: 12518 - protein, 32 aa, Artificial Sequence
  Non-cyclic GFR-binding peptide
  MOD_RES (32)..(32): Xaa is C or S
APTQLEPLPVVYYDDSSNVIEQLSNNMVVRAX

SEQ ID NO: 12519 - protein, 40 aa, Artificial Sequence
  Non-cyclic GFR-binding peptide
  MOD_RES (2)..(3)..(37)..(39): Xaa is C or S
  MOD_RES (17)..(18)..(19)..(20)..(21): Xaa is A or G
  MOD_RES (22)..(23)..(24)..(25): Xaa is A or G or absent
TXXVPTRLEPLPIVYYXXXXXXXXXEQLSNDMVVESXGXR

SEQ ID NO: 12520 - protein, 41 aa, Artificial Sequence
  Non-cyclic GFR-binding peptide
  MOD_RES (6)..(7)..(41): Xaa is C or S
  MOD_RES (21)..(22)..(23)..(24)..(25): Xaa is A or G
  MOD_RES (26)..(27)..(28)..(29): Xaa is A or G or absent
SIPKAXXVPTELEPLPMVYYXXXXXXXXXEQLSNEMVVEGX

SEQ ID NO: 12521 - protein, 33 aa, Artificial Sequence
  Non-cyclic GFR-binding peptide
  MOD_RES (2)..(3): Xaa is C or S
AXXVPTELSPISMLFIDENEKVVYKQYEDMVVE

SEQ ID NO: 12522 - protein, 39 aa, Artificial Sequence
  Non-cyclic GFR-binding peptide
  MOD_RES (3)..(4)..(36)..(38): Xaa is C or S
KPXXAPTQLEPLTVLYYDDSSNVIEQLSNNMVVRAXGXH

SEQ ID NO: 12523 - protein, 34 aa, Artificial Sequence
  Non-cyclic GFR-binding peptide
  MOD_RES (3)..(4): Xaa is C or S
PTXXVPTRLEPLTILYYDSANNVVEQLSNDMVVE

SEQ ID NO: 12524 - protein, 36 aa, Artificial Sequence
  Non-cyclic GFR-binding peptide
  MOD_RES (3)..(4)..(36): Xaa is C or S
KPXXAPTQLEPLPVVYYDDSSNVIEQLSNNMVVRAX

SEQ ID NO: 12525 - protein, 35 aa, Artificial Sequence
  Non-cyclic GFR-binding peptide
  MOD_RES (32)..(34): Xaa is C or S
VPTELSPISMLFIDEYDKVVYKQYEEMVVEGXGXR

SEQ ID NO: 12526 - protein, 32 aa, Artificial Sequence
  Non-cyclic GFR-binding peptide
  MOD_RES (1)..(2): Xaa is C or S
XXVPQDLSPISILFIVGRTPKVYKQYEMVVKS

SEQ ID NO: 12527 - protein, 34 aa, Artificial Sequence
  Non-cyclic GFR-binding peptide
  MOD_RES (1)..(2)..(34): Xaa is C or S
XXVPTELSPISMLFIDENEKVVYKQYEDMVVEGX

SEQ ID NO: 12528 - protein, 31 aa, Artificial Sequence
  Non-cyclic GFR-binding peptide
  MOD_RES (1)..(1): Xaa is C or S
XVPQDLEPLPIVYYVGRTPKVEQLSNMVVKS

SEQ ID NO: 12529 - protein, 34 aa, Artificial Sequence
  Non-cyclic GFR-binding peptide
  MOD_RES (4)..(4): Xaa is C or S
KPTXAPTKLSPISVLFIDDSSNVIYKQYENMVVR

SEQ ID NO: 12530 - protein, 35 aa, Artificial Sequence
  Non-cyclic GFR-binding peptide
  MOD_RES (2)..(3)..(35): Xaa is C or S
PXXAPTQLEPLTVLYYDDSSNVIEQLSNNMVVRAX

SEQ ID NO: 12531 - protein, 38 aa, Artificial Sequence
  Non-cyclic GFR-binding peptide
  MOD_RES (2)..(3)..(37): Xaa is C or S
  MOD_RES (17)..(18)..(19)..(20)..(21): Xaa is A or G
  MOD_RES (22)..(23)..(24)..(25): Xaa is A or G or absent
TXXVPTRLEPLPIVYYXXXXXXXXXEQLSNDMVVESXG

SEQ ID NO: 12532 - protein, 39 aa, Artificial Sequence
  Non-cyclic GFR-binding peptide
  MOD_RES (4)..(5)..(37)..(39): Xaa is C or S
PKAXXVPTELEPLPMVYYDENEKVVEQLSNDMVVEGXGX

SEQ ID NO: 12533 - protein, 37 aa, Artificial Sequence
  Non-cyclic GFR-binding peptide
  MOD_RES (4)..(5): Xaa is C or S
  MOD_RES (19)..(20)..(21)..(22)..(23): Xaa is A or G
  MOD_RES (24)..(25)..(26)..(27): Xaa is A or G or absent
ASPXXVSQDLSPISILFIXXXXXXXXXYKQYEMIVKS

SEQ ID NO: 12534 - protein, 40 aa, Artificial Sequence
  Non-cyclic GFR-binding peptide
  MOD_RES (2)..(3)..(37)..(39): Xaa is C or S
  MOD_RES (17)..(18)..(19)..(20)..(21): Xaa is A or G
  MOD_RES (22)..(23)..(24)..(25): Xaa is A or G or absent
AXXVPTELSPISMLFIXXXXXXXXXYKQYEEMVVEGXGXR

SEQ ID NO: 12535 - protein, 40 aa, Artificial Sequence
  Non-cyclic GFR-binding peptide
  MOD_RES (6)..(7): Xaa is C or S
  MOD_RES (21)..(22)..(23)..(24)..(25): Xaa is A or G
  MOD_RES (26)..(27)..(28)..(29): Xaa is A or G or absent
TVPKPXXAPTQLEPLPVVYYXXXXXXXXXEQLSNNMVVRA

SEQ ID NO: 12536 - protein, 38 aa, Artificial Sequence
  Non-cyclic GFR-binding peptide
  MOD_RES (2)..(36)..(38): Xaa is C or S
  MOD_RES (16)..(17)..(18)..(19)..(20): Xaa is A or G
  MOD_RES (21)..(22)..(23)..(24): Xaa is A or G or absent
TXAPTKLEPLPVVYYXXXXXXXXXEQLSNNMVVRSXGX

SEQ ID NO: 12537 - protein, 37 aa, Artificial Sequence
  Non-cyclic GFR-binding peptide
  MOD_RES (1)..(2)..(34)..(36): Xaa is C or S
XXVPTRLEPLTILYYDSANNVVEQLSNDMVVESXGXR

SEQ ID NO: 12538 - protein, 37 aa, Artificial Sequence
  Non-cyclic GFR-binding peptide
  MOD_RES (3)..(4)..(36): Xaa is C or S
PTXXVPTRLNAISILYFDSANNVVLKKYRDMVVESXG

SEQ ID NO: 12539 - protein, 36 aa, Artificial Sequence
  Non-cyclic GFR-binding peptide
  MOD_RES (4)..(5)..(36): Xaa is C or S
AAPXXVPQALEPLTILYYVGRKPKVEQLSNMIVRSX

SEQ ID NO: 12540 - protein, 36 aa, Artificial Sequence
  Non-cyclic GFR-binding peptide
  MOD_RES (1)..(2)..(35): Xaa is C or S
  MOD_RES (16)..(17)..(18)..(19)..(20): Xaa is A or G
  MOD_RES (21)..(22)..(23)..(24): Xaa is A or G or absent
XXVSQDLSPISILFIXXXXXXXXXYKQYEMIVKSXK

SEQ ID NO: 12541 - protein, 34 aa, Artificial Sequence
  Non-cyclic GFR-binding peptide
  MOD_RES (33)..(33): Xaa is C or S
  MOD_RES (14)..(15)..(16)..(17)..(18): Xaa is A or G
  MOD_RES (19)..(20)..(21)..(22): Xaa is A or G or absent
VPQDLSPISILFIXXXXXXXXXYKQYEMVVKSXK

SEQ ID NO: 12542 - protein, 36 aa, Artificial Sequence
  Non-cyclic GFR-binding peptide
  MOD_RES (4)..(5): Xaa is C or S
PKAXXVPTELEPLPMVYYDEYDKVVEQLSNEMVVEG

SEQ ID NO: 12543 - protein, 34 aa, Artificial Sequence
  Non-cyclic GFR-binding peptide
  MOD_RES (3)..(4): Xaa is C or S
KAXXVPTELEPLPMVYYDEYDKVVEQLSNEMVVE

SEQ ID NO: 12544 - protein, 35 aa, Artificial Sequence
  Non-cyclic GFR-binding peptide
  MOD_RES (1)..(34): Xaa is C or S
  MOD_RES (15)..(16)..(17)..(18)..(19): Xaa is A or G
  MOD_RES (20)..(21)..(22)..(23): Xaa is A or G or absent
XVSQDLSPISILFIXXXXXXXXXYKQYEMIVKSXK

SEQ ID NO: 12545 - protein, 34 aa, Artificial Sequence
  Non-cyclic GFR-binding peptide
  MOD_RES (3)..(4): Xaa is C or S
PTXXVPTRLNAISILYFDSANNVVLKKYRDMVVE

SEQ ID NO: 12546 - protein, 39 aa, Artificial Sequence
  Non-cyclic GFR-binding peptide
  MOD_RES (1)..(2)..(36)..(38): Xaa is C or S
  MOD_RES (16)..(17)..(18)..(19)..(20): Xaa is A or G
  MOD_RES (21)..(22)..(23)..(24): Xaa is A or G or absent
XXVPTRLEPLTILYYXXXXXXXXXEQLSNDMVVESXGXR

SEQ ID NO: 12547 - protein, 33 aa, Artificial Sequence
  Non-cyclic GFR-binding peptide
  MOD_RES (1)..(33): Xaa is C or S
XVPTELEPLPMVYYDEYDKVVEQLSNEMVVEGX

SEQ ID NO: 12548 - protein, 36 aa, Artificial Sequence
  Non-cyclic GFR-binding peptide
  MOD_RES (3)..(4)..(36): Xaa is C or S
KAXXVPTELEPLPMVYYDEYDKVVEQLSNEMVVEGX

SEQ ID NO: 12549 - protein, 34 aa, Artificial Sequence
  Non-cyclic GFR-binding peptide
  MOD_RES (3)..(4): Xaa is C or S
KPXXAPTKLEPLPVVYYDDSSNVIEQLSNNMVVR

SEQ ID NO: 12550 - protein, 36 aa, Artificial Sequence
  Non-cyclic GFR-binding peptide
  MOD_RES (5)..(6): Xaa is C or S
VPKPXXAPTKLEPLPVVYYDDSSNVIEQLSNNMVVR

SEQ ID NO: 12551 - protein, 39 aa, Artificial Sequence
  Non-cyclic GFR-binding peptide
  MOD_RES (1)..(2)..(36)..(38): Xaa is C or S
  MOD_RES (16)..(17)..(18)..(19)..(20): Xaa is A or G
  MOD_RES (21)..(22)..(23)..(24): Xaa is A or G or absent
XXVPTELSPISMLFIXXXXXXXXXYKQYEDMVVEGXGXR

SEQ ID NO: 12552 - protein, 36 aa, Artificial Sequence
  Non-cyclic GFR-binding peptide
  MOD_RES (2)..(3)..(35): Xaa is C or S
AXXVPTELEPLTMLYYDENEKVVEQLSNDMVVEGXG

SEQ ID NO: 12553 - protein, 40 aa, Artificial Sequence
  Non-cyclic GFR-binding peptide
  MOD_RES (5)..(6)..(40): Xaa is C or S
  MOD_RES (20)..(21)..(22)..(23)..(24): Xaa is A or G
  MOD_RES (25)..(26)..(27)..(28): Xaa is A or G or absent
VPKPXXAPTKLEPLPVVYYXXXXXXXXXEQLSNNMVVRSX

SEQ ID NO: 12554 - protein, 40 aa, Artificial Sequence
  Non-cyclic GFR-binding peptide
  MOD_RES (4)..(5)..(39): Xaa is C or S
  MOD_RES (19)..(20)..(21)..(22)..(23): Xaa is A or G
  MOD_RES (24)..(25)..(26)..(27): Xaa is A or G or absent
PKAXXVPTELEPLPMVYYXXXXXXXXXEQLSNEMVVEGXG

SEQ ID NO: 12555 - protein, 38 aa, Artificial Sequence
  Non-cyclic GFR-binding peptide
  MOD_RES (2)..(3)..(36)..(38): Xaa is C or S
  MOD_RES (17)..(18)..(19)..(20)..(21): Xaa is A or G
  MOD_RES (22)..(23)..(24)..(25): Xaa is A or G or absent
PXXVSQDLEPLPIVYYXXXXXXXXXEQLSNMIVKSXKX

SEQ ID NO: 12556 - protein, 39 aa, Artificial Sequence
  Non-cyclic GFR-binding peptide
  MOD_RES (6)..(7)..(39): Xaa is C or S
STPPTXXVPTRLEPLPIVYYDSANNVVEQLSNDMVVESX

SEQ ID NO: 12557 - protein, 35 aa, Artificial Sequence
  Non-cyclic GFR-binding peptide
  MOD_RES (1)..(2): Xaa is C or S
  MOD_RES (16)..(17)..(18)..(19)..(20): Xaa is A or G
  MOD_RES (21)..(22)..(23)..(24): Xaa is A or G or absent
XXVPTRLEPLTILYYXXXXXXXXXEQLSNDMVVES

SEQ ID NO: 12558 - protein, 41 aa, Artificial Sequence
  Non-cyclic GFR-binding peptide
  MOD_RES (6)..(7)..(38)..(40): Xaa is C or S
ASASPXXVPQDLEPLPIVYYVGRTPKVEQLSNMVVKSXKXS

SEQ ID NO: 12559 - protein, 39 aa, Artificial Sequence
  Non-cyclic GFR-binding peptide
  MOD_RES (4)..(5)..(36)..(38): Xaa is C or S
ASPXXVPQDLEPLPIVYYVGRTPKVEQLSNMVVKSXKXS

SEQ ID NO: 12560 - protein, 39 aa, Artificial Sequence
  Non-cyclic GFR-binding peptide
  MOD_RES (6)..(7)..(39): Xaa is C or S
YVPKPXXAPTKLSPISVLFIDDSSNVIYKQYENMVVRSX

SEQ ID NO: 12561 - protein, 44 aa, Artificial Sequence
  Non-cyclic GFR-binding peptide
  MOD_RES (6)..(7)..(41)..(43): Xaa is C or S
  MOD_RES (21)..(22)..(23)..(24)..(25): Xaa is A or G
  MOD_RES (26)..(27)..(28)..(29): Xaa is A or G or absent
STPPTXXVPTRLEPLTILYYXXXXXXXXXEQLSNDMVVESXGXR

SEQ ID NO: 12562 - protein, 37 aa, Artificial Sequence
  Non-cyclic GFR-binding peptide
  MOD_RES (3)..(4)..(36): Xaa is C or S
KPXXAPTKLEPLPVVYYDDSSNVIEQLSNNMVVRSXG

SEQ ID NO: 12563 - protein, 37 aa, Artificial Sequence
  Non-cyclic GFR-binding peptide
  MOD_RES (6)..(7): Xaa is C or S
ASASPXXVSQDLEPLPIVYYIGKTPKIEQLSNMIVKS

SEQ ID NO: 12564 - protein, 38 aa, Artificial Sequence
  Non-cyclic GFR-binding peptide
  MOD_RES (4)..(5): Xaa is C or S
  MOD_RES (19)..(20)..(21)..(22)..(23): Xaa is A or G
  MOD_RES (24)..(25)..(26)..(27): Xaa is A or G or absent
PKAXXVPTELSPISMLFIXXXXXXXXXYKQYEEMVVEG

SEQ ID NO: 12565 - protein, 32 aa, Artificial Sequence
  Non-cyclic GFR-binding peptide
  MOD_RES (1)..(1): Xaa is C or S
XVPTRLEPLTILYYDSANNVVEQLSNDMVVES

SEQ ID NO: 12566 - protein, 39 aa, Artificial Sequence
  Non-cyclic GFR-binding peptide
  MOD_RES (4)..(5)..(37)..(39): Xaa is C or S
PKAXXVPTELEPLTMLYYDEYDKVVEQLSNEMVVEGXGX

SEQ ID NO: 12567 - protein, 41 aa, Artificial Sequence
  Non-cyclic GFR-binding peptide
  MOD_RES (5)..(6)..(40): Xaa is C or S
  MOD_RES (20)..(21)..(22)..(23)..(24): Xaa is A or G
  MOD_RES (25)..(26)..(27)..(28): Xaa is A or G or absent
VPKPXXAPTKLSPISVLFIXXXXXXXXXYKQYENMVVRSXG

SEQ ID NO: 12568 - protein, 42 aa, Artificial Sequence
  Non-cyclic GFR-binding peptide
  MOD_RES (6)..(7)..(39)..(41): Xaa is C or S
STPPTXXVPTRLSAISILYLDSANNVVLKNYQDMVVESXGXR

SEQ ID NO: 12569 - protein, 35 aa, Artificial Sequence
  Non-cyclic GFR-binding peptide
  MOD_RES (1)..(35): Xaa is C or S
  MOD_RES (15)..(16)..(17)..(18)..(19): Xaa is A or G
  MOD_RES (20)..(21)..(22)..(23): Xaa is A or G or absent
XVPTRLSAISILYLXXXXXXXXXLKNYQDMVVESX

SEQ ID NO: 12570 - protein, 32 aa, Artificial Sequence
  Non-cyclic GFR-binding peptide
  MOD_RES (32)..(32): Xaa is C or S
VPTELSPISMLFIDEYDKVVYKQYEEMVVEGX

SEQ ID NO: 12571 - protein, 38 aa, Artificial Sequence
  Non-cyclic GFR-binding peptide
  MOD_RES (2)..(3)..(35)..(37): Xaa is C or S
TXXVPTRLSAISILYLDSANNVVLKNYQDMVVESXGXR

SEQ ID NO: 12572 - protein, 39 aa, Artificial Sequence
  Non-cyclic GFR-binding peptide
  MOD_RES (1)..(2)..(36)..(38): Xaa is C or S
  MOD_RES (16)..(17)..(18)..(19)..(20): Xaa is A or G
  MOD_RES (21)..(22)..(23)..(24): Xaa is A or G or absent
XXAPTQLEPLPVVYYXXXXXXXXXEQLSNNMVVRAXGXH

SEQ ID NO: 12573 - protein, 41 aa, Artificial Sequence
  Non-cyclic GFR-binding peptide
  MOD_RES (4)..(5)..(39)..(41): Xaa is C or S
  MOD_RES (19)..(20)..(21)..(22)..(23): Xaa is A or G
  MOD_RES (24)..(25)..(26)..(27): Xaa is A or G or absent
PPTXXVPTRLEPLTILYYXXXXXXXXXEQLSNDMVVESXGX

SEQ ID NO: 12574 - protein, 43 aa, Artificial Sequence
  Non-cyclic GFR-binding peptide
  MOD_RES (6)..(7)..(41)..(43): Xaa is C or S
  MOD_RES (21)..(22)..(23)..(24)..(25): Xaa is A or G
  MOD_RES (26)..(27)..(28)..(29): Xaa is A or G or absent
TVPKPXXAPTQLEPLPVVYYXXXXXXXXXEQLSNNMVVRAXGX

SEQ ID NO: 12575 - protein, 34 aa, Artificial Sequence
  Non-cyclic GFR-binding peptide
  MOD_RES (1)..(2): Xaa is C or S
  MOD_RES (16)..(17)..(18)..(19)..(20): Xaa is A or G
  MOD_RES (21)..(22)..(23)..(24): Xaa is A or G or absent
XXVPQDLEPLPIVYYXXXXXXXXXEQLSNMVVKS

SEQ ID NO: 12576 - protein, 35 aa, Artificial Sequence
  Non-cyclic GFR-binding peptide
  MOD_RES (1)..(2)..(34): Xaa is C or S
XXAPTKLEPLPVVYYDDSSNVIEQLSNNMVVRSXG

SEQ ID NO: 12577 - protein, 33 aa, Artificial Sequence
  Non-cyclic GFR-binding peptide
  MOD_RES (1)..(1): Xaa is C or S
  MOD_RES (15)..(16)..(17)..(18)..(19): Xaa is A or G
  MOD_RES (20)..(21)..(22)..(23): Xaa is A or G or absent
XVPTRLSAISILYLXXXXXXXXXLKNYQDMVVE

SEQ ID NO: 12578 - protein, 33 aa, Artificial Sequence
  Non-cyclic GFR-binding peptide
  MOD_RES (2)..(2): Xaa is C or S
TXAPTKLEPLPVVYYDDSSNVIEQLSNNMVVRS

SEQ ID NO: 12579 - protein, 39 aa, Artificial Sequence
  Non-cyclic GFR-binding peptide
  MOD_RES (6)..(7)..(38): Xaa is C or S
ASAAPXXVPQALEPLTILYYVGRKPKVEQLSNMIVRSXK

SEQ ID NO: 12580 - protein, 34 aa, Artificial Sequence
  Non-cyclic GFR-binding peptide
  MOD_RES (31)..(33): Xaa is C or S
VPQALSPISILFIVGRKPKVYKQYEMIVRSXKXS

SEQ ID NO: 12581 - protein, 39 aa, Artificial Sequence
  Non-cyclic GFR-binding peptide
  MOD_RES (3)..(4)..(36)..(38): Xaa is C or S
PTXXVPTRLSAISILYLDSANNVVLKNYQDMVVESXGXR

SEQ ID NO: 12582 - protein, 39 aa, Artificial Sequence
  Non-cyclic GFR-binding peptide
  MOD_RES (2)..(3)..(37)..(39): Xaa is C or S
  MOD_RES (17)..(18)..(19)..(20)..(21): Xaa is A or G
  MOD_RES (22)..(23)..(24)..(25): Xaa is A or G or absent
PXXAPTQLEPLPVVYYXXXXXXXXXEQLSNNMVVRAXGX

SEQ ID NO: 12583 - protein, 36 aa, Artificial Sequence
  Non-cyclic GFR-binding peptide
  MOD_RES (2)..(3)..(34)..(36): Xaa is C or S
PXXVPQALEPLTILYYVGRKPKVEQLSNMIVRSXKX

SEQ ID NO: 12584 - protein, 34 aa, Artificial Sequence
  Non-cyclic GFR-binding peptide
  MOD_RES (33)..(33): Xaa is C or S
  MOD_RES (14)..(15)..(16)..(17)..(18): Xaa is A or G
  MOD_RES (19)..(20)..(21)..(22): Xaa is A or G or absent
VSQDLEPLPIVYYXXXXXXXXXEQLSNMIVKSXK

SEQ ID NO: 12585 - protein, 38 aa, Artificial Sequence
  Non-cyclic GFR-binding peptide
  MOD_RES (5)..(6)..(38): Xaa is C or S
VPKPXXAPTQLEPLPVVYYDDSSNVIEQLSNNMVVRAX

SEQ ID NO: 12586 - protein, 38 aa, Artificial Sequence
  Non-cyclic GFR-binding peptide
  MOD_RES (1)..(2)..(35)..(37): Xaa is C or S
  MOD_RES (16)..(17)..(18)..(19)..(20): Xaa is A or G
  MOD_RES (21)..(22)..(23)..(24): Xaa is A or G or absent
XXVPQALEPLTILYYXXXXXXXXXEQLSNMIVRSXKXS

SEQ ID NO: 12587 - protein, 37 aa, Artificial Sequence
  Non-cyclic GFR-binding peptide
  MOD_RES (4)..(5)..(37): Xaa is C or S
PPTXXVPTRLEPLTILYYDSANNVVEQLSNDMVVESX

SEQ ID NO: 12588 - protein, 35 aa, Artificial Sequence
  Non-cyclic GFR-binding peptide
  MOD_RES (3)..(4)..(35): Xaa is C or S
APXXVPQALEPLTILYYVGRKPKVEQLSNMIVRSX

SEQ ID NO: 12589 - protein, 35 aa, Artificial Sequence
  Non-cyclic GFR-binding peptide
  MOD_RES (4)..(5): Xaa is C or S
PKAXXVPTELSPISMLFIDENEKVVYKQYEDMVVE

SEQ ID NO: 12590 - protein, 32 aa, Artificial Sequence
  Non-cyclic GFR-binding peptide
  MOD_RES (1)..(32): Xaa is C or S
XVPQDLEPLPIVYYVGRTPKVEQLSNMVVKSX

SEQ ID NO: 12591 - protein, 36 aa, Artificial Sequence
  Non-cyclic GFR-binding peptide
  MOD_RES (2)..(3)..(34)..(36): Xaa is C or S
PXXVSQDLEPLPIVYYIGKTPKIEQLSNMIVKSXKX

SEQ ID NO: 12592 - protein, 31 aa, Artificial Sequence
  Non-cyclic GFR-binding peptide
  MOD_RES (31)..(31): Xaa is C or S
VSQDLEPLPIVYYIGKTPKIEQLSNMIVKSX

SEQ ID NO: 12593 - protein, 37 aa, Artificial Sequence
  Non-cyclic GFR-binding peptide
  MOD_RES (2)..(3)..(35)..(37): Xaa is C or S
PXXAPTQLSPISVLFIDDSSNVIYKQYENMVVRAXGX

SEQ ID NO: 12594 - protein, 40 aa, Artificial Sequence
  Non-cyclic GFR-binding peptide
  MOD_RES (4)..(5)..(37)..(39): Xaa is C or S
PKPXXAPTQLEPLPVVYYDDSSNVIEQLSNNMVVRAXGXH

SEQ ID NO: 12595 - protein, 41 aa, Artificial Sequence
  Non-cyclic GFR-binding peptide
  MOD_RES (3)..(4)..(38)..(40): Xaa is C or S
  MOD_RES (18)..(19)..(20)..(21)..(22): Xaa is A or G
  MOD_RES (23)..(24)..(25)..(26): Xaa is A or G or absent
KPXXAPTQLSPISVLFIXXXXXXXXXYKQYENMVVRAXGXH

SEQ ID NO: 12596 - protein, 41 aa, Artificial Sequence
  Non-cyclic GFR-binding peptide
  MOD_RES (5)..(6)..(39)..(41): Xaa is C or S
  MOD_RES (20)..(21)..(22)..(23)..(24): Xaa is A or G
  MOD_RES (25)..(26)..(27)..(28): Xaa is A or G or absent
SASPXXVPQDLSPISILFIXXXXXXXXXYKQYEMVVKSXKX

SEQ ID NO: 12597 - protein, 35 aa, Artificial Sequence
  Non-cyclic GFR-binding peptide
  MOD_RES (3)..(4): Xaa is C or S
KPXXAPTKLSPISVLFIDDSSNVIYKQYENMVVRS

SEQ ID NO: 12598 - protein, 37 aa, Artificial Sequence
  Non-cyclic GFR-binding peptide
  MOD_RES (1)..(2)..(36): Xaa is C or S
  MOD_RES (16)..(17)..(18)..(19)..(20): Xaa is A or G
  MOD_RES (21)..(22)..(23)..(24): Xaa is A or G or absent
XXVPTELEPLTMLYYXXXXXXXXXEQLSNDMVVEGXG

SEQ ID NO: 12599 - protein, 40 aa, Artificial Sequence
  Non-cyclic GFR-binding peptide
  MOD_RES (4)..(5)..(37)..(39): Xaa is C or S
PKPXXAPTKLEPLPVVYYDDSSNVIEQLSNNMVVRSXGXH

SEQ ID NO: 12600 - protein, 38 aa, Artificial Sequence
  Non-cyclic GFR-binding peptide
  MOD_RES (2)..(3)..(35)..(37): Xaa is C or S
AXXVPTELSPISMLFIDENEKVVYKQYEDMVVEGXGXR

SEQ ID NO: 12601 - protein, 40 aa, Artificial Sequence
  Non-cyclic GFR-binding peptide
  MOD_RES (6)..(7)..(40): Xaa is C or S
  MOD_RES (21)..(22)..(23)..(24)..(25): Xaa is A or G
  MOD_RES (26)..(27)..(28)..(29): Xaa is A or G or absent
ASASPXXVPQDLEPLPIVYYXXXXXXXXXEQLSNMVVKSX

SEQ ID NO: 12602 - protein, 39 aa, Artificial Sequence
  Non-cyclic GFR-binding peptide
  MOD_RES (6)..(7): Xaa is C or S
  MOD_RES (21)..(22)..(23)..(24)..(25): Xaa is A or G
  MOD_RES (26)..(27)..(28)..(29): Xaa is A or G or absent
TVPKPXXAPTQLSPISVLFIXXXXXXXXXYKQYENMVVR

SEQ ID NO: 12603 - protein, 37 aa, Artificial Sequence
  Non-cyclic GFR-binding peptide
  MOD_RES (2)..(3)..(37): Xaa is C or S
  MOD_RES (17)..(18)..(19)..(20)..(21): Xaa is A or G
  MOD_RES (22)..(23)..(24)..(25): Xaa is A or G or absent
AXXVPTELEPLTMLYYXXXXXXXXXEQLSNEMVVEGX

SEQ ID NO: 12604 - protein, 36 aa, Artificial Sequence
  Non-cyclic GFR-binding peptide
  MOD_RES (3)..(4)..(36): Xaa is C or S
KAXXVPTELSPISMLFIDEYDKVVYKQYEEMVVEGX

SEQ ID NO: 12605 - protein, 37 aa, Artificial Sequence
  Non-cyclic GFR-binding peptide
  MOD_RES (4)..(4): Xaa is C or S
  MOD_RES (18)..(19)..(20)..(21)..(22): Xaa is A or G
  MOD_RES (23)..(24)..(25)..(26): Xaa is A or G or absent
KPTXAPTKLEPLPVVYYXXXXXXXXXEQLSNNMVVRS

SEQ ID NO: 12606 - protein, 40 aa, Artificial Sequence
  Non-cyclic GFR-binding peptide
  MOD_RES (4)..(5)..(37)..(39): Xaa is C or S
PKAXXVPTELSPISMLFIDEYDKVVYKQYEEMVVEGXGXR

SEQ ID NO: 12607 - protein, 35 aa, Artificial Sequence
  Non-cyclic GFR-binding peptide
  MOD_RES (1)..(2)..(34): Xaa is C or S
XXAPTQLEPLPVVYYDDSSNVIEQLSNNMVVRAXG

SEQ ID NO: 12608 - protein, 39 aa, Artificial Sequence
  Non-cyclic GFR-binding peptide
  MOD_RES (4)..(5)..(37)..(39): Xaa is C or S
PKAXXVPTELSPISMLFIDENEKVVYKQYEDMVVEGXGX

SEQ ID NO: 12609 - protein, 35 aa, Artificial Sequence
  Non-cyclic GFR-binding peptide
  MOD_RES (2)..(3): Xaa is C or S
  MOD_RES (17)..(18)..(19)..(20)..(21): Xaa is A or G
  MOD_RES (22)..(23)..(24)..(25): Xaa is A or G or absent
TXXVPTRLSAISILYLXXXXXXXXXLKNYQDMVVE

SEQ ID NO: 12610 - protein, 37 aa, Artificial Sequence
  Non-cyclic GFR-binding peptide
  MOD_RES (5)..(6): Xaa is C or S
TPPTXXVPTRLEPLPIVYYDSANNVVEQLSNDMVVES

SEQ ID NO: 12611 - protein, 35 aa, Artificial Sequence
  Non-cyclic GFR-binding peptide
  MOD_RES (1)..(2): Xaa is C or S
  MOD_RES (16)..(17)..(18)..(19)..(20): Xaa is A or G
  MOD_RES (21)..(22)..(23)..(24): Xaa is A or G or absent
XXVPTELSPISMLFIXXXXXXXXXYKQYEEMVVEG

SEQ ID NO: 12612 - protein, 41 aa, Artificial Sequence
  Non-cyclic GFR-binding peptide
  MOD_RES (5)..(6)..(40): Xaa is C or S
  MOD_RES (20)..(21)..(22)..(23)..(24): Xaa is A or G
  MOD_RES (25)..(26)..(27)..(28): Xaa is A or G or absent
TPPTXXVPTRLEPLPIVYYXXXXXXXXXEQLSNDMVVESXG

SEQ ID NO: 12613 - protein, 37 aa, Artificial Sequence
  Non-cyclic GFR-binding peptide
  MOD_RES (1)..(2)..(36): Xaa is C or S
  MOD_RES (16)..(17)..(18)..(19)..(20): Xaa is A or G
  MOD_RES (21)..(22)..(23)..(24): Xaa is A or G or absent
XXAPTKLSPISVLFIXXXXXXXXXYKQYENMVVRSXG

SEQ ID NO: 12614 - protein, 34 aa, Artificial Sequence
  Non-cyclic GFR-binding peptide
  MOD_RES (1)..(1): Xaa is C or S
  MOD_RES (15)..(16)..(17)..(18)..(19): Xaa is A or G
  MOD_RES (20)..(21)..(22)..(23): Xaa is A or G or absent
XAPTKLEPLTVLYYXXXXXXXXXEQLSNNMVVRS

SEQ ID NO: 12615 - protein, 32 aa, Artificial Sequence
  Non-cyclic GFR-binding peptide
  MOD_RES (1)..(2): Xaa is C or S
XXVPTELEPLPMVYYDEYDKVVEQLSNEMVVE

SEQ ID NO: 12616 - protein, 32 aa, Artificial Sequence
  Non-cyclic GFR-binding peptide
  MOD_RES (31)..(31): Xaa is C or S
VPQALEPLTILYYVGRKPKVEQLSNMIVRSXK

SEQ ID NO: 12617 - protein, 36 aa, Artificial Sequence
  Non-cyclic GFR-binding peptide
  MOD_RES (2)..(3)..(34)..(36): Xaa is C or S
PXXVPQDLSPISILFIVGRTPKVYKQYEMVVKSXKX

SEQ ID NO: 12618 - protein, 37 aa, Artificial Sequence
  Non-cyclic GFR-binding peptide
  MOD_RES (3)..(4): Xaa is C or S
  MOD_RES (18)..(19)..(20)..(21)..(22): Xaa is A or G
  MOD_RES (23)..(24)..(25)..(26): Xaa is A or G or absent
PTXXVPTRLSAISILYLXXXXXXXXXLKNYQDMVVES

SEQ ID NO: 12619 - protein, 39 aa, Artificial Sequence
  Non-cyclic GFR-binding peptide
  MOD_RES (6)..(7)..(39): Xaa is C or S
TVPKPXXAPTQLEPLPVVYYDDSSNVIEQLSNNMVVRAX

SEQ ID NO: 12620 - protein, 36 aa, Artificial Sequence
  Non-cyclic GFR-binding peptide
  MOD_RES (1)..(35): Xaa is C or S
  MOD_RES (15)..(16)..(17)..(18)..(19): Xaa is A or G
  MOD_RES (20)..(21)..(22)..(23): Xaa is A or G or absent
XVPTRLEPLTILYYXXXXXXXXXEQLSNDMVVESXG

SEQ ID NO: 12621 - protein, 40 aa, Artificial Sequence
  Non-cyclic GFR-binding peptide
  MOD_RES (5)..(6)..(37)..(39): Xaa is C or S
SASPXXVSQDLSPISILFIIGKTPKIYKQYEMIVKSXKXS

SEQ ID NO: 12622 - protein, 39 aa, Artificial Sequence
  Non-cyclic GFR-binding peptide
  MOD_RES (4)..(5)..(36)..(38): Xaa is C or S
ASPXXVPQDLSPISILFIVGRTPKVYKQYEMVVKSXKXS

SEQ ID NO: 12623 - protein, 36 aa, Artificial Sequence
  Non-cyclic GFR-binding peptide
  MOD_RES (3)..(4): Xaa is C or S
  MOD_RES (18)..(19)..(20)..(21)..(22): Xaa is A or G
  MOD_RES (23)..(24)..(25)..(26): Xaa is A or G or absent
SPXXVSQDLSPISILFIXXXXXXXXXYKQYEMIVKS

SEQ ID NO: 12624 - protein, 38 aa, Artificial Sequence
  Non-cyclic GFR-binding peptide
  MOD_RES (1)..(35)..(37): Xaa is C or S
  MOD_RES (15)..(16)..(17)..(18)..(19): Xaa is A or G
  MOD_RES (20)..(21)..(22)..(23): Xaa is A or G or absent
XAPTKLSPISVLFIXXXXXXXXXYKQYENMVVRSXGXH

SEQ ID NO: 12625 - protein, 35 aa, Artificial Sequence
  Non-cyclic GFR-binding peptide
  MOD_RES (33)..(35): Xaa is C or S
  MOD_RES (14)..(15)..(16)..(17)..(18): Xaa is A or G
  MOD_RES (19)..(20)..(21)..(22): Xaa is A or G or absent
VSQDLSPISILFIXXXXXXXXXYKQYEMIVKSXKX

SEQ ID NO: 12626 - protein, 30 aa, Artificial Sequence; identical to SEQ ID NO: 1044
  Non-cyclic GFR-binding peptide

SEQ ID NO: 12627 - protein, 38 aa, Artificial Sequence
  Non-cyclic GFR-binding peptide
  MOD_RES (3)..(4)..(38): Xaa is C or S
  MOD_RES (18)..(19)..(20)..(21)..(22): Xaa is A or G
  MOD_RES (23)..(24)..(25)..(26): Xaa is A or G or absent
KAXXVPTELEPLPMVYYXXXXXXXXXEQLSNEMVVEGX

SEQ ID NO: 12628 - protein, 44 aa, Artificial Sequence
  Non-cyclic GFR-binding peptide
  MOD_RES (6)..(7)..(41)..(43): Xaa is C or S
  MOD_RES (21)..(22)..(23)..(24)..(25): Xaa is A or G
  MOD_RES (26)..(27)..(28)..(29): Xaa is A or G or absent
TVPKPXXAPTQLEPLPVVYYXXXXXXXXXEQLSNNMVVRAXGXH

SEQ ID NO: 12629 - protein, 36 aa, Artificial Sequence
  Non-cyclic GFR-binding peptide
  MOD_RES (1)..(2)..(36): Xaa is C or S
  MOD_RES (16)..(17)..(18)..(19)..(20): Xaa is A or G
  MOD_RES (21)..(22)..(23)..(24): Xaa is A or G or absent
XXAPTKLEPLTVLYYXXXXXXXXXEQLSNNMVVRSX

SEQ ID NO: 12630 - protein, 37 aa, Artificial Sequence
  Non-cyclic GFR-binding peptide
  MOD_RES (6)..(7): Xaa is C or S
STPPTXXVPTRLEPLTILYYDSANNVVEQLSNDMVVE

SEQ ID NO: 12631 - protein, 37 aa, Artificial Sequence
  Non-cyclic GFR-binding peptide
  MOD_RES (1)..(2)..(36): Xaa is C or S
  MOD_RES (16)..(17)..(18)..(19)..(20): Xaa is A or G
  MOD_RES (21)..(22)..(23)..(24): Xaa is A or G or absent
XXAPTQLEPLTVLYYXXXXXXXXXEQLSNNMVVRAXG

SEQ ID NO: 12632 - protein, 35 aa, Artificial Sequence
  Non-cyclic GFR-binding peptide
  MOD_RES (2)..(3): Xaa is C or S
  MOD_RES (17)..(18)..(19)..(20)..(21): Xaa is A or G
  MOD_RES (22)..(23)..(24)..(25): Xaa is A or G or absent
AXXVPTELEPLTMLYYXXXXXXXXXEQLSNEMVVE

SEQ ID NO: 12633 - protein, 38 aa, Artificial Sequence
  Non-cyclic GFR-binding peptide
  MOD_RES (2)..(3)..(35)..(37): Xaa is C or S
TXXVPTRLEPLTILYYDSANNVVEQLSNDMVVESXGXR

SEQ ID NO: 12634 - protein, 38 aa, Artificial Sequence
  Non-cyclic GFR-binding peptide
  MOD_RES (1)..(2)..(36)..(38): Xaa is C or S
  MOD_RES (16)..(17)..(18)..(19)..(20): Xaa is A or G
  MOD_RES (21)..(22)..(23)..(24): Xaa is A or G or absent
XXVPTELSPISMLFIXXXXXXXXXYKQYEEMVVEGXGX

SEQ ID NO: 12635 - protein, 35 aa, Artificial Sequence
  Non-cyclic GFR-binding peptide
  MOD_RES (2)..(3)..(35): Xaa is C or S
TXXVPTRLEPLTILYYDSANNVVEQLSNDMVVESX

SEQ ID NO: 12636 - protein, 34 aa, Artificial Sequence
  Non-cyclic GFR-binding peptide
  MOD_RES (1)..(33): Xaa is C or S
XVPTRLSAISILYLDSANNVVLKNYQDMVVESXG

SEQ ID NO: 12637 - protein, 41 aa, Artificial Sequence
  Non-cyclic GFR-binding peptide
  MOD_RES (6)..(7)..(41): Xaa is C or S
  MOD_RES (21)..(22)..(23)..(24)..(25): Xaa is A or G
  MOD_RES (26)..(27)..(28)..(29): Xaa is A or G or absent
STPPTXXVPTRLEPLTILYYXXXXXXXXXEQLSNDMVVESX

SEQ ID NO: 12638 - protein, 34 aa, Artificial Sequence
  Non-cyclic GFR-binding peptide
  MOD_RES (2)..(3): Xaa is C or S
AXXVPTELEPLPMVYYDENEKVVEQLSNDMVVEG

SEQ ID NO: 12639 - protein, 40 aa, Artificial Sequence
  Non-cyclic GFR-binding peptide
  MOD_RES (4)..(5)..(38)..(40): Xaa is C or S
  MOD_RES (19)..(20)..(21)..(22)..(23): Xaa is A or G
  MOD_RES (24)..(25)..(26)..(27): Xaa is A or G or absent
ASPXXVPQDLEPLPIVYYXXXXXXXXXEQLSNMVVKSXKX

SEQ ID NO: 12640 - protein, 37 aa, Artificial Sequence
  Non-cyclic GFR-binding peptide
  MOD_RES (1)..(2)..(34)..(36): Xaa is C or S
XXVPTRLEPLPIVYYDSANNVVEQLSNDMVVESXGXR

SEQ ID NO: 12641 - protein, 36 aa, Artificial Sequence
  Non-cyclic GFR-binding peptide
  MOD_RES (1)..(2)..(36): Xaa is C or S
  MOD_RES (16)..(17)..(18)..(19)..(20): Xaa is A or G
  MOD_RES (21)..(22)..(23)..(24): Xaa is A or G or absent
XXAPTKLSPISVLFIXXXXXXXXXYKQYENMVVRSX

SEQ ID NO: 12642 - protein, 37 aa, Artificial Sequence
  Non-cyclic GFR-binding peptide
  MOD_RES (2)..(3)..(37): Xaa is C or S
  MOD_RES (17)..(18)..(19)..(20)..(21): Xaa is A or G
  MOD_RES (22)..(23)..(24)..(25): Xaa is A or G or absent
AXXVPTELEPLPMVYYXXXXXXXXXEQLSNDMVVEGX

SEQ ID NO: 12643 - protein, 37 aa, Artificial Sequence
  Non-cyclic GFR-binding peptide
  MOD_RES (34)..(36): Xaa is C or S
  MOD_RES (14)..(15)..(16)..(17)..(18): Xaa is A or G
  MOD_RES (19)..(20)..(21)..(22): Xaa is A or G or absent
VPTRLSAISILYLXXXXXXXXXLKNYQDMVVESXGXR

SEQ ID NO: 12644 - protein, 40 aa, Artificial Sequence
  Non-cyclic GFR-binding peptide
  MOD_RES (4)..(5)..(39): Xaa is C or S
  MOD_RES (19)..(20)..(21)..(22)..(23): Xaa is A or G
  MOD_RES (24)..(25)..(26)..(27): Xaa is A or G or absent
PPTXXVPTRLNAISILYFXXXXXXXXXLKKYRDMVVESXG

SEQ ID NO: 12645 - protein, 30 aa, Artificial Sequence
  Non-cyclic GFR-binding peptide
APTQLEPLPVVYYDDSSNVIEQLSNNMVVR

SEQ ID NO: 12646 - protein, 31 aa, Artificial Sequence
  Non-cyclic GFR-binding peptide
  MOD_RES (31)..(31): Xaa is C or S
VPQALEPLTILYYVGRKPKVEQLSNMIVRSX

SEQ ID NO: 12647 - protein, 35 aa, Artificial Sequence
  Non-cyclic GFR-binding peptide
  MOD_RES (1)..(2)..(34): Xaa is C or S
XXVPTELEPLTMLYYDENEKVVEQLSNDMVVEGXG

SEQ ID NO: 12648 - protein, 35 aa, Artificial Sequence
  Non-cyclic GFR-binding peptide
  MOD_RES (1)..(2)..(34): Xaa is C or S
XXVPTRLNAISILYFDSANNVVLKKYRDMVVESXG

SEQ ID NO: 12649 - protein, 39 aa, Artificial Sequence
  Non-cyclic GFR-binding peptide
  MOD_RES (7)..(39): Xaa is C or S
HVTKPTXAPTKLEPLTVLYYDDSSNVIEQLSNNMVVRSX

SEQ ID NO: 12650 - protein, 34 aa, Artificial Sequence
  Non-cyclic GFR-binding peptide
  MOD_RES (1)..(2)..(33): Xaa is C or S
XXVSQDLSPISILFIIGKTPKIYKQYEMIVKSXK

SEQ ID NO: 12651 - protein, 33 aa, Artificial Sequence
  Non-cyclic GFR-binding peptide
  MOD_RES (1)..(1): Xaa is C or S
  MOD_RES (15)..(16)..(17)..(18)..(19): Xaa is A or G
  MOD_RES (20)..(21)..(22)..(23): Xaa is A or G or absent
XAPTKLSPISVLFIXXXXXXXXXYKQYENMVVR

SEQ ID NO: 12652 - protein, 32 aa, Artificial Sequence
  Non-cyclic GFR-binding peptide
  MOD_RES (32)..(32): Xaa is C or S
VPTELEPLPMVYYDEYDKVVEQLSNEMVVEGX

SEQ ID NO: 12653 - protein, 38 aa, Artificial Sequence
  Non-cyclic GFR-binding peptide
  MOD_RES (4)..(5)..(38): Xaa is C or S
  MOD_RES (19)..(20)..(21)..(22)..(23): Xaa is A or G
  MOD_RES (24)..(25)..(26)..(27): Xaa is A or G or absent
ASPXXVPQDLEPLPIVYYXXXXXXXXXEQLSNMVVKSX

SEQ ID NO: 12654 - protein, 34 aa, Artificial Sequence
  Non-cyclic GFR-binding peptide
  MOD_RES (1)..(2)..(34): Xaa is C or S
XXAPTQLSPISVLFIDDSSNVIYKQYENMVVRAX

SEQ ID NO: 12655 - protein, 41 aa, Artificial Sequence
  Non-cyclic GFR-binding peptide
  MOD_RES (6)..(40): Xaa is C or S
  MOD_RES (20)..(21)..(22)..(23)..(24): Xaa is A or G
  MOD_RES (25)..(26)..(27)..(28): Xaa is A or G or absent
VTKPTXAPTKLEPLTVLYYXXXXXXXXXEQLSNNMVVRSXG

SEQ ID NO: 12656 - protein, 36 aa, Artificial Sequence
  Non-cyclic GFR-binding peptide
  MOD_RES (2)..(3): Xaa is C or S
  MOD_RES (17)..(18)..(19)..(20)..(21): Xaa is A or G
  MOD_RES (22)..(23)..(24)..(25): Xaa is A or G or absent
AXXVPTELEPLPMVYYXXXXXXXXXEQLSNDMVVEG

SEQ ID NO: 12657 - protein, 37 aa, Artificial Sequence
  Non-cyclic GFR-binding peptide
  MOD_RES (2)..(3)..(35)..(37): Xaa is C or S
PXXAPTKLEPLPVVYYDDSSNVIEQLSNNMVVRSXGX

SEQ ID NO: 12658 - protein, 34 aa, Artificial Sequence
  Non-cyclic GFR-binding peptide
  MOD_RES (1)..(34): Xaa is C or S
  MOD_RES (15)..(16)..(17)..(18)..(19): Xaa is A or G
  MOD_RES (20)..(21)..(22)..(23): Xaa is A or G or absent
XVPQALEPLTILYYXXXXXXXXXEQLSNMIVRSX

SEQ ID NO: 12659 - protein, 34 aa, Artificial Sequence
  Non-cyclic GFR-binding peptide
  MOD_RES (1)..(2): Xaa is C or S
  MOD_RES (16)..(17)..(18)..(19)..(20): Xaa is A or G
  MOD_RES (21)..(22)..(23)..(24): Xaa is A or G or absent
XXAPTQLEPLTVLYYXXXXXXXXXEQLSNNMVVR

SEQ ID NO: 12660 - protein, 43 aa, Artificial Sequence
  Non-cyclic GFR-binding peptide
  MOD_RES (6)..(7)..(41)..(43): Xaa is C or S
  MOD_RES (21)..(22)..(23)..(24)..(25): Xaa is A or G
  MOD_RES (26)..(27)..(28)..(29): Xaa is A or G or absent
STPPTXXVPTRLSAISILYLXXXXXXXXXLKNYQDMVVESXGX

SEQ ID NO: 12661 - protein, 34 aa, Artificial Sequence
  Non-cyclic GFR-binding peptide
  MOD_RES (2)..(34): Xaa is C or S
TXAPTKLSPISVLFIDDSSNVIYKQYENMVVRSX

SEQ ID NO: 12662 - protein, 36 aa, Artificial Sequence
  Non-cyclic GFR-binding peptide
  MOD_RES (1)..(35): Xaa is C or S
  MOD_RES (15)..(16)..(17)..(18)..(19): Xaa is A or G
  MOD_RES (20)..(21)..(22)..(23): Xaa is A or G or absent
XVPTELSPISMLFIXXXXXXXXXYKQYEEMVVEGXG

SEQ ID NO: 12663 - protein, 37 aa, Artificial Sequence
  Non-cyclic GFR-binding peptide
  MOD_RES (2)..(3)..(37): Xaa is C or S
  MOD_RES (17)..(18)..(19)..(20)..(21): Xaa is A or G
  MOD_RES (22)..(23)..(24)..(25): Xaa is A or G or absent
AXXVPTELSPISMLFIXXXXXXXXXYKQYEDMVVEGX

SEQ ID NO: 12664 - protein, 37 aa, Artificial Sequence
  Non-cyclic GFR-binding peptide
  MOD_RES (3)..(4): Xaa is C or S
  MOD_RES (18)..(19)..(20)..(21)..(22): Xaa is A or G
  MOD_RES (23)..(24)..(25)..(26): Xaa is A or G or absent
KAXXVPTELEPLPMVYYXXXXXXXXXEQLSNEMVVEG

SEQ ID NO: 12665 - protein, 38 aa, Artificial Sequence
  Non-cyclic GFR-binding peptide
  MOD_RES (1)..(2)..(36)..(38): Xaa is C or S
  MOD_RES (16)..(17)..(18)..(19)..(20): Xaa is A or G
  MOD_RES (21)..(22)..(23)..(24): Xaa is A or G or absent
XXAPTQLSPISVLFIXXXXXXXXXYKQYENMVVRAXGX

SEQ ID NO: 12666 - protein, 39 aa, Artificial Sequence
  Non-cyclic GFR-binding peptide
  MOD_RES (4)..(5)..(39): Xaa is C or S
  MOD_RES (19)..(20)..(21)..(22)..(23): Xaa is A or G
  MOD_RES (24)..(25)..(26)..(27): Xaa is A or G or absent
PPTXXVPTRLSAISILYLXXXXXXXXXLKNYQDMVVESX

SEQ ID NO: 12667 - protein, 36 aa, Artificial Sequence
  Non-cyclic GFR-binding peptide
  MOD_RES (34)..(36): Xaa is C or S
  MOD_RES (14)..(15)..(16)..(17)..(18): Xaa is A or G
  MOD_RES (19)..(20)..(21)..(22): Xaa is A or G or absent
VPTRLEPLTILYYXXXXXXXXXEQLSNDMVVESXGX

SEQ ID NO: 12668 - protein, 32 aa, Artificial Sequence
  Non-cyclic GFR-binding peptide
  MOD_RES (1)..(2): Xaa is C or S
XXVPTRLEPLTILYYDSANNVVEQLSNDMVVE

SEQ ID NO: 12669 - protein, 34 aa, Artificial Sequence
  Non-cyclic GFR-binding peptide
  MOD_RES (34)..(34): Xaa is C or S
  MOD_RES (14)..(15)..(16)..(17)..(18): Xaa is A or G
  MOD_RES (19)..(20)..(21)..(22): Xaa is A or G or absent
VPTRLSAISILYLXXXXXXXXXLKNYQDMVVESX

SEQ ID NO: 12670 - protein, 41 aa, Artificial Sequence
  Non-cyclic GFR-binding peptide
  MOD_RES (5)..(6)..(40): Xaa is C or S
  MOD_RES (20)..(21)..(22)..(23)..(24): Xaa is A or G
  MOD_RES (25)..(26)..(27)..(28): Xaa is A or G or absent
IPKAXXVPTELEPLTMLYYXXXXXXXXXEQLSNDMVVEGXG

SEQ ID NO: 12671 - protein, 39 aa, Artificial Sequence
  Non-cyclic GFR-binding peptide
  MOD_RES (3)..(4)..(38): Xaa is C or S
  MOD_RES (18)..(19)..(20)..(21)..(22): Xaa is A or G
  MOD_RES (23)..(24)..(25)..(26): Xaa is A or G or absent
PTXXVPTRLNAISILYFXXXXXXXXXLKKYRDMVVESXG

SEQ ID NO: 12672 - protein, 38 aa, Artificial Sequence
  Non-cyclic GFR-binding peptide
  MOD_RES (1)..(35)..(37): Xaa is C or S
  MOD_RES (15)..(16)..(17)..(18)..(19): Xaa is A or G
  MOD_RES (20)..(21)..(22)..(23): Xaa is A or G or absent
XVPTRLEPLPIVYYXXXXXXXXXEQLSNDMVVESXGXR

SEQ ID NO: 12673 - protein, 38 aa, Artificial Sequence
  Non-cyclic GFR-binding peptide
  MOD_RES (3)..(4)..(36)..(38): Xaa is C or S
KAXXVPTELEPLTMLYYDENEKVVEQLSNDMVVEGXGX

SEQ ID NO: 12674 - protein, 39 aa, Artificial Sequence
  Non-cyclic GFR-binding peptide
  MOD_RES (4)..(5)..(37)..(39): Xaa is C or S
PPTXXVPTRLNAISILYFDSANNVVLKKYRDMVVESXGX

SEQ ID NO: 12675 - protein, 32 aa, Artificial Sequence
  Non-cyclic GFR-binding peptide
  MOD_RES (1)..(1): Xaa is C or S
XAPTKLEPLTVLYYDDSSNVIEQLSNNMVVRS

SEQ ID NO: 12676 - protein, 40 aa, Artificial Sequence
  Non-cyclic GFR-binding peptide
  MOD_RES (6)..(7)..(39): Xaa is C or S
YVPKPXXAPTKLSPISVLFIDDSSNVIYKQYENMVVRSXG

SEQ ID NO: 12677 - protein, 41 aa, Artificial Sequence
  Non-cyclic GFR-binding peptide
  MOD_RES (3)..(4)..(38)..(40): Xaa is C or S
  MOD_RES (18)..(19)..(20)..(21)..(22): Xaa is A or G
  MOD_RES (23)..(24)..(25)..(26): Xaa is A or G or absent
KAXXVPTELEPLTMLYYXXXXXXXXXEQLSNEMVVEGXGXR

SEQ ID NO: 12678 - protein, 36 aa, Artificial Sequence
  Non-cyclic GFR-binding peptide
  MOD_RES (2)..(3)..(36): Xaa is C or S
  MOD_RES (17)..(18)..(19)..(20)..(21): Xaa is A or G
  MOD_RES (22)..(23)..(24)..(25): Xaa is A or G or absent
PXXVSQDLEPLPIVYYXXXXXXXXXEQLSNMIVKSX

SEQ ID NO: 12679 - protein, 34 aa, Artificial Sequence
  Non-cyclic GFR-binding peptide
  MOD_RES (34)..(34): Xaa is C or S
  MOD_RES (14)..(15)..(16)..(17)..(18): Xaa is A or G
  MOD_RES (19)..(20)..(21)..(22): Xaa is A or G or absent
APTKLEPLPVVYYXXXXXXXXXEQLSNNMVVRSX

SEQ ID NO: 12680 - protein, 34 aa, Artificial Sequence
  Non-cyclic GFR-binding peptide
  MOD_RES (1)..(2): Xaa is C or S
  MOD_RES (16)..(17)..(18)..(19)..(20): Xaa is A or G
  MOD_RES (21)..(22)..(23)..(24): Xaa is A or G or absent
XXVPTRLEPLPIVYYXXXXXXXXXEQLSNDMVVE

SEQ ID NO: 12681 - protein, 33 aa, Artificial Sequence
  Non-cyclic GFR-binding peptide
  MOD_RES (2)..(3): Xaa is C or S
PXXVPQDLEPLPIVYYVGRTPKVEQLSNMVVKS

SEQ ID NO: 12682 - protein, 37 aa, Artificial Sequence
  Non-cyclic GFR-binding peptide
  MOD_RES (2)..(3)..(37): Xaa is C or S
  MOD_RES (17)..(18)..(19)..(20)..(21): Xaa is A or G
  MOD_RES (22)..(23)..(24)..(25): Xaa is A or G or absent
PXXAPTKLEPLPVVYYXXXXXXXXXEQLSNNMVVRSX

SEQ ID NO: 12683 - protein, 37 aa, Artificial Sequence
  Non-cyclic GFR-binding peptide
  MOD_RES (2)..(3)..(35)..(37): Xaa is C or S
PXXAPTQLEPLPVVYYDDSSNVIEQLSNNMVVRAXGX

SEQ ID NO: 12684 - protein, 39 aa, Artificial Sequence
  Non-cyclic GFR-binding peptide
  MOD_RES (5)..(6)..(38): Xaa is C or S
TPPTXXVPTRLEPLTILYYDSANNVVEQLSNDMVVESXG

SEQ ID NO: 12685 - protein, 37 aa, Artificial Sequence
  Non-cyclic GFR-binding peptide
  MOD_RES (2)..(3)..(36): Xaa is C or S
  MOD_RES (17)..(18)..(19)..(20)..(21): Xaa is A or G
  MOD_RES (22)..(23)..(24)..(25): Xaa is A or G or absent
PXXVPQDLEPLPIVYYXXXXXXXXXEQLSNMVVKSXK

SEQ ID NO: 12686 - protein, 38 aa, Artificial Sequence
  Non-cyclic GFR-binding peptide
  MOD_RES (2)..(3)..(35)..(37): Xaa is C or S
AXXVPTELEPLTMLYYDENEKVVEQLSNDMVVEGXGXR

SEQ ID NO: 12687 - protein, 35 aa, Artificial Sequence
  Non-cyclic GFR-binding peptide
  MOD_RES (34)..(34): Xaa is C or S
  MOD_RES (14)..(15)..(16)..(17)..(18): Xaa is A or G
  MOD_RES (19)..(20)..(21)..(22): Xaa is A or G or absent
VPTELEPLTMLYYXXXXXXXXXEQLSNEMVVEGXG

SEQ ID NO: 12688 - protein, 34 aa, Artificial Sequence
  Non-cyclic GFR-binding peptide
  MOD_RES (34)..(34): Xaa is C or S
  MOD_RES (14)..(15)..(16)..(17)..(18): Xaa is A or G
  MOD_RES (19)..(20)..(21)..(22): Xaa is A or G or absent
APTKLSPISVLFIXXXXXXXXXYKQYENMVVRSX

SEQ ID NO: 12689 - protein, 39 aa, Artificial Sequence
  Non-cyclic GFR-binding peptide
  MOD_RES (5)..(6)..(39): Xaa is C or S
  MOD_RES (20)..(21)..(22)..(23)..(24): Xaa is A or G
  MOD_RES (25)..(26)..(27)..(28): Xaa is A or G or absent
SASPXXVSQDLSPISILFIXXXXXXXXXYKQYEMIVKSX

SEQ ID NO: 12690 - protein, 40 aa, Artificial Sequence
  Non-cyclic GFR-binding peptide
  MOD_RES (2)..(3)..(37)..(39): Xaa is C or S
  MOD_RES (17)..(18)..(19)..(20)..(21): Xaa is A or G
  MOD_RES (22)..(23)..(24)..(25): Xaa is A or G or absent
PXXAPTKLEPLPVVYYXXXXXXXXXEQLSNNMVVRSXGXH

SEQ ID NO: 12691 - protein, 37 aa, Artificial Sequence
  Non-cyclic GFR-binding peptide
  MOD_RES (1)..(35)..(37): Xaa is C or S
  MOD_RES (15)..(16)..(17)..(18)..(19): Xaa is A or G
  MOD_RES (20)..(21)..(22)..(23): Xaa is A or G or absent
XVPTELSPISMLFIXXXXXXXXXYKQYEEMVVEGXGX

SEQ ID NO: 12692 - protein, 38 aa, Artificial Sequence
  Non-cyclic GFR-binding peptide
  MOD_RES (5)..(37): Xaa is C or S
TKPTXAPTKLEPLPVVYYDDSSNVIEQLSNNMVVRSXG

SEQ ID NO: 12693 - protein, 33 aa, Artificial Sequence
  Non-cyclic GFR-binding peptide
  MOD_RES (1)..(1): Xaa is C or S
  MOD_RES (15)..(16)..(17)..(18)..(19): Xaa is A or G
  MOD_RES (20)..(21)..(22)..(23): Xaa is A or G or absent
XAPTQLSPISVLFIXXXXXXXXXYKQYENMVVR

SEQ ID NO: 12694 - protein, 33 aa, Artificial Sequence
  Non-cyclic GFR-binding peptide
  MOD_RES (32)..(32): Xaa is C or S
VPTELSPISMLFIDEYDKVVYKQYEEMVVEGXG

SEQ ID NO: 12695 - protein, 32 aa, Artificial Sequence
  Non-cyclic GFR-binding peptide
  MOD_RES (32)..(32): Xaa is C or S
APTQLSPISVLFIDDSSNVIYKQYENMVVRAX

SEQ ID NO: 12696 - protein, 38 aa, Artificial Sequence
  Non-cyclic GFR-binding peptide
  MOD_RES (5)..(6): Xaa is C or S
  MOD_RES (20)..(21)..(22)..(23)..(24): Xaa is A or G
  MOD_RES (25)..(26)..(27)..(28): Xaa is A or G or absent
VPKPXXAPTQLSPISVLFIXXXXXXXXXYKQYENMVVR

SEQ ID NO: 12697 - protein, 38 aa, Artificial Sequence
  Non-cyclic GFR-binding peptide
  MOD_RES (4)..(5)..(37): Xaa is C or S
PKAXXVPTELEPLPMVYYDENEKVVEQLSNDMVVEGXG

SEQ ID NO: 12698 - protein, 38 aa, Artificial Sequence
  Non-cyclic GFR-binding peptide
  MOD_RES (3)..(37): Xaa is C or S
  MOD_RES (17)..(18)..(19)..(20)..(21): Xaa is A or G
  MOD_RES (22)..(23)..(24)..(25): Xaa is A or G or absent
PTXAPTKLEPLTVLYYXXXXXXXXXEQLSNNMVVRSXG

SEQ ID NO: 12699 - protein, 35 aa, Artificial Sequence
  Non-cyclic GFR-binding peptide
  MOD_RES (3)..(35): Xaa is C or S
PTXAPTKLEPLPVVYYDDSSNVIEQLSNNMVVRSX

SEQ ID NO: 12700 - protein, 33 aa, Artificial Sequence
  Non-cyclic GFR-binding peptide
  MOD_RES (2)..(3): Xaa is C or S
PXXAPTKLSPISVLFIDDSSNVIYKQYENMVVR

SEQ ID NO: 12701 - protein, 32 aa, Artificial Sequence
  Non-cyclic GFR-binding peptide
  MOD_RES (14)..(15)..(16)..(17)..(18): Xaa is A or G
  MOD_RES (19)..(20)..(21)..(22): Xaa is A or G or absent
VPTELEPLTMLYYXXXXXXXXXEQLSNDMVVE

SEQ ID NO: 12702 - protein, 38 aa, Artificial Sequence
  Non-cyclic GFR-binding peptide
  MOD_RES (7)..(7): Xaa is C or S
HVTKPTXAPTKLEPLPVVYYDDSSNVIEQLSNNMVVRS

SEQ ID NO: 12703 - protein, 40 aa, Artificial Sequence
  Non-cyclic GFR-binding peptide
  MOD_RES (5)..(6)..(38)..(40): Xaa is C or S
TPPTXXVPTRLEPLTILYYDSANNVVEQLSNDMVVESXGX

SEQ ID NO: 12704 - protein, 35 aa, Artificial Sequence
  Non-cyclic GFR-binding peptide
  MOD_RES (3)..(4): Xaa is C or S
KPXXAPTQLEPLTVLYYDDSSNVIEQLSNNMVVRA

SEQ ID NO: 12705 - protein, 35 aa, Artificial Sequence
  Non-cyclic GFR-binding peptide
  MOD_RES (1)..(34): Xaa is C or S
  MOD_RES (15)..(16)..(17)..(18)..(19): Xaa is A or G
  MOD_RES (20)..(21)..(22)..(23): Xaa is A or G or absent
XVPQDLSPISILFIXXXXXXXXXYKQYEMVVKSXK

SEQ ID NO: 12706 - protein, 35 aa, Artificial Sequence
  Non-cyclic GFR-binding peptide
  MOD_RES (1)..(35): Xaa is C or S
  MOD_RES (15)..(16)..(17)..(18)..(19): Xaa is A or G
  MOD_RES (20)..(21)..(22)..(23): Xaa is A or G or absent
XAPTKLSPISVLFIXXXXXXXXXYKQYENMVVRSX

SEQ ID NO: 12707 - protein, 35 aa, Artificial Sequence
  Non-cyclic GFR-binding peptide
  MOD_RES (4)..(5): Xaa is C or S
AAPXXVPQALEPLTILYYVGRKPKVEQLSNMIVRS

SEQ ID NO: 12708 - protein, 35 aa, Artificial Sequence
  Non-cyclic GFR-binding peptide
  MOD_RES (2)..(3)..(34): Xaa is C or S
PXXVSQDLEPLPIVYYIGKTPKIEQLSNMIVKSXK

SEQ ID NO: 12709 - protein, 44 aa, Artificial Sequence
  Non-cyclic GFR-binding peptide
  MOD_RES (7)..(41)..(43): Xaa is C or S
  MOD_RES (21)..(22)..(23)..(24)..(25): Xaa is A or G
  MOD_RES (26)..(27)..(28)..(29): Xaa is A or G or absent
HVTKPTXAPTKLEPLTVLYYXXXXXXXXXEQLSNNMVVRSXGXH

SEQ ID NO: 12710 - protein, 40 aa, Artificial Sequence
  Non-cyclic GFR-binding peptide
  MOD_RES (4)..(5)..(37)..(39): Xaa is C or S
PPTXXVPTRLNAISILYFDSANNVVLKKYRDMVVESXGXR

SEQ ID NO: 12711 - protein, 36 aa, Artificial Sequence
  Non-cyclic GFR-binding peptide
  MOD_RES (4)..(5): Xaa is C or S
PPTXXVPTRLEPLTILYYDSANNVVEQLSNDMVVES

SEQ ID NO: 12712 - protein, 42 aa, Artificial Sequence
  Non-cyclic GFR-binding peptide
  MOD_RES (4)..(5)..(39)..(41): Xaa is C or S
  MOD_RES (19)..(20)..(21)..(22)..(23): Xaa is A or G
  MOD_RES (24)..(25)..(26)..(27): Xaa is A or G or absent
PPTXXVPTRLEPLPIVYYXXXXXXXXXEQLSNDMVVESXGXR

SEQ ID NO: 12713 - protein, 36 aa, Artificial Sequence
  Non-cyclic GFR-binding peptide
  MOD_RES (1)..(2)..(35): Xaa is C or S
  MOD_RES (16)..(17)..(18)..(19)..(20): Xaa is A or G
  MOD_RES (21)..(22)..(23)..(24): Xaa is A or G or absent
XXVPQDLSPISILFIXXXXXXXXXYKQYEMVVKSXK

SEQ ID NO: 12714 - protein, 35 aa, Artificial Sequence
  Non-cyclic GFR-binding peptide
  MOD_RES (2)..(3)..(34): Xaa is C or S
PXXVPQALEPLTILYYVGRKPKVEQLSNMIVRSXK

SEQ ID NO: 12715 - protein, 36 aa, Artificial Sequence
  Non-cyclic GFR-binding peptide
  MOD_RES (4)..(5): Xaa is C or S
PKAXXVPTELSPISMLFIDENEKVVYKQYEDMVVEG

SEQ ID NO: 12716 - protein, 36 aa, Artificial Sequence
  Non-cyclic GFR-binding peptide
  MOD_RES (6)..(6): Xaa is C or S
VTKPTXAPTKLEPLTVLYYDDSSNVIEQLSNNMVVR

SEQ ID NO: 12717 - protein, 38 aa, Artificial Sequence
  Non-cyclic GFR-binding peptide
  MOD_RES (1)..(2)..(36)..(38): Xaa is C or S
  MOD_RES (16)..(17)..(18)..(19)..(20): Xaa is A or G
  MOD_RES (21)..(22)..(23)..(24): Xaa is A or G or absent
XXVPTRLEPLPIVYYXXXXXXXXXEQLSNDMVVESXGX

SEQ ID NO: 12718 - protein, 31 aa, Artificial Sequence
  Non-cyclic GFR-binding peptide
  MOD_RES (1)..(1): Xaa is C or S
XAPTKLSPISVLFIDDSSNVIYKQYENMVVR

SEQ ID NO: 12719 - protein, 37 aa, Artificial Sequence
  Non-cyclic GFR-binding peptide
  MOD_RES (6)..(7): Xaa is C or S
ASASPXXVPQDLEPLPIVYYVGRTPKVEQLSNMVVKS

SEQ ID NO: 12720 - protein, 42 aa, Artificial Sequence
  Non-cyclic GFR-binding peptide
  MOD_RES (6)..(7)..(41): Xaa is C or S
  MOD_RES (21)..(22)..(23)..(24)..(25): Xaa is A or G
  MOD_RES (26)..(27)..(28)..(29): Xaa is A or G or absent
TVPKPXXAPTQLEPLTVLYYXXXXXXXXXEQLSNNMVVRAXG

SEQ ID NO: 12721 - protein, 34 aa, Artificial Sequence
  Non-cyclic GFR-binding peptide
  MOD_RES (1)..(2)..(34): Xaa is C or S
XXVPTRLNAISILYFDSANNVVLKKYRDMVVESX

SEQ ID NO: 12722 - protein, 35 aa, Artificial Sequence
  Non-cyclic GFR-binding peptide
  MOD_RES (2)..(3): Xaa is C or S
  MOD_RES (17)..(18)..(19)..(20)..(21): Xaa is A or G
  MOD_RES (22)..(23)..(24)..(25): Xaa is A or G or absent
PXXVPQDLEPLPIVYYXXXXXXXXXEQLSNMVVKS

SEQ ID NO: 12723 - protein, 33 aa, Artificial Sequence
  Non-cyclic GFR-binding peptide
  MOD_RES (1)..(33): Xaa is C or S
XVPTELSPISMLFIDENEKVVYKQYEDMVVEGX

SEQ ID NO: 12724 - protein, 39 aa, Artificial Sequence
  Non-cyclic GFR-binding peptide
  MOD_RES (3)..(4)..(38): Xaa is C or S
  MOD_RES (18)..(19)..(20)..(21)..(22): Xaa is A or G
  MOD_RES (23)..(24)..(25)..(26): Xaa is A or G or absent
KPXXAPTQLEPLTVLYYXXXXXXXXXEQLSNNMVVRAXG

SEQ ID NO: 12725 - protein, 32 aa, Artificial Sequence
  Non-cyclic GFR-binding peptide
  MOD_RES (1)..(32): Xaa is C or S
XVPQDLSPISILFIVGRTPKVYKQYEMVVKSX

SEQ ID NO: 12726 - protein, 41 aa, Artificial Sequence
  Non-cyclic GFR-binding peptide
  MOD_RES (5)..(6)..(39)..(41): Xaa is C or S
  MOD_RES (20)..(21)..(22)..(23)..(24): Xaa is A or G
  MOD_RES (25)..(26)..(27)..(28): Xaa is A or G or absent
SAAPXXVPQALEPLTILYYXXXXXXXXXEQLSNMIVRSXKX

SEQ ID NO: 12727 - protein, 35 aa, Artificial Sequence
  Non-cyclic GFR-binding peptide
  MOD_RES (3)..(3): Xaa is C or S
  MOD_RES (17)..(18)..(19)..(20)..(21): Xaa is A or G
  MOD_RES (22)..(23)..(24)..(25): Xaa is A or G or absent
PTXAPTKLEPLPVVYYXXXXXXXXXEQLSNNMVVR

SEQ ID NO: 12728 - protein, 40 aa, Artificial Sequence
  Non-cyclic GFR-binding peptide
  MOD_RES (4)..(5)..(39): Xaa is C or S
  MOD_RES (19)..(20)..(21)..(22)..(23): Xaa is A or G
  MOD_RES (24)..(25)..(26)..(27): Xaa is A or G or absent
PKPXXAPTQLEPLTVLYYXXXXXXXXXEQLSNNMVVRAXG

SEQ ID NO: 12729 - protein, 37 aa, Artificial Sequence
  Non-cyclic GFR-binding peptide
  MOD_RES (4)..(5)..(37): Xaa is C or S
PKPXXAPTQLSPISVLFIDDSSNVIYKQYENMVVRAX

SEQ ID NO: 12730 - protein, 39 aa, Artificial Sequence
  Non-cyclic GFR-binding peptide
  MOD_RES (5)..(6)..(38): Xaa is C or S
IPKAXXVPTELSPISMLFIDEYDKVVYKQYEEMVVEGXG

SEQ ID NO: 12731 - protein, 33 aa, Artificial Sequence
  Non-cyclic GFR-binding peptide
  MOD_RES (1)..(1): Xaa is C or S
  MOD_RES (15)..(16)..(17)..(18)..(19): Xaa is A or G
  MOD_RES (20)..(21)..(22)..(23): Xaa is A or G or absent
XVPTELEPLPMVYYXXXXXXXXXEQLSNDMVVE

SEQ ID NO: 12732 - protein, 36 aa, Artificial Sequence
  Non-cyclic GFR-binding peptide
  MOD_RES (5)..(6): Xaa is C or S
SASPXXVSQDLEPLPIVYYIGKTPKIEQLSNMIVKS

SEQ ID NO: 12733 - protein, 37 aa, Artificial Sequence
  Non-cyclic GFR-binding peptide
  MOD_RES (6)..(7): Xaa is C or S
KIPKAXXVPTELSPISMLFIDENEKVVYKQYEDMVVE

SEQ ID NO: 12734 - protein, 39 aa, Artificial Sequence
  Non-cyclic GFR-binding peptide
  MOD_RES (2)..(3)..(37)..(39): Xaa is C or S
  MOD_RES (17)..(18)..(19)..(20)..(21): Xaa is A or G
  MOD_RES (22)..(23)..(24)..(25): Xaa is A or G or absent
TXXVPTRLEPLTILYYXXXXXXXXXEQLSNDMVVESXGX

SEQ ID NO: 12735 - protein, 34 aa, Artificial Sequence
  Non-cyclic GFR-binding peptide
  MOD_RES (1)..(33): Xaa is C or S
XAPTKLSPISVLFIDDSSNVIYKQYENMVVRSXG

SEQ ID NO: 12736 - protein, 39 aa, Artificial Sequence
  Non-cyclic GFR-binding peptide
  MOD_RES (5)..(39): Xaa is C or S
  MOD_RES (19)..(20)..(21)..(22)..(23): Xaa is A or G
  MOD_RES (24)..(25)..(26)..(27): Xaa is A or G or absent
TKPTXAPTKLEPLPVVYYXXXXXXXXXEQLSNNMVVRSX

SEQ ID NO: 12737 - protein, 36 aa, Artificial Sequence
  Non-cyclic GFR-binding peptide
  MOD_RES (4)..(5): Xaa is C or S
PPTXXVPTRLSAISILYLDSANNVVLKNYQDMVVES

SEQ ID NO: 12738 - protein, 36 aa, Artificial Sequence
  Non-cyclic GFR-binding peptide
  MOD_RES (4)..(5): Xaa is C or S
PKAXXVPTELSPISMLFIDEYDKVVYKQYEEMVVEG

SEQ ID NO: 12739 - protein, 42 aa, Artificial Sequence
  Non-cyclic GFR-binding peptide
  MOD_RES (6)..(7)..(40)..(42): Xaa is C or S
  MOD_RES (21)..(22)..(23)..(24)..(25): Xaa is A or G
  MOD_RES (26)..(27)..(28)..(29): Xaa is A or G or absent
ASASPXXVPQDLSPISILFIXXXXXXXXXYKQYEMVVKSXKX

SEQ ID NO: 12740 - protein, 35 aa, Artificial Sequence
  Non-cyclic GFR-binding peptide
  MOD_RES (34)..(34): Xaa is C or S
  MOD_RES (14)..(15)..(16)..(17)..(18): Xaa is A or G
  MOD_RES (19)..(20)..(21)..(22): Xaa is A or G or absent
VPTELEPLPMVYYXXXXXXXXXEQLSNEMVVEGXG

SEQ ID NO: 12741 - protein, 37 aa, Artificial Sequence
  Non-cyclic GFR-binding peptide
  MOD_RES (4)..(5): Xaa is C or S
  MOD_RES (19)..(20)..(21)..(22)..(23): Xaa is A or G
  MOD_RES (24)..(25)..(26)..(27): Xaa is A or G or absent
PKPXXAPTKLSPISVLFIXXXXXXXXXYKQYENMVVR

SEQ ID NO: 12742 - protein, 36 aa, Artificial Sequence
  Non-cyclic GFR-binding peptide
  MOD_RES (34)..(36): Xaa is C or S
  MOD_RES (14)..(15)..(16)..(17)..(18): Xaa is A or G
  MOD_RES (19)..(20)..(21)..(22): Xaa is A or G or absent
APTKLEPLTVLYYXXXXXXXXXEQLSNNMVVRSXGX

SEQ ID NO: 12743 - protein, 37 aa, Artificial Sequence
  Non-cyclic GFR-binding peptide
  MOD_RES (1)..(35)..(37): Xaa is C or S
  MOD_RES (15)..(16)..(17)..(18)..(19): Xaa is A or G
  MOD_RES (20)..(21)..(22)..(23): Xaa is A or G or absent
XAPTKLSPISVLFIXXXXXXXXXYKQYENMVVRSXGX

SEQ ID NO: 12744 - protein, 31 aa, Artificial Sequence
  Non-cyclic GFR-binding peptide
  MOD_RES (1)..(1): Xaa is C or S
XVPTRLEPLTILYYDSANNVVEQLSNDMVVE

SEQ ID NO: 12745 - protein, 34 aa, Artificial Sequence
  Non-cyclic GFR-binding peptide
  MOD_RES (3)..(4): Xaa is C or S
KPXXAPTQLSPISVLFIDDSSNVIYKQYENMVVR

SEQ ID NO: 12746 - protein, 40 aa, Artificial Sequence
  Non-cyclic GFR-binding peptide
  MOD_RES (5)..(6)..(38)..(40): Xaa is C or S
TPPTXXVPTRLSAISILYLDSANNVVLKNYQDMVVESXGX

SEQ ID NO: 12747 - protein, 34 aa, Artificial Sequence
  Non-cyclic GFR-binding peptide
  MOD_RES (1)..(33): Xaa is C or S
XAPTQLSPISVLFIDDSSNVIYKQYENMVVRAXG

SEQ ID NO: 12748 - protein, 33 aa, Artificial Sequence
  Non-cyclic GFR-binding peptide
  MOD_RES (1)..(33): Xaa is C or S
XAPTKLEPLTVLYYDDSSNVIEQLSNNMVVRSX

SEQ ID NO: 12749 - protein, 43 aa, Artificial Sequence
  Non-cyclic GFR-binding peptide
  MOD_RES (5)..(6)..(40)..(42): Xaa is C or S
  MOD_RES (20)..(21)..(22)..(23)..(24): Xaa is A or G
  MOD_RES (25)..(26)..(27)..(28): Xaa is A or G or absent
TPPTXXVPTRLSAISILYLXXXXXXXXXLKNYQDMVVESXGXR

SEQ ID NO: 12750 - protein, 39 aa, Artificial Sequence
  Non-cyclic GFR-binding peptide
  MOD_RES (5)..(6)..(38): Xaa is C or S
TPPTXXVPTRLNAISILYFDSANNVVLKKYRDMVVESXG

SEQ ID NO: 12751 - protein, 38 aa, Artificial Sequence
  Non-cyclic GFR-binding peptide
  MOD_RES (4)..(5)..(37): Xaa is C or S
PKPXXAPTKLEPLPVVYYDDSSNVIEQLSNNMVVRSXG

SEQ ID NO: 12752 - protein, 43 aa, Artificial Sequence
  Non-cyclic GFR-binding peptide
  MOD_RES (5)..(6)..(40)..(42): Xaa is C or S
  MOD_RES (20)..(21)..(22)..(23)..(24): Xaa is A or G
  MOD_RES (25)..(26)..(27)..(28): Xaa is A or G or absent
VPKPXXAPTKLSPISVLFIXXXXXXXXXYKQYENMVVRSXGXH

SEQ ID NO: 12753 - protein, 34 aa, Artificial Sequence
  Non-cyclic GFR-binding peptide
  MOD_RES (33)..(33): Xaa is C or S
  MOD_RES (14)..(15)..(16)..(17)..(18): Xaa is A or G
  MOD_RES (19)..(20)..(21)..(22): Xaa is A or G or absent
VPQDLEPLPIVYYXXXXXXXXXEQLSNMVVKSXK

SEQ ID NO: 12754 - protein, 35 aa, Artificial Sequence
  Non-cyclic GFR-binding peptide
  MOD_RES (3)..(3): Xaa is C or S
  MOD_RES (17)..(18)..(19)..(20)..(21): Xaa is A or G
  MOD_RES (22)..(23)..(24)..(25): Xaa is A or G or absent
PTXAPTKLEPLTVLYYXXXXXXXXXEQLSNNMVVR

SEQ ID NO: 12755 - protein, 44 aa, Artificial Sequence
  Non-cyclic GFR-binding peptide
  MOD_RES (6)..(7)..(41)..(43): Xaa is C or S
  MOD_RES (21)..(22)..(23)..(24)..(25): Xaa is A or G
  MOD_RES (26)..(27)..(28)..(29): Xaa is A or G or absent
YVPKPXXAPTKLEPLPVVYYXXXXXXXXXEQLSNNMVVRSXGXH

SEQ ID NO: 12756 - protein, 31 aa, Artificial Sequence
  Non-cyclic GFR-binding peptide
  MOD_RES (31)..(31): Xaa is C or S
VPQDLSPISILFIVGRTPKVYKQYEMVVKSX

SEQ ID NO: 12757 - protein, 39 aa, Artificial Sequence
  Non-cyclic GFR-binding peptide
  MOD_RES (4)..(5)..(39): Xaa is C or S
  MOD_RES (19)..(20)..(21)..(22)..(23): Xaa is A or G
  MOD_RES (24)..(25)..(26)..(27): Xaa is A or G or absent
PKPXXAPTQLEPLTVLYYXXXXXXXXXEQLSNNMVVRAX

SEQ ID NO: 12758 - protein, 35 aa, Artificial Sequence
  Non-cyclic GFR-binding peptide
  MOD_RES (1)..(33)..(35): Xaa is C or S
XAPTQLEPLTVLYYDDSSNVIEQLSNNMVVRAXGX

SEQ ID NO: 12759 - protein, 38 aa, Artificial Sequence
  Non-cyclic GFR-binding peptide
  MOD_RES (1)..(2)..(36)..(38): Xaa is C or S
  MOD_RES (16)..(17)..(18)..(19)..(20): Xaa is A or G
  MOD_RES (21)..(22)..(23)..(24): Xaa is A or G or absent
XXVPTRLEPLTILYYXXXXXXXXXEQLSNDMVVESXGX

SEQ ID NO: 12760 - protein, 38 aa, Artificial Sequence
  Non-cyclic GFR-binding peptide
  MOD_RES (5)..(6)..(38): Xaa is C or S
IPKAXXVPTELEPLTMLYYDEYDKVVEQLSNEMVVEGX

SEQ ID NO: 12761 - protein, 40 aa, Artificial Sequence
  Non-cyclic GFR-binding peptide
  MOD_RES (6)..(40): Xaa is C or S
  MOD_RES (20)..(21)..(22)..(23)..(24): Xaa is A or G
  MOD_RES (25)..(26)..(27)..(28): Xaa is A or G or absent
VTKPTXAPTKLEPLTVLYYXXXXXXXXXEQLSNNMVVRSX

SEQ ID NO: 12762 - protein, 37 aa, Artificial Sequence
  Non-cyclic GFR-binding peptide
  MOD_RES (1)..(2)..(34)..(36): Xaa is C or S
XXVPTELEPLPMVYYDENEKVVEQLSNDMVVEGXGXR

SEQ ID NO: 12763 - protein, 34 aa, Artificial Sequence
  Non-cyclic GFR-binding peptide
  MOD_RES (33)..(33): Xaa is C or S
  MOD_RES (14)..(15)..(16)..(17)..(18): Xaa is A or G
  MOD_RES (19)..(20)..(21)..(22): Xaa is A or G or absent
VSQDLSPISILFIXXXXXXXXXYKQYEMIVKSXK

SEQ ID NO: 12764 - protein, 32 aa, Artificial Sequence
  Non-cyclic GFR-binding peptide
  MOD_RES (1)..(32): Xaa is C or S
XVSQDLSPISILFIIGKTPKIYKQYEMIVKSX

SEQ ID NO: 12765 - protein, 39 aa, Artificial Sequence
  Non-cyclic GFR-binding peptide
  MOD_RES (3)..(4)..(38): Xaa is C or S
  MOD_RES (18)..(19)..(20)..(21)..(22): Xaa is A or G
  MOD_RES (23)..(24)..(25)..(26): Xaa is A or G or absent
KPXXAPTQLEPLPVVYYXXXXXXXXXEQLSNNMVVRAXG

SEQ ID NO: 12766 - protein, 42 aa, Artificial Sequence
  Non-cyclic GFR-binding peptide
  MOD_RES (4)..(5)..(39)..(41): Xaa is C or S
  MOD_RES (19)..(20)..(21)..(22)..(23): Xaa is A or G
  MOD_RES (24)..(25)..(26)..(27): Xaa is A or G or absent
PKPXXAPTKLSPISVLFIXXXXXXXXXYKQYENMVVRSXGXH

SEQ ID NO: 12767 - protein, 39 aa, Artificial Sequence
  Non-cyclic GFR-binding peptide
  MOD_RES (6)..(7)..(39): Xaa is C or S
STPPTXXVPTRLSAISILYLDSANNVVLKNYQDMVVESX

SEQ ID NO: 12768 - protein, 36 aa, Artificial Sequence
  Non-cyclic GFR-binding peptide
  MOD_RES (1)..(34)..(36): Xaa is C or S
  MOD_RES (15)..(16)..(17)..(18)..(19): Xaa is A or G
  MOD_RES (20)..(21)..(22)..(23): Xaa is A or G or absent
XVSQDLSPISILFIXXXXXXXXXYKQYEMIVKSXKX

SEQ ID NO: 12769 - protein, 35 aa, Artificial Sequence
  Non-cyclic GFR-binding peptide
  MOD_RES (2)..(3)..(35): Xaa is C or S
AXXVPTELEPLTMLYYDEYDKVVEQLSNEMVVEGX

SEQ ID NO: 12770 - protein, 34 aa, Artificial Sequence
  Non-cyclic GFR-binding peptide
  MOD_RES (1)..(2)..(34): Xaa is C or S
XXVPTELSPISMLFIDEYDKVVYKQYEEMVVEGX

SEQ ID NO: 12771 - protein, 40 aa, Artificial Sequence
  Non-cyclic GFR-binding peptide
  MOD_RES (2)..(3)..(37)..(39): Xaa is C or S
  MOD_RES (17)..(18)..(19)..(20)..(21): Xaa is A or G
  MOD_RES (22)..(23)..(24)..(25): Xaa is A or G or absent
PXXAPTKLSPISVLFIXXXXXXXXXYKQYENMVVRSXGXH

SEQ ID NO: 12772 - protein, 41 aa, Artificial Sequence
  Non-cyclic GFR-binding peptide
  MOD_RES (6)..(7)..(38)..(40): Xaa is C or S
ASASPXXVPQDLSPISILFIVGRTPKVYKQYEMVVKSXKXS

SEQ ID NO: 12773 - protein, 41 aa, Artificial Sequence
  Non-cyclic GFR-binding peptide
  MOD_RES (5)..(39)..(41): Xaa is C or S
  MOD_RES (19)..(20)..(21)..(22)..(23): Xaa is A or G
  MOD_RES (24)..(25)..(26)..(27): Xaa is A or G or absent
TKPTXAPTKLSPISVLFIXXXXXXXXXYKQYENMVVRSXGX

SEQ ID NO: 12774 - protein, 31 aa, Artificial Sequence
  Non-cyclic GFR-binding peptide
  MOD_RES (1)..(1): Xaa is C or S
XVPTELSPISMLFIDEYDKVVYKQYEEMVVE

SEQ ID NO: 12775 - protein, 40 aa, Artificial Sequence
  Non-cyclic GFR-binding peptide
  MOD_RES (3)..(4)..(38)..(40): Xaa is C or S
  MOD_RES (18)..(19)..(20)..(21)..(22): Xaa is A or G
  MOD_RES (23)..(24)..(25)..(26): Xaa is A or G or absent
PTXXVPTRLNAISILYFXXXXXXXXXLKKYRDMVVESXGX

SEQ ID NO: 12776 - protein, 38 aa, Artificial Sequence
  Non-cyclic GFR-binding peptide
  MOD_RES (5)..(6)..(38): Xaa is C or S
IPKAXXVPTELEPLTMLYYDENEKVVEQLSNDMVVEGX

SEQ ID NO: 12777 - protein, 38 aa, Artificial Sequence
  Non-cyclic GFR-binding peptide
  MOD_RES (4)..(5): Xaa is C or S
  MOD_RES (19)..(20)..(21)..(22)..(23): Xaa is A or G
  MOD_RES (24)..(25)..(26)..(27): Xaa is A or G or absent
PKAXXVPTELEPLTMLYYXXXXXXXXXEQLSNEMVVEG

SEQ ID NO: 12778 - protein, 33 aa, Artificial Sequence
  Non-cyclic GFR-binding peptide
  MOD_RES (2)..(3): Xaa is C or S
TXXVPTRLNAISILYFDSANNVVLKKYRDMVVE

SEQ ID NO: 12779 - protein, 35 aa, Artificial Sequence
  Non-cyclic GFR-binding peptide
  MOD_RES (2)..(3)..(34): Xaa is C or S
PXXVPQDLSPISILFIVGRTPKVYKQYEMVVKSXK

SEQ ID NO: 12780 - protein, 38 aa, Artificial Sequence
  Non-cyclic GFR-binding peptide
  MOD_RES (4)..(36)..(38): Xaa is C or S
KPTXAPTKLEPLTVLYYDDSSNVIEQLSNNMVVRSXGX

SEQ ID NO: 12781 - protein, 39 aa, Artificial Sequence
  Non-cyclic GFR-binding peptide
  MOD_RES (5)..(6): Xaa is C or S
  MOD_RES (20)..(21)..(22)..(23)..(24): Xaa is A or G
  MOD_RES (25)..(26)..(27)..(28): Xaa is A or G or absent
IPKAXXVPTELEPLPMVYYXXXXXXXXXEQLSNDMVVEG

SEQ ID NO: 12782 - protein, 35 aa, Artificial Sequence
  Non-cyclic GFR-binding peptide
  MOD_RES (3)..(4): Xaa is C or S
KAXXVPTELEPLTMLYYDENEKVVEQLSNDMVVEG

SEQ ID NO: 12783 - protein, 36 aa, Artificial Sequence
  Non-cyclic GFR-binding peptide
  MOD_RES (3)..(4)..(35): Xaa is C or S
APXXVPQALEPLTILYYVGRKPKVEQLSNMIVRSXK

SEQ ID NO: 12784 - protein, 40 aa, Artificial Sequence
  Non-cyclic GFR-binding peptide
  MOD_RES (5)..(6)..(40): Xaa is C or S
  MOD_RES (20)..(21)..(22)..(23)..(24): Xaa is A or G
  MOD_RES (25)..(26)..(27)..(28): Xaa is A or G or absent
IPKAXXVPTELEPLPMVYYXXXXXXXXXEQLSNEMVVEGX

SEQ ID NO: 12785 - protein, 34 aa, Artificial Sequence
  Non-cyclic GFR-binding peptide
  MOD_RES (1)..(2): Xaa is C or S
  MOD_RES (16)..(17)..(18)..(19)..(20): Xaa is A or G
  MOD_RES (21)..(22)..(23)..(24): Xaa is A or G or absent
XXAPTQLEPLPVVYYXXXXXXXXXEQLSNNMVVR

SEQ ID NO: 12786 - protein, 33 aa, Artificial Sequence
  Non-cyclic GFR-binding peptide
  MOD_RES (1)..(33): Xaa is C or S
XVPTELSPISMLFIDEYDKVVYKQYEEMVVEGX

SEQ ID NO: 12787 - protein, 36 aa, Artificial Sequence
  Non-cyclic GFR-binding peptide
  MOD_RES (3)..(4)..(36): Xaa is C or S
KPXXAPTQLSPISVLFIDDSSNVIYKQYENMVVRAX

SEQ ID NO: 12788 - protein, 33 aa, Artificial Sequence
  Non-cyclic GFR-binding peptide
  MOD_RES (1)..(32): Xaa is C or S
XVSQDLSPISILFIIGKTPKIYKQYEMIVKSXK

SEQ ID NO: 12789 - protein, 40 aa, Artificial Sequence
  Non-cyclic GFR-binding peptide
  MOD_RES (2)..(3)..(37)..(39): Xaa is C or S
  MOD_RES (17)..(18)..(19)..(20)..(21): Xaa is A or G
  MOD_RES (22)..(23)..(24)..(25): Xaa is A or G or absent
AXXVPTELSPISMLFIXXXXXXXXXYKQYEDMVVEGXGXR

SEQ ID NO: 12790 - protein, 34 aa, Artificial Sequence
  Non-cyclic GFR-binding peptide
  MOD_RES (2)..(3): Xaa is C or S
TXXVPTRLEPLPIVYYDSANNVVEQLSNDMVVES

SEQ ID NO: 12791 - protein, 35 aa, Artificial Sequence
  Non-cyclic GFR-binding peptide
  MOD_RES (4)..(5): Xaa is C or S
PKPXXAPTKLSPISVLFIDDSSNVIYKQYENMVVR

SEQ ID NO: 12792 - protein, 39 aa, Artificial Sequence
  Non-cyclic GFR-binding peptide
  MOD_RES (2)..(3)..(37)..(39): Xaa is C or S
  MOD_RES (17)..(18)..(19)..(20)..(21): Xaa is A or G
  MOD_RES (22)..(23)..(24)..(25): Xaa is A or G or absent
PXXAPTKLEPLPVVYYXXXXXXXXXEQLSNNMVVRSXGX

SEQ ID NO: 12793 - protein, 33 aa, Artificial Sequence
  Non-cyclic GFR-binding peptide
  MOD_RES (14)..(15)..(16)..(17)..(18): Xaa is A or G
  MOD_RES (19)..(20)..(21)..(22): Xaa is A or G or absent
VPTELSPISMLFIXXXXXXXXXYKQYEEMVVEG

SEQ ID NO: 12794 - protein, 42 aa, Artificial Sequence
  Non-cyclic GFR-binding peptide
  MOD_RES (4)..(5)..(39)..(41): Xaa is C or S
  MOD_RES (19)..(20)..(21)..(22)..(23): Xaa is A or G
  MOD_RES (24)..(25)..(26)..(27): Xaa is A or G or absent
PKAXXVPTELSPISMLFIXXXXXXXXXYKQYEDMVVEGXGXR

SEQ ID NO: 12795 - protein, 39 aa, Artificial Sequence
  Non-cyclic GFR-binding peptide
  MOD_RES (6)..(7): Xaa is C or S
  MOD_RES (21)..(22)..(23)..(24)..(25): Xaa is A or G
  MOD_RES (26)..(27)..(28)..(29): Xaa is A or G or absent
ASAAPXXVPQALEPLTILYYXXXXXXXXXEQLSNMIVRS

SEQ ID NO: 12796 - protein, 41 aa, Artificial Sequence
  Non-cyclic GFR-binding peptide
  MOD_RES (6)..(7)..(39)..(41): Xaa is C or S
KIPKAXXVPTELSPISMLFIDENEKVVYKQYEDMVVEGXGX

SEQ ID NO: 12797 - protein, 39 aa, Artificial Sequence
  Non-cyclic GFR-binding peptide
  MOD_RES (3)..(4)..(36)..(38): Xaa is C or S
KPXXAPTKLSPISVLFIDDSSNVIYKQYENMVVRSXGXH

SEQ ID NO: 12798 - protein, 39 aa, Artificial Sequence
  Non-cyclic GFR-binding peptide
  MOD_RES (6)..(7)..(39): Xaa is C or S
KIPKAXXVPTELEPLTMLYYDENEKVVEQLSNDMVVEGX

SEQ ID NO: 12799 - protein, 43 aa, Artificial Sequence
  Non-cyclic GFR-binding peptide
  MOD_RES (6)..(7)..(41)..(43): Xaa is C or S
  MOD_RES (21)..(22)..(23)..(24)..(25): Xaa is A or G
  MOD_RES (26)..(27)..(28)..(29): Xaa is A or G or absent
YVPKPXXAPTKLEPLPVVYYXXXXXXXXXEQLSNNMVVRSXGX

SEQ ID NO: 12800 - protein, 34 aa, Artificial Sequence
  Non-cyclic GFR-binding peptide
  MOD_RES (31)..(33): Xaa is C or S
VPQDLSPISILFIVGRTPKVYKQYEMVVKSXKXS

SEQ ID NO: 12801 - protein, 43 aa, Artificial Sequence
  Non-cyclic GFR-binding peptide
  MOD_RES (5)..(6)..(40)..(42): Xaa is C or S
  MOD_RES (20)..(21)..(22)..(23)..(24): Xaa is A or G
  MOD_RES (25)..(26)..(27)..(28): Xaa is A or G or absent
TPPTXXVPTRLEPLPIVYYXXXXXXXXXEQLSNDMVVESXGXR

SEQ ID NO: 12802 - protein, 33 aa, Artificial Sequence
  Non-cyclic GFR-binding peptide
  MOD_RES (33)..(33): Xaa is C or S
  MOD_RES (14)..(15)..(16)..(17)..(18): Xaa is A or G
  MOD_RES (19)..(20)..(21)..(22): Xaa is A or G or absent
VSQDLSPISILFIXXXXXXXXXYKQYEMIVKSX

SEQ ID NO: 12803 - protein, 40 aa, Artificial Sequence
  Non-cyclic GFR-binding peptide
  MOD_RES (4)..(5)..(37)..(39): Xaa is C or S
PKPXXAPTKLEPLTVLYYDDSSNVIEQLSNNMVVRSXGXH

SEQ ID NO: 12804 - protein, 37 aa, Artificial Sequence
  Non-cyclic GFR-binding peptide
  MOD_RES (4)..(5)..(37): Xaa is C or S
PKAXXVPTELSPISMLFIDEYDKVVYKQYEEMVVEGX

SEQ ID NO: 12805 - protein, 35 aa, Artificial Sequence
  Non-cyclic GFR-binding peptide
  MOD_RES (1)..(34): Xaa is C or S
  MOD_RES (15)..(16)..(17)..(18)..(19): Xaa is A or G
  MOD_RES (20)..(21)..(22)..(23): Xaa is A or G or absent
XVSQDLEPLPIVYYXXXXXXXXXEQLSNMIVKSXK

SEQ ID NO: 12806 - protein, 34 aa, Artificial Sequence
  Non-cyclic GFR-binding peptide
  MOD_RES (1)..(2)..(34): Xaa is C or S
XXAPTKLSPISVLFIDDSSNVIYKQYENMVVRSX

SEQ ID NO: 12807 - protein, 40 aa, Artificial Sequence
  Non-cyclic GFR-binding peptide
  MOD_RES (2)..(3)..(37)..(39): Xaa is C or S
  MOD_RES (17)..(18)..(19)..(20)..(21): Xaa is A or G
  MOD_RES (22)..(23)..(24)..(25): Xaa is A or G or absent
PXXAPTKLEPLTVLYYXXXXXXXXXEQLSNNMVVRSXGXH

SEQ ID NO: 12808 - protein, 40 aa, Artificial Sequence
  Non-cyclic GFR-binding peptide
  MOD_RES (4)..(38)..(40): Xaa is C or S
  MOD_RES (18)..(19)..(20)..(21)..(22): Xaa is A or G
  MOD_RES (23)..(24)..(25)..(26): Xaa is A or G or absent
KPTXAPTKLEPLTVLYYXXXXXXXXXEQLSNNMVVRSXGX

SEQ ID NO: 12809 - protein, 34 aa, Artificial Sequence
  Non-cyclic GFR-binding peptide
  MOD_RES (1)..(2): Xaa is C or S
  MOD_RES (16)..(17)..(18)..(19)..(20): Xaa is A or G
  MOD_RES (21)..(22)..(23)..(24): Xaa is A or G or absent
XXAPTKLEPLPVVYYXXXXXXXXXEQLSNNMVVR

SEQ ID NO: 12810 - protein, 37 aa, Artificial Sequence
  Non-cyclic GFR-binding peptide
  MOD_RES (2)..(3)..(37): Xaa is C or S
  MOD_RES (17)..(18)..(19)..(20)..(21): Xaa is A or G
  MOD_RES (22)..(23)..(24)..(25): Xaa is A or G or absent
PXXAPTKLEPLTVLYYXXXXXXXXXEQLSNNMVVRSX

SEQ ID NO: 12811 - protein, 36 aa, Artificial Sequence
  Non-cyclic GFR-binding peptide
  MOD_RES (4)..(5)..(36): Xaa is C or S
ASPXXVPQDLEPLPIVYYVGRTPKVEQLSNMVVKSX

SEQ ID NO: 12812 - protein, 37 aa, Artificial Sequence
  Non-cyclic GFR-binding peptide
  MOD_RES (2)..(36): Xaa is C or S
  MOD_RES (16)..(17)..(18)..(19)..(20): Xaa is A or G
  MOD_RES (21)..(22)..(23)..(24): Xaa is A or G or absent
TXAPTKLEPLPVVYYXXXXXXXXXEQLSNNMVVRSXG

SEQ ID NO: 12813 - protein, 32 aa, Artificial Sequence
  Non-cyclic GFR-binding peptide
  MOD_RES (1)..(2): Xaa is C or S
XXVSQDLSPISILFIIGKTPKIYKQYEMIVKS

SEQ ID NO: 12814 - protein, 37 aa, Artificial Sequence
  Non-cyclic GFR-binding peptide
  MOD_RES (2)..(3)..(36): Xaa is C or S
  MOD_RES (17)..(18)..(19)..(20)..(21): Xaa is A or G
  MOD_RES (22)..(23)..(24)..(25): Xaa is A or G or absent
PXXVPQALSPISILFIXXXXXXXXXYKQYEMIVRSXK

SEQ ID NO: 12815 - protein, 32 aa, Artificial Sequence
  Non-cyclic GFR-binding peptide
  MOD_RES (14)..(15)..(16)..(17)..(18): Xaa is A or G
  MOD_RES (19)..(20)..(21)..(22): Xaa is A or G or absent
VPQDLEPLPIVYYXXXXXXXXXEQLSNMVVKS

SEQ ID NO: 12816 - protein, 36 aa, Artificial Sequence
  Non-cyclic GFR-binding peptide
  MOD_RES (2)..(3): Xaa is C or S
  MOD_RES (17)..(18)..(19)..(20)..(21): Xaa is A or G
  MOD_RES (22)..(23)..(24)..(25): Xaa is A or G or absent
TXXVPTRLEPLTILYYXXXXXXXXXEQLSNDMVVES

SEQ ID NO: 12817 - protein, 31 aa, Artificial Sequence
  Non-cyclic GFR-binding peptide
APTQLEPLPVVYYDDSSNVIEQLSNNMVVRA

SEQ ID NO: 12818 - protein, 34 aa, Artificial Sequence
  Non-cyclic GFR-binding peptide
  MOD_RES (32)..(34): Xaa is C or S
APTKLEPLPVVYYDDSSNVIEQLSNNMVVRSXGX

SEQ ID NO: 12819 - protein, 37 aa, Artificial Sequence
  Non-cyclic GFR-binding peptide
  MOD_RES (2)..(3)..(35)..(37): Xaa is C or S
TXXVPTRLNAISILYFDSANNVVLKKYRDMVVESXGX

SEQ ID NO: 12820 - protein, 38 aa, Artificial Sequence
  Non-cyclic GFR-binding peptide
  MOD_RES (7)..(7): Xaa is C or S
HVTKPTXAPTKLSPISVLFIDDSSNVIYKQYENMVVRS

SEQ ID NO: 12821 - protein, 39 aa, Artificial Sequence
  Non-cyclic GFR-binding peptide
  MOD_RES (6)..(7): Xaa is C or S
  MOD_RES (21)..(22)..(23)..(24)..(25): Xaa is A or G
  MOD_RES (26)..(27)..(28)..(29): Xaa is A or G or absent
YVPKPXXAPTKLEPLTVLYYXXXXXXXXXEQLSNNMVVR

SEQ ID NO: 12822 - protein, 36 aa, Artificial Sequence
  Non-cyclic GFR-binding peptide
  MOD_RES (34)..(36): Xaa is C or S
  MOD_RES (14)..(15)..(16)..(17)..(18): Xaa is A or G
  MOD_RES (19)..(20)..(21)..(22): Xaa is A or G or absent
VPTRLNAISILYFXXXXXXXXXLKKYRDMVVESXGX

SEQ ID NO: 12823 - protein, 41 aa, Artificial Sequence
  Non-cyclic GFR-binding peptide
  MOD_RES (3)..(4)..(38)..(40): Xaa is C or S
  MOD_RES (18)..(19)..(20)..(21)..(22): Xaa is A or G
  MOD_RES (23)..(24)..(25)..(26): Xaa is A or G or absent
PTXXVPTRLEPLTILYYXXXXXXXXXEQLSNDMVVESXGXR

SEQ ID NO: 12824 - protein, 33 aa, Artificial Sequence
  Non-cyclic GFR-binding peptide
  MOD_RES (32)..(32): Xaa is C or S
VPTRLNAISILYFDSANNVVLKKYRDMVVESXG

SEQ ID NO: 12825 - protein, 38 aa, Artificial Sequence
  Non-cyclic GFR-binding peptide
  MOD_RES (4)..(5): Xaa is C or S
  MOD_RES (19)..(20)..(21)..(22)..(23): Xaa is A or G
  MOD_RES (24)..(25)..(26)..(27): Xaa is A or G or absent
PKAXXVPTELEPLTMLYYXXXXXXXXXEQLSNDMVVEG

SEQ ID NO: 12826 - protein, 33 aa, Artificial Sequence
  Non-cyclic GFR-binding peptide
  MOD_RES (1)..(33): Xaa is C or S
XVPTELEPLPMVYYDENEKVVEQLSNDMVVEGX

SEQ ID NO: 12827 - protein, 33 aa, Artificial Sequence
  Non-cyclic GFR-binding peptide
  MOD_RES (31)..(33): Xaa is C or S
VPQDLEPLPIVYYVGRTPKVEQLSNMVVKSXKX

SEQ ID NO: 12828 - protein, 42 aa, Artificial Sequence
  Non-cyclic GFR-binding peptide
  MOD_RES (6)..(7)..(41): Xaa is C or S
  MOD_RES (21)..(22)..(23)..(24)..(25): Xaa is A or G
  MOD_RES (26)..(27)..(28)..(29): Xaa is A or G or absent
STPPTXXVPTRLSAISILYLXXXXXXXXXLKNYQDMVVESXG

SEQ ID NO: 12829 - protein, 33 aa, Artificial Sequence
  Non-cyclic GFR-binding peptide
  MOD_RES (2)..(3): Xaa is C or S
PXXAPTKLEPLPVVYYDDSSNVIEQLSNNMVVR

SEQ ID NO: 12830 - protein, 43 aa, Artificial Sequence
  Non-cyclic GFR-binding peptide
  MOD_RES (5)..(6)..(40)..(42): Xaa is C or S
  MOD_RES (20)..(21)..(22)..(23)..(24): Xaa is A or G
  MOD_RES (25)..(26)..(27)..(28): Xaa is A or G or absent
IPKAXXVPTELEPLPMVYYXXXXXXXXXEQLSNDMVVEGXGXR

SEQ ID NO: 12831 - protein, 33 aa, Artificial Sequence
  Non-cyclic GFR-binding peptide
  MOD_RES (32)..(32): Xaa is C or S
VPTELSPISMLFIDENEKVVYKQYEDMVVEGXG

SEQ ID NO: 12832 - protein, 39 aa, Artificial Sequence
  Non-cyclic GFR-binding peptide
  MOD_RES (4)..(5)..(39): Xaa is C or S
  MOD_RES (19)..(20)..(21)..(22)..(23): Xaa is A or G
  MOD_RES (24)..(25)..(26)..(27): Xaa is A or G or absent
PKPXXAPTKLEPLTVLYYXXXXXXXXXEQLSNNMVVRSX

SEQ ID NO: 12833 - protein, 38 aa, Artificial Sequence
  Non-cyclic GFR-binding peptide
  MOD_RES (1)..(35)..(37): Xaa is C or S
  MOD_RES (15)..(16)..(17)..(18)..(19): Xaa is A or G
  MOD_RES (20)..(21)..(22)..(23): Xaa is A or G or absent
XVPTELEPLTMLYYXXXXXXXXXEQLSNEMVVEGXGXR

SEQ ID NO: 12834 - protein, 36 aa, Artificial Sequence
  Non-cyclic GFR-binding peptide
  MOD_RES (4)..(5): Xaa is C or S
PKPXXAPTKLEPLTVLYYDDSSNVIEQLSNNMVVRS

SEQ ID NO: 12835 - protein, 35 aa, Artificial Sequence
  Non-cyclic GFR-binding peptide
  MOD_RES (3)..(35): Xaa is C or S
PTXAPTKLEPLTVLYYDDSSNVIEQLSNNMVVRSX

SEQ ID NO: 12836 - protein, 42 aa, Artificial Sequence
  Non-cyclic GFR-binding peptide
  MOD_RES (6)..(7)..(39)..(41): Xaa is C or S
SIPKAXXVPTELEPLTMLYYDEYDKVVEQLSNEMVVEGXGXR

SEQ ID NO: 12837 - protein, 38 aa, Artificial Sequence
  Non-cyclic GFR-binding peptide
  MOD_RES (6)..(7): Xaa is C or S
YVPKPXXAPTKLSPISVLFIDDSSNVIYKQYENMVVRS

SEQ ID NO: 12838 - protein, 38 aa, Artificial Sequence
  Non-cyclic GFR-binding peptide
  MOD_RES (1)..(35)..(37): Xaa is C or S
  MOD_RES (15)..(16)..(17)..(18)..(19): Xaa is A or G
  MOD_RES (20)..(21)..(22)..(23): Xaa is A or G or absent
XVPTELSPISMLFIXXXXXXXXXYKQYEDMVVEGXGXR

SEQ ID NO: 12839 - protein, 32 aa, Artificial Sequence
  Non-cyclic GFR-binding peptide
  MOD_RES (14)..(15)..(16)..(17)..(18): Xaa is A or G
  MOD_RES (19)..(20)..(21)..(22): Xaa is A or G or absent
APTQLSPISVLFIXXXXXXXXXYKQYENMVVR

SEQ ID NO: 12840 - protein, 39 aa, Artificial Sequence
  Non-cyclic GFR-binding peptide
  MOD_RES (3)..(4)..(36)..(38): Xaa is C or S
KAXXVPTELEPLPMVYYDENEKVVEQLSNDMVVEGXGXR

SEQ ID NO: 12841 - protein, 34 aa, Artificial Sequence
  Non-cyclic GFR-binding peptide
  MOD_RES (1)..(2)..(34): Xaa is C or S
XXVPTRLEPLTILYYDSANNVVEQLSNDMVVESX

SEQ ID NO: 12842 - protein, 35 aa, Artificial Sequence
  Non-cyclic GFR-binding peptide
  MOD_RES (2)..(3): Xaa is C or S
  MOD_RES (17)..(18)..(19)..(20)..(21): Xaa is A or G
  MOD_RES (22)..(23)..(24)..(25): Xaa is A or G or absent
PXXVPQALSPISILFIXXXXXXXXXYKQYEMIVRS

SEQ ID NO: 12843 - protein, 38 aa, Artificial Sequence
  Non-cyclic GFR-binding peptide
  MOD_RES (6)..(7)..(38): Xaa is C or S
ASASPXXVPQDLEPLPIVYYVGRTPKVEQLSNMVVKSX

SEQ ID NO: 12844 - protein, 40 aa, Artificial Sequence
  Non-cyclic GFR-binding peptide
  MOD_RES (5)..(37)..(39): Xaa is C or S
TKPTXAPTKLEPLTVLYYDDSSNVIEQLSNNMVVRSXGXH

SEQ ID NO: 12845 - protein, 30 aa, Artificial Sequence
  Non-cyclic GFR-binding peptide
APTQLSPISVLFIDDSSNVIYKQYENMVVR

SEQ ID NO: 12846 - protein, 37 aa, Artificial Sequence
  Non-cyclic GFR-binding peptide
  MOD_RES (6)..(7): Xaa is C or S
TVPKPXXAPTQLSPISVLFIDDSSNVIYKQYENMVVR

SEQ ID NO: 12847 - protein, 39 aa, Artificial Sequence
  Non-cyclic GFR-binding peptide
  MOD_RES (4)..(38): Xaa is C or S
  MOD_RES (18)..(19)..(20)..(21)..(22): Xaa is A or G
  MOD_RES (23)..(24)..(25)..(26): Xaa is A or G or absent
KPTXAPTKLSPISVLFIXXXXXXXXXYKQYENMVVRSXG

SEQ ID NO: 12848 - protein, 41 aa, Artificial Sequence
  Non-cyclic GFR-binding peptide
  MOD_RES (6)..(7)..(39)..(41): Xaa is C or S
YVPKPXXAPTKLEPLTVLYYDDSSNVIEQLSNNMVVRSXGX

SEQ ID NO: 12849 - protein, 34 aa, Artificial Sequence
  Non-cyclic GFR-binding peptide
  MOD_RES (1)..(33): Xaa is C or S
XVPTELSPISMLFIDENEKVVYKQYEDMVVEGXG

SEQ ID NO: 12850 - protein, 36 aa, Artificial Sequence
  Non-cyclic GFR-binding peptide
  MOD_RES (3)..(4): Xaa is C or S
  MOD_RES (18)..(19)..(20)..(21)..(22): Xaa is A or G
  MOD_RES (23)..(24)..(25)..(26): Xaa is A or G or absent
APXXVPQALSPISILFIXXXXXXXXXYKQYEMIVRS

SEQ ID NO: 12851 - protein, 41 aa, Artificial Sequence
  Non-cyclic GFR-binding peptide
  MOD_RES (6)..(7)..(39)..(41): Xaa is C or S
YVPKPXXAPTKLSPISVLFIDDSSNVIYKQYENMVVRSXGX

SEQ ID NO: 12852 - protein, 38 aa, Artificial Sequence
  Non-cyclic GFR-binding peptide
  MOD_RES (2)..(3)..(36)..(38): Xaa is C or S
  MOD_RES (17)..(18)..(19)..(20)..(21): Xaa is A or G
  MOD_RES (22)..(23)..(24)..(25): Xaa is A or G or absent
PXXVPQALEPLTILYYXXXXXXXXXEQLSNMIVRSXKX

SEQ ID NO: 12853 - protein, 42 aa, Artificial Sequence
  Non-cyclic GFR-binding peptide
  MOD_RES (4)..(5)..(39)..(41): Xaa is C or S
  MOD_RES (19)..(20)..(21)..(22)..(23): Xaa is A or G
  MOD_RES (24)..(25)..(26)..(27): Xaa is A or G or absent
PKAXXVPTELSPISMLFIXXXXXXXXXYKQYEEMVVEGXGXR

SEQ ID NO: 12854 - protein, 36 aa, Artificial Sequence
  Non-cyclic GFR-binding peptide
  MOD_RES (34)..(36): Xaa is C or S
  MOD_RES (14)..(15)..(16)..(17)..(18): Xaa is A or G
  MOD_RES (19)..(20)..(21)..(22): Xaa is A or G or absent
APTKLSPISVLFIXXXXXXXXXYKQYENMVVRSXGX

SEQ ID NO: 12855 - protein, 36 aa, Artificial Sequence
  Non-cyclic GFR-binding peptide
  MOD_RES (3)..(4): Xaa is C or S
  MOD_RES (18)..(19)..(20)..(21)..(22): Xaa is A or G
  MOD_RES (23)..(24)..(25)..(26): Xaa is A or G or absent
PTXXVPTRLNAISILYFXXXXXXXXXLKKYRDMVVE

SEQ ID NO: 12856 - protein, 33 aa, Artificial Sequence
  Non-cyclic GFR-binding peptide
  MOD_RES (2)..(3): Xaa is C or S
PXXVPQALSPISILFIVGRKPKVYKQYEMIVRS

SEQ ID NO: 12857 - protein, 30 aa, Artificial Sequence
  Non-cyclic GFR-binding peptide
VPTRLNAISILYFDSANNVVLKKYRDMVVE

SEQ ID NO: 12858 - protein, 39 aa, Artificial Sequence
  Non-cyclic GFR-binding peptide
  MOD_RES (5)..(6)..(37)..(39): Xaa is C or S
SASPXXVSQDLEPLPIVYYIGKTPKIEQLSNMIVKSXKX

SEQ ID NO: 12859 - protein, 38 aa, Artificial Sequence
  Non-cyclic GFR-binding peptide
  MOD_RES (3)..(4)..(38): Xaa is C or S
  MOD_RES (18)..(19)..(20)..(21)..(22): Xaa is A or G
  MOD_RES (23)..(24)..(25)..(26): Xaa is A or G or absent
KPXXAPTQLEPLTVLYYXXXXXXXXXEQLSNNMVVRAX

SEQ ID NO: 12860 - protein, 38 aa, Artificial Sequence
  Non-cyclic GFR-binding peptide
  MOD_RES (4)..(38): Xaa is C or S
  MOD_RES (18)..(19)..(20)..(21)..(22): Xaa is A or G
  MOD_RES (23)..(24)..(25)..(26): Xaa is A or G or absent
KPTXAPTKLSPISVLFIXXXXXXXXXYKQYENMVVRSX

SEQ ID NO: 12861 - protein, 36 aa, Artificial Sequence
  Non-cyclic GFR-binding peptide
  MOD_RES (1)..(35): Xaa is C or S
  MOD_RES (15)..(16)..(17)..(18)..(19): Xaa is A or G
  MOD_RES (20)..(21)..(22)..(23): Xaa is A or G or absent
XVPTELSPISMLFIXXXXXXXXXYKQYEDMVVEGXG

SEQ ID NO: 12862 - protein, 41 aa, Artificial Sequence
  Non-cyclic GFR-binding peptide
  MOD_RES (6)..(7)..(39)..(41): Xaa is C or S
STPPTXXVPTRLEPLTILYYDSANNVVEQLSNDMVVESXGX

SEQ ID NO: 12863 - protein, 34 aa, Artificial Sequence
  Non-cyclic GFR-binding peptide
  MOD_RES (33)..(33): Xaa is C or S
  MOD_RES (14)..(15)..(16)..(17)..(18): Xaa is A or G
  MOD_RES (19)..(20)..(21)..(22): Xaa is A or G or absent
VPQALEPLTILYYXXXXXXXXXEQLSNMIVRSXK

SEQ ID NO: 12864 - protein, 37 aa, Artificial Sequence
  Non-cyclic GFR-binding peptide
  MOD_RES (6)..(7): Xaa is C or S
KIPKAXXVPTELEPLPMVYYDENEKVVEQLSNDMVVE

SEQ ID NO: 12865 - protein, 33 aa, Artificial Sequence
  Non-cyclic GFR-binding peptide
  MOD_RES (1)..(2): Xaa is C or S
XXVPTELEPLTMLYYDENEKVVEQLSNDMVVEG

SEQ ID NO: 12866 - protein, 38 aa, Artificial Sequence
  Non-cyclic GFR-binding peptide
  MOD_RES (5)..(5): Xaa is C or S
  MOD_RES (19)..(20)..(21)..(22)..(23): Xaa is A or G
  MOD_RES (24)..(25)..(26)..(27): Xaa is A or G or absent
TKPTXAPTKLEPLTVLYYXXXXXXXXXEQLSNNMVVRS

SEQ ID NO: 12867 - protein, 35 aa, Artificial Sequence
  Non-cyclic GFR-binding peptide
  MOD_RES (1)..(2)..(33)..(35): Xaa is C or S
XXVPQDLSPISILFIVGRTPKVYKQYEMVVKSXKX

SEQ ID NO: 12868 - protein, 36 aa, Artificial Sequence
  Non-cyclic GFR-binding peptide
  MOD_RES (1)..(35): Xaa is C or S
  MOD_RES (15)..(16)..(17)..(18)..(19): Xaa is A or G
  MOD_RES (20)..(21)..(22)..(23): Xaa is A or G or absent
XAPTKLSPISVLFIXXXXXXXXXYKQYENMVVRSXG

SEQ ID NO: 12869 - protein, 42 aa, Artificial Sequence
  Non-cyclic GFR-binding peptide
  MOD_RES (4)..(5)..(39)..(41): Xaa is C or S
  MOD_RES (19)..(20)..(21)..(22)..(23): Xaa is A or G
  MOD_RES (24)..(25)..(26)..(27): Xaa is A or G or absent
PPTXXVPTRLNAISILYFXXXXXXXXXLKKYRDMVVESXGXR

SEQ ID NO: 12870 - protein, 41 aa, Artificial Sequence
  Non-cyclic GFR-binding peptide
  MOD_RES (6)..(7)..(41): Xaa is C or S
  MOD_RES (21)..(22)..(23)..(24)..(25): Xaa is A or G
  MOD_RES (26)..(27)..(28)..(29): Xaa is A or G or absent
YVPKPXXAPTKLEPLTVLYYXXXXXXXXXEQLSNNMVVRSX

SEQ ID NO: 12871 - protein, 35 aa, Artificial Sequence
  Non-cyclic GFR-binding peptide
  MOD_RES (2)..(3)..(34): Xaa is C or S
PXXVPQALSPISILFIVGRKPKVYKQYEMIVRSXK

SEQ ID NO: 12872 - protein, 31 aa, Artificial Sequence
  Non-cyclic GFR-binding peptide
VPTRLNAISILYFDSANNVVLKKYRDMVVES

SEQ ID NO: 12873 - protein, 36 aa, Artificial Sequence
  Non-cyclic GFR-binding peptide
  MOD_RES (1)..(2)..(33)..(35): Xaa is C or S
XXVPQDLEPLPIVYYVGRTPKVEQLSNMVVKSXKXS

SEQ ID NO: 12874 - protein, 34 aa, Artificial Sequence
  Non-cyclic GFR-binding peptide
  MOD_RES (1)..(34): Xaa is C or S
  MOD_RES (15)..(16)..(17)..(18)..(19): Xaa is A or G
  MOD_RES (20)..(21)..(22)..(23): Xaa is A or G or absent
XVPQDLSPISILFIXXXXXXXXXYKQYEMVVKSX

SEQ ID NO: 12875 - protein, 33 aa, Artificial Sequence
  Non-cyclic GFR-binding peptide
  MOD_RES (1)..(33): Xaa is C or S
XAPTQLEPLTVLYYDDSSNVIEQLSNNMVVRAX

SEQ ID NO: 12876 - protein, 39 aa, Artificial Sequence
  Non-cyclic GFR-binding peptide
  MOD_RES (7)..(39): Xaa is C or S
HVTKPTXAPTKLEPLPVVYYDDSSNVIEQLSNNMVVRSX

SEQ ID NO: 12877 - protein, 39 aa, Artificial Sequence
  Non-cyclic GFR-binding peptide
  MOD_RES (4)..(5)..(39): Xaa is C or S
  MOD_RES (19)..(20)..(21)..(22)..(23): Xaa is A or G
  MOD_RES (24)..(25)..(26)..(27): Xaa is A or G or absent
PKPXXAPTQLSPISVLFIXXXXXXXXXYKQYENMVVRAX

SEQ ID NO: 12878 - protein, 39 aa, Artificial Sequence
  Non-cyclic GFR-binding peptide
  MOD_RES (5)..(6): Xaa is C or S
  MOD_RES (20)..(21)..(22)..(23)..(24): Xaa is A or G
  MOD_RES (25)..(26)..(27)..(28): Xaa is A or G or absent
IPKAXXVPTELSPISMLFIXXXXXXXXXYKQYEDMVVEG

SEQ ID NO: 12879 - protein, 36 aa, Artificial Sequence
  Non-cyclic GFR-binding peptide
  MOD_RES (5)..(6): Xaa is C or S
VPKPXXAPTKLEPLTVLYYDDSSNVIEQLSNNMVVR

SEQ ID NO: 12880 - protein, 37 aa, Artificial Sequence
  Non-cyclic GFR-binding peptide
  MOD_RES (5)..(6): Xaa is C or S
TPPTXXVPTRLEPLTILYYDSANNVVEQLSNDMVVES

SEQ ID NO: 12881 - protein, 39 aa, Artificial Sequence
  Non-cyclic GFR-binding peptide
  MOD_RES (5)..(6): Xaa is C or S
  MOD_RES (20)..(21)..(22)..(23)..(24): Xaa is A or G
  MOD_RES (25)..(26)..(27)..(28): Xaa is A or G or absent
TPPTXXVPTRLSAISILYLXXXXXXXXXLKNYQDMVVES

SEQ ID NO: 12882 - protein, 38 aa, Artificial Sequence
  Non-cyclic GFR-binding peptide
  MOD_RES (6)..(7): Xaa is C or S
SIPKAXXVPTELEPLTMLYYDEYDKVVEQLSNEMVVEG

SEQ ID NO: 12883 - protein, 37 aa, Artificial Sequence
  Non-cyclic GFR-binding peptide
  MOD_RES (3)..(4)..(36): Xaa is C or S
PTXXVPTRLEPLPIVYYDSANNVVEQLSNDMVVESXG

SEQ ID NO: 12884 - protein, 37 aa, Artificial Sequence
  Non-cyclic GFR-binding peptide
  MOD_RES (4)..(5)..(37): Xaa is C or S
PKPXXAPTKLEPLTVLYYDDSSNVIEQLSNNMVVRSX

SEQ ID NO: 12885 - protein, 43 aa, Artificial Sequence
  Non-cyclic GFR-binding peptide
  MOD_RES (6)..(7)..(41)..(43): Xaa is C or S
  MOD_RES (21)..(22)..(23)..(24)..(25): Xaa is A or G
  MOD_RES (26)..(27)..(28)..(29): Xaa is A or G or absent
SIPKAXXVPTELSPISMLFIXXXXXXXXXYKQYEEMVVEGXGX

SEQ ID NO: 12886 - protein, 37 aa, Artificial Sequence
  Non-cyclic GFR-binding peptide
  MOD_RES (3)..(4)..(35)..(37): Xaa is C or S
SPXXVSQDLEPLPIVYYIGKTPKIEQLSNMIVKSXKX

SEQ ID NO: 12887 - protein, 41 aa, Artificial Sequence
  Non-cyclic GFR-binding peptide
  MOD_RES (3)..(4)..(38)..(40): Xaa is C or S
  MOD_RES (18)..(19)..(20)..(21)..(22): Xaa is A or G
  MOD_RES (23)..(24)..(25)..(26): Xaa is A or G or absent
KPXXAPTKLEPLPVVYYXXXXXXXXXEQLSNNMVVRSXGXH

SEQ ID NO: 12888 - protein, 33 aa, Artificial Sequence
  Non-cyclic GFR-binding peptide
  MOD_RES (14)..(15)..(16)..(17)..(18): Xaa is A or G
  MOD_RES (19)..(20)..(21)..(22): Xaa is A or G or absent
VPTELEPLPMVYYXXXXXXXXXEQLSNEMVVEG

SEQ ID NO: 12889 - protein, 44 aa, Artificial Sequence
  Non-cyclic GFR-binding peptide
  MOD_RES (6)..(7)..(41)..(43): Xaa is C or S
  MOD_RES (21)..(22)..(23)..(24)..(25): Xaa is A or G
  MOD_RES (26)..(27)..(28)..(29): Xaa is A or G or absent
STPPTXXVPTRLEPLPIVYYXXXXXXXXXEQLSNDMVVESXGXR

SEQ ID NO: 12890 - protein, 39 aa, Artificial Sequence
  Non-cyclic GFR-binding peptide
  MOD_RES (5)..(6): Xaa is C or S
  MOD_RES (20)..(21)..(22)..(23)..(24): Xaa is A or G
  MOD_RES (25)..(26)..(27)..(28): Xaa is A or G or absent
TPPTXXVPTRLNAISILYFXXXXXXXXXLKKYRDMVVES

SEQ ID NO: 12891 - protein, 39 aa, Artificial Sequence
  Non-cyclic GFR-binding peptide
  MOD_RES (4)..(36)..(38): Xaa is C or S
KPTXAPTKLEPLPVVYYDDSSNVIEQLSNNMVVRSXGXH

SEQ ID NO: 12892 - protein, 41 aa, Artificial Sequence
  Non-cyclic GFR-binding peptide
  MOD_RES (4)..(5)..(38)..(40): Xaa is C or S
  MOD_RES (19)..(20)..(21)..(22)..(23): Xaa is A or G
  MOD_RES (24)..(25)..(26)..(27): Xaa is A or G or absent
ASPXXVPQDLSPISILFIXXXXXXXXXYKQYEMVVKSXKXS

SEQ ID NO: 12893 - protein, 36 aa, Artificial Sequence
  Non-cyclic GFR-binding peptide
  MOD_RES (5)..(6): Xaa is C or S
VPKPXXAPTQLEPLPVVYYDDSSNVIEQLSNNMVVR

SEQ ID NO: 12894 - protein, 35 aa, Artificial Sequence
  Non-cyclic GFR-binding peptide
  MOD_RES (1)..(2): Xaa is C or S
  MOD_RES (16)..(17)..(18)..(19)..(20): Xaa is A or G
  MOD_RES (21)..(22)..(23)..(24): Xaa is A or G or absent
XXAPTKLEPLTVLYYXXXXXXXXXEQLSNNMVVRS

SEQ ID NO: 12895 - protein, 39 aa, Artificial Sequence
  Non-cyclic GFR-binding peptide
  MOD_RES (4)..(5)..(36)..(38): Xaa is C or S
ASPXXVSQDLSPISILFIIGKTPKIYKQYEMIVKSXKXS

SEQ ID NO: 12896 - protein, 35 aa, Artificial Sequence
  Non-cyclic GFR-binding peptide
  MOD_RES (1)..(2): Xaa is C or S
  MOD_RES (16)..(17)..(18)..(19)..(20): Xaa is A or G
  MOD_RES (21)..(22)..(23)..(24): Xaa is A or G or absent
XXVPTRLSAISILYLXXXXXXXXXLKNYQDMVVES

SEQ ID NO: 12897 - protein, 40 aa, Artificial Sequence
  Non-cyclic GFR-binding peptide
  MOD_RES (3)..(4)..(38)..(40): Xaa is C or S
  MOD_RES (18)..(19)..(20)..(21)..(22): Xaa is A or G
  MOD_RES (23)..(24)..(25)..(26): Xaa is A or G or absent
KPXXAPTKLEPLPVVYYXXXXXXXXXEQLSNNMVVRSXGX

SEQ ID NO: 12898 - protein, 32 aa, Artificial Sequence
  Non-cyclic GFR-binding peptide
  MOD_RES (1)..(2): Xaa is C or S
XXVPTELEPLTMLYYDEYDKVVEQLSNEMVVE

SEQ ID NO: 12899 - protein, 39 aa, Artificial Sequence
  Non-cyclic GFR-binding peptide
  MOD_RES (1)..(2)..(36)..(38): Xaa is C or S
  MOD_RES (16)..(17)..(18)..(19)..(20): Xaa is A or G
  MOD_RES (21)..(22)..(23)..(24): Xaa is A or G or absent
XXVPTELSPISMLFIXXXXXXXXXYKQYEEMVVEGXGXR

SEQ ID NO: 12900 - protein, 39 aa, Artificial Sequence
  Non-cyclic GFR-binding peptide
  MOD_RES (3)..(4)..(36)..(38): Xaa is C or S
KAXXVPTELEPLPMVYYDEYDKVVEQLSNEMVVEGXGXR

SEQ ID NO: 12901 - protein, 35 aa, Artificial Sequence
  Non-cyclic GFR-binding peptide
  MOD_RES (32)..(34): Xaa is C or S
VPTELEPLTMLYYDEYDKVVEQLSNEMVVEGXGXR

SEQ ID NO: 12902 - protein, 38 aa, Artificial Sequence
  Non-cyclic GFR-binding peptide
  MOD_RES (4)..(5)..(38): Xaa is C or S
  MOD_RES (19)..(20)..(21)..(22)..(23): Xaa is A or G
  MOD_RES (24)..(25)..(26)..(27): Xaa is A or G or absent
AAPXXVPQALEPLTILYYXXXXXXXXXEQLSNMIVRSX

SEQ ID NO: 12903 - protein, 36 aa, Artificial Sequence
  Non-cyclic GFR-binding peptide
  MOD_RES (1)..(35): Xaa is C or S
  MOD_RES (15)..(16)..(17)..(18)..(19): Xaa is A or G
  MOD_RES (20)..(21)..(22)..(23): Xaa is A or G or absent
XVPTELEPLTMLYYXXXXXXXXXEQLSNDMVVEGXG

SEQ ID NO: 12904 - protein, 42 aa, Artificial Sequence
  Non-cyclic GFR-binding peptide
  MOD_RES (6)..(7)..(39)..(41): Xaa is C or S
STPPTXXVPTRLNAISILYFDSANNVVLKKYRDMVVESXGXR

SEQ ID NO: 12905 - protein, 36 aa, Artificial Sequence
  Non-cyclic GFR-binding peptide
  MOD_RES (1)..(33)..(35): Xaa is C or S
XAPTQLEPLPVVYYDDSSNVIEQLSNNMVVRAXGXH

SEQ ID NO: 12906 - protein, 37 aa, Artificial Sequence
  Non-cyclic GFR-binding peptide
  MOD_RES (5)..(6)..(37): Xaa is C or S
SASPXXVSQDLEPLPIVYYIGKTPKIEQLSNMIVKSX

SEQ ID NO: 12907 - protein, 31 aa, Artificial Sequence
  Non-cyclic GFR-binding peptide
  MOD_RES (1)..(1): Xaa is C or S
XVSQDLEPLPIVYYIGKTPKIEQLSNMIVKS

SEQ ID NO: 12908 - protein, 37 aa, Artificial Sequence
  Non-cyclic GFR-binding peptide
  MOD_RES (1)..(2)..(36): Xaa is C or S
  MOD_RES (16)..(17)..(18)..(19)..(20): Xaa is A or G
  MOD_RES (21)..(22)..(23)..(24): Xaa is A or G or absent
XXVPTELEPLPMVYYXXXXXXXXXEQLSNEMVVEGXG

SEQ ID NO: 12909 - protein, 39 aa, Artificial Sequence
  Non-cyclic GFR-binding peptide
  MOD_RES (5)..(6)..(38): Xaa is C or S
TPPTXXVPTRLSAISILYLDSANNVVLKNYQDMVVESXG

SEQ ID NO: 12910 - protein, 38 aa, Artificial Sequence
  Non-cyclic GFR-binding peptide
  MOD_RES (5)..(6): Xaa is C or S
  MOD_RES (20)..(21)..(22)..(23)..(24): Xaa is A or G
  MOD_RES (25)..(26)..(27)..(28): Xaa is A or G or absent
VPKPXXAPTQLEPLPVVYYXXXXXXXXXEQLSNNMVVR

SEQ ID NO: 12911 - protein, 35 aa, Artificial Sequence
  Non-cyclic GFR-binding peptide
  MOD_RES (32)..(34): Xaa is C or S
VPTELEPLTMLYYDENEKVVEQLSNDMVVEGXGXR

SEQ ID NO: 12912 - protein, 36 aa, Artificial Sequence
  Non-cyclic GFR-binding peptide
  MOD_RES (2)..(36): Xaa is C or S
  MOD_RES (16)..(17)..(18)..(19)..(20): Xaa is A or G
  MOD_RES (21)..(22)..(23)..(24): Xaa is A or G or absent
TXAPTKLSPISVLFIXXXXXXXXXYKQYENMVVRSX

SEQ ID NO: 12913 - protein, 32 aa, Artificial Sequence
  Non-cyclic GFR-binding peptide
  MOD_RES (1)..(2): Xaa is C or S
XXVSQDLEPLPIVYYIGKTPKIEQLSNMIVKS

SEQ ID NO: 12914 - protein, 32 aa, Artificial Sequence
  Non-cyclic GFR-binding peptide
  MOD_RES (32)..(32): Xaa is C or S
VPTRLEPLPIVYYDSANNVVEQLSNDMVVESX

SEQ ID NO: 12915 - protein, 35 aa, Artificial Sequence
  Non-cyclic GFR-binding peptide
  MOD_RES (3)..(3): Xaa is C or S
  MOD_RES (17)..(18)..(19)..(20)..(21): Xaa is A or G
  MOD_RES (22)..(23)..(24)..(25): Xaa is A or G or absent
PTXAPTKLSPISVLFIXXXXXXXXXYKQYENMVVR

SEQ ID NO: 12916 - protein, 39 aa, Artificial Sequence
  Non-cyclic GFR-binding peptide
  MOD_RES (4)..(5)..(37)..(39): Xaa is C or S
PKPXXAPTQLEPLTVLYYDDSSNVIEQLSNNMVVRAXGX

SEQ ID NO: 12917 - protein, 36 aa, Artificial Sequence
  Non-cyclic GFR-binding peptide
  MOD_RES (5)..(5): Xaa is C or S
TKPTXAPTKLEPLTVLYYDDSSNVIEQLSNNMVVRS

SEQ ID NO: 12918 - protein, 34 aa, Artificial Sequence
  Non-cyclic GFR-binding peptide
  MOD_RES (2)..(34): Xaa is C or S
TXAPTKLEPLPVVYYDDSSNVIEQLSNNMVVRSX

SEQ ID NO: 12919 - protein, 35 aa, Artificial Sequence
  Non-cyclic GFR-binding peptide
  MOD_RES (4)..(5): Xaa is C or S
PKAXXVPTELEPLPMVYYDEYDKVVEQLSNEMVVE

SEQ ID NO: 12920 - protein, 40 aa, Artificial Sequence
  Non-cyclic GFR-binding peptide
  MOD_RES (3)..(37)..(39): Xaa is C or S
  MOD_RES (17)..(18)..(19)..(20)..(21): Xaa is A or G
  MOD_RES (22)..(23)..(24)..(25): Xaa is A or G or absent
PTXAPTKLSPISVLFIXXXXXXXXXYKQYENMVVRSXGXH

SEQ ID NO: 12921 - protein, 33 aa, Artificial Sequence
  Non-cyclic GFR-binding peptide
  MOD_RES (14)..(15)..(16)..(17)..(18): Xaa is A or G
  MOD_RES (19)..(20)..(21)..(22): Xaa is A or G or absent
APTKLEPLPVVYYXXXXXXXXXEQLSNNMVVRS

SEQ ID NO: 12922 - protein, 43 aa, Artificial Sequence
  Non-cyclic GFR-binding peptide
  MOD_RES (6)..(7)..(41)..(43): Xaa is C or S
  MOD_RES (21)..(22)..(23)..(24)..(25): Xaa is A or G
  MOD_RES (26)..(27)..(28)..(29): Xaa is A or G or absent
TVPKPXXAPTQLSPISVLFIXXXXXXXXXYKQYENMVVRAXGX

SEQ ID NO: 12923 - protein, 37 aa, Artificial Sequence
  Non-cyclic GFR-binding peptide
  MOD_RES (2)..(3)..(34)..(36): Xaa is C or S
PXXVSQDLSPISILFIIGKTPKIYKQYEMIVKSXKXS

SEQ ID NO: 12924 - protein, 39 aa, Artificial Sequence
  Non-cyclic GFR-binding peptide
  MOD_RES (4)..(5)..(37)..(39): Xaa is C or S
PKPXXAPTQLSPISVLFIDDSSNVIYKQYENMVVRAXGX

SEQ ID NO: 12925 - protein, 39 aa, Artificial Sequence
  Non-cyclic GFR-binding peptide
  MOD_RES (2)..(3)..(37)..(39): Xaa is C or S
  MOD_RES (17)..(18)..(19)..(20)..(21): Xaa is A or G
  MOD_RES (22)..(23)..(24)..(25): Xaa is A or G or absent
AXXVPTELEPLPMVYYXXXXXXXXXEQLSNEMVVEGXGX

SEQ ID NO: 12926 - protein, 37 aa, Artificial Sequence
  Non-cyclic GFR-binding peptide
  MOD_RES (2)..(3)..(37): Xaa is C or S
  MOD_RES (17)..(18)..(19)..(20)..(21): Xaa is A or G
  MOD_RES (22)..(23)..(24)..(25): Xaa is A or G or absent
TXXVPTRLSAISILYLXXXXXXXXXLKNYQDMVVESX

SEQ ID NO: 12927 - protein, 33 aa, Artificial Sequence
  Non-cyclic GFR-binding peptide
  MOD_RES (14)..(15)..(16)..(17)..(18): Xaa is A or G
  MOD_RES (19)..(20)..(21)..(22): Xaa is A or G or absent
VPTRLNAISILYFXXXXXXXXXLKKYRDMVVES

SEQ ID NO: 12928 - protein, 31 aa, Artificial Sequence
  Non-cyclic GFR-binding peptide
  MOD_RES (1)..(1): Xaa is C or S
XVPQDLSPISILFIVGRTPKVYKQYEMVVKS

SEQ ID NO: 12929 - protein, 36 aa, Artificial Sequence
  Non-cyclic GFR-binding peptide
  MOD_RES (34)..(36): Xaa is C or S
  MOD_RES (14)..(15)..(16)..(17)..(18): Xaa is A or G
  MOD_RES (19)..(20)..(21)..(22): Xaa is A or G or absent
VPTELEPLTMLYYXXXXXXXXXEQLSNEMVVEGXGX

SEQ ID NO: 12930 - protein, 36 aa, Artificial Sequence
  Non-cyclic GFR-binding peptide
  MOD_RES (5)..(6): Xaa is C or S
VPKPXXAPTQLEPLTVLYYDDSSNVIEQLSNNMVVR

SEQ ID NO: 12931 - protein, 33 aa, Artificial Sequence
  Non-cyclic GFR-binding peptide
  MOD_RES (14)..(15)..(16)..(17)..(18): Xaa is A or G
  MOD_RES (19)..(20)..(21)..(22): Xaa is A or G or absent
VPTRLSAISILYLXXXXXXXXXLKNYQDMVVES

SEQ ID NO: 12932 - protein, 33 aa, Artificial Sequence
  Non-cyclic GFR-binding peptide
  MOD_RES (2)..(2): Xaa is C or S
TXAPTKLEPLTVLYYDDSSNVIEQLSNNMVVRS

SEQ ID NO: 12933 - protein, 36 aa, Artificial Sequence
  Non-cyclic GFR-binding peptide
  MOD_RES (4)..(36): Xaa is C or S
KPTXAPTKLEPLPVVYYDDSSNVIEQLSNNMVVRSX

SEQ ID NO: 12934 - protein, 37 aa, Artificial Sequence
  Non-cyclic GFR-binding peptide
  MOD_RES (1)..(2)..(36): Xaa is C or S
  MOD_RES (16)..(17)..(18)..(19)..(20): Xaa is A or G
  MOD_RES (21)..(22)..(23)..(24): Xaa is A or G or absent
XXVPTRLEPLTILYYXXXXXXXXXEQLSNDMVVESXG

SEQ ID NO: 12935 - protein, 40 aa, Artificial Sequence
  Non-cyclic GFR-binding peptide
  MOD_RES (6)..(7): Xaa is C or S
  MOD_RES (21)..(22)..(23)..(24)..(25): Xaa is A or G
  MOD_RES (26)..(27)..(28)..(29): Xaa is A or G or absent
STPPTXXVPTRLNAISILYFXXXXXXXXXLKKYRDMVVES

SEQ ID NO: 12936 - protein, 38 aa, Artificial Sequence
  Non-cyclic GFR-binding peptide
  MOD_RES (5)..(37): Xaa is C or S
TKPTXAPTKLEPLTVLYYDDSSNVIEQLSNNMVVRSXG

SEQ ID NO: 12937 - protein, 33 aa, Artificial Sequence
  Non-cyclic GFR-binding peptide
  MOD_RES (2)..(3): Xaa is C or S
PXXAPTQLSPISVLFIDDSSNVIYKQYENMVVR

SEQ ID NO: 12938 - protein, 40 aa, Artificial Sequence
  Non-cyclic GFR-binding peptide
  MOD_RES (5)..(6)..(38)..(40): Xaa is C or S
IPKAXXVPTELEPLTMLYYDEYDKVVEQLSNEMVVEGXGX

SEQ ID NO: 12939 - protein, 32 aa, Artificial Sequence
  Non-cyclic GFR-binding peptide
  MOD_RES (1)..(1): Xaa is C or S
XVPTELSPISMLFIDENEKVVYKQYEDMVVEG

SEQ ID NO: 12940 - protein, 33 aa, Artificial Sequence
  Non-cyclic GFR-binding peptide
  MOD_RES (14)..(15)..(16)..(17)..(18): Xaa is A or G
  MOD_RES (19)..(20)..(21)..(22): Xaa is A or G or absent
APTKLEPLTVLYYXXXXXXXXXEQLSNNMVVRS

SEQ ID NO: 12941 - protein, 39 aa, Artificial Sequence
  Non-cyclic GFR-binding peptide
  MOD_RES (5)..(6)..(39): Xaa is C or S
  MOD_RES (20)..(21)..(22)..(23)..(24): Xaa is A or G
  MOD_RES (25)..(26)..(27)..(28): Xaa is A or G or absent
SASPXXVSQDLEPLPIVYYXXXXXXXXXEQLSNMIVKSX

SEQ ID NO: 12942 - protein, 35 aa, Artificial Sequence
  Non-cyclic GFR-binding peptide
  MOD_RES (3)..(4)..(35): Xaa is C or S
SPXXVSQDLSPISILFIIGKTPKIYKQYEMIVKSX

SEQ ID NO: 12943 - protein, 38 aa, Artificial Sequence
  Non-cyclic GFR-binding peptide
  MOD_RES (4)..(5)..(36)..(38): Xaa is C or S
ASPXXVPQDLEPLPIVYYVGRTPKVEQLSNMVVKSXKX

SEQ ID NO: 12944 - protein, 35 aa, Artificial Sequence
  Non-cyclic GFR-binding peptide
  MOD_RES (3)..(4): Xaa is C or S
KPXXAPTQLSPISVLFIDDSSNVIYKQYENMVVRA

SEQ ID NO: 12945 - protein, 40 aa, Artificial Sequence
  Non-cyclic GFR-binding peptide
  MOD_RES (5)..(6)..(39): Xaa is C or S
  MOD_RES (20)..(21)..(22)..(23)..(24): Xaa is A or G
  MOD_RES (25)..(26)..(27)..(28): Xaa is A or G or absent
SASPXXVSQDLSPISILFIXXXXXXXXXYKQYEMIVKSXK

SEQ ID NO: 12946 - protein, 37 aa, Artificial Sequence
  Non-cyclic GFR-binding peptide
  MOD_RES (4)..(5)..(37): Xaa is C or S
PKPXXAPTKLEPLPVVYYDDSSNVIEQLSNNMVVRSX

SEQ ID NO: 12947 - protein, 40 aa, Artificial Sequence
  Non-cyclic GFR-binding peptide
  MOD_RES (3)..(4)..(38)..(40): Xaa is C or S
  MOD_RES (18)..(19)..(20)..(21)..(22): Xaa is A or G
  MOD_RES (23)..(24)..(25)..(26): Xaa is A or G or absent
KPXXAPTQLSPISVLFIXXXXXXXXXYKQYENMVVRAXGX

SEQ ID NO: 12948 - protein, 36 aa, Artificial Sequence
  Non-cyclic GFR-binding peptide
  MOD_RES (2)..(3): Xaa is C or S
  MOD_RES (17)..(18)..(19)..(20)..(21): Xaa is A or G
  MOD_RES (22)..(23)..(24)..(25): Xaa is A or G or absent
AXXVPTELEPLTMLYYXXXXXXXXXEQLSNEMVVEG

SEQ ID NO: 12949 - protein, 35 aa, Artificial Sequence
  Non-cyclic GFR-binding peptide
  MOD_RES (3)..(35): Xaa is C or S
PTXAPTKLSPISVLFIDDSSNVIYKQYENMVVRSX

SEQ ID NO: 12950 - protein, 35 aa, Artificial Sequence
  Non-cyclic GFR-binding peptide
  MOD_RES (34)..(34): Xaa is C or S
  MOD_RES (14)..(15)..(16)..(17)..(18): Xaa is A or G
  MOD_RES (19)..(20)..(21)..(22): Xaa is A or G or absent
APTQLEPLPVVYYXXXXXXXXXEQLSNNMVVRAXG

SEQ ID NO: 12951 - protein, 42 aa, Artificial Sequence
  Non-cyclic GFR-binding peptide
  MOD_RES (7)..(41): Xaa is C or S
  MOD_RES (21)..(22)..(23)..(24)..(25): Xaa is A or G
  MOD_RES (26)..(27)..(28)..(29): Xaa is A or G or absent
HVTKPTXAPTKLEPLTVLYYXXXXXXXXXEQLSNNMVVRSXG

SEQ ID NO: 12952 - protein, 40 aa, Artificial Sequence
  Non-cyclic GFR-binding peptide
  MOD_RES (5)..(6)..(38)..(40): Xaa is C or S
IPKAXXVPTELSPISMLFIDEYDKVVYKQYEEMVVEGXGX

SEQ ID NO: 12953 - protein, 38 aa, Artificial Sequence
  Non-cyclic GFR-binding peptide
  MOD_RES (6)..(7): Xaa is C or S
SIPKAXXVPTELEPLPMVYYDEYDKVVEQLSNEMVVEG

SEQ ID NO: 12954 - protein, 39 aa, Artificial Sequence
  Non-cyclic GFR-binding peptide
  MOD_RES (6)..(7): Xaa is C or S
  MOD_RES (21)..(22)..(23)..(24)..(25): Xaa is A or G
  MOD_RES (26)..(27)..(28)..(29): Xaa is A or G or absent
YVPKPXXAPTKLEPLPVVYYXXXXXXXXXEQLSNNMVVR

SEQ ID NO: 12955 - protein, 40 aa, Artificial Sequence
  Non-cyclic GFR-binding peptide
  MOD_RES (5)..(6)..(40): Xaa is C or S
  MOD_RES (20)..(21)..(22)..(23)..(24): Xaa is A or G
  MOD_RES (25)..(26)..(27)..(28): Xaa is A or G or absent
IPKAXXVPTELEPLTMLYYXXXXXXXXXEQLSNEMVVEGX

SEQ ID NO: 12956 - protein, 34 aa, Artificial Sequence
  Non-cyclic GFR-binding peptide
  MOD_RES (1)..(1): Xaa is C or S
  MOD_RES (15)..(16)..(17)..(18)..(19): Xaa is A or G
  MOD_RES (20)..(21)..(22)..(23): Xaa is A or G or absent
XVPTRLEPLPIVYYXXXXXXXXXEQLSNDMVVES

SEQ ID NO: 12957 - protein, 40 aa, Artificial Sequence
  Non-cyclic GFR-binding peptide
  MOD_RES (6)..(7): Xaa is C or S
  MOD_RES (21)..(22)..(23)..(24)..(25): Xaa is A or G
  MOD_RES (26)..(27)..(28)..(29): Xaa is A or G or absent
STPPTXXVPTRLSAISILYLXXXXXXXXXLKNYQDMVVES

SEQ ID NO: 12958 - protein, 37 aa, Artificial Sequence
  Non-cyclic GFR-binding peptide
  MOD_RES (4)..(5)..(37): Xaa is C or S
PKAXXVPTELEPLTMLYYDEYDKVVEQLSNEMVVEGX

SEQ ID NO: 12959 - protein, 31 aa, Artificial Sequence
  Non-cyclic GFR-binding peptide
VPTRLEPLTILYYDSANNVVEQLSNDMVVES

SEQ ID NO: 12960 - protein, 38 aa, Artificial Sequence
  Non-cyclic GFR-binding peptide
  MOD_RES (5)..(6)..(38): Xaa is C or S
IPKAXXVPTELEPLPMVYYDENEKVVEQLSNDMVVEGX

SEQ ID NO: 12961 - protein, 42 aa, Artificial Sequence
  Non-cyclic GFR-binding peptide
  MOD_RES (6)..(7)..(39)..(41): Xaa is C or S
TVPKPXXAPTQLSPISVLFIDDSSNVIYKQYENMVVRAXGXH

SEQ ID NO: 12962 - protein, 35 aa, Artificial Sequence
  Non-cyclic GFR-binding peptide
  MOD_RES (4)..(5): Xaa is C or S
AAPXXVPQALSPISILFIVGRKPKVYKQYEMIVRS

SEQ ID NO: 12963 - protein, 33 aa, Artificial Sequence
  Non-cyclic GFR-binding peptide
  MOD_RES (2)..(3): Xaa is C or S
TXXVPTRLEPLPIVYYDSANNVVEQLSNDMVVE

SEQ ID NO: 12964 - protein, 36 aa, Artificial Sequence
  Non-cyclic GFR-binding peptide
  MOD_RES (2)..(3)..(35): Xaa is C or S
TXXVPTRLEPLPIVYYDSANNVVEQLSNDMVVESXG

SEQ ID NO: 12965 - protein, 38 aa, Artificial Sequence
  Non-cyclic GFR-binding peptide
  MOD_RES (4)..(5)..(38): Xaa is C or S
  MOD_RES (19)..(20)..(21)..(22)..(23): Xaa is A or G
  MOD_RES (24)..(25)..(26)..(27): Xaa is A or G or absent
ASPXXVSQDLEPLPIVYYXXXXXXXXXEQLSNMIVKSX

SEQ ID NO: 12966 - protein, 34 aa, Artificial Sequence
  Non-cyclic GFR-binding peptide
  MOD_RES (1)..(1): Xaa is C or S
  MOD_RES (15)..(16)..(17)..(18)..(19): Xaa is A or G
  MOD_RES (20)..(21)..(22)..(23): Xaa is A or G or absent
XVPTRLEPLTILYYXXXXXXXXXEQLSNDMVVES

SEQ ID NO: 12967 - protein, 35 aa, Artificial Sequence
  Non-cyclic GFR-binding peptide
  MOD_RES (1)..(2): Xaa is C or S
  MOD_RES (16)..(17)..(18)..(19)..(20): Xaa is A or G
  MOD_RES (21)..(22)..(23)..(24): Xaa is A or G or absent
XXVPTRLEPLPIVYYXXXXXXXXXEQLSNDMVVES

SEQ ID NO: 12968 - protein, 36 aa, Artificial Sequence
  Non-cyclic GFR-binding peptide
  MOD_RES (2)..(3)..(35): Xaa is C or S
AXXVPTELEPLTMLYYDEYDKVVEQLSNEMVVEGXG

SEQ ID NO: 12969 - protein, 36 aa, Artificial Sequence
  Non-cyclic GFR-binding peptide
  MOD_RES (3)..(4): Xaa is C or S
  MOD_RES (18)..(19)..(20)..(21)..(22): Xaa is A or G
  MOD_RES (23)..(24)..(25)..(26): Xaa is A or G or absent
KAXXVPTELSPISMLFIXXXXXXXXXYKQYEEMVVE

SEQ ID NO: 12970 - protein, 36 aa, Artificial Sequence
  Non-cyclic GFR-binding peptide
  MOD_RES (5)..(5): Xaa is C or S
TKPTXAPTKLSPISVLFIDDSSNVIYKQYENMVVRS

SEQ ID NO: 12971 - protein, 40 aa, Artificial Sequence
  Non-cyclic GFR-binding peptide
  MOD_RES (5)..(6)..(37)..(39): Xaa is C or S
SASPXXVPQDLSPISILFIVGRTPKVYKQYEMVVKSXKXS

SEQ ID NO: 12972 - protein, 40 aa, Artificial Sequence
  Non-cyclic GFR-binding peptide
  MOD_RES (6)..(7)..(39): Xaa is C or S
STPPTXXVPTRLEPLPIVYYDSANNVVEQLSNDMVVESXG

SEQ ID NO: 12973 - protein, 34 aa, Artificial Sequence
  Non-cyclic GFR-binding peptide
  MOD_RES (1)..(2): Xaa is C or S
  MOD_RES (16)..(17)..(18)..(19)..(20): Xaa is A or G
  MOD_RES (21)..(22)..(23)..(24): Xaa is A or G or absent
XXAPTKLEPLTVLYYXXXXXXXXXEQLSNNMVVR

SEQ ID NO: 12974 - protein, 34 aa, Artificial Sequence
  Non-cyclic GFR-binding peptide
  MOD_RES (2)..(3): Xaa is C or S
PXXAPTQLSPISVLFIDDSSNVIYKQYENMVVRA

SEQ ID NO: 12975 - protein, 38 aa, Artificial Sequence
  Non-cyclic GFR-binding peptide
  MOD_RES (4)..(5)..(37): Xaa is C or S
PPTXXVPTRLNAISILYFDSANNVVLKKYRDMVVESXG

SEQ ID NO: 12976 - protein, 37 aa, Artificial Sequence
  Non-cyclic GFR-binding peptide
  MOD_RES (1)..(2)..(34)..(36): Xaa is C or S
XXVPTELSPISMLFIDENEKVVYKQYEDMVVEGXGXR

SEQ ID NO: 12977 - protein, 31 aa, Artificial Sequence
  Non-cyclic GFR-binding peptide
VPTELEPLPMVYYDEYDKVVEQLSNEMVVEG

SEQ ID NO: 12978 - protein, 43 aa, Artificial Sequence
  Non-cyclic GFR-binding peptide
  MOD_RES (6)..(7)..(40)..(42): Xaa is C or S
  MOD_RES (21)..(22)..(23)..(24)..(25): Xaa is A or G
  MOD_RES (26)..(27)..(28)..(29): Xaa is A or G or absent
ASASPXXVPQDLEPLPIVYYXXXXXXXXXEQLSNMVVKSXKXS

SEQ ID NO: 12979 - protein, 39 aa, Artificial Sequence
  Non-cyclic GFR-binding peptide
  MOD_RES (6)..(7): Xaa is C or S
  MOD_RES (21)..(22)..(23)..(24)..(25): Xaa is A or G
  MOD_RES (26)..(27)..(28)..(29): Xaa is A or G or absent
SIPKAXXVPTELEPLPMVYYXXXXXXXXXEQLSNEMVVE

SEQ ID NO: 12980 - protein, 39 aa, Artificial Sequence
  Non-cyclic GFR-binding peptide
  MOD_RES (6)..(7): Xaa is C or S
  MOD_RES (21)..(22)..(23)..(24)..(25): Xaa is A or G
  MOD_RES (26)..(27)..(28)..(29): Xaa is A or G or absent
ASAAPXXVPQALSPISILFIXXXXXXXXXYKQYEMIVRS

SEQ ID NO: 12981 - protein, 34 aa, Artificial Sequence
  Non-cyclic GFR-binding peptide
  MOD_RES (3)..(4): Xaa is C or S
PTXXVPTRLSAISILYLDSANNVVLKNYQDMVVE

SEQ ID NO: 12982 - protein, 37 aa, Artificial Sequence
  Non-cyclic GFR-binding peptide
  MOD_RES (5)..(6): Xaa is C or S
IPKAXXVPTELSPISMLFIDENEKVVYKQYEDMVVEG

SEQ ID NO: 12983 - protein, 31 aa, Artificial Sequence
  Non-cyclic GFR-binding peptide
  MOD_RES (1)..(1): Xaa is C or S
XVPTELEPLTMLYYDENEKVVEQLSNDMVVE

SEQ ID NO: 12984 - protein, 38 aa, Artificial Sequence
  Non-cyclic GFR-binding peptide
  MOD_RES (1)..(2)..(36)..(38): Xaa is C or S
  MOD_RES (16)..(17)..(18)..(19)..(20): Xaa is A or G
  MOD_RES (21)..(22)..(23)..(24): Xaa is A or G or absent
XXVPTELEPLTMLYYXXXXXXXXXEQLSNDMVVEGXGX

SEQ ID NO: 12985 - protein, 36 aa, Artificial Sequence
  Non-cyclic GFR-binding peptide
  MOD_RES (1)..(2)..(34)..(36): Xaa is C or S
XXAPTKLEPLTVLYYDDSSNVIEQLSNNMVVRSXGX

SEQ ID NO: 12986 - protein, 41 aa, Artificial Sequence
  Non-cyclic GFR-binding peptide
  MOD_RES (5)..(39)..(41): Xaa is C or S
  MOD_RES (19)..(20)..(21)..(22)..(23): Xaa is A or G
  MOD_RES (24)..(25)..(26)..(27): Xaa is A or G or absent
TKPTXAPTKLEPLTVLYYXXXXXXXXXEQLSNNMVVRSXGX

SEQ ID NO: 12987 - protein, 34 aa, Artificial Sequence
  Non-cyclic GFR-binding peptide
  MOD_RES (2)..(3)..(34): Xaa is C or S
PXXVSQDLEPLPIVYYIGKTPKIEQLSNMIVKSX

SEQ ID NO: 12988 - protein, 38 aa, Artificial Sequence
  Non-cyclic GFR-binding peptide
  MOD_RES (3)..(4)..(37): Xaa is C or S
  MOD_RES (18)..(19)..(20)..(21)..(22): Xaa is A or G
  MOD_RES (23)..(24)..(25)..(26): Xaa is A or G or absent
SPXXVSQDLSPISILFIXXXXXXXXXYKQYEMIVKSXK

SEQ ID NO: 12989 - protein, 37 aa, Artificial Sequence
  Non-cyclic GFR-binding peptide
  MOD_RES (6)..(7): Xaa is C or S
ASASPXXVSQDLSPISILFIIGKTPKIYKQYEMIVKS

SEQ ID NO: 12990 - protein, 33 aa, Artificial Sequence
  Non-cyclic GFR-binding peptide
  MOD_RES (1)..(1): Xaa is C or S
  MOD_RES (15)..(16)..(17)..(18)..(19): Xaa is A or G
  MOD_RES (20)..(21)..(22)..(23): Xaa is A or G or absent
XVPTRLEPLPIVYYXXXXXXXXXEQLSNDMVVE

SEQ ID NO: 12991 - protein, 39 aa, Artificial Sequence
  Non-cyclic GFR-binding peptide
  MOD_RES (5)..(6)..(39): Xaa is C or S
  MOD_RES (20)..(21)..(22)..(23)..(24): Xaa is A or G
  MOD_RES (25)..(26)..(27)..(28): Xaa is A or G or absent
SASPXXVPQDLEPLPIVYYXXXXXXXXXEQLSNMVVKSX

SEQ ID NO: 12992 - protein, 36 aa, Artificial Sequence
  Non-cyclic GFR-binding peptide
  MOD_RES (1)..(35): Xaa is C or S
  MOD_RES (15)..(16)..(17)..(18)..(19): Xaa is A or G
  MOD_RES (20)..(21)..(22)..(23): Xaa is A or G or absent
XAPTKLEPLPVVYYXXXXXXXXXEQLSNNMVVRSXG

SEQ ID NO: 12993 - protein, 35 aa, Artificial Sequence
  Non-cyclic GFR-binding peptide
  MOD_RES (2)..(3): Xaa is C or S
  MOD_RES (17)..(18)..(19)..(20)..(21): Xaa is A or G
  MOD_RES (22)..(23)..(24)..(25): Xaa is A or G or absent
PXXAPTKLSPISVLFIXXXXXXXXXYKQYENMVVR

SEQ ID NO: 12994 - protein, 37 aa, Artificial Sequence
  Non-cyclic GFR-binding peptide
  MOD_RES (1)..(2)..(34)..(36): Xaa is C or S
XXVPTELEPLTMLYYDENEKVVEQLSNDMVVEGXGXR

SEQ ID NO: 12995 - protein, 36 aa, Artificial Sequence
  Non-cyclic GFR-binding peptide
  MOD_RES (1)..(2)..(34)..(36): Xaa is C or S
XXAPTKLSPISVLFIDDSSNVIYKQYENMVVRSXGX

SEQ ID NO: 12996 - protein, 37 aa, Artificial Sequence
  Non-cyclic GFR-binding peptide
  MOD_RES (1)..(2)..(36): Xaa is C or S
  MOD_RES (16)..(17)..(18)..(19)..(20): Xaa is A or G
  MOD_RES (21)..(22)..(23)..(24): Xaa is A or G or absent
XXAPTQLEPLPVVYYXXXXXXXXXEQLSNNMVVRAXG

SEQ ID NO: 12997 - protein, 38 aa, Artificial Sequence
  Non-cyclic GFR-binding peptide
  MOD_RES (5)..(6)..(37): Xaa is C or S
SAAPXXVPQALSPISILFIVGRKPKVYKQYEMIVRSXK

SEQ ID NO: 12998 - protein, 38 aa, Artificial Sequence
  Non-cyclic GFR-binding peptide
  MOD_RES (5)..(6)..(38): Xaa is C or S
VPKPXXAPTQLEPLTVLYYDDSSNVIEQLSNNMVVRAX

SEQ ID NO: 12999 - protein, 39 aa, Artificial Sequence
  Non-cyclic GFR-binding peptide
  MOD_RES (2)..(3)..(36)..(38): Xaa is C or S
  MOD_RES (17)..(18)..(19)..(20)..(21): Xaa is A or G
  MOD_RES (22)..(23)..(24)..(25): Xaa is A or G or absent
PXXVPQDLEPLPIVYYXXXXXXXXXEQLSNMVVKSXKXS

SEQ ID NO: 13000 - protein, 34 aa, Artificial Sequence
  Non-cyclic GFR-binding peptide
  MOD_RES (1)..(33): Xaa is C or S
XVPTELEPLPMVYYDEYDKVVEQLSNEMVVEGXG

SEQ ID NO: 13001 - protein, 37 aa, Artificial Sequence
  Non-cyclic GFR-binding peptide
  MOD_RES (5)..(6)..(37): Xaa is C or S
SAAPXXVPQALSPISILFIVGRKPKVYKQYEMIVRSX

SEQ ID NO: 13002 - protein, 36 aa, Artificial Sequence
  Non-cyclic GFR-binding peptide
  MOD_RES (2)..(3): Xaa is C or S
  MOD_RES (17)..(18)..(19)..(20)..(21): Xaa is A or G
  MOD_RES (22)..(23)..(24)..(25): Xaa is A or G or absent
AXXVPTELSPISMLFIXXXXXXXXXYKQYEEMVVEG

SEQ ID NO: 13003 - protein, 34 aa, Artificial Sequence
  Non-cyclic GFR-binding peptide
  MOD_RES (1)..(2): Xaa is C or S
  MOD_RES (16)..(17)..(18)..(19)..(20): Xaa is A or G
  MOD_RES (21)..(22)..(23)..(24): Xaa is A or G or absent
XXVPTELSPISMLFIXXXXXXXXXYKQYEEMVVE

SEQ ID NO: 13004 - protein, 34 aa, Artificial Sequence
  Non-cyclic GFR-binding peptide
  MOD_RES (3)..(4): Xaa is C or S
SPXXVSQDLSPISILFIIGKTPKIYKQYEMIVKS

SEQ ID NO: 13005 - protein, 36 aa, Artificial Sequence
  Non-cyclic GFR-binding peptide
  MOD_RES (2)..(3): Xaa is C or S
  MOD_RES (17)..(18)..(19)..(20)..(21): Xaa is A or G
  MOD_RES (22)..(23)..(24)..(25): Xaa is A or G or absent
AXXVPTELEPLPMVYYXXXXXXXXXEQLSNEMVVEG

SEQ ID NO: 13006 - protein, 36 aa, Artificial Sequence
  Non-cyclic GFR-binding peptide
  MOD_RES (34)..(36): Xaa is C or S
  MOD_RES (14)..(15)..(16)..(17)..(18): Xaa is A or G
  MOD_RES (19)..(20)..(21)..(22): Xaa is A or G or absent
VPTELSPISMLFIXXXXXXXXXYKQYEEMVVEGXGX

SEQ ID NO: 13007 - protein, 39 aa, Artificial Sequence
  Non-cyclic GFR-binding peptide
  MOD_RES (3)..(4)..(38): Xaa is C or S
  MOD_RES (18)..(19)..(20)..(21)..(22): Xaa is A or G
  MOD_RES (23)..(24)..(25)..(26): Xaa is A or G or absent
KAXXVPTELEPLTMLYYXXXXXXXXXEQLSNDMVVEGXG

SEQ ID NO: 13008 - protein, 43 aa, Artificial Sequence
  Non-cyclic GFR-binding peptide
  MOD_RES (6)..(40)..(42): Xaa is C or S
  MOD_RES (20)..(21)..(22)..(23)..(24): Xaa is A or G
  MOD_RES (25)..(26)..(27)..(28): Xaa is A or G or absent
VTKPTXAPTKLEPLTVLYYXXXXXXXXXEQLSNNMVVRSXGXH

SEQ ID NO: 13009 - protein, 40 aa, Artificial Sequence
  Non-cyclic GFR-binding peptide
  MOD_RES (5)..(6)..(40): Xaa is C or S
  MOD_RES (20)..(21)..(22)..(23)..(24): Xaa is A or G
  MOD_RES (25)..(26)..(27)..(28): Xaa is A or G or absent
TPPTXXVPTRLEPLTILYYXXXXXXXXXEQLSNDMVVESX

SEQ ID NO: 13010 - protein, 40 aa, Artificial Sequence
  Non-cyclic GFR-binding peptide
  MOD_RES (4)..(5)..(39): Xaa is C or S
  MOD_RES (19)..(20)..(21)..(22)..(23): Xaa is A or G
  MOD_RES (24)..(25)..(26)..(27): Xaa is A or G or absent
PKPXXAPTKLSPISVLFIXXXXXXXXXYKQYENMVVRSXG

SEQ ID NO: 13011 - protein, 39 aa, Artificial Sequence
  Non-cyclic GFR-binding peptide
  MOD_RES (5)..(6)..(38): Xaa is C or S
VPKPXXAPTQLEPLTVLYYDDSSNVIEQLSNNMVVRAXG

SEQ ID NO: 13012 - protein, 38 aa, Artificial Sequence
  Non-cyclic GFR-binding peptide
  MOD_RES (4)..(5): Xaa is C or S
  MOD_RES (19)..(20)..(21)..(22)..(23): Xaa is A or G
  MOD_RES (24)..(25)..(26)..(27): Xaa is A or G or absent
PKAXXVPTELEPLPMVYYXXXXXXXXXEQLSNDMVVEG

SEQ ID NO: 13013 - protein, 38 aa, Artificial Sequence
  Non-cyclic GFR-binding peptide
  MOD_RES (4)..(5)..(37): Xaa is C or S
PPTXXVPTRLEPLPIVYYDSANNVVEQLSNDMVVESXG

SEQ ID NO: 13014 - protein, 40 aa, Artificial Sequence
  Non-cyclic GFR-binding peptide
  MOD_RES (6)..(40): Xaa is C or S
  MOD_RES (20)..(21)..(22)..(23)..(24): Xaa is A or G
  MOD_RES (25)..(26)..(27)..(28): Xaa is A or G or absent
VTKPTXAPTKLSPISVLFIXXXXXXXXXYKQYENMVVRSX

SEQ ID NO: 13015 - protein, 38 aa, Artificial Sequence
  Non-cyclic GFR-binding peptide
  MOD_RES (1)..(2)..(36)..(38): Xaa is C or S
  MOD_RES (16)..(17)..(18)..(19)..(20): Xaa is A or G
  MOD_RES (21)..(22)..(23)..(24): Xaa is A or G or absent
XXVPTELEPLTMLYYXXXXXXXXXEQLSNEMVVEGXGX

SEQ ID NO: 13016 - protein, 34 aa, Artificial Sequence
  Non-cyclic GFR-binding peptide
  MOD_RES (1)..(33): Xaa is C or S
XVPTRLNAISILYFDSANNVVLKKYRDMVVESXG

SEQ ID NO: 13017 - protein, 37 aa, Artificial Sequence
  Non-cyclic GFR-binding peptide
  MOD_RES (2)..(3)..(37): Xaa is C or S
  MOD_RES (17)..(18)..(19)..(20)..(21): Xaa is A or G
  MOD_RES (22)..(23)..(24)..(25): Xaa is A or G or absent
PXXAPTQLSPISVLFIXXXXXXXXXYKQYENMVVRAX

SEQ ID NO: 13018 - protein, 37 aa, Artificial Sequence
  Non-cyclic GFR-binding peptide
  MOD_RES (1)..(35)..(37): Xaa is C or S
  MOD_RES (15)..(16)..(17)..(18)..(19): Xaa is A or G
  MOD_RES (20)..(21)..(22)..(23): Xaa is A or G or absent
XVPTRLEPLTILYYXXXXXXXXXEQLSNDMVVESXGX

SEQ ID NO: 13019 - protein, 35 aa, Artificial Sequence
  Non-cyclic GFR-binding peptide
  MOD_RES (3)..(4): Xaa is C or S
KAXXVPTELSPISMLFIDEYDKVVYKQYEEMVVEG

SEQ ID NO: 13020 - protein, 39 aa, Artificial Sequence
  Non-cyclic GFR-binding peptide
  MOD_RES (6)..(7): Xaa is C or S
  MOD_RES (21)..(22)..(23)..(24)..(25): Xaa is A or G
  MOD_RES (26)..(27)..(28)..(29): Xaa is A or G or absent
SIPKAXXVPTELEPLTMLYYXXXXXXXXXEQLSNEMVVE

SEQ ID NO: 13021 - protein, 41 aa, Artificial Sequence
  Non-cyclic GFR-binding peptide
  MOD_RES (4)..(5)..(39)..(41): Xaa is C or S
  MOD_RES (19)..(20)..(21)..(22)..(23): Xaa is A or G
  MOD_RES (24)..(25)..(26)..(27): Xaa is A or G or absent
PKAXXVPTELSPISMLFIXXXXXXXXXYKQYEEMVVEGXGX

SEQ ID NO: 13022 - protein, 35 aa, Artificial Sequence
  Non-cyclic GFR-binding peptide
  MOD_RES (1)..(35): Xaa is C or S
  MOD_RES (15)..(16)..(17)..(18)..(19): Xaa is A or G
  MOD_RES (20)..(21)..(22)..(23): Xaa is A or G or absent
XVPTELEPLPMVYYXXXXXXXXXEQLSNEMVVEGX

SEQ ID NO: 13023 - protein, 42 aa, Artificial Sequence
  Non-cyclic GFR-binding peptide
  MOD_RES (7)..(41): Xaa is C or S
  MOD_RES (21)..(22)..(23)..(24)..(25): Xaa is A or G
  MOD_RES (26)..(27)..(28)..(29): Xaa is A or G or absent
HVTKPTXAPTKLSPISVLFIXXXXXXXXXYKQYENMVVRSXG

SEQ ID NO: 13024 - protein, 34 aa, Artificial Sequence
  Non-cyclic GFR-binding peptide
  MOD_RES (1)..(2)..(34): Xaa is C or S
XXAPTQLEPLPVVYYDDSSNVIEQLSNNMVVRAX

SEQ ID NO: 13025 - protein, 39 aa, Artificial Sequence
  Non-cyclic GFR-binding peptide
  MOD_RES (2)..(3)..(37)..(39): Xaa is C or S
  MOD_RES (17)..(18)..(19)..(20)..(21): Xaa is A or G
  MOD_RES (22)..(23)..(24)..(25): Xaa is A or G or absent
TXXVPTRLSAISILYLXXXXXXXXXLKNYQDMVVESXGX

SEQ ID NO: 13026 - protein, 43 aa, Artificial Sequence
  Non-cyclic GFR-binding peptide
  MOD_RES (6)..(7)..(41)..(43): Xaa is C or S
  MOD_RES (21)..(22)..(23)..(24)..(25): Xaa is A or G
  MOD_RES (26)..(27)..(28)..(29): Xaa is A or G or absent
TVPKPXXAPTQLEPLTVLYYXXXXXXXXXEQLSNNMVVRAXGX

SEQ ID NO: 13027 - protein, 41 aa, Artificial Sequence
  Non-cyclic GFR-binding peptide
  MOD_RES (4)..(5)..(39)..(41): Xaa is C or S
  MOD_RES (19)..(20)..(21)..(22)..(23): Xaa is A or G
  MOD_RES (24)..(25)..(26)..(27): Xaa is A or G or absent
PKAXXVPTELSPISMLFIXXXXXXXXXYKQYEDMVVEGXGX

SEQ ID NO: 13028 - protein, 41 aa, Artificial Sequence
  Non-cyclic GFR-binding peptide
  MOD_RES (6)..(7)..(39)..(41): Xaa is C or S
KIPKAXXVPTELEPLTMLYYDENEKVVEQLSNDMVVEGXGX

SEQ ID NO: 13029 - protein, 32 aa, Artificial Sequence
  Non-cyclic GFR-binding peptide
  MOD_RES (1)..(2): Xaa is C or S
XXVPQALEPLTILYYVGRKPKVEQLSNMIVRS

SEQ ID NO: 13030 - protein, 38 aa, Artificial Sequence
  Non-cyclic GFR-binding peptide
  MOD_RES (6)..(38): Xaa is C or S
VTKPTXAPTKLEPLTVLYYDDSSNVIEQLSNNMVVRSX

SEQ ID NO: 13031 - protein, 35 aa, Artificial Sequence
  Non-cyclic GFR-binding peptide
  MOD_RES (2)..(3)..(35): Xaa is C or S
TXXVPTRLSAISILYLDSANNVVLKNYQDMVVESX

SEQ ID NO: 13032 - protein, 36 aa, Artificial Sequence
  Non-cyclic GFR-binding peptide
  MOD_RES (5)..(6): Xaa is C or S
VPKPXXAPTQLSPISVLFIDDSSNVIYKQYENMVVR

SEQ ID NO: 13033 - protein, 40 aa, Artificial Sequence
  Non-cyclic GFR-binding peptide
  MOD_RES (4)..(5)..(39): Xaa is C or S
  MOD_RES (19)..(20)..(21)..(22)..(23): Xaa is A or G
  MOD_RES (24)..(25)..(26)..(27): Xaa is A or G or absent
PKPXXAPTKLEPLTVLYYXXXXXXXXXEQLSNNMVVRSXG

SEQ ID NO: 13034 - protein, 38 aa, Artificial Sequence
  Non-cyclic GFR-binding peptide
  MOD_RES (2)..(3)..(35)..(37): Xaa is C or S
TXXVPTRLEPLPIVYYDSANNVVEQLSNDMVVESXGXR

SEQ ID NO: 13035 - protein, 36 aa, Artificial Sequence
  Non-cyclic GFR-binding peptide
  MOD_RES (3)..(4)..(36): Xaa is C or S
KAXXVPTELEPLTMLYYDEYDKVVEQLSNEMVVEGX

SEQ ID NO: 13036 - protein, 30 aa, Artificial Sequence
  Non-cyclic GFR-binding peptide
APTKLEPLPVVYYDDSSNVIEQLSNNMVVR

SEQ ID NO: 13037 - protein, 33 aa, Artificial Sequence
  Non-cyclic GFR-binding peptide
  MOD_RES (14)..(15)..(16)..(17)..(18): Xaa is A or G
  MOD_RES (19)..(20)..(21)..(22): Xaa is A or G or absent
APTKLSPISVLFIXXXXXXXXXYKQYENMVVRS

SEQ ID NO: 13038 - protein, 44 aa, Artificial Sequence
  Non-cyclic GFR-binding peptide
  MOD_RES (6)..(7)..(41)..(43): Xaa is C or S
  MOD_RES (21)..(22)..(23)..(24)..(25): Xaa is A or G
  MOD_RES (26)..(27)..(28)..(29): Xaa is A or G or absent
KIPKAXXVPTELEPLPMVYYXXXXXXXXXEQLSNDMVVEGXGXR

SEQ ID NO: 13039 - protein, 36 aa, Artificial Sequence
  Non-cyclic GFR-binding peptide
  MOD_RES (1)..(2)..(35): Xaa is C or S
  MOD_RES (16)..(17)..(18)..(19)..(20): Xaa is A or G
  MOD_RES (21)..(22)..(23)..(24): Xaa is A or G or absent
XXVPQALSPISILFIXXXXXXXXXYKQYEMIVRSXK

SEQ ID NO: 13040 - protein, 40 aa, Artificial Sequence
  Non-cyclic GFR-binding peptide
  MOD_RES (5)..(6)..(39): Xaa is C or S
  MOD_RES (20)..(21)..(22)..(23)..(24): Xaa is A or G
  MOD_RES (25)..(26)..(27)..(28): Xaa is A or G or absent
SASPXXVPQDLEPLPIVYYXXXXXXXXXEQLSNMVVKSXK

SEQ ID NO: 13041 - protein, 37 aa, Artificial Sequence
  Non-cyclic GFR-binding peptide
  MOD_RES (1)..(2)..(34)..(36): Xaa is C or S
XXAPTKLSPISVLFIDDSSNVIYKQYENMVVRSXGXH

SEQ ID NO: 13042 - protein, 33 aa, Artificial Sequence
  Non-cyclic GFR-binding peptide
  MOD_RES (1)..(33): Xaa is C or S
XAPTQLEPLPVVYYDDSSNVIEQLSNNMVVRAX

SEQ ID NO: 13043 - protein, 36 aa, Artificial Sequence
  Non-cyclic GFR-binding peptide
  MOD_RES (1)..(2)..(34)..(36): Xaa is C or S
XXVPTRLEPLPIVYYDSANNVVEQLSNDMVVESXGX

SEQ ID NO: 13044 - protein, 38 aa, Artificial Sequence
  Non-cyclic GFR-binding peptide
  MOD_RES (6)..(7)..(38): Xaa is C or S
ASAAPXXVPQALSPISILFIVGRKPKVYKQYEMIVRSX

SEQ ID NO: 13045 - protein, 33 aa, Artificial Sequence
  Non-cyclic GFR-binding peptide
  MOD_RES (31)..(33): Xaa is C or S
VSQDLEPLPIVYYIGKTPKIEQLSNMIVKSXKX

SEQ ID NO: 13046 - protein, 31 aa, Artificial Sequence
  Non-cyclic GFR-binding peptide
VPTELEPLTMLYYDEYDKVVEQLSNEMVVEG

SEQ ID NO: 13047 - protein, 34 aa, Artificial Sequence
  Non-cyclic GFR-binding peptide
  MOD_RES (34)..(34): Xaa is C or S
  MOD_RES (14)..(15)..(16)..(17)..(18): Xaa is A or G
  MOD_RES (19)..(20)..(21)..(22): Xaa is A or G or absent
VPTELEPLPMVYYXXXXXXXXXEQLSNEMVVEGX

SEQ ID NO: 13048 - protein, 37 aa, Artificial Sequence
  Non-cyclic GFR-binding peptide
  MOD_RES (2)..(3)..(34)..(36): Xaa is C or S
PXXVPQDLEPLPIVYYVGRTPKVEQLSNMVVKSXKXS

SEQ ID NO: 13049 - protein, 41 aa, Artificial Sequence
  Non-cyclic GFR-binding peptide
  MOD_RES (5)..(39)..(41): Xaa is C or S
  MOD_RES (19)..(20)..(21)..(22)..(23): Xaa is A or G
  MOD_RES (24)..(25)..(26)..(27): Xaa is A or G or absent
TKPTXAPTKLEPLPVVYYXXXXXXXXXEQLSNNMVVRSXGX

SEQ ID NO: 13050 - protein, 36 aa, Artificial Sequence
  Non-cyclic GFR-binding peptide
  MOD_RES (2)..(3)..(36): Xaa is C or S
  MOD_RES (17)..(18)..(19)..(20)..(21): Xaa is A or G
  MOD_RES (22)..(23)..(24)..(25): Xaa is A or G or absent
PXXVPQDLSPISILFIXXXXXXXXXYKQYEMVVKSX

SEQ ID NO: 13051 - protein, 35 aa, Artificial Sequence
  Non-cyclic GFR-binding peptide
  MOD_RES (4)..(5): Xaa is C or S
PKAXXVPTELSPISMLFIDEYDKVVYKQYEEMVVE

SEQ ID NO: 13052 - protein, 40 aa, Artificial Sequence
  Non-cyclic GFR-binding peptide
  MOD_RES (4)..(5)..(37)..(39): Xaa is C or S
PPTXXVPTRLEPLPIVYYDSANNVVEQLSNDMVVESXGXR

SEQ ID NO: 13053 - protein, 33 aa, Artificial Sequence
  Non-cyclic GFR-binding peptide
  MOD_RES (33)..(33): Xaa is C or S
  MOD_RES (14)..(15)..(16)..(17)..(18): Xaa is A or G
  MOD_RES (19)..(20)..(21)..(22): Xaa is A or G or absent
VPQDLSPISILFIXXXXXXXXXYKQYEMVVKSX

SEQ ID NO: 13054 - protein, 34 aa, Artificial Sequence
  Non-cyclic GFR-binding peptide
  MOD_RES (34)..(34): Xaa is C or S
  MOD_RES (14)..(15)..(16)..(17)..(18): Xaa is A or G
  MOD_RES (19)..(20)..(21)..(22): Xaa is A or G or absent
VPTRLNAISILYFXXXXXXXXXLKKYRDMVVESX

SEQ ID NO: 13055 - protein, 34 aa, Artificial Sequence
  Non-cyclic GFR-binding peptide
  MOD_RES (34)..(34): Xaa is C or S
  MOD_RES (14)..(15)..(16)..(17)..(18): Xaa is A or G
  MOD_RES (19)..(20)..(21)..(22): Xaa is A or G or absent
APTQLEPLPVVYYXXXXXXXXXEQLSNNMVVRAX

SEQ ID NO: 13056 - protein, 37 aa, Artificial Sequence
  Non-cyclic GFR-binding peptide
  MOD_RES (4)..(5)..(36): Xaa is C or S
ASPXXVSQDLEPLPIVYYIGKTPKIEQLSNMIVKSXK

SEQ ID NO: 13057 - protein, 31 aa, Artificial Sequence
  Non-cyclic GFR-binding peptide
  MOD_RES (1)..(1): Xaa is C or S
XVSQDLSPISILFIIGKTPKIYKQYEMIVKS

SEQ ID NO: 13058 - protein, 35 aa, Artificial Sequence
  Non-cyclic GFR-binding peptide
  MOD_RES (32)..(34): Xaa is C or S
APTKLSPISVLFIDDSSNVIYKQYENMVVRSXGXH

SEQ ID NO: 13059 - protein, 34 aa, Artificial Sequence
  Non-cyclic GFR-binding peptide
  MOD_RES (2)..(3): Xaa is C or S
AXXVPTELSPISMLFIDEYDKVVYKQYEEMVVEG

SEQ ID NO: 13060 - protein, 40 aa, Artificial Sequence
  Non-cyclic GFR-binding peptide
  MOD_RES (5)..(6)..(38)..(40): Xaa is C or S
IPKAXXVPTELSPISMLFIDENEKVVYKQYEDMVVEGXGX

SEQ ID NO: 13061 - protein, 38 aa, Artificial Sequence
  Non-cyclic GFR-binding peptide
  MOD_RES (3)..(4)..(38): Xaa is C or S
  MOD_RES (18)..(19)..(20)..(21)..(22): Xaa is A or G
  MOD_RES (23)..(24)..(25)..(26): Xaa is A or G or absent
KPXXAPTKLSPISVLFIXXXXXXXXXYKQYENMVVRSX

SEQ ID NO: 13062 - protein, 40 aa, Artificial Sequence
  Non-cyclic GFR-binding peptide
  MOD_RES (5)..(6)..(38)..(40): Xaa is C or S
IPKAXXVPTELEPLTMLYYDENEKVVEQLSNDMVVEGXGX

SEQ ID NO: 13063 - protein, 34 aa, Artificial Sequence
  Non-cyclic GFR-binding peptide
  MOD_RES (1)..(2)..(33): Xaa is C or S
XXVPQDLSPISILFIVGRTPKVYKQYEMVVKSXK

SEQ ID NO: 13064 - protein, 39 aa, Artificial Sequence
  Non-cyclic GFR-binding peptide
  MOD_RES (7)..(7): Xaa is C or S
  MOD_RES (21)..(22)..(23)..(24)..(25): Xaa is A or G
  MOD_RES (26)..(27)..(28)..(29): Xaa is A or G or absent
HVTKPTXAPTKLSPISVLFIXXXXXXXXXYKQYENMVVR

SEQ ID NO: 13065 - protein, 36 aa, Artificial Sequence
  Non-cyclic GFR-binding peptide
  MOD_RES (1)..(2)..(36): Xaa is C or S
  MOD_RES (16)..(17)..(18)..(19)..(20): Xaa is A or G
  MOD_RES (21)..(22)..(23)..(24): Xaa is A or G or absent
XXVPTRLEPLPIVYYXXXXXXXXXEQLSNDMVVESX

SEQ ID NO: 13066 - protein, 37 aa, Artificial Sequence
  Non-cyclic GFR-binding peptide
  MOD_RES (3)..(4)..(37): Xaa is C or S
  MOD_RES (18)..(19)..(20)..(21)..(22): Xaa is A or G
  MOD_RES (23)..(24)..(25)..(26): Xaa is A or G or absent
APXXVPQALSPISILFIXXXXXXXXXYKQYEMIVRSX

SEQ ID NO: 13067 - protein, 37 aa, Artificial Sequence
  Non-cyclic GFR-binding peptide
  MOD_RES (3)..(37): Xaa is C or S
  MOD_RES (17)..(18)..(19)..(20)..(21): Xaa is A or G
  MOD_RES (22)..(23)..(24)..(25): Xaa is A or G or absent
PTXAPTKLEPLTVLYYXXXXXXXXXEQLSNNMVVRSX

SEQ ID NO: 13068 - protein, 38 aa, Artificial Sequence
  Non-cyclic GFR-binding peptide
  MOD_RES (5)..(6): Xaa is C or S
  MOD_RES (20)..(21)..(22)..(23)..(24): Xaa is A or G
  MOD_RES (25)..(26)..(27)..(28): Xaa is A or G or absent
IPKAXXVPTELEPLTMLYYXXXXXXXXXEQLSNDMVVE

SEQ ID NO: 13069 - protein, 37 aa, Artificial Sequence
  Non-cyclic GFR-binding peptide
  MOD_RES (5)..(6): Xaa is C or S
VPKPXXAPTKLSPISVLFIDDSSNVIYKQYENMVVRS

SEQ ID NO: 13070 - protein, 34 aa, Artificial Sequence
  Non-cyclic GFR-binding peptide
  MOD_RES (1)..(2)..(34): Xaa is C or S
XXVPTELEPLPMVYYDENEKVVEQLSNDMVVEGX

SEQ ID NO: 13071 - protein, 41 aa, Artificial Sequence
  Non-cyclic GFR-binding peptide
  MOD_RES (6)..(38)..(40): Xaa is C or S
VTKPTXAPTKLSPISVLFIDDSSNVIYKQYENMVVRSXGXH

SEQ ID NO: 13072 - protein, 39 aa, Artificial Sequence
  Non-cyclic GFR-binding peptide
  MOD_RES (5)..(6)..(38): Xaa is C or S
VPKPXXAPTQLSPISVLFIDDSSNVIYKQYENMVVRAXG

SEQ ID NO: 13073 - protein, 41 aa, Artificial Sequence
  Non-cyclic GFR-binding peptide
  MOD_RES (6)..(7)..(41): Xaa is C or S
  MOD_RES (21)..(22)..(23)..(24)..(25): Xaa is A or G
  MOD_RES (26)..(27)..(28)..(29): Xaa is A or G or absent
TVPKPXXAPTQLSPISVLFIXXXXXXXXXYKQYENMVVRAX

SEQ ID NO: 13074 - protein, 39 aa, Artificial Sequence
  Non-cyclic GFR-binding peptide
  MOD_RES (5)..(6)..(38): Xaa is C or S
VPKPXXAPTKLEPLPVVYYDDSSNVIEQLSNNMVVRSXG

SEQ ID NO: 13075 - protein, 38 aa, Artificial Sequence
  Non-cyclic GFR-binding peptide
  MOD_RES (2)..(3)..(35)..(37): Xaa is C or S
PXXAPTKLEPLTVLYYDDSSNVIEQLSNNMVVRSXGXH

SEQ ID NO: 13076 - protein, 38 aa, Artificial Sequence
  Non-cyclic GFR-binding peptide
  MOD_RES (1)..(2)..(36)..(38): Xaa is C or S
  MOD_RES (16)..(17)..(18)..(19)..(20): Xaa is A or G
  MOD_RES (21)..(22)..(23)..(24): Xaa is A or G or absent
XXAPTKLSPISVLFIXXXXXXXXXYKQYENMVVRSXGX

SEQ ID NO: 13077 - protein, 38 aa, Artificial Sequence
  Non-cyclic GFR-binding peptide
  MOD_RES (5)..(6): Xaa is C or S
  MOD_RES (20)..(21)..(22)..(23)..(24): Xaa is A or G
  MOD_RES (25)..(26)..(27)..(28): Xaa is A or G or absent
IPKAXXVPTELEPLPMVYYXXXXXXXXXEQLSNDMVVE

SEQ ID NO: 13078 - protein, 36 aa, Artificial Sequence
  Non-cyclic GFR-binding peptide
  MOD_RES (5)..(6): Xaa is C or S
TPPTXXVPTRLEPLPIVYYDSANNVVEQLSNDMVVE

SEQ ID NO: 13079 - protein, 34 aa, Artificial Sequence
  Non-cyclic GFR-binding peptide
  MOD_RES (1)..(2): Xaa is C or S
  MOD_RES (16)..(17)..(18)..(19)..(20): Xaa is A or G
  MOD_RES (21)..(22)..(23)..(24): Xaa is A or G or absent
XXVPQALSPISILFIXXXXXXXXXYKQYEMIVRS

SEQ ID NO: 13080 - protein, 36 aa, Artificial Sequence
  Non-cyclic GFR-binding peptide
  MOD_RES (1)..(2)..(34)..(36): Xaa is C or S
XXVPTRLSAISILYLDSANNVVLKNYQDMVVESXGX

SEQ ID NO: 13081 - protein, 37 aa, Artificial Sequence
  Non-cyclic GFR-binding peptide
  MOD_RES (34)..(36): Xaa is C or S
  MOD_RES (14)..(15)..(16)..(17)..(18): Xaa is A or G
  MOD_RES (19)..(20)..(21)..(22): Xaa is A or G or absent
VPTELSPISMLFIXXXXXXXXXYKQYEDMVVEGXGXR

SEQ ID NO: 13082 - protein, 39 aa, Artificial Sequence
  Non-cyclic GFR-binding peptide
  MOD_RES (4)..(38): Xaa is C or S
  MOD_RES (18)..(19)..(20)..(21)..(22): Xaa is A or G
  MOD_RES (23)..(24)..(25)..(26): Xaa is A or G or absent
KPTXAPTKLEPLPVVYYXXXXXXXXXEQLSNNMVVRSXG

SEQ ID NO: 13083 - protein, 41 aa, Artificial Sequence
  Non-cyclic GFR-binding peptide
  MOD_RES (4)..(5)..(39)..(41): Xaa is C or S
  MOD_RES (19)..(20)..(21)..(22)..(23): Xaa is A or G
  MOD_RES (24)..(25)..(26)..(27): Xaa is A or G or absent
PKPXXAPTKLEPLTVLYYXXXXXXXXXEQLSNNMVVRSXGX

SEQ ID NO: 13084 - protein, 35 aa, Artificial Sequence
  Non-cyclic GFR-binding peptide
  MOD_RES (32)..(34): Xaa is C or S
VPTELSPISMLFIDENEKVVYKQYEDMVVEGXGXR

SEQ ID NO: 13085 - protein, 41 aa, Artificial Sequence
  Non-cyclic GFR-binding peptide
  MOD_RES (7)..(41): Xaa is C or S
  MOD_RES (21)..(22)..(23)..(24)..(25): Xaa is A or G
  MOD_RES (26)..(27)..(28)..(29): Xaa is A or G or absent
HVTKPTXAPTKLSPISVLFIXXXXXXXXXYKQYENMVVRSX

SEQ ID NO: 13086 - protein, 35 aa, Artificial Sequence
  Non-cyclic GFR-binding peptide
  MOD_RES (2)..(3): Xaa is C or S
  MOD_RES (17)..(18)..(19)..(20)..(21): Xaa is A or G
  MOD_RES (22)..(23)..(24)..(25): Xaa is A or G or absent
PXXAPTKLEPLPVVYYXXXXXXXXXEQLSNNMVVR

SEQ ID NO: 13087 - protein, 32 aa, Artificial Sequence
  Non-cyclic GFR-binding peptide
  MOD_RES (32)..(32): Xaa is C or S
VPTRLEPLTILYYDSANNVVEQLSNDMVVESX

SEQ ID NO: 13088 - protein, 38 aa, Artificial Sequence
  Non-cyclic GFR-binding peptide
  MOD_RES (5)..(6): Xaa is C or S
  MOD_RES (20)..(21)..(22)..(23)..(24): Xaa is A or G
  MOD_RES (25)..(26)..(27)..(28): Xaa is A or G or absent
TPPTXXVPTRLEPLPIVYYXXXXXXXXXEQLSNDMVVE

SEQ ID NO: 13089 - protein, 39 aa, Artificial Sequence
  Non-cyclic GFR-binding peptide
  MOD_RES (5)..(6): Xaa is C or S
  MOD_RES (20)..(21)..(22)..(23)..(24): Xaa is A or G
  MOD_RES (25)..(26)..(27)..(28): Xaa is A or G or absent
VPKPXXAPTKLSPISVLFIXXXXXXXXXYKQYENMVVRS

SEQ ID NO: 13090 - protein, 37 aa, Artificial Sequence
  Non-cyclic GFR-binding peptide
  MOD_RES (6)..(7): Xaa is C or S
STPPTXXVPTRLNAISILYFDSANNVVLKKYRDMVVE

SEQ ID NO: 13091 - protein, 35 aa, Artificial Sequence
  Non-cyclic GFR-binding peptide
  MOD_RES (1)..(35): Xaa is C or S
  MOD_RES (15)..(16)..(17)..(18)..(19): Xaa is A or G
  MOD_RES (20)..(21)..(22)..(23): Xaa is A or G or absent
XVPTELSPISMLFIXXXXXXXXXYKQYEDMVVEGX

SEQ ID NO: 13092 - protein, 33 aa, Artificial Sequence
  Non-cyclic GFR-binding peptide
  MOD_RES (1)..(1): Xaa is C or S
  MOD_RES (15)..(16)..(17)..(18)..(19): Xaa is A or G
  MOD_RES (20)..(21)..(22)..(23): Xaa is A or G or absent
XAPTQLEPLPVVYYXXXXXXXXXEQLSNNMVVR

SEQ ID NO: 13093 - protein, 38 aa, Artificial Sequence
  Non-cyclic GFR-binding peptide
  MOD_RES (2)..(3)..(37): Xaa is C or S
  MOD_RES (17)..(18)..(19)..(20)..(21): Xaa is A or G
  MOD_RES (22)..(23)..(24)..(25): Xaa is A or G or absent
PXXAPTQLEPLPVVYYXXXXXXXXXEQLSNNMVVRAXG

SEQ ID NO: 13094 - protein, 41 aa, Artificial Sequence
  Non-cyclic GFR-binding peptide
  MOD_RES (6)..(7)..(39)..(41): Xaa is C or S
TVPKPXXAPTQLEPLPVVYYDDSSNVIEQLSNNMVVRAXGX

SEQ ID NO: 13095 - protein, 40 aa, Artificial Sequence
  Non-cyclic GFR-binding peptide
  MOD_RES (5)..(6)..(40): Xaa is C or S
  MOD_RES (20)..(21)..(22)..(23)..(24): Xaa is A or G
  MOD_RES (25)..(26)..(27)..(28): Xaa is A or G or absent
VPKPXXAPTQLEPLTVLYYXXXXXXXXXEQLSNNMVVRAX

SEQ ID NO: 13096 - protein, 40 aa, Artificial Sequence
  Non-cyclic GFR-binding peptide
  MOD_RES (5)..(6)..(38)..(40): Xaa is C or S
VPKPXXAPTKLSPISVLFIDDSSNVIYKQYENMVVRSXGX

SEQ ID NO: 13097 - protein, 39 aa, Artificial Sequence
  Non-cyclic GFR-binding peptide
  MOD_RES (3)..(4)..(36)..(38): Xaa is C or S
KPXXAPTKLEPLTVLYYDDSSNVIEQLSNNMVVRSXGXH

SEQ ID NO: 13098 - protein, 33 aa, Artificial Sequence
  Non-cyclic GFR-binding peptide
  MOD_RES (2)..(3): Xaa is C or S
PXXAPTQLEPLPVVYYDDSSNVIEQLSNNMVVR

SEQ ID NO: 13099 - protein, 40 aa, Artificial Sequence
  Non-cyclic GFR-binding peptide
  MOD_RES (5)..(6)..(38)..(40): Xaa is C or S
VPKPXXAPTQLEPLTVLYYDDSSNVIEQLSNNMVVRAXGX

SEQ ID NO: 13100 - protein, 39 aa, Artificial Sequence
  Non-cyclic GFR-binding peptide
  MOD_RES (6)..(7)..(39): Xaa is C or S
YVPKPXXAPTKLEPLPVVYYDDSSNVIEQLSNNMVVRSX

SEQ ID NO: 13101 - protein, 39 aa, Artificial Sequence
  Non-cyclic GFR-binding peptide
  MOD_RES (5)..(6)..(38): Xaa is C or S
VPKPXXAPTKLSPISVLFIDDSSNVIYKQYENMVVRSXG

SEQ ID NO: 13102 - protein, 36 aa, Artificial Sequence
  Non-cyclic GFR-binding peptide
  MOD_RES (1)..(2)..(33)..(35): Xaa is C or S
XXVPQALEPLTILYYVGRKPKVEQLSNMIVRSXKXS

SEQ ID NO: 13103 - protein, 36 aa, Artificial Sequence
  Non-cyclic GFR-binding peptide
  MOD_RES (1)..(33)..(35): Xaa is C or S
XVPTELEPLPMVYYDENEKVVEQLSNDMVVEGXGXR

SEQ ID NO: 13104 - protein, 42 aa, Artificial Sequence
  Non-cyclic GFR-binding peptide
  MOD_RES (4)..(5)..(39)..(41): Xaa is C or S
  MOD_RES (19)..(20)..(21)..(22)..(23): Xaa is A or G
  MOD_RES (24)..(25)..(26)..(27): Xaa is A or G or absent
PKPXXAPTQLEPLPVVYYXXXXXXXXXEQLSNNMVVRAXGXH

SEQ ID NO: 13105 - protein, 36 aa, Artificial Sequence
  Non-cyclic GFR-binding peptide
  MOD_RES (1)..(2)..(33)..(35): Xaa is C or S
XXVSQDLSPISILFIIGKTPKIYKQYEMIVKSXKXS

SEQ ID NO: 13106 - protein, 38 aa, Artificial Sequence
  Non-cyclic GFR-binding peptide
  MOD_RES (3)..(4)..(36)..(38): Xaa is C or S
PTXXVPTRLEPLTILYYDSANNVVEQLSNDMVVESXGX

SEQ ID NO: 13107 - protein, 38 aa, Artificial Sequence
  Non-cyclic GFR-binding peptide
  MOD_RES (5)..(6): Xaa is C or S
  MOD_RES (20)..(21)..(22)..(23)..(24): Xaa is A or G
  MOD_RES (25)..(26)..(27)..(28): Xaa is A or G or absent
VPKPXXAPTQLEPLTVLYYXXXXXXXXXEQLSNNMVVR

SEQ ID NO: 13108 - protein, 39 aa, Artificial Sequence
  Non-cyclic GFR-binding peptide
  MOD_RES (4)..(5)..(37)..(39): Xaa is C or S
PPTXXVPTRLEPLTILYYDSANNVVEQLSNDMVVESXGX

SEQ ID NO: 13109 - protein, 40 aa, Artificial Sequence
  Non-cyclic GFR-binding peptide
  MOD_RES (2)..(3)..(37)..(39): Xaa is C or S
  MOD_RES (17)..(18)..(19)..(20)..(21): Xaa is A or G
  MOD_RES (22)..(23)..(24)..(25): Xaa is A or G or absent
PXXAPTQLSPISVLFIXXXXXXXXXYKQYENMVVRAXGXH

SEQ ID NO: 13110 - protein, 44 aa, Artificial Sequence
  Non-cyclic GFR-binding peptide
  MOD_RES (7)..(41)..(43): Xaa is C or S
  MOD_RES (21)..(22)..(23)..(24)..(25): Xaa is A or G
  MOD_RES (26)..(27)..(28)..(29): Xaa is A or G or absent
HVTKPTXAPTKLSPISVLFIXXXXXXXXXYKQYENMVVRSXGXH

SEQ ID NO: 13111 - protein, 33 aa, Artificial Sequence
  Non-cyclic GFR-binding peptide
  MOD_RES (32)..(32): Xaa is C or S
VPTELEPLTMLYYDENEKVVEQLSNDMVVEGXG

SEQ ID NO: 13112 - protein, 41 aa, Artificial Sequence
  Non-cyclic GFR-binding peptide
  MOD_RES (3)..(4)..(38)..(40): Xaa is C or S
  MOD_RES (18)..(19)..(20)..(21)..(22): Xaa is A or G
  MOD_RES (23)..(24)..(25)..(26): Xaa is A or G or absent
KPXXAPTKLSPISVLFIXXXXXXXXXYKQYENMVVRSXGXH

SEQ ID NO: 13113 - protein, 42 aa, Artificial Sequence
  Non-cyclic GFR-binding peptide
  MOD_RES (4)..(5)..(39)..(41): Xaa is C or S
  MOD_RES (19)..(20)..(21)..(22)..(23): Xaa is A or G
  MOD_RES (24)..(25)..(26)..(27): Xaa is A or G or absent
PKAXXVPTELEPLTMLYYXXXXXXXXXEQLSNDMVVEGXGXR

SEQ ID NO: 13114 - protein, 40 aa, Artificial Sequence
  Non-cyclic GFR-binding peptide
  MOD_RES (5)..(6)..(40): Xaa is C or S
  MOD_RES (20)..(21)..(22)..(23)..(24): Xaa is A or G
  MOD_RES (25)..(26)..(27)..(28): Xaa is A or G or absent
IPKAXXVPTELSPISMLFIXXXXXXXXXYKQYEDMVVEGX

SEQ ID NO: 13115 - protein, 33 aa, Artificial Sequence
  Non-cyclic GFR-binding peptide
  MOD_RES (1)..(2): Xaa is C or S
XXVPTELSPISMLFIDENEKVVYKQYEDMVVEG

SEQ ID NO: 13116 - protein, 33 aa, Artificial Sequence
  Non-cyclic GFR-binding peptide
  MOD_RES (1)..(2)..(33): Xaa is C or S
XXVPQDLEPLPIVYYVGRTPKVEQLSNMVVKSX

SEQ ID NO: 13117 - protein, 35 aa, Artificial Sequence
  Non-cyclic GFR-binding peptide
  MOD_RES (3)..(4)..(35): Xaa is C or S
SPXXVPQDLSPISILFIVGRTPKVYKQYEMVVKSX

SEQ ID NO: 13118 - protein, 41 aa, Artificial Sequence
  Non-cyclic GFR-binding peptide
  MOD_RES (5)..(6)..(38)..(40): Xaa is C or S
IPKAXXVPTELEPLPMVYYDEYDKVVEQLSNEMVVEGXGXR

SEQ ID NO: 13119 - protein, 32 aa, Artificial Sequence
  Non-cyclic GFR-binding peptide
  MOD_RES (14)..(15)..(16)..(17)..(18): Xaa is A or G
  MOD_RES (19)..(20)..(21)..(22): Xaa is A or G or absent
VPTRLEPLPIVYYXXXXXXXXXEQLSNDMVVE

SEQ ID NO: 13120 - protein, 38 aa, Artificial Sequence
  Non-cyclic GFR-binding peptide
  MOD_RES (5)..(5): Xaa is C or S
  MOD_RES (19)..(20)..(21)..(22)..(23): Xaa is A or G
  MOD_RES (24)..(25)..(26)..(27): Xaa is A or G or absent
TKPTXAPTKLSPISVLFIXXXXXXXXXYKQYENMVVRS

SEQ ID NO: 13121 - protein, 32 aa, Artificial Sequence
  Non-cyclic GFR-binding peptide
  MOD_RES (1)..(2): Xaa is C or S
XXVPTRLSAISILYLDSANNVVLKNYQDMVVE

SEQ ID NO: 13122 - protein, 40 aa, Artificial Sequence
  Non-cyclic GFR-binding peptide
  MOD_RES (5)..(39): Xaa is C or S
  MOD_RES (19)..(20)..(21)..(22)..(23): Xaa is A or G
  MOD_RES (24)..(25)..(26)..(27): Xaa is A or G or absent
TKPTXAPTKLEPLPVVYYXXXXXXXXXEQLSNNMVVRSXG

SEQ ID NO: 13123 - protein, 40 aa, Artificial Sequence
  Non-cyclic GFR-binding peptide
  MOD_RES (5)..(6)..(38)..(40): Xaa is C or S
VPKPXXAPTQLSPISVLFIDDSSNVIYKQYENMVVRAXGX

SEQ ID NO: 13124 - protein, 35 aa, Artificial Sequence
  Non-cyclic GFR-binding peptide
  MOD_RES (2)..(3): Xaa is C or S
  MOD_RES (17)..(18)..(19)..(20)..(21): Xaa is A or G
  MOD_RES (22)..(23)..(24)..(25): Xaa is A or G or absent
PXXVSQDLSPISILFIXXXXXXXXXYKQYEMIVKS

SEQ ID NO: 13125 - protein, 33 aa, Artificial Sequence
  Non-cyclic GFR-binding peptide
  MOD_RES (2)..(3): Xaa is C or S
PXXAPTKLEPLTVLYYDDSSNVIEQLSNNMVVR

SEQ ID NO: 13126 - protein, 39 aa, Artificial Sequence
  Non-cyclic GFR-binding peptide
  MOD_RES (6)..(7)..(39): Xaa is C or S
TVPKPXXAPTQLSPISVLFIDDSSNVIYKQYENMVVRAX

SEQ ID NO: 13127 - protein, 39 aa, Artificial Sequence
  Non-cyclic GFR-binding peptide
  MOD_RES (6)..(7): Xaa is C or S
  MOD_RES (21)..(22)..(23)..(24)..(25): Xaa is A or G
  MOD_RES (26)..(27)..(28)..(29): Xaa is A or G or absent
TVPKPXXAPTQLEPLTVLYYXXXXXXXXXEQLSNNMVVR

SEQ ID NO: 13128 - protein, 33 aa, Artificial Sequence
  Non-cyclic GFR-binding peptide
  MOD_RES (1)..(33): Xaa is C or S
XAPTKLSPISVLFIDDSSNVIYKQYENMVVRSX

SEQ ID NO: 13129 - protein, 37 aa, Artificial Sequence
  Non-cyclic GFR-binding peptide
  MOD_RES (2)..(3)..(35)..(37): Xaa is C or S
AXXVPTELEPLTMLYYDENEKVVEQLSNDMVVEGXGX

SEQ ID NO: 13130 - protein, 39 aa, Artificial Sequence
  Non-cyclic GFR-binding peptide
  MOD_RES (5)..(6)..(39): Xaa is C or S
  MOD_RES (20)..(21)..(22)..(23)..(24): Xaa is A or G
  MOD_RES (25)..(26)..(27)..(28): Xaa is A or G or absent
SAAPXXVPQALEPLTILYYXXXXXXXXXEQLSNMIVRSX

SEQ ID NO: 13131 - protein, 40 aa, Artificial Sequence
  Non-cyclic GFR-binding peptide
  MOD_RES (4)..(5)..(37)..(39): Xaa is C or S
PKPXXAPTQLSPISVLFIDDSSNVIYKQYENMVVRAXGXH

SEQ ID NO: 13132 - protein, 38 aa, Artificial Sequence
  Non-cyclic GFR-binding peptide
  MOD_RES (3)..(4)..(38): Xaa is C or S
  MOD_RES (18)..(19)..(20)..(21)..(22): Xaa is A or G
  MOD_RES (23)..(24)..(25)..(26): Xaa is A or G or absent
PTXXVPTRLSAISILYLXXXXXXXXXLKNYQDMVVESX

SEQ ID NO: 13133 - protein, 35 aa, Artificial Sequence
  Non-cyclic GFR-binding peptide
  MOD_RES (3)..(4): Xaa is C or S
KAXXVPTELEPLPMVYYDEYDKVVEQLSNEMVVEG

SEQ ID NO: 13134 - protein, 33 aa, Artificial Sequence
  Non-cyclic GFR-binding peptide
  MOD_RES (32)..(32): Xaa is C or S
APTKLEPLTVLYYDDSSNVIEQLSNNMVVRSXG

SEQ ID NO: 13135 - protein, 35 aa, Artificial Sequence
  Non-cyclic GFR-binding peptide
  MOD_RES (2)..(3): Xaa is C or S
  MOD_RES (17)..(18)..(19)..(20)..(21): Xaa is A or G
  MOD_RES (22)..(23)..(24)..(25): Xaa is A or G or absent
AXXVPTELSPISMLFIXXXXXXXXXYKQYEDMVVE

SEQ ID NO: 13136 - protein, 42 aa, Artificial Sequence
  Non-cyclic GFR-binding peptide
  MOD_RES (6)..(7)..(39)..(41): Xaa is C or S
SIPKAXXVPTELSPISMLFIDEYDKVVYKQYEEMVVEGXGXR

SEQ ID NO: 13137 - protein, 41 aa, Artificial Sequence
  Non-cyclic GFR-binding peptide
  MOD_RES (5)..(6)..(38)..(40): Xaa is C or S
TPPTXXVPTRLSAISILYLDSANNVVLKNYQDMVVESXGXR

SEQ ID NO: 13138 - protein, 38 aa, Artificial Sequence
  Non-cyclic GFR-binding peptide
  MOD_RES (5)..(6): Xaa is C or S
  MOD_RES (20)..(21)..(22)..(23)..(24): Xaa is A or G
  MOD_RES (25)..(26)..(27)..(28): Xaa is A or G or absent
SASPXXVSQDLEPLPIVYYXXXXXXXXXEQLSNMIVKS

SEQ ID NO: 13139 - protein, 37 aa, Artificial Sequence
  Non-cyclic GFR-binding peptide
  MOD_RES (2)..(3)..(37): Xaa is C or S
  MOD_RES (17)..(18)..(19)..(20)..(21): Xaa is A or G
  MOD_RES (22)..(23)..(24)..(25): Xaa is A or G or absent
TXXVPTRLEPLTILYYXXXXXXXXXEQLSNDMVVESX

SEQ ID NO: 13140 - protein, 40 aa, Artificial Sequence
  Non-cyclic GFR-binding peptide
  MOD_RES (6)..(7)..(39): Xaa is C or S
STPPTXXVPTRLSAISILYLDSANNVVLKNYQDMVVESXG

SEQ ID NO: 13141 - protein, 43 aa, Artificial Sequence
  Non-cyclic GFR-binding peptide
  MOD_RES (6)..(7)..(41)..(43): Xaa is C or S
  MOD_RES (21)..(22)..(23)..(24)..(25): Xaa is A or G
  MOD_RES (26)..(27)..(28)..(29): Xaa is A or G or absent
KIPKAXXVPTELSPISMLFIXXXXXXXXXYKQYEDMVVEGXGX

SEQ ID NO: 13142 - protein, 36 aa, Artificial Sequence
  Non-cyclic GFR-binding peptide
  MOD_RES (3)..(4): Xaa is C or S
  MOD_RES (18)..(19)..(20)..(21)..(22): Xaa is A or G
  MOD_RES (23)..(24)..(25)..(26): Xaa is A or G or absent
KAXXVPTELSPISMLFIXXXXXXXXXYKQYEDMVVE

SEQ ID NO: 13143 - protein, 33 aa, Artificial Sequence
  Non-cyclic GFR-binding peptide
  MOD_RES (1)..(1): Xaa is C or S
  MOD_RES (15)..(16)..(17)..(18)..(19): Xaa is A or G
  MOD_RES (20)..(21)..(22)..(23): Xaa is A or G or absent
XVPTRLEPLTILYYXXXXXXXXXEQLSNDMVVE

SEQ ID NO: 13144 - protein, 32 aa, Artificial Sequence
  Non-cyclic GFR-binding peptide
  MOD_RES (32)..(32): Xaa is C or S
APTKLSPISVLFIDDSSNVIYKQYENMVVRSX

SEQ ID NO: 13145 - protein, 43 aa, Artificial Sequence
  Non-cyclic GFR-binding peptide
  MOD_RES (5)..(6)..(40)..(42): Xaa is C or S
  MOD_RES (20)..(21)..(22)..(23)..(24): Xaa is A or G
  MOD_RES (25)..(26)..(27)..(28): Xaa is A or G or absent
VPKPXXAPTQLEPLTVLYYXXXXXXXXXEQLSNNMVVRAXGXH

SEQ ID NO: 13146 - protein, 37 aa, Artificial Sequence
  Non-cyclic GFR-binding peptide
  MOD_RES (3)..(35)..(37): Xaa is C or S
PTXAPTKLEPLPVVYYDDSSNVIEQLSNNMVVRSXGX

SEQ ID NO: 13147 - protein, 34 aa, Artificial Sequence
  Non-cyclic GFR-binding peptide
  MOD_RES (1)..(2)..(34): Xaa is C or S
XXAPTQLEPLTVLYYDDSSNVIEQLSNNMVVRAX

SEQ ID NO: 13148 - protein, 39 aa, Artificial Sequence
  Non-cyclic GFR-binding peptide
  MOD_RES (5)..(6)..(39): Xaa is C or S
  MOD_RES (20)..(21)..(22)..(23)..(24): Xaa is A or G
  MOD_RES (25)..(26)..(27)..(28): Xaa is A or G or absent
SAAPXXVPQALSPISILFIXXXXXXXXXYKQYEMIVRSX

SEQ ID NO: 13149 - protein, 41 aa, Artificial Sequence
  Non-cyclic GFR-binding peptide
  MOD_RES (7)..(39)..(41): Xaa is C or S
HVTKPTXAPTKLSPISVLFIDDSSNVIYKQYENMVVRSXGX

SEQ ID NO: 13150 - protein, 37 aa, Artificial Sequence
  Non-cyclic GFR-binding peptide
  MOD_RES (1)..(2)..(36): Xaa is C or S
  MOD_RES (16)..(17)..(18)..(19)..(20): Xaa is A or G
  MOD_RES (21)..(22)..(23)..(24): Xaa is A or G or absent
XXAPTKLEPLTVLYYXXXXXXXXXEQLSNNMVVRSXG

SEQ ID NO: 13151 - protein, 40 aa, Artificial Sequence
  Non-cyclic GFR-binding peptide
  MOD_RES (6)..(7)..(40): Xaa is C or S
  MOD_RES (21)..(22)..(23)..(24)..(25): Xaa is A or G
  MOD_RES (26)..(27)..(28)..(29): Xaa is A or G or absent
ASASPXXVSQDLSPISILFIXXXXXXXXXYKQYEMIVKSX

SEQ ID NO: 13152 - protein, 31 aa, Artificial Sequence
  Non-cyclic GFR-binding peptide
APTQLEPLTVLYYDDSSNVIEQLSNNMVVRA

SEQ ID NO: 13153 - protein, 38 aa, Artificial Sequence
  Non-cyclic GFR-binding peptide
  MOD_RES (6)..(7): Xaa is C or S
YVPKPXXAPTKLEPLTVLYYDDSSNVIEQLSNNMVVRS

SEQ ID NO: 13154 - protein, 39 aa, Artificial Sequence
  Non-cyclic GFR-binding peptide
  MOD_RES (4)..(5)..(39): Xaa is C or S
  MOD_RES (19)..(20)..(21)..(22)..(23): Xaa is A or G
  MOD_RES (24)..(25)..(26)..(27): Xaa is A or G or absent
PKPXXAPTKLEPLPVVYYXXXXXXXXXEQLSNNMVVRSX

SEQ ID NO: 13155 - protein, 38 aa, Artificial Sequence
  Non-cyclic GFR-binding peptide
  MOD_RES (3)..(4)..(37): Xaa is C or S
  MOD_RES (18)..(19)..(20)..(21)..(22): Xaa is A or G
  MOD_RES (23)..(24)..(25)..(26): Xaa is A or G or absent
SPXXVPQDLEPLPIVYYXXXXXXXXXEQLSNMVVKSXK

SEQ ID NO: 13156 - protein, 41 aa, Artificial Sequence
  Non-cyclic GFR-binding peptide
  MOD_RES (6)..(7)..(39)..(41): Xaa is C or S
STPPTXXVPTRLNAISILYFDSANNVVLKKYRDMVVESXGX

SEQ ID NO: 13157 - protein, 37 aa, Artificial Sequence
  Non-cyclic GFR-binding peptide
  MOD_RES (1)..(2)..(34)..(36): Xaa is C or S
XXAPTQLSPISVLFIDDSSNVIYKQYENMVVRAXGXH

SEQ ID NO: 13158 - protein, 35 aa, Artificial Sequence
  Non-cyclic GFR-binding peptide
  MOD_RES (34)..(34): Xaa is C or S
  MOD_RES (14)..(15)..(16)..(17)..(18): Xaa is A or G
  MOD_RES (19)..(20)..(21)..(22): Xaa is A or G or absent
VPTRLEPLPIVYYXXXXXXXXXEQLSNDMVVESXG

SEQ ID NO: 13159 - protein, 36 aa, Artificial Sequence
  Non-cyclic GFR-binding peptide
  MOD_RES (2)..(3)..(35): Xaa is C or S
AXXVPTELSPISMLFIDEYDKVVYKQYEEMVVEGXG

SEQ ID NO: 13160 - protein, 35 aa, Artificial Sequence
  Non-cyclic GFR-binding peptide
  MOD_RES (32)..(34): Xaa is C or S
VPTRLSAISILYLDSANNVVLKNYQDMVVESXGXR

SEQ ID NO: 13161 - protein, 37 aa, Artificial Sequence
  Non-cyclic GFR-binding peptide
  MOD_RES (3)..(4): Xaa is C or S
  MOD_RES (18)..(19)..(20)..(21)..(22): Xaa is A or G
  MOD_RES (23)..(24)..(25)..(26): Xaa is A or G or absent
KPXXAPTQLSPISVLFIXXXXXXXXXYKQYENMVVRA

SEQ ID NO: 13162 - protein, 31 aa, Artificial Sequence
  Non-cyclic GFR-binding peptide
  MOD_RES (1)..(1): Xaa is C or S
XVPTELEPLTMLYYDEYDKVVEQLSNEMVVE

SEQ ID NO: 13163 - protein, 42 aa, Artificial Sequence
  Non-cyclic GFR-binding peptide
  MOD_RES (5)..(6)..(40)..(42): Xaa is C or S
  MOD_RES (20)..(21)..(22)..(23)..(24): Xaa is A or G
  MOD_RES (25)..(26)..(27)..(28): Xaa is A or G or absent
VPKPXXAPTKLEPLPVVYYXXXXXXXXXEQLSNNMVVRSXGX

SEQ ID NO: 13164 - protein, 33 aa, Artificial Sequence
  Non-cyclic GFR-binding peptide
  MOD_RES (32)..(32): Xaa is C or S
APTQLSPISVLFIDDSSNVIYKQYENMVVRAXG

SEQ ID NO: 13165 - protein, 38 aa, Artificial Sequence
  Non-cyclic GFR-binding peptide
  MOD_RES (3)..(4)..(35)..(37): Xaa is C or S
SPXXVPQDLEPLPIVYYVGRTPKVEQLSNMVVKSXKXS

SEQ ID NO: 13166 - protein, 34 aa, Artificial Sequence
  Non-cyclic GFR-binding peptide
  MOD_RES (1)..(1): Xaa is C or S
  MOD_RES (15)..(16)..(17)..(18)..(19): Xaa is A or G
  MOD_RES (20)..(21)..(22)..(23): Xaa is A or G or absent
XVPTRLSAISILYLXXXXXXXXXLKNYQDMVVES

SEQ ID NO: 13167 - protein, 38 aa, Artificial Sequence
  Non-cyclic GFR-binding peptide
  MOD_RES (5)..(6)..(37): Xaa is C or S
SASPXXVPQDLSPISILFIVGRTPKVYKQYEMVVKSXK

SEQ ID NO: 13168 - protein, 36 aa, Artificial Sequence
  Non-cyclic GFR-binding peptide
  MOD_RES (1)..(33)..(35): Xaa is C or S
XVPTRLEPLPIVYYDSANNVVEQLSNDMVVESXGXR

SEQ ID NO: 13169 - protein, 41 aa, Artificial Sequence
  Non-cyclic GFR-binding peptide
  MOD_RES (5)..(6)..(38)..(40): Xaa is C or S
VPKPXXAPTKLEPLTVLYYDDSSNVIEQLSNNMVVRSXGXH

SEQ ID NO: 13170 - protein, 36 aa, Artificial Sequence
  Non-cyclic GFR-binding peptide
  MOD_RES (3)..(4): Xaa is C or S
  MOD_RES (18)..(19)..(20)..(21)..(22): Xaa is A or G
  MOD_RES (23)..(24)..(25)..(26): Xaa is A or G or absent
KPXXAPTKLSPISVLFIXXXXXXXXXYKQYENMVVR

SEQ ID NO: 13171 - protein, 35 aa, Artificial Sequence
  Non-cyclic GFR-binding peptide
  MOD_RES (1)..(2)..(35): Xaa is C or S
  MOD_RES (16)..(17)..(18)..(19)..(20): Xaa is A or G
  MOD_RES (21)..(22)..(23)..(24): Xaa is A or G or absent
XXVPQALEPLTILYYXXXXXXXXXEQLSNMIVRSX

SEQ ID NO: 13172 - protein, 34 aa, Artificial Sequence
  Non-cyclic GFR-binding peptide
  MOD_RES (3)..(4): Xaa is C or S
SPXXVSQDLEPLPIVYYIGKTPKIEQLSNMIVKS

SEQ ID NO: 13173 - protein, 34 aa, Artificial Sequence
  Non-cyclic GFR-binding peptide
  MOD_RES (1)..(1): Xaa is C or S
  MOD_RES (15)..(16)..(17)..(18)..(19): Xaa is A or G
  MOD_RES (20)..(21)..(22)..(23): Xaa is A or G or absent
XVPTRLNAISILYFXXXXXXXXXLKKYRDMVVES

SEQ ID NO: 13174 - protein, 33 aa, Artificial Sequence
  Non-cyclic GFR-binding peptide
  MOD_RES (1)..(33): Xaa is C or S
XVPTRLEPLTILYYDSANNVVEQLSNDMVVESX

SEQ ID NO: 13175 - protein, 39 aa, Artificial Sequence
  Non-cyclic GFR-binding peptide
  MOD_RES (6)..(7)..(39): Xaa is C or S
STPPTXXVPTRLNAISILYFDSANNVVLKKYRDMVVESX

SEQ ID NO: 13176 - protein, 35 aa, Artificial Sequence
  Non-cyclic GFR-binding peptide
  MOD_RES (2)..(3): Xaa is C or S
  MOD_RES (17)..(18)..(19)..(20)..(21): Xaa is A or G
  MOD_RES (22)..(23)..(24)..(25): Xaa is A or G or absent
AXXVPTELEPLTMLYYXXXXXXXXXEQLSNDMVVE

SEQ ID NO: 13177 - protein, 40 aa, Artificial Sequence
  Non-cyclic GFR-binding peptide
  MOD_RES (6)..(38)..(40): Xaa is C or S
VTKPTXAPTKLEPLPVVYYDDSSNVIEQLSNNMVVRSXGX

SEQ ID NO: 13178 - protein, 39 aa, Artificial Sequence
  Non-cyclic GFR-binding peptide
  MOD_RES (4)..(5)..(39): Xaa is C or S
  MOD_RES (19)..(20)..(21)..(22)..(23): Xaa is A or G
  MOD_RES (24)..(25)..(26)..(27): Xaa is A or G or absent
PKAXXVPTELSPISMLFIXXXXXXXXXYKQYEEMVVEGX

SEQ ID NO: 13179 - protein, 34 aa, Artificial Sequence
  Non-cyclic GFR-binding peptide
  MOD_RES (1)..(33): Xaa is C or S
XVPTELEPLTMLYYDEYDKVVEQLSNEMVVEGXG

SEQ ID NO: 13180 - protein, 37 aa, Artificial Sequence
  Non-cyclic GFR-binding peptide
  MOD_RES (3)..(4)..(37): Xaa is C or S
  MOD_RES (18)..(19)..(20)..(21)..(22): Xaa is A or G
  MOD_RES (23)..(24)..(25)..(26): Xaa is A or G or absent
APXXVPQALEPLTILYYXXXXXXXXXEQLSNMIVRSX

SEQ ID NO: 13181 - protein, 42 aa, Artificial Sequence
  Non-cyclic GFR-binding peptide
  MOD_RES (5)..(6)..(40)..(42): Xaa is C or S
  MOD_RES (20)..(21)..(22)..(23)..(24): Xaa is A or G
  MOD_RES (25)..(26)..(27)..(28): Xaa is A or G or absent
VPKPXXAPTKLEPLTVLYYXXXXXXXXXEQLSNNMVVRSXGX

SEQ ID NO: 13182 - protein, 40 aa, Artificial Sequence
  Non-cyclic GFR-binding peptide
  MOD_RES (5)..(37)..(39): Xaa is C or S
TKPTXAPTKLSPISVLFIDDSSNVIYKQYENMVVRSXGXH

SEQ ID NO: 13183 - protein, 38 aa, Artificial Sequence
  Non-cyclic GFR-binding peptide
  MOD_RES (3)..(4)..(38): Xaa is C or S
  MOD_RES (18)..(19)..(20)..(21)..(22): Xaa is A or G
  MOD_RES (23)..(24)..(25)..(26): Xaa is A or G or absent
PTXXVPTRLEPLTILYYXXXXXXXXXEQLSNDMVVESX

SEQ ID NO: 13184 - protein, 30 aa, Artificial Sequence
  Non-cyclic GFR-binding peptide
APTKLSPISVLFIDDSSNVIYKQYENMVVR

SEQ ID NO: 13185 - protein, 35 aa, Artificial Sequence
  Non-cyclic GFR-binding peptide
  MOD_RES (32)..(34): Xaa is C or S
VPTRLEPLTILYYDSANNVVEQLSNDMVVESXGXR

SEQ ID NO: 13186 - protein, 34 aa, Artificial Sequence
  Non-cyclic GFR-binding peptide
  MOD_RES (32)..(34): Xaa is C or S
VPTRLEPLTILYYDSANNVVEQLSNDMVVESXGX

SEQ ID NO: 13187 - protein, 36 aa, Artificial Sequence
  Non-cyclic GFR-binding peptide
  MOD_RES (1)..(2)..(36): Xaa is C or S
  MOD_RES (16)..(17)..(18)..(19)..(20): Xaa is A or G
  MOD_RES (21)..(22)..(23)..(24): Xaa is A or G or absent
XXVPTELEPLTMLYYXXXXXXXXXEQLSNDMVVEGX

SEQ ID NO: 13188 - protein, 39 aa, Artificial Sequence
  Non-cyclic GFR-binding peptide
  MOD_RES (3)..(37)..(39): Xaa is C or S
  MOD_RES (17)..(18)..(19)..(20)..(21): Xaa is A or G
  MOD_RES (22)..(23)..(24)..(25): Xaa is A or G or absent
PTXAPTKLEPLPVVYYXXXXXXXXXEQLSNNMVVRSXGX

SEQ ID NO: 13189 - protein, 30 aa, Artificial Sequence; identical to SEQ ID NO: 982
  Non-cyclic GFR-binding peptide

SEQ ID NO: 13190 - protein, 37 aa, Artificial Sequence
  Non-cyclic GFR-binding peptide
  MOD_RES (3)..(4): Xaa is C or S
  MOD_RES (18)..(19)..(20)..(21)..(22): Xaa is A or G
  MOD_RES (23)..(24)..(25)..(26): Xaa is A or G or absent
KAXXVPTELEPLTMLYYXXXXXXXXXEQLSNDMVVEG

SEQ ID NO: 13191 - protein, 38 aa, Artificial Sequence
  Non-cyclic GFR-binding peptide
  MOD_RES (5)..(37): Xaa is C or S
TKPTXAPTKLSPISVLFIDDSSNVIYKQYENMVVRSXG

SEQ ID NO: 13192 - protein, 34 aa, Artificial Sequence
  Non-cyclic GFR-binding peptide
  MOD_RES (3)..(4): Xaa is C or S
SPXXVPQDLSPISILFIVGRTPKVYKQYEMVVKS

SEQ ID NO: 13193 - protein, 35 aa, Artificial Sequence
  Non-cyclic GFR-binding peptide
  MOD_RES (2)..(3): Xaa is C or S
  MOD_RES (17)..(18)..(19)..(20)..(21): Xaa is A or G
  MOD_RES (22)..(23)..(24)..(25): Xaa is A or G or absent
AXXVPTELEPLPMVYYXXXXXXXXXEQLSNDMVVE

SEQ ID NO: 13194 - protein, 41 aa, Artificial Sequence
  Non-cyclic GFR-binding peptide
  MOD_RES (7)..(39)..(41): Xaa is C or S
HVTKPTXAPTKLEPLTVLYYDDSSNVIEQLSNNMVVRSXGX

SEQ ID NO: 13195 - protein, 37 aa, Artificial Sequence
  Non-cyclic GFR-binding peptide
  MOD_RES (1)..(35)..(37): Xaa is C or S
  MOD_RES (15)..(16)..(17)..(18)..(19): Xaa is A or G
  MOD_RES (20)..(21)..(22)..(23): Xaa is A or G or absent
XAPTQLEPLPVVYYXXXXXXXXXEQLSNNMVVRAXGX

SEQ ID NO: 13196 - protein, 38 aa, Artificial Sequence
  Non-cyclic GFR-binding peptide
  MOD_RES (3)..(4)..(38): Xaa is C or S
  MOD_RES (18)..(19)..(20)..(21)..(22): Xaa is A or G
  MOD_RES (23)..(24)..(25)..(26): Xaa is A or G or absent
KPXXAPTQLEPLPVVYYXXXXXXXXXEQLSNNMVVRAX

SEQ ID NO: 13197 - protein, 30 aa, Artificial Sequence; identical to SEQ ID NO: 1047
  Non-cyclic GFR-binding peptide

SEQ ID NO: 13198 - protein, 41 aa, Artificial Sequence
  Non-cyclic GFR-binding peptide
  MOD_RES (4)..(5)..(39)..(41): Xaa is C or S
  MOD_RES (19)..(20)..(21)..(22)..(23): Xaa is A or G
  MOD_RES (24)..(25)..(26)..(27): Xaa is A or G or absent
PPTXXVPTRLNAISILYFXXXXXXXXXLKKYRDMVVESXGX

SEQ ID NO: 13199 - protein, 32 aa, Artificial Sequence
  Non-cyclic GFR-binding peptide
  MOD_RES (1)..(1): Xaa is C or S
XAPTKLSPISVLFIDDSSNVIYKQYENMVVRS

SEQ ID NO: 13200 - protein, 40 aa, Artificial Sequence
  Non-cyclic GFR-binding peptide
  MOD_RES (5)..(6)..(38)..(40): Xaa is C or S
VPKPXXAPTKLEPLTVLYYDDSSNVIEQLSNNMVVRSXGX

SEQ ID NO: 13201 - protein, 38 aa, Artificial Sequence
  Non-cyclic GFR-binding peptide
  MOD_RES (2)..(3)..(37): Xaa is C or S
  MOD_RES (17)..(18)..(19)..(20)..(21): Xaa is A or G
  MOD_RES (22)..(23)..(24)..(25): Xaa is A or G or absent
TXXVPTRLSAISILYLXXXXXXXXXLKNYQDMVVESXG

SEQ ID NO: 13202 - protein, 38 aa, Artificial Sequence
  Non-cyclic GFR-binding peptide
  MOD_RES (4)..(5): Xaa is C or S
  MOD_RES (19)..(20)..(21)..(22)..(23): Xaa is A or G
  MOD_RES (24)..(25)..(26)..(27): Xaa is A or G or absent
PKPXXAPTQLEPLTVLYYXXXXXXXXXEQLSNNMVVRA

SEQ ID NO: 13203 - protein, 35 aa, Artificial Sequence
  Non-cyclic GFR-binding peptide
  MOD_RES (32)..(34): Xaa is C or S
APTKLEPLTVLYYDDSSNVIEQLSNNMVVRSXGXH

SEQ ID NO: 13204 - protein, 33 aa, Artificial Sequence
  Non-cyclic GFR-binding peptide
  MOD_RES (1)..(33): Xaa is C or S
XVPTELEPLTMLYYDENEKVVEQLSNDMVVEGX

SEQ ID NO: 13205 - protein, 34 aa, Artificial Sequence
  Non-cyclic GFR-binding peptide
  MOD_RES (2)..(3): Xaa is C or S
PXXAPTQLEPLTVLYYDDSSNVIEQLSNNMVVRA

SEQ ID NO: 13206 - protein, 36 aa, Artificial Sequence
  Non-cyclic GFR-binding peptide
  MOD_RES (34)..(36): Xaa is C or S
  MOD_RES (14)..(15)..(16)..(17)..(18): Xaa is A or G
  MOD_RES (19)..(20)..(21)..(22): Xaa is A or G or absent
VPTELEPLTMLYYXXXXXXXXXEQLSNDMVVEGXGX

SEQ ID NO: 13207 - protein, 35 aa, Artificial Sequence
  Non-cyclic GFR-binding peptide
  MOD_RES (3)..(4): Xaa is C or S
KPXXAPTQLEPLPVVYYDDSSNVIEQLSNNMVVRA

SEQ ID NO: 13208 - protein, 39 aa, Artificial Sequence
  Non-cyclic GFR-binding peptide
  MOD_RES (6)..(7): Xaa is C or S
  MOD_RES (21)..(22)..(23)..(24)..(25): Xaa is A or G
  MOD_RES (26)..(27)..(28)..(29): Xaa is A or G or absent
ASASPXXVSQDLSPISILFIXXXXXXXXXYKQYEMIVKS

SEQ ID NO: 13209 - protein, 37 aa, Artificial Sequence
  Non-cyclic GFR-binding peptide
  MOD_RES (2)..(3)..(34)..(36): Xaa is C or S
PXXVPQALSPISILFIVGRKPKVYKQYEMIVRSXKXS

SEQ ID NO: 13210 - protein, 38 aa, Artificial Sequence
  Non-cyclic GFR-binding peptide
  MOD_RES (5)..(6): Xaa is C or S
  MOD_RES (20)..(21)..(22)..(23)..(24): Xaa is A or G
  MOD_RES (25)..(26)..(27)..(28): Xaa is A or G or absent
SASPXXVSQDLSPISILFIXXXXXXXXXYKQYEMIVKS

SEQ ID NO: 13211 - protein, 33 aa, Artificial Sequence
  Non-cyclic GFR-binding peptide
  MOD_RES (1)..(2): Xaa is C or S
XXVPTELEPLPMVYYDENEKVVEQLSNDMVVEG

SEQ ID NO: 13212 - protein, 38 aa, Artificial Sequence
  Non-cyclic GFR-binding peptide
  MOD_RES (6)..(7): Xaa is C or S
SIPKAXXVPTELSPISMLFIDEYDKVVYKQYEEMVVEG

SEQ ID NO: 13213 - protein, 37 aa, Artificial Sequence
  Non-cyclic GFR-binding peptide
  MOD_RES (6)..(7): Xaa is C or S
YVPKPXXAPTKLSPISVLFIDDSSNVIYKQYENMVVR

SEQ ID NO: 13214 - protein, 41 aa, Artificial Sequence
  Non-cyclic GFR-binding peptide
  MOD_RES (3)..(4)..(38)..(40): Xaa is C or S
  MOD_RES (18)..(19)..(20)..(21)..(22): Xaa is A or G
  MOD_RES (23)..(24)..(25)..(26): Xaa is A or G or absent
KAXXVPTELEPLPMVYYXXXXXXXXXEQLSNDMVVEGXGXR

SEQ ID NO: 13215 - protein, 36 aa, Artificial Sequence
  Non-cyclic GFR-binding peptide
  MOD_RES (4)..(4): Xaa is C or S
  MOD_RES (18)..(19)..(20)..(21)..(22): Xaa is A or G
  MOD_RES (23)..(24)..(25)..(26): Xaa is A or G or absent
KPTXAPTKLEPLTVLYYXXXXXXXXXEQLSNNMVVR

SEQ ID NO: 13216 - protein, 37 aa, Artificial Sequence
  Non-cyclic GFR-binding peptide
  MOD_RES (5)..(37): Xaa is C or S
TKPTXAPTKLSPISVLFIDDSSNVIYKQYENMVVRSX

SEQ ID NO: 13217 - protein, 35 aa, Artificial Sequence
  Non-cyclic GFR-binding peptide
  MOD_RES (5)..(5): Xaa is C or S
TKPTXAPTKLEPLTVLYYDDSSNVIEQLSNNMVVR

SEQ ID NO: 13218 - protein, 36 aa, Artificial Sequence
  Non-cyclic GFR-binding peptide
  MOD_RES (3)..(4)..(36): Xaa is C or S
PTXXVPTRLNAISILYFDSANNVVLKKYRDMVVESX

SEQ ID NO: 13219 - protein, 38 aa, Artificial Sequence
  Non-cyclic GFR-binding peptide
  MOD_RES (1)..(35)..(37): Xaa is C or S
  MOD_RES (15)..(16)..(17)..(18)..(19): Xaa is A or G
  MOD_RES (20)..(21)..(22)..(23): Xaa is A or G or absent
XAPTQLEPLTVLYYXXXXXXXXXEQLSNNMVVRAXGXH

SEQ ID NO: 13220 - protein, 42 aa, Artificial Sequence
  Non-cyclic GFR-binding peptide
  MOD_RES (6)..(40)..(42): Xaa is C or S
  MOD_RES (20)..(21)..(22)..(23)..(24): Xaa is A or G
  MOD_RES (25)..(26)..(27)..(28): Xaa is A or G or absent
VTKPTXAPTKLSPISVLFIXXXXXXXXXYKQYENMVVRSXGX

SEQ ID NO: 13221 - protein, 40 aa, Artificial Sequence
  Non-cyclic GFR-binding peptide
  MOD_RES (4)..(5)..(39): Xaa is C or S
  MOD_RES (19)..(20)..(21)..(22)..(23): Xaa is A or G
  MOD_RES (24)..(25)..(26)..(27): Xaa is A or G or absent
PPTXXVPTRLEPLPIVYYXXXXXXXXXEQLSNDMVVESXG

SEQ ID NO: 13222 - protein, 39 aa, Artificial Sequence
  Non-cyclic GFR-binding peptide
  MOD_RES (5)..(6)..(38): Xaa is C or S
TPPTXXVPTRLEPLPIVYYDSANNVVEQLSNDMVVESXG

SEQ ID NO: 13223 - protein, 35 aa, Artificial Sequence
  Non-cyclic GFR-binding peptide
  MOD_RES (1)..(2)..(34): Xaa is C or S
XXAPTKLSPISVLFIDDSSNVIYKQYENMVVRSXG

SEQ ID NO: 13224 - protein, 34 aa, Artificial Sequence
  Non-cyclic GFR-binding peptide
  MOD_RES (34)..(34): Xaa is C or S
  MOD_RES (14)..(15)..(16)..(17)..(18): Xaa is A or G
  MOD_RES (19)..(20)..(21)..(22): Xaa is A or G or absent
APTQLEPLTVLYYXXXXXXXXXEQLSNNMVVRAX

SEQ ID NO: 13225 - protein, 36 aa, Artificial Sequence
  Non-cyclic GFR-binding peptide
  MOD_RES (34)..(36): Xaa is C or S
  MOD_RES (14)..(15)..(16)..(17)..(18): Xaa is A or G
  MOD_RES (19)..(20)..(21)..(22): Xaa is A or G or absent
VPTELEPLPMVYYXXXXXXXXXEQLSNDMVVEGXGX

SEQ ID NO: 13226 - protein, 37 aa, Artificial Sequence
  Non-cyclic GFR-binding peptide
  MOD_RES (5)..(6): Xaa is C or S
TPPTXXVPTRLSAISILYLDSANNVVLKNYQDMVVES

SEQ ID NO: 13227 - protein, 37 aa, Artificial Sequence
  Non-cyclic GFR-binding peptide
  MOD_RES (6)..(7): Xaa is C or S
KIPKAXXVPTELEPLTMLYYDENEKVVEQLSNDMVVE

SEQ ID NO: 13228 - protein, 33 aa, Artificial Sequence
  Non-cyclic GFR-binding peptide
  MOD_RES (1)..(33): Xaa is C or S
XVPTRLEPLPIVYYDSANNVVEQLSNDMVVESX

SEQ ID NO: 13229 - protein, 33 aa, Artificial Sequence
  Non-cyclic GFR-binding peptide
  MOD_RES (1)..(2)..(33): Xaa is C or S
XXVSQDLEPLPIVYYIGKTPKIEQLSNMIVKSX

SEQ ID NO: 13230 - protein, 43 aa, Artificial Sequence
  Non-cyclic GFR-binding peptide
  MOD_RES (5)..(6)..(40)..(42): Xaa is C or S
  MOD_RES (20)..(21)..(22)..(23)..(24): Xaa is A or G
  MOD_RES (25)..(26)..(27)..(28): Xaa is A or G or absent
TPPTXXVPTRLNAISILYFXXXXXXXXXLKKYRDMVVESXGXR

SEQ ID NO: 13231 - protein, 41 aa, Artificial Sequence
  Non-cyclic GFR-binding peptide
  MOD_RES (6)..(7)..(39)..(41): Xaa is C or S
SIPKAXXVPTELEPLPMVYYDEYDKVVEQLSNEMVVEGXGX

SEQ ID NO: 13232 - protein, 40 aa, Artificial Sequence
  Non-cyclic GFR-binding peptide
  MOD_RES (3)..(4)..(37)..(39): Xaa is C or S
  MOD_RES (18)..(19)..(20)..(21)..(22): Xaa is A or G
  MOD_RES (23)..(24)..(25)..(26): Xaa is A or G or absent
SPXXVPQDLEPLPIVYYXXXXXXXXXEQLSNMVVKSXKXS

SEQ ID NO: 13233 - protein, 36 aa, Artificial Sequence
  Non-cyclic GFR-binding peptide
  MOD_RES (1)..(2)..(34)..(36): Xaa is C or S
XXVPTELEPLTMLYYDENEKVVEQLSNDMVVEGXGX

SEQ ID NO: 13234 - protein, 31 aa, Artificial Sequence
  Non-cyclic GFR-binding peptide
  MOD_RES (1)..(1): Xaa is C or S
XVPTRLSAISILYLDSANNVVLKNYQDMVVE

SEQ ID NO: 13235 - protein, 35 aa, Artificial Sequence
  Non-cyclic GFR-binding peptide
  MOD_RES (1)..(2)..(35): Xaa is C or S
  MOD_RES (16)..(17)..(18)..(19)..(20): Xaa is A or G
  MOD_RES (21)..(22)..(23)..(24): Xaa is A or G or absent
XXVSQDLSPISILFIXXXXXXXXXYKQYEMIVKSX

SEQ ID NO: 13236 - protein, 30 aa, Artificial Sequence; identical to SEQ ID NO: 983
  Non-cyclic GFR-binding peptide

SEQ ID NO: 13237 - protein, 38 aa, Artificial Sequence
  Non-cyclic GFR-binding peptide
  MOD_RES (5)..(6)..(38): Xaa is C or S
TPPTXXVPTRLNAISILYFDSANNVVLKKYRDMVVESX

SEQ ID NO: 13238 - protein, 38 aa, Artificial Sequence
  Non-cyclic GFR-binding peptide
  MOD_RES (3)..(4)..(36)..(38): Xaa is C or S
KPXXAPTQLSPISVLFIDDSSNVIYKQYENMVVRAXGX

SEQ ID NO: 13239 - protein, 38 aa, Artificial Sequence
  Non-cyclic GFR-binding peptide
  MOD_RES (6)..(38): Xaa is C or S
VTKPTXAPTKLEPLPVVYYDDSSNVIEQLSNNMVVRSX

SEQ ID NO: 13240 - protein, 34 aa, Artificial Sequence
  Non-cyclic GFR-binding peptide
  MOD_RES (34)..(34): Xaa is C or S
  MOD_RES (14)..(15)..(16)..(17)..(18): Xaa is A or G
  MOD_RES (19)..(20)..(21)..(22): Xaa is A or G or absent
VPTELEPLTMLYYXXXXXXXXXEQLSNEMVVEGX

SEQ ID NO: 13241 - protein, 40 aa, Artificial Sequence
  Non-cyclic GFR-binding peptide
  MOD_RES (3)..(4)..(38)..(40): Xaa is C or S
  MOD_RES (18)..(19)..(20)..(21)..(22): Xaa is A or G
  MOD_RES (23)..(24)..(25)..(26): Xaa is A or G or absent
KPXXAPTKLEPLTVLYYXXXXXXXXXEQLSNNMVVRSXGX

SEQ ID NO: 13242 - protein, 37 aa, Artificial Sequence
  Non-cyclic GFR-binding peptide
  MOD_RES (5)..(6): Xaa is C or S
VPKPXXAPTKLEPLPVVYYDDSSNVIEQLSNNMVVRS

SEQ ID NO: 13243 - protein, 32 aa, Artificial Sequence
  Non-cyclic GFR-binding peptide
  MOD_RES (14)..(15)..(16)..(17)..(18): Xaa is A or G
  MOD_RES (19)..(20)..(21)..(22): Xaa is A or G or absent
APTQLEPLPVVYYXXXXXXXXXEQLSNNMVVR

SEQ ID NO: 13244 - protein, 43 aa, Artificial Sequence
  Non-cyclic GFR-binding peptide
  MOD_RES (6)..(7)..(41)..(43): Xaa is C or S
  MOD_RES (21)..(22)..(23)..(24)..(25): Xaa is A or G
  MOD_RES (26)..(27)..(28)..(29): Xaa is A or G or absent
YVPKPXXAPTKLEPLTVLYYXXXXXXXXXEQLSNNMVVRSXGX

SEQ ID NO: 13245 - protein, 39 aa, Artificial Sequence
  Non-cyclic GFR-binding peptide
  MOD_RES (4)..(5)..(39): Xaa is C or S
  MOD_RES (19)..(20)..(21)..(22)..(23): Xaa is A or G
  MOD_RES (24)..(25)..(26)..(27): Xaa is A or G or absent
PKAXXVPTELEPLPMVYYXXXXXXXXXEQLSNDMVVEGX

SEQ ID NO: 13246 - protein, 38 aa, Artificial Sequence
  Non-cyclic GFR-binding peptide
  MOD_RES (3)..(4)..(35)..(37): Xaa is C or S
APXXVPQALEPLTILYYVGRKPKVEQLSNMIVRSXKXS

SEQ ID NO: 13247 - protein, 38 aa, Artificial Sequence
  Non-cyclic GFR-binding peptide
  MOD_RES (2)..(3)..(36)..(38): Xaa is C or S
  MOD_RES (17)..(18)..(19)..(20)..(21): Xaa is A or G
  MOD_RES (22)..(23)..(24)..(25): Xaa is A or G or absent
PXXVPQALSPISILFIXXXXXXXXXYKQYEMIVRSXKX

SEQ ID NO: 13248 - protein, 33 aa, Artificial Sequence
  Non-cyclic GFR-binding peptide
  MOD_RES (1)..(1): Xaa is C or S
  MOD_RES (15)..(16)..(17)..(18)..(19): Xaa is A or G
  MOD_RES (20)..(21)..(22)..(23): Xaa is A or G or absent
XAPTQLEPLTVLYYXXXXXXXXXEQLSNNMVVR

SEQ ID NO: 13249 - protein, 37 aa, Artificial Sequence
  Non-cyclic GFR-binding peptide
  MOD_RES (2)..(3)..(35)..(37): Xaa is C or S
AXXVPTELSPISMLFIDEYDKVVYKQYEEMVVEGXGX

SEQ ID NO: 13250 - protein, 37 aa, Artificial Sequence
  Non-cyclic GFR-binding peptide
  MOD_RES (2)..(3)..(35)..(37): Xaa is C or S
AXXVPTELEPLTMLYYDEYDKVVEQLSNEMVVEGXGX

SEQ ID NO: 13251 - protein, 33 aa, Artificial Sequence
  Non-cyclic GFR-binding peptide
  MOD_RES (32)..(32): Xaa is C or S
VPTELEPLPMVYYDEYDKVVEQLSNEMVVEGXG

SEQ ID NO: 13252 - protein, 37 aa, Artificial Sequence
  Non-cyclic GFR-binding peptide
  MOD_RES (1)..(2)..(36): Xaa is C or S
  MOD_RES (16)..(17)..(18)..(19)..(20): Xaa is A or G
  MOD_RES (21)..(22)..(23)..(24): Xaa is A or G or absent
XXVPTRLSAISILYLXXXXXXXXXLKNYQDMVVESXG

SEQ ID NO: 13253 - protein, 37 aa, Artificial Sequence
  Non-cyclic GFR-binding peptide
  MOD_RES (4)..(36): Xaa is C or S
KPTXAPTKLEPLTVLYYDDSSNVIEQLSNNMVVRSXG

SEQ ID NO: 13254 - protein, 36 aa, Artificial Sequence
  Non-cyclic GFR-binding peptide
  MOD_RES (2)..(3): Xaa is C or S
  MOD_RES (17)..(18)..(19)..(20)..(21): Xaa is A or G
  MOD_RES (22)..(23)..(24)..(25): Xaa is A or G or absent
PXXAPTKLSPISVLFIXXXXXXXXXYKQYENMVVRS

SEQ ID NO: 13255 - protein, 35 aa, Artificial Sequence
  Non-cyclic GFR-binding peptide
  MOD_RES (1)..(2): Xaa is C or S
  MOD_RES (16)..(17)..(18)..(19)..(20): Xaa is A or G
  MOD_RES (21)..(22)..(23)..(24): Xaa is A or G or absent
XXVPTRLNAISILYFXXXXXXXXXLKKYRDMVVES

SEQ ID NO: 13256 - protein, 38 aa, Artificial Sequence
  Non-cyclic GFR-binding peptide
  MOD_RES (5)..(6)..(38): Xaa is C or S
VPKPXXAPTKLSPISVLFIDDSSNVIYKQYENMVVRSX

SEQ ID NO: 13257 - protein, 42 aa, Artificial Sequence
  Non-cyclic GFR-binding peptide
  MOD_RES (7)..(39)..(41): Xaa is C or S
HVTKPTXAPTKLEPLPVVYYDDSSNVIEQLSNNMVVRSXGXH

SEQ ID NO: 13258 - protein, 39 aa, Artificial Sequence
  Non-cyclic GFR-binding peptide
  MOD_RES (1)..(2)..(36)..(38): Xaa is C or S
  MOD_RES (16)..(17)..(18)..(19)..(20): Xaa is A or G
  MOD_RES (21)..(22)..(23)..(24): Xaa is A or G or absent
XXAPTKLEPLPVVYYXXXXXXXXXEQLSNNMVVRSXGXH

SEQ ID NO: 13259 - protein, 41 aa, Artificial Sequence
  Non-cyclic GFR-binding peptide
  MOD_RES (6)..(7)..(41): Xaa is C or S
  MOD_RES (21)..(22)..(23)..(24)..(25): Xaa is A or G
  MOD_RES (26)..(27)..(28)..(29): Xaa is A or G or absent
SIPKAXXVPTELEPLTMLYYXXXXXXXXXEQLSNEMVVEGX

SEQ ID NO: 13260 - protein, 38 aa, Artificial Sequence
  Non-cyclic GFR-binding peptide
  MOD_RES (5)..(6): Xaa is C or S
  MOD_RES (20)..(21)..(22)..(23)..(24): Xaa is A or G
  MOD_RES (25)..(26)..(27)..(28): Xaa is A or G or absent
TPPTXXVPTRLEPLTILYYXXXXXXXXXEQLSNDMVVE

SEQ ID NO: 13261 - protein, 39 aa, Artificial Sequence
  Non-cyclic GFR-binding peptide
  MOD_RES (4)..(5)..(39): Xaa is C or S
  MOD_RES (19)..(20)..(21)..(22)..(23): Xaa is A or G
  MOD_RES (24)..(25)..(26)..(27): Xaa is A or G or absent
PPTXXVPTRLNAISILYFXXXXXXXXXLKKYRDMVVESX

SEQ ID NO: 13262 - protein, 39 aa, Artificial Sequence
  Non-cyclic GFR-binding peptide
  MOD_RES (4)..(5)..(37)..(39): Xaa is C or S
PKPXXAPTKLSPISVLFIDDSSNVIYKQYENMVVRSXGX

SEQ ID NO: 13263 - protein, 37 aa, Artificial Sequence
  Non-cyclic GFR-binding peptide
  MOD_RES (6)..(7): Xaa is C or S
STPPTXXVPTRLSAISILYLDSANNVVLKNYQDMVVE

SEQ ID NO: 13264 - protein, 38 aa, Artificial Sequence
  Non-cyclic GFR-binding peptide
  MOD_RES (3)..(4)..(36)..(38): Xaa is C or S
KPXXAPTQLEPLTVLYYDDSSNVIEQLSNNMVVRAXGX

SEQ ID NO: 13265 - protein, 42 aa, Artificial Sequence
  Non-cyclic GFR-binding peptide
  MOD_RES (4)..(5)..(39)..(41): Xaa is C or S
  MOD_RES (19)..(20)..(21)..(22)..(23): Xaa is A or G
  MOD_RES (24)..(25)..(26)..(27): Xaa is A or G or absent
PPTXXVPTRLSAISILYLXXXXXXXXXLKNYQDMVVESXGXR

SEQ ID NO: 13266 - protein, 33 aa, Artificial Sequence
  Non-cyclic GFR-binding peptide
  MOD_RES (1)..(1): Xaa is C or S
  MOD_RES (15)..(16)..(17)..(18)..(19): Xaa is A or G
  MOD_RES (20)..(21)..(22)..(23): Xaa is A or G or absent
XVPQDLEPLPIVYYXXXXXXXXXEQLSNMVVKS

SEQ ID NO: 13267 - protein, 37 aa, Artificial Sequence
  Non-cyclic GFR-binding peptide
  MOD_RES (2)..(3)..(35)..(37): Xaa is C or S
AXXVPTELSPISMLFIDENEKVVYKQYEDMVVEGXGX

SEQ ID NO: 13268 - protein, 41 aa, Artificial Sequence
  Non-cyclic GFR-binding peptide
  MOD_RES (4)..(38)..(40): Xaa is C or S
  MOD_RES (18)..(19)..(20)..(21)..(22): Xaa is A or G
  MOD_RES (23)..(24)..(25)..(26): Xaa is A or G or absent
KPTXAPTKLEPLPVVYYXXXXXXXXXEQLSNNMVVRSXGXH

SEQ ID NO: 13269 - protein, 36 aa, Artificial Sequence
  Non-cyclic GFR-binding peptide
  MOD_RES (1)..(2)..(34)..(36): Xaa is C or S
XXVPTELSPISMLFIDENEKVVYKQYEDMVVEGXGX

SEQ ID NO: 13270 - protein, 36 aa, Artificial Sequence
  Non-cyclic GFR-binding peptide
  MOD_RES (4)..(36): Xaa is C or S
KPTXAPTKLEPLTVLYYDDSSNVIEQLSNNMVVRSX

SEQ ID NO: 13271 - protein, 39 aa, Artificial Sequence
  Non-cyclic GFR-binding peptide
  MOD_RES (3)..(4)..(38): Xaa is C or S
  MOD_RES (18)..(19)..(20)..(21)..(22): Xaa is A or G
  MOD_RES (23)..(24)..(25)..(26): Xaa is A or G or absent
PTXXVPTRLEPLPIVYYXXXXXXXXXEQLSNDMVVESXG

SEQ ID NO: 13272 - protein, 36 aa, Artificial Sequence
  Non-cyclic GFR-binding peptide
  MOD_RES (1)..(35): Xaa is C or S
  MOD_RES (15)..(16)..(17)..(18)..(19): Xaa is A or G
  MOD_RES (20)..(21)..(22)..(23): Xaa is A or G or absent
XVPTELEPLTMLYYXXXXXXXXXEQLSNEMVVEGXG

SEQ ID NO: 13273 - protein, 37 aa, Artificial Sequence
  Non-cyclic GFR-binding peptide
  MOD_RES (6)..(7): Xaa is C or S
ASAAPXXVPQALEPLTILYYVGRKPKVEQLSNMIVRS

SEQ ID NO: 13274 - protein, 37 aa, Artificial Sequence
  Non-cyclic GFR-binding peptide
  MOD_RES (4)..(5)..(37): Xaa is C or S
PPTXXVPTRLNAISILYFDSANNVVLKKYRDMVVESX

SEQ ID NO: 13275 - protein, 41 aa, Artificial Sequence
  Non-cyclic GFR-binding peptide
  MOD_RES (4)..(5)..(38)..(40): Xaa is C or S
  MOD_RES (19)..(20)..(21)..(22)..(23): Xaa is A or G
  MOD_RES (24)..(25)..(26)..(27): Xaa is A or G or absent
AAPXXVPQALEPLTILYYXXXXXXXXXEQLSNMIVRSXKXS

SEQ ID NO: 13276 - protein, 37 aa, Artificial Sequence
  Non-cyclic GFR-binding peptide
  MOD_RES (3)..(4)..(35)..(37): Xaa is C or S
SPXXVPQDLEPLPIVYYVGRTPKVEQLSNMVVKSXKX

SEQ ID NO: 13277 - protein, 34 aa, Artificial Sequence
  Non-cyclic GFR-binding peptide
  MOD_RES (31)..(33): Xaa is C or S
VSQDLEPLPIVYYIGKTPKIEQLSNMIVKSXKXS

SEQ ID NO: 13278 - protein, 42 aa, Artificial Sequence
  Non-cyclic GFR-binding peptide
  MOD_RES (5)..(6)..(40)..(42): Xaa is C or S
  MOD_RES (20)..(21)..(22)..(23)..(24): Xaa is A or G
  MOD_RES (25)..(26)..(27)..(28): Xaa is A or G or absent
IPKAXXVPTELSPISMLFIXXXXXXXXXYKQYEDMVVEGXGX

SEQ ID NO: 13279 - protein, 37 aa, Artificial Sequence
  Non-cyclic GFR-binding peptide
  MOD_RES (1)..(35)..(37): Xaa is C or S
  MOD_RES (15)..(16)..(17)..(18)..(19): Xaa is A or G
  MOD_RES (20)..(21)..(22)..(23): Xaa is A or G or absent
XAPTQLEPLTVLYYXXXXXXXXXEQLSNNMVVRAXGX

SEQ ID NO: 13280 - protein, 33 aa, Artificial Sequence
  Non-cyclic GFR-binding peptide
  MOD_RES (33)..(33): Xaa is C or S
  MOD_RES (14)..(15)..(16)..(17)..(18): Xaa is A or G
  MOD_RES (19)..(20)..(21)..(22): Xaa is A or G or absent
VPQALEPLTILYYXXXXXXXXXEQLSNMIVRSX

SEQ ID NO: 13281 - protein, 40 aa, Artificial Sequence
  Non-cyclic GFR-binding peptide
  MOD_RES (3)..(4)..(38)..(40): Xaa is C or S
  MOD_RES (18)..(19)..(20)..(21)..(22): Xaa is A or G
  MOD_RES (23)..(24)..(25)..(26): Xaa is A or G or absent
KAXXVPTELSPISMLFIXXXXXXXXXYKQYEDMVVEGXGX

SEQ ID NO: 13282 - protein, 41 aa, Artificial Sequence
  Non-cyclic GFR-binding peptide
  MOD_RES (3)..(4)..(38)..(40): Xaa is C or S
  MOD_RES (18)..(19)..(20)..(21)..(22): Xaa is A or G
  MOD_RES (23)..(24)..(25)..(26): Xaa is A or G or absent
KAXXVPTELSPISMLFIXXXXXXXXXYKQYEDMVVEGXGXR

SEQ ID NO: 13283 - protein, 35 aa, Artificial Sequence
  Non-cyclic GFR-binding peptide
  MOD_RES (1)..(35): Xaa is C or S
  MOD_RES (15)..(16)..(17)..(18)..(19): Xaa is A or G
  MOD_RES (20)..(21)..(22)..(23): Xaa is A or G or absent
XVPTELEPLTMLYYXXXXXXXXXEQLSNEMVVEGX

SEQ ID NO: 13284 - protein, 35 aa, Artificial Sequence
  Non-cyclic GFR-binding peptide
  MOD_RES (1)..(2)..(34): Xaa is C or S
XXVPTELEPLPMVYYDENEKVVEQLSNDMVVEGXG

SEQ ID NO: 13285 - protein, 35 aa, Artificial Sequence
  Non-cyclic GFR-binding peptide
  MOD_RES (1)..(34): Xaa is C or S
  MOD_RES (15)..(16)..(17)..(18)..(19): Xaa is A or G
  MOD_RES (20)..(21)..(22)..(23): Xaa is A or G or absent
XVPQALEPLTILYYXXXXXXXXXEQLSNMIVRSXK

SEQ ID NO: 13286 - protein, 35 aa, Artificial Sequence
  Non-cyclic GFR-binding peptide
  MOD_RES (1)..(35): Xaa is C or S
  MOD_RES (15)..(16)..(17)..(18)..(19): Xaa is A or G
  MOD_RES (20)..(21)..(22)..(23): Xaa is A or G or absent
XAPTQLEPLTVLYYXXXXXXXXXEQLSNNMVVRAX

SEQ ID NO: 13287 - protein, 34 aa, Artificial Sequence
  Non-cyclic GFR-binding peptide
  MOD_RES (2)..(3): Xaa is C or S
AXXVPTELEPLTMLYYDEYDKVVEQLSNEMVVEG

SEQ ID NO: 13288 - protein, 42 aa, Artificial Sequence
  Non-cyclic GFR-binding peptide
  MOD_RES (5)..(6)..(40)..(42): Xaa is C or S
  MOD_RES (20)..(21)..(22)..(23)..(24): Xaa is A or G
  MOD_RES (25)..(26)..(27)..(28): Xaa is A or G or absent
VPKPXXAPTQLSPISVLFIXXXXXXXXXYKQYENMVVRAXGX

SEQ ID NO: 13289 - protein, 31 aa, Artificial Sequence
  Non-cyclic GFR-binding peptide
VPTELSPISMLFIDEYDKVVYKQYEEMVVEG

SEQ ID NO: 13290 - protein, 43 aa, Artificial Sequence
  Non-cyclic GFR-binding peptide
  MOD_RES (7)..(41)..(43): Xaa is C or S
  MOD_RES (21)..(22)..(23)..(24)..(25): Xaa is A or G
  MOD_RES (26)..(27)..(28)..(29): Xaa is A or G or absent
HVTKPTXAPTKLSPISVLFIXXXXXXXXXYKQYENMVVRSXGX

SEQ ID NO: 13291 - protein, 37 aa, Artificial Sequence
  Non-cyclic GFR-binding peptide
  MOD_RES (4)..(5): Xaa is C or S
  MOD_RES (19)..(20)..(21)..(22)..(23): Xaa is A or G
  MOD_RES (24)..(25)..(26)..(27): Xaa is A or G or absent
PPTXXVPTRLEPLTILYYXXXXXXXXXEQLSNDMVVE

SEQ ID NO: 13292 - protein, 40 aa, Artificial Sequence
  Non-cyclic GFR-binding peptide
  MOD_RES (3)..(4)..(38)..(40): Xaa is C or S
  MOD_RES (18)..(19)..(20)..(21)..(22): Xaa is A or G
  MOD_RES (23)..(24)..(25)..(26): Xaa is A or G or absent
PTXXVPTRLEPLTILYYXXXXXXXXXEQLSNDMVVESXGX

SEQ ID NO: 13293 - protein, 33 aa, Artificial Sequence
  Non-cyclic GFR-binding peptide
  MOD_RES (14)..(15)..(16)..(17)..(18): Xaa is A or G
  MOD_RES (19)..(20)..(21)..(22): Xaa is A or G or absent
VPTRLEPLPIVYYXXXXXXXXXEQLSNDMVVES

SEQ ID NO: 13294 - protein, 38 aa, Artificial Sequence
  Non-cyclic GFR-binding peptide
  MOD_RES (7)..(7): Xaa is C or S
HVTKPTXAPTKLEPLTVLYYDDSSNVIEQLSNNMVVRS

SEQ ID NO: 13295 - protein, 35 aa, Artificial Sequence
  Non-cyclic GFR-binding peptide
  MOD_RES (1)..(2)..(34): Xaa is C or S
XXAPTQLEPLTVLYYDDSSNVIEQLSNNMVVRAXG

SEQ ID NO: 13296 - protein, 32 aa, Artificial Sequence
  Non-cyclic GFR-binding peptide
  MOD_RES (1)..(1): Xaa is C or S
XAPTKLEPLPVVYYDDSSNVIEQLSNNMVVRS

SEQ ID NO: 13297 - protein, 39 aa, Artificial Sequence
  Non-cyclic GFR-binding peptide
  MOD_RES (4)..(5)..(38): Xaa is C or S
  MOD_RES (19)..(20)..(21)..(22)..(23): Xaa is A or G
  MOD_RES (24)..(25)..(26)..(27): Xaa is A or G or absent
ASPXXVPQDLEPLPIVYYXXXXXXXXXEQLSNMVVKSXK

SEQ ID NO: 13298 - protein, 39 aa, Artificial Sequence
  Non-cyclic GFR-binding peptide
  MOD_RES (6)..(7): Xaa is C or S
  MOD_RES (21)..(22)..(23)..(24)..(25): Xaa is A or G
  MOD_RES (26)..(27)..(28)..(29): Xaa is A or G or absent
TVPKPXXAPTQLEPLPVVYYXXXXXXXXXEQLSNNMVVR

SEQ ID NO: 13299 - protein, 38 aa, Artificial Sequence
  Non-cyclic GFR-binding peptide
  MOD_RES (1)..(2)..(36)..(38): Xaa is C or S
  MOD_RES (16)..(17)..(18)..(19)..(20): Xaa is A or G
  MOD_RES (21)..(22)..(23)..(24): Xaa is A or G or absent
XXVPTRLNAISILYFXXXXXXXXXLKKYRDMVVESXGX

SEQ ID NO: 13300 - protein, 39 aa, Artificial Sequence
  Non-cyclic GFR-binding peptide
  MOD_RES (6)..(7)..(39): Xaa is C or S
YVPKPXXAPTKLEPLTVLYYDDSSNVIEQLSNNMVVRSX

SEQ ID NO: 13301 - protein, 42 aa, Artificial Sequence
  Non-cyclic GFR-binding peptide
  MOD_RES (6)..(7)..(41): Xaa is C or S
  MOD_RES (21)..(22)..(23)..(24)..(25): Xaa is A or G
  MOD_RES (26)..(27)..(28)..(29): Xaa is A or G or absent
KIPKAXXVPTELEPLPMVYYXXXXXXXXXEQLSNDMVVEGXG

SEQ ID NO: 13302 - protein, 34 aa, Artificial Sequence
  Non-cyclic GFR-binding peptide
  MOD_RES (1)..(2)..(34): Xaa is C or S
XXVPTRLEPLPIVYYDSANNVVEQLSNDMVVESX

SEQ ID NO: 13303 - protein, 38 aa, Artificial Sequence
  Non-cyclic GFR-binding peptide
  MOD_RES (3)..(4)..(35)..(37): Xaa is C or S
APXXVPQALSPISILFIVGRKPKVYKQYEMIVRSXKXS

SEQ ID NO: 13304 - protein, 40 aa, Artificial Sequence
  Non-cyclic GFR-binding peptide
  MOD_RES (5)..(6)..(40): Xaa is C or S
  MOD_RES (20)..(21)..(22)..(23)..(24): Xaa is A or G
  MOD_RES (25)..(26)..(27)..(28): Xaa is A or G or absent
TPPTXXVPTRLEPLPIVYYXXXXXXXXXEQLSNDMVVESX

SEQ ID NO: 13305 - protein, 37 aa, Artificial Sequence
  Non-cyclic GFR-binding peptide
  MOD_RES (1)..(2)..(35)..(37): Xaa is C or S
  MOD_RES (16)..(17)..(18)..(19)..(20): Xaa is A or G
  MOD_RES (21)..(22)..(23)..(24): Xaa is A or G or absent
XXVSQDLEPLPIVYYXXXXXXXXXEQLSNMIVKSXKX

SEQ ID NO: 13306 - protein, 39 aa, Artificial Sequence
  Non-cyclic GFR-binding peptide
  MOD_RES (6)..(7)..(39): Xaa is C or S
SIPKAXXVPTELSPISMLFIDEYDKVVYKQYEEMVVEGX

SEQ ID NO: 13307 - protein, 36 aa, Artificial Sequence
  Non-cyclic GFR-binding peptide
  MOD_RES (1)..(2)..(34)..(36): Xaa is C or S
XXVPTELEPLTMLYYDEYDKVVEQLSNEMVVEGXGX

SEQ ID NO: 13308 - protein, 36 aa, Artificial Sequence
  Non-cyclic GFR-binding peptide
  MOD_RES (3)..(4): Xaa is C or S
  MOD_RES (18)..(19)..(20)..(21)..(22): Xaa is A or G
  MOD_RES (23)..(24)..(25)..(26): Xaa is A or G or absent
KAXXVPTELEPLPMVYYXXXXXXXXXEQLSNEMVVE

SEQ ID NO: 13309 - protein, 42 aa, Artificial Sequence
  Non-cyclic GFR-binding peptide
  MOD_RES (5)..(6)..(39)..(41): Xaa is C or S
  MOD_RES (20)..(21)..(22)..(23)..(24): Xaa is A or G
  MOD_RES (25)..(26)..(27)..(28): Xaa is A or G or absent
SAAPXXVPQALSPISILFIXXXXXXXXXYKQYEMIVRSXKXS

SEQ ID NO: 13310 - protein, 39 aa, Artificial Sequence
  Non-cyclic GFR-binding peptide
  MOD_RES (4)..(5)..(38): Xaa is C or S
  MOD_RES (19)..(20)..(21)..(22)..(23): Xaa is A or G
  MOD_RES (24)..(25)..(26)..(27): Xaa is A or G or absent
ASPXXVSQDLSPISILFIXXXXXXXXXYKQYEMIVKSXK

SEQ ID NO: 13311 - protein, 37 aa, Artificial Sequence
  Non-cyclic GFR-binding peptide
  MOD_RES (5)..(6): Xaa is C or S
TPPTXXVPTRLNAISILYFDSANNVVLKKYRDMVVES

SEQ ID NO: 13312 - protein, 34 aa, Artificial Sequence
  Non-cyclic GFR-binding peptide
  MOD_RES (32)..(34): Xaa is C or S
APTQLEPLPVVYYDDSSNVIEQLSNNMVVRAXGX

SEQ ID NO: 13313 - protein, 42 aa, Artificial Sequence
  Non-cyclic GFR-binding peptide
  MOD_RES (4)..(5)..(39)..(41): Xaa is C or S
  MOD_RES (19)..(20)..(21)..(22)..(23): Xaa is A or G
  MOD_RES (24)..(25)..(26)..(27): Xaa is A or G or absent
PKPXXAPTQLSPISVLFIXXXXXXXXXYKQYENMVVRAXGXH

SEQ ID NO: 13314 - protein, 37 aa, Artificial Sequence
  Non-cyclic GFR-binding peptide
  MOD_RES (2)..(34)..(36): Xaa is C or S
TXAPTKLEPLPVVYYDDSSNVIEQLSNNMVVRSXGXH

SEQ ID NO: 13315 - protein, 40 aa, Artificial Sequence
  Non-cyclic GFR-binding peptide
  MOD_RES (3)..(4)..(38)..(40): Xaa is C or S
  MOD_RES (18)..(19)..(20)..(21)..(22): Xaa is A or G
  MOD_RES (23)..(24)..(25)..(26): Xaa is A or G or absent
PTXXVPTRLEPLPIVYYXXXXXXXXXEQLSNDMVVESXGX

SEQ ID NO: 13316 - protein, 37 aa, Artificial Sequence
  Non-cyclic GFR-binding peptide
  MOD_RES (4)..(36): Xaa is C or S
KPTXAPTKLSPISVLFIDDSSNVIYKQYENMVVRSXG

SEQ ID NO: 13317 - protein, 39 aa, Artificial Sequence
  Non-cyclic GFR-binding peptide
  MOD_RES (6)..(7)..(38): Xaa is C or S
ASAAPXXVPQALSPISILFIVGRKPKVYKQYEMIVRSXK

SEQ ID NO: 13318 - protein, 43 aa, Artificial Sequence
  Non-cyclic GFR-binding peptide
  MOD_RES (6)..(7)..(40)..(42): Xaa is C or S
  MOD_RES (21)..(22)..(23)..(24)..(25): Xaa is A or G
  MOD_RES (26)..(27)..(28)..(29): Xaa is A or G or absent
ASASPXXVSQDLSPISILFIXXXXXXXXXYKQYEMIVKSXKXS

SEQ ID NO: 13319 - protein, 35 aa, Artificial Sequence
  Non-cyclic GFR-binding peptide
  MOD_RES (34)..(34): Xaa is C or S
  MOD_RES (14)..(15)..(16)..(17)..(18): Xaa is A or G
  MOD_RES (19)..(20)..(21)..(22): Xaa is A or G or absent
VPTELSPISMLFIXXXXXXXXXYKQYEEMVVEGXG

SEQ ID NO: 13320 - protein, 37 aa, Artificial Sequence
  Non-cyclic GFR-binding peptide
  MOD_RES (1)..(35)..(37): Xaa is C or S
  MOD_RES (15)..(16)..(17)..(18)..(19): Xaa is A or G
  MOD_RES (20)..(21)..(22)..(23): Xaa is A or G or absent
XVPTRLSAISILYLXXXXXXXXXLKNYQDMVVESXGX

SEQ ID NO: 13321 - protein, 37 aa, Artificial Sequence
  Non-cyclic GFR-binding peptide
  MOD_RES (1)..(2)..(34)..(36): Xaa is C or S
XXAPTQLEPLTVLYYDDSSNVIEQLSNNMVVRAXGXH

SEQ ID NO: 13322 - protein, 34 aa, Artificial Sequence
  Non-cyclic GFR-binding peptide
  MOD_RES (1)..(2): Xaa is C or S
  MOD_RES (16)..(17)..(18)..(19)..(20): Xaa is A or G
  MOD_RES (21)..(22)..(23)..(24): Xaa is A or G or absent
XXAPTKLSPISVLFIXXXXXXXXXYKQYENMVVR

SEQ ID NO: 13323 - protein, 35 aa, Artificial Sequence
  Non-cyclic GFR-binding peptide
  MOD_RES (1)..(2)..(34): Xaa is C or S
XXAPTKLEPLTVLYYDDSSNVIEQLSNNMVVRSXG

SEQ ID NO: 13324 - protein, 38 aa, Artificial Sequence
  Non-cyclic GFR-binding peptide
  MOD_RES (3)..(4)..(36)..(38): Xaa is C or S
KPXXAPTKLSPISVLFIDDSSNVIYKQYENMVVRSXGX

SEQ ID NO: 13325 - protein, 36 aa, Artificial Sequence
  Non-cyclic GFR-binding peptide
  MOD_RES (4)..(4): Xaa is C or S
  MOD_RES (18)..(19)..(20)..(21)..(22): Xaa is A or G
  MOD_RES (23)..(24)..(25)..(26): Xaa is A or G or absent
KPTXAPTKLEPLPVVYYXXXXXXXXXEQLSNNMVVR

SEQ ID NO: 13326 - protein, 42 aa, Artificial Sequence
  Non-cyclic GFR-binding peptide
  MOD_RES (6)..(7)..(41): Xaa is C or S
  MOD_RES (21)..(22)..(23)..(24)..(25): Xaa is A or G
  MOD_RES (26)..(27)..(28)..(29): Xaa is A or G or absent
TVPKPXXAPTQLSPISVLFIXXXXXXXXXYKQYENMVVRAXG

SEQ ID NO: 13327 - protein, 36 aa, Artificial Sequence
  Non-cyclic GFR-binding peptide
  MOD_RES (2)..(3): Xaa is C or S
  MOD_RES (17)..(18)..(19)..(20)..(21): Xaa is A or G
  MOD_RES (22)..(23)..(24)..(25): Xaa is A or G or absent
PXXAPTKLEPLPVVYYXXXXXXXXXEQLSNNMVVRS

SEQ ID NO: 13328 - protein, 43 aa, Artificial Sequence
  Non-cyclic GFR-binding peptide
  MOD_RES (5)..(6)..(40)..(42): Xaa is C or S
  MOD_RES (20)..(21)..(22)..(23)..(24): Xaa is A or G
  MOD_RES (25)..(26)..(27)..(28): Xaa is A or G or absent
IPKAXXVPTELSPISMLFIXXXXXXXXXYKQYEDMVVEGXGXR

SEQ ID NO: 13329 - protein, 37 aa, Artificial Sequence
  Non-cyclic GFR-binding peptide
  MOD_RES (3)..(37): Xaa is C or S
  MOD_RES (17)..(18)..(19)..(20)..(21): Xaa is A or G
  MOD_RES (22)..(23)..(24)..(25): Xaa is A or G or absent
PTXAPTKLEPLPVVYYXXXXXXXXXEQLSNNMVVRSX

SEQ ID NO: 13330 - protein, 36 aa, Artificial Sequence
  Non-cyclic GFR-binding peptide
  MOD_RES (1)..(2)..(36): Xaa is C or S
  MOD_RES (16)..(17)..(18)..(19)..(20): Xaa is A or G
  MOD_RES (21)..(22)..(23)..(24): Xaa is A or G or absent
XXVPTRLEPLTILYYXXXXXXXXXEQLSNDMVVESX

SEQ ID NO: 13331 - protein, 37 aa, Artificial Sequence
  Non-cyclic GFR-binding peptide
  MOD_RES (4)..(5): Xaa is C or S
  MOD_RES (19)..(20)..(21)..(22)..(23): Xaa is A or G
  MOD_RES (24)..(25)..(26)..(27): Xaa is A or G or absent
PPTXXVPTRLEPLPIVYYXXXXXXXXXEQLSNDMVVE

SEQ ID NO: 13332 - protein, 36 aa, Artificial Sequence
  Non-cyclic GFR-binding peptide
  MOD_RES (3)..(4): Xaa is C or S
  MOD_RES (18)..(19)..(20)..(21)..(22): Xaa is A or G
  MOD_RES (23)..(24)..(25)..(26): Xaa is A or G or absent
KAXXVPTELEPLTMLYYXXXXXXXXXEQLSNEMVVE

SEQ ID NO: 13333 - protein, 39 aa, Artificial Sequence
  Non-cyclic GFR-binding peptide
  MOD_RES (4)..(5)..(38): Xaa is C or S
  MOD_RES (19)..(20)..(21)..(22)..(23): Xaa is A or G
  MOD_RES (24)..(25)..(26)..(27): Xaa is A or G or absent
AAPXXVPQALSPISILFIXXXXXXXXXYKQYEMIVRSXK

SEQ ID NO: 13334 - protein, 39 aa, Artificial Sequence
  Non-cyclic GFR-binding peptide
  MOD_RES (6)..(7)..(39): Xaa is C or S
KIPKAXXVPTELEPLPMVYYDENEKVVEQLSNDMVVEGX

SEQ ID NO: 13335 - protein, 36 aa, Artificial Sequence
  Non-cyclic GFR-binding peptide
  MOD_RES (1)..(2)..(33)..(35): Xaa is C or S
XXVPQALSPISILFIVGRKPKVYKQYEMIVRSXKXS

SEQ ID NO: 13336 - protein, 38 aa, Artificial Sequence
  Non-cyclic GFR-binding peptide
  MOD_RES (2)..(3)..(37): Xaa is C or S
  MOD_RES (17)..(18)..(19)..(20)..(21): Xaa is A or G
  MOD_RES (22)..(23)..(24)..(25): Xaa is A or G or absent
PXXAPTKLEPLTVLYYXXXXXXXXXEQLSNNMVVRSXG

SEQ ID NO: 13337 - protein, 32 aa, Artificial Sequence
  Non-cyclic GFR-binding peptide
  MOD_RES (1)..(1): Xaa is C or S
XVPTELEPLPMVYYDENEKVVEQLSNDMVVEG

SEQ ID NO: 13338 - protein, 41 aa, Artificial Sequence
  Non-cyclic GFR-binding peptide
  MOD_RES (4)..(38)..(40): Xaa is C or S
  MOD_RES (18)..(19)..(20)..(21)..(22): Xaa is A or G
  MOD_RES (23)..(24)..(25)..(26): Xaa is A or G or absent
KPTXAPTKLSPISVLFIXXXXXXXXXYKQYENMVVRSXGXH

SEQ ID NO: 13339 - protein, 41 aa, Artificial Sequence
  Non-cyclic GFR-binding peptide
  MOD_RES (5)..(6)..(40): Xaa is C or S
  MOD_RES (20)..(21)..(22)..(23)..(24): Xaa is A or G
  MOD_RES (25)..(26)..(27)..(28): Xaa is A or G or absent
TPPTXXVPTRLNAISILYFXXXXXXXXXLKKYRDMVVESXG

SEQ ID NO: 13340 - protein, 33 aa, Artificial Sequence
  Non-cyclic GFR-binding peptide
  MOD_RES (1)..(2): Xaa is C or S
XXAPTKLSPISVLFIDDSSNVIYKQYENMVVRS

SEQ ID NO: 13341 - protein, 34 aa, Artificial Sequence
  Non-cyclic GFR-binding peptide
  MOD_RES (3)..(4): Xaa is C or S
SPXXVPQDLEPLPIVYYVGRTPKVEQLSNMVVKS

SEQ ID NO: 13342 - protein, 37 aa, Artificial Sequence
  Non-cyclic GFR-binding peptide
  MOD_RES (1)..(2)..(34)..(36): Xaa is C or S
XXVPTELEPLPMVYYDEYDKVVEQLSNEMVVEGXGXR

SEQ ID NO: 13343 - protein, 39 aa, Artificial Sequence
  Non-cyclic GFR-binding peptide
  MOD_RES (1)..(2)..(36)..(38): Xaa is C or S
  MOD_RES (16)..(17)..(18)..(19)..(20): Xaa is A or G
  MOD_RES (21)..(22)..(23)..(24): Xaa is A or G or absent
XXAPTKLSPISVLFIXXXXXXXXXYKQYENMVVRSXGXH

SEQ ID NO: 13344 - protein, 38 aa, Artificial Sequence
  Non-cyclic GFR-binding peptide
  MOD_RES (5)..(5): Xaa is C or S
  MOD_RES (19)..(20)..(21)..(22)..(23): Xaa is A or G
  MOD_RES (24)..(25)..(26)..(27): Xaa is A or G or absent
TKPTXAPTKLEPLPVVYYXXXXXXXXXEQLSNNMVVRS

SEQ ID NO: 13345 - protein, 30 aa, Artificial Sequence; identical to SEQ ID NO: 1046
  Non-cyclic GFR-binding peptide

SEQ ID NO: 13346 - protein, 38 aa, Artificial Sequence
  Non-cyclic GFR-binding peptide
  MOD_RES (3)..(4)..(36)..(38): Xaa is C or S
KPXXAPTKLEPLTVLYYDDSSNVIEQLSNNMVVRSXGX

SEQ ID NO: 13347 - protein, 42 aa, Artificial Sequence
  Non-cyclic GFR-binding peptide
  MOD_RES (2)..(36): Xaa is C or S
  MOD_RES (14)..(15)..(16)..(17)..(18): Xaa is A or G
  MOD_RES (19)..(20)..(21)..(22): Xaa is A or G or absent
EXKNHQLFVQVEKXXXXXXXXXVKAMKVSREETPVXELGEDN

SEQ ID NO: 13348 - protein, 37 aa, Artificial Sequence
  Non-cyclic GFR-binding peptide
  MOD_RES (1)..(1): Xaa is C or S
  MOD_RES (14)..(15)..(16)..(17)..(18): Xaa is A or G
  MOD_RES (19)..(20)..(21)..(22): Xaa is A or G or absent
XELHEELRSMEGLXXXXXXXXXMIQVTINSHHVRSPQ

SEQ ID NO: 13349 - protein, 36 aa, Artificial Sequence
  Non-cyclic GFR-binding peptide
  MOD_RES (1)..(3): Xaa is C or S
XEXQSHEELSMEGIHQGQHPKIRMIQMTINSQGTPV

SEQ ID NO: 13350 - protein, 43 aa, Artificial Sequence
  Non-cyclic GFR-binding peptide
  MOD_RES (1)..(3)..(37): Xaa is C or S
XEXKNHQLFSMEGLHQGQHPKIRMIQMTINSEETPVXELGEDN

SEQ ID NO: 13351 - protein, 35 aa, Artificial Sequence
  Non-cyclic GFR-binding peptide
  MOD_RES (1)..(35): Xaa is C or S
XQSHEELSMEGIHQGQHPKIRMIQMTINSQGTPVX

SEQ ID NO: 13352 - protein, 42 aa, Artificial Sequence
  Non-cyclic GFR-binding peptide
  MOD_RES (2)..(4)..(41): Xaa is C or S
  MOD_RES (17)..(18)..(19)..(20)..(21): Xaa is A or G
  MOD_RES (22)..(23)..(24)..(25): Xaa is A or G or absent
AXAXELHEELRSMEGIXXXXXXXXXMIQVTINSHHVRSPQXK

SEQ ID NO: 13353 - protein, 38 aa, Artificial Sequence
  Non-cyclic GFR-binding peptide
  MOD_RES (1)..(3): Xaa is C or S
  MOD_RES (16)..(17)..(18)..(19)..(20): Xaa is A or G
  MOD_RES (21)..(22)..(23)..(24): Xaa is A or G or absent
XAXELHEELRSMEGIXXXXXXXXXMIQVTINSHHVRSP

SEQ ID NO: 13354 - protein, 41 aa, Artificial Sequence
  Non-cyclic GFR-binding peptide
  MOD_RES (1)..(3)..(40): Xaa is C or S
  MOD_RES (16)..(17)..(18)..(19)..(20): Xaa is A or G
  MOD_RES (21)..(22)..(23)..(24): Xaa is A or G or absent
XKXALHDELTSMEGIXXXXXXXXXMIQVTINSLQVQTPRXQ

SEQ ID NO: 13355 - protein, 39 aa, Artificial Sequence
  Non-cyclic GFR-binding peptide
  MOD_RES (2)..(36): Xaa is C or S
  MOD_RES (14)..(15)..(16)..(17)..(18): Xaa is A or G
  MOD_RES (19)..(20)..(21)..(22): Xaa is A or G or absent
EXKNHQLFVQVEKXXXXXXXXXVKAMKVSREETPVXELG

SEQ ID NO: 13356 - protein, 32 aa, Artificial Sequence
  Non-cyclic GFR-binding peptide
NHQLFVTAKKHQGQHPKIRIKRMQVPREETPV

SEQ ID NO: 13357 - protein, 42 aa, Artificial Sequence
  Non-cyclic GFR-binding peptide
  MOD_RES (1)..(38): Xaa is C or S
XELHEELRVTAKKLKPKKRVYEIKRVQVPRHHVRSPQXKVSS

SEQ ID NO: 13358 - protein, 34 aa, Artificial Sequence
  Non-cyclic GFR-binding peptide
  MOD_RES (33)..(33): Xaa is C or S
  MOD_RES (11)..(12)..(13)..(14)..(15): Xaa is A or G
  MOD_RES (16)..(17)..(18)..(19): Xaa is A or G or absent
SHEELVTAKKXXXXXXXXXIKRMQVPRQGTPVXE

SEQ ID NO: 13359 - protein, 36 aa, Artificial Sequence
  Non-cyclic GFR-binding peptide
  MOD_RES (35)..(35): Xaa is C or S
  MOD_RES (11)..(12)..(13)..(14)..(15): Xaa is A or G
  MOD_RES (16)..(17)..(18)..(19): Xaa is A or G or absent
HEELRSMEGLXXXXXXXXXMIQVTINSHHVRSPQXK

SEQ ID NO: 13360 - protein, 43 aa, Artificial Sequence
  Non-cyclic GFR-binding peptide
  MOD_RES (1)..(3)..(37): Xaa is C or S
  MOD_RES (15)..(16)..(17)..(18)..(19): Xaa is A or G
  MOD_RES (20)..(21)..(22)..(23): Xaa is A or G or absent
XEXQSHEELVQVEKXXXXXXXXXVKAMKVSRQGTPVXELGEDN

SEQ ID NO: 13361 - protein, 40 aa, Artificial Sequence
  Non-cyclic GFR-binding peptide
  MOD_RES (34)..(34): Xaa is C or S
  MOD_RES (12)..(13)..(14)..(15)..(16): Xaa is A or G
  MOD_RES (17)..(18)..(19)..(20): Xaa is A or G or absent
QSHEELVQVEKXXXXXXXXXVKAMKVSRQGTPVXELGEDN

SEQ ID NO: 13362 - protein, 38 aa, Artificial Sequence
  Non-cyclic GFR-binding peptide
  MOD_RES (37)..(37): Xaa is C or S
  MOD_RES (13)..(14)..(15)..(16)..(17): Xaa is A or G
  MOD_RES (18)..(19)..(20)..(21): Xaa is A or G or absent
ALHDELTVQVEKXXXXXXXXXVKAVKVSRLQVQTPRXQ

SEQ ID NO: 13363 - protein, 41 aa, Artificial Sequence
  Non-cyclic GFR-binding peptide
  MOD_RES (2)..(4)..(38): Xaa is C or S
  MOD_RES (16)..(17)..(18)..(19)..(20): Xaa is A or G
  MOD_RES (21)..(22)..(23)..(24): Xaa is A or G or absent
RXEXQSHEELVQVEKXXXXXXXXXVKAMKVSRQGTPVXELG

SEQ ID NO: 13364 - protein, 36 aa, Artificial Sequence
  Non-cyclic GFR-binding peptide
  MOD_RES (2)..(36): Xaa is C or S
  MOD_RES (14)..(15)..(16)..(17)..(18): Xaa is A or G
  MOD_RES (19)..(20)..(21)..(22): Xaa is A or G or absent
EXQSHEELVQVEKXXXXXXXXXVKAMKVSRQGTPVX

SEQ ID NO: 13365 - protein, 35 aa, Artificial Sequence
  Non-cyclic GFR-binding peptide
  MOD_RES (2)..(2): Xaa is C or S
EXKNHQLFSMEGLHQGQHPKIRMIQMTINSEETPV

SEQ ID NO: 13366 - protein, 39 aa, Artificial Sequence
  Non-cyclic GFR-binding peptide
  MOD_RES (1)..(38): Xaa is C or S
XELHEELRSMEGILKPKKRVYEMIQVTINSHHVRSPQXK

SEQ ID NO: 13367 - protein, 36 aa, Artificial Sequence
  Non-cyclic GFR-binding peptide
  MOD_RES (1)..(3): Xaa is C or S
XEXKNHQLFVQVEKHQGQHPKIRVKAMKVSREETPV

SEQ ID NO: 13368 - protein, 40 aa, Artificial Sequence
  Non-cyclic GFR-binding peptide
  MOD_RES (2)..(39): Xaa is C or S
  MOD_RES (15)..(16)..(17)..(18)..(19): Xaa is A or G
  MOD_RES (20)..(21)..(22)..(23): Xaa is A or G or absent
KXALHDELTVQVEKXXXXXXXXXVKAVKVSRLQVQTPRXQ

SEQ ID NO: 13369 - protein, 37 aa, Artificial Sequence
  Non-cyclic GFR-binding peptide
  MOD_RES (34)..(34): Xaa is C or S
  MOD_RES (12)..(13)..(14)..(15)..(16): Xaa is A or G
  MOD_RES (17)..(18)..(19)..(20): Xaa is A or G or absent
QSHEELVQVEKXXXXXXXXXVKAMKVSRQGTPVXELG

SEQ ID NO: 13370 - protein, 40 aa, Artificial Sequence
  Non-cyclic GFR-binding peptide
  MOD_RES (2)..(4): Xaa is C or S
  MOD_RES (17)..(18)..(19)..(20)..(21): Xaa is A or G
  MOD_RES (22)..(23)..(24)..(25): Xaa is A or G or absent
EXKXALHDELTVQVEKXXXXXXXXXVKAVKVSRLQVQTPR

SEQ ID NO: 13371 - protein, 37 aa, Artificial Sequence
  Non-cyclic GFR-binding peptide
  MOD_RES (37)..(37): Xaa is C or S
ALHDELTVQVEKFIPKKRVIEVKAVKVSRLQVQTPRX

SEQ ID NO: 13372 - protein, 42 aa, Artificial Sequence
  Non-cyclic GFR-binding peptide
  MOD_RES (1)..(38): Xaa is C or S
  MOD_RES (14)..(15)..(16)..(17)..(18): Xaa is A or G
  MOD_RES (19)..(20)..(21)..(22): Xaa is A or G or absent
XALHDELTSMEGIXXXXXXXXXMIQVTINSLQVQTPRXQVNR

SEQ ID NO: 13373 - protein, 36 aa, Artificial Sequence
  Non-cyclic GFR-binding peptide
  MOD_RES (2)..(2): Xaa is C or S
  MOD_RES (15)..(16)..(17)..(18)..(19): Xaa is A or G
  MOD_RES (20)..(21)..(22)..(23): Xaa is A or G or absent
AXELHEELRVTAKKXXXXXXXXXIKRVQVPRHHVRS

SEQ ID NO: 13374 - protein, 36 aa, Artificial Sequence
  Non-cyclic GFR-binding peptide
  MOD_RES (36)..(36): Xaa is C or S
LHEELRSMEGILKPKKRVYEMIQVTINSHHVRSPQX

SEQ ID NO: 13375 - protein, 45 aa, Artificial Sequence
  Non-cyclic GFR-binding peptide
  MOD_RES (2)..(4)..(41): Xaa is C or S
AXAXELHEELRSMEGILKPKKRVYEMIQVTINSHHVRSPQXKVSS

SEQ ID NO: 13376 - protein, 34 aa, Artificial Sequence
  Non-cyclic GFR-binding peptide
ELHEELRVTAKKLKPKKRVYEIKRVQVPRHHVRS

SEQ ID NO: 13377 - protein, 37 aa, Artificial Sequence
  Non-cyclic GFR-binding peptide
  MOD_RES (2)..(4): Xaa is C or S
RXEXQSHEELVTAKKHQGQHPKIRIKRMQVPRQGTPV

SEQ ID NO: 13378 - protein, 35 aa, Artificial Sequence
  Non-cyclic GFR-binding peptide
  MOD_RES (35)..(35): Xaa is C or S
HDELTSMEGIFIPKKRVIEMIQVTINSLQVQTPRX

SEQ ID NO: 13379 - protein, 34 aa, Artificial Sequence
  Non-cyclic GFR-binding peptide
  MOD_RES (1)..(1): Xaa is C or S
  MOD_RES (13)..(14)..(15)..(16)..(17): Xaa is A or G
  MOD_RES (18)..(19)..(20)..(21): Xaa is A or G or absent
XKNHQLFSMEGLXXXXXXXXXMIQMTINSEETPV

SEQ ID NO: 13380 - protein, 33 aa, Artificial Sequence
  Non-cyclic GFR-binding peptide
KNHQLFSMEGLHQGQHPKIRMIQMTINSEETPV

SEQ ID NO: 13381 - protein, 44 aa, Artificial Sequence
  Non-cyclic GFR-binding peptide
  MOD_RES (2)..(4)..(41): Xaa is C or S
EXKXALHDELTSMEGIFIPKKRVIEMIQVTINSLQVQTPRXQVN

SEQ ID NO: 13382 - protein, 40 aa, Artificial Sequence
  Non-cyclic GFR-binding peptide
  MOD_RES (1)..(3)..(37): Xaa is C or S
  MOD_RES (15)..(16)..(17)..(18)..(19): Xaa is A or G
  MOD_RES (20)..(21)..(22)..(23): Xaa is A or G or absent
XEXKNHQLFVQVEKXXXXXXXXXVKAMKVSREETPVXELG

SEQ ID NO: 13383 - protein, 39 aa, Artificial Sequence
  Non-cyclic GFR-binding peptide
  MOD_RES (2)..(36): Xaa is C or S
  MOD_RES (14)..(15)..(16)..(17)..(18): Xaa is A or G
  MOD_RES (19)..(20)..(21)..(22): Xaa is A or G or absent
EXKNHQLFSMEGLXXXXXXXXXMIQMTINSEETPVXELG

SEQ ID NO: 13384 - protein, 41 aa, Artificial Sequence
  Non-cyclic GFR-binding peptide
  MOD_RES (1)..(35): Xaa is C or S
  MOD_RES (13)..(14)..(15)..(16)..(17): Xaa is A or G
  MOD_RES (18)..(19)..(20)..(21): Xaa is A or G or absent
XQSHEELVQVEKXXXXXXXXXVKAMKVSRQGTPVXELGEDN

SEQ ID NO: 13385 - protein, 42 aa, Artificial Sequence
  Non-cyclic GFR-binding peptide
  MOD_RES (2)..(39): Xaa is C or S
  MOD_RES (15)..(16)..(17)..(18)..(19): Xaa is A or G
  MOD_RES (20)..(21)..(22)..(23): Xaa is A or G or absent
KXALHDELTSMEGIXXXXXXXXXMIQVTINSLQVQTPRXQVN

SEQ ID NO: 13386 - protein, 36 aa, Artificial Sequence
  Non-cyclic GFR-binding peptide
  MOD_RES (33)..(33): Xaa is C or S
  MOD_RES (11)..(12)..(13)..(14)..(15): Xaa is A or G
  MOD_RES (16)..(17)..(18)..(19): Xaa is A or G or absent
SHEELVQVEKXXXXXXXXXVKAMKVSRQGTPVXELG

SEQ ID NO: 13387 - protein, 38 aa, Artificial Sequence
  Non-cyclic GFR-binding peptide
  MOD_RES (2)..(36): Xaa is C or S
EXQSHEELVQVEKHQGQHPKIRVKAMKVSRQGTPVXEL

SEQ ID NO: 13388 - protein, 38 aa, Artificial Sequence
  Non-cyclic GFR-binding peptide
  MOD_RES (2)..(2): Xaa is C or S
AXELHEELRVTAKKLKPKKRVYEIKRVQVPRHHVRSPQ

SEQ ID NO: 13389 - protein, 40 aa, Artificial Sequence
  Non-cyclic GFR-binding peptide
  MOD_RES (1)..(35): Xaa is C or S
XQSHEELSMEGIHQGQHPKIRMIQMTINSQGTPVXELGED

SEQ ID NO: 13390 - protein, 37 aa, Artificial Sequence
  Non-cyclic GFR-binding peptide
  MOD_RES (2)..(4): Xaa is C or S
  MOD_RES (16)..(17)..(18)..(19)..(20): Xaa is A or G
  MOD_RES (21)..(22)..(23)..(24): Xaa is A or G or absent
RXEXQSHEELSMEGIXXXXXXXXXMIQMTINSQGTPV

SEQ ID NO: 13391 - protein, 39 aa, Artificial Sequence
  Non-cyclic GFR-binding peptide
  MOD_RES (35)..(35): Xaa is C or S
  MOD_RES (11)..(12)..(13)..(14)..(15): Xaa is A or G
  MOD_RES (16)..(17)..(18)..(19): Xaa is A or G or absent
HEELRVTAKKXXXXXXXXXIKRVQVPRHHVRSPQXKVSS

SEQ ID NO: 13392 - protein, 37 aa, Artificial Sequence
  Non-cyclic GFR-binding peptide
  MOD_RES (35)..(35): Xaa is C or S
HDELTSMEGIFIPKKRVIEMIQVTINSLQVQTPRXQV

SEQ ID NO: 13393 - protein, 42 aa, Artificial Sequence
  Non-cyclic GFR-binding peptide
  MOD_RES (1)..(3)..(37): Xaa is C or S
XEXKNHQLFVTAKKHQGQHPKIRIKRMQVPREETPVXELGED

SEQ ID NO: 13394 - protein, 41 aa, Artificial Sequence
  Non-cyclic GFR-binding peptide
  MOD_RES (1)..(38): Xaa is C or S
XELHEELRSMEGILKPKKRVYEMIQVTINSHHVRSPQXKVS

SEQ ID NO: 13395 - protein, 35 aa, Artificial Sequence
  Non-cyclic GFR-binding peptide
  MOD_RES (13)..(14)..(15)..(16)..(17): Xaa is A or G
  MOD_RES (18)..(19)..(20)..(21): Xaa is A or G or absent
ALHDELTVQVEKXXXXXXXXXVKAVKVSRLQVQTP

SEQ ID NO: 13396 - protein, 38 aa, Artificial Sequence
  Non-cyclic GFR-binding peptide
  MOD_RES (35)..(35): Xaa is C or S
HEELRVTAKKLKPKKRVYEIKRVQVPRHHVRSPQXKVS

SEQ ID NO: 13397 - protein, 37 aa, Artificial Sequence
  Non-cyclic GFR-binding peptide
  MOD_RES (33)..(33): Xaa is C or S
NHQLFVQVEKHQGQHPKIRVKAMKVSREETPVXELGE

SEQ ID NO: 13398 - protein, 38 aa, Artificial Sequence
  Non-cyclic GFR-binding peptide
  MOD_RES (2)..(4)..(38): Xaa is C or S
RXEXQSHEELVTAKKHQGQHPKIRIKRMQVPRQGTPVX

SEQ ID NO: 13399 - protein, 40 aa, Artificial Sequence
  Non-cyclic GFR-binding peptide
  MOD_RES (1)..(3)..(37): Xaa is C or S
  MOD_RES (15)..(16)..(17)..(18)..(19): Xaa is A or G
  MOD_RES (20)..(21)..(22)..(23): Xaa is A or G or absent
XEXQSHEELSMEGIXXXXXXXXXMIQMTINSQGTPVXELG

SEQ ID NO: 13400 - protein, 35 aa, Artificial Sequence
  Non-cyclic GFR-binding peptide
  MOD_RES (35)..(35): Xaa is C or S
HEELRVTAKKLKPKKRVYEIKRVQVPRHHVRSPQX

SEQ ID NO: 13401 - protein, 39 aa, Artificial Sequence
  Non-cyclic GFR-binding peptide
  MOD_RES (2)..(4)..(38): Xaa is C or S
RXEXQSHEELSMEGIHQGQHPKIRMIQMTINSQGTPVXE

SEQ ID NO: 13402 - protein, 35 aa, Artificial Sequence
  Non-cyclic GFR-binding peptide
  MOD_RES (33)..(33): Xaa is C or S
NHQLFVQVEKHQGQHPKIRVKAMKVSREETPVXEL

SEQ ID NO: 13403 - protein, 40 aa, Artificial Sequence
  Non-cyclic GFR-binding peptide
  MOD_RES (37)..(37): Xaa is C or S
  MOD_RES (13)..(14)..(15)..(16)..(17): Xaa is A or G
  MOD_RES (18)..(19)..(20)..(21): Xaa is A or G or absent
ELHEELRVTAKKXXXXXXXXXIKRVQVPRHHVRSPQXKVS

SEQ ID NO: 13404 - protein, 40 aa, Artificial Sequence
  Non-cyclic GFR-binding peptide
  MOD_RES (37)..(37): Xaa is C or S
ALHDELTSMEGLFIPKKRVIEMIQVTINSLQVQTPRXQVN

SEQ ID NO: 13405 - protein, 38 aa, Artificial Sequence
  Non-cyclic GFR-binding peptide
  MOD_RES (2)..(4)..(38): Xaa is C or S
RXEXQSHEELVQVEKHQGQHPKIRVKAMKVSRQGTPVX

SEQ ID NO: 13406 - protein, 42 aa, Artificial Sequence
  Non-cyclic GFR-binding peptide
  MOD_RES (2)..(36): Xaa is C or S
  MOD_RES (14)..(15)..(16)..(17)..(18): Xaa is A or G
  MOD_RES (19)..(20)..(21)..(22): Xaa is A or G or absent
EXKNHQLFSMEGLXXXXXXXXXMIQMTINSEETPVXELGEDN

SEQ ID NO: 13407 - protein, 45 aa, Artificial Sequence
  Non-cyclic GFR-binding peptide
  MOD_RES (2)..(4)..(41): Xaa is C or S
EXKXALHDELTSMEGLFIPKKRVIEMIQVTINSLQVQTPRXQVNR

SEQ ID NO: 13408 - protein, 42 aa, Artificial Sequence
  Non-cyclic GFR-binding peptide
  MOD_RES (2)..(4)..(38): Xaa is C or S
  MOD_RES (16)..(17)..(18)..(19)..(20): Xaa is A or G
  MOD_RES (21)..(22)..(23)..(24): Xaa is A or G or absent
RXEXQSHEELVQVEKXXXXXXXXXVKAMKVSRQGTPVXELGE

SEQ ID NO: 13409 - protein, 39 aa, Artificial Sequence
  Non-cyclic GFR-binding peptide
  MOD_RES (1)..(35): Xaa is C or S
XKNHQLFSMEGLHQGQHPKIRMIQMTINSEETPVXELGE

SEQ ID NO: 13410 - protein, 42 aa, Artificial Sequence
  Non-cyclic GFR-binding peptide
  MOD_RES (1)..(38): Xaa is C or S
XALHDELTSMEGIFIPKKRVIEMIQVTINSLQVQTPRXQVNR

SEQ ID NO: 13411 - protein, 37 aa, Artificial Sequence
  Non-cyclic GFR-binding peptide
  MOD_RES (2)..(36): Xaa is C or S
  MOD_RES (14)..(15)..(16)..(17)..(18): Xaa is A or G
  MOD_RES (19)..(20)..(21)..(22): Xaa is A or G or absent
EXQSHEELSMEGIXXXXXXXXXMIQMTINSQGTPVXE

SEQ ID NO: 13412 - protein, 41 aa, Artificial Sequence
  Non-cyclic GFR-binding peptide
  MOD_RES (2)..(4)..(38): Xaa is C or S
  MOD_RES (16)..(17)..(18)..(19)..(20): Xaa is A or G
  MOD_RES (21)..(22)..(23)..(24): Xaa is A or G or absent
RXEXQSHEELVTAKKXXXXXXXXXIKRMQVPRQGTPVXELG

SEQ ID NO: 13413 - protein, 35 aa, Artificial Sequence
  Non-cyclic GFR-binding peptide
  MOD_RES (34)..(34): Xaa is C or S
  MOD_RES (12)..(13)..(14)..(15)..(16): Xaa is A or G
  MOD_RES (17)..(18)..(19)..(20): Xaa is A or G or absent
KNHQLFVTAKKXXXXXXXXXIKRMQVPREETPVXE

SEQ ID NO: 13414 - protein, 38 aa, Artificial Sequence
  Non-cyclic GFR-binding peptide
  MOD_RES (34)..(34): Xaa is C or S
  MOD_RES (12)..(13)..(14)..(15)..(16): Xaa is A or G
  MOD_RES (17)..(18)..(19)..(20): Xaa is A or G or absent
QSHEELSMEGIXXXXXXXXXMIQMTINSQGTPVXELGE

SEQ ID NO: 13415 - protein, 39 aa, Artificial Sequence
  Non-cyclic GFR-binding peptide
  MOD_RES (2)..(4): Xaa is C or S
  MOD_RES (17)..(18)..(19)..(20)..(21): Xaa is A or G
  MOD_RES (22)..(23)..(24)..(25): Xaa is A or G or absent
EXKXALHDELTSMEGIXXXXXXXXXMIQVTINSLQVQTP

SEQ ID NO: 13416 - protein, 33 aa, Artificial Sequence
  Non-cyclic GFR-binding peptide
QSHEELVTAKKHQGQHPKIRIKRMQVPRQGTPV

SEQ ID NO: 13417 - protein, 36 aa, Artificial Sequence
  Non-cyclic GFR-binding peptide
  MOD_RES (34)..(34): Xaa is C or S
  MOD_RES (12)..(13)..(14)..(15)..(16): Xaa is A or G
  MOD_RES (17)..(18)..(19)..(20): Xaa is A or G or absent
KNHQLFVQVEKXXXXXXXXXVKAMKVSREETPVXEL

SEQ ID NO: 13418 - protein, 40 aa, Artificial Sequence
  Non-cyclic GFR-binding peptide
  MOD_RES (36)..(36): Xaa is C or S
LHDELTSMEGLFIPKKRVIEMIQVTINSLQVQTPRXQVNR

SEQ ID NO: 13419 - protein, 35 aa, Artificial Sequence
  Non-cyclic GFR-binding peptide
LHDELTVQVEKFIPKKRVIEVKAVKVSRLQVQTPR

SEQ ID NO: 13420 - protein, 39 aa, Artificial Sequence
  Non-cyclic GFR-binding peptide
  MOD_RES (1)..(3)..(37): Xaa is C or S
XEXQSHEELVTAKKHQGQHPKIRIKRMQVPRQGTPVXEL

SEQ ID NO: 13421 - protein, 41 aa, Artificial Sequence
  Non-cyclic GFR-binding peptide
  MOD_RES (37)..(37): Xaa is C or S
ALHDELTVQVEKFIPKKRVIEVKAVKVSRLQVQTPRXQVNR

SEQ ID NO: 13422 - protein, 35 aa, Artificial Sequence
  Non-cyclic GFR-binding peptide
  MOD_RES (2)..(2): Xaa is C or S
EXKNHQLFVQVEKHQGQHPKIRVKAMKVSREETPV

SEQ ID NO: 13423 - protein, 37 aa, Artificial Sequence
  Non-cyclic GFR-binding peptide
  MOD_RES (2)..(36): Xaa is C or S
  MOD_RES (14)..(15)..(16)..(17)..(18): Xaa is A or G
  MOD_RES (19)..(20)..(21)..(22): Xaa is A or G or absent
EXKNHQLFVTAKKXXXXXXXXXIKRMQVPREETPVXE

SEQ ID NO: 13424 - protein, 38 aa, Artificial Sequence
  Non-cyclic GFR-binding peptide
  MOD_RES (37)..(37): Xaa is C or S
  MOD_RES (13)..(14)..(15)..(16)..(17): Xaa is A or G
  MOD_RES (18)..(19)..(20)..(21): Xaa is A or G or absent
ELHEELRVTAKKXXXXXXXXXIKRVQVPRHHVRSPQXK

SEQ ID NO: 13425 - protein, 39 aa, Artificial Sequence
  Non-cyclic GFR-binding peptide
  MOD_RES (2)..(39): Xaa is C or S
  MOD_RES (15)..(16)..(17)..(18)..(19): Xaa is A or G
  MOD_RES (20)..(21)..(22)..(23): Xaa is A or G or absent
KXALHDELTSMEGIXXXXXXXXXMIQVTINSLQVQTPRX

SEQ ID NO: 13426 - protein, 44 aa, Artificial Sequence
  Non-cyclic GFR-binding peptide
  MOD_RES (1)..(3)..(40): Xaa is C or S
  MOD_RES (16)..(17)..(18)..(19)..(20): Xaa is A or G
  MOD_RES (21)..(22)..(23)..(24): Xaa is A or G or absent
XKXALHDELTSMEGLXXXXXXXXXMIQVTINSLQVQTPRXQVNR

SEQ ID NO: 13427 - protein, 42 aa, Artificial Sequence
  Non-cyclic GFR-binding peptide
  MOD_RES (2)..(4)..(38): Xaa is C or S
  MOD_RES (16)..(17)..(18)..(19)..(20): Xaa is A or G
  MOD_RES (21)..(22)..(23)..(24): Xaa is A or G or absent
RXEXQSHEELVTAKKXXXXXXXXXIKRMQVPRQGTPVXELGE

SEQ ID NO: 13428 - protein, 41 aa, Artificial Sequence
  Non-cyclic GFR-binding peptide
  MOD_RES (1)..(38): Xaa is C or S
XALHDELTSMEGIFIPKKRVIEMIQVTINSLQVQTPRXQVN

SEQ ID NO: 13429 - protein, 38 aa, Artificial Sequence
  Non-cyclic GFR-binding peptide
  MOD_RES (33)..(33): Xaa is C or S
  MOD_RES (11)..(12)..(13)..(14)..(15): Xaa is A or G
  MOD_RES (16)..(17)..(18)..(19): Xaa is A or G or absent
NHQLFVQVEKXXXXXXXXXVKAMKVSREETPVXELGED

SEQ ID NO: 13430 - protein, 40 aa, Artificial Sequence
  Non-cyclic GFR-binding peptide
  MOD_RES (2)..(4): Xaa is C or S
  MOD_RES (17)..(18)..(19)..(20)..(21): Xaa is A or G
  MOD_RES (22)..(23)..(24)..(25): Xaa is A or G or absent
AXAXELHEELRSMEGLXXXXXXXXXMIQVTINSHHVRSPQ

SEQ ID NO: 13431 - protein, 36 aa, Artificial Sequence
  Non-cyclic GFR-binding peptide
  MOD_RES (13)..(14)..(15)..(16)..(17): Xaa is A or G
  MOD_RES (18)..(19)..(20)..(21): Xaa is A or G or absent
ALHDELTSMEGIXXXXXXXXXMIQVTINSLQVQTPR

SEQ ID NO: 13432 - protein, 36 aa, Artificial Sequence
  Non-cyclic GFR-binding peptide
  MOD_RES (1)..(35): Xaa is C or S
XKNHQLFVTAKKHQGQHPKIRIKRMQVPREETPVXE

SEQ ID NO: 13433 - protein, 37 aa, Artificial Sequence
  Non-cyclic GFR-binding peptide
  MOD_RES (37)..(37): Xaa is C or S
ELHEELRVTAKKLKPKKRVYEIKRVQVPRHHVRSPQX

SEQ ID NO: 13434 - protein, 40 aa, Artificial Sequence
  Non-cyclic GFR-binding peptide
  MOD_RES (1)..(38): Xaa is C or S
XALHDELTVQVEKFIPKKRVIEVKAVKVSRLQVQTPRXQV

SEQ ID NO: 13435 - protein, 45 aa, Artificial Sequence
  Non-cyclic GFR-binding peptide
  MOD_RES (2)..(4)..(41): Xaa is C or S
  MOD_RES (17)..(18)..(19)..(20)..(21): Xaa is A or G
  MOD_RES (22)..(23)..(24)..(25): Xaa is A or G or absent
EXKXALHDELTVQVEKXXXXXXXXXVKAVKVSRLQVQTPRXQVNR

SEQ ID NO: 13436 - protein, 43 aa, Artificial Sequence
  Non-cyclic GFR-binding peptide
  MOD_RES (2)..(4)..(38): Xaa is C or S
RXEXKNHQLFVTAKKHQGQHPKIRIKRMQVPREETPVXELGED

SEQ ID NO: 13437 - protein, 39 aa, Artificial Sequence
  Non-cyclic GFR-binding peptide
  MOD_RES (1)..(3): Xaa is C or S
  MOD_RES (16)..(17)..(18)..(19)..(20): Xaa is A or G
  MOD_RES (21)..(22)..(23)..(24): Xaa is A or G or absent
XAXELHEELRVTAKKXXXXXXXXXIKRVQVPRHHVRSPQ

SEQ ID NO: 13438 - protein, 33 aa, Artificial Sequence
  Non-cyclic GFR-binding peptide
  MOD_RES (11)..(12)..(13)..(14)..(15): Xaa is A or G
  MOD_RES (16)..(17)..(18)..(19): Xaa is A or G or absent
HDELTSMEGIXXXXXXXXXMIQVTINSLQVQTP

SEQ ID NO: 13439 - protein, 40 aa, Artificial Sequence
  Non-cyclic GFR-binding peptide
  MOD_RES (2)..(39): Xaa is C or S
KXALHDELTVQVEKFIPKKRVIEVKAVKVSRLQVQTPRXQ

SEQ ID NO: 13440 - protein, 35 aa, Artificial Sequence
  Non-cyclic GFR-binding peptide
  MOD_RES (34)..(34): Xaa is C or S
KNHQLFVQVEKHQGQHPKIRVKAMKVSREETPVXE

SEQ ID NO: 13441 - protein, 37 aa, Artificial Sequence
  Non-cyclic GFR-binding peptide
  MOD_RES (37)..(37): Xaa is C or S
ELHEELRSMEGLLKPKKRVYEMIQVTINSHHVRSPQX

SEQ ID NO: 13442 - protein, 40 aa, Artificial Sequence
  Non-cyclic GFR-binding peptide
  MOD_RES (2)..(4): Xaa is C or S
  MOD_RES (17)..(18)..(19)..(20)..(21): Xaa is A or G
  MOD_RES (22)..(23)..(24)..(25): Xaa is A or G or absent
EXKXALHDELTSMEGLXXXXXXXXXMIQVTINSLQVQTPR

SEQ ID NO: 13443 - protein, 35 aa, Artificial Sequence
  Non-cyclic GFR-binding peptide
LHEELRVTAKKLKPKKRVYEIKRVQVPRHHVRSPQ

SEQ ID NO: 13444 - protein, 36 aa, Artificial Sequence
  Non-cyclic GFR-binding peptide
  MOD_RES (1)..(35): Xaa is C or S
XKNHQLFSMEGLHQGQHPKIRMIQMTINSEETPVXE

SEQ ID NO: 13445 - protein, 38 aa, Artificial Sequence
  Non-cyclic GFR-binding peptide
  MOD_RES (36)..(36): Xaa is C or S
  MOD_RES (12)..(13)..(14)..(15)..(16): Xaa is A or G
  MOD_RES (17)..(18)..(19)..(20): Xaa is A or G or absent
LHDELTSMEGIXXXXXXXXXMIQVTINSLQVQTPRXQV

SEQ ID NO: 13446 - protein, 40 aa, Artificial Sequence
  Non-cyclic GFR-binding peptide
  MOD_RES (2)..(4): Xaa is C or S
  MOD_RES (17)..(18)..(19)..(20)..(21): Xaa is A or G
  MOD_RES (22)..(23)..(24)..(25): Xaa is A or G or absent
AXAXELHEELRVTAKKXXXXXXXXXIKRVQVPRHHVRSPQ

SEQ ID NO: 13447 - protein, 36 aa, Artificial Sequence
  Non-cyclic GFR-binding peptide
  MOD_RES (2)..(36): Xaa is C or S
  MOD_RES (14)..(15)..(16)..(17)..(18): Xaa is A or G
  MOD_RES (19)..(20)..(21)..(22): Xaa is A or G or absent
EXQSHEELVTAKKXXXXXXXXXIKRMQVPRQGTPVX

SEQ ID NO: 13448 - protein, 44 aa, Artificial Sequence
  Non-cyclic GFR-binding peptide
  MOD_RES (2)..(4)..(41): Xaa is C or S
AXAXELHEELRSMEGILKPKKRVYEMIQVTINSHHVRSPQXKVS

SEQ ID NO: 13449 - protein, 43 aa, Artificial Sequence
  Non-cyclic GFR-binding peptide
  MOD_RES (2)..(39): Xaa is C or S
AXELHEELRSMEGILKPKKRVYEMIQVTINSHHVRSPQXKVSS

SEQ ID NO: 13450 - protein, 34 aa, Artificial Sequence
  Non-cyclic GFR-binding peptide
  MOD_RES (1)..(1): Xaa is C or S
  MOD_RES (13)..(14)..(15)..(16)..(17): Xaa is A or G
  MOD_RES (18)..(19)..(20)..(21): Xaa is A or G or absent
XQSHEELVTAKKXXXXXXXXXIKRMQVPRQGTPV

SEQ ID NO: 13451 - protein, 38 aa, Artificial Sequence
  Non-cyclic GFR-binding peptide
  MOD_RES (34)..(34): Xaa is C or S
KNHQLFVQVEKHQGQHPKIRVKAMKVSREETPVXELGE

SEQ ID NO: 13452 - protein, 35 aa, Artificial Sequence
  Non-cyclic GFR-binding peptide
ELHEELRSMEGILKPKKRVYEMIQVTINSHHVRSP

SEQ ID NO: 13453 - protein, 38 aa, Artificial Sequence
  Non-cyclic GFR-binding peptide
  MOD_RES (1)..(35): Xaa is C or S
XKNHQLFVTAKKHQGQHPKIRIKRMQVPREETPVXELG

SEQ ID NO: 13454 - protein, 37 aa, Artificial Sequence
  Non-cyclic GFR-binding peptide
  MOD_RES (35)..(35): Xaa is C or S
HEELRVTAKKLKPKKRVYEIKRVQVPRHHVRSPQXKV

SEQ ID NO: 13455 - protein, 37 aa, Artificial Sequence
  Non-cyclic GFR-binding peptide
  MOD_RES (1)..(1): Xaa is C or S
  MOD_RES (14)..(15)..(16)..(17)..(18): Xaa is A or G
  MOD_RES (19)..(20)..(21)..(22): Xaa is A or G or absent
XELHEELRVTAKKXXXXXXXXXIKRVQVPRHHVRSPQ

SEQ ID NO: 13456 - protein, 39 aa, Artificial Sequence
  Non-cyclic GFR-binding peptide
  MOD_RES (2)..(4)..(38): Xaa is C or S
  MOD_RES (16)..(17)..(18)..(19)..(20): Xaa is A or G
  MOD_RES (21)..(22)..(23)..(24): Xaa is A or G or absent
RXEXKNHQLFSMEGLXXXXXXXXXMIQMTINSEETPVXE

SEQ ID NO: 13457 - protein, 34 aa, Artificial Sequence
  Non-cyclic GFR-binding peptide
HEELRSMEGILKPKKRVYEMIQVTINSHHVRSPQ

SEQ ID NO: 13458 - protein, 38 aa, Artificial Sequence
  Non-cyclic GFR-binding peptide
  MOD_RES (2)..(4)..(38): Xaa is C or S
  MOD_RES (16)..(17)..(18)..(19)..(20): Xaa is A or G
  MOD_RES (21)..(22)..(23)..(24): Xaa is A or G or absent
RXEXQSHEELVQVEKXXXXXXXXXVKAMKVSRQGTPVX

SEQ ID NO: 13459 - protein, 39 aa, Artificial Sequence
  Non-cyclic GFR-binding peptide
  MOD_RES (2)..(36): Xaa is C or S
EXQSHEELVTAKKHQGQHPKIRIKRMQVPRQGTPVXELG

SEQ ID NO: 13460 - protein, 40 aa, Artificial Sequence
  Non-cyclic GFR-binding peptide
  MOD_RES (37)..(37): Xaa is C or S
  MOD_RES (13)..(14)..(15)..(16)..(17): Xaa is A or G
  MOD_RES (18)..(19)..(20)..(21): Xaa is A or G or absent
ELHEELRSMEGLXXXXXXXXXMIQVTINSHHVRSPQXKVS

SEQ ID NO: 13461 - protein, 36 aa, Artificial Sequence
  Non-cyclic GFR-binding peptide
  MOD_RES (33)..(33): Xaa is C or S
  MOD_RES (11)..(12)..(13)..(14)..(15): Xaa is A or G
  MOD_RES (16)..(17)..(18)..(19): Xaa is A or G or absent
SHEELVTAKKXXXXXXXXXIKRMQVPRQGTPVXELG

SEQ ID NO: 13462 - protein, 36 aa, Artificial Sequence
  Non-cyclic GFR-binding peptide
  MOD_RES (1)..(3): Xaa is C or S
  MOD_RES (15)..(16)..(17)..(18)..(19): Xaa is A or G
  MOD_RES (20)..(21)..(22)..(23): Xaa is A or G or absent
XEXQSHEELVTAKKXXXXXXXXXIKRMQVPRQGTPV

SEQ ID NO: 13463 - protein, 40 aa, Artificial Sequence
  Non-cyclic GFR-binding peptide
  MOD_RES (34)..(34): Xaa is C or S
QSHEELSMEGIHQGQHPKIRMIQMTINSQGTPVXELGEDN

SEQ ID NO: 13464 - protein, 36 aa, Artificial Sequence
  Non-cyclic GFR-binding peptide
  MOD_RES (1)..(1): Xaa is C or S
  MOD_RES (14)..(15)..(16)..(17)..(18): Xaa is A or G
  MOD_RES (19)..(20)..(21)..(22): Xaa is A or G or absent
XALHDELTSMEGIXXXXXXXXXMIQVTINSLQVQTP

SEQ ID NO: 13465 - protein, 41 aa, Artificial Sequence
  Non-cyclic GFR-binding peptide
  MOD_RES (2)..(39): Xaa is C or S
  MOD_RES (15)..(16)..(17)..(18)..(19): Xaa is A or G
  MOD_RES (20)..(21)..(22)..(23): Xaa is A or G or absent
KXALHDELTVQVEKXXXXXXXXXVKAVKVSRLQVQTPRXQV

SEQ ID NO: 13466 - protein, 40 aa, Artificial Sequence
  Non-cyclic GFR-binding peptide
  MOD_RES (2)..(39): Xaa is C or S
  MOD_RES (15)..(16)..(17)..(18)..(19): Xaa is A or G
  MOD_RES (20)..(21)..(22)..(23): Xaa is A or G or absent
AXELHEELRVTAKKXXXXXXXXXIKRVQVPRHHVRSPQXK

SEQ ID NO: 13467 - protein, 43 aa, Artificial Sequence
  Non-cyclic GFR-binding peptide
  MOD_RES (2)..(39): Xaa is C or S
KXALHDELTVQVEKFIPKKRVIEVKAVKVSRLQVQTPRXQVNR

SEQ ID NO: 13468 - protein, 39 aa, Artificial Sequence
  Non-cyclic GFR-binding peptide
  MOD_RES (1)..(35): Xaa is C or S
XQSHEELVQVEKHQGQHPKIRVKAMKVSRQGTPVXELGE

SEQ ID NO: 13469 - protein, 35 aa, Artificial Sequence
  Non-cyclic GFR-binding peptide
  MOD_RES (1)..(1): Xaa is C or S
  MOD_RES (14)..(15)..(16)..(17)..(18): Xaa is A or G
  MOD_RES (19)..(20)..(21)..(22): Xaa is A or G or absent
XALHDELTVQVEKXXXXXXXXXVKAVKVSRLQVQT

SEQ ID NO: 13470 - protein, 38 aa, Artificial Sequence
  Non-cyclic GFR-binding peptide
  MOD_RES (1)..(38): Xaa is C or S
XELHEELRVTAKKLKPKKRVYEIKRVQVPRHHVRSPQX

SEQ ID NO: 13471 - protein, 37 aa, Artificial Sequence
  Non-cyclic GFR-binding peptide
  MOD_RES (34)..(34): Xaa is C or S
QSHEELSMEGIHQGQHPKIRMIQMTINSQGTPVXELG

SEQ ID NO: 13472 - protein, 34 aa, Artificial Sequence
  Non-cyclic GFR-binding peptide
  MOD_RES (34)..(34): Xaa is C or S
  MOD_RES (12)..(13)..(14)..(15)..(16): Xaa is A or G
  MOD_RES (17)..(18)..(19)..(20): Xaa is A or G or absent
KNHQLFSMEGLXXXXXXXXXMIQMTINSEETPVX

SEQ ID NO: 13473 - protein, 41 aa, Artificial Sequence
  Non-cyclic GFR-binding peptide
  MOD_RES (2)..(39): Xaa is C or S
  MOD_RES (15)..(16)..(17)..(18)..(19): Xaa is A or G
  MOD_RES (20)..(21)..(22)..(23): Xaa is A or G or absent
AXELHEELRVTAKKXXXXXXXXXIKRVQVPRHHVRSPQXKV

SEQ ID NO: 13474 - protein, 33 aa, Artificial Sequence
  Non-cyclic GFR-binding peptide
  MOD_RES (33)..(33): Xaa is C or S
NHQLFVQVEKHQGQHPKIRVKAMKVSREETPVX

SEQ ID NO: 13475 - protein, 34 aa, Artificial Sequence
  Non-cyclic GFR-binding peptide
  MOD_RES (33)..(33): Xaa is C or S
  MOD_RES (11)..(12)..(13)..(14)..(15): Xaa is A or G
  MOD_RES (16)..(17)..(18)..(19): Xaa is A or G or absent
NHQLFSMEGLXXXXXXXXXMIQMTINSEETPVXE

SEQ ID NO: 13476 - protein, 41 aa, Artificial Sequence
  Non-cyclic GFR-binding peptide
  MOD_RES (2)..(36): Xaa is C or S
EXKNHQLFVTAKKHQGQHPKIRIKRMQVPREETPVXELGED

SEQ ID NO: 13477 - protein, 34 aa, Artificial Sequence
  Non-cyclic GFR-binding peptide
ELHEELRSMEGLLKPKKRVYEMIQVTINSHHVRS

SEQ ID NO: 13478 - protein, 43 aa, Artificial Sequence
  Non-cyclic GFR-binding peptide
  MOD_RES (2)..(39): Xaa is C or S
AXELHEELRSMEGLLKPKKRVYEMIQVTINSHHVRSPQXKVSS

SEQ ID NO: 13479 - protein, 42 aa, Artificial Sequence
  Non-cyclic GFR-binding peptide
  MOD_RES (2)..(36): Xaa is C or S
EXQSHEELVTAKKHQGQHPKIRIKRMQVPRQGTPVXELGEDN

SEQ ID NO: 13480 - protein, 38 aa, Artificial Sequence
  Non-cyclic GFR-binding peptide
  MOD_RES (37)..(37): Xaa is C or S
  MOD_RES (13)..(14)..(15)..(16)..(17): Xaa is A or G
  MOD_RES (18)..(19)..(20)..(21): Xaa is A or G or absent
ELHEELRSMEGLXXXXXXXXXMIQVTINSHHVRSPQXK

SEQ ID NO: 13481 - protein, 43 aa, Artificial Sequence
  Non-cyclic GFR-binding peptide
  MOD_RES (2)..(4)..(38): Xaa is C or S
  MOD_RES (16)..(17)..(18)..(19)..(20): Xaa is A or G
  MOD_RES (21)..(22)..(23)..(24): Xaa is A or G or absent
RXEXKNHQLFVQVEKXXXXXXXXXVKAMKVSREETPVXELGED

SEQ ID NO: 13482 - protein, 45 aa, Artificial Sequence
  Non-cyclic GFR-binding peptide
  MOD_RES (2)..(4)..(41): Xaa is C or S
EXKXALHDELTVQVEKFIPKKRVIEVKAVKVSRLQVQTPRXQVNR

SEQ ID NO: 13483 - protein, 36 aa, Artificial Sequence
  Non-cyclic GFR-binding peptide
  MOD_RES (1)..(3): Xaa is C or S
XEXKNHQLFVTAKKHQGQHPKIRIKRMQVPREETPV

SEQ ID NO: 13484 - protein, 38 aa, Artificial Sequence
  Non-cyclic GFR-binding peptide
  MOD_RES (37)..(37): Xaa is C or S
ALHDELTSMEGIFIPKKRVIEMIQVTINSLQVQTPRXQ

SEQ ID NO: 13485 - protein, 37 aa, Artificial Sequence
  Non-cyclic GFR-binding peptide
  MOD_RES (36)..(36): Xaa is C or S
LHDELTSMEGLFIPKKRVIEMIQVTINSLQVQTPRXQ

SEQ ID NO: 13486 - protein, 43 aa, Artificial Sequence
  Non-cyclic GFR-binding peptide
  MOD_RES (1)..(3)..(37): Xaa is C or S
  MOD_RES (15)..(16)..(17)..(18)..(19): Xaa is A or G
  MOD_RES (20)..(21)..(22)..(23): Xaa is A or G or absent
XEXQSHEELVTAKKXXXXXXXXXIKRMQVPRQGTPVXELGEDN

SEQ ID NO: 13487 - protein, 35 aa, Artificial Sequence
  Non-cyclic GFR-binding peptide
  MOD_RES (12)..(13)..(14)..(15)..(16): Xaa is A or G
  MOD_RES (17)..(18)..(19)..(20): Xaa is A or G or absent
LHDELTSMEGLXXXXXXXXXMIQVTINSLQVQTPR

SEQ ID NO: 13488 - protein, 38 aa, Artificial Sequence
  Non-cyclic GFR-binding peptide
  MOD_RES (2)..(2): Xaa is C or S
  MOD_RES (15)..(16)..(17)..(18)..(19): Xaa is A or G
  MOD_RES (20)..(21)..(22)..(23): Xaa is A or G or absent
KXALHDELTSMEGIXXXXXXXXXMIQVTINSLQVQTPR

SEQ ID NO: 13489 - protein, 37 aa, Artificial Sequence
  Non-cyclic GFR-binding peptide
  MOD_RES (35)..(35): Xaa is C or S
  MOD_RES (11)..(12)..(13)..(14)..(15): Xaa is A or G
  MOD_RES (16)..(17)..(18)..(19): Xaa is A or G or absent
HDELTVQVEKXXXXXXXXXVKAVKVSRLQVQTPRXQV

SEQ ID NO: 13490 - protein, 38 aa, Artificial Sequence
  Non-cyclic GFR-binding peptide
  MOD_RES (1)..(38): Xaa is C or S
XELHEELRSMEGLLKPKKRVYEMIQVTINSHHVRSPQX

SEQ ID NO: 13491 - protein, 33 aa, Artificial Sequence
  Non-cyclic GFR-binding peptide
HEELRSMEGLLKPKKRVYEMIQVTINSHHVRSP

SEQ ID NO: 13492 - protein, 41 aa, Artificial Sequence
  Non-cyclic GFR-binding peptide
  MOD_RES (2)..(39): Xaa is C or S
KXALHDELTVQVEKFIPKKRVIEVKAVKVSRLQVQTPRXQV

SEQ ID NO: 13493 - protein, 34 aa, Artificial Sequence
  Non-cyclic GFR-binding peptide
  MOD_RES (33)..(33): Xaa is C or S
  MOD_RES (11)..(12)..(13)..(14)..(15): Xaa is A or G
  MOD_RES (16)..(17)..(18)..(19): Xaa is A or G or absent
SHEELVQVEKXXXXXXXXXVKAMKVSRQGTPVXE

SEQ ID NO: 13494 - protein, 36 aa, Artificial Sequence
  Non-cyclic GFR-binding peptide
  MOD_RES (13)..(14)..(15)..(16)..(17): Xaa is A or G
  MOD_RES (18)..(19)..(20)..(21): Xaa is A or G or absent
ELHEELRSMEGIXXXXXXXXXMIQVTINSHHVRSPQ

SEQ ID NO: 13495 - protein, 40 aa, Artificial Sequence
  Non-cyclic GFR-binding peptide
  MOD_RES (2)..(36): Xaa is C or S
EXQSHEELVTAKKHQGQHPKIRIKRMQVPRQGTPVXELGE

SEQ ID NO: 13496 - protein, 42 aa, Artificial Sequence
  Non-cyclic GFR-binding peptide
  MOD_RES (1)..(3)..(40): Xaa is C or S
XKXALHDELTSMEGIFIPKKRVIEMIQVTINSLQVQTPRXQV

SEQ ID NO: 13497 - protein, 40 aa, Artificial Sequence
  Non-cyclic GFR-binding peptide
  MOD_RES (2)..(4): Xaa is C or S
EXKXALHDELTSMEGLFIPKKRVIEMIQVTINSLQVQTPR

SEQ ID NO: 13498 - protein, 39 aa, Artificial Sequence
  Non-cyclic GFR-binding peptide
  MOD_RES (34)..(34): Xaa is C or S
  MOD_RES (12)..(13)..(14)..(15)..(16): Xaa is A or G
  MOD_RES (17)..(18)..(19)..(20): Xaa is A or G or absent
KNHQLFVQVEKXXXXXXXXXVKAMKVSREETPVXELGED

SEQ ID NO: 13499 - protein, 37 aa, Artificial Sequence
  Non-cyclic GFR-binding peptide
  MOD_RES (1)..(35): Xaa is C or S
  MOD_RES (13)..(14)..(15)..(16)..(17): Xaa is A or G
  MOD_RES (18)..(19)..(20)..(21): Xaa is A or G or absent
XKNHQLFVQVEKXXXXXXXXXVKAMKVSREETPVXEL

SEQ ID NO: 13500 - protein, 39 aa, Artificial Sequence
  Non-cyclic GFR-binding peptide
  MOD_RES (37)..(37): Xaa is C or S
  MOD_RES (13)..(14)..(15)..(16)..(17): Xaa is A or G
  MOD_RES (18)..(19)..(20)..(21): Xaa is A or G or absent
ELHEELRSMEGIXXXXXXXXXMIQVTINSHHVRSPQXKV

SEQ ID NO: 13501 - protein, 34 aa, Artificial Sequence
  Non-cyclic GFR-binding peptide
  MOD_RES (1)..(1): Xaa is C or S
  MOD_RES (13)..(14)..(15)..(16)..(17): Xaa is A or G
  MOD_RES (18)..(19)..(20)..(21): Xaa is A or G or absent
XQSHEELVQVEKXXXXXXXXXVKAMKVSRQGTPV

SEQ ID NO: 13502 - protein, 39 aa, Artificial Sequence
  Non-cyclic GFR-binding peptide
  MOD_RES (1)..(35): Xaa is C or S
XQSHEELVTAKKHQGQHPKIRIKRMQVPRQGTPVXELGE

SEQ ID NO: 13503 - protein, 39 aa, Artificial Sequence
  Non-cyclic GFR-binding peptide
  MOD_RES (36)..(36): Xaa is C or S
LHDELTVQVEKFIPKKRVIEVKAVKVSRLQVQTPRXQVN

SEQ ID NO: 13504 - protein, 34 aa, Artificial Sequence
  Non-cyclic GFR-binding peptide
  MOD_RES (33)..(33): Xaa is C or S
  MOD_RES (11)..(12)..(13)..(14)..(15): Xaa is A or G
  MOD_RES (16)..(17)..(18)..(19): Xaa is A or G or absent
SHEELSMEGIXXXXXXXXXMIQMTINSQGTPVXE

SEQ ID NO: 13505 - protein, 37 aa, Artificial Sequence
  Non-cyclic GFR-binding peptide
  MOD_RES (2)..(36): Xaa is C or S
EXKNHQLFVQVEKHQGQHPKIRVKAMKVSREETPVXE

SEQ ID NO: 13506 - protein, 42 aa, Artificial Sequence
  Non-cyclic GFR-binding peptide
  MOD_RES (1)..(3)..(40): Xaa is C or S
  MOD_RES (16)..(17)..(18)..(19)..(20): Xaa is A or G
  MOD_RES (21)..(22)..(23)..(24): Xaa is A or G or absent
XAXELHEELRSMEGLXXXXXXXXXMIQVTINSHHVRSPQXKV

SEQ ID NO: 13507 - protein, 39 aa, Artificial Sequence
  Non-cyclic GFR-binding peptide
  MOD_RES (1)..(3)..(37): Xaa is C or S
  MOD_RES (15)..(16)..(17)..(18)..(19): Xaa is A or G
  MOD_RES (20)..(21)..(22)..(23): Xaa is A or G or absent
XEXQSHEELSMEGIXXXXXXXXXMIQMTINSQGTPVXEL

SEQ ID NO: 13508 - protein, 37 aa, Artificial Sequence
  Non-cyclic GFR-binding peptide
  MOD_RES (2)..(36): Xaa is C or S
  MOD_RES (14)..(15)..(16)..(17)..(18): Xaa is A or G
  MOD_RES (19)..(20)..(21)..(22): Xaa is A or G or absent
EXKNHQLFVQVEKXXXXXXXXXVKAMKVSREETPVXE

SEQ ID NO: 13509 - protein, 35 aa, Artificial Sequence
  Non-cyclic GFR-binding peptide
  MOD_RES (33)..(33): Xaa is C or S
SHEELSMEGIHQGQHPKIRMIQMTINSQGTPVXEL

SEQ ID NO: 13510 - protein, 37 aa, Artificial Sequence
  Non-cyclic GFR-binding peptide
  MOD_RES (1)..(3)..(37): Xaa is C or S
XEXKNHQLFSMEGLHQGQHPKIRMIQMTINSEETPVX

SEQ ID NO: 13511 - protein, 39 aa, Artificial Sequence
  Non-cyclic GFR-binding peptide
  MOD_RES (33)..(33): Xaa is C or S
  MOD_RES (11)..(12)..(13)..(14)..(15): Xaa is A or G
  MOD_RES (16)..(17)..(18)..(19): Xaa is A or G or absent
SHEELVQVEKXXXXXXXXXVKAMKVSRQGTPVXELGEDN

SEQ ID NO: 13512 - protein, 40 aa, Artificial Sequence
  Non-cyclic GFR-binding peptide
  MOD_RES (34)..(34): Xaa is C or S
  MOD_RES (12)..(13)..(14)..(15)..(16): Xaa is A or G
  MOD_RES (17)..(18)..(19)..(20): Xaa is A or G or absent
KNHQLFVQVEKXXXXXXXXXVKAMKVSREETPVXELGEDN

SEQ ID NO: 13513 - protein, 34 aa, Artificial Sequence
  Non-cyclic GFR-binding peptide
LHDELTSMEGIFIPKKRVIEMIQVTINSLQVQTP

SEQ ID NO: 13514 - protein, 37 aa, Artificial Sequence
  Non-cyclic GFR-binding peptide
  MOD_RES (1)..(35): Xaa is C or S
  MOD_RES (13)..(14)..(15)..(16)..(17): Xaa is A or G
  MOD_RES (18)..(19)..(20)..(21): Xaa is A or G or absent
XQSHEELSMEGIXXXXXXXXXMIQMTINSQGTPVXEL

SEQ ID NO: 13515 - protein, 40 aa, Artificial Sequence
  Non-cyclic GFR-binding peptide
  MOD_RES (37)..(37): Xaa is C or S
ELHEELRVTAKKLKPKKRVYEIKRVQVPRHHVRSPQXKVS

SEQ ID NO: 13516 - protein, 34 aa, Artificial Sequence
  Non-cyclic GFR-binding peptide
  MOD_RES (34)..(34): Xaa is C or S
  MOD_RES (12)..(13)..(14)..(15)..(16): Xaa is A or G
  MOD_RES (17)..(18)..(19)..(20): Xaa is A or G or absent
QSHEELVTAKKXXXXXXXXXIKRMQVPRQGTPVX

SEQ ID NO: 13517 - protein, 39 aa, Artificial Sequence
  Non-cyclic GFR-binding peptide
  MOD_RES (2)..(39): Xaa is C or S
  MOD_RES (15)..(16)..(17)..(18)..(19): Xaa is A or G
  MOD_RES (20)..(21)..(22)..(23): Xaa is A or G or absent
KXALHDELTSMEGLXXXXXXXXXMIQVTINSLQVQTPRX

SEQ ID NO: 13518 - protein, 40 aa, Artificial Sequence
  Non-cyclic GFR-binding peptide
  MOD_RES (37)..(37): Xaa is C or S
ELHEELRSMEGLLKPKKRVYEMIQVTINSHHVRSPQXKVS

SEQ ID NO: 13519 - protein, 37 aa, Artificial Sequence
  Non-cyclic GFR-binding peptide
  MOD_RES (1)..(3): Xaa is C or S
  MOD_RES (16)..(17)..(18)..(19)..(20): Xaa is A or G
  MOD_RES (21)..(22)..(23)..(24): Xaa is A or G or absent
XKXALHDELTSMEGLXXXXXXXXXMIQVTINSLQVQT

SEQ ID NO: 13520 - protein, 35 aa, Artificial Sequence
  Non-cyclic GFR-binding peptide
  MOD_RES (2)..(2): Xaa is C or S
EXQSHEELSMEGIHQGQHPKIRMIQMTINSQGTPV

SEQ ID NO: 13521 - protein, 40 aa, Artificial Sequence
  Non-cyclic GFR-binding peptide
  MOD_RES (1)..(38): Xaa is C or S
  MOD_RES (14)..(15)..(16)..(17)..(18): Xaa is A or G
  MOD_RES (19)..(20)..(21)..(22): Xaa is A or G or absent
XALHDELTSMEGLXXXXXXXXXMIQVTINSLQVQTPRXQV

SEQ ID NO: 13522 - protein, 34 aa, Artificial Sequence
  Non-cyclic GFR-binding peptide
  MOD_RES (13)..(14)..(15)..(16)..(17): Xaa is A or G
  MOD_RES (18)..(19)..(20)..(21): Xaa is A or G or absent
ELHEELRVTAKKXXXXXXXXXIKRVQVPRHHVRS

SEQ ID NO: 13523 - protein, 39 aa, Artificial Sequence
  Non-cyclic GFR-binding peptide
  MOD_RES (1)..(3)..(37): Xaa is C or S
  MOD_RES (15)..(16)..(17)..(18)..(19): Xaa is A or G
  MOD_RES (20)..(21)..(22)..(23): Xaa is A or G or absent
XEXKNHQLFVQVEKXXXXXXXXXVKAMKVSREETPVXEL

SEQ ID NO: 13524 - protein, 43 aa, Artificial Sequence
  Non-cyclic GFR-binding peptide
  MOD_RES (2)..(4)..(41): Xaa is C or S
  MOD_RES (17)..(18)..(19)..(20)..(21): Xaa is A or G
  MOD_RES (22)..(23)..(24)..(25): Xaa is A or G or absent
AXAXELHEELRSMEGLXXXXXXXXXMIQVTINSHHVRSPQXKV

SEQ ID NO: 13525 - protein, 35 aa, Artificial Sequence
  Non-cyclic GFR-binding peptide
  MOD_RES (35)..(35): Xaa is C or S
  MOD_RES (11)..(12)..(13)..(14)..(15): Xaa is A or G
  MOD_RES (16)..(17)..(18)..(19): Xaa is A or G or absent
HDELTVQVEKXXXXXXXXXVKAVKVSRLQVQTPRX

SEQ ID NO: 13526 - protein, 38 aa, Artificial Sequence
  Non-cyclic GFR-binding peptide
  MOD_RES (2)..(4): Xaa is C or S
AXAXELHEELRSMEGILKPKKRVYEMIQVTINSHHVRS

SEQ ID NO: 13527 - protein, 35 aa, Artificial Sequence
  Non-cyclic GFR-binding peptide
  MOD_RES (34)..(34): Xaa is C or S
  MOD_RES (12)..(13)..(14)..(15)..(16): Xaa is A or G
  MOD_RES (17)..(18)..(19)..(20): Xaa is A or G or absent
KNHQLFSMEGLXXXXXXXXXMIQMTINSEETPVXE

SEQ ID NO: 13528 - protein, 37 aa, Artificial Sequence
  Non-cyclic GFR-binding peptide
  MOD_RES (1)..(3)..(37): Xaa is C or S
  MOD_RES (15)..(16)..(17)..(18)..(19): Xaa is A or G
  MOD_RES (20)..(21)..(22)..(23): Xaa is A or G or absent
XEXQSHEELVQVEKXXXXXXXXXVKAMKVSRQGTPVX

SEQ ID NO: 13529 - protein, 42 aa, Artificial Sequence
  Non-cyclic GFR-binding peptide
  MOD_RES (2)..(4)..(38): Xaa is C or S
RXEXQSHEELVTAKKHQGQHPKIRIKRMQVPRQGTPVXELGE

SEQ ID NO: 13530 - protein, 41 aa, Artificial Sequence
  Non-cyclic GFR-binding peptide
  MOD_RES (1)..(3)..(40): Xaa is C or S
  MOD_RES (16)..(17)..(18)..(19)..(20): Xaa is A or G
  MOD_RES (21)..(22)..(23)..(24): Xaa is A or G or absent
XKXALHDELTVQVEKXXXXXXXXXVKAVKVSRLQVQTPRXQ

SEQ ID NO: 13531 - protein, 38 aa, Artificial Sequence
  Non-cyclic GFR-binding peptide
  MOD_RES (2)..(2): Xaa is C or S
  MOD_RES (15)..(16)..(17)..(18)..(19): Xaa is A or G
  MOD_RES (20)..(21)..(22)..(23): Xaa is A or G or absent
AXELHEELRSMEGIXXXXXXXXXMIQVTINSHHVRSPQ

SEQ ID NO: 13532 - protein, 36 aa, Artificial Sequence
  Non-cyclic GFR-binding peptide
  MOD_RES (35)..(35): Xaa is C or S
  MOD_RES (11)..(12)..(13)..(14)..(15): Xaa is A or G
  MOD_RES (16)..(17)..(18)..(19): Xaa is A or G or absent
HDELTSMEGIXXXXXXXXXMIQVTINSLQVQTPRXQ

SEQ ID NO: 13533 - protein, 33 aa, Artificial Sequence
  Non-cyclic GFR-binding peptide
  MOD_RES (33)..(33): Xaa is C or S
NHQLFSMEGLHQGQHPKIRMIQMTINSEETPVX

SEQ ID NO: 13534 - protein, 39 aa, Artificial Sequence
  Non-cyclic GFR-binding peptide
  MOD_RES (36)..(36): Xaa is C or S
LHEELRSMEGILKPKKRVYEMIQVTINSHHVRSPQXKVS

SEQ ID NO: 13535 - protein, 39 aa, Artificial Sequence
  Non-cyclic GFR-binding peptide
  MOD_RES (1)..(38): Xaa is C or S
  MOD_RES (14)..(15)..(16)..(17)..(18): Xaa is A or G
  MOD_RES (19)..(20)..(21)..(22): Xaa is A or G or absent
XALHDELTSMEGIXXXXXXXXXMIQVTINSLQVQTPRXQ

SEQ ID NO: 13536 - protein, 41 aa, Artificial Sequence
  Non-cyclic GFR-binding peptide
  MOD_RES (2)..(4)..(38): Xaa is C or S
RXEXQSHEELVTAKKHQGQHPKIRIKRMQVPRQGTPVXELG

SEQ ID NO: 13537 - protein, 33 aa, Artificial Sequence
  Non-cyclic GFR-binding peptide
  MOD_RES (12)..(13)..(14)..(15)..(16): Xaa is A or G
  MOD_RES (17)..(18)..(19)..(20): Xaa is A or G or absent
LHDELTVQVEKXXXXXXXXXVKAVKVSRLQVQT

SEQ ID NO: 13538 - protein, 38 aa, Artificial Sequence
  Non-cyclic GFR-binding peptide
  MOD_RES (33)..(33): Xaa is C or S
SHEELVTAKKHQGQHPKIRIKRMQVPRQGTPVXELGED

SEQ ID NO: 13539 - protein, 39 aa, Artificial Sequence
  Non-cyclic GFR-binding peptide
  MOD_RES (1)..(38): Xaa is C or S
XALHDELTSMEGIFIPKKRVIEMIQVTINSLQVQTPRXQ

SEQ ID NO: 13540 - protein, 39 aa, Artificial Sequence
  Non-cyclic GFR-binding peptide
  MOD_RES (34)..(34): Xaa is C or S
  MOD_RES (12)..(13)..(14)..(15)..(16): Xaa is A or G
  MOD_RES (17)..(18)..(19)..(20): Xaa is A or G or absent
QSHEELVQVEKXXXXXXXXXVKAMKVSRQGTPVXELGED

SEQ ID NO: 13541 - protein, 39 aa, Artificial Sequence
  Non-cyclic GFR-binding peptide
  MOD_RES (36)..(36): Xaa is C or S
LHEELRVTAKKLKPKKRVYEIKRVQVPRHHVRSPQXKVS

SEQ ID NO: 13542 - protein, 35 aa, Artificial Sequence
  Non-cyclic GFR-binding peptide
  MOD_RES (2)..(2): Xaa is C or S
  MOD_RES (14)..(15)..(16)..(17)..(18): Xaa is A or G
  MOD_RES (19)..(20)..(21)..(22): Xaa is A or G or absent
EXQSHEELSMEGIXXXXXXXXXMIQMTINSQGTPV

SEQ ID NO: 13543 - protein, 40 aa, Artificial Sequence
  Non-cyclic GFR-binding peptide
  MOD_RES (2)..(36): Xaa is C or S
  MOD_RES (14)..(15)..(16)..(17)..(18): Xaa is A or G
  MOD_RES (19)..(20)..(21)..(22): Xaa is A or G or absent
EXQSHEELVTAKKXXXXXXXXXIKRMQVPRQGTPVXELGE

SEQ ID NO: 13544 - protein, 42 aa, Artificial Sequence
  Non-cyclic GFR-binding peptide
  MOD_RES (2)..(4)..(38): Xaa is C or S
RXEXQSHEELVQVEKHQGQHPKIRVKAMKVSRQGTPVXELGE

SEQ ID NO: 13545 - protein, 41 aa, Artificial Sequence
  Non-cyclic GFR-binding peptide
  MOD_RES (1)..(3)..(37): Xaa is C or S
  MOD_RES (15)..(16)..(17)..(18)..(19): Xaa is A or G
  MOD_RES (20)..(21)..(22)..(23): Xaa is A or G or absent
XEXKNHQLFVTAKKXXXXXXXXXIKRMQVPREETPVXELGE

SEQ ID NO: 13546 - protein, 42 aa, Artificial Sequence
  Non-cyclic GFR-binding peptide
  MOD_RES (2)..(39): Xaa is C or S
AXELHEELRSMEGILKPKKRVYEMIQVTINSHHVRSPQXKVS

SEQ ID NO: 13547 - protein, 43 aa, Artificial Sequence
  Non-cyclic GFR-binding peptide
  MOD_RES (1)..(3)..(37): Xaa is C or S
XEXKNHQLFVQVEKHQGQHPKIRVKAMKVSREETPVXELGEDN

SEQ ID NO: 13548 - protein, 35 aa, Artificial Sequence
  Non-cyclic GFR-binding peptide
  MOD_RES (1)..(1): Xaa is C or S
  MOD_RES (14)..(15)..(16)..(17)..(18): Xaa is A or G
  MOD_RES (19)..(20)..(21)..(22): Xaa is A or G or absent
XELHEELRSMEGIXXXXXXXXXMIQVTINSHHVRS

SEQ ID NO: 13549 - protein, 34 aa, Artificial Sequence
  Non-cyclic GFR-binding peptide
LHEELRVTAKKLKPKKRVYEIKRVQVPRHHVRSP

SEQ ID NO: 13550 - protein, 39 aa, Artificial Sequence
  Non-cyclic GFR-binding peptide
  MOD_RES (2)..(4)..(38): Xaa is C or S
  MOD_RES (16)..(17)..(18)..(19)..(20): Xaa is A or G
  MOD_RES (21)..(22)..(23)..(24): Xaa is A or G or absent
RXEXQSHEELSMEGIXXXXXXXXXMIQMTINSQGTPVXE

SEQ ID NO: 13551 - protein, 38 aa, Artificial Sequence
  Non-cyclic GFR-binding peptide
  MOD_RES (36)..(36): Xaa is C or S
LHEELRSMEGLLKPKKRVYEMIQVTINSHHVRSPQXKV

SEQ ID NO: 13552 - protein, 40 aa, Artificial Sequence
  Non-cyclic GFR-binding peptide
  MOD_RES (37)..(37): Xaa is C or S
  MOD_RES (13)..(14)..(15)..(16)..(17): Xaa is A or G
  MOD_RES (18)..(19)..(20)..(21): Xaa is A or G or absent
ALHDELTSMEGLXXXXXXXXXMIQVTINSLQVQTPRXQVN

SEQ ID NO: 13553 - protein, 34 aa, Artificial Sequence
  Non-cyclic GFR-binding peptide
LHEELRSMEGILKPKKRVYEMIQVTINSHHVRSP

SEQ ID NO: 13554 - protein, 33 aa, Artificial Sequence
  Non-cyclic GFR-binding peptide
  MOD_RES (12)..(13)..(14)..(15)..(16): Xaa is A or G
  MOD_RES (17)..(18)..(19)..(20): Xaa is A or G or absent
KNHQLFVTAKKXXXXXXXXXIKRMQVPREETPV

SEQ ID NO: 13555 - protein, 39 aa, Artificial Sequence
  Non-cyclic GFR-binding peptide
  MOD_RES (36)..(36): Xaa is C or S
  MOD_RES (12)..(13)..(14)..(15)..(16): Xaa is A or G
  MOD_RES (17)..(18)..(19)..(20): Xaa is A or G or absent
LHDELTSMEGLXXXXXXXXXMIQVTINSLQVQTPRXQVN

SEQ ID NO: 13556 - protein, 41 aa, Artificial Sequence
  Non-cyclic GFR-binding peptide
  MOD_RES (2)..(4)..(38): Xaa is C or S
  MOD_RES (16)..(17)..(18)..(19)..(20): Xaa is A or G
  MOD_RES (21)..(22)..(23)..(24): Xaa is A or G or absent
RXEXQSHEELSMEGIXXXXXXXXXMIQMTINSQGTPVXELG

SEQ ID NO: 13557 - protein, 38 aa, Artificial Sequence
  Non-cyclic GFR-binding peptide
  MOD_RES (35)..(35): Xaa is C or S
HDELTSMEGLFIPKKRVIEMIQVTINSLQVQTPRXQVN

SEQ ID NO: 13558 - protein, 35 aa, Artificial Sequence
  Non-cyclic GFR-binding peptide
  MOD_RES (34)..(34): Xaa is C or S
QSHEELVQVEKHQGQHPKIRVKAMKVSRQGTPVXE

SEQ ID NO: 13559 - protein, 37 aa, Artificial Sequence
  Non-cyclic GFR-binding peptide
  MOD_RES (35)..(35): Xaa is C or S
  MOD_RES (11)..(12)..(13)..(14)..(15): Xaa is A or G
  MOD_RES (16)..(17)..(18)..(19): Xaa is A or G or absent
HDELTSMEGIXXXXXXXXXMIQVTINSLQVQTPRXQV

SEQ ID NO: 13560 - protein, 37 aa, Artificial Sequence
  Non-cyclic GFR-binding peptide
  MOD_RES (36)..(36): Xaa is C or S
  MOD_RES (12)..(13)..(14)..(15)..(16): Xaa is A or G
  MOD_RES (17)..(18)..(19)..(20): Xaa is A or G or absent
LHEELRSMEGLXXXXXXXXXMIQVTINSHHVRSPQXK

SEQ ID NO: 13561 - protein, 36 aa, Artificial Sequence
  Non-cyclic GFR-binding peptide
  MOD_RES (1)..(35): Xaa is C or S
XQSHEELVTAKKHQGQHPKIRIKRMQVPRQGTPVXE

SEQ ID NO: 13562 - protein, 42 aa, Artificial Sequence
  Non-cyclic GFR-binding peptide
  MOD_RES (1)..(3)..(37): Xaa is C or S
XEXKNHQLFVQVEKHQGQHPKIRVKAMKVSREETPVXELGED

SEQ ID NO: 13563 - protein, 38 aa, Artificial Sequence
  Non-cyclic GFR-binding peptide
  MOD_RES (2)..(36): Xaa is C or S
EXQSHEELVTAKKHQGQHPKIRIKRMQVPRQGTPVXEL

SEQ ID NO: 13564 - protein, 37 aa, Artificial Sequence
  Non-cyclic GFR-binding peptide
  MOD_RES (33)..(33): Xaa is C or S
NHQLFVTAKKHQGQHPKIRIKRMQVPREETPVXELGE

SEQ ID NO: 13565 - protein, 35 aa, Artificial Sequence
  Non-cyclic GFR-binding peptide
  MOD_RES (1)..(35): Xaa is C or S
  MOD_RES (13)..(14)..(15)..(16)..(17): Xaa is A or G
  MOD_RES (18)..(19)..(20)..(21): Xaa is A or G or absent
XQSHEELVTAKKXXXXXXXXXIKRMQVPRQGTPVX

SEQ ID NO: 13566 - protein, 38 aa, Artificial Sequence
  Non-cyclic GFR-binding peptide
  MOD_RES (33)..(33): Xaa is C or S
  MOD_RES (11)..(12)..(13)..(14)..(15): Xaa is A or G
  MOD_RES (16)..(17)..(18)..(19): Xaa is A or G or absent
NHQLFSMEGLXXXXXXXXXMIQMTINSEETPVXELGED

SEQ ID NO: 13567 - protein, 35 aa, Artificial Sequence
  Non-cyclic GFR-binding peptide
  MOD_RES (33)..(33): Xaa is C or S
NHQLFVTAKKHQGQHPKIRIKRMQVPREETPVXEL

SEQ ID NO: 13568 - protein, 42 aa, Artificial Sequence
  Non-cyclic GFR-binding peptide
  MOD_RES (2)..(36): Xaa is C or S
  MOD_RES (14)..(15)..(16)..(17)..(18): Xaa is A or G
  MOD_RES (19)..(20)..(21)..(22): Xaa is A or G or absent
EXQSHEELSMEGIXXXXXXXXXMIQMTINSQGTPVXELGEDN

SEQ ID NO: 13569 - protein, 42 aa, Artificial Sequence
  Non-cyclic GFR-binding peptide
  MOD_RES (1)..(3)..(37): Xaa is C or S
  MOD_RES (15)..(16)..(17)..(18)..(19): Xaa is A or G
  MOD_RES (20)..(21)..(22)..(23): Xaa is A or G or absent
XEXQSHEELVTAKKXXXXXXXXXIKRMQVPRQGTPVXELGED

SEQ ID NO: 13570 - protein, 37 aa, Artificial Sequence
  Non-cyclic GFR-binding peptide
  MOD_RES (2)..(2): Xaa is C or S
  MOD_RES (15)..(16)..(17)..(18)..(19): Xaa is A or G
  MOD_RES (20)..(21)..(22)..(23): Xaa is A or G or absent
KXALHDELTSMEGIXXXXXXXXXMIQVTINSLQVQTP

SEQ ID NO: 13571 - protein, 33 aa, Artificial Sequence
  Non-cyclic GFR-binding peptide
  MOD_RES (11)..(12)..(13)..(14)..(15): Xaa is A or G
  MOD_RES (16)..(17)..(18)..(19): Xaa is A or G or absent
HEELRSMEGIXXXXXXXXXMIQVTINSHHVRSP

SEQ ID NO: 13572 - protein, 43 aa, Artificial Sequence
  Non-cyclic GFR-binding peptide
  MOD_RES (2)..(4)..(41): Xaa is C or S
  MOD_RES (17)..(18)..(19)..(20)..(21): Xaa is A or G
  MOD_RES (22)..(23)..(24)..(25): Xaa is A or G or absent
EXKXALHDELTSMEGIXXXXXXXXXMIQVTINSLQVQTPRXQV

SEQ ID NO: 13573 - protein, 40 aa, Artificial Sequence
  Non-cyclic GFR-binding peptide
  MOD_RES (2)..(4): Xaa is C or S
EXKXALHDELTVQVEKFIPKKRVIEVKAVKVSRLQVQTPR

SEQ ID NO: 13574 - protein, 37 aa, Artificial Sequence
  Non-cyclic GFR-binding peptide
  MOD_RES (2)..(2): Xaa is C or S
KXALHDELTSMEGIFIPKKRVIEMIQVTINSLQVQTP

SEQ ID NO: 13575 - protein, 38 aa, Artificial Sequence
  Non-cyclic GFR-binding peptide
  MOD_RES (37)..(37): Xaa is C or S
ELHEELRSMEGLLKPKKRVYEMIQVTINSHHVRSPQXK

SEQ ID NO: 13576 - protein, 38 aa, Artificial Sequence
  Non-cyclic GFR-binding peptide
  MOD_RES (34)..(34): Xaa is C or S
  MOD_RES (12)..(13)..(14)..(15)..(16): Xaa is A or G
  MOD_RES (17)..(18)..(19)..(20): Xaa is A or G or absent
KNHQLFVTAKKXXXXXXXXXIKRMQVPREETPVXELGE

SEQ ID NO: 13577 - protein, 33 aa, Artificial Sequence
  Non-cyclic GFR-binding peptide
  MOD_RES (33)..(33): Xaa is C or S
SHEELSMEGIHQGQHPKIRMIQMTINSQGTPVX

SEQ ID NO: 13578 - protein, 35 aa, Artificial Sequence
  Non-cyclic GFR-binding peptide
  MOD_RES (2)..(2): Xaa is C or S
EXKNHQLFVTAKKHQGQHPKIRIKRMQVPREETPV

SEQ ID NO: 13579 - protein, 41 aa, Artificial Sequence
  Non-cyclic GFR-binding peptide
  MOD_RES (1)..(35): Xaa is C or S
  MOD_RES (13)..(14)..(15)..(16)..(17): Xaa is A or G
  MOD_RES (18)..(19)..(20)..(21): Xaa is A or G or absent
XKNHQLFSMEGLXXXXXXXXXMIQMTINSEETPVXELGEDN

SEQ ID NO: 13580 - protein, 39 aa, Artificial Sequence
  Non-cyclic GFR-binding peptide
  MOD_RES (35)..(35): Xaa is C or S
HEELRSMEGLLKPKKRVYEMIQVTINSHHVRSPQXKVSS

SEQ ID NO: 13581 - protein, 37 aa, Artificial Sequence
  Non-cyclic GFR-binding peptide
  MOD_RES (2)..(2): Xaa is C or S
  MOD_RES (15)..(16)..(17)..(18)..(19): Xaa is A or G
  MOD_RES (20)..(21)..(22)..(23): Xaa is A or G or absent
AXELHEELRSMEGLXXXXXXXXXMIQVTINSHHVRSP

SEQ ID NO: 13582 - protein, 42 aa, Artificial Sequence
  Non-cyclic GFR-binding peptide
  MOD_RES (2)..(39): Xaa is C or S
KXALHDELTSMEGLFIPKKRVIEMIQVTINSLQVQTPRXQVN

SEQ ID NO: 13583 - protein, 38 aa, Artificial Sequence
  Non-cyclic GFR-binding peptide
  MOD_RES (34)..(34): Xaa is C or S
KNHQLFSMEGLHQGQHPKIRMIQMTINSEETPVXELGE

SEQ ID NO: 13584 - protein, 42 aa, Artificial Sequence
  Non-cyclic GFR-binding peptide
  MOD_RES (2)..(39): Xaa is C or S
  MOD_RES (15)..(16)..(17)..(18)..(19): Xaa is A or G
  MOD_RES (20)..(21)..(22)..(23): Xaa is A or G or absent
KXALHDELTSMEGLXXXXXXXXXMIQVTINSLQVQTPRXQVN

SEQ ID NO: 13585 - protein, 41 aa, Artificial Sequence
  Non-cyclic GFR-binding peptide
  MOD_RES (2)..(4)..(41): Xaa is C or S
  MOD_RES (17)..(18)..(19)..(20)..(21): Xaa is A or G
  MOD_RES (22)..(23)..(24)..(25): Xaa is A or G or absent
EXKXALHDELTSMEGIXXXXXXXXXMIQVTINSLQVQTPRX

SEQ ID NO: 13586 - protein, 39 aa, Artificial Sequence
  Non-cyclic GFR-binding peptide
  MOD_RES (1)..(3): Xaa is C or S
XKXALHDELTVQVEKFIPKKRVIEVKAVKVSRLQVQTPR

SEQ ID NO: 13587 - protein, 39 aa, Artificial Sequence
  Non-cyclic GFR-binding peptide
  MOD_RES (37)..(37): Xaa is C or S
  MOD_RES (13)..(14)..(15)..(16)..(17): Xaa is A or G
  MOD_RES (18)..(19)..(20)..(21): Xaa is A or G or absent
ALHDELTSMEGIXXXXXXXXXMIQVTINSLQVQTPRXQV

SEQ ID NO: 13588 - protein, 42 aa, Artificial Sequence
  Non-cyclic GFR-binding peptide
  MOD_RES (2)..(4)..(41): Xaa is C or S
  MOD_RES (17)..(18)..(19)..(20)..(21): Xaa is A or G
  MOD_RES (22)..(23)..(24)..(25): Xaa is A or G or absent
EXKXALHDELTSMEGIXXXXXXXXXMIQVTINSLQVQTPRXQ

SEQ ID NO: 13589 - protein, 38 aa, Artificial Sequence
  Non-cyclic GFR-binding peptide
  MOD_RES (1)..(38): Xaa is C or S
XALHDELTSMEGIFIPKKRVIEMIQVTINSLQVQTPRX

SEQ ID NO: 13590 - protein, 40 aa, Artificial Sequence
  Non-cyclic GFR-binding peptide
  MOD_RES (36)..(36): Xaa is C or S
  MOD_RES (12)..(13)..(14)..(15)..(16): Xaa is A or G
  MOD_RES (17)..(18)..(19)..(20): Xaa is A or G or absent
LHEELRSMEGLXXXXXXXXXMIQVTINSHHVRSPQXKVSS

SEQ ID NO: 13591 - protein, 42 aa, Artificial Sequence
  Non-cyclic GFR-binding peptide
  MOD_RES (1)..(38): Xaa is C or S
  MOD_RES (14)..(15)..(16)..(17)..(18): Xaa is A or G
  MOD_RES (19)..(20)..(21)..(22): Xaa is A or G or absent
XELHEELRSMEGLXXXXXXXXXMIQVTINSHHVRSPQXKVSS

SEQ ID NO: 13592 - protein, 39 aa, Artificial Sequence
  Non-cyclic GFR-binding peptide
  MOD_RES (1)..(3)..(37): Xaa is C or S
XEXQSHEELVQVEKHQGQHPKIRVKAMKVSRQGTPVXEL

SEQ ID NO: 13593 - protein, 35 aa, Artificial Sequence
  Non-cyclic GFR-binding peptide
  MOD_RES (1)..(35): Xaa is C or S
  MOD_RES (13)..(14)..(15)..(16)..(17): Xaa is A or G
  MOD_RES (18)..(19)..(20)..(21): Xaa is A or G or absent
XKNHQLFSMEGLXXXXXXXXXMIQMTINSEETPVX

SEQ ID NO: 13594 - protein, 34 aa, Artificial Sequence
  Non-cyclic GFR-binding peptide
  MOD_RES (34)..(34): Xaa is C or S
  MOD_RES (12)..(13)..(14)..(15)..(16): Xaa is A or G
  MOD_RES (17)..(18)..(19)..(20): Xaa is A or G or absent
KNHQLFVQVEKXXXXXXXXXVKAMKVSREETPVX

SEQ ID NO: 13595 - protein, 36 aa, Artificial Sequence
  Non-cyclic GFR-binding peptide
ALHDELTSMEGIFIPKKRVIEMIQVTINSLQVQTPR

SEQ ID NO: 13596 - protein, 41 aa, Artificial Sequence
  Non-cyclic GFR-binding peptide
  MOD_RES (2)..(4)..(41): Xaa is C or S
  MOD_RES (17)..(18)..(19)..(20)..(21): Xaa is A or G
  MOD_RES (22)..(23)..(24)..(25): Xaa is A or G or absent
AXAXELHEELRSMEGIXXXXXXXXXMIQVTINSHHVRSPQX

SEQ ID NO: 13597 - protein, 35 aa, Artificial Sequence
  Non-cyclic GFR-binding peptide
  MOD_RES (1)..(1): Xaa is C or S
XALHDELTVQVEKFIPKKRVIEVKAVKVSRLQVQT

SEQ ID NO: 13598 - protein, 36 aa, Artificial Sequence
  Non-cyclic GFR-binding peptide
  MOD_RES (1)..(1): Xaa is C or S
  MOD_RES (14)..(15)..(16)..(17)..(18): Xaa is A or G
  MOD_RES (19)..(20)..(21)..(22): Xaa is A or G or absent
XELHEELRSMEGLXXXXXXXXXMIQVTINSHHVRSP

SEQ ID NO: 13599 - protein, 44 aa, Artificial Sequence
  Non-cyclic GFR-binding peptide
  MOD_RES (1)..(3)..(40): Xaa is C or S
XAXELHEELRSMEGLLKPKKRVYEMIQVTINSHHVRSPQXKVSS

SEQ ID NO: 13600 - protein, 44 aa, Artificial Sequence
  Non-cyclic GFR-binding peptide
  MOD_RES (2)..(4)..(38): Xaa is C or S
  MOD_RES (16)..(17)..(18)..(19)..(20): Xaa is A or G
  MOD_RES (21)..(22)..(23)..(24): Xaa is A or G or absent
RXEXKNHQLFVQVEKXXXXXXXXXVKAMKVSREETPVXELGEDN

SEQ ID NO: 13601 - protein, 40 aa, Artificial Sequence
  Non-cyclic GFR-binding peptide
  MOD_RES (2)..(4)..(38): Xaa is C or S
  MOD_RES (16)..(17)..(18)..(19)..(20): Xaa is A or G
  MOD_RES (21)..(22)..(23)..(24): Xaa is A or G or absent
RXEXKNHQLFVQVEKXXXXXXXXXVKAMKVSREETPVXEL

SEQ ID NO: 13602 - protein, 42 aa, Artificial Sequence
  Non-cyclic GFR-binding peptide
  MOD_RES (2)..(36): Xaa is C or S
EXQSHEELVQVEKHQGQHPKIRVKAMKVSRQGTPVXELGEDN

SEQ ID NO: 13603 - protein, 34 aa, Artificial Sequence
  Non-cyclic GFR-binding peptide
HDELTSMEGIFIPKKRVIEMIQVTINSLQVQTPR

SEQ ID NO: 13604 - protein, 36 aa, Artificial Sequence
  Non-cyclic GFR-binding peptide
  MOD_RES (1)..(35): Xaa is C or S
XQSHEELVQVEKHQGQHPKIRVKAMKVSRQGTPVXE

SEQ ID NO: 13605 - protein, 39 aa, Artificial Sequence
  Non-cyclic GFR-binding peptide
  MOD_RES (2)..(36): Xaa is C or S
EXQSHEELVQVEKHQGQHPKIRVKAMKVSRQGTPVXELG

SEQ ID NO: 13606 - protein, 38 aa, Artificial Sequence
  Non-cyclic GFR-binding peptide
  MOD_RES (1)..(35): Xaa is C or S
  MOD_RES (13)..(14)..(15)..(16)..(17): Xaa is A or G
  MOD_RES (18)..(19)..(20)..(21): Xaa is A or G or absent
XQSHEELSMEGIXXXXXXXXXMIQMTINSQGTPVXELG

SEQ ID NO: 13607 - protein, 41 aa, Artificial Sequence
  Non-cyclic GFR-binding peptide
  MOD_RES (1)..(38): Xaa is C or S
  MOD_RES (14)..(15)..(16)..(17)..(18): Xaa is A or G
  MOD_RES (19)..(20)..(21)..(22): Xaa is A or G or absent
XELHEELRVTAKKXXXXXXXXXIKRVQVPRHHVRSPQXKVS

SEQ ID NO: 13608 - protein, 43 aa, Artificial Sequence
  Non-cyclic GFR-binding peptide
  MOD_RES (2)..(4)..(38): Xaa is C or S
RXEXKNHQLFVQVEKHQGQHPKIRVKAMKVSREETPVXELGED

SEQ ID NO: 13609 - protein, 40 aa, Artificial Sequence
  Non-cyclic GFR-binding peptide
  MOD_RES (1)..(38): Xaa is C or S
XALHDELTSMEGLFIPKKRVIEMIQVTINSLQVQTPRXQV

SEQ ID NO: 13610 - protein, 33 aa, Artificial Sequence
  Non-cyclic GFR-binding peptide
KNHQLFVTAKKHQGQHPKIRIKRMQVPREETPV

SEQ ID NO: 13611 - protein, 39 aa, Artificial Sequence
  Non-cyclic GFR-binding peptide
  MOD_RES (36)..(36): Xaa is C or S
  MOD_RES (12)..(13)..(14)..(15)..(16): Xaa is A or G
  MOD_RES (17)..(18)..(19)..(20): Xaa is A or G or absent
LHDELTVQVEKXXXXXXXXXVKAVKVSRLQVQTPRXQVN

SEQ ID NO: 13612 - protein, 36 aa, Artificial Sequence
  Non-cyclic GFR-binding peptide
  MOD_RES (2)..(2): Xaa is C or S
KXALHDELTVQVEKFIPKKRVIEVKAVKVSRLQVQT

SEQ ID NO: 13613 - protein, 38 aa, Artificial Sequence
  Non-cyclic GFR-binding peptide
  MOD_RES (36)..(36): Xaa is C or S
  MOD_RES (12)..(13)..(14)..(15)..(16): Xaa is A or G
  MOD_RES (17)..(18)..(19)..(20): Xaa is A or G or absent
LHEELRSMEGIXXXXXXXXXMIQVTINSHHVRSPQXKV

SEQ ID NO: 13614 - protein, 40 aa, Artificial Sequence
  Non-cyclic GFR-binding peptide
  MOD_RES (1)..(3)..(37): Xaa is C or S
XEXQSHEELVTAKKHQGQHPKIRIKRMQVPRQGTPVXELG

SEQ ID NO: 13615 - protein, 40 aa, Artificial Sequence
  Non-cyclic GFR-binding peptide
  MOD_RES (2)..(36): Xaa is C or S
EXQSHEELVQVEKHQGQHPKIRVKAMKVSRQGTPVXELGE

SEQ ID NO: 13616 - protein, 36 aa, Artificial Sequence
  Non-cyclic GFR-binding peptide
  MOD_RES (1)..(3): Xaa is C or S
  MOD_RES (15)..(16)..(17)..(18)..(19): Xaa is A or G
  MOD_RES (20)..(21)..(22)..(23): Xaa is A or G or absent
XEXKNHQLFSMEGLXXXXXXXXXMIQMTINSEETPV

SEQ ID NO: 13617 - protein, 36 aa, Artificial Sequence
  Non-cyclic GFR-binding peptide
  MOD_RES (34)..(34): Xaa is C or S
  MOD_RES (12)..(13)..(14)..(15)..(16): Xaa is A or G
  MOD_RES (17)..(18)..(19)..(20): Xaa is A or G or absent
KNHQLFSMEGLXXXXXXXXXMIQMTINSEETPVXEL

SEQ ID NO: 13618 - protein, 39 aa, Artificial Sequence
  Non-cyclic GFR-binding peptide
  MOD_RES (33)..(33): Xaa is C or S
NHQLFVTAKKHQGQHPKIRIKRMQVPREETPVXELGEDN

SEQ ID NO: 13619 - protein, 41 aa, Artificial Sequence
  Non-cyclic GFR-binding peptide
  MOD_RES (37)..(37): Xaa is C or S
ELHEELRSMEGLLKPKKRVYEMIQVTINSHHVRSPQXKVSS

SEQ ID NO: 13620 - protein, 37 aa, Artificial Sequence
  Non-cyclic GFR-binding peptide
  MOD_RES (2)..(36): Xaa is C or S
EXKNHQLFSMEGLHQGQHPKIRMIQMTINSEETPVXE

SEQ ID NO: 13621 - protein, 38 aa, Artificial Sequence
  Non-cyclic GFR-binding peptide
  MOD_RES (36)..(36): Xaa is C or S
  MOD_RES (12)..(13)..(14)..(15)..(16): Xaa is A or G
  MOD_RES (17)..(18)..(19)..(20): Xaa is A or G or absent
LHEELRVTAKKXXXXXXXXXIKRVQVPRHHVRSPQXKV

SEQ ID NO: 13622 - protein, 39 aa, Artificial Sequence
  Non-cyclic GFR-binding peptide
  MOD_RES (33)..(33): Xaa is C or S
NHQLFVQVEKHQGQHPKIRVKAMKVSREETPVXELGEDN

SEQ ID NO: 13623 - protein, 39 aa, Artificial Sequence
  Non-cyclic GFR-binding peptide
  MOD_RES (1)..(3): Xaa is C or S
XAXELHEELRSMEGILKPKKRVYEMIQVTINSHHVRSPQ

SEQ ID NO: 13624 - protein, 37 aa, Artificial Sequence
  Non-cyclic GFR-binding peptide
  MOD_RES (37)..(37): Xaa is C or S
  MOD_RES (13)..(14)..(15)..(16)..(17): Xaa is A or G
  MOD_RES (18)..(19)..(20)..(21): Xaa is A or G or absent
ELHEELRVTAKKXXXXXXXXXIKRVQVPRHHVRSPQX

SEQ ID NO: 13625 - protein, 38 aa, Artificial Sequence
  Non-cyclic GFR-binding peptide
  MOD_RES (33)..(33): Xaa is C or S
SHEELVQVEKHQGQHPKIRVKAMKVSRQGTPVXELGED

SEQ ID NO: 13626 - protein, 40 aa, Artificial Sequence
  Non-cyclic GFR-binding peptide
  MOD_RES (2)..(4)..(38): Xaa is C or S
  MOD_RES (16)..(17)..(18)..(19)..(20): Xaa is A or G
  MOD_RES (21)..(22)..(23)..(24): Xaa is A or G or absent
RXEXQSHEELSMEGIXXXXXXXXXMIQMTINSQGTPVXEL

SEQ ID NO: 13627 - protein, 33 aa, Artificial Sequence
  Non-cyclic GFR-binding peptide
  MOD_RES (11)..(12)..(13)..(14)..(15): Xaa is A or G
  MOD_RES (16)..(17)..(18)..(19): Xaa is A or G or absent
HEELRVTAKKXXXXXXXXXIKRVQVPRHHVRSP

SEQ ID NO: 13628 - protein, 43 aa, Artificial Sequence
  Non-cyclic GFR-binding peptide
  MOD_RES (1)..(3)..(40): Xaa is C or S
  MOD_RES (16)..(17)..(18)..(19)..(20): Xaa is A or G
  MOD_RES (21)..(22)..(23)..(24): Xaa is A or G or absent
XAXELHEELRSMEGIXXXXXXXXXMIQVTINSHHVRSPQXKVS

SEQ ID NO: 13629 - protein, 37 aa, Artificial Sequence
  Non-cyclic GFR-binding peptide
  MOD_RES (2)..(2): Xaa is C or S
AXELHEELRVTAKKLKPKKRVYEIKRVQVPRHHVRSP

SEQ ID NO: 13630 - protein, 38 aa, Artificial Sequence
  Non-cyclic GFR-binding peptide
  MOD_RES (2)..(36): Xaa is C or S
  MOD_RES (14)..(15)..(16)..(17)..(18): Xaa is A or G
  MOD_RES (19)..(20)..(21)..(22): Xaa is A or G or absent
EXKNHQLFVQVEKXXXXXXXXXVKAMKVSREETPVXEL

SEQ ID NO: 13631 - protein, 36 aa, Artificial Sequence
  Non-cyclic GFR-binding peptide
  MOD_RES (13)..(14)..(15)..(16)..(17): Xaa is A or G
  MOD_RES (18)..(19)..(20)..(21): Xaa is A or G or absent
ALHDELTVQVEKXXXXXXXXXVKAVKVSRLQVQTPR

SEQ ID NO: 13632 - protein, 38 aa, Artificial Sequence
  Non-cyclic GFR-binding peptide
  MOD_RES (1)..(3)..(37): Xaa is C or S
  MOD_RES (15)..(16)..(17)..(18)..(19): Xaa is A or G
  MOD_RES (20)..(21)..(22)..(23): Xaa is A or G or absent
XEXQSHEELVTAKKXXXXXXXXXIKRMQVPRQGTPVXE

SEQ ID NO: 13633 - protein, 36 aa, Artificial Sequence
  Non-cyclic GFR-binding peptide
  MOD_RES (2)..(2): Xaa is C or S
  MOD_RES (15)..(16)..(17)..(18)..(19): Xaa is A or G
  MOD_RES (20)..(21)..(22)..(23): Xaa is A or G or absent
KXALHDELTVQVEKXXXXXXXXXVKAVKVSRLQVQT

SEQ ID NO: 13634 - protein, 43 aa, Artificial Sequence
  Non-cyclic GFR-binding peptide
  MOD_RES (2)..(4)..(41): Xaa is C or S
AXAXELHEELRSMEGILKPKKRVYEMIQVTINSHHVRSPQXKV

SEQ ID NO: 13635 - protein, 37 aa, Artificial Sequence
  Non-cyclic GFR-binding peptide
  MOD_RES (2)..(2): Xaa is C or S
AXELHEELRSMEGLLKPKKRVYEMIQVTINSHHVRSP

SEQ ID NO: 13636 - protein, 40 aa, Artificial Sequence
  Non-cyclic GFR-binding peptide
  MOD_RES (1)..(38): Xaa is C or S
XELHEELRSMEGILKPKKRVYEMIQVTINSHHVRSPQXKV

SEQ ID NO: 13637 - protein, 38 aa, Artificial Sequence
  Non-cyclic GFR-binding peptide
  MOD_RES (2)..(4)..(38): Xaa is C or S
  MOD_RES (16)..(17)..(18)..(19)..(20): Xaa is A or G
  MOD_RES (21)..(22)..(23)..(24): Xaa is A or G or absent
RXEXQSHEELSMEGIXXXXXXXXXMIQMTINSQGTPVX

SEQ ID NO: 13638 - protein, 38 aa, Artificial Sequence
  Non-cyclic GFR-binding peptide
  MOD_RES (33)..(33): Xaa is C or S
  MOD_RES (11)..(12)..(13)..(14)..(15): Xaa is A or G
  MOD_RES (16)..(17)..(18)..(19): Xaa is A or G or absent
SHEELSMEGIXXXXXXXXXMIQMTINSQGTPVXELGED

SEQ ID NO: 13639 - protein, 40 aa, Artificial Sequence
  Non-cyclic GFR-binding peptide
  MOD_RES (1)..(3)..(37): Xaa is C or S
  MOD_RES (15)..(16)..(17)..(18)..(19): Xaa is A or G
  MOD_RES (20)..(21)..(22)..(23): Xaa is A or G or absent
XEXKNHQLFVTAKKXXXXXXXXXIKRMQVPREETPVXELG

SEQ ID NO: 13640 - protein, 43 aa, Artificial Sequence
  Non-cyclic GFR-binding peptide
  MOD_RES (2)..(4)..(38): Xaa is C or S
  MOD_RES (16)..(17)..(18)..(19)..(20): Xaa is A or G
  MOD_RES (21)..(22)..(23)..(24): Xaa is A or G or absent
RXEXKNHQLFVTAKKXXXXXXXXXIKRMQVPREETPVXELGED

SEQ ID NO: 13641 - protein, 35 aa, Artificial Sequence
  Non-cyclic GFR-binding peptide
  MOD_RES (1)..(1): Xaa is C or S
  MOD_RES (14)..(15)..(16)..(17)..(18): Xaa is A or G
  MOD_RES (19)..(20)..(21)..(22): Xaa is A or G or absent
XALHDELTSMEGLXXXXXXXXXMIQVTINSLQVQT

SEQ ID NO: 13642 - protein, 39 aa, Artificial Sequence
  Non-cyclic GFR-binding peptide
  MOD_RES (35)..(35): Xaa is C or S
HDELTSMEGLFIPKKRVIEMIQVTINSLQVQTPRXQVNR

SEQ ID NO: 13643 - protein, 41 aa, Artificial Sequence
  Non-cyclic GFR-binding peptide
  MOD_RES (2)..(36): Xaa is C or S
EXQSHEELSMEGIHQGQHPKIRMIQMTINSQGTPVXELGED

SEQ ID NO: 13644 - protein, 38 aa, Artificial Sequence
  Non-cyclic GFR-binding peptide
  MOD_RES (33)..(33): Xaa is C or S
NHQLFSMEGLHQGQHPKIRMIQMTINSEETPVXELGED

SEQ ID NO: 13645 - protein, 40 aa, Artificial Sequence
  Non-cyclic GFR-binding peptide
  MOD_RES (36)..(36): Xaa is C or S
  MOD_RES (12)..(13)..(14)..(15)..(16): Xaa is A or G
  MOD_RES (17)..(18)..(19)..(20): Xaa is A or G or absent
LHEELRVTAKKXXXXXXXXXIKRVQVPRHHVRSPQXKVSS

SEQ ID NO: 13646 - protein, 40 aa, Artificial Sequence
  Non-cyclic GFR-binding peptide
  MOD_RES (1)..(3)..(40): Xaa is C or S
  MOD_RES (16)..(17)..(18)..(19)..(20): Xaa is A or G
  MOD_RES (21)..(22)..(23)..(24): Xaa is A or G or absent
XAXELHEELRSMEGIXXXXXXXXXMIQVTINSHHVRSPQX

SEQ ID NO: 13647 - protein, 35 aa, Artificial Sequence
  Non-cyclic GFR-binding peptide
  MOD_RES (33)..(33): Xaa is C or S
NHQLFSMEGLHQGQHPKIRMIQMTINSEETPVXEL

SEQ ID NO: 13648 - protein, 39 aa, Artificial Sequence
  Non-cyclic GFR-binding peptide
  MOD_RES (1)..(35): Xaa is C or S
XKNHQLFVTAKKHQGQHPKIRIKRMQVPREETPVXELGE

SEQ ID NO: 13649 - protein, 41 aa, Artificial Sequence
  Non-cyclic GFR-binding peptide
  MOD_RES (1)..(3)..(37): Xaa is C or S
XEXQSHEELVTAKKHQGQHPKIRIKRMQVPRQGTPVXELGE

SEQ ID NO: 13650 - protein, 37 aa, Artificial Sequence
  Non-cyclic GFR-binding peptide
  MOD_RES (37)..(37): Xaa is C or S
ALHDELTSMEGIFIPKKRVIEMIQVTINSLQVQTPRX

SEQ ID NO: 13651 - protein, 42 aa, Artificial Sequence
  Non-cyclic GFR-binding peptide
  MOD_RES (1)..(3)..(37): Xaa is C or S
XEXKNHQLFSMEGLHQGQHPKIRMIQMTINSEETPVXELGED

SEQ ID NO: 13652 - protein, 38 aa, Artificial Sequence
  Non-cyclic GFR-binding peptide
  MOD_RES (35)..(35): Xaa is C or S
HEELRSMEGLLKPKKRVYEMIQVTINSHHVRSPQXKVS

SEQ ID NO: 13653 - protein, 38 aa, Artificial Sequence
  Non-cyclic GFR-binding peptide
  MOD_RES (1)..(3): Xaa is C or S
XKXALHDELTVQVEKFIPKKRVIEVKAVKVSRLQVQTP

SEQ ID NO: 13654 - protein, 41 aa, Artificial Sequence
  Non-cyclic GFR-binding peptide
  MOD_RES (2)..(39): Xaa is C or S
KXALHDELTSMEGLFIPKKRVIEMIQVTINSLQVQTPRXQV

SEQ ID NO: 13655 - protein, 40 aa, Artificial Sequence
  Non-cyclic GFR-binding peptide
  MOD_RES (2)..(4): Xaa is C or S
AXAXELHEELRSMEGILKPKKRVYEMIQVTINSHHVRSPQ

SEQ ID NO: 13656 - protein, 37 aa, Artificial Sequence
  Non-cyclic GFR-binding peptide
  MOD_RES (1)..(1): Xaa is C or S
XELHEELRSMEGLLKPKKRVYEMIQVTINSHHVRSPQ

SEQ ID NO: 13657 - protein, 40 aa, Artificial Sequence
  Non-cyclic GFR-binding peptide
  MOD_RES (1)..(35): Xaa is C or S
XKNHQLFVTAKKHQGQHPKIRIKRMQVPREETPVXELGED

SEQ ID NO: 13658 - protein, 36 aa, Artificial Sequence
  Non-cyclic GFR-binding peptide
  MOD_RES (36)..(36): Xaa is C or S
  MOD_RES (12)..(13)..(14)..(15)..(16): Xaa is A or G
  MOD_RES (17)..(18)..(19)..(20): Xaa is A or G or absent
LHDELTSMEGLXXXXXXXXXMIQVTINSLQVQTPRX

SEQ ID NO: 13659 - protein, 38 aa, Artificial Sequence
  Non-cyclic GFR-binding peptide
  MOD_RES (1)..(3)..(37): Xaa is C or S
XEXQSHEELVQVEKHQGQHPKIRVKAMKVSRQGTPVXE

SEQ ID NO: 13660 - protein, 32 aa, Artificial Sequence
  Non-cyclic GFR-binding peptide
  MOD_RES (11)..(12)..(13)..(14)..(15): Xaa is A or G
  MOD_RES (16)..(17)..(18)..(19): Xaa is A or G or absent
HDELTSMEGIXXXXXXXXXMIQVTINSLQVQT

SEQ ID NO: 13661 - protein, 41 aa, Artificial Sequence
  Non-cyclic GFR-binding peptide
  MOD_RES (2)..(4)..(38): Xaa is C or S
RXEXQSHEELSMEGIHQGQHPKIRMIQMTINSQGTPVXELG

SEQ ID NO: 13662 - protein, 42 aa, Artificial Sequence
  Non-cyclic GFR-binding peptide
  MOD_RES (1)..(3)..(40): Xaa is C or S
XAXELHEELRSMEGILKPKKRVYEMIQVTINSHHVRSPQXKV

SEQ ID NO: 13663 - protein, 39 aa, Artificial Sequence
  Non-cyclic GFR-binding peptide
  MOD_RES (35)..(35): Xaa is C or S
  MOD_RES (11)..(12)..(13)..(14)..(15): Xaa is A or G
  MOD_RES (16)..(17)..(18)..(19): Xaa is A or G or absent
HEELRSMEGLXXXXXXXXXMIQVTINSHHVRSPQXKVSS

SEQ ID NO: 13664 - protein, 41 aa, Artificial Sequence
  Non-cyclic GFR-binding peptide
  MOD_RES (37)..(37): Xaa is C or S
  MOD_RES (13)..(14)..(15)..(16)..(17): Xaa is A or G
  MOD_RES (18)..(19)..(20)..(21): Xaa is A or G or absent
ELHEELRVTAKKXXXXXXXXXIKRVQVPRHHVRSPQXKVSS

SEQ ID NO: 13665 - protein, 37 aa, Artificial Sequence
  Non-cyclic GFR-binding peptide
  MOD_RES (1)..(3)..(37): Xaa is C or S
XEXQSHEELVQVEKHQGQHPKIRVKAMKVSRQGTPVX

SEQ ID NO: 13666 - protein, 39 aa, Artificial Sequence
  Non-cyclic GFR-binding peptide
  MOD_RES (36)..(36): Xaa is C or S
LHDELTSMEGLFIPKKRVIEMIQVTINSLQVQTPRXQVN

SEQ ID NO: 13667 - protein, 38 aa, Artificial Sequence
  Non-cyclic GFR-binding peptide
  MOD_RES (2)..(4): Xaa is C or S
  MOD_RES (17)..(18)..(19)..(20)..(21): Xaa is A or G
  MOD_RES (22)..(23)..(24)..(25): Xaa is A or G or absent
EXKXALHDELTVQVEKXXXXXXXXXVKAVKVSRLQVQT

SEQ ID NO: 13668 - protein, 42 aa, Artificial Sequence
  Non-cyclic GFR-binding peptide
  MOD_RES (2)..(4)..(41): Xaa is C or S
AXAXELHEELRSMEGLLKPKKRVYEMIQVTINSHHVRSPQXK

SEQ ID NO: 13669 - protein, 44 aa, Artificial Sequence
  Non-cyclic GFR-binding peptide
  MOD_RES (2)..(4)..(38): Xaa is C or S
  MOD_RES (16)..(17)..(18)..(19)..(20): Xaa is A or G
  MOD_RES (21)..(22)..(23)..(24): Xaa is A or G or absent
RXEXQSHEELSMEGIXXXXXXXXXMIQMTINSQGTPVXELGEDN

SEQ ID NO: 13670 - protein, 42 aa, Artificial Sequence
  Non-cyclic GFR-binding peptide
  MOD_RES (2)..(39): Xaa is C or S
  MOD_RES (15)..(16)..(17)..(18)..(19): Xaa is A or G
  MOD_RES (20)..(21)..(22)..(23): Xaa is A or G or absent
AXELHEELRSMEGLXXXXXXXXXMIQVTINSHHVRSPQXKVS

SEQ ID NO: 13671 - protein, 42 aa, Artificial Sequence
  Non-cyclic GFR-binding peptide
  MOD_RES (2)..(36): Xaa is C or S
EXKNHQLFVQVEKHQGQHPKIRVKAMKVSREETPVXELGEDN

SEQ ID NO: 13672 - protein, 37 aa, Artificial Sequence
  Non-cyclic GFR-binding peptide
  MOD_RES (1)..(1): Xaa is C or S
XALHDELTSMEGLFIPKKRVIEMIQVTINSLQVQTPR

SEQ ID NO: 13673 - protein, 37 aa, Artificial Sequence
  Non-cyclic GFR-binding peptide
  MOD_RES (1)..(35): Xaa is C or S
  MOD_RES (13)..(14)..(15)..(16)..(17): Xaa is A or G
  MOD_RES (18)..(19)..(20)..(21): Xaa is A or G or absent
XKNHQLFSMEGLXXXXXXXXXMIQMTINSEETPVXEL

SEQ ID NO: 13674 - protein, 38 aa, Artificial Sequence
  Non-cyclic GFR-binding peptide
  MOD_RES (1)..(3): Xaa is C or S
XAXELHEELRVTAKKLKPKKRVYEIKRVQVPRHHVRSP

SEQ ID NO: 13675 - protein, 38 aa, Artificial Sequence
  Non-cyclic GFR-binding peptide
  MOD_RES (33)..(33): Xaa is C or S
SHEELSMEGIHQGQHPKIRMIQMTINSQGTPVXELGED

SEQ ID NO: 13676 - protein, 39 aa, Artificial Sequence
  Non-cyclic GFR-binding peptide
  MOD_RES (1)..(38): Xaa is C or S
  MOD_RES (14)..(15)..(16)..(17)..(18): Xaa is A or G
  MOD_RES (19)..(20)..(21)..(22): Xaa is A or G or absent
XELHEELRVTAKKXXXXXXXXXIKRVQVPRHHVRSPQXK

SEQ ID NO: 13677 - protein, 40 aa, Artificial Sequence
  Non-cyclic GFR-binding peptide
  MOD_RES (1)..(35): Xaa is C or S
XQSHEELVQVEKHQGQHPKIRVKAMKVSRQGTPVXELGED

SEQ ID NO: 13678 - protein, 39 aa, Artificial Sequence
  Non-cyclic GFR-binding peptide
  MOD_RES (1)..(35): Xaa is C or S
  MOD_RES (13)..(14)..(15)..(16)..(17): Xaa is A or G
  MOD_RES (18)..(19)..(20)..(21): Xaa is A or G or absent
XKNHQLFVQVEKXXXXXXXXXVKAMKVSREETPVXELGE

SEQ ID NO: 13679 - protein, 42 aa, Artificial Sequence
  Non-cyclic GFR-binding peptide
  MOD_RES (1)..(3)..(37): Xaa is C or S
  MOD_RES (15)..(16)..(17)..(18)..(19): Xaa is A or G
  MOD_RES (20)..(21)..(22)..(23): Xaa is A or G or absent
XEXQSHEELVQVEKXXXXXXXXXVKAMKVSRQGTPVXELGED

SEQ ID NO: 13680 - protein, 39 aa, Artificial Sequence
  Non-cyclic GFR-binding peptide
  MOD_RES (2)..(4): Xaa is C or S
EXKXALHDELTVQVEKFIPKKRVIEVKAVKVSRLQVQTP

SEQ ID NO: 13681 - protein, 39 aa, Artificial Sequence
  Non-cyclic GFR-binding peptide
  MOD_RES (2)..(39): Xaa is C or S
AXELHEELRSMEGILKPKKRVYEMIQVTINSHHVRSPQX

SEQ ID NO: 13682 - protein, 37 aa, Artificial Sequence
  Non-cyclic GFR-binding peptide
  MOD_RES (1)..(35): Xaa is C or S
XKNHQLFSMEGLHQGQHPKIRMIQMTINSEETPVXEL

SEQ ID NO: 13683 - protein, 43 aa, Artificial Sequence
  Non-cyclic GFR-binding peptide
  MOD_RES (2)..(4)..(41): Xaa is C or S
EXKXALHDELTSMEGLFIPKKRVIEMIQVTINSLQVQTPRXQV

SEQ ID NO: 13684 - protein, 37 aa, Artificial Sequence
  Non-cyclic GFR-binding peptide
  MOD_RES (1)..(1): Xaa is C or S
  MOD_RES (14)..(15)..(16)..(17)..(18): Xaa is A or G
  MOD_RES (19)..(20)..(21)..(22): Xaa is A or G or absent
XALHDELTVQVEKXXXXXXXXXVKAVKVSRLQVQTPR

SEQ ID NO: 13685 - protein, 33 aa, Artificial Sequence
  Non-cyclic GFR-binding peptide
  MOD_RES (12)..(13)..(14)..(15)..(16): Xaa is A or G
  MOD_RES (17)..(18)..(19)..(20): Xaa is A or G or absent
LHEELRSMEGIXXXXXXXXXMIQVTINSHHVRS

SEQ ID NO: 13686 - protein, 37 aa, Artificial Sequence
  Non-cyclic GFR-binding peptide
  MOD_RES (33)..(33): Xaa is C or S
  MOD_RES (11)..(12)..(13)..(14)..(15): Xaa is A or G
  MOD_RES (16)..(17)..(18)..(19): Xaa is A or G or absent
SHEELVQVEKXXXXXXXXXVKAMKVSRQGTPVXELGE

SEQ ID NO: 13687 - protein, 39 aa, Artificial Sequence
  Non-cyclic GFR-binding peptide
  MOD_RES (1)..(35): Xaa is C or S
XKNHQLFVQVEKHQGQHPKIRVKAMKVSREETPVXELGE

SEQ ID NO: 13688 - protein, 39 aa, Artificial Sequence
  Non-cyclic GFR-binding peptide
  MOD_RES (36)..(36): Xaa is C or S
LHEELRSMEGLLKPKKRVYEMIQVTINSHHVRSPQXKVS

SEQ ID NO: 13689 - protein, 39 aa, Artificial Sequence
  Non-cyclic GFR-binding peptide
  MOD_RES (1)..(38): Xaa is C or S
  MOD_RES (14)..(15)..(16)..(17)..(18): Xaa is A or G
  MOD_RES (19)..(20)..(21)..(22): Xaa is A or G or absent
XELHEELRSMEGIXXXXXXXXXMIQVTINSHHVRSPQXK

SEQ ID NO: 13690 - protein, 37 aa, Artificial Sequence
  Non-cyclic GFR-binding peptide
  MOD_RES (1)..(35): Xaa is C or S
  MOD_RES (13)..(14)..(15)..(16)..(17): Xaa is A or G
  MOD_RES (18)..(19)..(20)..(21): Xaa is A or G or absent
XQSHEELVTAKKXXXXXXXXXIKRMQVPRQGTPVXEL

SEQ ID NO: 13691 - protein, 38 aa, Artificial Sequence
  Non-cyclic GFR-binding peptide
  MOD_RES (1)..(3)..(37): Xaa is C or S
XEXKNHQLFVQVEKHQGQHPKIRVKAMKVSREETPVXE

SEQ ID NO: 13692 - protein, 38 aa, Artificial Sequence
  Non-cyclic GFR-binding peptide
  MOD_RES (2)..(2): Xaa is C or S
KXALHDELTSMEGLFIPKKRVIEMIQVTINSLQVQTPR

SEQ ID NO: 13693 - protein, 39 aa, Artificial Sequence
  Non-cyclic GFR-binding peptide
  MOD_RES (2)..(36): Xaa is C or S
EXKNHQLFVQVEKHQGQHPKIRVKAMKVSREETPVXELG

SEQ ID NO: 13694 - protein, 38 aa, Artificial Sequence
  Non-cyclic GFR-binding peptide
  MOD_RES (2)..(4): Xaa is C or S
AXAXELHEELRVTAKKLKPKKRVYEIKRVQVPRHHVRS

SEQ ID NO: 13695 - protein, 40 aa, Artificial Sequence
  Non-cyclic GFR-binding peptide
  MOD_RES (1)..(38): Xaa is C or S
XELHEELRSMEGLLKPKKRVYEMIQVTINSHHVRSPQXKV

SEQ ID NO: 13696 - protein, 37 aa, Artificial Sequence
  Non-cyclic GFR-binding peptide
  MOD_RES (1)..(3)..(37): Xaa is C or S
XEXQSHEELSMEGIHQGQHPKIRMIQMTINSQGTPVX

SEQ ID NO: 13697 - protein, 39 aa, Artificial Sequence
  Non-cyclic GFR-binding peptide
  MOD_RES (34)..(34): Xaa is C or S
KNHQLFVTAKKHQGQHPKIRIKRMQVPREETPVXELGED

SEQ ID NO: 13698 - protein, 41 aa, Artificial Sequence
  Non-cyclic GFR-binding peptide
  MOD_RES (2)..(36): Xaa is C or S
  MOD_RES (14)..(15)..(16)..(17)..(18): Xaa is A or G
  MOD_RES (19)..(20)..(21)..(22): Xaa is A or G or absent
EXQSHEELVTAKKXXXXXXXXXIKRMQVPRQGTPVXELGED

SEQ ID NO: 13699 - protein, 41 aa, Artificial Sequence
  Non-cyclic GFR-binding peptide
  MOD_RES (2)..(39): Xaa is C or S
AXELHEELRSMEGLLKPKKRVYEMIQVTINSHHVRSPQXKV

SEQ ID NO: 13700 - protein, 39 aa, Artificial Sequence
  Non-cyclic GFR-binding peptide
  MOD_RES (1)..(3)..(37): Xaa is C or S
  MOD_RES (15)..(16)..(17)..(18)..(19): Xaa is A or G
  MOD_RES (20)..(21)..(22)..(23): Xaa is A or G or absent
XEXKNHQLFSMEGLXXXXXXXXXMIQMTINSEETPVXEL

SEQ ID NO: 13701 - protein, 42 aa, Artificial Sequence
  Non-cyclic GFR-binding peptide
  MOD_RES (1)..(38): Xaa is C or S
  MOD_RES (14)..(15)..(16)..(17)..(18): Xaa is A or G
  MOD_RES (19)..(20)..(21)..(22): Xaa is A or G or absent
XELHEELRSMEGIXXXXXXXXXMIQVTINSHHVRSPQXKVSS

SEQ ID NO: 13702 - protein, 39 aa, Artificial Sequence
  Non-cyclic GFR-binding peptide
  MOD_RES (1)..(3): Xaa is C or S
XKXALHDELTSMEGIFIPKKRVIEMIQVTINSLQVQTPR

SEQ ID NO: 13703 - protein, 43 aa, Artificial Sequence
  Non-cyclic GFR-binding peptide
  MOD_RES (1)..(3)..(40): Xaa is C or S
XKXALHDELTSMEGIFIPKKRVIEMIQVTINSLQVQTPRXQVN

SEQ ID NO: 13704 - protein, 33 aa, Artificial Sequence
  Non-cyclic GFR-binding peptide
QSHEELVQVEKHQGQHPKIRVKAMKVSRQGTPV

SEQ ID NO: 13705 - protein, 39 aa, Artificial Sequence
  Non-cyclic GFR-binding peptide
  MOD_RES (34)..(34): Xaa is C or S
  MOD_RES (12)..(13)..(14)..(15)..(16): Xaa is A or G
  MOD_RES (17)..(18)..(19)..(20): Xaa is A or G or absent
KNHQLFSMEGLXXXXXXXXXMIQMTINSEETPVXELGED

SEQ ID NO: 13706 - protein, 44 aa, Artificial Sequence
  Non-cyclic GFR-binding peptide
  MOD_RES (1)..(3)..(40): Xaa is C or S
XKXALHDELTSMEGIFIPKKRVIEMIQVTINSLQVQTPRXQVNR

SEQ ID NO: 13707 - protein, 44 aa, Artificial Sequence
  Non-cyclic GFR-binding peptide
  MOD_RES (1)..(3)..(40): Xaa is C or S
XKXALHDELTSMEGLFIPKKRVIEMIQVTINSLQVQTPRXQVNR

SEQ ID NO: 13708 - protein, 38 aa, Artificial Sequence
  Non-cyclic GFR-binding peptide
  MOD_RES (2)..(4): Xaa is C or S
EXKXALHDELTSMEGLFIPKKRVIEMIQVTINSLQVQT

SEQ ID NO: 13709 - protein, 38 aa, Artificial Sequence
  Non-cyclic GFR-binding peptide
  MOD_RES (34)..(34): Xaa is C or S
  MOD_RES (12)..(13)..(14)..(15)..(16): Xaa is A or G
  MOD_RES (17)..(18)..(19)..(20): Xaa is A or G or absent
QSHEELVTAKKXXXXXXXXXIKRMQVPRQGTPVXELGE

SEQ ID NO: 13710 - protein, 32 aa, Artificial Sequence
  Non-cyclic GFR-binding peptide
  MOD_RES (11)..(12)..(13)..(14)..(15): Xaa is A or G
  MOD_RES (16)..(17)..(18)..(19): Xaa is A or G or absent
SHEELVTAKKXXXXXXXXXIKRMQVPRQGTPV

SEQ ID NO: 13711 - protein, 40 aa, Artificial Sequence
  Non-cyclic GFR-binding peptide
  MOD_RES (1)..(35): Xaa is C or S
  MOD_RES (13)..(14)..(15)..(16)..(17): Xaa is A or G
  MOD_RES (18)..(19)..(20)..(21): Xaa is A or G or absent
XKNHQLFVTAKKXXXXXXXXXIKRMQVPREETPVXELGED

SEQ ID NO: 13712 - protein, 33 aa, Artificial Sequence
  Non-cyclic GFR-binding peptide
QSHEELSMEGIHQGQHPKIRMIQMTINSQGTPV

SEQ ID NO: 13713 - protein, 35 aa, Artificial Sequence
  Non-cyclic GFR-binding peptide
  MOD_RES (1)..(35): Xaa is C or S
XKNHQLFVTAKKHQGQHPKIRIKRMQVPREETPVX

SEQ ID NO: 13714 - protein, 40 aa, Artificial Sequence
  Non-cyclic GFR-binding peptide
  MOD_RES (1)..(35): Xaa is C or S
  MOD_RES (13)..(14)..(15)..(16)..(17): Xaa is A or G
  MOD_RES (18)..(19)..(20)..(21): Xaa is A or G or absent
XQSHEELVQVEKXXXXXXXXXVKAMKVSRQGTPVXELGED

SEQ ID NO: 13715 - protein, 39 aa, Artificial Sequence
  Non-cyclic GFR-binding peptide
  MOD_RES (2)..(4): Xaa is C or S
AXAXELHEELRSMEGILKPKKRVYEMIQVTINSHHVRSP

SEQ ID NO: 13716 - protein, 43 aa, Artificial Sequence
  Non-cyclic GFR-binding peptide
  MOD_RES (2)..(39): Xaa is C or S
  MOD_RES (15)..(16)..(17)..(18)..(19): Xaa is A or G
  MOD_RES (20)..(21)..(22)..(23): Xaa is A or G or absent
AXELHEELRVTAKKXXXXXXXXXIKRVQVPRHHVRSPQXKVSS

SEQ ID NO: 13717 - protein, 37 aa, Artificial Sequence
  Non-cyclic GFR-binding peptide
  MOD_RES (2)..(36): Xaa is C or S
EXQSHEELSMEGIHQGQHPKIRMIQMTINSQGTPVXE

SEQ ID NO: 13718 - protein, 36 aa, Artificial Sequence
  Non-cyclic GFR-binding peptide
  MOD_RES (36)..(36): Xaa is C or S
  MOD_RES (12)..(13)..(14)..(15)..(16): Xaa is A or G
  MOD_RES (17)..(18)..(19)..(20): Xaa is A or G or absent
LHEELRSMEGLXXXXXXXXXMIQVTINSHHVRSPQX

SEQ ID NO: 13719 - protein, 33 aa, Artificial Sequence
  Non-cyclic GFR-binding peptide
  MOD_RES (33)..(33): Xaa is C or S
  MOD_RES (11)..(12)..(13)..(14)..(15): Xaa is A or G
  MOD_RES (16)..(17)..(18)..(19): Xaa is A or G or absent
NHQLFVTAKKXXXXXXXXXIKRMQVPREETPVX

SEQ ID NO: 13720 - protein, 34 aa, Artificial Sequence
  Non-cyclic GFR-binding peptide
  MOD_RES (34)..(34): Xaa is C or S
QSHEELSMEGIHQGQHPKIRMIQMTINSQGTPVX

SEQ ID NO: 13721 - protein, 33 aa, Artificial Sequence
  Non-cyclic GFR-binding peptide
  MOD_RES (11)..(12)..(13)..(14)..(15): Xaa is A or G
  MOD_RES (16)..(17)..(18)..(19): Xaa is A or G or absent
HDELTVQVEKXXXXXXXXXVKAVKVSRLQVQTP

SEQ ID NO: 13722 - protein, 37 aa, Artificial Sequence
  Non-cyclic GFR-binding peptide
  MOD_RES (37)..(37): Xaa is C or S
  MOD_RES (13)..(14)..(15)..(16)..(17): Xaa is A or G
  MOD_RES (18)..(19)..(20)..(21): Xaa is A or G or absent
ELHEELRSMEGLXXXXXXXXXMIQVTINSHHVRSPQX

SEQ ID NO: 13723 - protein, 37 aa, Artificial Sequence
  Non-cyclic GFR-binding peptide
  MOD_RES (33)..(33): Xaa is C or S
SHEELVTAKKHQGQHPKIRIKRMQVPRQGTPVXELGE

SEQ ID NO: 13724 - protein, 40 aa, Artificial Sequence
  Non-cyclic GFR-binding peptide
  MOD_RES (2)..(4)..(38): Xaa is C or S
  MOD_RES (16)..(17)..(18)..(19)..(20): Xaa is A or G
  MOD_RES (21)..(22)..(23)..(24): Xaa is A or G or absent
RXEXKNHQLFVTAKKXXXXXXXXXIKRMQVPREETPVXEL

SEQ ID NO: 13725 - protein, 38 aa, Artificial Sequence
  Non-cyclic GFR-binding peptide
  MOD_RES (2)..(4): Xaa is C or S
EXKXALHDELTSMEGIFIPKKRVIEMIQVTINSLQVQT

SEQ ID NO: 13726 - protein, 37 aa, Artificial Sequence
  Non-cyclic GFR-binding peptide
  MOD_RES (1)..(3): Xaa is C or S
  MOD_RES (16)..(17)..(18)..(19)..(20): Xaa is A or G
  MOD_RES (21)..(22)..(23)..(24): Xaa is A or G or absent
XAXELHEELRSMEGLXXXXXXXXXMIQVTINSHHVRS

SEQ ID NO: 13727 - protein, 45 aa, Artificial Sequence
  Non-cyclic GFR-binding peptide
  MOD_RES (2)..(4)..(41): Xaa is C or S
  MOD_RES (17)..(18)..(19)..(20)..(21): Xaa is A or G
  MOD_RES (22)..(23)..(24)..(25): Xaa is A or G or absent
AXAXELHEELRSMEGIXXXXXXXXXMIQVTINSHHVRSPQXKVSS

SEQ ID NO: 13728 - protein, 32 aa, Artificial Sequence; identical to SEQ ID NO: 2168
  Non-cyclic GFR-binding peptide

SEQ ID NO: 13729 - protein, 38 aa, Artificial Sequence
  Non-cyclic GFR-binding peptide
  MOD_RES (1)..(3)..(37): Xaa is C or S
XEXQSHEELSMEGIHQGQHPKIRMIQMTINSQGTPVXE

SEQ ID NO: 13730 - protein, 39 aa, Artificial Sequence
  Non-cyclic GFR-binding peptide
  MOD_RES (37)..(37): Xaa is C or S
ELHEELRSMEGILKPKKRVYEMIQVTINSHHVRSPQXKV

SEQ ID NO: 13731 - protein, 45 aa, Artificial Sequence
  Non-cyclic GFR-binding peptide
  MOD_RES (2)..(4)..(41): Xaa is C or S
  MOD_RES (17)..(18)..(19)..(20)..(21): Xaa is A or G
  MOD_RES (22)..(23)..(24)..(25): Xaa is A or G or absent
AXAXELHEELRSMEGLXXXXXXXXXMIQVTINSHHVRSPQXKVSS

SEQ ID NO: 13732 - protein, 36 aa, Artificial Sequence
  Non-cyclic GFR-binding peptide
  MOD_RES (33)..(33): Xaa is C or S
NHQLFVQVEKHQGQHPKIRVKAMKVSREETPVXELG

SEQ ID NO: 13733 - protein, 35 aa, Artificial Sequence
  Non-cyclic GFR-binding peptide
  MOD_RES (2)..(2): Xaa is C or S
  MOD_RES (14)..(15)..(16)..(17)..(18): Xaa is A or G
  MOD_RES (19)..(20)..(21)..(22): Xaa is A or G or absent
EXKNHQLFSMEGLXXXXXXXXXMIQMTINSEETPV

SEQ ID NO: 13734 - protein, 37 aa, Artificial Sequence
  Non-cyclic GFR-binding peptide
  MOD_RES (1)..(3)..(37): Xaa is C or S
XEXKNHQLFVQVEKHQGQHPKIRVKAMKVSREETPVX

SEQ ID NO: 13735 - protein, 34 aa, Artificial Sequence
  Non-cyclic GFR-binding peptide
  MOD_RES (12)..(13)..(14)..(15)..(16): Xaa is A or G
  MOD_RES (17)..(18)..(19)..(20): Xaa is A or G or absent
LHEELRSMEGIXXXXXXXXXMIQVTINSHHVRSP

SEQ ID NO: 13736 - protein, 39 aa, Artificial Sequence
  Non-cyclic GFR-binding peptide
  MOD_RES (33)..(33): Xaa is C or S
NHQLFSMEGLHQGQHPKIRMIQMTINSEETPVXELGEDN

SEQ ID NO: 13737 - protein, 36 aa, Artificial Sequence
  Non-cyclic GFR-binding peptide
  MOD_RES (2)..(36): Xaa is C or S
EXQSHEELSMEGIHQGQHPKIRMIQMTINSQGTPVX

SEQ ID NO: 13738 - protein, 41 aa, Artificial Sequence
  Non-cyclic GFR-binding peptide
  MOD_RES (1)..(35): Xaa is C or S
XKNHQLFSMEGLHQGQHPKIRMIQMTINSEETPVXELGEDN

SEQ ID NO: 13739 - protein, 36 aa, Artificial Sequence
  Non-cyclic GFR-binding peptide
  MOD_RES (33)..(33): Xaa is C or S
NHQLFVTAKKHQGQHPKIRIKRMQVPREETPVXELG

SEQ ID NO: 13740 - protein, 41 aa, Artificial Sequence
  Non-cyclic GFR-binding peptide
  MOD_RES (1)..(35): Xaa is C or S
  MOD_RES (13)..(14)..(15)..(16)..(17): Xaa is A or G
  MOD_RES (18)..(19)..(20)..(21): Xaa is A or G or absent
XQSHEELSMEGIXXXXXXXXXMIQMTINSQGTPVXELGEDN

SEQ ID NO: 13741 - protein, 35 aa, Artificial Sequence
  Non-cyclic GFR-binding peptide
  MOD_RES (2)..(2): Xaa is C or S
  MOD_RES (14)..(15)..(16)..(17)..(18): Xaa is A or G
  MOD_RES (19)..(20)..(21)..(22): Xaa is A or G or absent
EXQSHEELVQVEKXXXXXXXXXVKAMKVSRQGTPV

SEQ ID NO: 13742 - protein, 36 aa, Artificial Sequence
  Non-cyclic GFR-binding peptide
  MOD_RES (33)..(33): Xaa is C or S
  MOD_RES (11)..(12)..(13)..(14)..(15): Xaa is A or G
  MOD_RES (16)..(17)..(18)..(19): Xaa is A or G or absent
NHQLFSMEGLXXXXXXXXXMIQMTINSEETPVXELG

SEQ ID NO: 13743 - protein, 42 aa, Artificial Sequence
  Non-cyclic GFR-binding peptide
  MOD_RES (2)..(39): Xaa is C or S
  MOD_RES (15)..(16)..(17)..(18)..(19): Xaa is A or G
  MOD_RES (20)..(21)..(22)..(23): Xaa is A or G or absent
AXELHEELRSMEGIXXXXXXXXXMIQVTINSHHVRSPQXKVS

SEQ ID NO: 13744 - protein, 41 aa, Artificial Sequence
  Non-cyclic GFR-binding peptide
  MOD_RES (37)..(37): Xaa is C or S
  MOD_RES (13)..(14)..(15)..(16)..(17): Xaa is A or G
  MOD_RES (18)..(19)..(20)..(21): Xaa is A or G or absent
ELHEELRSMEGIXXXXXXXXXMIQVTINSHHVRSPQXKVSS

SEQ ID NO: 13745 - protein, 40 aa, Artificial Sequence
  Non-cyclic GFR-binding peptide
  MOD_RES (2)..(39): Xaa is C or S
  MOD_RES (15)..(16)..(17)..(18)..(19): Xaa is A or G
  MOD_RES (20)..(21)..(22)..(23): Xaa is A or G or absent
AXELHEELRSMEGIXXXXXXXXXMIQVTINSHHVRSPQXK

SEQ ID NO: 13746 - protein, 43 aa, Artificial Sequence
  Non-cyclic GFR-binding peptide
  MOD_RES (2)..(39): Xaa is C or S
AXELHEELRVTAKKLKPKKRVYEIKRVQVPRHHVRSPQXKVSS

SEQ ID NO: 13747 - protein, 37 aa, Artificial Sequence
  Non-cyclic GFR-binding peptide
  MOD_RES (34)..(34): Xaa is C or S
KNHQLFVTAKKHQGQHPKIRIKRMQVPREETPVXELG

SEQ ID NO: 13748 - protein, 37 aa, Artificial Sequence
  Non-cyclic GFR-binding peptide
  MOD_RES (1)..(3)..(37): Xaa is C or S
XEXQSHEELVTAKKHQGQHPKIRIKRMQVPRQGTPVX

SEQ ID NO: 13749 - protein, 38 aa, Artificial Sequence
  Non-cyclic GFR-binding peptide
  MOD_RES (2)..(2): Xaa is C or S
KXALHDELTSMEGIFIPKKRVIEMIQVTINSLQVQTPR

SEQ ID NO: 13750 - protein, 41 aa, Artificial Sequence
  Non-cyclic GFR-binding peptide
  MOD_RES (2)..(4)..(41): Xaa is C or S
AXAXELHEELRSMEGILKPKKRVYEMIQVTINSHHVRSPQX

SEQ ID NO: 13751 - protein, 39 aa, Artificial Sequence
  Non-cyclic GFR-binding peptide
  MOD_RES (2)..(4): Xaa is C or S
AXAXELHEELRSMEGLLKPKKRVYEMIQVTINSHHVRSP

SEQ ID NO: 13752 - protein, 37 aa, Artificial Sequence
  Non-cyclic GFR-binding peptide
  MOD_RES (2)..(4): Xaa is C or S
RXEXKNHQLFSMEGLHQGQHPKIRMIQMTINSEETPV

SEQ ID NO: 13753 - protein, 35 aa, Artificial Sequence
  Non-cyclic GFR-binding peptide
  MOD_RES (1)..(35): Xaa is C or S
  MOD_RES (13)..(14)..(15)..(16)..(17): Xaa is A or G
  MOD_RES (18)..(19)..(20)..(21): Xaa is A or G or absent
XQSHEELVQVEKXXXXXXXXXVKAMKVSRQGTPVX

SEQ ID NO: 13754 - protein, 44 aa, Artificial Sequence
  Non-cyclic GFR-binding peptide
  MOD_RES (2)..(4)..(38): Xaa is C or S
RXEXQSHEELVTAKKHQGQHPKIRIKRMQVPRQGTPVXELGEDN

SEQ ID NO: 13755 - protein, 41 aa, Artificial Sequence
  Non-cyclic GFR-binding peptide
  MOD_RES (2)..(4)..(38): Xaa is C or S
RXEXKNHQLFSMEGLHQGQHPKIRMIQMTINSEETPVXELG

SEQ ID NO: 13756 - protein, 39 aa, Artificial Sequence
  Non-cyclic GFR-binding peptide
  MOD_RES (2)..(4)..(38): Xaa is C or S
  MOD_RES (16)..(17)..(18)..(19)..(20): Xaa is A or G
  MOD_RES (21)..(22)..(23)..(24): Xaa is A or G or absent
RXEXKNHQLFVTAKKXXXXXXXXXIKRMQVPREETPVXE

SEQ ID NO: 13757 - protein, 41 aa, Artificial Sequence
  Non-cyclic GFR-binding peptide
  MOD_RES (2)..(39): Xaa is C or S
  MOD_RES (15)..(16)..(17)..(18)..(19): Xaa is A or G
  MOD_RES (20)..(21)..(22)..(23): Xaa is A or G or absent
AXELHEELRSMEGLXXXXXXXXXMIQVTINSHHVRSPQXKV

SEQ ID NO: 13758 - protein, 35 aa, Artificial Sequence
  Non-cyclic GFR-binding peptide
  MOD_RES (1)..(35): Xaa is C or S
XQSHEELVQVEKHQGQHPKIRVKAMKVSRQGTPVX

SEQ ID NO: 13759 - protein, 37 aa, Artificial Sequence
  Non-cyclic GFR-binding peptide
  MOD_RES (1)..(1): Xaa is C or S
XELHEELRVTAKKLKPKKRVYEIKRVQVPRHHVRSPQ

SEQ ID NO: 13760 - protein, 44 aa, Artificial Sequence
  Non-cyclic GFR-binding peptide
  MOD_RES (1)..(3)..(40): Xaa is C or S
  MOD_RES (16)..(17)..(18)..(19)..(20): Xaa is A or G
  MOD_RES (21)..(22)..(23)..(24): Xaa is A or G or absent
XAXELHEELRSMEGLXXXXXXXXXMIQVTINSHHVRSPQXKVSS

SEQ ID NO: 13761 - protein, 40 aa, Artificial Sequence
  Non-cyclic GFR-binding peptide
  MOD_RES (1)..(3)..(40): Xaa is C or S
XAXELHEELRVTAKKLKPKKRVYEIKRVQVPRHHVRSPQX

SEQ ID NO: 13762 - protein, 37 aa, Artificial Sequence
  Non-cyclic GFR-binding peptide
  MOD_RES (35)..(35): Xaa is C or S
  MOD_RES (11)..(12)..(13)..(14)..(15): Xaa is A or G
  MOD_RES (16)..(17)..(18)..(19): Xaa is A or G or absent
HEELRSMEGIXXXXXXXXXMIQVTINSHHVRSPQXKV

SEQ ID NO: 13763 - protein, 36 aa, Artificial Sequence
  Non-cyclic GFR-binding peptide
  MOD_RES (34)..(34): Xaa is C or S
  MOD_RES (12)..(13)..(14)..(15)..(16): Xaa is A or G
  MOD_RES (17)..(18)..(19)..(20): Xaa is A or G or absent
KNHQLFVTAKKXXXXXXXXXIKRMQVPREETPVXEL

SEQ ID NO: 13764 - protein, 33 aa, Artificial Sequence
  Non-cyclic GFR-binding peptide
  MOD_RES (33)..(33): Xaa is C or S
  MOD_RES (11)..(12)..(13)..(14)..(15): Xaa is A or G
  MOD_RES (16)..(17)..(18)..(19): Xaa is A or G or absent
SHEELVQVEKXXXXXXXXXVKAMKVSRQGTPVX

SEQ ID NO: 13765 - protein, 45 aa, Artificial Sequence
  Non-cyclic GFR-binding peptide
  MOD_RES (2)..(4)..(41): Xaa is C or S
  MOD_RES (17)..(18)..(19)..(20)..(21): Xaa is A or G
  MOD_RES (22)..(23)..(24)..(25): Xaa is A or G or absent
AXAXELHEELRVTAKKXXXXXXXXXIKRVQVPRHHVRSPQXKVSS

SEQ ID NO: 13766 - protein, 44 aa, Artificial Sequence
  Non-cyclic GFR-binding peptide
  MOD_RES (1)..(3)..(40): Xaa is C or S
  MOD_RES (16)..(17)..(18)..(19)..(20): Xaa is A or G
  MOD_RES (21)..(22)..(23)..(24): Xaa is A or G or absent
XAXELHEELRSMEGIXXXXXXXXXMIQVTINSHHVRSPQXKVSS

SEQ ID NO: 13767 - protein, 37 aa, Artificial Sequence
  Non-cyclic GFR-binding peptide
  MOD_RES (34)..(34): Xaa is C or S
  MOD_RES (12)..(13)..(14)..(15)..(16): Xaa is A or G
  MOD_RES (17)..(18)..(19)..(20): Xaa is A or G or absent
KNHQLFSMEGLXXXXXXXXXMIQMTINSEETPVXELG

SEQ ID NO: 13768 - protein, 37 aa, Artificial Sequence
  Non-cyclic GFR-binding peptide
  MOD_RES (36)..(36): Xaa is C or S
  MOD_RES (12)..(13)..(14)..(15)..(16): Xaa is A or G
  MOD_RES (17)..(18)..(19)..(20): Xaa is A or G or absent
LHEELRVTAKKXXXXXXXXXIKRVQVPRHHVRSPQXK

SEQ ID NO: 13769 - protein, 39 aa, Artificial Sequence
  Non-cyclic GFR-binding peptide
  MOD_RES (1)..(3): Xaa is C or S
XKXALHDELTSMEGLFIPKKRVIEMIQVTINSLQVQTPR

SEQ ID NO: 13770 - protein, 38 aa, Artificial Sequence
  Non-cyclic GFR-binding peptide
  MOD_RES (35)..(35): Xaa is C or S
HDELTVQVEKFIPKKRVIEVKAVKVSRLQVQTPRXQVN

SEQ ID NO: 13771 - protein, 37 aa, Artificial Sequence
  Non-cyclic GFR-binding peptide
  MOD_RES (33)..(33): Xaa is C or S
NHQLFSMEGLHQGQHPKIRMIQMTINSEETPVXELGE

SEQ ID NO: 13772 - protein, 40 aa, Artificial Sequence
  Non-cyclic GFR-binding peptide
  MOD_RES (2)..(4)..(38): Xaa is C or S
RXEXKNHQLFVQVEKHQGQHPKIRVKAMKVSREETPVXEL

SEQ ID NO: 13773 - protein, 38 aa, Artificial Sequence
  Non-cyclic GFR-binding peptide
  MOD_RES (2)..(2): Xaa is C or S
  MOD_RES (15)..(16)..(17)..(18)..(19): Xaa is A or G
  MOD_RES (20)..(21)..(22)..(23): Xaa is A or G or absent
KXALHDELTSMEGLXXXXXXXXXMIQVTINSLQVQTPR

SEQ ID NO: 13774 - protein, 35 aa, Artificial Sequence
  Non-cyclic GFR-binding peptide
  MOD_RES (1)..(1): Xaa is C or S
  MOD_RES (14)..(15)..(16)..(17)..(18): Xaa is A or G
  MOD_RES (19)..(20)..(21)..(22): Xaa is A or G or absent
XALHDELTSMEGIXXXXXXXXXMIQVTINSLQVQT

SEQ ID NO: 13775 - protein, 36 aa, Artificial Sequence
  Non-cyclic GFR-binding peptide
  MOD_RES (1)..(1): Xaa is C or S
XALHDELTVQVEKFIPKKRVIEVKAVKVSRLQVQTP

SEQ ID NO: 13776 - protein, 40 aa, Artificial Sequence
  Non-cyclic GFR-binding peptide
  MOD_RES (2)..(36): Xaa is C or S
  MOD_RES (14)..(15)..(16)..(17)..(18): Xaa is A or G
  MOD_RES (19)..(20)..(21)..(22): Xaa is A or G or absent
EXKNHQLFVQVEKXXXXXXXXXVKAMKVSREETPVXELGE

SEQ ID NO: 13777 - protein, 39 aa, Artificial Sequence
  Non-cyclic GFR-binding peptide
  MOD_RES (2)..(4): Xaa is C or S
AXAXELHEELRVTAKKLKPKKRVYEIKRVQVPRHHVRSP

SEQ ID NO: 13778 - protein, 41 aa, Artificial Sequence
  Non-cyclic GFR-binding peptide
  MOD_RES (37)..(37): Xaa is C or S
ALHDELTSMEGLFIPKKRVIEMIQVTINSLQVQTPRXQVNR

SEQ ID NO: 13779 - protein, 42 aa, Artificial Sequence
  Non-cyclic GFR-binding peptide
  MOD_RES (2)..(4)..(38): Xaa is C or S
RXEXKNHQLFVQVEKHQGQHPKIRVKAMKVSREETPVXELGE

SEQ ID NO: 13780 - protein, 39 aa, Artificial Sequence
  Non-cyclic GFR-binding peptide
  MOD_RES (1)..(38): Xaa is C or S
XALHDELTVQVEKFIPKKRVIEVKAVKVSRLQVQTPRXQ

SEQ ID NO: 13781 - protein, 32 aa, Artificial Sequence; identical to SEQ ID NO: 2187
  Non-cyclic GFR-binding peptide

SEQ ID NO: 13782 - protein, 36 aa, Artificial Sequence
  Non-cyclic GFR-binding peptide
  MOD_RES (2)..(2): Xaa is C or S
  MOD_RES (15)..(16)..(17)..(18)..(19): Xaa is A or G
  MOD_RES (20)..(21)..(22)..(23): Xaa is A or G or absent
KXALHDELTSMEGLXXXXXXXXXMIQVTINSLQVQT

SEQ ID NO: 13783 - protein, 36 aa, Artificial Sequence
  Non-cyclic GFR-binding peptide
  MOD_RES (2)..(2): Xaa is C or S
KXALHDELTSMEGIFIPKKRVIEMIQVTINSLQVQT

SEQ ID NO: 13784 - protein, 32 aa, Artificial Sequence
  Non-cyclic GFR-binding peptide
  MOD_RES (11)..(12)..(13)..(14)..(15): Xaa is A or G
  MOD_RES (16)..(17)..(18)..(19): Xaa is A or G or absent
HDELTSMEGLXXXXXXXXXMIQVTINSLQVQT

SEQ ID NO: 13785 - protein, 39 aa, Artificial Sequence
  Non-cyclic GFR-binding peptide
  MOD_RES (2)..(39): Xaa is C or S
  MOD_RES (15)..(16)..(17)..(18)..(19): Xaa is A or G
  MOD_RES (20)..(21)..(22)..(23): Xaa is A or G or absent
AXELHEELRSMEGIXXXXXXXXXMIQVTINSHHVRSPQX

SEQ ID NO: 13786 - protein, 43 aa, Artificial Sequence
  Non-cyclic GFR-binding peptide
  MOD_RES (1)..(3)..(37): Xaa is C or S
XEXKNHQLFVTAKKHQGQHPKIRIKRMQVPREETPVXELGEDN

SEQ ID NO: 13787 - protein, 38 aa, Artificial Sequence
  Non-cyclic GFR-binding peptide
  MOD_RES (35)..(35): Xaa is C or S
HEELRSMEGILKPKKRVYEMIQVTINSHHVRSPQXKVS

SEQ ID NO: 13788 - protein, 40 aa, Artificial Sequence
  Non-cyclic GFR-binding peptide
  MOD_RES (36)..(36): Xaa is C or S
  MOD_RES (12)..(13)..(14)..(15)..(16): Xaa is A or G
  MOD_RES (17)..(18)..(19)..(20): Xaa is A or G or absent
LHDELTSMEGLXXXXXXXXXMIQVTINSLQVQTPRXQVNR

SEQ ID NO: 13789 - protein, 32 aa, Artificial Sequence
  Non-cyclic GFR-binding peptide
HEELRSMEGILKPKKRVYEMIQVTINSHHVRS

SEQ ID NO: 13790 - protein, 40 aa, Artificial Sequence
  Non-cyclic GFR-binding peptide
  MOD_RES (2)..(36): Xaa is C or S
  MOD_RES (14)..(15)..(16)..(17)..(18): Xaa is A or G
  MOD_RES (19)..(20)..(21)..(22): Xaa is A or G or absent
EXQSHEELSMEGIXXXXXXXXXMIQMTINSQGTPVXELGE

SEQ ID NO: 13791 - protein, 39 aa, Artificial Sequence
  Non-cyclic GFR-binding peptide
  MOD_RES (33)..(33): Xaa is C or S
SHEELSMEGIHQGQHPKIRMIQMTINSQGTPVXELGEDN

SEQ ID NO: 13792 - protein, 37 aa, Artificial Sequence
  Non-cyclic GFR-binding peptide
  MOD_RES (2)..(36): Xaa is C or S
EXQSHEELVTAKKHQGQHPKIRIKRMQVPRQGTPVXE

SEQ ID NO: 13793 - protein, 37 aa, Artificial Sequence
  Non-cyclic GFR-binding peptide
  MOD_RES (36)..(36): Xaa is C or S
  MOD_RES (12)..(13)..(14)..(15)..(16): Xaa is A or G
  MOD_RES (17)..(18)..(19)..(20): Xaa is A or G or absent
LHDELTVQVEKXXXXXXXXXVKAVKVSRLQVQTPRXQ

SEQ ID NO: 13794 - protein, 36 aa, Artificial Sequence
  Non-cyclic GFR-binding peptide
  MOD_RES (33)..(33): Xaa is C or S
  MOD_RES (11)..(12)..(13)..(14)..(15): Xaa is A or G
  MOD_RES (16)..(17)..(18)..(19): Xaa is A or G or absent
NHQLFVQVEKXXXXXXXXXVKAMKVSREETPVXELG

SEQ ID NO: 13795 - protein, 36 aa, Artificial Sequence
  Non-cyclic GFR-binding peptide
  MOD_RES (1)..(1): Xaa is C or S
  MOD_RES (14)..(15)..(16)..(17)..(18): Xaa is A or G
  MOD_RES (19)..(20)..(21)..(22): Xaa is A or G or absent
XELHEELRSMEGIXXXXXXXXXMIQVTINSHHVRSP

SEQ ID NO: 13796 - protein, 41 aa, Artificial Sequence
  Non-cyclic GFR-binding peptide
  MOD_RES (1)..(3)..(40): Xaa is C or S
XKXALHDELTVQVEKFIPKKRVIEVKAVKVSRLQVQTPRXQ

SEQ ID NO: 13797 - protein, 39 aa, Artificial Sequence
  Non-cyclic GFR-binding peptide
  MOD_RES (1)..(38): Xaa is C or S
  MOD_RES (14)..(15)..(16)..(17)..(18): Xaa is A or G
  MOD_RES (19)..(20)..(21)..(22): Xaa is A or G or absent
XALHDELTSMEGLXXXXXXXXXMIQVTINSLQVQTPRXQ

SEQ ID NO: 13798 - protein, 38 aa, Artificial Sequence
  Non-cyclic GFR-binding peptide
  MOD_RES (2)..(36): Xaa is C or S
  MOD_RES (14)..(15)..(16)..(17)..(18): Xaa is A or G
  MOD_RES (19)..(20)..(21)..(22): Xaa is A or G or absent
EXKNHQLFSMEGLXXXXXXXXXMIQMTINSEETPVXEL

SEQ ID NO: 13799 - protein, 41 aa, Artificial Sequence
  Non-cyclic GFR-binding peptide
  MOD_RES (1)..(35): Xaa is C or S
XQSHEELSMEGIHQGQHPKIRMIQMTINSQGTPVXELGEDN

SEQ ID NO: 13800 - protein, 38 aa, Artificial Sequence
  Non-cyclic GFR-binding peptide
  MOD_RES (2)..(4): Xaa is C or S
EXKXALHDELTVQVEKFIPKKRVIEVKAVKVSRLQVQT

SEQ ID NO: 13801 - protein, 41 aa, Artificial Sequence
  Non-cyclic GFR-binding peptide
  MOD_RES (2)..(36): Xaa is C or S
  MOD_RES (14)..(15)..(16)..(17)..(18): Xaa is A or G
  MOD_RES (19)..(20)..(21)..(22): Xaa is A or G or absent
EXQSHEELSMEGIXXXXXXXXXMIQMTINSQGTPVXELGED

SEQ ID NO: 13802 - protein, 39 aa, Artificial Sequence
  Non-cyclic GFR-binding peptide
  MOD_RES (1)..(35): Xaa is C or S
  MOD_RES (13)..(14)..(15)..(16)..(17): Xaa is A or G
  MOD_RES (18)..(19)..(20)..(21): Xaa is A or G or absent
XQSHEELSMEGIXXXXXXXXXMIQMTINSQGTPVXELGE

SEQ ID NO: 13803 - protein, 37 aa, Artificial Sequence
  Non-cyclic GFR-binding peptide
  MOD_RES (35)..(35): Xaa is C or S
  MOD_RES (11)..(12)..(13)..(14)..(15): Xaa is A or G
  MOD_RES (16)..(17)..(18)..(19): Xaa is A or G or absent
HEELRSMEGLXXXXXXXXXMIQVTINSHHVRSPQXKV

SEQ ID NO: 13804 - protein, 43 aa, Artificial Sequence
  Non-cyclic GFR-binding peptide
  MOD_RES (2)..(39): Xaa is C or S
  MOD_RES (15)..(16)..(17)..(18)..(19): Xaa is A or G
  MOD_RES (20)..(21)..(22)..(23): Xaa is A or G or absent
KXALHDELTVQVEKXXXXXXXXXVKAVKVSRLQVQTPRXQVNR

SEQ ID NO: 13805 - protein, 37 aa, Artificial Sequence
  Non-cyclic GFR-binding peptide
  MOD_RES (1)..(3): Xaa is C or S
XKXALHDELTSMEGIFIPKKRVIEMIQVTINSLQVQT

SEQ ID NO: 13806 - protein, 37 aa, Artificial Sequence
  Non-cyclic GFR-binding peptide
  MOD_RES (33)..(33): Xaa is C or S
SHEELSMEGIHQGQHPKIRMIQMTINSQGTPVXELGE

SEQ ID NO: 13807 - protein, 34 aa, Artificial Sequence
  Non-cyclic GFR-binding peptide
  MOD_RES (13)..(14)..(15)..(16)..(17): Xaa is A or G
  MOD_RES (18)..(19)..(20)..(21): Xaa is A or G or absent
ALHDELTSMEGLXXXXXXXXXMIQVTINSLQVQT

SEQ ID NO: 13808 - protein, 41 aa, Artificial Sequence
  Non-cyclic GFR-binding peptide
  MOD_RES (1)..(35): Xaa is C or S
XQSHEELVTAKKHQGQHPKIRIKRMQVPRQGTPVXELGEDN

SEQ ID NO: 13809 - protein, 43 aa, Artificial Sequence
  Non-cyclic GFR-binding peptide
  MOD_RES (2)..(4)..(38): Xaa is C or S
RXEXKNHQLFSMEGLHQGQHPKIRMIQMTINSEETPVXELGED

SEQ ID NO: 13810 - protein, 36 aa, Artificial Sequence
  Non-cyclic GFR-binding peptide
  MOD_RES (2)..(2): Xaa is C or S
KXALHDELTSMEGLFIPKKRVIEMIQVTINSLQVQT

SEQ ID NO: 13811 - protein, 36 aa, Artificial Sequence
  Non-cyclic GFR-binding peptide
  MOD_RES (34)..(34): Xaa is C or S
KNHQLFVQVEKHQGQHPKIRVKAMKVSREETPVXEL

SEQ ID NO: 13812 - protein, 33 aa, Artificial Sequence
  Non-cyclic GFR-binding peptide
  MOD_RES (33)..(33): Xaa is C or S
SHEELVQVEKHQGQHPKIRVKAMKVSRQGTPVX

SEQ ID NO: 13813 - protein, 39 aa, Artificial Sequence
  Non-cyclic GFR-binding peptide
  MOD_RES (36)..(36): Xaa is C or S
  MOD_RES (12)..(13)..(14)..(15)..(16): Xaa is A or G
  MOD_RES (17)..(18)..(19)..(20): Xaa is A or G or absent
LHEELRSMEGLXXXXXXXXXMIQVTINSHHVRSPQXKVS

SEQ ID NO: 13814 - protein, 39 aa, Artificial Sequence
  Non-cyclic GFR-binding peptide
  MOD_RES (1)..(3): Xaa is C or S
  MOD_RES (16)..(17)..(18)..(19)..(20): Xaa is A or G
  MOD_RES (21)..(22)..(23)..(24): Xaa is A or G or absent
XAXELHEELRSMEGIXXXXXXXXXMIQVTINSHHVRSPQ

SEQ ID NO: 13815 - protein, 32 aa, Artificial Sequence
  Non-cyclic GFR-binding peptide
HDELTSMEGLFIPKKRVIEMIQVTINSLQVQT

SEQ ID NO: 13816 - protein, 41 aa, Artificial Sequence
  Non-cyclic GFR-binding peptide
  MOD_RES (1)..(3)..(40): Xaa is C or S
  MOD_RES (16)..(17)..(18)..(19)..(20): Xaa is A or G
  MOD_RES (21)..(22)..(23)..(24): Xaa is A or G or absent
XAXELHEELRSMEGIXXXXXXXXXMIQVTINSHHVRSPQXK

SEQ ID NO: 13817 - protein, 35 aa, Artificial Sequence
  Non-cyclic GFR-binding peptide
  MOD_RES (13)..(14)..(15)..(16)..(17): Xaa is A or G
  MOD_RES (18)..(19)..(20)..(21): Xaa is A or G or absent
ALHDELTSMEGLXXXXXXXXXMIQVTINSLQVQTP

SEQ ID NO: 13818 - protein, 38 aa, Artificial Sequence
  Non-cyclic GFR-binding peptide
  MOD_RES (37)..(37): Xaa is C or S
ELHEELRSMEGILKPKKRVYEMIQVTINSHHVRSPQXK

SEQ ID NO: 13819 - protein, 39 aa, Artificial Sequence
  Non-cyclic GFR-binding peptide
  MOD_RES (2)..(36): Xaa is C or S
  MOD_RES (14)..(15)..(16)..(17)..(18): Xaa is A or G
  MOD_RES (19)..(20)..(21)..(22): Xaa is A or G or absent
EXQSHEELSMEGIXXXXXXXXXMIQMTINSQGTPVXELG

SEQ ID NO: 13820 - protein, 39 aa, Artificial Sequence
  Non-cyclic GFR-binding peptide
  MOD_RES (1)..(35): Xaa is C or S
XQSHEELSMEGIHQGQHPKIRMIQMTINSQGTPVXELGE

SEQ ID NO: 13821 - protein, 33 aa, Artificial Sequence
  Non-cyclic GFR-binding peptide
  MOD_RES (33)..(33): Xaa is C or S
SHEELVTAKKHQGQHPKIRIKRMQVPRQGTPVX

SEQ ID NO: 13822 - protein, 41 aa, Artificial Sequence
  Non-cyclic GFR-binding peptide
  MOD_RES (1)..(35): Xaa is C or S
  MOD_RES (13)..(14)..(15)..(16)..(17): Xaa is A or G
  MOD_RES (18)..(19)..(20)..(21): Xaa is A or G or absent
XQSHEELVTAKKXXXXXXXXXIKRMQVPRQGTPVXELGEDN

SEQ ID NO: 13823 - protein, 43 aa, Artificial Sequence
  Non-cyclic GFR-binding peptide
  MOD_RES (2)..(4)..(41): Xaa is C or S
  MOD_RES (17)..(18)..(19)..(20)..(21): Xaa is A or G
  MOD_RES (22)..(23)..(24)..(25): Xaa is A or G or absent
EXKXALHDELTVQVEKXXXXXXXXXVKAVKVSRLQVQTPRXQV

SEQ ID NO: 13824 - protein, 42 aa, Artificial Sequence
  Non-cyclic GFR-binding peptide
  MOD_RES (2)..(4)..(38): Xaa is C or S
  MOD_RES (16)..(17)..(18)..(19)..(20): Xaa is A or G
  MOD_RES (21)..(22)..(23)..(24): Xaa is A or G or absent
RXEXKNHQLFVTAKKXXXXXXXXXIKRMQVPREETPVXELGE

SEQ ID NO: 13825 - protein, 39 aa, Artificial Sequence
  Non-cyclic GFR-binding peptide
  MOD_RES (35)..(35): Xaa is C or S
  MOD_RES (11)..(12)..(13)..(14)..(15): Xaa is A or G
  MOD_RES (16)..(17)..(18)..(19): Xaa is A or G or absent
HEELRSMEGIXXXXXXXXXMIQVTINSHHVRSPQXKVSS

SEQ ID NO: 13826 - protein, 37 aa, Artificial Sequence
  Non-cyclic GFR-binding peptide
  MOD_RES (1)..(3): Xaa is C or S
XKXALHDELTSMEGLFIPKKRVIEMIQVTINSLQVQT

SEQ ID NO: 13827 - protein, 35 aa, Artificial Sequence
  Non-cyclic GFR-binding peptide
  MOD_RES (2)..(2): Xaa is C or S
EXQSHEELVTAKKHQGQHPKIRIKRMQVPRQGTPV

SEQ ID NO: 13828 - protein, 44 aa, Artificial Sequence
  Non-cyclic GFR-binding peptide
  MOD_RES (2)..(4)..(38): Xaa is C or S
RXEXQSHEELSMEGIHQGQHPKIRMIQMTINSQGTPVXELGEDN

SEQ ID NO: 13829 - protein, 35 aa, Artificial Sequence
  Non-cyclic GFR-binding peptide
  MOD_RES (35)..(35): Xaa is C or S
  MOD_RES (11)..(12)..(13)..(14)..(15): Xaa is A or G
  MOD_RES (16)..(17)..(18)..(19): Xaa is A or G or absent
HDELTSMEGLXXXXXXXXXMIQVTINSLQVQTPRX

SEQ ID NO: 13830 - protein, 42 aa, Artificial Sequence
  Non-cyclic GFR-binding peptide
  MOD_RES (2)..(4)..(38): Xaa is C or S
  MOD_RES (16)..(17)..(18)..(19)..(20): Xaa is A or G
  MOD_RES (21)..(22)..(23)..(24): Xaa is A or G or absent
RXEXKNHQLFVQVEKXXXXXXXXXVKAMKVSREETPVXELGE

SEQ ID NO: 13831 - protein, 35 aa, Artificial Sequence
  Non-cyclic GFR-binding peptide
  MOD_RES (35)..(35): Xaa is C or S
  MOD_RES (11)..(12)..(13)..(14)..(15): Xaa is A or G
  MOD_RES (16)..(17)..(18)..(19): Xaa is A or G or absent
HDELTSMEGIXXXXXXXXXMIQVTINSLQVQTPRX

SEQ ID NO: 13832 - protein, 32 aa, Artificial Sequence
  Non-cyclic GFR-binding peptide
NHQLFVQVEKHQGQHPKIRVKAMKVSREETPV

SEQ ID NO: 13833 - protein, 38 aa, Artificial Sequence
  Non-cyclic GFR-binding peptide
  MOD_RES (1)..(35): Xaa is C or S
  MOD_RES (13)..(14)..(15)..(16)..(17): Xaa is A or G
  MOD_RES (18)..(19)..(20)..(21): Xaa is A or G or absent
XQSHEELVQVEKXXXXXXXXXVKAMKVSRQGTPVXELG

SEQ ID NO: 13834 - protein, 38 aa, Artificial Sequence
  Non-cyclic GFR-binding peptide
  MOD_RES (1)..(3)..(37): Xaa is C or S
XEXKNHQLFSMEGLHQGQHPKIRMIQMTINSEETPVXE

SEQ ID NO: 13835 - protein, 41 aa, Artificial Sequence
  Non-cyclic GFR-binding peptide
  MOD_RES (2)..(4)..(41): Xaa is C or S
EXKXALHDELTVQVEKFIPKKRVIEVKAVKVSRLQVQTPRX

SEQ ID NO: 13836 - protein, 42 aa, Artificial Sequence
  Non-cyclic GFR-binding peptide
  MOD_RES (1)..(3)..(37): Xaa is C or S
XEXQSHEELVQVEKHQGQHPKIRVKAMKVSRQGTPVXELGED

SEQ ID NO: 13837 - protein, 33 aa, Artificial Sequence
  Non-cyclic GFR-binding peptide
LHEELRVTAKKLKPKKRVYEIKRVQVPRHHVRS

SEQ ID NO: 13838 - protein, 42 aa, Artificial Sequence
  Non-cyclic GFR-binding peptide
  MOD_RES (2)..(4)..(41): Xaa is C or S
AXAXELHEELRVTAKKLKPKKRVYEIKRVQVPRHHVRSPQXK

SEQ ID NO: 13839 - protein, 45 aa, Artificial Sequence
  Non-cyclic GFR-binding peptide
  MOD_RES (2)..(4)..(41): Xaa is C or S
  MOD_RES (17)..(18)..(19)..(20)..(21): Xaa is A or G
  MOD_RES (22)..(23)..(24)..(25): Xaa is A or G or absent
EXKXALHDELTSMEGLXXXXXXXXXMIQVTINSLQVQTPRXQVNR

SEQ ID NO: 13840 - protein, 32 aa, Artificial Sequence
  Non-cyclic GFR-binding peptide
HEELRSMEGLLKPKKRVYEMIQVTINSHHVRS

SEQ ID NO: 13841 - protein, 39 aa, Artificial Sequence
  Non-cyclic GFR-binding peptide
  MOD_RES (34)..(34): Xaa is C or S
KNHQLFVQVEKHQGQHPKIRVKAMKVSREETPVXELGED

SEQ ID NO: 13842 - protein, 32 aa, Artificial Sequence
  Non-cyclic GFR-binding peptide
HDELTSMEGIFIPKKRVIEMIQVTINSLQVQT

SEQ ID NO: 13843 - protein, 37 aa, Artificial Sequence
  Non-cyclic GFR-binding peptide
  MOD_RES (37)..(37): Xaa is C or S
  MOD_RES (13)..(14)..(15)..(16)..(17): Xaa is A or G
  MOD_RES (18)..(19)..(20)..(21): Xaa is A or G or absent
ALHDELTSMEGIXXXXXXXXXMIQVTINSLQVQTPRX

SEQ ID NO: 13844 - protein, 35 aa, Artificial Sequence
  Non-cyclic GFR-binding peptide
LHDELTSMEGLFIPKKRVIEMIQVTINSLQVQTPR

SEQ ID NO: 13845 - protein, 37 aa, Artificial Sequence
  Non-cyclic GFR-binding peptide
  MOD_RES (2)..(4): Xaa is C or S
  MOD_RES (16)..(17)..(18)..(19)..(20): Xaa is A or G
  MOD_RES (21)..(22)..(23)..(24): Xaa is A or G or absent
RXEXQSHEELVQVEKXXXXXXXXXVKAMKVSRQGTPV

SEQ ID NO: 13846 - protein, 41 aa, Artificial Sequence
  Non-cyclic GFR-binding peptide
  MOD_RES (2)..(4)..(41): Xaa is C or S
  MOD_RES (17)..(18)..(19)..(20)..(21): Xaa is A or G
  MOD_RES (22)..(23)..(24)..(25): Xaa is A or G or absent
AXAXELHEELRSMEGLXXXXXXXXXMIQVTINSHHVRSPQX

SEQ ID NO: 13847 - protein, 40 aa, Artificial Sequence
  Non-cyclic GFR-binding peptide
  MOD_RES (2)..(39): Xaa is C or S
KXALHDELTSMEGIFIPKKRVIEMIQVTINSLQVQTPRXQ

SEQ ID NO: 13848 - protein, 32 aa, Artificial Sequence
  Non-cyclic GFR-binding peptide
  MOD_RES (11)..(12)..(13)..(14)..(15): Xaa is A or G
  MOD_RES (16)..(17)..(18)..(19): Xaa is A or G or absent
NHQLFSMEGLXXXXXXXXXMIQMTINSEETPV

SEQ ID NO: 13849 - protein, 35 aa, Artificial Sequence
  Non-cyclic GFR-binding peptide
  MOD_RES (13)..(14)..(15)..(16)..(17): Xaa is A or G
  MOD_RES (18)..(19)..(20)..(21): Xaa is A or G or absent
ELHEELRSMEGIXXXXXXXXXMIQVTINSHHVRSP

SEQ ID NO: 13850 - protein, 37 aa, Artificial Sequence
  Non-cyclic GFR-binding peptide
  MOD_RES (2)..(4): Xaa is C or S
RXEXQSHEELSMEGIHQGQHPKIRMIQMTINSQGTPV

SEQ ID NO: 13851 - protein, 34 aa, Artificial Sequence
  Non-cyclic GFR-binding peptide
  MOD_RES (34)..(34): Xaa is C or S
QSHEELVQVEKHQGQHPKIRVKAMKVSRQGTPVX

SEQ ID NO: 13852 - protein, 38 aa, Artificial Sequence
  Non-cyclic GFR-binding peptide
  MOD_RES (1)..(3): Xaa is C or S
  MOD_RES (16)..(17)..(18)..(19)..(20): Xaa is A or G
  MOD_RES (21)..(22)..(23)..(24): Xaa is A or G or absent
XKXALHDELTSMEGLXXXXXXXXXMIQVTINSLQVQTP

SEQ ID NO: 13853 - protein, 37 aa, Artificial Sequence
  Non-cyclic GFR-binding peptide
  MOD_RES (2)..(36): Xaa is C or S
  MOD_RES (14)..(15)..(16)..(17)..(18): Xaa is A or G
  MOD_RES (19)..(20)..(21)..(22): Xaa is A or G or absent
EXKNHQLFSMEGLXXXXXXXXXMIQMTINSEETPVXE

SEQ ID NO: 13854 - protein, 43 aa, Artificial Sequence
  Non-cyclic GFR-binding peptide
  MOD_RES (2)..(39): Xaa is C or S
  MOD_RES (15)..(16)..(17)..(18)..(19): Xaa is A or G
  MOD_RES (20)..(21)..(22)..(23): Xaa is A or G or absent
AXELHEELRSMEGLXXXXXXXXXMIQVTINSHHVRSPQXKVSS

SEQ ID NO: 13855 - protein, 33 aa, Artificial Sequence
  Non-cyclic GFR-binding peptide
  MOD_RES (33)..(33): Xaa is C or S
NHQLFVTAKKHQGQHPKIRIKRMQVPREETPVX

SEQ ID NO: 13856 - protein, 42 aa, Artificial Sequence
  Non-cyclic GFR-binding peptide
  MOD_RES (2)..(4)..(41): Xaa is C or S
  MOD_RES (17)..(18)..(19)..(20)..(21): Xaa is A or G
  MOD_RES (22)..(23)..(24)..(25): Xaa is A or G or absent
EXKXALHDELTSMEGLXXXXXXXXXMIQVTINSLQVQTPRXQ

SEQ ID NO: 13857 - protein, 41 aa, Artificial Sequence
  Non-cyclic GFR-binding peptide
  MOD_RES (2)..(4)..(38): Xaa is C or S
RXEXQSHEELVQVEKHQGQHPKIRVKAMKVSRQGTPVXELG

SEQ ID NO: 13858 - protein, 38 aa, Artificial Sequence
  Non-cyclic GFR-binding peptide
  MOD_RES (2)..(4): Xaa is C or S
  MOD_RES (17)..(18)..(19)..(20)..(21): Xaa is A or G
  MOD_RES (22)..(23)..(24)..(25): Xaa is A or G or absent
EXKXALHDELTSMEGIXXXXXXXXXMIQVTINSLQVQT

SEQ ID NO: 13859 - protein, 41 aa, Artificial Sequence
  Non-cyclic GFR-binding peptide
  MOD_RES (1)..(35): Xaa is C or S
XKNHQLFVQVEKHQGQHPKIRVKAMKVSREETPVXELGEDN

SEQ ID NO: 13860 - protein, 41 aa, Artificial Sequence
  Non-cyclic GFR-binding peptide
  MOD_RES (1)..(35): Xaa is C or S
  MOD_RES (13)..(14)..(15)..(16)..(17): Xaa is A or G
  MOD_RES (18)..(19)..(20)..(21): Xaa is A or G or absent
XKNHQLFVQVEKXXXXXXXXXVKAMKVSREETPVXELGEDN

SEQ ID NO: 13861 - protein, 39 aa, Artificial Sequence
  Non-cyclic GFR-binding peptide
  MOD_RES (2)..(4): Xaa is C or S
EXKXALHDELTSMEGIFIPKKRVIEMIQVTINSLQVQTP

SEQ ID NO: 13862 - protein, 34 aa, Artificial Sequence
  Non-cyclic GFR-binding peptide
  MOD_RES (1)..(1): Xaa is C or S
  MOD_RES (13)..(14)..(15)..(16)..(17): Xaa is A or G
  MOD_RES (18)..(19)..(20)..(21): Xaa is A or G or absent
XKNHQLFVTAKKXXXXXXXXXIKRMQVPREETPV

SEQ ID NO: 13863 - protein, 40 aa, Artificial Sequence
  Non-cyclic GFR-binding peptide
  MOD_RES (1)..(3)..(37): Xaa is C or S
XEXQSHEELVQVEKHQGQHPKIRVKAMKVSRQGTPVXELG

SEQ ID NO: 13864 - protein, 42 aa, Artificial Sequence
  Non-cyclic GFR-binding peptide
  MOD_RES (2)..(39): Xaa is C or S
  MOD_RES (15)..(16)..(17)..(18)..(19): Xaa is A or G
  MOD_RES (20)..(21)..(22)..(23): Xaa is A or G or absent
AXELHEELRVTAKKXXXXXXXXXIKRVQVPRHHVRSPQXKVS

SEQ ID NO: 13865 - protein, 37 aa, Artificial Sequence
  Non-cyclic GFR-binding peptide
  MOD_RES (36)..(36): Xaa is C or S
  MOD_RES (12)..(13)..(14)..(15)..(16): Xaa is A or G
  MOD_RES (17)..(18)..(19)..(20): Xaa is A or G or absent
LHDELTSMEGIXXXXXXXXXMIQVTINSLQVQTPRXQ

SEQ ID NO: 13866 - protein, 32 aa, Artificial Sequence
  Non-cyclic GFR-binding peptide
  MOD_RES (11)..(12)..(13)..(14)..(15): Xaa is A or G
  MOD_RES (16)..(17)..(18)..(19): Xaa is A or G or absent
SHEELVQVEKXXXXXXXXXVKAMKVSRQGTPV

SEQ ID NO: 13867 - protein, 32 aa, Artificial Sequence
  Non-cyclic GFR-binding peptide
  MOD_RES (11)..(12)..(13)..(14)..(15): Xaa is A or G
  MOD_RES (16)..(17)..(18)..(19): Xaa is A or G or absent
NHQLFVTAKKXXXXXXXXXIKRMQVPREETPV

SEQ ID NO: 13868 - protein, 35 aa, Artificial Sequence
  Non-cyclic GFR-binding peptide
  MOD_RES (12)..(13)..(14)..(15)..(16): Xaa is A or G
  MOD_RES (17)..(18)..(19)..(20): Xaa is A or G or absent
LHEELRSMEGLXXXXXXXXXMIQVTINSHHVRSPQ

SEQ ID NO: 13869 - protein, 41 aa, Artificial Sequence
  Non-cyclic GFR-binding peptide
  MOD_RES (1)..(3)..(37): Xaa is C or S
XEXQSHEELVQVEKHQGQHPKIRVKAMKVSRQGTPVXELGE

SEQ ID NO: 13870 - protein, 36 aa, Artificial Sequence
  Non-cyclic GFR-binding peptide
  MOD_RES (34)..(34): Xaa is C or S
  MOD_RES (12)..(13)..(14)..(15)..(16): Xaa is A or G
  MOD_RES (17)..(18)..(19)..(20): Xaa is A or G or absent
QSHEELVQVEKXXXXXXXXXVKAMKVSRQGTPVXEL

SEQ ID NO: 13871 - protein, 36 aa, Artificial Sequence
  Non-cyclic GFR-binding peptide
  MOD_RES (36)..(36): Xaa is C or S
LHDELTSMEGLFIPKKRVIEMIQVTINSLQVQTPRX

SEQ ID NO: 13872 - protein, 38 aa, Artificial Sequence
  Non-cyclic GFR-binding peptide
  MOD_RES (2)..(4): Xaa is C or S
AXAXELHEELRSMEGLLKPKKRVYEMIQVTINSHHVRS

SEQ ID NO: 13873 - protein, 41 aa, Artificial Sequence
  Non-cyclic GFR-binding peptide
  MOD_RES (1)..(38): Xaa is C or S
  MOD_RES (14)..(15)..(16)..(17)..(18): Xaa is A or G
  MOD_RES (19)..(20)..(21)..(22): Xaa is A or G or absent
XALHDELTVQVEKXXXXXXXXXVKAVKVSRLQVQTPRXQVN

SEQ ID NO: 13874 - protein, 38 aa, Artificial Sequence
  Non-cyclic GFR-binding peptide
  MOD_RES (1)..(38): Xaa is C or S
  MOD_RES (14)..(15)..(16)..(17)..(18): Xaa is A or G
  MOD_RES (19)..(20)..(21)..(22): Xaa is A or G or absent
XALHDELTSMEGIXXXXXXXXXMIQVTINSLQVQTPRX

SEQ ID NO: 13875 - protein, 35 aa, Artificial Sequence
  Non-cyclic GFR-binding peptide
  MOD_RES (34)..(34): Xaa is C or S
  MOD_RES (12)..(13)..(14)..(15)..(16): Xaa is A or G
  MOD_RES (17)..(18)..(19)..(20): Xaa is A or G or absent
QSHEELVTAKKXXXXXXXXXIKRMQVPRQGTPVXE

SEQ ID NO: 13876 - protein, 33 aa, Artificial Sequence
  Non-cyclic GFR-binding peptide
  MOD_RES (33)..(33): Xaa is C or S
  MOD_RES (11)..(12)..(13)..(14)..(15): Xaa is A or G
  MOD_RES (16)..(17)..(18)..(19): Xaa is A or G or absent
SHEELVTAKKXXXXXXXXXIKRMQVPRQGTPVX

SEQ ID NO: 13877 - protein, 39 aa, Artificial Sequence
  Non-cyclic GFR-binding peptide
  MOD_RES (2)..(39): Xaa is C or S
  MOD_RES (15)..(16)..(17)..(18)..(19): Xaa is A or G
  MOD_RES (20)..(21)..(22)..(23): Xaa is A or G or absent
AXELHEELRSMEGLXXXXXXXXXMIQVTINSHHVRSPQX

SEQ ID NO: 13878 - protein, 37 aa, Artificial Sequence
  Non-cyclic GFR-binding peptide
  MOD_RES (2)..(4): Xaa is C or S
  MOD_RES (16)..(17)..(18)..(19)..(20): Xaa is A or G
  MOD_RES (21)..(22)..(23)..(24): Xaa is A or G or absent
RXEXQSHEELVTAKKXXXXXXXXXIKRMQVPRQGTPV

SEQ ID NO: 13879 - protein, 33 aa, Artificial Sequence
  Non-cyclic GFR-binding peptide
LHEELRSMEGILKPKKRVYEMIQVTINSHHVRS

SEQ ID NO: 13880 - protein, 43 aa, Artificial Sequence
  Non-cyclic GFR-binding peptide
  MOD_RES (1)..(3)..(40): Xaa is C or S
  MOD_RES (16)..(17)..(18)..(19)..(20): Xaa is A or G
  MOD_RES (21)..(22)..(23)..(24): Xaa is A or G or absent
XKXALHDELTSMEGLXXXXXXXXXMIQVTINSLQVQTPRXQVN

SEQ ID NO: 13881 - protein, 41 aa, Artificial Sequence
  Non-cyclic GFR-binding peptide
  MOD_RES (37)..(37): Xaa is C or S
  MOD_RES (13)..(14)..(15)..(16)..(17): Xaa is A or G
  MOD_RES (18)..(19)..(20)..(21): Xaa is A or G or absent
ALHDELTVQVEKXXXXXXXXXVKAVKVSRLQVQTPRXQVNR

SEQ ID NO: 13882 - protein, 44 aa, Artificial Sequence
  Non-cyclic GFR-binding peptide
  MOD_RES (2)..(4)..(38): Xaa is C or S
  MOD_RES (16)..(17)..(18)..(19)..(20): Xaa is A or G
  MOD_RES (21)..(22)..(23)..(24): Xaa is A or G or absent
RXEXKNHQLFSMEGLXXXXXXXXXMIQMTINSEETPVXELGEDN

SEQ ID NO: 13883 - protein, 36 aa, Artificial Sequence
  Non-cyclic GFR-binding peptide
  MOD_RES (2)..(36): Xaa is C or S
EXKNHQLFVQVEKHQGQHPKIRVKAMKVSREETPVX

SEQ ID NO: 13884 - protein, 35 aa, Artificial Sequence
  Non-cyclic GFR-binding peptide
ALHDELTVQVEKFIPKKRVIEVKAVKVSRLQVQTP

SEQ ID NO: 13885 - protein, 38 aa, Artificial Sequence
  Non-cyclic GFR-binding peptide
  MOD_RES (1)..(3)..(37): Xaa is C or S
  MOD_RES (15)..(16)..(17)..(18)..(19): Xaa is A or G
  MOD_RES (20)..(21)..(22)..(23): Xaa is A or G or absent
XEXQSHEELVQVEKXXXXXXXXXVKAMKVSRQGTPVXE

SEQ ID NO: 13886 - protein, 36 aa, Artificial Sequence
  Non-cyclic GFR-binding peptide
  MOD_RES (1)..(1): Xaa is C or S
  MOD_RES (14)..(15)..(16)..(17)..(18): Xaa is A or G
  MOD_RES (19)..(20)..(21)..(22): Xaa is A or G or absent
XALHDELTSMEGLXXXXXXXXXMIQVTINSLQVQTP

SEQ ID NO: 13887 - protein, 44 aa, Artificial Sequence
  Non-cyclic GFR-binding peptide
  MOD_RES (2)..(4)..(38): Xaa is C or S
RXEXKNHQLFSMEGLHQGQHPKIRMIQMTINSEETPVXELGEDN

SEQ ID NO: 13888 - protein, 35 aa, Artificial Sequence
  Non-cyclic GFR-binding peptide
  MOD_RES (34)..(34): Xaa is C or S
  MOD_RES (12)..(13)..(14)..(15)..(16): Xaa is A or G
  MOD_RES (17)..(18)..(19)..(20): Xaa is A or G or absent
QSHEELSMEGIXXXXXXXXXMIQMTINSQGTPVXE

SEQ ID NO: 13889 - protein, 38 aa, Artificial Sequence
  Non-cyclic GFR-binding peptide
  MOD_RES (2)..(36): Xaa is C or S
  MOD_RES (14)..(15)..(16)..(17)..(18): Xaa is A or G
  MOD_RES (19)..(20)..(21)..(22): Xaa is A or G or absent
EXQSHEELVTAKKXXXXXXXXXIKRMQVPRQGTPVXEL

SEQ ID NO: 13890 - protein, 36 aa, Artificial Sequence
  Non-cyclic GFR-binding peptide
  MOD_RES (1)..(1): Xaa is C or S
  MOD_RES (14)..(15)..(16)..(17)..(18): Xaa is A or G
  MOD_RES (19)..(20)..(21)..(22): Xaa is A or G or absent
XELHEELRVTAKKXXXXXXXXXIKRVQVPRHHVRSP

SEQ ID NO: 13891 - protein, 37 aa, Artificial Sequence
  Non-cyclic GFR-binding peptide
  MOD_RES (34)..(34): Xaa is C or S
  MOD_RES (12)..(13)..(14)..(15)..(16): Xaa is A or G
  MOD_RES (17)..(18)..(19)..(20): Xaa is A or G or absent
QSHEELVTAKKXXXXXXXXXIKRMQVPRQGTPVXELG

SEQ ID NO: 13892 - protein, 34 aa, Artificial Sequence
  Non-cyclic GFR-binding peptide
ALHDELTVQVEKFIPKKRVIEVKAVKVSRLQVQT

SEQ ID NO: 13893 - protein, 38 aa, Artificial Sequence
  Non-cyclic GFR-binding peptide
  MOD_RES (1)..(35): Xaa is C or S
XQSHEELVQVEKHQGQHPKIRVKAMKVSRQGTPVXELG

SEQ ID NO: 13894 - protein, 33 aa, Artificial Sequence
  Non-cyclic GFR-binding peptide
  MOD_RES (33)..(33): Xaa is C or S
  MOD_RES (11)..(12)..(13)..(14)..(15): Xaa is A or G
  MOD_RES (16)..(17)..(18)..(19): Xaa is A or G or absent
NHQLFVQVEKXXXXXXXXXVKAMKVSREETPVX

SEQ ID NO: 13895 - protein, 32 aa, Artificial Sequence; identical to SEQ ID NO: 2227
  Non-cyclic GFR-binding peptide

SEQ ID NO: 13896 - protein, 42 aa, Artificial Sequence
  Non-cyclic GFR-binding peptide
  MOD_RES (1)..(3)..(40): Xaa is C or S
XAXELHEELRVTAKKLKPKKRVYEIKRVQVPRHHVRSPQXKV

SEQ ID NO: 13897 - protein, 36 aa, Artificial Sequence
  Non-cyclic GFR-binding peptide
  MOD_RES (34)..(34): Xaa is C or S
  MOD_RES (12)..(13)..(14)..(15)..(16): Xaa is A or G
  MOD_RES (17)..(18)..(19)..(20): Xaa is A or G or absent
QSHEELSMEGIXXXXXXXXXMIQMTINSQGTPVXEL

SEQ ID NO: 13898 - protein, 43 aa, Artificial Sequence
  Non-cyclic GFR-binding peptide
  MOD_RES (2)..(4)..(41): Xaa is C or S
  MOD_RES (17)..(18)..(19)..(20)..(21): Xaa is A or G
  MOD_RES (22)..(23)..(24)..(25): Xaa is A or G or absent
EXKXALHDELTSMEGLXXXXXXXXXMIQVTINSLQVQTPRXQV

SEQ ID NO: 13899 - protein, 42 aa, Artificial Sequence
  Non-cyclic GFR-binding peptide
  MOD_RES (1)..(3)..(37): Xaa is C or S
XEXQSHEELVTAKKHQGQHPKIRIKRMQVPRQGTPVXELGED

SEQ ID NO: 13900 - protein, 41 aa, Artificial Sequence
  Non-cyclic GFR-binding peptide
  MOD_RES (37)..(37): Xaa is C or S
ELHEELRVTAKKLKPKKRVYEIKRVQVPRHHVRSPQXKVSS

SEQ ID NO: 13901 - protein, 38 aa, Artificial Sequence
  Non-cyclic GFR-binding peptide
  MOD_RES (1)..(3): Xaa is C or S
XKXALHDELTSMEGIFIPKKRVIEMIQVTINSLQVQTP

SEQ ID NO: 13902 - protein, 36 aa, Artificial Sequence
  Non-cyclic GFR-binding peptide
  MOD_RES (33)..(33): Xaa is C or S
SHEELVQVEKHQGQHPKIRVKAMKVSRQGTPVXELG

SEQ ID NO: 13903 - protein, 37 aa, Artificial Sequence
  Non-cyclic GFR-binding peptide
  MOD_RES (36)..(36): Xaa is C or S
LHDELTVQVEKFIPKKRVIEVKAVKVSRLQVQTPRXQ

SEQ ID NO: 13904 - protein, 41 aa, Artificial Sequence
  Non-cyclic GFR-binding peptide
  MOD_RES (37)..(37): Xaa is C or S
  MOD_RES (13)..(14)..(15)..(16)..(17): Xaa is A or G
  MOD_RES (18)..(19)..(20)..(21): Xaa is A or G or absent
ALHDELTSMEGLXXXXXXXXXMIQVTINSLQVQTPRXQVNR

SEQ ID NO: 13905 - protein, 43 aa, Artificial Sequence
  Non-cyclic GFR-binding peptide
  MOD_RES (1)..(3)..(40): Xaa is C or S
XKXALHDELTVQVEKFIPKKRVIEVKAVKVSRLQVQTPRXQVN

SEQ ID NO: 13906 - protein, 36 aa, Artificial Sequence
  Non-cyclic GFR-binding peptide
  MOD_RES (34)..(34): Xaa is C or S
  MOD_RES (12)..(13)..(14)..(15)..(16): Xaa is A or G
  MOD_RES (17)..(18)..(19)..(20): Xaa is A or G or absent
QSHEELVTAKKXXXXXXXXXIKRMQVPRQGTPVXEL

SEQ ID NO: 13907 - protein, 35 aa, Artificial Sequence
  Non-cyclic GFR-binding peptide
  MOD_RES (2)..(2): Xaa is C or S
  MOD_RES (14)..(15)..(16)..(17)..(18): Xaa is A or G
  MOD_RES (19)..(20)..(21)..(22): Xaa is A or G or absent
EXKNHQLFVTAKKXXXXXXXXXIKRMQVPREETPV

SEQ ID NO: 13908 - protein, 36 aa, Artificial Sequence
  Non-cyclic GFR-binding peptide
  MOD_RES (2)..(36): Xaa is C or S
  MOD_RES (14)..(15)..(16)..(17)..(18): Xaa is A or G
  MOD_RES (19)..(20)..(21)..(22): Xaa is A or G or absent
EXQSHEELSMEGIXXXXXXXXXMIQMTINSQGTPVX

SEQ ID NO: 13909 - protein, 39 aa, Artificial Sequence
  Non-cyclic GFR-binding peptide
  MOD_RES (37)..(37): Xaa is C or S
ALHDELTSMEGIFIPKKRVIEMIQVTINSLQVQTPRXQV

SEQ ID NO: 13910 - protein, 41 aa, Artificial Sequence
  Non-cyclic GFR-binding peptide
  MOD_RES (2)..(36): Xaa is C or S
EXKNHQLFVQVEKHQGQHPKIRVKAMKVSREETPVXELGED

SEQ ID NO: 13911 - protein, 36 aa, Artificial Sequence
  Non-cyclic GFR-binding peptide
  MOD_RES (33)..(33): Xaa is C or S
SHEELVTAKKHQGQHPKIRIKRMQVPRQGTPVXELG

SEQ ID NO: 13912 - protein, 35 aa, Artificial Sequence
  Non-cyclic GFR-binding peptide
  MOD_RES (1)..(35): Xaa is C or S
  MOD_RES (13)..(14)..(15)..(16)..(17): Xaa is A or G
  MOD_RES (18)..(19)..(20)..(21): Xaa is A or G or absent
XKNHQLFVTAKKXXXXXXXXXIKRMQVPREETPVX

SEQ ID NO: 13913 - protein, 43 aa, Artificial Sequence
  Non-cyclic GFR-binding peptide
  MOD_RES (1)..(3)..(40): Xaa is C or S
  MOD_RES (16)..(17)..(18)..(19)..(20): Xaa is A or G
  MOD_RES (21)..(22)..(23)..(24): Xaa is A or G or absent
XAXELHEELRSMEGLXXXXXXXXXMIQVTINSHHVRSPQXKVS

SEQ ID NO: 13914 - protein, 38 aa, Artificial Sequence
  Non-cyclic GFR-binding peptide
  MOD_RES (1)..(3)..(37): Xaa is C or S
XEXQSHEELVTAKKHQGQHPKIRIKRMQVPRQGTPVXE

SEQ ID NO: 13915 - protein, 34 aa, Artificial Sequence
  Non-cyclic GFR-binding peptide
  MOD_RES (13)..(14)..(15)..(16)..(17): Xaa is A or G
  MOD_RES (18)..(19)..(20)..(21): Xaa is A or G or absent
ELHEELRSMEGIXXXXXXXXXMIQVTINSHHVRS

SEQ ID NO: 13916 - protein, 34 aa, Artificial Sequence
  Non-cyclic GFR-binding peptide
  MOD_RES (1)..(1): Xaa is C or S
XKNHQLFVTAKKHQGQHPKIRIKRMQVPREETPV

SEQ ID NO: 13917 - protein, 37 aa, Artificial Sequence
  Non-cyclic GFR-binding peptide
  MOD_RES (36)..(36): Xaa is C or S
LHEELRVTAKKLKPKKRVYEIKRVQVPRHHVRSPQXK

SEQ ID NO: 13918 - protein, 36 aa, Artificial Sequence
  Non-cyclic GFR-binding peptide
ELHEELRSMEGILKPKKRVYEMIQVTINSHHVRSPQ

SEQ ID NO: 13919 - protein, 44 aa, Artificial Sequence
  Non-cyclic GFR-binding peptide
  MOD_RES (2)..(4)..(41): Xaa is C or S
EXKXALHDELTSMEGLFIPKKRVIEMIQVTINSLQVQTPRXQVN

SEQ ID NO: 13920 - protein, 36 aa, Artificial Sequence
  Non-cyclic GFR-binding peptide
  MOD_RES (33)..(33): Xaa is C or S
SHEELSMEGIHQGQHPKIRMIQMTINSQGTPVXELG

SEQ ID NO: 13921 - protein, 40 aa, Artificial Sequence
  Non-cyclic GFR-binding peptide
  MOD_RES (2)..(4)..(38): Xaa is C or S
RXEXKNHQLFVTAKKHQGQHPKIRIKRMQVPREETPVXEL

SEQ ID NO: 13922 - protein, 43 aa, Artificial Sequence
  Non-cyclic GFR-binding peptide
  MOD_RES (1)..(3)..(37): Xaa is C or S
  MOD_RES (15)..(16)..(17)..(18)..(19): Xaa is A or G
  MOD_RES (20)..(21)..(22)..(23): Xaa is A or G or absent
XEXKNHQLFVQVEKXXXXXXXXXVKAMKVSREETPVXELGEDN

SEQ ID NO: 13923 - protein, 37 aa, Artificial Sequence
  Non-cyclic GFR-binding peptide
  MOD_RES (36)..(36): Xaa is C or S
LHEELRSMEGILKPKKRVYEMIQVTINSHHVRSPQXK

SEQ ID NO: 13924 - protein, 37 aa, Artificial Sequence
  Non-cyclic GFR-binding peptide
  MOD_RES (2)..(2): Xaa is C or S
KXALHDELTVQVEKFIPKKRVIEVKAVKVSRLQVQTP

SEQ ID NO: 13925 - protein, 34 aa, Artificial Sequence
  Non-cyclic GFR-binding peptide
  MOD_RES (12)..(13)..(14)..(15)..(16): Xaa is A or G
  MOD_RES (17)..(18)..(19)..(20): Xaa is A or G or absent
LHDELTSMEGLXXXXXXXXXMIQVTINSLQVQTP

SEQ ID NO: 13926 - protein, 44 aa, Artificial Sequence
  Non-cyclic GFR-binding peptide
  MOD_RES (2)..(4)..(38): Xaa is C or S
RXEXQSHEELVQVEKHQGQHPKIRVKAMKVSRQGTPVXELGEDN

SEQ ID NO: 13927 - protein, 39 aa, Artificial Sequence
  Non-cyclic GFR-binding peptide
  MOD_RES (1)..(3)..(37): Xaa is C or S
  MOD_RES (15)..(16)..(17)..(18)..(19): Xaa is A or G
  MOD_RES (20)..(21)..(22)..(23): Xaa is A or G or absent
XEXKNHQLFVTAKKXXXXXXXXXIKRMQVPREETPVXEL

SEQ ID NO: 13928 - protein, 36 aa, Artificial Sequence
  Non-cyclic GFR-binding peptide
  MOD_RES (36)..(36): Xaa is C or S
LHEELRSMEGLLKPKKRVYEMIQVTINSHHVRSPQX

SEQ ID NO: 13929 - protein, 35 aa, Artificial Sequence
  Non-cyclic GFR-binding peptide
  MOD_RES (35)..(35): Xaa is C or S
HEELRSMEGLLKPKKRVYEMIQVTINSHHVRSPQX

SEQ ID NO: 13930 - protein, 36 aa, Artificial Sequence
  Non-cyclic GFR-binding peptide
  MOD_RES (33)..(33): Xaa is C or S
  MOD_RES (11)..(12)..(13)..(14)..(15): Xaa is A or G
  MOD_RES (16)..(17)..(18)..(19): Xaa is A or G or absent
SHEELSMEGIXXXXXXXXXMIQMTINSQGTPVXELG

SEQ ID NO: 13931 - protein, 37 aa, Artificial Sequence
  Non-cyclic GFR-binding peptide
  MOD_RES (1)..(1): Xaa is C or S
XALHDELTSMEGIFIPKKRVIEMIQVTINSLQVQTPR

SEQ ID NO: 13932 - protein, 43 aa, Artificial Sequence
  Non-cyclic GFR-binding peptide
  MOD_RES (2)..(4)..(41): Xaa is C or S
AXAXELHEELRSMEGLLKPKKRVYEMIQVTINSHHVRSPQXKV

SEQ ID NO: 13933 - protein, 34 aa, Artificial Sequence
  Non-cyclic GFR-binding peptide
ALHDELTSMEGLFIPKKRVIEMIQVTINSLQVQT

SEQ ID NO: 13934 - protein, 37 aa, Artificial Sequence
  Non-cyclic GFR-binding peptide
  MOD_RES (34)..(34): Xaa is C or S
KNHQLFVQVEKHQGQHPKIRVKAMKVSREETPVXELG

SEQ ID NO: 13935 - protein, 37 aa, Artificial Sequence
  Non-cyclic GFR-binding peptide
  MOD_RES (1)..(35): Xaa is C or S
XQSHEELVTAKKHQGQHPKIRIKRMQVPRQGTPVXEL

SEQ ID NO: 13936 - protein, 37 aa, Artificial Sequence
  Non-cyclic GFR-binding peptide
  MOD_RES (2)..(4): Xaa is C or S
RXEXQSHEELVQVEKHQGQHPKIRVKAMKVSRQGTPV

SEQ ID NO: 13937 - protein, 40 aa, Artificial Sequence
  Non-cyclic GFR-binding peptide
  MOD_RES (1)..(38): Xaa is C or S
  MOD_RES (14)..(15)..(16)..(17)..(18): Xaa is A or G
  MOD_RES (19)..(20)..(21)..(22): Xaa is A or G or absent
XALHDELTSMEGIXXXXXXXXXMIQVTINSLQVQTPRXQV

SEQ ID NO: 13938 - protein, 42 aa, Artificial Sequence
  Non-cyclic GFR-binding peptide
  MOD_RES (1)..(3)..(37): Xaa is C or S
XEXQSHEELSMEGIHQGQHPKIRMIQMTINSQGTPVXELGED

SEQ ID NO: 13939 - protein, 39 aa, Artificial Sequence
  Non-cyclic GFR-binding peptide
  MOD_RES (1)..(3): Xaa is C or S
XAXELHEELRSMEGLLKPKKRVYEMIQVTINSHHVRSPQ

SEQ ID NO: 13940 - protein, 35 aa, Artificial Sequence
  Non-cyclic GFR-binding peptide
  MOD_RES (35)..(35): Xaa is C or S
HEELRSMEGILKPKKRVYEMIQVTINSHHVRSPQX

SEQ ID NO: 13941 - protein, 36 aa, Artificial Sequence
  Non-cyclic GFR-binding peptide
  MOD_RES (33)..(33): Xaa is C or S
NHQLFSMEGLHQGQHPKIRMIQMTINSEETPVXELG

SEQ ID NO: 13942 - protein, 34 aa, Artificial Sequence
  Non-cyclic GFR-binding peptide
  MOD_RES (11)..(12)..(13)..(14)..(15): Xaa is A or G
  MOD_RES (16)..(17)..(18)..(19): Xaa is A or G or absent
HEELRSMEGIXXXXXXXXXMIQVTINSHHVRSPQ

SEQ ID NO: 13943 - protein, 38 aa, Artificial Sequence
  Non-cyclic GFR-binding peptide
  MOD_RES (2)..(4)..(38): Xaa is C or S
RXEXKNHQLFVTAKKHQGQHPKIRIKRMQVPREETPVX

SEQ ID NO: 13944 - protein, 38 aa, Artificial Sequence
  Non-cyclic GFR-binding peptide
  MOD_RES (2)..(36): Xaa is C or S
  MOD_RES (14)..(15)..(16)..(17)..(18): Xaa is A or G
  MOD_RES (19)..(20)..(21)..(22): Xaa is A or G or absent
EXQSHEELSMEGIXXXXXXXXXMIQMTINSQGTPVXEL

SEQ ID NO: 13945 - protein, 43 aa, Artificial Sequence
  Non-cyclic GFR-binding peptide
  MOD_RES (2)..(4)..(41): Xaa is C or S
AXAXELHEELRVTAKKLKPKKRVYEIKRVQVPRHHVRSPQXKV

SEQ ID NO: 13946 - protein, 38 aa, Artificial Sequence
  Non-cyclic GFR-binding peptide
  MOD_RES (36)..(36): Xaa is C or S
LHDELTSMEGLFIPKKRVIEMIQVTINSLQVQTPRXQV

SEQ ID NO: 13947 - protein, 35 aa, Artificial Sequence
  Non-cyclic GFR-binding peptide
LHEELRSMEGLLKPKKRVYEMIQVTINSHHVRSPQ

SEQ ID NO: 13948 - protein, 42 aa, Artificial Sequence
  Non-cyclic GFR-binding peptide
  MOD_RES (2)..(39): Xaa is C or S
AXELHEELRSMEGLLKPKKRVYEMIQVTINSHHVRSPQXKVS

SEQ ID NO: 13949 - protein, 42 aa, Artificial Sequence
  Non-cyclic GFR-binding peptide
  MOD_RES (1)..(38): Xaa is C or S
  MOD_RES (14)..(15)..(16)..(17)..(18): Xaa is A or G
  MOD_RES (19)..(20)..(21)..(22): Xaa is A or G or absent
XELHEELRVTAKKXXXXXXXXXIKRVQVPRHHVRSPQXKVSS

SEQ ID NO: 13950 - protein, 39 aa, Artificial Sequence
  Non-cyclic GFR-binding peptide
  MOD_RES (2)..(39): Xaa is C or S
AXELHEELRVTAKKLKPKKRVYEIKRVQVPRHHVRSPQX

SEQ ID NO: 13951 - protein, 43 aa, Artificial Sequence
  Non-cyclic GFR-binding peptide
  MOD_RES (1)..(3)..(37): Xaa is C or S
  MOD_RES (15)..(16)..(17)..(18)..(19): Xaa is A or G
  MOD_RES (20)..(21)..(22)..(23): Xaa is A or G or absent
XEXKNHQLFSMEGLXXXXXXXXXMIQMTINSEETPVXELGEDN

SEQ ID NO: 13952 - protein, 41 aa, Artificial Sequence
  Non-cyclic GFR-binding peptide
  MOD_RES (2)..(4)..(41): Xaa is C or S
EXKXALHDELTSMEGIFIPKKRVIEMIQVTINSLQVQTPRX

SEQ ID NO: 13953 - protein, 44 aa, Artificial Sequence
  Non-cyclic GFR-binding peptide
  MOD_RES (2)..(4)..(41): Xaa is C or S
  MOD_RES (17)..(18)..(19)..(20)..(21): Xaa is A or G
  MOD_RES (22)..(23)..(24)..(25): Xaa is A or G or absent
EXKXALHDELTSMEGIXXXXXXXXXMIQVTINSLQVQTPRXQVN

SEQ ID NO: 13954 - protein, 39 aa, Artificial Sequence
  Non-cyclic GFR-binding peptide
  MOD_RES (2)..(39): Xaa is C or S
AXELHEELRSMEGLLKPKKRVYEMIQVTINSHHVRSPQX

SEQ ID NO: 13955 - protein, 42 aa, Artificial Sequence
  Non-cyclic GFR-binding peptide
  MOD_RES (2)..(39): Xaa is C or S
AXELHEELRVTAKKLKPKKRVYEIKRVQVPRHHVRSPQXKVS

SEQ ID NO: 13956 - protein, 41 aa, Artificial Sequence
  Non-cyclic GFR-binding peptide
  MOD_RES (2)..(4)..(38): Xaa is C or S
  MOD_RES (16)..(17)..(18)..(19)..(20): Xaa is A or G
  MOD_RES (21)..(22)..(23)..(24): Xaa is A or G or absent
RXEXKNHQLFSMEGLXXXXXXXXXMIQMTINSEETPVXELG

SEQ ID NO: 13957 - protein, 37 aa, Artificial Sequence
  Non-cyclic GFR-binding peptide
  MOD_RES (1)..(1): Xaa is C or S
XELHEELRSMEGILKPKKRVYEMIQVTINSHHVRSPQ

SEQ ID NO: 13958 - protein, 39 aa, Artificial Sequence
  Non-cyclic GFR-binding peptide
  MOD_RES (34)..(34): Xaa is C or S
  MOD_RES (12)..(13)..(14)..(15)..(16): Xaa is A or G
  MOD_RES (17)..(18)..(19)..(20): Xaa is A or G or absent
QSHEELVTAKKXXXXXXXXXIKRMQVPRQGTPVXELGED

SEQ ID NO: 13959 - protein, 39 aa, Artificial Sequence
  Non-cyclic GFR-binding peptide
  MOD_RES (2)..(4)..(38): Xaa is C or S
RXEXKNHQLFVTAKKHQGQHPKIRIKRMQVPREETPVXE

SEQ ID NO: 13960 - protein, 41 aa, Artificial Sequence
  Non-cyclic GFR-binding peptide
  MOD_RES (1)..(3)..(40): Xaa is C or S
XAXELHEELRSMEGLLKPKKRVYEMIQVTINSHHVRSPQXK

SEQ ID NO: 13961 - protein, 34 aa, Artificial Sequence
  Non-cyclic GFR-binding peptide
  MOD_RES (11)..(12)..(13)..(14)..(15): Xaa is A or G
  MOD_RES (16)..(17)..(18)..(19): Xaa is A or G or absent
HEELRSMEGLXXXXXXXXXMIQVTINSHHVRSPQ

SEQ ID NO: 13962 - protein, 37 aa, Artificial Sequence
  Non-cyclic GFR-binding peptide
  MOD_RES (2)..(36): Xaa is C or S
  MOD_RES (14)..(15)..(16)..(17)..(18): Xaa is A or G
  MOD_RES (19)..(20)..(21)..(22): Xaa is A or G or absent
EXQSHEELVTAKKXXXXXXXXXIKRMQVPRQGTPVXE

SEQ ID NO: 13963 - protein, 44 aa, Artificial Sequence
  Non-cyclic GFR-binding peptide
  MOD_RES (2)..(4)..(38): Xaa is C or S
  MOD_RES (16)..(17)..(18)..(19)..(20): Xaa is A or G
  MOD_RES (21)..(22)..(23)..(24): Xaa is A or G or absent
RXEXQSHEELVTAKKXXXXXXXXXIKRMQVPRQGTPVXELGEDN

SEQ ID NO: 13964 - protein, 40 aa, Artificial Sequence
  Non-cyclic GFR-binding peptide
  MOD_RES (1)..(3)..(40): Xaa is C or S
  MOD_RES (16)..(17)..(18)..(19)..(20): Xaa is A or G
  MOD_RES (21)..(22)..(23)..(24): Xaa is A or G or absent
XAXELHEELRSMEGLXXXXXXXXXMIQVTINSHHVRSPQX

SEQ ID NO: 13965 - protein, 39 aa, Artificial Sequence
  Non-cyclic GFR-binding peptide
  MOD_RES (34)..(34): Xaa is C or S
  MOD_RES (12)..(13)..(14)..(15)..(16): Xaa is A or G
  MOD_RES (17)..(18)..(19)..(20): Xaa is A or G or absent
QSHEELSMEGIXXXXXXXXXMIQMTINSQGTPVXELGED

SEQ ID NO: 13966 - protein, 37 aa, Artificial Sequence
  Non-cyclic GFR-binding peptide
  MOD_RES (2)..(4): Xaa is C or S
  MOD_RES (16)..(17)..(18)..(19)..(20): Xaa is A or G
  MOD_RES (21)..(22)..(23)..(24): Xaa is A or G or absent
RXEXKNHQLFSMEGLXXXXXXXXXMIQMTINSEETPV

SEQ ID NO: 13967 - protein, 34 aa, Artificial Sequence
  Non-cyclic GFR-binding peptide
  MOD_RES (13)..(14)..(15)..(16)..(17): Xaa is A or G
  MOD_RES (18)..(19)..(20)..(21): Xaa is A or G or absent
ALHDELTVQVEKXXXXXXXXXVKAVKVSRLQVQT

SEQ ID NO: 13968 - protein, 40 aa, Artificial Sequence
  Non-cyclic GFR-binding peptide
  MOD_RES (1)..(3)..(40): Xaa is C or S
  MOD_RES (16)..(17)..(18)..(19)..(20): Xaa is A or G
  MOD_RES (21)..(22)..(23)..(24): Xaa is A or G or absent
XKXALHDELTVQVEKXXXXXXXXXVKAVKVSRLQVQTPRX

SEQ ID NO: 13969 - protein, 35 aa, Artificial Sequence
  Non-cyclic GFR-binding peptide
ALHDELTSMEGLFIPKKRVIEMIQVTINSLQVQTP

SEQ ID NO: 13970 - protein, 36 aa, Artificial Sequence
  Non-cyclic GFR-binding peptide
  MOD_RES (13)..(14)..(15)..(16)..(17): Xaa is A or G
  MOD_RES (18)..(19)..(20)..(21): Xaa is A or G or absent
ALHDELTSMEGLXXXXXXXXXMIQVTINSLQVQTPR

SEQ ID NO: 13971 - protein, 38 aa, Artificial Sequence
  Non-cyclic GFR-binding peptide
  MOD_RES (1)..(3): Xaa is C or S
  MOD_RES (16)..(17)..(18)..(19)..(20): Xaa is A or G
  MOD_RES (21)..(22)..(23)..(24): Xaa is A or G or absent
XAXELHEELRSMEGLXXXXXXXXXMIQVTINSHHVRSP

SEQ ID NO: 13972 - protein, 41 aa, Artificial Sequence
  Non-cyclic GFR-binding peptide
  MOD_RES (1)..(3)..(40): Xaa is C or S
  MOD_RES (16)..(17)..(18)..(19)..(20): Xaa is A or G
  MOD_RES (21)..(22)..(23)..(24): Xaa is A or G or absent
XKXALHDELTSMEGLXXXXXXXXXMIQVTINSLQVQTPRXQ

SEQ ID NO: 13973 - protein, 39 aa, Artificial Sequence
  Non-cyclic GFR-binding peptide
  MOD_RES (36)..(36): Xaa is C or S
  MOD_RES (12)..(13)..(14)..(15)..(16): Xaa is A or G
  MOD_RES (17)..(18)..(19)..(20): Xaa is A or G or absent
LHDELTSMEGIXXXXXXXXXMIQVTINSLQVQTPRXQVN

SEQ ID NO: 13974 - protein, 41 aa, Artificial Sequence
  Non-cyclic GFR-binding peptide
  MOD_RES (1)..(3)..(37): Xaa is C or S
XEXKNHQLFVTAKKHQGQHPKIRIKRMQVPREETPVXELGE

SEQ ID NO: 13975 - protein, 36 aa, Artificial Sequence
  Non-cyclic GFR-binding peptide
  MOD_RES (2)..(36): Xaa is C or S
  MOD_RES (14)..(15)..(16)..(17)..(18): Xaa is A or G
  MOD_RES (19)..(20)..(21)..(22): Xaa is A or G or absent
EXKNHQLFVTAKKXXXXXXXXXIKRMQVPREETPVX

SEQ ID NO: 13976 - protein, 32 aa, Artificial Sequence
  Non-cyclic GFR-binding peptide
SHEELVQVEKHQGQHPKIRVKAMKVSRQGTPV

SEQ ID NO: 13977 - protein, 36 aa, Artificial Sequence
  Non-cyclic GFR-binding peptide
  MOD_RES (34)..(34): Xaa is C or S
KNHQLFSMEGLHQGQHPKIRMIQMTINSEETPVXEL

SEQ ID NO: 13978 - protein, 35 aa, Artificial Sequence
  Non-cyclic GFR-binding peptide
  MOD_RES (34)..(34): Xaa is C or S
QSHEELSMEGIHQGQHPKIRMIQMTINSQGTPVXE

SEQ ID NO: 13979 - protein, 33 aa, Artificial Sequence
  Non-cyclic GFR-binding peptide
  MOD_RES (12)..(13)..(14)..(15)..(16): Xaa is A or G
  MOD_RES (17)..(18)..(19)..(20): Xaa is A or G or absent
LHEELRVTAKKXXXXXXXXXIKRVQVPRHHVRS

SEQ ID NO: 13980 - protein, 35 aa, Artificial Sequence
  Non-cyclic GFR-binding peptide
  MOD_RES (33)..(33): Xaa is C or S
  MOD_RES (11)..(12)..(13)..(14)..(15): Xaa is A or G
  MOD_RES (16)..(17)..(18)..(19): Xaa is A or G or absent
NHQLFSMEGLXXXXXXXXXMIQMTINSEETPVXEL

SEQ ID NO: 13981 - protein, 37 aa, Artificial Sequence
  Non-cyclic GFR-binding peptide
  MOD_RES (33)..(33): Xaa is C or S
  MOD_RES (11)..(12)..(13)..(14)..(15): Xaa is A or G
  MOD_RES (16)..(17)..(18)..(19): Xaa is A or G or absent
SHEELSMEGIXXXXXXXXXMIQMTINSQGTPVXELGE

SEQ ID NO: 13982 - protein, 43 aa, Artificial Sequence
  Non-cyclic GFR-binding peptide
  MOD_RES (2)..(4)..(38): Xaa is C or S
RXEXQSHEELVTAKKHQGQHPKIRIKRMQVPRQGTPVXELGED

SEQ ID NO: 13983 - protein, 33 aa, Artificial Sequence
  Non-cyclic GFR-binding peptide
LHDELTSMEGLFIPKKRVIEMIQVTINSLQVQT

SEQ ID NO: 13984 - protein, 42 aa, Artificial Sequence
  Non-cyclic GFR-binding peptide
  MOD_RES (1)..(38): Xaa is C or S
XELHEELRSMEGILKPKKRVYEMIQVTINSHHVRSPQXKVSS

SEQ ID NO: 13985 - protein, 40 aa, Artificial Sequence
  Non-cyclic GFR-binding peptide
  MOD_RES (36)..(36): Xaa is C or S
LHEELRVTAKKLKPKKRVYEIKRVQVPRHHVRSPQXKVSS

SEQ ID NO: 13986 - protein, 38 aa, Artificial Sequence
  Non-cyclic GFR-binding peptide
  MOD_RES (2)..(4)..(38): Xaa is C or S
  MOD_RES (16)..(17)..(18)..(19)..(20): Xaa is A or G
  MOD_RES (21)..(22)..(23)..(24): Xaa is A or G or absent
RXEXKNHQLFVTAKKXXXXXXXXXIKRMQVPREETPVX

SEQ ID NO: 13987 - protein, 35 aa, Artificial Sequence
  Non-cyclic GFR-binding peptide
ELHEELRVTAKKLKPKKRVYEIKRVQVPRHHVRSP

SEQ ID NO: 13988 - protein, 36 aa, Artificial Sequence
  Non-cyclic GFR-binding peptide
  MOD_RES (35)..(35): Xaa is C or S
HDELTVQVEKFIPKKRVIEVKAVKVSRLQVQTPRXQ

SEQ ID NO: 13989 - protein, 38 aa, Artificial Sequence
  Non-cyclic GFR-binding peptide
  MOD_RES (2)..(4)..(38): Xaa is C or S
  MOD_RES (16)..(17)..(18)..(19)..(20): Xaa is A or G
  MOD_RES (21)..(22)..(23)..(24): Xaa is A or G or absent
RXEXKNHQLFVQVEKXXXXXXXXXVKAMKVSREETPVX

SEQ ID NO: 13990 - protein, 41 aa, Artificial Sequence
  Non-cyclic GFR-binding peptide
  MOD_RES (1)..(38): Xaa is C or S
XELHEELRSMEGLLKPKKRVYEMIQVTINSHHVRSPQXKVS

SEQ ID NO: 13991 - protein, 33 aa, Artificial Sequence
  Non-cyclic GFR-binding peptide
  MOD_RES (33)..(33): Xaa is C or S
  MOD_RES (11)..(12)..(13)..(14)..(15): Xaa is A or G
  MOD_RES (16)..(17)..(18)..(19): Xaa is A or G or absent
NHQLFSMEGLXXXXXXXXXMIQMTINSEETPVX

SEQ ID NO: 13992 - protein, 35 aa, Artificial Sequence
  Non-cyclic GFR-binding peptide
LHDELTSMEGIFIPKKRVIEMIQVTINSLQVQTPR

SEQ ID NO: 13993 - protein, 38 aa, Artificial Sequence
  Non-cyclic GFR-binding peptide
  MOD_RES (1)..(35): Xaa is C or S
  MOD_RES (13)..(14)..(15)..(16)..(17): Xaa is A or G
  MOD_RES (18)..(19)..(20)..(21): Xaa is A or G or absent
XKNHQLFSMEGLXXXXXXXXXMIQMTINSEETPVXELG

SEQ ID NO: 13994 - protein, 39 aa, Artificial Sequence
  Non-cyclic GFR-binding peptide
  MOD_RES (1)..(3)..(37): Xaa is C or S
XEXQSHEELSMEGIHQGQHPKIRMIQMTINSQGTPVXEL

SEQ ID NO: 13995 - protein, 33 aa, Artificial Sequence
  Non-cyclic GFR-binding peptide
HEELRSMEGILKPKKRVYEMIQVTINSHHVRSP

SEQ ID NO: 13996 - protein, 37 aa, Artificial Sequence
  Non-cyclic GFR-binding peptide
  MOD_RES (1)..(3): Xaa is C or S
XAXELHEELRVTAKKLKPKKRVYEIKRVQVPRHHVRS

SEQ ID NO: 13997 - protein, 39 aa, Artificial Sequence
  Non-cyclic GFR-binding peptide
  MOD_RES (2)..(39): Xaa is C or S
  MOD_RES (15)..(16)..(17)..(18)..(19): Xaa is A or G
  MOD_RES (20)..(21)..(22)..(23): Xaa is A or G or absent
KXALHDELTVQVEKXXXXXXXXXVKAVKVSRLQVQTPRX

SEQ ID NO: 13998 - protein, 37 aa, Artificial Sequence
  Non-cyclic GFR-binding peptide
  MOD_RES (2)..(2): Xaa is C or S
  MOD_RES (15)..(16)..(17)..(18)..(19): Xaa is A or G
  MOD_RES (20)..(21)..(22)..(23): Xaa is A or G or absent
KXALHDELTVQVEKXXXXXXXXXVKAVKVSRLQVQTP

SEQ ID NO: 13999 - protein, 39 aa, Artificial Sequence
  Non-cyclic GFR-binding peptide
  MOD_RES (1)..(38): Xaa is C or S
XELHEELRVTAKKLKPKKRVYEIKRVQVPRHHVRSPQXK

SEQ ID NO: 14000 - protein, 38 aa, Artificial Sequence
  Non-cyclic GFR-binding peptide
  MOD_RES (2)..(36): Xaa is C or S
EXKNHQLFSMEGLHQGQHPKIRMIQMTINSEETPVXEL

SEQ ID NO: 14001 - protein, 37 aa, Artificial Sequence
  Non-cyclic GFR-binding peptide
  MOD_RES (1)..(3): Xaa is C or S
XKXALHDELTVQVEKFIPKKRVIEVKAVKVSRLQVQT

SEQ ID NO: 14002 - protein, 43 aa, Artificial Sequence
  Non-cyclic GFR-binding peptide
  MOD_RES (2)..(4)..(38): Xaa is C or S
RXEXQSHEELVQVEKHQGQHPKIRVKAMKVSRQGTPVXELGED

SEQ ID NO: 14003 - protein, 37 aa, Artificial Sequence
  Non-cyclic GFR-binding peptide
  MOD_RES (37)..(37): Xaa is C or S
ELHEELRSMEGILKPKKRVYEMIQVTINSHHVRSPQX

SEQ ID NO: 14004 - protein, 33 aa, Artificial Sequence
  Non-cyclic GFR-binding peptide
  MOD_RES (12)..(13)..(14)..(15)..(16): Xaa is A or G
  MOD_RES (17)..(18)..(19)..(20): Xaa is A or G or absent
KNHQLFVQVEKXXXXXXXXXVKAMKVSREETPV

SEQ ID NO: 14005 - protein, 37 aa, Artificial Sequence
  Non-cyclic GFR-binding peptide
  MOD_RES (1)..(3)..(37): Xaa is C or S
  MOD_RES (15)..(16)..(17)..(18)..(19): Xaa is A or G
  MOD_RES (20)..(21)..(22)..(23): Xaa is A or G or absent
XEXKNHQLFSMEGLXXXXXXXXXMIQMTINSEETPVX

SEQ ID NO: 14006 - protein, 39 aa, Artificial Sequence
  Non-cyclic GFR-binding peptide
  MOD_RES (33)..(33): Xaa is C or S
  MOD_RES (11)..(12)..(13)..(14)..(15): Xaa is A or G
  MOD_RES (16)..(17)..(18)..(19): Xaa is A or G or absent
NHQLFVQVEKXXXXXXXXXVKAMKVSREETPVXELGEDN

SEQ ID NO: 14007 - protein, 38 aa, Artificial Sequence
  Non-cyclic GFR-binding peptide
  MOD_RES (1)..(38): Xaa is C or S
XALHDELTVQVEKFIPKKRVIEVKAVKVSRLQVQTPRX

SEQ ID NO: 14008 - protein, 32 aa, Artificial Sequence
  Non-cyclic GFR-binding peptide
  MOD_RES (11)..(12)..(13)..(14)..(15): Xaa is A or G
  MOD_RES (16)..(17)..(18)..(19): Xaa is A or G or absent
NHQLFVQVEKXXXXXXXXXVKAMKVSREETPV

SEQ ID NO: 14009 - protein, 43 aa, Artificial Sequence
  Non-cyclic GFR-binding peptide
  MOD_RES (2)..(39): Xaa is C or S
KXALHDELTSMEGIFIPKKRVIEMIQVTINSLQVQTPRXQVNR

SEQ ID NO: 14010 - protein, 38 aa, Artificial Sequence
  Non-cyclic GFR-binding peptide
  MOD_RES (36)..(36): Xaa is C or S
LHDELTVQVEKFIPKKRVIEVKAVKVSRLQVQTPRXQV

SEQ ID NO: 14011 - protein, 42 aa, Artificial Sequence
  Non-cyclic GFR-binding peptide
  MOD_RES (1)..(38): Xaa is C or S
  MOD_RES (14)..(15)..(16)..(17)..(18): Xaa is A or G
  MOD_RES (19)..(20)..(21)..(22): Xaa is A or G or absent
XALHDELTSMEGLXXXXXXXXXMIQVTINSLQVQTPRXQVNR

SEQ ID NO: 14012 - protein, 34 aa, Artificial Sequence
  Non-cyclic GFR-binding peptide
LHDELTSMEGLFIPKKRVIEMIQVTINSLQVQTP

SEQ ID NO: 14013 - protein, 38 aa, Artificial Sequence
  Non-cyclic GFR-binding peptide
  MOD_RES (37)..(37): Xaa is C or S
  MOD_RES (13)..(14)..(15)..(16)..(17): Xaa is A or G
  MOD_RES (18)..(19)..(20)..(21): Xaa is A or G or absent
ELHEELRSMEGIXXXXXXXXXMIQVTINSHHVRSPQXK

SEQ ID NO: 14014 - protein, 35 aa, Artificial Sequence
  Non-cyclic GFR-binding peptide
  MOD_RES (1)..(35): Xaa is C or S
  MOD_RES (13)..(14)..(15)..(16)..(17): Xaa is A or G
  MOD_RES (18)..(19)..(20)..(21): Xaa is A or G or absent
XQSHEELSMEGIXXXXXXXXXMIQMTINSQGTPVX

SEQ ID NO: 14015 - protein, 44 aa, Artificial Sequence
  Non-cyclic GFR-binding peptide
  MOD_RES (2)..(4)..(41): Xaa is C or S
  MOD_RES (17)..(18)..(19)..(20)..(21): Xaa is A or G
  MOD_RES (22)..(23)..(24)..(25): Xaa is A or G or absent
EXKXALHDELTVQVEKXXXXXXXXXVKAVKVSRLQVQTPRXQVN

SEQ ID NO: 14016 - protein, 39 aa, Artificial Sequence
  Non-cyclic GFR-binding peptide
  MOD_RES (35)..(35): Xaa is C or S
  MOD_RES (11)..(12)..(13)..(14)..(15): Xaa is A or G
  MOD_RES (16)..(17)..(18)..(19): Xaa is A or G or absent
HDELTVQVEKXXXXXXXXXVKAVKVSRLQVQTPRXQVNR

SEQ ID NO: 14017 - protein, 40 aa, Artificial Sequence
  Non-cyclic GFR-binding peptide
  MOD_RES (34)..(34): Xaa is C or S
  MOD_RES (12)..(13)..(14)..(15)..(16): Xaa is A or G
  MOD_RES (17)..(18)..(19)..(20): Xaa is A or G or absent
KNHQLFVTAKKXXXXXXXXXIKRMQVPREETPVXELGEDN

SEQ ID NO: 14018 - protein, 34 aa, Artificial Sequence
  Non-cyclic GFR-binding peptide
  MOD_RES (12)..(13)..(14)..(15)..(16): Xaa is A or G
  MOD_RES (17)..(18)..(19)..(20): Xaa is A or G or absent
LHEELRVTAKKXXXXXXXXXIKRVQVPRHHVRSP

SEQ ID NO: 14019 - protein, 39 aa, Artificial Sequence
  Non-cyclic GFR-binding peptide
  MOD_RES (33)..(33): Xaa is C or S
SHEELVQVEKHQGQHPKIRVKAMKVSRQGTPVXELGEDN

SEQ ID NO: 14020 - protein, 42 aa, Artificial Sequence
  Non-cyclic GFR-binding peptide
  MOD_RES (2)..(39): Xaa is C or S
  MOD_RES (15)..(16)..(17)..(18)..(19): Xaa is A or G
  MOD_RES (20)..(21)..(22)..(23): Xaa is A or G or absent
KXALHDELTVQVEKXXXXXXXXXVKAVKVSRLQVQTPRXQVN

SEQ ID NO: 14021 - protein, 32 aa, Artificial Sequence
  Non-cyclic GFR-binding peptide
  MOD_RES (11)..(12)..(13)..(14)..(15): Xaa is A or G
  MOD_RES (16)..(17)..(18)..(19): Xaa is A or G or absent
HEELRSMEGLXXXXXXXXXMIQVTINSHHVRS

SEQ ID NO: 14022 - protein, 40 aa, Artificial Sequence
  Non-cyclic GFR-binding peptide
  MOD_RES (2)..(36): Xaa is C or S
EXKNHQLFVTAKKHQGQHPKIRIKRMQVPREETPVXELGE

SEQ ID NO: 14023 - protein, 39 aa, Artificial Sequence
  Non-cyclic GFR-binding peptide
  MOD_RES (1)..(3)..(37): Xaa is C or S
XEXKNHQLFVTAKKHQGQHPKIRIKRMQVPREETPVXEL

SEQ ID NO: 14024 - protein, 37 aa, Artificial Sequence
  Non-cyclic GFR-binding peptide
  MOD_RES (2)..(2): Xaa is C or S
  MOD_RES (15)..(16)..(17)..(18)..(19): Xaa is A or G
  MOD_RES (20)..(21)..(22)..(23): Xaa is A or G or absent
AXELHEELRVTAKKXXXXXXXXXIKRVQVPRHHVRSP

SEQ ID NO: 14025 - protein, 37 aa, Artificial Sequence
  Non-cyclic GFR-binding peptide
  MOD_RES (33)..(33): Xaa is C or S
  MOD_RES (11)..(12)..(13)..(14)..(15): Xaa is A or G
  MOD_RES (16)..(17)..(18)..(19): Xaa is A or G or absent
NHQLFSMEGLXXXXXXXXXMIQMTINSEETPVXELGE

SEQ ID NO: 14026 - protein, 41 aa, Artificial Sequence
  Non-cyclic GFR-binding peptide
  MOD_RES (2)..(4)..(41): Xaa is C or S
  MOD_RES (17)..(18)..(19)..(20)..(21): Xaa is A or G
  MOD_RES (22)..(23)..(24)..(25): Xaa is A or G or absent
EXKXALHDELTVQVEKXXXXXXXXXVKAVKVSRLQVQTPRX

SEQ ID NO: 14027 - protein, 38 aa, Artificial Sequence
  Non-cyclic GFR-binding peptide
  MOD_RES (2)..(2): Xaa is C or S
  MOD_RES (15)..(16)..(17)..(18)..(19): Xaa is A or G
  MOD_RES (20)..(21)..(22)..(23): Xaa is A or G or absent
KXALHDELTVQVEKXXXXXXXXXVKAVKVSRLQVQTPR

SEQ ID NO: 14028 - protein, 38 aa, Artificial Sequence
  Non-cyclic GFR-binding peptide
  MOD_RES (1)..(3): Xaa is C or S
  MOD_RES (16)..(17)..(18)..(19)..(20): Xaa is A or G
  MOD_RES (21)..(22)..(23)..(24): Xaa is A or G or absent
XKXALHDELTVQVEKXXXXXXXXXVKAVKVSRLQVQTP

SEQ ID NO: 14029 - protein, 37 aa, Artificial Sequence
  Non-cyclic GFR-binding peptide
  MOD_RES (34)..(34): Xaa is C or S
  MOD_RES (12)..(13)..(14)..(15)..(16): Xaa is A or G
  MOD_RES (17)..(18)..(19)..(20): Xaa is A or G or absent
KNHQLFVTAKKXXXXXXXXXIKRMQVPREETPVXELG

SEQ ID NO: 14030 - protein, 40 aa, Artificial Sequence
  Non-cyclic GFR-binding peptide
  MOD_RES (2)..(36): Xaa is C or S
EXKNHQLFSMEGLHQGQHPKIRMIQMTINSEETPVXELGE

SEQ ID NO: 14031 - protein, 40 aa, Artificial Sequence
  Non-cyclic GFR-binding peptide
  MOD_RES (37)..(37): Xaa is C or S
  MOD_RES (13)..(14)..(15)..(16)..(17): Xaa is A or G
  MOD_RES (18)..(19)..(20)..(21): Xaa is A or G or absent
ELHEELRSMEGIXXXXXXXXXMIQVTINSHHVRSPQXKVS

SEQ ID NO: 14032 - protein, 39 aa, Artificial Sequence
  Non-cyclic GFR-binding peptide
  MOD_RES (1)..(3)..(37): Xaa is C or S
XEXKNHQLFVQVEKHQGQHPKIRVKAMKVSREETPVXEL

SEQ ID NO: 14033 - protein, 38 aa, Artificial Sequence
  Non-cyclic GFR-binding peptide
  MOD_RES (33)..(33): Xaa is C or S
NHQLFVTAKKHQGQHPKIRIKRMQVPREETPVXELGED

SEQ ID NO: 14034 - protein, 39 aa, Artificial Sequence
  Non-cyclic GFR-binding peptide
  MOD_RES (37)..(37): Xaa is C or S
  MOD_RES (13)..(14)..(15)..(16)..(17): Xaa is A or G
  MOD_RES (18)..(19)..(20)..(21): Xaa is A or G or absent
ELHEELRSMEGLXXXXXXXXXMIQVTINSHHVRSPQXKV

SEQ ID NO: 14035 - protein, 43 aa, Artificial Sequence
  Non-cyclic GFR-binding peptide
  MOD_RES (2)..(4)..(38): Xaa is C or S
  MOD_RES (16)..(17)..(18)..(19)..(20): Xaa is A or G
  MOD_RES (21)..(22)..(23)..(24): Xaa is A or G or absent
RXEXQSHEELSMEGIXXXXXXXXXMIQMTINSQGTPVXELGED

SEQ ID NO: 14036 - protein, 41 aa, Artificial Sequence
  Non-cyclic GFR-binding peptide
  MOD_RES (2)..(36): Xaa is C or S
EXQSHEELVTAKKHQGQHPKIRIKRMQVPRQGTPVXELGED

SEQ ID NO: 14037 - protein, 34 aa, Artificial Sequence
  Non-cyclic GFR-binding peptide
  MOD_RES (11)..(12)..(13)..(14)..(15): Xaa is A or G
  MOD_RES (16)..(17)..(18)..(19): Xaa is A or G or absent
HEELRVTAKKXXXXXXXXXIKRVQVPRHHVRSPQ

SEQ ID NO: 14038 - protein, 41 aa, Artificial Sequence
  Non-cyclic GFR-binding peptide
  MOD_RES (2)..(4)..(41): Xaa is C or S
  MOD_RES (17)..(18)..(19)..(20)..(21): Xaa is A or G
  MOD_RES (22)..(23)..(24)..(25): Xaa is A or G or absent
AXAXELHEELRVTAKKXXXXXXXXXIKRVQVPRHHVRSPQX

SEQ ID NO: 14039 - protein, 36 aa, Artificial Sequence
  Non-cyclic GFR-binding peptide
  MOD_RES (1)..(3): Xaa is C or S
XEXQSHEELVQVEKHQGQHPKIRVKAMKVSRQGTPV

SEQ ID NO: 14040 - protein, 40 aa, Artificial Sequence
  Non-cyclic GFR-binding peptide
  MOD_RES (2)..(39): Xaa is C or S
  MOD_RES (15)..(16)..(17)..(18)..(19): Xaa is A or G
  MOD_RES (20)..(21)..(22)..(23): Xaa is A or G or absent
KXALHDELTSMEGIXXXXXXXXXMIQVTINSLQVQTPRXQ

SEQ ID NO: 14041 - protein, 40 aa, Artificial Sequence
  Non-cyclic GFR-binding peptide
  MOD_RES (1)..(38): Xaa is C or S
  MOD_RES (14)..(15)..(16)..(17)..(18): Xaa is A or G
  MOD_RES (19)..(20)..(21)..(22): Xaa is A or G or absent
XELHEELRVTAKKXXXXXXXXXIKRVQVPRHHVRSPQXKV

SEQ ID NO: 14042 - protein, 39 aa, Artificial Sequence
  Non-cyclic GFR-binding peptide
  MOD_RES (36)..(36): Xaa is C or S
  MOD_RES (12)..(13)..(14)..(15)..(16): Xaa is A or G
  MOD_RES (17)..(18)..(19)..(20): Xaa is A or G or absent
LHEELRVTAKKXXXXXXXXXIKRVQVPRHHVRSPQXKVS

SEQ ID NO: 14043 - protein, 32 aa, Artificial Sequence
  Non-cyclic GFR-binding peptide
  MOD_RES (11)..(12)..(13)..(14)..(15): Xaa is A or G
  MOD_RES (16)..(17)..(18)..(19): Xaa is A or G or absent
HDELTVQVEKXXXXXXXXXVKAVKVSRLQVQT

SEQ ID NO: 14044 - protein, 37 aa, Artificial Sequence
  Non-cyclic GFR-binding peptide
  MOD_RES (36)..(36): Xaa is C or S
LHDELTSMEGIFIPKKRVIEMIQVTINSLQVQTPRXQ

SEQ ID NO: 14045 - protein, 40 aa, Artificial Sequence
  Non-cyclic GFR-binding peptide
  MOD_RES (37)..(37): Xaa is C or S
  MOD_RES (13)..(14)..(15)..(16)..(17): Xaa is A or G
  MOD_RES (18)..(19)..(20)..(21): Xaa is A or G or absent
ALHDELTVQVEKXXXXXXXXXVKAVKVSRLQVQTPRXQVN

SEQ ID NO: 14046 - protein, 40 aa, Artificial Sequence
  Non-cyclic GFR-binding peptide
  MOD_RES (1)..(3)..(37): Xaa is C or S
  MOD_RES (15)..(16)..(17)..(18)..(19): Xaa is A or G
  MOD_RES (20)..(21)..(22)..(23): Xaa is A or G or absent
XEXQSHEELVQVEKXXXXXXXXXVKAMKVSRQGTPVXELG

SEQ ID NO: 14047 - protein, 38 aa, Artificial Sequence
  Non-cyclic GFR-binding peptide
  MOD_RES (37)..(37): Xaa is C or S
ALHDELTSMEGLFIPKKRVIEMIQVTINSLQVQTPRXQ

SEQ ID NO: 14048 - protein, 42 aa, Artificial Sequence
  Non-cyclic GFR-binding peptide
  MOD_RES (2)..(39): Xaa is C or S
KXALHDELTVQVEKFIPKKRVIEVKAVKVSRLQVQTPRXQVN

SEQ ID NO: 14049 - protein, 40 aa, Artificial Sequence
  Non-cyclic GFR-binding peptide
  MOD_RES (2)..(36): Xaa is C or S
EXKNHQLFVQVEKHQGQHPKIRVKAMKVSREETPVXELGE

SEQ ID NO: 14050 - protein, 36 aa, Artificial Sequence
  Non-cyclic GFR-binding peptide
  MOD_RES (1)..(1): Xaa is C or S
XELHEELRSMEGLLKPKKRVYEMIQVTINSHHVRSP

SEQ ID NO: 14051 - protein, 42 aa, Artificial Sequence
  Non-cyclic GFR-binding peptide
  MOD_RES (2)..(4)..(41): Xaa is C or S
EXKXALHDELTVQVEKFIPKKRVIEVKAVKVSRLQVQTPRXQ

SEQ ID NO: 14052 - protein, 40 aa, Artificial Sequence
  Non-cyclic GFR-binding peptide
  MOD_RES (1)..(35): Xaa is C or S
  MOD_RES (13)..(14)..(15)..(16)..(17): Xaa is A or G
  MOD_RES (18)..(19)..(20)..(21): Xaa is A or G or absent
XQSHEELSMEGIXXXXXXXXXMIQMTINSQGTPVXELGED

SEQ ID NO: 14053 - protein, 34 aa, Artificial Sequence
  Non-cyclic GFR-binding peptide
  MOD_RES (34)..(34): Xaa is C or S
QSHEELVTAKKHQGQHPKIRIKRMQVPRQGTPVX

SEQ ID NO: 14054 - protein, 39 aa, Artificial Sequence
  Non-cyclic GFR-binding peptide
  MOD_RES (2)..(4): Xaa is C or S
  MOD_RES (17)..(18)..(19)..(20)..(21): Xaa is A or G
  MOD_RES (22)..(23)..(24)..(25): Xaa is A or G or absent
AXAXELHEELRVTAKKXXXXXXXXXIKRVQVPRHHVRSP

SEQ ID NO: 14055 - protein, 36 aa, Artificial Sequence
  Non-cyclic GFR-binding peptide
  MOD_RES (13)..(14)..(15)..(16)..(17): Xaa is A or G
  MOD_RES (18)..(19)..(20)..(21): Xaa is A or G or absent
ELHEELRSMEGLXXXXXXXXXMIQVTINSHHVRSPQ

SEQ ID NO: 14056 - protein, 39 aa, Artificial Sequence
  Non-cyclic GFR-binding peptide
  MOD_RES (1)..(35): Xaa is C or S
  MOD_RES (13)..(14)..(15)..(16)..(17): Xaa is A or G
  MOD_RES (18)..(19)..(20)..(21): Xaa is A or G or absent
XKNHQLFSMEGLXXXXXXXXXMIQMTINSEETPVXELGE

SEQ ID NO: 14057 - protein, 44 aa, Artificial Sequence
  Non-cyclic GFR-binding peptide
  MOD_RES (1)..(3)..(40): Xaa is C or S
  MOD_RES (16)..(17)..(18)..(19)..(20): Xaa is A or G
  MOD_RES (21)..(22)..(23)..(24): Xaa is A or G or absent
XKXALHDELTSMEGIXXXXXXXXXMIQVTINSLQVQTPRXQVNR

SEQ ID NO: 14058 - protein, 44 aa, Artificial Sequence
  Non-cyclic GFR-binding peptide
  MOD_RES (1)..(3)..(40): Xaa is C or S
XAXELHEELRVTAKKLKPKKRVYEIKRVQVPRHHVRSPQXKVSS

SEQ ID NO: 14059 - protein, 37 aa, Artificial Sequence
  Non-cyclic GFR-binding peptide
  MOD_RES (34)..(34): Xaa is C or S
  MOD_RES (12)..(13)..(14)..(15)..(16): Xaa is A or G
  MOD_RES (17)..(18)..(19)..(20): Xaa is A or G or absent
QSHEELSMEGIXXXXXXXXXMIQMTINSQGTPVXELG

SEQ ID NO: 14060 - protein, 41 aa, Artificial Sequence
  Non-cyclic GFR-binding peptide
  MOD_RES (37)..(37): Xaa is C or S
ELHEELRSMEGILKPKKRVYEMIQVTINSHHVRSPQXKVSS

SEQ ID NO: 14061 - protein, 34 aa, Artificial Sequence
  Non-cyclic GFR-binding peptide
  MOD_RES (33)..(33): Xaa is C or S
NHQLFSMEGLHQGQHPKIRMIQMTINSEETPVXE

SEQ ID NO: 14062 - protein, 37 aa, Artificial Sequence
  Non-cyclic GFR-binding peptide
  MOD_RES (36)..(36): Xaa is C or S
  MOD_RES (12)..(13)..(14)..(15)..(16): Xaa is A or G
  MOD_RES (17)..(18)..(19)..(20): Xaa is A or G or absent
LHEELRSMEGIXXXXXXXXXMIQVTINSHHVRSPQXK

SEQ ID NO: 14063 - protein, 39 aa, Artificial Sequence
  Non-cyclic GFR-binding peptide
  MOD_RES (35)..(35): Xaa is C or S
HEELRVTAKKLKPKKRVYEIKRVQVPRHHVRSPQXKVSS

SEQ ID NO: 14064 - protein, 42 aa, Artificial Sequence
  Non-cyclic GFR-binding peptide
  MOD_RES (1)..(38): Xaa is C or S
XALHDELTSMEGLFIPKKRVIEMIQVTINSLQVQTPRXQVNR

SEQ ID NO: 14065 - protein, 36 aa, Artificial Sequence
  Non-cyclic GFR-binding peptide
  MOD_RES (1)..(3): Xaa is C or S
  MOD_RES (15)..(16)..(17)..(18)..(19): Xaa is A or G
  MOD_RES (20)..(21)..(22)..(23): Xaa is A or G or absent
XEXKNHQLFVTAKKXXXXXXXXXIKRMQVPREETPV

SEQ ID NO: 14066 - protein, 38 aa, Artificial Sequence
  Non-cyclic GFR-binding peptide
  MOD_RES (34)..(34): Xaa is C or S
  MOD_RES (12)..(13)..(14)..(15)..(16): Xaa is A or G
  MOD_RES (17)..(18)..(19)..(20): Xaa is A or G or absent
QSHEELVQVEKXXXXXXXXXVKAMKVSRQGTPVXELGE

SEQ ID NO: 14067 - protein, 43 aa, Artificial Sequence
  Non-cyclic GFR-binding peptide
  MOD_RES (1)..(3)..(40): Xaa is C or S
XAXELHEELRVTAKKLKPKKRVYEIKRVQVPRHHVRSPQXKVS

SEQ ID NO: 14068 - protein, 41 aa, Artificial Sequence
  Non-cyclic GFR-binding peptide
  MOD_RES (1)..(3)..(40): Xaa is C or S
  MOD_RES (16)..(17)..(18)..(19)..(20): Xaa is A or G
  MOD_RES (21)..(22)..(23)..(24): Xaa is A or G or absent
XAXELHEELRVTAKKXXXXXXXXXIKRVQVPRHHVRSPQXK

SEQ ID NO: 14069 - protein, 34 aa, Artificial Sequence
  Non-cyclic GFR-binding peptide
  MOD_RES (1)..(1): Xaa is C or S
XQSHEELVTAKKHQGQHPKIRIKRMQVPRQGTPV

SEQ ID NO: 14070 - protein, 41 aa, Artificial Sequence
  Non-cyclic GFR-binding peptide
  MOD_RES (2)..(36): Xaa is C or S
  MOD_RES (14)..(15)..(16)..(17)..(18): Xaa is A or G
  MOD_RES (19)..(20)..(21)..(22): Xaa is A or G or absent
EXKNHQLFVQVEKXXXXXXXXXVKAMKVSREETPVXELGED

SEQ ID NO: 14071 - protein, 43 aa, Artificial Sequence
  Non-cyclic GFR-binding peptide
  MOD_RES (1)..(3)..(37): Xaa is C or S
  MOD_RES (15)..(16)..(17)..(18)..(19): Xaa is A or G
  MOD_RES (20)..(21)..(22)..(23): Xaa is A or G or absent
XEXQSHEELSMEGIXXXXXXXXXMIQMTINSQGTPVXELGEDN

SEQ ID NO: 14072 - protein, 41 aa, Artificial Sequence
  Non-cyclic GFR-binding peptide
  MOD_RES (1)..(3)..(37): Xaa is C or S
XEXKNHQLFVQVEKHQGQHPKIRVKAMKVSREETPVXELGE

SEQ ID NO: 14073 - protein, 39 aa, Artificial Sequence
  Non-cyclic GFR-binding peptide
  MOD_RES (34)..(34): Xaa is C or S
QSHEELVTAKKHQGQHPKIRIKRMQVPRQGTPVXELGED

SEQ ID NO: 14074 - protein, 39 aa, Artificial Sequence
  Non-cyclic GFR-binding peptide
  MOD_RES (34)..(34): Xaa is C or S
KNHQLFSMEGLHQGQHPKIRMIQMTINSEETPVXELGED

SEQ ID NO: 14075 - protein, 39 aa, Artificial Sequence
  Non-cyclic GFR-binding peptide
  MOD_RES (2)..(39): Xaa is C or S
  MOD_RES (15)..(16)..(17)..(18)..(19): Xaa is A or G
  MOD_RES (20)..(21)..(22)..(23): Xaa is A or G or absent
AXELHEELRVTAKKXXXXXXXXXIKRVQVPRHHVRSPQX

SEQ ID NO: 14076 - protein, 40 aa, Artificial Sequence
  Non-cyclic GFR-binding peptide
  MOD_RES (1)..(35): Xaa is C or S
  MOD_RES (13)..(14)..(15)..(16)..(17): Xaa is A or G
  MOD_RES (18)..(19)..(20)..(21): Xaa is A or G or absent
XKNHQLFVQVEKXXXXXXXXXVKAMKVSREETPVXELGED

SEQ ID NO: 14077 - protein, 37 aa, Artificial Sequence
  Non-cyclic GFR-binding peptide
  MOD_RES (36)..(36): Xaa is C or S
LHEELRSMEGLLKPKKRVYEMIQVTINSHHVRSPQXK

SEQ ID NO: 14078 - protein, 41 aa, Artificial Sequence
  Non-cyclic GFR-binding peptide
  MOD_RES (1)..(35): Xaa is C or S
XQSHEELVQVEKHQGQHPKIRVKAMKVSRQGTPVXELGEDN

SEQ ID NO: 14079 - protein, 44 aa, Artificial Sequence
  Non-cyclic GFR-binding peptide
  MOD_RES (1)..(3)..(40): Xaa is C or S
XKXALHDELTVQVEKFIPKKRVIEVKAVKVSRLQVQTPRXQVNR

SEQ ID NO: 14080 - protein, 42 aa, Artificial Sequence
  Non-cyclic GFR-binding peptide
  MOD_RES (1)..(38): Xaa is C or S
  MOD_RES (14)..(15)..(16)..(17)..(18): Xaa is A or G
  MOD_RES (19)..(20)..(21)..(22): Xaa is A or G or absent
XALHDELTVQVEKXXXXXXXXXVKAVKVSRLQVQTPRXQVNR

SEQ ID NO: 14081 - protein, 38 aa, Artificial Sequence
  Non-cyclic GFR-binding peptide
  MOD_RES (36)..(36): Xaa is C or S
LHEELRSMEGILKPKKRVYEMIQVTINSHHVRSPQXKV

SEQ ID NO: 14082 - protein, 38 aa, Artificial Sequence
  Non-cyclic GFR-binding peptide
  MOD_RES (2)..(4): Xaa is C or S
  MOD_RES (17)..(18)..(19)..(20)..(21): Xaa is A or G
  MOD_RES (22)..(23)..(24)..(25): Xaa is A or G or absent
AXAXELHEELRVTAKKXXXXXXXXXIKRVQVPRHHVRS

SEQ ID NO: 14083 - protein, 40 aa, Artificial Sequence
  Non-cyclic GFR-binding peptide
  MOD_RES (1)..(38): Xaa is C or S
  MOD_RES (14)..(15)..(16)..(17)..(18): Xaa is A or G
  MOD_RES (19)..(20)..(21)..(22): Xaa is A or G or absent
XELHEELRSMEGLXXXXXXXXXMIQVTINSHHVRSPQXKV

SEQ ID NO: 14084 - protein, 34 aa, Artificial Sequence
  Non-cyclic GFR-binding peptide
ELHEELRSMEGILKPKKRVYEMIQVTINSHHVRS

SEQ ID NO: 14085 - protein, 35 aa, Artificial Sequence
  Non-cyclic GFR-binding peptide
  MOD_RES (34)..(34): Xaa is C or S
  MOD_RES (12)..(13)..(14)..(15)..(16): Xaa is A or G
  MOD_RES (17)..(18)..(19)..(20): Xaa is A or G or absent
QSHEELVQVEKXXXXXXXXXVKAMKVSRQGTPVXE

SEQ ID NO: 14086 - protein, 37 aa, Artificial Sequence
  Non-cyclic GFR-binding peptide
  MOD_RES (2)..(4): Xaa is C or S
RXEXKNHQLFVTAKKHQGQHPKIRIKRMQVPREETPV

SEQ ID NO: 14087 - protein, 37 aa, Artificial Sequence
  Non-cyclic GFR-binding peptide
  MOD_RES (2)..(4): Xaa is C or S
  MOD_RES (16)..(17)..(18)..(19)..(20): Xaa is A or G
  MOD_RES (21)..(22)..(23)..(24): Xaa is A or G or absent
RXEXKNHQLFVQVEKXXXXXXXXXVKAMKVSREETPV

SEQ ID NO: 14088 - protein, 35 aa, Artificial Sequence
  Non-cyclic GFR-binding peptide
  MOD_RES (35)..(35): Xaa is C or S
  MOD_RES (11)..(12)..(13)..(14)..(15): Xaa is A or G
  MOD_RES (16)..(17)..(18)..(19): Xaa is A or G or absent
HEELRVTAKKXXXXXXXXXIKRVQVPRHHVRSPQX

SEQ ID NO: 14089 - protein, 36 aa, Artificial Sequence
  Non-cyclic GFR-binding peptide
  MOD_RES (2)..(2): Xaa is C or S
  MOD_RES (15)..(16)..(17)..(18)..(19): Xaa is A or G
  MOD_RES (20)..(21)..(22)..(23): Xaa is A or G or absent
KXALHDELTSMEGIXXXXXXXXXMIQVTINSLQVQT

SEQ ID NO: 14090 - protein, 33 aa, Artificial Sequence
  Non-cyclic GFR-binding peptide
HDELTVQVEKFIPKKRVIEVKAVKVSRLQVQTP

SEQ ID NO: 14091 - protein, 38 aa, Artificial Sequence
  Non-cyclic GFR-binding peptide
  MOD_RES (1)..(38): Xaa is C or S
  MOD_RES (14)..(15)..(16)..(17)..(18): Xaa is A or G
  MOD_RES (19)..(20)..(21)..(22): Xaa is A or G or absent
XALHDELTVQVEKXXXXXXXXXVKAVKVSRLQVQTPRX

SEQ ID NO: 14092 - protein, 36 aa, Artificial Sequence
  Non-cyclic GFR-binding peptide
  MOD_RES (33)..(33): Xaa is C or S
  MOD_RES (11)..(12)..(13)..(14)..(15): Xaa is A or G
  MOD_RES (16)..(17)..(18)..(19): Xaa is A or G or absent
NHQLFVTAKKXXXXXXXXXIKRMQVPREETPVXELG

SEQ ID NO: 14093 - protein, 40 aa, Artificial Sequence
  Non-cyclic GFR-binding peptide
  MOD_RES (2)..(4): Xaa is C or S
EXKXALHDELTSMEGIFIPKKRVIEMIQVTINSLQVQTPR

SEQ ID NO: 14094 - protein, 42 aa, Artificial Sequence
  Non-cyclic GFR-binding peptide
  MOD_RES (2)..(4)..(41): Xaa is C or S
  MOD_RES (17)..(18)..(19)..(20)..(21): Xaa is A or G
  MOD_RES (22)..(23)..(24)..(25): Xaa is A or G or absent
AXAXELHEELRSMEGLXXXXXXXXXMIQVTINSHHVRSPQXK

SEQ ID NO: 14095 - protein, 45 aa, Artificial Sequence
  Non-cyclic GFR-binding peptide
  MOD_RES (2)..(4)..(41): Xaa is C or S
AXAXELHEELRSMEGLLKPKKRVYEMIQVTINSHHVRSPQXKVSS

SEQ ID NO: 14096 - protein, 34 aa, Artificial Sequence
  Non-cyclic GFR-binding peptide
  MOD_RES (1)..(1): Xaa is C or S
XQSHEELVQVEKHQGQHPKIRVKAMKVSRQGTPV

SEQ ID NO: 14097 - protein, 41 aa, Artificial Sequence
  Non-cyclic GFR-binding peptide
  MOD_RES (2)..(4)..(38): Xaa is C or S
  MOD_RES (16)..(17)..(18)..(19)..(20): Xaa is A or G
  MOD_RES (21)..(22)..(23)..(24): Xaa is A or G or absent
RXEXKNHQLFVQVEKXXXXXXXXXVKAMKVSREETPVXELG

SEQ ID NO: 14098 - protein, 38 aa, Artificial Sequence
  Non-cyclic GFR-binding peptide
  MOD_RES (2)..(36): Xaa is C or S
EXQSHEELSMEGIHQGQHPKIRMIQMTINSQGTPVXEL

SEQ ID NO: 14099 - protein, 38 aa, Artificial Sequence
  Non-cyclic GFR-binding peptide
  MOD_RES (2)..(4)..(38): Xaa is C or S
RXEXKNHQLFVQVEKHQGQHPKIRVKAMKVSREETPVX

SEQ ID NO: 14100 - protein, 45 aa, Artificial Sequence
  Non-cyclic GFR-binding peptide
  MOD_RES (2)..(4)..(41): Xaa is C or S
AXAXELHEELRVTAKKLKPKKRVYEIKRVQVPRHHVRSPQXKVSS

SEQ ID NO: 14101 - protein, 40 aa, Artificial Sequence
  Non-cyclic GFR-binding peptide
  MOD_RES (2)..(4): Xaa is C or S
  MOD_RES (17)..(18)..(19)..(20)..(21): Xaa is A or G
  MOD_RES (22)..(23)..(24)..(25): Xaa is A or G or absent
AXAXELHEELRSMEGIXXXXXXXXXMIQVTINSHHVRSPQ

SEQ ID NO: 14102 - protein, 35 aa, Artificial Sequence
  Non-cyclic GFR-binding peptide
  MOD_RES (35)..(35): Xaa is C or S
HDELTSMEGLFIPKKRVIEMIQVTINSLQVQTPRX

SEQ ID NO: 14103 - protein, 40 aa, Artificial Sequence
  Non-cyclic GFR-binding peptide
  MOD_RES (1)..(3)..(37): Xaa is C or S
XEXKNHQLFSMEGLHQGQHPKIRMIQMTINSEETPVXELG

SEQ ID NO: 14104 - protein, 38 aa, Artificial Sequence
  Non-cyclic GFR-binding peptide
  MOD_RES (2)..(36): Xaa is C or S
EXKNHQLFVQVEKHQGQHPKIRVKAMKVSREETPVXEL

SEQ ID NO: 14105 - protein, 43 aa, Artificial Sequence
  Non-cyclic GFR-binding peptide
  MOD_RES (1)..(3)..(37): Xaa is C or S
  MOD_RES (15)..(16)..(17)..(18)..(19): Xaa is A or G
  MOD_RES (20)..(21)..(22)..(23): Xaa is A or G or absent
XEXKNHQLFVTAKKXXXXXXXXXIKRMQVPREETPVXELGEDN

SEQ ID NO: 14106 - protein, 33 aa, Artificial Sequence
  Non-cyclic GFR-binding peptide
  MOD_RES (33)..(33): Xaa is C or S
  MOD_RES (11)..(12)..(13)..(14)..(15): Xaa is A or G
  MOD_RES (16)..(17)..(18)..(19): Xaa is A or G or absent
SHEELSMEGIXXXXXXXXXMIQMTINSQGTPVX

SEQ ID NO: 14107 - protein, 33 aa, Artificial Sequence
  Non-cyclic GFR-binding peptide
HDELTSMEGLFIPKKRVIEMIQVTINSLQVQTP

SEQ ID NO: 14108 - protein, 39 aa, Artificial Sequence
  Non-cyclic GFR-binding peptide
  MOD_RES (37)..(37): Xaa is C or S
  MOD_RES (13)..(14)..(15)..(16)..(17): Xaa is A or G
  MOD_RES (18)..(19)..(20)..(21): Xaa is A or G or absent
ALHDELTVQVEKXXXXXXXXXVKAVKVSRLQVQTPRXQV

SEQ ID NO: 14109 - protein, 38 aa, Artificial Sequence
  Non-cyclic GFR-binding peptide
  MOD_RES (36)..(36): Xaa is C or S
  MOD_RES (12)..(13)..(14)..(15)..(16): Xaa is A or G
  MOD_RES (17)..(18)..(19)..(20): Xaa is A or G or absent
LHDELTSMEGLXXXXXXXXXMIQVTINSLQVQTPRXQV

SEQ ID NO: 14110 - protein, 39 aa, Artificial Sequence
  Non-cyclic GFR-binding peptide
  MOD_RES (2)..(4)..(38): Xaa is C or S
RXEXKNHQLFVQVEKHQGQHPKIRVKAMKVSREETPVXE

SEQ ID NO: 14111 - protein, 40 aa, Artificial Sequence
  Non-cyclic GFR-binding peptide
  MOD_RES (2)..(39): Xaa is C or S
AXELHEELRSMEGILKPKKRVYEMIQVTINSHHVRSPQXK

SEQ ID NO: 14112 - protein, 36 aa, Artificial Sequence
  Non-cyclic GFR-binding peptide
  MOD_RES (1)..(3): Xaa is C or S
XEXQSHEELVTAKKHQGQHPKIRIKRMQVPRQGTPV

SEQ ID NO: 14113 - protein, 35 aa, Artificial Sequence
  Non-cyclic GFR-binding peptide
ELHEELRSMEGLLKPKKRVYEMIQVTINSHHVRSP

SEQ ID NO: 14114 - protein, 36 aa, Artificial Sequence
  Non-cyclic GFR-binding peptide
  MOD_RES (35)..(35): Xaa is C or S
  MOD_RES (11)..(12)..(13)..(14)..(15): Xaa is A or G
  MOD_RES (16)..(17)..(18)..(19): Xaa is A or G or absent
HDELTSMEGLXXXXXXXXXMIQVTINSLQVQTPRXQ

SEQ ID NO: 14115 - protein, 39 aa, Artificial Sequence
  Non-cyclic GFR-binding peptide
  MOD_RES (37)..(37): Xaa is C or S
  MOD_RES (13)..(14)..(15)..(16)..(17): Xaa is A or G
  MOD_RES (18)..(19)..(20)..(21): Xaa is A or G or absent
ELHEELRVTAKKXXXXXXXXXIKRVQVPRHHVRSPQXKV

SEQ ID NO: 14116 - protein, 39 aa, Artificial Sequence
  Non-cyclic GFR-binding peptide
  MOD_RES (1)..(35): Xaa is C or S
  MOD_RES (13)..(14)..(15)..(16)..(17): Xaa is A or G
  MOD_RES (18)..(19)..(20)..(21): Xaa is A or G or absent
XQSHEELVTAKKXXXXXXXXXIKRMQVPRQGTPVXELGE

SEQ ID NO: 14117 - protein, 44 aa, Artificial Sequence
  Non-cyclic GFR-binding peptide
  MOD_RES (2)..(4)..(38): Xaa is C or S
  MOD_RES (16)..(17)..(18)..(19)..(20): Xaa is A or G
  MOD_RES (21)..(22)..(23)..(24): Xaa is A or G or absent
RXEXQSHEELVQVEKXXXXXXXXXVKAMKVSRQGTPVXELGEDN

SEQ ID NO: 14118 - protein, 42 aa, Artificial Sequence
  Non-cyclic GFR-binding peptide
  MOD_RES (2)..(36): Xaa is C or S
  MOD_RES (14)..(15)..(16)..(17)..(18): Xaa is A or G
  MOD_RES (19)..(20)..(21)..(22): Xaa is A or G or absent
EXQSHEELVQVEKXXXXXXXXXVKAMKVSRQGTPVXELGEDN

SEQ ID NO: 14119 - protein, 32 aa, Artificial Sequence
  Non-cyclic GFR-binding peptide
SHEELVTAKKHQGQHPKIRIKRMQVPRQGTPV

SEQ ID NO: 14120 - protein, 44 aa, Artificial Sequence
  Non-cyclic GFR-binding peptide
  MOD_RES (2)..(4)..(41): Xaa is C or S
AXAXELHEELRVTAKKLKPKKRVYEIKRVQVPRHHVRSPQXKVS

SEQ ID NO: 14121 - protein, 36 aa, Artificial Sequence
  Non-cyclic GFR-binding peptide
  MOD_RES (1)..(35): Xaa is C or S
  MOD_RES (13)..(14)..(15)..(16)..(17): Xaa is A or G
  MOD_RES (18)..(19)..(20)..(21): Xaa is A or G or absent
XKNHQLFSMEGLXXXXXXXXXMIQMTINSEETPVXE

SEQ ID NO: 14122 - protein, 38 aa, Artificial Sequence
  Non-cyclic GFR-binding peptide
  MOD_RES (1)..(3)..(37): Xaa is C or S
  MOD_RES (15)..(16)..(17)..(18)..(19): Xaa is A or G
  MOD_RES (20)..(21)..(22)..(23): Xaa is A or G or absent
XEXKNHQLFSMEGLXXXXXXXXXMIQMTINSEETPVXE

SEQ ID NO: 14123 - protein, 36 aa, Artificial Sequence
  Non-cyclic GFR-binding peptide
  MOD_RES (13)..(14)..(15)..(16)..(17): Xaa is A or G
  MOD_RES (18)..(19)..(20)..(21): Xaa is A or G or absent
ELHEELRVTAKKXXXXXXXXXIKRVQVPRHHVRSPQ

SEQ ID NO: 14124 - protein, 33 aa, Artificial Sequence
  Non-cyclic GFR-binding peptide
  MOD_RES (11)..(12)..(13)..(14)..(15): Xaa is A or G
  MOD_RES (16)..(17)..(18)..(19): Xaa is A or G or absent
HDELTSMEGLXXXXXXXXXMIQVTINSLQVQTP

SEQ ID NO: 14125 - protein, 38 aa, Artificial Sequence
  Non-cyclic GFR-binding peptide
  MOD_RES (1)..(38): Xaa is C or S
XALHDELTSMEGLFIPKKRVIEMIQVTINSLQVQTPRX

SEQ ID NO: 14126 - protein, 42 aa, Artificial Sequence
  Non-cyclic GFR-binding peptide
  MOD_RES (1)..(3)..(40): Xaa is C or S
XKXALHDELTSMEGLFIPKKRVIEMIQVTINSLQVQTPRXQV

SEQ ID NO: 14127 - protein, 40 aa, Artificial Sequence
  Non-cyclic GFR-binding peptide
  MOD_RES (1)..(35): Xaa is C or S
XKNHQLFSMEGLHQGQHPKIRMIQMTINSEETPVXELGED

SEQ ID NO: 14128 - protein, 37 aa, Artificial Sequence
  Non-cyclic GFR-binding peptide
  MOD_RES (2)..(36): Xaa is C or S
  MOD_RES (14)..(15)..(16)..(17)..(18): Xaa is A or G
  MOD_RES (19)..(20)..(21)..(22): Xaa is A or G or absent
EXQSHEELVQVEKXXXXXXXXXVKAMKVSRQGTPVXE

SEQ ID NO: 14129 - protein, 42 aa, Artificial Sequence
  Non-cyclic GFR-binding peptide
  MOD_RES (2)..(4)..(41): Xaa is C or S
  MOD_RES (17)..(18)..(19)..(20)..(21): Xaa is A or G
  MOD_RES (22)..(23)..(24)..(25): Xaa is A or G or absent
AXAXELHEELRVTAKKXXXXXXXXXIKRVQVPRHHVRSPQXK

SEQ ID NO: 14130 - protein, 37 aa, Artificial Sequence
  Non-cyclic GFR-binding peptide
  MOD_RES (1)..(35): Xaa is C or S
XKNHQLFVQVEKHQGQHPKIRVKAMKVSREETPVXEL

SEQ ID NO: 14131 - protein, 40 aa, Artificial Sequence
  Non-cyclic GFR-binding peptide
  MOD_RES (2)..(4)..(38): Xaa is C or S
  MOD_RES (16)..(17)..(18)..(19)..(20): Xaa is A or G
  MOD_RES (21)..(22)..(23)..(24): Xaa is A or G or absent
RXEXQSHEELVQVEKXXXXXXXXXVKAMKVSRQGTPVXEL

SEQ ID NO: 14132 - protein, 37 aa, Artificial Sequence
  Non-cyclic GFR-binding peptide
  MOD_RES (33)..(33): Xaa is C or S
  MOD_RES (11)..(12)..(13)..(14)..(15): Xaa is A or G
  MOD_RES (16)..(17)..(18)..(19): Xaa is A or G or absent
NHQLFVQVEKXXXXXXXXXVKAMKVSREETPVXELGE

SEQ ID NO: 14133 - protein, 41 aa, Artificial Sequence
  Non-cyclic GFR-binding peptide
  MOD_RES (1)..(38): Xaa is C or S
XALHDELTVQVEKFIPKKRVIEVKAVKVSRLQVQTPRXQVN

SEQ ID NO: 14134 - protein, 39 aa, Artificial Sequence
  Non-cyclic GFR-binding peptide
  MOD_RES (33)..(33): Xaa is C or S
  MOD_RES (11)..(12)..(13)..(14)..(15): Xaa is A or G
  MOD_RES (16)..(17)..(18)..(19): Xaa is A or G or absent
NHQLFVTAKKXXXXXXXXXIKRMQVPREETPVXELGEDN

SEQ ID NO: 14135 - protein, 40 aa, Artificial Sequence
  Non-cyclic GFR-binding peptide
  MOD_RES (1)..(3)..(37): Xaa is C or S
XEXKNHQLFVQVEKHQGQHPKIRVKAMKVSREETPVXELG

SEQ ID NO: 14136 - protein, 39 aa, Artificial Sequence
  Non-cyclic GFR-binding peptide
  MOD_RES (1)..(35): Xaa is C or S
  MOD_RES (13)..(14)..(15)..(16)..(17): Xaa is A or G
  MOD_RES (18)..(19)..(20)..(21): Xaa is A or G or absent
XQSHEELVQVEKXXXXXXXXXVKAMKVSRQGTPVXELGE

SEQ ID NO: 14137 - protein, 43 aa, Artificial Sequence
  Non-cyclic GFR-binding peptide
  MOD_RES (2)..(4)..(38): Xaa is C or S
  MOD_RES (16)..(17)..(18)..(19)..(20): Xaa is A or G
  MOD_RES (21)..(22)..(23)..(24): Xaa is A or G or absent
RXEXKNHQLFSMEGLXXXXXXXXXMIQMTINSEETPVXELGED

SEQ ID NO: 14138 - protein, 35 aa, Artificial Sequence
  Non-cyclic GFR-binding peptide
  MOD_RES (1)..(35): Xaa is C or S
XQSHEELVTAKKHQGQHPKIRIKRMQVPRQGTPVX

SEQ ID NO: 14139 - protein, 38 aa, Artificial Sequence
  Non-cyclic GFR-binding peptide
  MOD_RES (2)..(2): Xaa is C or S
KXALHDELTVQVEKFIPKKRVIEVKAVKVSRLQVQTPR

SEQ ID NO: 14140 - protein, 40 aa, Artificial Sequence
  Non-cyclic GFR-binding peptide
  MOD_RES (2)..(39): Xaa is C or S
  MOD_RES (15)..(16)..(17)..(18)..(19): Xaa is A or G
  MOD_RES (20)..(21)..(22)..(23): Xaa is A or G or absent
KXALHDELTSMEGLXXXXXXXXXMIQVTINSLQVQTPRXQ

SEQ ID NO: 14141 - protein, 39 aa, Artificial Sequence
  Non-cyclic GFR-binding peptide
  MOD_RES (33)..(33): Xaa is C or S
  MOD_RES (11)..(12)..(13)..(14)..(15): Xaa is A or G
  MOD_RES (16)..(17)..(18)..(19): Xaa is A or G or absent
SHEELSMEGIXXXXXXXXXMIQMTINSQGTPVXELGEDN

SEQ ID NO: 14142 - protein, 40 aa, Artificial Sequence
  Non-cyclic GFR-binding peptide
  MOD_RES (2)..(4): Xaa is C or S
  MOD_RES (17)..(18)..(19)..(20)..(21): Xaa is A or G
  MOD_RES (22)..(23)..(24)..(25): Xaa is A or G or absent
EXKXALHDELTSMEGIXXXXXXXXXMIQVTINSLQVQTPR

SEQ ID NO: 14143 - protein, 32 aa, Artificial Sequence; identical to SEQ ID NO: 2208
  Non-cyclic GFR-binding peptide

SEQ ID NO: 14144 - protein, 38 aa, Artificial Sequence
  Non-cyclic GFR-binding peptide
  MOD_RES (1)..(3): Xaa is C or S
XAXELHEELRSMEGLLKPKKRVYEMIQVTINSHHVRSP

SEQ ID NO: 14145 - protein, 39 aa, Artificial Sequence
  Non-cyclic GFR-binding peptide
  MOD_RES (34)..(34): Xaa is C or S
  MOD_RES (12)..(13)..(14)..(15)..(16): Xaa is A or G
  MOD_RES (17)..(18)..(19)..(20): Xaa is A or G or absent
KNHQLFVTAKKXXXXXXXXXIKRMQVPREETPVXELGED

SEQ ID NO: 14146 - protein, 34 aa, Artificial Sequence
  Non-cyclic GFR-binding peptide
  MOD_RES (33)..(33): Xaa is C or S
NHQLFVQVEKHQGQHPKIRVKAMKVSREETPVXE

SEQ ID NO: 14147 - protein, 38 aa, Artificial Sequence
  Non-cyclic GFR-binding peptide
  MOD_RES (1)..(3): Xaa is C or S
  MOD_RES (16)..(17)..(18)..(19)..(20): Xaa is A or G
  MOD_RES (21)..(22)..(23)..(24): Xaa is A or G or absent
XKXALHDELTSMEGIXXXXXXXXXMIQVTINSLQVQTP

SEQ ID NO: 14148 - protein, 35 aa, Artificial Sequence
  Non-cyclic GFR-binding peptide
  MOD_RES (2)..(2): Xaa is C or S
  MOD_RES (14)..(15)..(16)..(17)..(18): Xaa is A or G
  MOD_RES (19)..(20)..(21)..(22): Xaa is A or G or absent
EXQSHEELVTAKKXXXXXXXXXIKRMQVPRQGTPV

SEQ ID NO: 14149 - protein, 36 aa, Artificial Sequence
  Non-cyclic GFR-binding peptide
ELHEELRVTAKKLKPKKRVYEIKRVQVPRHHVRSPQ

SEQ ID NO: 14150 - protein, 36 aa, Artificial Sequence
  Non-cyclic GFR-binding peptide
  MOD_RES (1)..(1): Xaa is C or S
XELHEELRVTAKKLKPKKRVYEIKRVQVPRHHVRSP

SEQ ID NO: 14151 - protein, 38 aa, Artificial Sequence
  Non-cyclic GFR-binding peptide
  MOD_RES (1)..(35): Xaa is C or S
  MOD_RES (13)..(14)..(15)..(16)..(17): Xaa is A or G
  MOD_RES (18)..(19)..(20)..(21): Xaa is A or G or absent
XKNHQLFVTAKKXXXXXXXXXIKRMQVPREETPVXELG

SEQ ID NO: 14152 - protein, 33 aa, Artificial Sequence
  Non-cyclic GFR-binding peptide
HEELRVTAKKLKPKKRVYEIKRVQVPRHHVRSP

SEQ ID NO: 14153 - protein, 35 aa, Artificial Sequence
  Non-cyclic GFR-binding peptide
  MOD_RES (33)..(33): Xaa is C or S
SHEELVQVEKHQGQHPKIRVKAMKVSRQGTPVXEL

SEQ ID NO: 14154 - protein, 32 aa, Artificial Sequence
  Non-cyclic GFR-binding peptide
  MOD_RES (11)..(12)..(13)..(14)..(15): Xaa is A or G
  MOD_RES (16)..(17)..(18)..(19): Xaa is A or G or absent
SHEELSMEGIXXXXXXXXXMIQMTINSQGTPV

SEQ ID NO: 14155 - protein, 34 aa, Artificial Sequence
  Non-cyclic GFR-binding peptide
  MOD_RES (34)..(34): Xaa is C or S
KNHQLFVTAKKHQGQHPKIRIKRMQVPREETPVX

SEQ ID NO: 14156 - protein, 35 aa, Artificial Sequence
  Non-cyclic GFR-binding peptide
  MOD_RES (1)..(1): Xaa is C or S
  MOD_RES (14)..(15)..(16)..(17)..(18): Xaa is A or G
  MOD_RES (19)..(20)..(21)..(22): Xaa is A or G or absent
XELHEELRVTAKKXXXXXXXXXIKRVQVPRHHVRS

SEQ ID NO: 14157 - protein, 36 aa, Artificial Sequence
  Non-cyclic GFR-binding peptide
ALHDELTSMEGLFIPKKRVIEMIQVTINSLQVQTPR

SEQ ID NO: 14158 - protein, 44 aa, Artificial Sequence
  Non-cyclic GFR-binding peptide
  MOD_RES (2)..(4)..(41): Xaa is C or S
EXKXALHDELTVQVEKFIPKKRVIEVKAVKVSRLQVQTPRXQVN

SEQ ID NO: 14159 - protein, 37 aa, Artificial Sequence
  Non-cyclic GFR-binding peptide
  MOD_RES (33)..(33): Xaa is C or S
  MOD_RES (11)..(12)..(13)..(14)..(15): Xaa is A or G
  MOD_RES (16)..(17)..(18)..(19): Xaa is A or G or absent
SHEELVTAKKXXXXXXXXXIKRMQVPRQGTPVXELGE

SEQ ID NO: 14160 - protein, 43 aa, Artificial Sequence
  Non-cyclic GFR-binding peptide
  MOD_RES (2)..(39): Xaa is C or S
  MOD_RES (15)..(16)..(17)..(18)..(19): Xaa is A or G
  MOD_RES (20)..(21)..(22)..(23): Xaa is A or G or absent
KXALHDELTSMEGIXXXXXXXXXMIQVTINSLQVQTPRXQVNR

SEQ ID NO: 14161 - protein, 36 aa, Artificial Sequence
  Non-cyclic GFR-binding peptide
  MOD_RES (1)..(35): Xaa is C or S
  MOD_RES (13)..(14)..(15)..(16)..(17): Xaa is A or G
  MOD_RES (18)..(19)..(20)..(21): Xaa is A or G or absent
XQSHEELVQVEKXXXXXXXXXVKAMKVSRQGTPVXE

SEQ ID NO: 14162 - protein, 44 aa, Artificial Sequence
  Non-cyclic GFR-binding peptide
  MOD_RES (2)..(4)..(41): Xaa is C or S
AXAXELHEELRSMEGLLKPKKRVYEMIQVTINSHHVRSPQXKVS

SEQ ID NO: 14163 - protein, 40 aa, Artificial Sequence
  Non-cyclic GFR-binding peptide
  MOD_RES (37)..(37): Xaa is C or S
ALHDELTVQVEKFIPKKRVIEVKAVKVSRLQVQTPRXQVN

SEQ ID NO: 14164 - protein, 38 aa, Artificial Sequence
  Non-cyclic GFR-binding peptide
  MOD_RES (36)..(36): Xaa is C or S
  MOD_RES (12)..(13)..(14)..(15)..(16): Xaa is A or G
  MOD_RES (17)..(18)..(19)..(20): Xaa is A or G or absent
LHDELTVQVEKXXXXXXXXXVKAVKVSRLQVQTPRXQV

SEQ ID NO: 14165 - protein, 36 aa, Artificial Sequence
  Non-cyclic GFR-binding peptide
  MOD_RES (1)..(3): Xaa is C or S
  MOD_RES (15)..(16)..(17)..(18)..(19): Xaa is A or G
  MOD_RES (20)..(21)..(22)..(23): Xaa is A or G or absent
XEXKNHQLFVQVEKXXXXXXXXXVKAMKVSREETPV

SEQ ID NO: 14166 - protein, 41 aa, Artificial Sequence
  Non-cyclic GFR-binding peptide
  MOD_RES (2)..(39): Xaa is C or S
AXELHEELRVTAKKLKPKKRVYEIKRVQVPRHHVRSPQXKV

SEQ ID NO: 14167 - protein, 36 aa, Artificial Sequence
  Non-cyclic GFR-binding peptide
  MOD_RES (35)..(35): Xaa is C or S
  MOD_RES (11)..(12)..(13)..(14)..(15): Xaa is A or G
  MOD_RES (16)..(17)..(18)..(19): Xaa is A or G or absent
HEELRSMEGIXXXXXXXXXMIQVTINSHHVRSPQXK

SEQ ID NO: 14168 - protein, 41 aa, Artificial Sequence
  Non-cyclic GFR-binding peptide
  MOD_RES (2)..(4)..(41): Xaa is C or S
AXAXELHEELRSMEGLLKPKKRVYEMIQVTINSHHVRSPQX

SEQ ID NO: 14169 - protein, 44 aa, Artificial Sequence
  Non-cyclic GFR-binding peptide
  MOD_RES (1)..(3)..(40): Xaa is C or S
  MOD_RES (16)..(17)..(18)..(19)..(20): Xaa is A or G
  MOD_RES (21)..(22)..(23)..(24): Xaa is A or G or absent
XAXELHEELRVTAKKXXXXXXXXXIKRVQVPRHHVRSPQXKVSS

SEQ ID NO: 14170 - protein, 39 aa, Artificial Sequence
  Non-cyclic GFR-binding peptide
  MOD_RES (2)..(36): Xaa is C or S
  MOD_RES (14)..(15)..(16)..(17)..(18): Xaa is A or G
  MOD_RES (19)..(20)..(21)..(22): Xaa is A or G or absent
EXQSHEELVTAKKXXXXXXXXXIKRMQVPRQGTPVXELG

SEQ ID NO: 14171 - protein, 38 aa, Artificial Sequence
  Non-cyclic GFR-binding peptide
  MOD_RES (33)..(33): Xaa is C or S
NHQLFVQVEKHQGQHPKIRVKAMKVSREETPVXELGED

SEQ ID NO: 14172 - protein, 39 aa, Artificial Sequence
  Non-cyclic GFR-binding peptide
  MOD_RES (33)..(33): Xaa is C or S
SHEELVTAKKHQGQHPKIRIKRMQVPRQGTPVXELGEDN

SEQ ID NO: 14173 - protein, 34 aa, Artificial Sequence
  Non-cyclic GFR-binding peptide
  MOD_RES (33)..(33): Xaa is C or S
SHEELVTAKKHQGQHPKIRIKRMQVPRQGTPVXE

SEQ ID NO: 14174 - protein, 44 aa, Artificial Sequence
  Non-cyclic GFR-binding peptide
  MOD_RES (2)..(4)..(41): Xaa is C or S
  MOD_RES (17)..(18)..(19)..(20)..(21): Xaa is A or G
  MOD_RES (22)..(23)..(24)..(25): Xaa is A or G or absent
AXAXELHEELRSMEGIXXXXXXXXXMIQVTINSHHVRSPQXKVS

SEQ ID NO: 14175 - protein, 35 aa, Artificial Sequence
  Non-cyclic GFR-binding peptide
  MOD_RES (33)..(33): Xaa is C or S
  MOD_RES (11)..(12)..(13)..(14)..(15): Xaa is A or G
  MOD_RES (16)..(17)..(18)..(19): Xaa is A or G or absent
SHEELVTAKKXXXXXXXXXIKRMQVPRQGTPVXEL

SEQ ID NO: 14176 - protein, 37 aa, Artificial Sequence
  Non-cyclic GFR-binding peptide
  MOD_RES (1)..(3): Xaa is C or S
XAXELHEELRSMEGILKPKKRVYEMIQVTINSHHVRS

SEQ ID NO: 14177 - protein, 36 aa, Artificial Sequence
  Non-cyclic GFR-binding peptide
  MOD_RES (2)..(36): Xaa is C or S
  MOD_RES (14)..(15)..(16)..(17)..(18): Xaa is A or G
  MOD_RES (19)..(20)..(21)..(22): Xaa is A or G or absent
EXKNHQLFVQVEKXXXXXXXXXVKAMKVSREETPVX

SEQ ID NO: 14178 - protein, 40 aa, Artificial Sequence
  Non-cyclic GFR-binding peptide
  MOD_RES (34)..(34): Xaa is C or S
KNHQLFSMEGLHQGQHPKIRMIQMTINSEETPVXELGEDN

SEQ ID NO: 14179 - protein, 37 aa, Artificial Sequence
  Non-cyclic GFR-binding peptide
  MOD_RES (33)..(33): Xaa is C or S
SHEELVQVEKHQGQHPKIRVKAMKVSRQGTPVXELGE

SEQ ID NO: 14180 - protein, 40 aa, Artificial Sequence
  Non-cyclic GFR-binding peptide
  MOD_RES (2)..(36): Xaa is C or S
EXQSHEELSMEGIHQGQHPKIRMIQMTINSQGTPVXELGE

SEQ ID NO: 14181 - protein, 41 aa, Artificial Sequence
  Non-cyclic GFR-binding peptide
  MOD_RES (2)..(36): Xaa is C or S
EXQSHEELVQVEKHQGQHPKIRVKAMKVSRQGTPVXELGED

SEQ ID NO: 14182 - protein, 41 aa, Artificial Sequence
  Non-cyclic GFR-binding peptide
  MOD_RES (1)..(38): Xaa is C or S
XALHDELTSMEGLFIPKKRVIEMIQVTINSLQVQTPRXQVN

SEQ ID NO: 14183 - protein, 43 aa, Artificial Sequence
  Non-cyclic GFR-binding peptide
  MOD_RES (1)..(3)..(40): Xaa is C or S
  MOD_RES (16)..(17)..(18)..(19)..(20): Xaa is A or G
  MOD_RES (21)..(22)..(23)..(24): Xaa is A or G or absent
XKXALHDELTSMEGIXXXXXXXXXMIQVTINSLQVQTPRXQVN

SEQ ID NO: 14184 - protein, 41 aa, Artificial Sequence
  Non-cyclic GFR-binding peptide
  MOD_RES (1)..(38): Xaa is C or S
  MOD_RES (14)..(15)..(16)..(17)..(18): Xaa is A or G
  MOD_RES (19)..(20)..(21)..(22): Xaa is A or G or absent
XALHDELTSMEGLXXXXXXXXXMIQVTINSLQVQTPRXQVN

SEQ ID NO: 14185 - protein, 43 aa, Artificial Sequence
  Non-cyclic GFR-binding peptide
  MOD_RES (2)..(4)..(38): Xaa is C or S
  MOD_RES (16)..(17)..(18)..(19)..(20): Xaa is A or G
  MOD_RES (21)..(22)..(23)..(24): Xaa is A or G or absent
RXEXQSHEELVQVEKXXXXXXXXXVKAMKVSRQGTPVXELGED

SEQ ID NO: 14186 - protein, 36 aa, Artificial Sequence
  Non-cyclic GFR-binding peptide
  MOD_RES (36)..(36): Xaa is C or S
  MOD_RES (12)..(13)..(14)..(15)..(16): Xaa is A or G
  MOD_RES (17)..(18)..(19)..(20): Xaa is A or G or absent
LHDELTVQVEKXXXXXXXXXVKAVKVSRLQVQTPRX

SEQ ID NO: 14187 - protein, 33 aa, Artificial Sequence
  Non-cyclic GFR-binding peptide
  MOD_RES (11)..(12)..(13)..(14)..(15): Xaa is A or G
  MOD_RES (16)..(17)..(18)..(19): Xaa is A or G or absent
HEELRSMEGLXXXXXXXXXMIQVTINSHHVRSP

SEQ ID NO: 14188 - protein, 38 aa, Artificial Sequence
  Non-cyclic GFR-binding peptide
  MOD_RES (34)..(34): Xaa is C or S
  MOD_RES (12)..(13)..(14)..(15)..(16): Xaa is A or G
  MOD_RES (17)..(18)..(19)..(20): Xaa is A or G or absent
KNHQLFVQVEKXXXXXXXXXVKAMKVSREETPVXELGE

SEQ ID NO: 14189 - protein, 36 aa, Artificial Sequence
  Non-cyclic GFR-binding peptide
  MOD_RES (1)..(1): Xaa is C or S
XALHDELTSMEGLFIPKKRVIEMIQVTINSLQVQTP

SEQ ID NO: 14190 - protein, 42 aa, Artificial Sequence
  Non-cyclic GFR-binding peptide
  MOD_RES (2)..(36): Xaa is C or S
EXQSHEELSMEGIHQGQHPKIRMIQMTINSQGTPVXELGEDN

SEQ ID NO: 14191 - protein, 40 aa, Artificial Sequence
  Non-cyclic GFR-binding peptide
  MOD_RES (36)..(36): Xaa is C or S
  MOD_RES (12)..(13)..(14)..(15)..(16): Xaa is A or G
  MOD_RES (17)..(18)..(19)..(20): Xaa is A or G or absent
LHDELTVQVEKXXXXXXXXXVKAVKVSRLQVQTPRXQVNR

SEQ ID NO: 14192 - protein, 39 aa, Artificial Sequence
  Non-cyclic GFR-binding peptide
  MOD_RES (1)..(3): Xaa is C or S
  MOD_RES (16)..(17)..(18)..(19)..(20): Xaa is A or G
  MOD_RES (21)..(22)..(23)..(24): Xaa is A or G or absent
XKXALHDELTSMEGLXXXXXXXXXMIQVTINSLQVQTPR

SEQ ID NO: 14193 - protein, 38 aa, Artificial Sequence
  Non-cyclic GFR-binding peptide
  MOD_RES (1)..(3): Xaa is C or S
XKXALHDELTSMEGLFIPKKRVIEMIQVTINSLQVQTP

SEQ ID NO: 14194 - protein, 39 aa, Artificial Sequence
  Non-cyclic GFR-binding peptide
  MOD_RES (1)..(3)..(37): Xaa is C or S
  MOD_RES (15)..(16)..(17)..(18)..(19): Xaa is A or G
  MOD_RES (20)..(21)..(22)..(23): Xaa is A or G or absent
XEXQSHEELVTAKKXXXXXXXXXIKRMQVPRQGTPVXEL

SEQ ID NO: 14195 - protein, 43 aa, Artificial Sequence
  Non-cyclic GFR-binding peptide
  MOD_RES (2)..(4)..(38): Xaa is C or S
  MOD_RES (16)..(17)..(18)..(19)..(20): Xaa is A or G
  MOD_RES (21)..(22)..(23)..(24): Xaa is A or G or absent
RXEXQSHEELVTAKKXXXXXXXXXIKRMQVPRQGTPVXELGED

SEQ ID NO: 14196 - protein, 40 aa, Artificial Sequence
  Non-cyclic GFR-binding peptide
  MOD_RES (1)..(3)..(40): Xaa is C or S
  MOD_RES (16)..(17)..(18)..(19)..(20): Xaa is A or G
  MOD_RES (21)..(22)..(23)..(24): Xaa is A or G or absent
XKXALHDELTSMEGIXXXXXXXXXMIQVTINSLQVQTPRX

SEQ ID NO: 14197 - protein, 38 aa, Artificial Sequence
  Non-cyclic GFR-binding peptide
  MOD_RES (33)..(33): Xaa is C or S
  MOD_RES (11)..(12)..(13)..(14)..(15): Xaa is A or G
  MOD_RES (16)..(17)..(18)..(19): Xaa is A or G or absent
SHEELVQVEKXXXXXXXXXVKAMKVSRQGTPVXELGED

SEQ ID NO: 14198 - protein, 36 aa, Artificial Sequence
  Non-cyclic GFR-binding peptide
  MOD_RES (1)..(35): Xaa is C or S
  MOD_RES (13)..(14)..(15)..(16)..(17): Xaa is A or G
  MOD_RES (18)..(19)..(20)..(21): Xaa is A or G or absent
XKNHQLFVTAKKXXXXXXXXXIKRMQVPREETPVXE

SEQ ID NO: 14199 - protein, 40 aa, Artificial Sequence
  Non-cyclic GFR-binding peptide
  MOD_RES (1)..(3)..(37): Xaa is C or S
XEXQSHEELSMEGIHQGQHPKIRMIQMTINSQGTPVXELG

SEQ ID NO: 14200 - protein, 33 aa, Artificial Sequence
  Non-cyclic GFR-binding peptide
  MOD_RES (12)..(13)..(14)..(15)..(16): Xaa is A or G
  MOD_RES (17)..(18)..(19)..(20): Xaa is A or G or absent
LHDELTSMEGLXXXXXXXXXMIQVTINSLQVQT

SEQ ID NO: 14201 - protein, 43 aa, Artificial Sequence
  Non-cyclic GFR-binding peptide
  MOD_RES (2)..(4)..(38): Xaa is C or S
RXEXQSHEELSMEGIHQGQHPKIRMIQMTINSQGTPVXELGED

SEQ ID NO: 14202 - protein, 40 aa, Artificial Sequence
  Non-cyclic GFR-binding peptide
  MOD_RES (34)..(34): Xaa is C or S
  MOD_RES (12)..(13)..(14)..(15)..(16): Xaa is A or G
  MOD_RES (17)..(18)..(19)..(20): Xaa is A or G or absent
QSHEELVTAKKXXXXXXXXXIKRMQVPRQGTPVXELGEDN

SEQ ID NO: 14203 - protein, 40 aa, Artificial Sequence
  Non-cyclic GFR-binding peptide
  MOD_RES (34)..(34): Xaa is C or S
  MOD_RES (12)..(13)..(14)..(15)..(16): Xaa is A or G
  MOD_RES (17)..(18)..(19)..(20): Xaa is A or G or absent
QSHEELSMEGIXXXXXXXXXMIQMTINSQGTPVXELGEDN

SEQ ID NO: 14204 - protein, 38 aa, Artificial Sequence
  Non-cyclic GFR-binding peptide
  MOD_RES (35)..(35): Xaa is C or S
HDELTSMEGIFIPKKRVIEMIQVTINSLQVQTPRXQVN

SEQ ID NO: 14205 - protein, 36 aa, Artificial Sequence
  Non-cyclic GFR-binding peptide
  MOD_RES (1)..(35): Xaa is C or S
  MOD_RES (13)..(14)..(15)..(16)..(17): Xaa is A or G
  MOD_RES (18)..(19)..(20)..(21): Xaa is A or G or absent
XQSHEELVTAKKXXXXXXXXXIKRMQVPRQGTPVXE

SEQ ID NO: 14206 - protein, 36 aa, Artificial Sequence
  Non-cyclic GFR-binding peptide
  MOD_RES (2)..(36): Xaa is C or S
  MOD_RES (14)..(15)..(16)..(17)..(18): Xaa is A or G
  MOD_RES (19)..(20)..(21)..(22): Xaa is A or G or absent
EXKNHQLFSMEGLXXXXXXXXXMIQMTINSEETPVX

SEQ ID NO: 14207 - protein, 35 aa, Artificial Sequence
  Non-cyclic GFR-binding peptide
  MOD_RES (1)..(1): Xaa is C or S
XELHEELRSMEGLLKPKKRVYEMIQVTINSHHVRS

SEQ ID NO: 14208 - protein, 41 aa, Artificial Sequence
  Non-cyclic GFR-binding peptide
  MOD_RES (1)..(3)..(37): Xaa is C or S
XEXQSHEELSMEGIHQGQHPKIRMIQMTINSQGTPVXELGE

SEQ ID NO: 14209 - protein, 38 aa, Artificial Sequence
  Non-cyclic GFR-binding peptide
  MOD_RES (2)..(4): Xaa is C or S
  MOD_RES (17)..(18)..(19)..(20)..(21): Xaa is A or G
  MOD_RES (22)..(23)..(24)..(25): Xaa is A or G or absent
EXKXALHDELTSMEGLXXXXXXXXXMIQVTINSLQVQT

SEQ ID NO: 14210 - protein, 39 aa, Artificial Sequence
  Non-cyclic GFR-binding peptide
  MOD_RES (35)..(35): Xaa is C or S
HDELTSMEGIFIPKKRVIEMIQVTINSLQVQTPRXQVNR

SEQ ID NO: 14211 - protein, 40 aa, Artificial Sequence
  Non-cyclic GFR-binding peptide
  MOD_RES (2)..(39): Xaa is C or S
KXALHDELTSMEGLFIPKKRVIEMIQVTINSLQVQTPRXQ

SEQ ID NO: 14212 - protein, 38 aa, Artificial Sequence
  Non-cyclic GFR-binding peptide
  MOD_RES (2)..(2): Xaa is C or S
AXELHEELRSMEGILKPKKRVYEMIQVTINSHHVRSPQ

SEQ ID NO: 14213 - protein, 38 aa, Artificial Sequence
  Non-cyclic GFR-binding peptide
  MOD_RES (1)..(3)..(37): Xaa is C or S
  MOD_RES (15)..(16)..(17)..(18)..(19): Xaa is A or G
  MOD_RES (20)..(21)..(22)..(23): Xaa is A or G or absent
XEXQSHEELSMEGIXXXXXXXXXMIQMTINSQGTPVXE

SEQ ID NO: 14214 - protein, 39 aa, Artificial Sequence
  Non-cyclic GFR-binding peptide
  MOD_RES (1)..(38): Xaa is C or S
  MOD_RES (14)..(15)..(16)..(17)..(18): Xaa is A or G
  MOD_RES (19)..(20)..(21)..(22): Xaa is A or G or absent
XALHDELTVQVEKXXXXXXXXXVKAVKVSRLQVQTPRXQ

SEQ ID NO: 14215 - protein, 39 aa, Artificial Sequence
  Non-cyclic GFR-binding peptide
  MOD_RES (35)..(35): Xaa is C or S
HEELRSMEGILKPKKRVYEMIQVTINSHHVRSPQXKVSS

SEQ ID NO: 14216 - protein, 40 aa, Artificial Sequence
  Non-cyclic GFR-binding peptide
  MOD_RES (36)..(36): Xaa is C or S
LHEELRSMEGLLKPKKRVYEMIQVTINSHHVRSPQXKVSS

SEQ ID NO: 14217 - protein, 40 aa, Artificial Sequence
  Non-cyclic GFR-binding peptide
  MOD_RES (1)..(3)..(40): Xaa is C or S
XKXALHDELTSMEGLFIPKKRVIEMIQVTINSLQVQTPRX

SEQ ID NO: 14218 - protein, 38 aa, Artificial Sequence
  Non-cyclic GFR-binding peptide
  MOD_RES (1)..(38): Xaa is C or S
  MOD_RES (14)..(15)..(16)..(17)..(18): Xaa is A or G
  MOD_RES (19)..(20)..(21)..(22): Xaa is A or G or absent
XALHDELTSMEGLXXXXXXXXXMIQVTINSLQVQTPRX

SEQ ID NO: 14219 - protein, 41 aa, Artificial Sequence
  Non-cyclic GFR-binding peptide
  MOD_RES (2)..(4)..(41): Xaa is C or S
EXKXALHDELTSMEGLFIPKKRVIEMIQVTINSLQVQTPRX

SEQ ID NO: 14220 - protein, 37 aa, Artificial Sequence
  Non-cyclic GFR-binding peptide
  MOD_RES (1)..(3)..(37): Xaa is C or S
  MOD_RES (15)..(16)..(17)..(18)..(19): Xaa is A or G
  MOD_RES (20)..(21)..(22)..(23): Xaa is A or G or absent
XEXQSHEELSMEGIXXXXXXXXXMIQMTINSQGTPVX

SEQ ID NO: 14221 - protein, 37 aa, Artificial Sequence
  Non-cyclic GFR-binding peptide
  MOD_RES (37)..(37): Xaa is C or S
ALHDELTSMEGLFIPKKRVIEMIQVTINSLQVQTPRX

SEQ ID NO: 14222 - protein, 33 aa, Artificial Sequence
  Non-cyclic GFR-binding peptide
  MOD_RES (12)..(13)..(14)..(15)..(16): Xaa is A or G
  MOD_RES (17)..(18)..(19)..(20): Xaa is A or G or absent
KNHQLFSMEGLXXXXXXXXXMIQMTINSEETPV

SEQ ID NO: 14223 - protein, 42 aa, Artificial Sequence
  Non-cyclic GFR-binding peptide
  MOD_RES (2)..(36): Xaa is C or S
EXKNHQLFVTAKKHQGQHPKIRIKRMQVPREETPVXELGEDN

SEQ ID NO: 14224 - protein, 39 aa, Artificial Sequence
  Non-cyclic GFR-binding peptide
  MOD_RES (2)..(4): Xaa is C or S
  MOD_RES (17)..(18)..(19)..(20)..(21): Xaa is A or G
  MOD_RES (22)..(23)..(24)..(25): Xaa is A or G or absent
AXAXELHEELRSMEGLXXXXXXXXXMIQVTINSHHVRSP

SEQ ID NO: 14225 - protein, 36 aa, Artificial Sequence
  Non-cyclic GFR-binding peptide
  MOD_RES (2)..(2): Xaa is C or S
AXELHEELRSMEGILKPKKRVYEMIQVTINSHHVRS

SEQ ID NO: 14226 - protein, 33 aa, Artificial Sequence
  Non-cyclic GFR-binding peptide
  MOD_RES (12)..(13)..(14)..(15)..(16): Xaa is A or G
  MOD_RES (17)..(18)..(19)..(20): Xaa is A or G or absent
LHEELRSMEGLXXXXXXXXXMIQVTINSHHVRS

SEQ ID NO: 14227 - protein, 38 aa, Artificial Sequence
  Non-cyclic GFR-binding peptide
  MOD_RES (37)..(37): Xaa is C or S
  MOD_RES (13)..(14)..(15)..(16)..(17): Xaa is A or G
  MOD_RES (18)..(19)..(20)..(21): Xaa is A or G or absent
ALHDELTSMEGLXXXXXXXXXMIQVTINSLQVQTPRXQ

SEQ ID NO: 14228 - protein, 41 aa, Artificial Sequence
  Non-cyclic GFR-binding peptide
  MOD_RES (1)..(3)..(40): Xaa is C or S
XKXALHDELTSMEGIFIPKKRVIEMIQVTINSLQVQTPRXQ

SEQ ID NO: 14229 - protein, 34 aa, Artificial Sequence
  Non-cyclic GFR-binding peptide
  MOD_RES (1)..(1): Xaa is C or S
XKNHQLFSMEGLHQGQHPKIRMIQMTINSEETPV

SEQ ID NO: 14230 - protein, 39 aa, Artificial Sequence
  Non-cyclic GFR-binding peptide
  MOD_RES (35)..(35): Xaa is C or S
HDELTVQVEKFIPKKRVIEVKAVKVSRLQVQTPRXQVNR

SEQ ID NO: 14231 - protein, 39 aa, Artificial Sequence
  Non-cyclic GFR-binding peptide
  MOD_RES (2)..(4): Xaa is C or S
EXKXALHDELTSMEGLFIPKKRVIEMIQVTINSLQVQTP

SEQ ID NO: 14232 - protein, 34 aa, Artificial Sequence
  Non-cyclic GFR-binding peptide
HDELTVQVEKFIPKKRVIEVKAVKVSRLQVQTPR

SEQ ID NO: 14233 - protein, 42 aa, Artificial Sequence
  Non-cyclic GFR-binding peptide
  MOD_RES (2)..(4)..(41): Xaa is C or S
  MOD_RES (17)..(18)..(19)..(20)..(21): Xaa is A or G
  MOD_RES (22)..(23)..(24)..(25): Xaa is A or G or absent
EXKXALHDELTVQVEKXXXXXXXXXVKAVKVSRLQVQTPRXQ

SEQ ID NO: 14234 - protein, 34 aa, Artificial Sequence
  Non-cyclic GFR-binding peptide
  MOD_RES (34)..(34): Xaa is C or S
KNHQLFSMEGLHQGQHPKIRMIQMTINSEETPVX

SEQ ID NO: 14235 - protein, 38 aa, Artificial Sequence
  Non-cyclic GFR-binding peptide
  MOD_RES (1)..(38): Xaa is C or S
XELHEELRSMEGILKPKKRVYEMIQVTINSHHVRSPQX

SEQ ID NO: 14236 - protein, 38 aa, Artificial Sequence
  Non-cyclic GFR-binding peptide
  MOD_RES (1)..(35): Xaa is C or S
XQSHEELSMEGIHQGQHPKIRMIQMTINSQGTPVXELG

SEQ ID NO: 14237 - protein, 39 aa, Artificial Sequence
  Non-cyclic GFR-binding peptide
  MOD_RES (2)..(39): Xaa is C or S
KXALHDELTVQVEKFIPKKRVIEVKAVKVSRLQVQTPRX

SEQ ID NO: 14238 - protein, 37 aa, Artificial Sequence
  Non-cyclic GFR-binding peptide
  MOD_RES (34)..(34): Xaa is C or S
QSHEELVQVEKHQGQHPKIRVKAMKVSRQGTPVXELG

SEQ ID NO: 14239 - protein, 34 aa, Artificial Sequence
  Non-cyclic GFR-binding peptide
  MOD_RES (33)..(33): Xaa is C or S
SHEELSMEGIHQGQHPKIRMIQMTINSQGTPVXE

SEQ ID NO: 14240 - protein, 42 aa, Artificial Sequence
  Non-cyclic GFR-binding peptide
  MOD_RES (2)..(4)..(38): Xaa is C or S
RXEXKNHQLFVTAKKHQGQHPKIRIKRMQVPREETPVXELGE

SEQ ID NO: 14241 - protein, 36 aa, Artificial Sequence
  Non-cyclic GFR-binding peptide
  MOD_RES (35)..(35): Xaa is C or S
  MOD_RES (11)..(12)..(13)..(14)..(15): Xaa is A or G
  MOD_RES (16)..(17)..(18)..(19): Xaa is A or G or absent
HEELRVTAKKXXXXXXXXXIKRVQVPRHHVRSPQXK

SEQ ID NO: 14242 - protein, 40 aa, Artificial Sequence
  Non-cyclic GFR-binding peptide
  MOD_RES (36)..(36): Xaa is C or S
  MOD_RES (12)..(13)..(14)..(15)..(16): Xaa is A or G
  MOD_RES (17)..(18)..(19)..(20): Xaa is A or G or absent
LHEELRSMEGIXXXXXXXXXMIQVTINSHHVRSPQXKVSS

SEQ ID NO: 14243 - protein, 39 aa, Artificial Sequence
  Non-cyclic GFR-binding peptide
  MOD_RES (33)..(33): Xaa is C or S
  MOD_RES (11)..(12)..(13)..(14)..(15): Xaa is A or G
  MOD_RES (16)..(17)..(18)..(19): Xaa is A or G or absent
NHQLFSMEGLXXXXXXXXXMIQMTINSEETPVXELGEDN

SEQ ID NO: 14244 - protein, 41 aa, Artificial Sequence
  Non-cyclic GFR-binding peptide
  MOD_RES (1)..(3)..(40): Xaa is C or S
XAXELHEELRSMEGILKPKKRVYEMIQVTINSHHVRSPQXK

SEQ ID NO: 14245 - protein, 37 aa, Artificial Sequence
  Non-cyclic GFR-binding peptide
  MOD_RES (1)..(35): Xaa is C or S
XQSHEELSMEGIHQGQHPKIRMIQMTINSQGTPVXEL

SEQ ID NO: 14246 - protein, 35 aa, Artificial Sequence
  Non-cyclic GFR-binding peptide
  MOD_RES (1)..(35): Xaa is C or S
XKNHQLFSMEGLHQGQHPKIRMIQMTINSEETPVX

SEQ ID NO: 14247 - protein, 35 aa, Artificial Sequence
  Non-cyclic GFR-binding peptide
  MOD_RES (33)..(33): Xaa is C or S
  MOD_RES (11)..(12)..(13)..(14)..(15): Xaa is A or G
  MOD_RES (16)..(17)..(18)..(19): Xaa is A or G or absent
SHEELSMEGIXXXXXXXXXMIQMTINSQGTPVXEL

SEQ ID NO: 14248 - protein, 39 aa, Artificial Sequence
  Non-cyclic GFR-binding peptide
  MOD_RES (2)..(36): Xaa is C or S
EXQSHEELSMEGIHQGQHPKIRMIQMTINSQGTPVXELG

SEQ ID NO: 14249 - protein, 38 aa, Artificial Sequence
  Non-cyclic GFR-binding peptide
  MOD_RES (1)..(3)..(37): Xaa is C or S
XEXKNHQLFVTAKKHQGQHPKIRIKRMQVPREETPVXE

SEQ ID NO: 14250 - protein, 43 aa, Artificial Sequence
  Non-cyclic GFR-binding peptide
  MOD_RES (2)..(39): Xaa is C or S
  MOD_RES (15)..(16)..(17)..(18)..(19): Xaa is A or G
  MOD_RES (20)..(21)..(22)..(23): Xaa is A or G or absent
AXELHEELRSMEGIXXXXXXXXXMIQVTINSHHVRSPQXKVSS

SEQ ID NO: 14251 - protein, 42 aa, Artificial Sequence
  Non-cyclic GFR-binding peptide
  MOD_RES (1)..(3)..(40): Xaa is C or S
  MOD_RES (16)..(17)..(18)..(19)..(20): Xaa is A or G
  MOD_RES (21)..(22)..(23)..(24): Xaa is A or G or absent
XKXALHDELTVQVEKXXXXXXXXXVKAVKVSRLQVQTPRXQV

SEQ ID NO: 14252 - protein, 42 aa, Artificial Sequence
  Non-cyclic GFR-binding peptide
  MOD_RES (1)..(38): Xaa is C or S
XALHDELTVQVEKFIPKKRVIEVKAVKVSRLQVQTPRXQVNR

SEQ ID NO: 14253 - protein, 45 aa, Artificial Sequence
  Non-cyclic GFR-binding peptide
  MOD_RES (2)..(4)..(41): Xaa is C or S
  MOD_RES (17)..(18)..(19)..(20)..(21): Xaa is A or G
  MOD_RES (22)..(23)..(24)..(25): Xaa is A or G or absent
EXKXALHDELTSMEGIXXXXXXXXXMIQVTINSLQVQTPRXQVNR

SEQ ID NO: 14254 - protein, 37 aa, Artificial Sequence
  Non-cyclic GFR-binding peptide
  MOD_RES (1)..(1): Xaa is C or S
  MOD_RES (14)..(15)..(16)..(17)..(18): Xaa is A or G
  MOD_RES (19)..(20)..(21)..(22): Xaa is A or G or absent
XELHEELRSMEGIXXXXXXXXXMIQVTINSHHVRSPQ

SEQ ID NO: 14255 - protein, 41 aa, Artificial Sequence
  Non-cyclic GFR-binding peptide
  MOD_RES (2)..(36): Xaa is C or S
  MOD_RES (14)..(15)..(16)..(17)..(18): Xaa is A or G
  MOD_RES (19)..(20)..(21)..(22): Xaa is A or G or absent
EXKNHQLFSMEGLXXXXXXXXXMIQMTINSEETPVXELGED

SEQ ID NO: 14256 - protein, 42 aa, Artificial Sequence
  Non-cyclic GFR-binding peptide
  MOD_RES (2)..(4)..(38): Xaa is C or S
RXEXKNHQLFSMEGLHQGQHPKIRMIQMTINSEETPVXELGE

SEQ ID NO: 14257 - protein, 39 aa, Artificial Sequence
  Non-cyclic GFR-binding peptide
  MOD_RES (37)..(37): Xaa is C or S
ELHEELRSMEGLLKPKKRVYEMIQVTINSHHVRSPQXKV

SEQ ID NO: 14258 - protein, 35 aa, Artificial Sequence
  Non-cyclic GFR-binding peptide
  MOD_RES (13)..(14)..(15)..(16)..(17): Xaa is A or G
  MOD_RES (18)..(19)..(20)..(21): Xaa is A or G or absent
ELHEELRVTAKKXXXXXXXXXIKRVQVPRHHVRSP

SEQ ID NO: 14259 - protein, 39 aa, Artificial Sequence
  Non-cyclic GFR-binding peptide
  MOD_RES (1)..(35): Xaa is C or S
  MOD_RES (13)..(14)..(15)..(16)..(17): Xaa is A or G
  MOD_RES (18)..(19)..(20)..(21): Xaa is A or G or absent
XKNHQLFVTAKKXXXXXXXXXIKRMQVPREETPVXELGE

SEQ ID NO: 14260 - protein, 36 aa, Artificial Sequence
  Non-cyclic GFR-binding peptide
  MOD_RES (34)..(34): Xaa is C or S
KNHQLFVTAKKHQGQHPKIRIKRMQVPREETPVXEL

SEQ ID NO: 14261 - protein, 34 aa, Artificial Sequence
  Non-cyclic GFR-binding peptide
HDELTSMEGLFIPKKRVIEMIQVTINSLQVQTPR

SEQ ID NO: 14262 - protein, 42 aa, Artificial Sequence
  Non-cyclic GFR-binding peptide
  MOD_RES (2)..(36): Xaa is C or S
  MOD_RES (14)..(15)..(16)..(17)..(18): Xaa is A or G
  MOD_RES (19)..(20)..(21)..(22): Xaa is A or G or absent
EXQSHEELVTAKKXXXXXXXXXIKRMQVPRQGTPVXELGEDN

SEQ ID NO: 14263 - protein, 36 aa, Artificial Sequence
  Non-cyclic GFR-binding peptide
  MOD_RES (2)..(36): Xaa is C or S
EXQSHEELVTAKKHQGQHPKIRIKRMQVPRQGTPVX

SEQ ID NO: 14264 - protein, 40 aa, Artificial Sequence
  Non-cyclic GFR-binding peptide
  MOD_RES (37)..(37): Xaa is C or S
ALHDELTSMEGIFIPKKRVIEMIQVTINSLQVQTPRXQVN

SEQ ID NO: 14265 - protein, 42 aa, Artificial Sequence
  Non-cyclic GFR-binding peptide
  MOD_RES (2)..(4)..(41): Xaa is C or S
EXKXALHDELTSMEGLFIPKKRVIEMIQVTINSLQVQTPRXQ

SEQ ID NO: 14266 - protein, 35 aa, Artificial Sequence
  Non-cyclic GFR-binding peptide
  MOD_RES (1)..(1): Xaa is C or S
XALHDELTSMEGIFIPKKRVIEMIQVTINSLQVQT

SEQ ID NO: 14267 - protein, 38 aa, Artificial Sequence
  Non-cyclic GFR-binding peptide
  MOD_RES (34)..(34): Xaa is C or S
KNHQLFVTAKKHQGQHPKIRIKRMQVPREETPVXELGE

SEQ ID NO: 14268 - protein, 35 aa, Artificial Sequence
  Non-cyclic GFR-binding peptide
  MOD_RES (2)..(2): Xaa is C or S
EXQSHEELVQVEKHQGQHPKIRVKAMKVSRQGTPV

SEQ ID NO: 14269 - protein, 39 aa, Artificial Sequence
  Non-cyclic GFR-binding peptide
  MOD_RES (2)..(4): Xaa is C or S
  MOD_RES (17)..(18)..(19)..(20)..(21): Xaa is A or G
  MOD_RES (22)..(23)..(24)..(25): Xaa is A or G or absent
EXKXALHDELTVQVEKXXXXXXXXXVKAVKVSRLQVQTP

SEQ ID NO: 14270 - protein, 44 aa, Artificial Sequence
  Non-cyclic GFR-binding peptide
  MOD_RES (2)..(4)..(41): Xaa is C or S
  MOD_RES (17)..(18)..(19)..(20)..(21): Xaa is A or G
  MOD_RES (22)..(23)..(24)..(25): Xaa is A or G or absent
EXKXALHDELTSMEGLXXXXXXXXXMIQVTINSLQVQTPRXQVN

SEQ ID NO: 14271 - protein, 37 aa, Artificial Sequence
  Non-cyclic GFR-binding peptide
  MOD_RES (33)..(33): Xaa is C or S
  MOD_RES (11)..(12)..(13)..(14)..(15): Xaa is A or G
  MOD_RES (16)..(17)..(18)..(19): Xaa is A or G or absent
NHQLFVTAKKXXXXXXXXXIKRMQVPREETPVXELGE

SEQ ID NO: 14272 - protein, 39 aa, Artificial Sequence
  Non-cyclic GFR-binding peptide
  MOD_RES (2)..(4)..(38): Xaa is C or S
  MOD_RES (16)..(17)..(18)..(19)..(20): Xaa is A or G
  MOD_RES (21)..(22)..(23)..(24): Xaa is A or G or absent
RXEXKNHQLFVQVEKXXXXXXXXXVKAMKVSREETPVXE

SEQ ID NO: 14273 - protein, 40 aa, Artificial Sequence
  Non-cyclic GFR-binding peptide
  MOD_RES (34)..(34): Xaa is C or S
KNHQLFVQVEKHQGQHPKIRVKAMKVSREETPVXELGEDN

SEQ ID NO: 14274 - protein, 35 aa, Artificial Sequence
  Non-cyclic GFR-binding peptide
  MOD_RES (34)..(34): Xaa is C or S
KNHQLFVTAKKHQGQHPKIRIKRMQVPREETPVXE

SEQ ID NO: 14275 - protein, 41 aa, Artificial Sequence
  Non-cyclic GFR-binding peptide
  MOD_RES (2)..(39): Xaa is C or S
  MOD_RES (15)..(16)..(17)..(18)..(19): Xaa is A or G
  MOD_RES (20)..(21)..(22)..(23): Xaa is A or G or absent
KXALHDELTSMEGLXXXXXXXXXMIQVTINSLQVQTPRXQV

SEQ ID NO: 14276 - protein, 38 aa, Artificial Sequence
  Non-cyclic GFR-binding peptide
  MOD_RES (1)..(35): Xaa is C or S
XKNHQLFVQVEKHQGQHPKIRVKAMKVSREETPVXELG

SEQ ID NO: 14277 - protein, 38 aa, Artificial Sequence
  Non-cyclic GFR-binding peptide
  MOD_RES (35)..(35): Xaa is C or S
  MOD_RES (11)..(12)..(13)..(14)..(15): Xaa is A or G
  MOD_RES (16)..(17)..(18)..(19): Xaa is A or G or absent
HEELRSMEGIXXXXXXXXXMIQVTINSHHVRSPQXKVS

SEQ ID NO: 14278 - protein, 35 aa, Artificial Sequence
  Non-cyclic GFR-binding peptide
  MOD_RES (35)..(35): Xaa is C or S
HDELTVQVEKFIPKKRVIEVKAVKVSRLQVQTPRX

SEQ ID NO: 14279 - protein, 37 aa, Artificial Sequence
  Non-cyclic GFR-binding peptide
  MOD_RES (2)..(2): Xaa is C or S
  MOD_RES (15)..(16)..(17)..(18)..(19): Xaa is A or G
  MOD_RES (20)..(21)..(22)..(23): Xaa is A or G or absent
AXELHEELRSMEGIXXXXXXXXXMIQVTINSHHVRSP

SEQ ID NO: 14280 - protein, 39 aa, Artificial Sequence
  Non-cyclic GFR-binding peptide
  MOD_RES (33)..(33): Xaa is C or S
  MOD_RES (11)..(12)..(13)..(14)..(15): Xaa is A or G
  MOD_RES (16)..(17)..(18)..(19): Xaa is A or G or absent
SHEELVTAKKXXXXXXXXXIKRMQVPRQGTPVXELGEDN

SEQ ID NO: 14281 - protein, 36 aa, Artificial Sequence
  Non-cyclic GFR-binding peptide
  MOD_RES (2)..(36): Xaa is C or S
EXQSHEELVQVEKHQGQHPKIRVKAMKVSRQGTPVX

SEQ ID NO: 14282 - protein, 35 aa, Artificial Sequence
  Non-cyclic GFR-binding peptide
  MOD_RES (34)..(34): Xaa is C or S
QSHEELVTAKKHQGQHPKIRIKRMQVPRQGTPVXE

SEQ ID NO: 14283 - protein, 38 aa, Artificial Sequence
  Non-cyclic GFR-binding peptide
  MOD_RES (34)..(34): Xaa is C or S
  MOD_RES (12)..(13)..(14)..(15)..(16): Xaa is A or G
  MOD_RES (17)..(18)..(19)..(20): Xaa is A or G or absent
KNHQLFSMEGLXXXXXXXXXMIQMTINSEETPVXELGE

SEQ ID NO: 14284 - protein, 36 aa, Artificial Sequence
  Non-cyclic GFR-binding peptide
  MOD_RES (2)..(2): Xaa is C or S
AXELHEELRSMEGLLKPKKRVYEMIQVTINSHHVRS

SEQ ID NO: 14285 - protein, 41 aa, Artificial Sequence
  Non-cyclic GFR-binding peptide
  MOD_RES (37)..(37): Xaa is C or S
  MOD_RES (13)..(14)..(15)..(16)..(17): Xaa is A or G
  MOD_RES (18)..(19)..(20)..(21): Xaa is A or G or absent
ELHEELRSMEGLXXXXXXXXXMIQVTINSHHVRSPQXKVSS

SEQ ID NO: 14286 - protein, 39 aa, Artificial Sequence
  Non-cyclic GFR-binding peptide
  MOD_RES (37)..(37): Xaa is C or S
  MOD_RES (13)..(14)..(15)..(16)..(17): Xaa is A or G
  MOD_RES (18)..(19)..(20)..(21): Xaa is A or G or absent
ALHDELTSMEGLXXXXXXXXXMIQVTINSLQVQTPRXQV

SEQ ID NO: 14287 - protein, 38 aa, Artificial Sequence
  Non-cyclic GFR-binding peptide
  MOD_RES (36)..(36): Xaa is C or S
  MOD_RES (12)..(13)..(14)..(15)..(16): Xaa is A or G
  MOD_RES (17)..(18)..(19)..(20): Xaa is A or G or absent
LHEELRSMEGLXXXXXXXXXMIQVTINSHHVRSPQXKV

SEQ ID NO: 14288 - protein, 38 aa, Artificial Sequence
  Non-cyclic GFR-binding peptide
  MOD_RES (37)..(37): Xaa is C or S
  MOD_RES (13)..(14)..(15)..(16)..(17): Xaa is A or G
  MOD_RES (18)..(19)..(20)..(21): Xaa is A or G or absent
ALHDELTSMEGIXXXXXXXXXMIQVTINSLQVQTPRXQ

SEQ ID NO: 14289 - protein, 35 aa, Artificial Sequence
  Non-cyclic GFR-binding peptide
  MOD_RES (33)..(33): Xaa is C or S
SHEELVTAKKHQGQHPKIRIKRMQVPRQGTPVXEL

SEQ ID NO: 14290 - protein, 41 aa, Artificial Sequence
  Non-cyclic GFR-binding peptide
  MOD_RES (37)..(37): Xaa is C or S
ALHDELTSMEGIFIPKKRVIEMIQVTINSLQVQTPRXQVNR

SEQ ID NO: 14291 - protein, 32 aa, Artificial Sequence
  Non-cyclic GFR-binding peptide
  MOD_RES (11)..(12)..(13)..(14)..(15): Xaa is A or G
  MOD_RES (16)..(17)..(18)..(19): Xaa is A or G or absent
HEELRVTAKKXXXXXXXXXIKRVQVPRHHVRS

SEQ ID NO: 14292 - protein, 36 aa, Artificial Sequence
  Non-cyclic GFR-binding peptide
  MOD_RES (36)..(36): Xaa is C or S
LHDELTVQVEKFIPKKRVIEVKAVKVSRLQVQTPRX

SEQ ID NO: 14293 - protein, 36 aa, Artificial Sequence
  Non-cyclic GFR-binding peptide
  MOD_RES (2)..(2): Xaa is C or S
  MOD_RES (15)..(16)..(17)..(18)..(19): Xaa is A or G
  MOD_RES (20)..(21)..(22)..(23): Xaa is A or G or absent
AXELHEELRSMEGIXXXXXXXXXMIQVTINSHHVRS

SEQ ID NO: 14294 - protein, 44 aa, Artificial Sequence
  Non-cyclic GFR-binding peptide
  MOD_RES (2)..(4)..(41): Xaa is C or S
  MOD_RES (17)..(18)..(19)..(20)..(21): Xaa is A or G
  MOD_RES (22)..(23)..(24)..(25): Xaa is A or G or absent
AXAXELHEELRVTAKKXXXXXXXXXIKRVQVPRHHVRSPQXKVS

SEQ ID NO: 14295 - protein, 39 aa, Artificial Sequence
  Non-cyclic GFR-binding peptide
  MOD_RES (2)..(4)..(38): Xaa is C or S
  MOD_RES (16)..(17)..(18)..(19)..(20): Xaa is A or G
  MOD_RES (21)..(22)..(23)..(24): Xaa is A or G or absent
RXEXQSHEELVTAKKXXXXXXXXXIKRMQVPRQGTPVXE

SEQ ID NO: 14296 - protein, 42 aa, Artificial Sequence
  Non-cyclic GFR-binding peptide
  MOD_RES (1)..(3)..(40): Xaa is C or S
XAXELHEELRSMEGLLKPKKRVYEMIQVTINSHHVRSPQXKV

SEQ ID NO: 14297 - protein, 34 aa, Artificial Sequence
  Non-cyclic GFR-binding peptide
  MOD_RES (33)..(33): Xaa is C or S
  MOD_RES (11)..(12)..(13)..(14)..(15): Xaa is A or G
  MOD_RES (16)..(17)..(18)..(19): Xaa is A or G or absent
NHQLFVQVEKXXXXXXXXXVKAMKVSREETPVXE

SEQ ID NO: 14298 - protein, 43 aa, Artificial Sequence
  Non-cyclic GFR-binding peptide
  MOD_RES (2)..(4)..(41): Xaa is C or S
  MOD_RES (17)..(18)..(19)..(20)..(21): Xaa is A or G
  MOD_RES (22)..(23)..(24)..(25): Xaa is A or G or absent
AXAXELHEELRVTAKKXXXXXXXXXIKRVQVPRHHVRSPQXKV

SEQ ID NO: 14299 - protein, 36 aa, Artificial Sequence
  Non-cyclic GFR-binding peptide
  MOD_RES (35)..(35): Xaa is C or S
HDELTSMEGIFIPKKRVIEMIQVTINSLQVQTPRXQ

SEQ ID NO: 14300 - protein, 40 aa, Artificial Sequence
  Non-cyclic GFR-binding peptide
  MOD_RES (2)..(36): Xaa is C or S
  MOD_RES (14)..(15)..(16)..(17)..(18): Xaa is A or G
  MOD_RES (19)..(20)..(21)..(22): Xaa is A or G or absent
EXKNHQLFVTAKKXXXXXXXXXIKRMQVPREETPVXELGE

SEQ ID NO: 14301 - protein, 35 aa, Artificial Sequence
  Non-cyclic GFR-binding peptide
  MOD_RES (2)..(2): Xaa is C or S
  MOD_RES (14)..(15)..(16)..(17)..(18): Xaa is A or G
  MOD_RES (19)..(20)..(21)..(22): Xaa is A or G or absent
EXKNHQLFVQVEKXXXXXXXXXVKAMKVSREETPV

SEQ ID NO: 14302 - protein, 40 aa, Artificial Sequence
  Non-cyclic GFR-binding peptide
  MOD_RES (2)..(36): Xaa is C or S
  MOD_RES (14)..(15)..(16)..(17)..(18): Xaa is A or G
  MOD_RES (19)..(20)..(21)..(22): Xaa is A or G or absent
EXQSHEELVQVEKXXXXXXXXXVKAMKVSRQGTPVXELGE

SEQ ID NO: 14303 - protein, 39 aa, Artificial Sequence
  Non-cyclic GFR-binding peptide
  MOD_RES (1)..(3): Xaa is C or S
  MOD_RES (16)..(17)..(18)..(19)..(20): Xaa is A or G
  MOD_RES (21)..(22)..(23)..(24): Xaa is A or G or absent
XKXALHDELTVQVEKXXXXXXXXXVKAVKVSRLQVQTPR

SEQ ID NO: 14304 - protein, 36 aa, Artificial Sequence
  Non-cyclic GFR-binding peptide
  MOD_RES (1)..(35): Xaa is C or S
  MOD_RES (13)..(14)..(15)..(16)..(17): Xaa is A or G
  MOD_RES (18)..(19)..(20)..(21): Xaa is A or G or absent
XKNHQLFVQVEKXXXXXXXXXVKAMKVSREETPVXE

SEQ ID NO: 14305 - protein, 39 aa, Artificial Sequence
  Non-cyclic GFR-binding peptide
  MOD_RES (34)..(34): Xaa is C or S
QSHEELVQVEKHQGQHPKIRVKAMKVSRQGTPVXELGED

SEQ ID NO: 14306 - protein, 38 aa, Artificial Sequence
  Non-cyclic GFR-binding peptide
  MOD_RES (2)..(4)..(38): Xaa is C or S
RXEXKNHQLFSMEGLHQGQHPKIRMIQMTINSEETPVX

SEQ ID NO: 14307 - protein, 34 aa, Artificial Sequence
  Non-cyclic GFR-binding peptide
  MOD_RES (34)..(34): Xaa is C or S
  MOD_RES (12)..(13)..(14)..(15)..(16): Xaa is A or G
  MOD_RES (17)..(18)..(19)..(20): Xaa is A or G or absent
KNHQLFVTAKKXXXXXXXXXIKRMQVPREETPVX

SEQ ID NO: 14308 - protein, 35 aa, Artificial Sequence
  Non-cyclic GFR-binding peptide
  MOD_RES (12)..(13)..(14)..(15)..(16): Xaa is A or G
  MOD_RES (17)..(18)..(19)..(20): Xaa is A or G or absent
LHDELTVQVEKXXXXXXXXXVKAVKVSRLQVQTPR

SEQ ID NO: 14309 - protein, 40 aa, Artificial Sequence
  Non-cyclic GFR-binding peptide
  MOD_RES (2)..(39): Xaa is C or S
  MOD_RES (15)..(16)..(17)..(18)..(19): Xaa is A or G
  MOD_RES (20)..(21)..(22)..(23): Xaa is A or G or absent
AXELHEELRSMEGLXXXXXXXXXMIQVTINSHHVRSPQXK

SEQ ID NO: 14310 - protein, 44 aa, Artificial Sequence
  Non-cyclic GFR-binding peptide
  MOD_RES (2)..(4)..(38): Xaa is C or S
RXEXKNHQLFVQVEKHQGQHPKIRVKAMKVSREETPVXELGEDN

SEQ ID NO: 14311 - protein, 36 aa, Artificial Sequence
  Non-cyclic GFR-binding peptide
  MOD_RES (36)..(36): Xaa is C or S
LHEELRVTAKKLKPKKRVYEIKRVQVPRHHVRSPQX

SEQ ID NO: 14312 - protein, 39 aa, Artificial Sequence
  Non-cyclic GFR-binding peptide
  MOD_RES (2)..(36): Xaa is C or S
EXKNHQLFSMEGLHQGQHPKIRMIQMTINSEETPVXELG

SEQ ID NO: 14313 - protein, 43 aa, Artificial Sequence
  Non-cyclic GFR-binding peptide
  MOD_RES (2)..(4)..(41): Xaa is C or S
EXKXALHDELTSMEGIFIPKKRVIEMIQVTINSLQVQTPRXQV

SEQ ID NO: 14314 - protein, 36 aa, Artificial Sequence
  Non-cyclic GFR-binding peptide
  MOD_RES (1)..(35): Xaa is C or S
XQSHEELSMEGIHQGQHPKIRMIQMTINSQGTPVXE

SEQ ID NO: 14315 - protein, 42 aa, Artificial Sequence
  Non-cyclic GFR-binding peptide
  MOD_RES (2)..(4)..(38): Xaa is C or S
RXEXQSHEELSMEGIHQGQHPKIRMIQMTINSQGTPVXELGE

SEQ ID NO: 14316 - protein, 41 aa, Artificial Sequence
  Non-cyclic GFR-binding peptide
  MOD_RES (1)..(38): Xaa is C or S
  MOD_RES (14)..(15)..(16)..(17)..(18): Xaa is A or G
  MOD_RES (19)..(20)..(21)..(22): Xaa is A or G or absent
XELHEELRSMEGIXXXXXXXXXMIQVTINSHHVRSPQXKVS

SEQ ID NO: 14317 - protein, 40 aa, Artificial Sequence
  Non-cyclic GFR-binding peptide
  MOD_RES (2)..(36): Xaa is C or S
  MOD_RES (14)..(15)..(16)..(17)..(18): Xaa is A or G
  MOD_RES (19)..(20)..(21)..(22): Xaa is A or G or absent
EXKNHQLFSMEGLXXXXXXXXXMIQMTINSEETPVXELGE

SEQ ID NO: 14318 - protein, 44 aa, Artificial Sequence
  Non-cyclic GFR-binding peptide
  MOD_RES (2)..(4)..(38): Xaa is C or S
RXEXKNHQLFVTAKKHQGQHPKIRIKRMQVPREETPVXELGEDN

SEQ ID NO: 14319 - protein, 37 aa, Artificial Sequence
  Non-cyclic GFR-binding peptide
  MOD_RES (2)..(2): Xaa is C or S
KXALHDELTSMEGLFIPKKRVIEMIQVTINSLQVQTP

SEQ ID NO: 14320 - protein, 38 aa, Artificial Sequence
  Non-cyclic GFR-binding peptide
  MOD_RES (2)..(36): Xaa is C or S
  MOD_RES (14)..(15)..(16)..(17)..(18): Xaa is A or G
  MOD_RES (19)..(20)..(21)..(22): Xaa is A or G or absent
EXQSHEELVQVEKXXXXXXXXXVKAMKVSRQGTPVXEL

SEQ ID NO: 14321 - protein, 43 aa, Artificial Sequence
  Non-cyclic GFR-binding peptide
  MOD_RES (1)..(3)..(40): Xaa is C or S
  MOD_RES (16)..(17)..(18)..(19)..(20): Xaa is A or G
  MOD_RES (21)..(22)..(23)..(24): Xaa is A or G or absent
XKXALHDELTVQVEKXXXXXXXXXVKAVKVSRLQVQTPRXQVN

SEQ ID NO: 14322 - protein, 38 aa, Artificial Sequence
  Non-cyclic GFR-binding peptide
  MOD_RES (1)..(35): Xaa is C or S
  MOD_RES (13)..(14)..(15)..(16)..(17): Xaa is A or G
  MOD_RES (18)..(19)..(20)..(21): Xaa is A or G or absent
XKNHQLFVQVEKXXXXXXXXXVKAMKVSREETPVXELG

SEQ ID NO: 14323 - protein, 34 aa, Artificial Sequence
  Non-cyclic GFR-binding peptide
  MOD_RES (33)..(33): Xaa is C or S
SHEELVQVEKHQGQHPKIRVKAMKVSRQGTPVXE

SEQ ID NO: 14324 - protein, 39 aa, Artificial Sequence
  Non-cyclic GFR-binding peptide
  MOD_RES (2)..(39): Xaa is C or S
KXALHDELTSMEGLFIPKKRVIEMIQVTINSLQVQTPRX

SEQ ID NO: 14325 - protein, 38 aa, Artificial Sequence
  Non-cyclic GFR-binding peptide
  MOD_RES (35)..(35): Xaa is C or S
  MOD_RES (11)..(12)..(13)..(14)..(15): Xaa is A or G
  MOD_RES (16)..(17)..(18)..(19): Xaa is A or G or absent
HDELTSMEGLXXXXXXXXXMIQVTINSLQVQTPRXQVN

SEQ ID NO: 14326 - protein, 34 aa, Artificial Sequence
  Non-cyclic GFR-binding peptide
  MOD_RES (13)..(14)..(15)..(16)..(17): Xaa is A or G
  MOD_RES (18)..(19)..(20)..(21): Xaa is A or G or absent
ALHDELTSMEGIXXXXXXXXXMIQVTINSLQVQT

SEQ ID NO: 14327 - protein, 42 aa, Artificial Sequence
  Non-cyclic GFR-binding peptide
  MOD_RES (1)..(3)..(37): Xaa is C or S
  MOD_RES (15)..(16)..(17)..(18)..(19): Xaa is A or G
  MOD_RES (20)..(21)..(22)..(23): Xaa is A or G or absent
XEXKNHQLFVQVEKXXXXXXXXXVKAMKVSREETPVXELGED

SEQ ID NO: 14328 - protein, 38 aa, Artificial Sequence
  Non-cyclic GFR-binding peptide
  MOD_RES (34)..(34): Xaa is C or S
QSHEELVQVEKHQGQHPKIRVKAMKVSRQGTPVXELGE

SEQ ID NO: 14329 - protein, 42 aa, Artificial Sequence
  Non-cyclic GFR-binding peptide
  MOD_RES (1)..(3)..(40): Xaa is C or S
  MOD_RES (16)..(17)..(18)..(19)..(20): Xaa is A or G
  MOD_RES (21)..(22)..(23)..(24): Xaa is A or G or absent
XAXELHEELRVTAKKXXXXXXXXXIKRVQVPRHHVRSPQXKV

SEQ ID NO: 14330 - protein, 41 aa, Artificial Sequence
  Non-cyclic GFR-binding peptide
  MOD_RES (1)..(38): Xaa is C or S
  MOD_RES (14)..(15)..(16)..(17)..(18): Xaa is A or G
  MOD_RES (19)..(20)..(21)..(22): Xaa is A or G or absent
XELHEELRSMEGLXXXXXXXXXMIQVTINSHHVRSPQXKVS

SEQ ID NO: 14331 - protein, 37 aa, Artificial Sequence
  Non-cyclic GFR-binding peptide
  MOD_RES (1)..(3): Xaa is C or S
  MOD_RES (16)..(17)..(18)..(19)..(20): Xaa is A or G
  MOD_RES (21)..(22)..(23)..(24): Xaa is A or G or absent
XAXELHEELRSMEGIXXXXXXXXXMIQVTINSHHVRS

SEQ ID NO: 14332 - protein, 38 aa, Artificial Sequence
  Non-cyclic GFR-binding peptide
  MOD_RES (33)..(33): Xaa is C or S
  MOD_RES (11)..(12)..(13)..(14)..(15): Xaa is A or G
  MOD_RES (16)..(17)..(18)..(19): Xaa is A or G or absent
SHEELVTAKKXXXXXXXXXIKRMQVPRQGTPVXELGED

SEQ ID NO: 14333 - protein, 43 aa, Artificial Sequence
  Non-cyclic GFR-binding peptide
  MOD_RES (1)..(3)..(40): Xaa is C or S
XKXALHDELTSMEGLFIPKKRVIEMIQVTINSLQVQTPRXQVN

SEQ ID NO: 14334 - protein, 39 aa, Artificial Sequence
  Non-cyclic GFR-binding peptide
  MOD_RES (2)..(4)..(38): Xaa is C or S
  MOD_RES (16)..(17)..(18)..(19)..(20): Xaa is A or G
  MOD_RES (21)..(22)..(23)..(24): Xaa is A or G or absent
RXEXQSHEELVQVEKXXXXXXXXXVKAMKVSRQGTPVXE

SEQ ID NO: 14335 - protein, 35 aa, Artificial Sequence
  Non-cyclic GFR-binding peptide
  MOD_RES (33)..(33): Xaa is C or S
  MOD_RES (11)..(12)..(13)..(14)..(15): Xaa is A or G
  MOD_RES (16)..(17)..(18)..(19): Xaa is A or G or absent
SHEELVQVEKXXXXXXXXXVKAMKVSRQGTPVXEL

SEQ ID NO: 14336 - protein, 34 aa, Artificial Sequence
  Non-cyclic GFR-binding peptide
  MOD_RES (34)..(34): Xaa is C or S
KNHQLFVQVEKHQGQHPKIRVKAMKVSREETPVX

SEQ ID NO: 14337 - protein, 39 aa, Artificial Sequence
  Non-cyclic GFR-binding peptide
  MOD_RES (37)..(37): Xaa is C or S
ELHEELRVTAKKLKPKKRVYEIKRVQVPRHHVRSPQXKV

SEQ ID NO: 14338 - protein, 37 aa, Artificial Sequence
  Non-cyclic GFR-binding peptide
  MOD_RES (35)..(35): Xaa is C or S
  MOD_RES (11)..(12)..(13)..(14)..(15): Xaa is A or G
  MOD_RES (16)..(17)..(18)..(19): Xaa is A or G or absent
HDELTSMEGLXXXXXXXXXMIQVTINSLQVQTPRXQV

SEQ ID NO: 14339 - protein, 35 aa, Artificial Sequence
  Non-cyclic GFR-binding peptide
  MOD_RES (34)..(34): Xaa is C or S
KNHQLFSMEGLHQGQHPKIRMIQMTINSEETPVXE

SEQ ID NO: 14340 - protein, 38 aa, Artificial Sequence
  Non-cyclic GFR-binding peptide
  MOD_RES (35)..(35): Xaa is C or S
  MOD_RES (11)..(12)..(13)..(14)..(15): Xaa is A or G
  MOD_RES (16)..(17)..(18)..(19): Xaa is A or G or absent
HDELTSMEGIXXXXXXXXXMIQVTINSLQVQTPRXQVN

SEQ ID NO: 14341 - protein, 37 aa, Artificial Sequence
  Non-cyclic GFR-binding peptide
  MOD_RES (1)..(1): Xaa is C or S
XALHDELTVQVEKFIPKKRVIEVKAVKVSRLQVQTPR

SEQ ID NO: 14342 - protein, 36 aa, Artificial Sequence
  Non-cyclic GFR-binding peptide
  MOD_RES (2)..(36): Xaa is C or S
EXKNHQLFVTAKKHQGQHPKIRIKRMQVPREETPVX

SEQ ID NO: 14343 - protein, 35 aa, Artificial Sequence
  Non-cyclic GFR-binding peptide
  MOD_RES (34)..(34): Xaa is C or S
  MOD_RES (12)..(13)..(14)..(15)..(16): Xaa is A or G
  MOD_RES (17)..(18)..(19)..(20): Xaa is A or G or absent
KNHQLFVQVEKXXXXXXXXXVKAMKVSREETPVXE

SEQ ID NO: 14344 - protein, 39 aa, Artificial Sequence
  Non-cyclic GFR-binding peptide
  MOD_RES (36)..(36): Xaa is C or S
  MOD_RES (12)..(13)..(14)..(15)..(16): Xaa is A or G
  MOD_RES (17)..(18)..(19)..(20): Xaa is A or G or absent
LHEELRSMEGIXXXXXXXXXMIQVTINSHHVRSPQXKVS

SEQ ID NO: 14345 - protein, 40 aa, Artificial Sequence
  Non-cyclic GFR-binding peptide
  MOD_RES (2)..(4): Xaa is C or S
AXAXELHEELRSMEGLLKPKKRVYEMIQVTINSHHVRSPQ

SEQ ID NO: 14346 - protein, 40 aa, Artificial Sequence
  Non-cyclic GFR-binding peptide
  MOD_RES (1)..(38): Xaa is C or S
XELHEELRVTAKKLKPKKRVYEIKRVQVPRHHVRSPQXKV

SEQ ID NO: 14347 - protein, 36 aa, Artificial Sequence
  Non-cyclic GFR-binding peptide
  MOD_RES (35)..(35): Xaa is C or S
HEELRVTAKKLKPKKRVYEIKRVQVPRHHVRSPQXK

SEQ ID NO: 14348 - protein, 35 aa, Artificial Sequence
  Non-cyclic GFR-binding peptide
LHEELRSMEGILKPKKRVYEMIQVTINSHHVRSPQ

SEQ ID NO: 14349 - protein, 39 aa, Artificial Sequence
  Non-cyclic GFR-binding peptide
  MOD_RES (34)..(34): Xaa is C or S
QSHEELSMEGIHQGQHPKIRMIQMTINSQGTPVXELGED

SEQ ID NO: 14350 - protein, 38 aa, Artificial Sequence
  Non-cyclic GFR-binding peptide
  MOD_RES (2)..(4): Xaa is C or S
  MOD_RES (17)..(18)..(19)..(20)..(21): Xaa is A or G
  MOD_RES (22)..(23)..(24)..(25): Xaa is A or G or absent
AXAXELHEELRSMEGLXXXXXXXXXMIQVTINSHHVRS

SEQ ID NO: 14351 - protein, 43 aa, Artificial Sequence
  Non-cyclic GFR-binding peptide
  MOD_RES (1)..(3)..(37): Xaa is C or S
XEXQSHEELVTAKKHQGQHPKIRIKRMQVPRQGTPVXELGEDN

SEQ ID NO: 14352 - protein, 40 aa, Artificial Sequence
  Non-cyclic GFR-binding peptide
  MOD_RES (1)..(3)..(40): Xaa is C or S
XAXELHEELRSMEGLLKPKKRVYEMIQVTINSHHVRSPQX

SEQ ID NO: 14353 - protein, 40 aa, Artificial Sequence
  Non-cyclic GFR-binding peptide
  MOD_RES (1)..(3)..(40): Xaa is C or S
XAXELHEELRSMEGILKPKKRVYEMIQVTINSHHVRSPQX

SEQ ID NO: 14354 - protein, 44 aa, Artificial Sequence
  Non-cyclic GFR-binding peptide
  MOD_RES (2)..(4)..(38): Xaa is C or S
  MOD_RES (16)..(17)..(18)..(19)..(20): Xaa is A or G
  MOD_RES (21)..(22)..(23)..(24): Xaa is A or G or absent
RXEXKNHQLFVTAKKXXXXXXXXXIKRMQVPREETPVXELGEDN

SEQ ID NO: 14355 - protein, 33 aa, Artificial Sequence
  Non-cyclic GFR-binding peptide
HDELTSMEGIFIPKKRVIEMIQVTINSLQVQTP

SEQ ID NO: 14356 - protein, 36 aa, Artificial Sequence
  Non-cyclic GFR-binding peptide
  MOD_RES (36)..(36): Xaa is C or S
LHDELTSMEGIFIPKKRVIEMIQVTINSLQVQTPRX

SEQ ID NO: 14357 - protein, 33 aa, Artificial Sequence
  Non-cyclic GFR-binding peptide
LHDELTVQVEKFIPKKRVIEVKAVKVSRLQVQT

SEQ ID NO: 14358 - protein, 34 aa, Artificial Sequence
  Non-cyclic GFR-binding peptide
LHEELRSMEGLLKPKKRVYEMIQVTINSHHVRSP

SEQ ID NO: 14359 - protein, 40 aa, Artificial Sequence
  Non-cyclic GFR-binding peptide
  MOD_RES (37)..(37): Xaa is C or S
ELHEELRSMEGILKPKKRVYEMIQVTINSHHVRSPQXKVS

SEQ ID NO: 14360 - protein, 35 aa, Artificial Sequence
  Non-cyclic GFR-binding peptide
  MOD_RES (13)..(14)..(15)..(16)..(17): Xaa is A or G
  MOD_RES (18)..(19)..(20)..(21): Xaa is A or G or absent
ALHDELTSMEGIXXXXXXXXXMIQVTINSLQVQTP

SEQ ID NO: 14361 - protein, 41 aa, Artificial Sequence
  Non-cyclic GFR-binding peptide
  MOD_RES (1)..(3)..(37): Xaa is C or S
  MOD_RES (15)..(16)..(17)..(18)..(19): Xaa is A or G
  MOD_RES (20)..(21)..(22)..(23): Xaa is A or G or absent
XEXKNHQLFVQVEKXXXXXXXXXVKAMKVSREETPVXELGE

SEQ ID NO: 14362 - protein, 34 aa, Artificial Sequence
  Non-cyclic GFR-binding peptide
  MOD_RES (1)..(1): Xaa is C or S
XQSHEELSMEGIHQGQHPKIRMIQMTINSQGTPV

SEQ ID NO: 14363 - protein, 36 aa, Artificial Sequence
  Non-cyclic GFR-binding peptide
  MOD_RES (35)..(35): Xaa is C or S
HEELRSMEGILKPKKRVYEMIQVTINSHHVRSPQXK

SEQ ID NO: 14364 - protein, 40 aa, Artificial Sequence
  Non-cyclic GFR-binding peptide
  MOD_RES (34)..(34): Xaa is C or S
KNHQLFVTAKKHQGQHPKIRIKRMQVPREETPVXELGEDN

SEQ ID NO: 14365 - protein, 36 aa, Artificial Sequence
  Non-cyclic GFR-binding peptide
ALHDELTVQVEKFIPKKRVIEVKAVKVSRLQVQTPR

SEQ ID NO: 14366 - protein, 37 aa, Artificial Sequence
  Non-cyclic GFR-binding peptide
  MOD_RES (1)..(1): Xaa is C or S
  MOD_RES (14)..(15)..(16)..(17)..(18): Xaa is A or G
  MOD_RES (19)..(20)..(21)..(22): Xaa is A or G or absent
XALHDELTSMEGIXXXXXXXXXMIQVTINSLQVQTPR

SEQ ID NO: 14367 - protein, 34 aa, Artificial Sequence
  Non-cyclic GFR-binding peptide
  MOD_RES (12)..(13)..(14)..(15)..(16): Xaa is A or G
  MOD_RES (17)..(18)..(19)..(20): Xaa is A or G or absent
LHDELTSMEGIXXXXXXXXXMIQVTINSLQVQTP

SEQ ID NO: 14368 - protein, 35 aa, Artificial Sequence
  Non-cyclic GFR-binding peptide
  MOD_RES (33)..(33): Xaa is C or S
  MOD_RES (11)..(12)..(13)..(14)..(15): Xaa is A or G
  MOD_RES (16)..(17)..(18)..(19): Xaa is A or G or absent
NHQLFVTAKKXXXXXXXXXIKRMQVPREETPVXEL

SEQ ID NO: 14369 - protein, 40 aa, Artificial Sequence
  Non-cyclic GFR-binding peptide
  MOD_RES (2)..(39): Xaa is C or S
AXELHEELRSMEGLLKPKKRVYEMIQVTINSHHVRSPQXK

SEQ ID NO: 14370 - protein, 38 aa, Artificial Sequence
  Non-cyclic GFR-binding peptide
  MOD_RES (36)..(36): Xaa is C or S
LHEELRVTAKKLKPKKRVYEIKRVQVPRHHVRSPQXKV

SEQ ID NO: 14371 - protein, 44 aa, Artificial Sequence
  Non-cyclic GFR-binding peptide
  MOD_RES (1)..(3)..(40): Xaa is C or S
  MOD_RES (16)..(17)..(18)..(19)..(20): Xaa is A or G
  MOD_RES (21)..(22)..(23)..(24): Xaa is A or G or absent
XKXALHDELTVQVEKXXXXXXXXXVKAVKVSRLQVQTPRXQVNR

SEQ ID NO: 14372 - protein, 38 aa, Artificial Sequence
  Non-cyclic GFR-binding peptide
  MOD_RES (2)..(4)..(38): Xaa is C or S
RXEXQSHEELSMEGIHQGQHPKIRMIQMTINSQGTPVX

SEQ ID NO: 14373 - protein, 43 aa, Artificial Sequence
  Non-cyclic GFR-binding peptide
  MOD_RES (1)..(3)..(40): Xaa is C or S
XAXELHEELRSMEGILKPKKRVYEMIQVTINSHHVRSPQXKVS

SEQ ID NO: 14374 - protein, 40 aa, Artificial Sequence
  Non-cyclic GFR-binding peptide
  MOD_RES (2)..(39): Xaa is C or S
AXELHEELRVTAKKLKPKKRVYEIKRVQVPRHHVRSPQXK

SEQ ID NO: 14375 - protein, 43 aa, Artificial Sequence
  Non-cyclic GFR-binding peptide
  MOD_RES (1)..(3)..(40): Xaa is C or S
XAXELHEELRSMEGLLKPKKRVYEMIQVTINSHHVRSPQXKVS

SEQ ID NO: 14376 - protein, 34 aa, Artificial Sequence
  Non-cyclic GFR-binding peptide
  MOD_RES (1)..(1): Xaa is C or S
  MOD_RES (13)..(14)..(15)..(16)..(17): Xaa is A or G
  MOD_RES (18)..(19)..(20)..(21): Xaa is A or G or absent
XQSHEELSMEGIXXXXXXXXXMIQMTINSQGTPV

SEQ ID NO: 14377 - protein, 37 aa, Artificial Sequence
  Non-cyclic GFR-binding peptide
  MOD_RES (1)..(3)..(37): Xaa is C or S
  MOD_RES (15)..(16)..(17)..(18)..(19): Xaa is A or G
  MOD_RES (20)..(21)..(22)..(23): Xaa is A or G or absent
XEXQSHEELVTAKKXXXXXXXXXIKRMQVPRQGTPVX

SEQ ID NO: 14378 - protein, 43 aa, Artificial Sequence
  Non-cyclic GFR-binding peptide
  MOD_RES (2)..(4)..(41): Xaa is C or S
EXKXALHDELTVQVEKFIPKKRVIEVKAVKVSRLQVQTPRXQV

SEQ ID NO: 14379 - protein, 38 aa, Artificial Sequence
  Non-cyclic GFR-binding peptide
  MOD_RES (33)..(33): Xaa is C or S
  MOD_RES (11)..(12)..(13)..(14)..(15): Xaa is A or G
  MOD_RES (16)..(17)..(18)..(19): Xaa is A or G or absent
NHQLFVTAKKXXXXXXXXXIKRMQVPREETPVXELGED

SEQ ID NO: 14380 - protein, 40 aa, Artificial Sequence
  Non-cyclic GFR-binding peptide
  MOD_RES (34)..(34): Xaa is C or S
  MOD_RES (12)..(13)..(14)..(15)..(16): Xaa is A or G
  MOD_RES (17)..(18)..(19)..(20): Xaa is A or G or absent
KNHQLFSMEGLXXXXXXXXXMIQMTINSEETPVXELGEDN

SEQ ID NO: 14381 - protein, 41 aa, Artificial Sequence
  Non-cyclic GFR-binding peptide
  MOD_RES (1)..(3)..(37): Xaa is C or S
  MOD_RES (15)..(16)..(17)..(18)..(19): Xaa is A or G
  MOD_RES (20)..(21)..(22)..(23): Xaa is A or G or absent
XEXQSHEELVQVEKXXXXXXXXXVKAMKVSRQGTPVXELGE

SEQ ID NO: 14382 - protein, 41 aa, Artificial Sequence
  Non-cyclic GFR-binding peptide
  MOD_RES (2)..(4)..(38): Xaa is C or S
RXEXKNHQLFVTAKKHQGQHPKIRIKRMQVPREETPVXELG

SEQ ID NO: 14383 - protein, 38 aa, Artificial Sequence
  Non-cyclic GFR-binding peptide
  MOD_RES (1)..(3)..(37): Xaa is C or S
  MOD_RES (15)..(16)..(17)..(18)..(19): Xaa is A or G
  MOD_RES (20)..(21)..(22)..(23): Xaa is A or G or absent
XEXKNHQLFVQVEKXXXXXXXXXVKAMKVSREETPVXE

SEQ ID NO: 14384 - protein, 35 aa, Artificial Sequence
  Non-cyclic GFR-binding peptide
  MOD_RES (35)..(35): Xaa is C or S
  MOD_RES (11)..(12)..(13)..(14)..(15): Xaa is A or G
  MOD_RES (16)..(17)..(18)..(19): Xaa is A or G or absent
HEELRSMEGIXXXXXXXXXMIQVTINSHHVRSPQX

SEQ ID NO: 14385 - protein, 36 aa, Artificial Sequence
  Non-cyclic GFR-binding peptide
  MOD_RES (2)..(36): Xaa is C or S
EXKNHQLFSMEGLHQGQHPKIRMIQMTINSEETPVX

SEQ ID NO: 14386 - protein, 36 aa, Artificial Sequence
  Non-cyclic GFR-binding peptide
  MOD_RES (34)..(34): Xaa is C or S
QSHEELVQVEKHQGQHPKIRVKAMKVSRQGTPVXEL

SEQ ID NO: 14387 - protein, 39 aa, Artificial Sequence
  Non-cyclic GFR-binding peptide
  MOD_RES (2)..(36): Xaa is C or S
EXKNHQLFVTAKKHQGQHPKIRIKRMQVPREETPVXELG

SEQ ID NO: 14388 - protein, 37 aa, Artificial Sequence
  Non-cyclic GFR-binding peptide
  MOD_RES (37)..(37): Xaa is C or S
  MOD_RES (13)..(14)..(15)..(16)..(17): Xaa is A or G
  MOD_RES (18)..(19)..(20)..(21): Xaa is A or G or absent
ALHDELTSMEGLXXXXXXXXXMIQVTINSLQVQTPRX

SEQ ID NO: 14389 - protein, 35 aa, Artificial Sequence
  Non-cyclic GFR-binding peptide
  MOD_RES (33)..(33): Xaa is C or S
  MOD_RES (11)..(12)..(13)..(14)..(15): Xaa is A or G
  MOD_RES (16)..(17)..(18)..(19): Xaa is A or G or absent
NHQLFVQVEKXXXXXXXXXVKAMKVSREETPVXEL

SEQ ID NO: 14390 - protein, 37 aa, Artificial Sequence
  Non-cyclic GFR-binding peptide
  MOD_RES (35)..(35): Xaa is C or S
HDELTVQVEKFIPKKRVIEVKAVKVSRLQVQTPRXQV

SEQ ID NO: 14391 - protein, 33 aa, Artificial Sequence
  Non-cyclic GFR-binding peptide
  MOD_RES (12)..(13)..(14)..(15)..(16): Xaa is A or G
  MOD_RES (17)..(18)..(19)..(20): Xaa is A or G or absent
LHDELTSMEGIXXXXXXXXXMIQVTINSLQVQT

SEQ ID NO: 14392 - protein, 40 aa, Artificial Sequence
  Non-cyclic GFR-binding peptide
  MOD_RES (37)..(37): Xaa is C or S
  MOD_RES (13)..(14)..(15)..(16)..(17): Xaa is A or G
  MOD_RES (18)..(19)..(20)..(21): Xaa is A or G or absent
ALHDELTSMEGIXXXXXXXXXMIQVTINSLQVQTPRXQVN

SEQ ID NO: 14393 - protein, 40 aa, Artificial Sequence
  Non-cyclic GFR-binding peptide
  MOD_RES (2)..(4)..(38): Xaa is C or S
RXEXQSHEELVTAKKHQGQHPKIRIKRMQVPRQGTPVXEL

SEQ ID NO: 14394 - protein, 41 aa, Artificial Sequence
  Non-cyclic GFR-binding peptide
  MOD_RES (1)..(3)..(37): Xaa is C or S
XEXKNHQLFSMEGLHQGQHPKIRMIQMTINSEETPVXELGE

SEQ ID NO: 14395 - protein, 38 aa, Artificial Sequence
  Non-cyclic GFR-binding peptide
  MOD_RES (2)..(36): Xaa is C or S
  MOD_RES (14)..(15)..(16)..(17)..(18): Xaa is A or G
  MOD_RES (19)..(20)..(21)..(22): Xaa is A or G or absent
EXKNHQLFVTAKKXXXXXXXXXIKRMQVPREETPVXEL

SEQ ID NO: 14396 - protein, 38 aa, Artificial Sequence
  Non-cyclic GFR-binding peptide
  MOD_RES (1)..(38): Xaa is C or S
  MOD_RES (14)..(15)..(16)..(17)..(18): Xaa is A or G
  MOD_RES (19)..(20)..(21)..(22): Xaa is A or G or absent
XELHEELRVTAKKXXXXXXXXXIKRVQVPRHHVRSPQX

SEQ ID NO: 14397 - protein, 36 aa, Artificial Sequence
  Non-cyclic GFR-binding peptide
  MOD_RES (1)..(35): Xaa is C or S
XKNHQLFVQVEKHQGQHPKIRVKAMKVSREETPVXE

SEQ ID NO: 14398 - protein, 37 aa, Artificial Sequence
  Non-cyclic GFR-binding peptide
  MOD_RES (37)..(37): Xaa is C or S
  MOD_RES (13)..(14)..(15)..(16)..(17): Xaa is A or G
  MOD_RES (18)..(19)..(20)..(21): Xaa is A or G or absent
ALHDELTVQVEKXXXXXXXXXVKAVKVSRLQVQTPRX

SEQ ID NO: 14399 - protein, 40 aa, Artificial Sequence
  Non-cyclic GFR-binding peptide
  MOD_RES (1)..(3)..(40): Xaa is C or S
XKXALHDELTVQVEKFIPKKRVIEVKAVKVSRLQVQTPRX

SEQ ID NO: 14400 - protein, 40 aa, Artificial Sequence
  Non-cyclic GFR-binding peptide
  MOD_RES (36)..(36): Xaa is C or S
LHEELRSMEGILKPKKRVYEMIQVTINSHHVRSPQXKVSS

SEQ ID NO: 14401 - protein, 37 aa, Artificial Sequence
  Non-cyclic GFR-binding peptide
  MOD_RES (34)..(34): Xaa is C or S
QSHEELVTAKKHQGQHPKIRIKRMQVPRQGTPVXELG

SEQ ID NO: 14402 - protein, 40 aa, Artificial Sequence
  Non-cyclic GFR-binding peptide
  MOD_RES (34)..(34): Xaa is C or S
QSHEELVTAKKHQGQHPKIRIKRMQVPRQGTPVXELGEDN

SEQ ID NO: 14403 - protein, 37 aa, Artificial Sequence
  Non-cyclic GFR-binding peptide
  MOD_RES (1)..(3)..(37): Xaa is C or S
XEXKNHQLFVTAKKHQGQHPKIRIKRMQVPREETPVX

SEQ ID NO: 14404 - protein, 42 aa, Artificial Sequence
  Non-cyclic GFR-binding peptide
  MOD_RES (2)..(4)..(38): Xaa is C or S
  MOD_RES (16)..(17)..(18)..(19)..(20): Xaa is A or G
  MOD_RES (21)..(22)..(23)..(24): Xaa is A or G or absent
RXEXKNHQLFSMEGLXXXXXXXXXMIQMTINSEETPVXELGE

SEQ ID NO: 14405 - protein, 34 aa, Artificial Sequence
  Non-cyclic GFR-binding peptide
  MOD_RES (33)..(33): Xaa is C or S
NHQLFVTAKKHQGQHPKIRIKRMQVPREETPVXE

SEQ ID NO: 14406 - protein, 35 aa, Artificial Sequence
  Non-cyclic GFR-binding peptide
  MOD_RES (35)..(35): Xaa is C or S
  MOD_RES (11)..(12)..(13)..(14)..(15): Xaa is A or G
  MOD_RES (16)..(17)..(18)..(19): Xaa is A or G or absent
HEELRSMEGLXXXXXXXXXMIQVTINSHHVRSPQX

SEQ ID NO: 14407 - protein, 38 aa, Artificial Sequence
  Non-cyclic GFR-binding peptide
  MOD_RES (1)..(38): Xaa is C or S
  MOD_RES (14)..(15)..(16)..(17)..(18): Xaa is A or G
  MOD_RES (19)..(20)..(21)..(22): Xaa is A or G or absent
XELHEELRSMEGLXXXXXXXXXMIQVTINSHHVRSPQX

SEQ ID NO: 14408 - protein, 42 aa, Artificial Sequence
  Non-cyclic GFR-binding peptide
  MOD_RES (2)..(4)..(41): Xaa is C or S
AXAXELHEELRSMEGILKPKKRVYEMIQVTINSHHVRSPQXK

SEQ ID NO: 14409 - protein, 34 aa, Artificial Sequence
  Non-cyclic GFR-binding peptide
LHDELTVQVEKFIPKKRVIEVKAVKVSRLQVQTP

SEQ ID NO: 14410 - protein, 41 aa, Artificial Sequence
  Non-cyclic GFR-binding peptide
  MOD_RES (2)..(4)..(41): Xaa is C or S
AXAXELHEELRVTAKKLKPKKRVYEIKRVQVPRHHVRSPQX

SEQ ID NO: 14411 - protein, 34 aa, Artificial Sequence
  Non-cyclic GFR-binding peptide
  MOD_RES (34)..(34): Xaa is C or S
  MOD_RES (12)..(13)..(14)..(15)..(16): Xaa is A or G
  MOD_RES (17)..(18)..(19)..(20): Xaa is A or G or absent
QSHEELSMEGIXXXXXXXXXMIQMTINSQGTPVX

SEQ ID NO: 14412 - protein, 37 aa, Artificial Sequence
  Non-cyclic GFR-binding peptide
  MOD_RES (1)..(3)..(37): Xaa is C or S
  MOD_RES (15)..(16)..(17)..(18)..(19): Xaa is A or G
  MOD_RES (20)..(21)..(22)..(23): Xaa is A or G or absent
XEXKNHQLFVTAKKXXXXXXXXXIKRMQVPREETPVX

SEQ ID NO: 14413 - protein, 40 aa, Artificial Sequence
  Non-cyclic GFR-binding peptide
  MOD_RES (2)..(4)..(38): Xaa is C or S
RXEXQSHEELSMEGIHQGQHPKIRMIQMTINSQGTPVXEL

SEQ ID NO: 14414 - protein, 41 aa, Artificial Sequence
  Non-cyclic GFR-binding peptide
  MOD_RES (2)..(39): Xaa is C or S
  MOD_RES (15)..(16)..(17)..(18)..(19): Xaa is A or G
  MOD_RES (20)..(21)..(22)..(23): Xaa is A or G or absent
AXELHEELRSMEGIXXXXXXXXXMIQVTINSHHVRSPQXKV

SEQ ID NO: 14415 - protein, 42 aa, Artificial Sequence
  Non-cyclic GFR-binding peptide
  MOD_RES (1)..(3)..(40): Xaa is C or S
  MOD_RES (16)..(17)..(18)..(19)..(20): Xaa is A or G
  MOD_RES (21)..(22)..(23)..(24): Xaa is A or G or absent
XKXALHDELTSMEGIXXXXXXXXXMIQVTINSLQVQTPRXQV

SEQ ID NO: 14416 - protein, 42 aa, Artificial Sequence
  Non-cyclic GFR-binding peptide
  MOD_RES (1)..(3)..(40): Xaa is C or S
  MOD_RES (16)..(17)..(18)..(19)..(20): Xaa is A or G
  MOD_RES (21)..(22)..(23)..(24): Xaa is A or G or absent
XKXALHDELTSMEGLXXXXXXXXXMIQVTINSLQVQTPRXQV

SEQ ID NO: 14417 - protein, 40 aa, Artificial Sequence
  Non-cyclic GFR-binding peptide
  MOD_RES (1)..(35): Xaa is C or S
  MOD_RES (13)..(14)..(15)..(16)..(17): Xaa is A or G
  MOD_RES (18)..(19)..(20)..(21): Xaa is A or G or absent
XKNHQLFSMEGLXXXXXXXXXMIQMTINSEETPVXELGED

SEQ ID NO: 14418 - protein, 38 aa, Artificial Sequence
  Non-cyclic GFR-binding peptide
  MOD_RES (2)..(4): Xaa is C or S
  MOD_RES (17)..(18)..(19)..(20)..(21): Xaa is A or G
  MOD_RES (22)..(23)..(24)..(25): Xaa is A or G or absent
AXAXELHEELRSMEGIXXXXXXXXXMIQVTINSHHVRS

SEQ ID NO: 14419 - protein, 38 aa, Artificial Sequence
  Non-cyclic GFR-binding peptide
  MOD_RES (37)..(37): Xaa is C or S
ELHEELRVTAKKLKPKKRVYEIKRVQVPRHHVRSPQXK

SEQ ID NO: 14420 - protein, 41 aa, Artificial Sequence
  Non-cyclic GFR-binding peptide
  MOD_RES (1)..(3)..(40): Xaa is C or S
  MOD_RES (16)..(17)..(18)..(19)..(20): Xaa is A or G
  MOD_RES (21)..(22)..(23)..(24): Xaa is A or G or absent
XAXELHEELRSMEGLXXXXXXXXXMIQVTINSHHVRSPQXK

SEQ ID NO: 14421 - protein, 39 aa, Artificial Sequence
  Non-cyclic GFR-binding peptide
  MOD_RES (1)..(3): Xaa is C or S
  MOD_RES (16)..(17)..(18)..(19)..(20): Xaa is A or G
  MOD_RES (21)..(22)..(23)..(24): Xaa is A or G or absent
XAXELHEELRSMEGLXXXXXXXXXMIQVTINSHHVRSPQ

SEQ ID NO: 14422 - protein, 41 aa, Artificial Sequence
  Non-cyclic GFR-binding peptide
  MOD_RES (1)..(3)..(37): Xaa is C or S
  MOD_RES (15)..(16)..(17)..(18)..(19): Xaa is A or G
  MOD_RES (20)..(21)..(22)..(23): Xaa is A or G or absent
XEXKNHQLFSMEGLXXXXXXXXXMIQMTINSEETPVXELGE

SEQ ID NO: 14423 - protein, 33 aa, Artificial Sequence
  Non-cyclic GFR-binding peptide
  MOD_RES (12)..(13)..(14)..(15)..(16): Xaa is A or G
  MOD_RES (17)..(18)..(19)..(20): Xaa is A or G or absent
QSHEELVQVEKXXXXXXXXXVKAMKVSRQGTPV

SEQ ID NO: 14424 - protein, 40 aa, Artificial Sequence
  Non-cyclic GFR-binding peptide
  MOD_RES (1)..(38): Xaa is C or S
XALHDELTSMEGIFIPKKRVIEMIQVTINSLQVQTPRXQV

SEQ ID NO: 14425 - protein, 39 aa, Artificial Sequence
  Non-cyclic GFR-binding peptide
  MOD_RES (1)..(38): Xaa is C or S
  MOD_RES (14)..(15)..(16)..(17)..(18): Xaa is A or G
  MOD_RES (19)..(20)..(21)..(22): Xaa is A or G or absent
XELHEELRSMEGLXXXXXXXXXMIQVTINSHHVRSPQXK

SEQ ID NO: 14426 - protein, 33 aa, Artificial Sequence
  Non-cyclic GFR-binding peptide
LHEELRSMEGLLKPKKRVYEMIQVTINSHHVRS

SEQ ID NO: 14427 - protein, 40 aa, Artificial Sequence
  Non-cyclic GFR-binding peptide
  MOD_RES (36)..(36): Xaa is C or S
LHDELTSMEGIFIPKKRVIEMIQVTINSLQVQTPRXQVNR

SEQ ID NO: 14428 - protein, 36 aa, Artificial Sequence
  Non-cyclic GFR-binding peptide
  MOD_RES (1)..(1): Xaa is C or S
XALHDELTSMEGIFIPKKRVIEMIQVTINSLQVQTP

SEQ ID NO: 14429 - protein, 43 aa, Artificial Sequence
  Non-cyclic GFR-binding peptide
  MOD_RES (1)..(3)..(37): Xaa is C or S
XEXQSHEELVQVEKHQGQHPKIRVKAMKVSRQGTPVXELGEDN

SEQ ID NO: 14430 - protein, 42 aa, Artificial Sequence
  Non-cyclic GFR-binding peptide
  MOD_RES (1)..(3)..(40): Xaa is C or S
  MOD_RES (16)..(17)..(18)..(19)..(20): Xaa is A or G
  MOD_RES (21)..(22)..(23)..(24): Xaa is A or G or absent
XAXELHEELRSMEGIXXXXXXXXXMIQVTINSHHVRSPQXKV

SEQ ID NO: 14431 - protein, 40 aa, Artificial Sequence
  Non-cyclic GFR-binding peptide
  MOD_RES (1)..(35): Xaa is C or S
  MOD_RES (13)..(14)..(15)..(16)..(17): Xaa is A or G
  MOD_RES (18)..(19)..(20)..(21): Xaa is A or G or absent
XQSHEELVTAKKXXXXXXXXXIKRMQVPRQGTPVXELGED

SEQ ID NO: 14432 - protein, 38 aa, Artificial Sequence
  Non-cyclic GFR-binding peptide
  MOD_RES (35)..(35): Xaa is C or S
  MOD_RES (11)..(12)..(13)..(14)..(15): Xaa is A or G
  MOD_RES (16)..(17)..(18)..(19): Xaa is A or G or absent
HEELRVTAKKXXXXXXXXXIKRVQVPRHHVRSPQXKVS

SEQ ID NO: 14433 - protein, 37 aa, Artificial Sequence
  Non-cyclic GFR-binding peptide
  MOD_RES (34)..(34): Xaa is C or S
  MOD_RES (12)..(13)..(14)..(15)..(16): Xaa is A or G
  MOD_RES (17)..(18)..(19)..(20): Xaa is A or G or absent
KNHQLFVQVEKXXXXXXXXXVKAMKVSREETPVXELG

SEQ ID NO: 14434 - protein, 37 aa, Artificial Sequence
  Non-cyclic GFR-binding peptide
  MOD_RES (1)..(3): Xaa is C or S
  MOD_RES (16)..(17)..(18)..(19)..(20): Xaa is A or G
  MOD_RES (21)..(22)..(23)..(24): Xaa is A or G or absent
XAXELHEELRVTAKKXXXXXXXXXIKRVQVPRHHVRS

SEQ ID NO: 14435 - protein, 32 aa, Artificial Sequence
  Non-cyclic GFR-binding peptide
  MOD_RES (11)..(12)..(13)..(14)..(15): Xaa is A or G
  MOD_RES (16)..(17)..(18)..(19): Xaa is A or G or absent
HEELRSMEGIXXXXXXXXXMIQVTINSHHVRS

SEQ ID NO: 14436 - protein, 41 aa, Artificial Sequence
  Non-cyclic GFR-binding peptide
  MOD_RES (37)..(37): Xaa is C or S
  MOD_RES (13)..(14)..(15)..(16)..(17): Xaa is A or G
  MOD_RES (18)..(19)..(20)..(21): Xaa is A or G or absent
ALHDELTSMEGIXXXXXXXXXMIQVTINSLQVQTPRXQVNR

SEQ ID NO: 14437 - protein, 37 aa, Artificial Sequence
  Non-cyclic GFR-binding peptide
  MOD_RES (1)..(3): Xaa is C or S
  MOD_RES (16)..(17)..(18)..(19)..(20): Xaa is A or G
  MOD_RES (21)..(22)..(23)..(24): Xaa is A or G or absent
XKXALHDELTSMEGIXXXXXXXXXMIQVTINSLQVQT

SEQ ID NO: 14438 - protein, 36 aa, Artificial Sequence
  Non-cyclic GFR-binding peptide
  MOD_RES (1)..(3): Xaa is C or S
  MOD_RES (15)..(16)..(17)..(18)..(19): Xaa is A or G
  MOD_RES (20)..(21)..(22)..(23): Xaa is A or G or absent
XEXQSHEELSMEGIXXXXXXXXXMIQMTINSQGTPV

SEQ ID NO: 14439 - protein, 38 aa, Artificial Sequence
  Non-cyclic GFR-binding peptide
  MOD_RES (1)..(3): Xaa is C or S
XAXELHEELRSMEGILKPKKRVYEMIQVTINSHHVRSP

SEQ ID NO: 14440 - protein, 40 aa, Artificial Sequence
  Non-cyclic GFR-binding peptide
  MOD_RES (1)..(3)..(37): Xaa is C or S
  MOD_RES (15)..(16)..(17)..(18)..(19): Xaa is A or G
  MOD_RES (20)..(21)..(22)..(23): Xaa is A or G or absent
XEXKNHQLFSMEGLXXXXXXXXXMIQMTINSEETPVXELG

SEQ ID NO: 14441 - protein, 37 aa, Artificial Sequence
  Non-cyclic GFR-binding peptide
  MOD_RES (35)..(35): Xaa is C or S
HDELTSMEGLFIPKKRVIEMIQVTINSLQVQTPRXQV

SEQ ID NO: 14442 - protein, 34 aa, Artificial Sequence
  Non-cyclic GFR-binding peptide
  MOD_RES (12)..(13)..(14)..(15)..(16): Xaa is A or G
  MOD_RES (17)..(18)..(19)..(20): Xaa is A or G or absent
LHDELTVQVEKXXXXXXXXXVKAVKVSRLQVQTP

SEQ ID NO: 14443 - protein, 35 aa, Artificial Sequence
  Non-cyclic GFR-binding peptide
  MOD_RES (1)..(1): Xaa is C or S
XELHEELRSMEGILKPKKRVYEMIQVTINSHHVRS

SEQ ID NO: 14444 - protein, 38 aa, Artificial Sequence
  Non-cyclic GFR-binding peptide
  MOD_RES (36)..(36): Xaa is C or S
LHDELTSMEGIFIPKKRVIEMIQVTINSLQVQTPRXQV

SEQ ID NO: 14445 - protein, 34 aa, Artificial Sequence
  Non-cyclic GFR-binding peptide
  MOD_RES (33)..(33): Xaa is C or S
  MOD_RES (11)..(12)..(13)..(14)..(15): Xaa is A or G
  MOD_RES (16)..(17)..(18)..(19): Xaa is A or G or absent
NHQLFVTAKKXXXXXXXXXIKRMQVPREETPVXE

SEQ ID NO: 14446 - protein, 42 aa, Artificial Sequence
  Non-cyclic GFR-binding peptide
  MOD_RES (1)..(3)..(37): Xaa is C or S
  MOD_RES (15)..(16)..(17)..(18)..(19): Xaa is A or G
  MOD_RES (20)..(21)..(22)..(23): Xaa is A or G or absent
XEXKNHQLFVTAKKXXXXXXXXXIKRMQVPREETPVXELGED

SEQ ID NO: 14447 - protein, 42 aa, Artificial Sequence
  Non-cyclic GFR-binding peptide
  MOD_RES (2)..(39): Xaa is C or S
KXALHDELTSMEGIFIPKKRVIEMIQVTINSLQVQTPRXQVN

SEQ ID NO: 14448 - protein, 38 aa, Artificial Sequence
  Non-cyclic GFR-binding peptide
  MOD_RES (34)..(34): Xaa is C or S
QSHEELSMEGIHQGQHPKIRMIQMTINSQGTPVXELGE

SEQ ID NO: 14449 - protein, 38 aa, Artificial Sequence
  Non-cyclic GFR-binding peptide
  MOD_RES (1)..(3): Xaa is C or S
  MOD_RES (16)..(17)..(18)..(19)..(20): Xaa is A or G
  MOD_RES (21)..(22)..(23)..(24): Xaa is A or G or absent
XAXELHEELRVTAKKXXXXXXXXXIKRVQVPRHHVRSP

SEQ ID NO: 14450 - protein, 36 aa, Artificial Sequence
  Non-cyclic GFR-binding peptide
  MOD_RES (1)..(1): Xaa is C or S
XELHEELRSMEGILKPKKRVYEMIQVTINSHHVRSP

SEQ ID NO: 14451 - protein, 35 aa, Artificial Sequence
  Non-cyclic GFR-binding peptide
  MOD_RES (1)..(1): Xaa is C or S
XELHEELRVTAKKLKPKKRVYEIKRVQVPRHHVRS

SEQ ID NO: 14452 - protein, 38 aa, Artificial Sequence
  Non-cyclic GFR-binding peptide
  MOD_RES (34)..(34): Xaa is C or S
QSHEELVTAKKHQGQHPKIRIKRMQVPRQGTPVXELGE

SEQ ID NO: 14453 - protein, 36 aa, Artificial Sequence
  Non-cyclic GFR-binding peptide
  MOD_RES (35)..(35): Xaa is C or S
HDELTSMEGLFIPKKRVIEMIQVTINSLQVQTPRXQ

SEQ ID NO: 14454 - protein, 37 aa, Artificial Sequence
  Non-cyclic GFR-binding peptide
  MOD_RES (2)..(2): Xaa is C or S
  MOD_RES (15)..(16)..(17)..(18)..(19): Xaa is A or G
  MOD_RES (20)..(21)..(22)..(23): Xaa is A or G or absent
KXALHDELTSMEGLXXXXXXXXXMIQVTINSLQVQTP

SEQ ID NO: 14455 - protein, 33 aa, Artificial Sequence
  Non-cyclic GFR-binding peptide
LHDELTSMEGIFIPKKRVIEMIQVTINSLQVQT

SEQ ID NO: 14456 - protein, 34 aa, Artificial Sequence
  Non-cyclic GFR-binding peptide
ALHDELTSMEGIFIPKKRVIEMIQVTINSLQVQT

SEQ ID NO: 14457 - protein, 37 aa, Artificial Sequence
  Non-cyclic GFR-binding peptide
  MOD_RES (1)..(35): Xaa is C or S
XKNHQLFVTAKKHQGQHPKIRIKRMQVPREETPVXEL

SEQ ID NO: 14458 - protein, 36 aa, Artificial Sequence
  Non-cyclic GFR-binding peptide
  MOD_RES (35)..(35): Xaa is C or S
HEELRSMEGLLKPKKRVYEMIQVTINSHHVRSPQXK

SEQ ID NO: 14459 - protein, 37 aa, Artificial Sequence
  Non-cyclic GFR-binding peptide
  MOD_RES (1)..(35): Xaa is C or S
  MOD_RES (13)..(14)..(15)..(16)..(17): Xaa is A or G
  MOD_RES (18)..(19)..(20)..(21): Xaa is A or G or absent
XKNHQLFVTAKKXXXXXXXXXIKRMQVPREETPVXEL

SEQ ID NO: 14460 - protein, 38 aa, Artificial Sequence
  Non-cyclic GFR-binding peptide
  MOD_RES (37)..(37): Xaa is C or S
ALHDELTVQVEKFIPKKRVIEVKAVKVSRLQVQTPRXQ

SEQ ID NO: 14461 - protein, 38 aa, Artificial Sequence
  Non-cyclic GFR-binding peptide
  MOD_RES (35)..(35): Xaa is C or S
  MOD_RES (11)..(12)..(13)..(14)..(15): Xaa is A or G
  MOD_RES (16)..(17)..(18)..(19): Xaa is A or G or absent
HEELRSMEGLXXXXXXXXXMIQVTINSHHVRSPQXKVS

SEQ ID NO: 14462 - protein, 36 aa, Artificial Sequence
  Non-cyclic GFR-binding peptide
  MOD_RES (1)..(3): Xaa is C or S
  MOD_RES (15)..(16)..(17)..(18)..(19): Xaa is A or G
  MOD_RES (20)..(21)..(22)..(23): Xaa is A or G or absent
XEXQSHEELVQVEKXXXXXXXXXVKAMKVSRQGTPV

SEQ ID NO: 14463 - protein, 40 aa, Artificial Sequence
  Non-cyclic GFR-binding peptide
  MOD_RES (1)..(35): Xaa is C or S
XKNHQLFVQVEKHQGQHPKIRVKAMKVSREETPVXELGED

SEQ ID NO: 14464 - protein, 38 aa, Artificial Sequence
  Non-cyclic GFR-binding peptide
  MOD_RES (2)..(4)..(38): Xaa is C or S
  MOD_RES (16)..(17)..(18)..(19)..(20): Xaa is A or G
  MOD_RES (21)..(22)..(23)..(24): Xaa is A or G or absent
RXEXKNHQLFSMEGLXXXXXXXXXMIQMTINSEETPVX

SEQ ID NO: 14465 - protein, 37 aa, Artificial Sequence
  Non-cyclic GFR-binding peptide
  MOD_RES (1)..(3)..(37): Xaa is C or S
  MOD_RES (15)..(16)..(17)..(18)..(19): Xaa is A or G
  MOD_RES (20)..(21)..(22)..(23): Xaa is A or G or absent
XEXKNHQLFVQVEKXXXXXXXXXVKAMKVSREETPVX

SEQ ID NO: 14466 - protein, 40 aa, Artificial Sequence
  Non-cyclic GFR-binding peptide
  MOD_RES (1)..(35): Xaa is C or S
XQSHEELVTAKKHQGQHPKIRIKRMQVPRQGTPVXELGED

SEQ ID NO: 14467 - protein, 36 aa, Artificial Sequence
  Non-cyclic GFR-binding peptide
  MOD_RES (35)..(35): Xaa is C or S
  MOD_RES (11)..(12)..(13)..(14)..(15): Xaa is A or G
  MOD_RES (16)..(17)..(18)..(19): Xaa is A or G or absent
HDELTVQVEKXXXXXXXXXVKAVKVSRLQVQTPRXQ

SEQ ID NO: 14468 - protein, 40 aa, Artificial Sequence
  Non-cyclic GFR-binding peptide
  MOD_RES (2)..(4)..(38): Xaa is C or S
  MOD_RES (16)..(17)..(18)..(19)..(20): Xaa is A or G
  MOD_RES (21)..(22)..(23)..(24): Xaa is A or G or absent
RXEXKNHQLFSMEGLXXXXXXXXXMIQMTINSEETPVXEL

SEQ ID NO: 14469 - protein, 40 aa, Artificial Sequence
  Non-cyclic GFR-binding peptide
  MOD_RES (1)..(38): Xaa is C or S
  MOD_RES (14)..(15)..(16)..(17)..(18): Xaa is A or G
  MOD_RES (19)..(20)..(21)..(22): Xaa is A or G or absent
XALHDELTVQVEKXXXXXXXXXVKAVKVSRLQVQTPRXQV

SEQ ID NO: 14470 - protein, 34 aa, Artificial Sequence
  Non-cyclic GFR-binding peptide
  MOD_RES (11)..(12)..(13)..(14)..(15): Xaa is A or G
  MOD_RES (16)..(17)..(18)..(19): Xaa is A or G or absent
HDELTVQVEKXXXXXXXXXVKAVKVSRLQVQTPR

SEQ ID NO: 14471 - protein, 41 aa, Artificial Sequence
  Non-cyclic GFR-binding peptide
  MOD_RES (2)..(36): Xaa is C or S
EXKNHQLFSMEGLHQGQHPKIRMIQMTINSEETPVXELGED

SEQ ID NO: 14472 - protein, 40 aa, Artificial Sequence
  Non-cyclic GFR-binding peptide
  MOD_RES (2)..(4): Xaa is C or S
AXAXELHEELRVTAKKLKPKKRVYEIKRVQVPRHHVRSPQ

SEQ ID NO: 14473 - protein, 36 aa, Artificial Sequence
  Non-cyclic GFR-binding peptide
  MOD_RES (2)..(2): Xaa is C or S
AXELHEELRVTAKKLKPKKRVYEIKRVQVPRHHVRS

SEQ ID NO: 14474 - protein, 36 aa, Artificial Sequence
  Non-cyclic GFR-binding peptide
  MOD_RES (36)..(36): Xaa is C or S
  MOD_RES (12)..(13)..(14)..(15)..(16): Xaa is A or G
  MOD_RES (17)..(18)..(19)..(20): Xaa is A or G or absent
LHDELTSMEGIXXXXXXXXXMIQVTINSLQVQTPRX

SEQ ID NO: 14475 - protein, 37 aa, Artificial Sequence
  Non-cyclic GFR-binding peptide
  MOD_RES (1)..(3): Xaa is C or S
XAXELHEELRSMEGLLKPKKRVYEMIQVTINSHHVRS

SEQ ID NO: 14476 - protein, 33 aa, Artificial Sequence
  Non-cyclic GFR-binding peptide
KNHQLFVQVEKHQGQHPKIRVKAMKVSREETPV

SEQ ID NO: 14477 - protein, 43 aa, Artificial Sequence
  Non-cyclic GFR-binding peptide
  MOD_RES (1)..(3)..(37): Xaa is C or S
XEXQSHEELSMEGIHQGQHPKIRMIQMTINSQGTPVXELGEDN

SEQ ID NO: 14478 - protein, 45 aa, Artificial Sequence
  Non-cyclic GFR-binding peptide
  MOD_RES (2)..(4)..(41): Xaa is C or S
EXKXALHDELTSMEGIFIPKKRVIEMIQVTINSLQVQTPRXQVNR

SEQ ID NO: 14479 - protein, 38 aa, Artificial Sequence
  Non-cyclic GFR-binding peptide
  MOD_RES (1)..(38): Xaa is C or S
  MOD_RES (14)..(15)..(16)..(17)..(18): Xaa is A or G
  MOD_RES (19)..(20)..(21)..(22): Xaa is A or G or absent
XELHEELRSMEGIXXXXXXXXXMIQVTINSHHVRSPQX

SEQ ID NO: 14480 - protein, 36 aa, Artificial Sequence
  Non-cyclic GFR-binding peptide
  MOD_RES (1)..(1): Xaa is C or S
  MOD_RES (14)..(15)..(16)..(17)..(18): Xaa is A or G
  MOD_RES (19)..(20)..(21)..(22): Xaa is A or G or absent
XALHDELTVQVEKXXXXXXXXXVKAVKVSRLQVQTP

SEQ ID NO: 14481 - protein, 39 aa, Artificial Sequence
  Non-cyclic GFR-binding peptide
  MOD_RES (2)..(36): Xaa is C or S
  MOD_RES (14)..(15)..(16)..(17)..(18): Xaa is A or G
  MOD_RES (19)..(20)..(21)..(22): Xaa is A or G or absent
EXQSHEELVQVEKXXXXXXXXXVKAMKVSRQGTPVXELG

SEQ ID NO: 14482 - protein, 34 aa, Artificial Sequence
  Non-cyclic GFR-binding peptide
HEELRSMEGLLKPKKRVYEMIQVTINSHHVRSPQ

SEQ ID NO: 14483 - protein, 37 aa, Artificial Sequence
  Non-cyclic GFR-binding peptide
  MOD_RES (34)..(34): Xaa is C or S
KNHQLFSMEGLHQGQHPKIRMIQMTINSEETPVXELG

SEQ ID NO: 14484 - protein, 39 aa, Artificial Sequence
  Non-cyclic GFR-binding peptide
  MOD_RES (2)..(4)..(38): Xaa is C or S
RXEXQSHEELVQVEKHQGQHPKIRVKAMKVSRQGTPVXE

SEQ ID NO: 14485 - protein, 34 aa, Artificial Sequence
  Non-cyclic GFR-binding peptide
  MOD_RES (13)..(14)..(15)..(16)..(17): Xaa is A or G
  MOD_RES (18)..(19)..(20)..(21): Xaa is A or G or absent
ELHEELRSMEGLXXXXXXXXXMIQVTINSHHVRS

SEQ ID NO: 14486 - protein, 44 aa, Artificial Sequence
  Non-cyclic GFR-binding peptide
  MOD_RES (2)..(4)..(41): Xaa is C or S
  MOD_RES (17)..(18)..(19)..(20)..(21): Xaa is A or G
  MOD_RES (22)..(23)..(24)..(25): Xaa is A or G or absent
AXAXELHEELRSMEGLXXXXXXXXXMIQVTINSHHVRSPQXKVS

SEQ ID NO: 14487 - protein, 42 aa, Artificial Sequence
  Non-cyclic GFR-binding peptide
  MOD_RES (1)..(3)..(37): Xaa is C or S
  MOD_RES (15)..(16)..(17)..(18)..(19): Xaa is A or G
  MOD_RES (20)..(21)..(22)..(23): Xaa is A or G or absent
XEXKNHQLFSMEGLXXXXXXXXXMIQMTINSEETPVXELGED

SEQ ID NO: 14488 - protein, 42 aa, Artificial Sequence
  Non-cyclic GFR-binding peptide
  MOD_RES (2)..(36): Xaa is C or S
  MOD_RES (14)..(15)..(16)..(17)..(18): Xaa is A or G
  MOD_RES (19)..(20)..(21)..(22): Xaa is A or G or absent
EXKNHQLFVTAKKXXXXXXXXXIKRMQVPREETPVXELGEDN

SEQ ID NO: 14489 - protein, 41 aa, Artificial Sequence
  Non-cyclic GFR-binding peptide
  MOD_RES (2)..(36): Xaa is C or S
  MOD_RES (14)..(15)..(16)..(17)..(18): Xaa is A or G
  MOD_RES (19)..(20)..(21)..(22): Xaa is A or G or absent
EXQSHEELVQVEKXXXXXXXXXVKAMKVSRQGTPVXELGED

SEQ ID NO: 14490 - protein, 35 aa, Artificial Sequence
  Non-cyclic GFR-binding peptide
  MOD_RES (12)..(13)..(14)..(15)..(16): Xaa is A or G
  MOD_RES (17)..(18)..(19)..(20): Xaa is A or G or absent
LHDELTSMEGIXXXXXXXXXMIQVTINSLQVQTPR

SEQ ID NO: 14491 - protein, 39 aa, Artificial Sequence
  Non-cyclic GFR-binding peptide
  MOD_RES (1)..(3): Xaa is C or S
  MOD_RES (16)..(17)..(18)..(19)..(20): Xaa is A or G
  MOD_RES (21)..(22)..(23)..(24): Xaa is A or G or absent
XKXALHDELTSMEGIXXXXXXXXXMIQVTINSLQVQTPR

SEQ ID NO: 14492 - protein, 39 aa, Artificial Sequence
  Non-cyclic GFR-binding peptide
  MOD_RES (2)..(39): Xaa is C or S
KXALHDELTSMEGIFIPKKRVIEMIQVTINSLQVQTPRX

SEQ ID NO: 14493 - protein, 41 aa, Artificial Sequence
  Non-cyclic GFR-binding peptide
  MOD_RES (2)..(39): Xaa is C or S
AXELHEELRSMEGILKPKKRVYEMIQVTINSHHVRSPQXKV

SEQ ID NO: 14494 - protein, 39 aa, Artificial Sequence
  Non-cyclic GFR-binding peptide
  MOD_RES (1)..(3)..(37): Xaa is C or S
XEXKNHQLFSMEGLHQGQHPKIRMIQMTINSEETPVXEL

SEQ ID NO: 14495 - protein, 38 aa, Artificial Sequence
  Non-cyclic GFR-binding peptide
  MOD_RES (2)..(2): Xaa is C or S
AXELHEELRSMEGLLKPKKRVYEMIQVTINSHHVRSPQ

SEQ ID NO: 14496 - protein, 35 aa, Artificial Sequence
  Non-cyclic GFR-binding peptide
  MOD_RES (13)..(14)..(15)..(16)..(17): Xaa is A or G
  MOD_RES (18)..(19)..(20)..(21): Xaa is A or G or absent
ELHEELRSMEGLXXXXXXXXXMIQVTINSHHVRSP

SEQ ID NO: 14497 - protein, 39 aa, Artificial Sequence
  Non-cyclic GFR-binding peptide
  MOD_RES (2)..(4)..(38): Xaa is C or S
RXEXQSHEELVTAKKHQGQHPKIRIKRMQVPRQGTPVXE

SEQ ID NO: 14498 - protein, 40 aa, Artificial Sequence
  Non-cyclic GFR-binding peptide
  MOD_RES (1)..(3)..(40): Xaa is C or S
  MOD_RES (16)..(17)..(18)..(19)..(20): Xaa is A or G
  MOD_RES (21)..(22)..(23)..(24): Xaa is A or G or absent
XKXALHDELTSMEGLXXXXXXXXXMIQVTINSLQVQTPRX

SEQ ID NO: 14499 - protein, 39 aa, Artificial Sequence
  Non-cyclic GFR-binding peptide
  MOD_RES (2)..(4): Xaa is C or S
  MOD_RES (17)..(18)..(19)..(20)..(21): Xaa is A or G
  MOD_RES (22)..(23)..(24)..(25): Xaa is A or G or absent
EXKXALHDELTSMEGLXXXXXXXXXMIQVTINSLQVQTP

SEQ ID NO: 14500 - protein, 40 aa, Artificial Sequence
  Non-cyclic GFR-binding peptide
  MOD_RES (1)..(3)..(37): Xaa is C or S
XEXKNHQLFVTAKKHQGQHPKIRIKRMQVPREETPVXELG

SEQ ID NO: 14501 - protein, 34 aa, Artificial Sequence
  Non-cyclic GFR-binding peptide
HEELRVTAKKLKPKKRVYEIKRVQVPRHHVRSPQ

SEQ ID NO: 14502 - protein, 38 aa, Artificial Sequence
  Non-cyclic GFR-binding peptide
  MOD_RES (2)..(4)..(38): Xaa is C or S
  MOD_RES (16)..(17)..(18)..(19)..(20): Xaa is A or G
  MOD_RES (21)..(22)..(23)..(24): Xaa is A or G or absent
RXEXQSHEELVTAKKXXXXXXXXXIKRMQVPRQGTPVX

SEQ ID NO: 14503 - protein, 34 aa, Artificial Sequence
  Non-cyclic GFR-binding peptide
  MOD_RES (12)..(13)..(14)..(15)..(16): Xaa is A or G
  MOD_RES (17)..(18)..(19)..(20): Xaa is A or G or absent
LHEELRSMEGLXXXXXXXXXMIQVTINSHHVRSP

SEQ ID NO: 14504 - protein, 39 aa, Artificial Sequence
  Non-cyclic GFR-binding peptide
  MOD_RES (1)..(38): Xaa is C or S
XALHDELTSMEGLFIPKKRVIEMIQVTINSLQVQTPRXQ

SEQ ID NO: 14505 - protein, 42 aa, Artificial Sequence
  Non-cyclic GFR-binding peptide
  MOD_RES (1)..(38): Xaa is C or S
XELHEELRSMEGLLKPKKRVYEMIQVTINSHHVRSPQXKVSS

SEQ ID NO: 14506 - protein, 38 aa, Artificial Sequence
  Non-cyclic GFR-binding peptide
  MOD_RES (1)..(35): Xaa is C or S
XQSHEELVTAKKHQGQHPKIRIKRMQVPRQGTPVXELG

SEQ ID NO: 14507 - protein, 42 aa, Artificial Sequence
  Non-cyclic GFR-binding peptide
  MOD_RES (1)..(3)..(40): Xaa is C or S
XKXALHDELTVQVEKFIPKKRVIEVKAVKVSRLQVQTPRXQV

SEQ ID NO: 14508 - protein, 41 aa, Artificial Sequence
  Non-cyclic GFR-binding peptide
  MOD_RES (1)..(35): Xaa is C or S
XKNHQLFVTAKKHQGQHPKIRIKRMQVPREETPVXELGEDN

SEQ ID NO: 14509 - protein, 33 aa, Artificial Sequence
  Non-cyclic GFR-binding peptide
  MOD_RES (12)..(13)..(14)..(15)..(16): Xaa is A or G
  MOD_RES (17)..(18)..(19)..(20): Xaa is A or G or absent
QSHEELSMEGIXXXXXXXXXMIQMTINSQGTPV

SEQ ID NO: 14510 - protein, 40 aa, Artificial Sequence
  Non-cyclic GFR-binding peptide
  MOD_RES (2)..(4)..(38): Xaa is C or S
RXEXKNHQLFSMEGLHQGQHPKIRMIQMTINSEETPVXEL

SEQ ID NO: 14511 - protein, 42 aa, Artificial Sequence
  Non-cyclic GFR-binding peptide
  MOD_RES (2)..(4)..(38): Xaa is C or S
  MOD_RES (16)..(17)..(18)..(19)..(20): Xaa is A or G
  MOD_RES (21)..(22)..(23)..(24): Xaa is A or G or absent
RXEXQSHEELSMEGIXXXXXXXXXMIQMTINSQGTPVXELGE

SEQ ID NO: 14512 - protein, 34 aa, Artificial Sequence
  Non-cyclic GFR-binding peptide
  MOD_RES (11)..(12)..(13)..(14)..(15): Xaa is A or G
  MOD_RES (16)..(17)..(18)..(19): Xaa is A or G or absent
HDELTSMEGLXXXXXXXXXMIQVTINSLQVQTPR

SEQ ID NO: 14513 - protein, 35 aa, Artificial Sequence
  Non-cyclic GFR-binding peptide
  MOD_RES (12)..(13)..(14)..(15)..(16): Xaa is A or G
  MOD_RES (17)..(18)..(19)..(20): Xaa is A or G or absent
LHEELRSMEGIXXXXXXXXXMIQVTINSHHVRSPQ

SEQ ID NO: 14514 - protein, 43 aa, Artificial Sequence
  Non-cyclic GFR-binding peptide
  MOD_RES (2)..(4)..(41): Xaa is C or S
  MOD_RES (17)..(18)..(19)..(20)..(21): Xaa is A or G
  MOD_RES (22)..(23)..(24)..(25): Xaa is A or G or absent
AXAXELHEELRSMEGIXXXXXXXXXMIQVTINSHHVRSPQXKV

SEQ ID NO: 14515 - protein, 35 aa, Artificial Sequence
  Non-cyclic GFR-binding peptide
  MOD_RES (1)..(35): Xaa is C or S
XKNHQLFVQVEKHQGQHPKIRVKAMKVSREETPVX

SEQ ID NO: 14516 - protein, 39 aa, Artificial Sequence
  Non-cyclic GFR-binding peptide
  MOD_RES (2)..(4)..(38): Xaa is C or S
RXEXKNHQLFSMEGLHQGQHPKIRMIQMTINSEETPVXE

SEQ ID NO: 14517 - protein, 36 aa, Artificial Sequence
  Non-cyclic GFR-binding peptide
  MOD_RES (1)..(35): Xaa is C or S
  MOD_RES (13)..(14)..(15)..(16)..(17): Xaa is A or G
  MOD_RES (18)..(19)..(20)..(21): Xaa is A or G or absent
XQSHEELSMEGIXXXXXXXXXMIQMTINSQGTPVXE

SEQ ID NO: 14518 - protein, 41 aa, Artificial Sequence
  Non-cyclic GFR-binding peptide
  MOD_RES (1)..(3)..(40): Xaa is C or S
XAXELHEELRVTAKKLKPKKRVYEIKRVQVPRHHVRSPQXK

SEQ ID NO: 14519 - protein, 37 aa, Artificial Sequence
  Non-cyclic GFR-binding peptide
  MOD_RES (2)..(4): Xaa is C or S
RXEXKNHQLFVQVEKHQGQHPKIRVKAMKVSREETPV

SEQ ID NO: 14520 - protein, 37 aa, Artificial Sequence
  Non-cyclic GFR-binding peptide
  MOD_RES (2)..(36): Xaa is C or S
EXKNHQLFVTAKKHQGQHPKIRIKRMQVPREETPVXE

SEQ ID NO: 14521 - protein, 40 aa, Artificial Sequence
  Non-cyclic GFR-binding peptide
  MOD_RES (1)..(3)..(40): Xaa is C or S
XKXALHDELTSMEGIFIPKKRVIEMIQVTINSLQVQTPRX

SEQ ID NO: 14522 - protein, 33 aa, Artificial Sequence
  Non-cyclic GFR-binding peptide
  MOD_RES (12)..(13)..(14)..(15)..(16): Xaa is A or G
  MOD_RES (17)..(18)..(19)..(20): Xaa is A or G or absent
QSHEELVTAKKXXXXXXXXXIKRMQVPRQGTPV

SEQ ID NO: 14523 - protein, 44 aa, Artificial Sequence
  Non-cyclic GFR-binding peptide
  MOD_RES (1)..(3)..(40): Xaa is C or S
XAXELHEELRSMEGILKPKKRVYEMIQVTINSHHVRSPQXKVSS

SEQ ID NO: 14524 - protein, 37 aa, Artificial Sequence
  Non-cyclic GFR-binding peptide
  MOD_RES (35)..(35): Xaa is C or S
HEELRSMEGLLKPKKRVYEMIQVTINSHHVRSPQXKV

SEQ ID NO: 14525 - protein, 37 aa, Artificial Sequence
  Non-cyclic GFR-binding peptide
  MOD_RES (35)..(35): Xaa is C or S
HEELRSMEGILKPKKRVYEMIQVTINSHHVRSPQXKV

SEQ ID NO: 14526 - protein, 36 aa, Artificial Sequence
  Non-cyclic GFR-binding peptide
  MOD_RES (2)..(2): Xaa is C or S
  MOD_RES (15)..(16)..(17)..(18)..(19): Xaa is A or G
  MOD_RES (20)..(21)..(22)..(23): Xaa is A or G or absent
AXELHEELRSMEGLXXXXXXXXXMIQVTINSHHVRS

SEQ ID NO: 14527 - protein, 41 aa, Artificial Sequence
  Non-cyclic GFR-binding peptide
  MOD_RES (1)..(3)..(40): Xaa is C or S
XKXALHDELTSMEGLFIPKKRVIEMIQVTINSLQVQTPRXQ

SEQ ID NO: 14528 - protein, 37 aa, Artificial Sequence
  Non-cyclic GFR-binding peptide
  MOD_RES (2)..(36): Xaa is C or S
EXQSHEELVQVEKHQGQHPKIRVKAMKVSRQGTPVXE

SEQ ID NO: 14529 - protein, 41 aa, Artificial Sequence
  Non-cyclic GFR-binding peptide
  MOD_RES (2)..(39): Xaa is C or S
KXALHDELTSMEGIFIPKKRVIEMIQVTINSLQVQTPRXQV

SEQ ID NO: 14530 - protein, 41 aa, Artificial Sequence
  Non-cyclic GFR-binding peptide
  MOD_RES (2)..(4)..(38): Xaa is C or S
RXEXKNHQLFVQVEKHQGQHPKIRVKAMKVSREETPVXELG

SEQ ID NO: 14531 - protein, 37 aa, Artificial Sequence
  Non-cyclic GFR-binding peptide
  MOD_RES (36)..(36): Xaa is C or S
  MOD_RES (12)..(13)..(14)..(15)..(16): Xaa is A or G
  MOD_RES (17)..(18)..(19)..(20): Xaa is A or G or absent
LHDELTSMEGLXXXXXXXXXMIQVTINSLQVQTPRXQ

SEQ ID NO: 14532 - protein, 40 aa, Artificial Sequence
  Non-cyclic GFR-binding peptide
  MOD_RES (2)..(4)..(38): Xaa is C or S
RXEXQSHEELVQVEKHQGQHPKIRVKAMKVSRQGTPVXEL

SEQ ID NO: 14533 - protein, 39 aa, Artificial Sequence
  Non-cyclic GFR-binding peptide
  MOD_RES (1)..(3): Xaa is C or S
XAXELHEELRVTAKKLKPKKRVYEIKRVQVPRHHVRSPQ

SEQ ID NO: 14534 - protein, 38 aa, Artificial Sequence
  Non-cyclic GFR-binding peptide
  MOD_RES (1)..(35): Xaa is C or S
XKNHQLFSMEGLHQGQHPKIRMIQMTINSEETPVXELG

SEQ ID NO: 14535 - protein, 39 aa, Artificial Sequence
  Non-cyclic GFR-binding peptide
  MOD_RES (37)..(37): Xaa is C or S
ALHDELTVQVEKFIPKKRVIEVKAVKVSRLQVQTPRXQV

SEQ ID NO: 14536 - protein, 40 aa, Artificial Sequence
  Non-cyclic GFR-binding peptide
  MOD_RES (34)..(34): Xaa is C or S
QSHEELVQVEKHQGQHPKIRVKAMKVSRQGTPVXELGEDN

SEQ ID NO: 14537 - protein, 39 aa, Artificial Sequence
  Non-cyclic GFR-binding peptide
  MOD_RES (1)..(3)..(37): Xaa is C or S
  MOD_RES (15)..(16)..(17)..(18)..(19): Xaa is A or G
  MOD_RES (20)..(21)..(22)..(23): Xaa is A or G or absent
XEXQSHEELVQVEKXXXXXXXXXVKAMKVSRQGTPVXEL

SEQ ID NO: 14538 - protein, 41 aa, Artificial Sequence
  Non-cyclic GFR-binding peptide
  MOD_RES (1)..(3)..(37): Xaa is C or S
  MOD_RES (15)..(16)..(17)..(18)..(19): Xaa is A or G
  MOD_RES (20)..(21)..(22)..(23): Xaa is A or G or absent
XEXQSHEELSMEGIXXXXXXXXXMIQMTINSQGTPVXELGE

SEQ ID NO: 14539 - protein, 35 aa, Artificial Sequence
  Non-cyclic GFR-binding peptide
  MOD_RES (12)..(13)..(14)..(15)..(16): Xaa is A or G
  MOD_RES (17)..(18)..(19)..(20): Xaa is A or G or absent
LHEELRVTAKKXXXXXXXXXIKRVQVPRHHVRSPQ

SEQ ID NO: 14540 - protein, 43 aa, Artificial Sequence
  Non-cyclic GFR-binding peptide
  MOD_RES (1)..(3)..(40): Xaa is C or S
  MOD_RES (16)..(17)..(18)..(19)..(20): Xaa is A or G
  MOD_RES (21)..(22)..(23)..(24): Xaa is A or G or absent
XAXELHEELRVTAKKXXXXXXXXXIKRVQVPRHHVRSPQXKVS

SEQ ID NO: 14541 - protein, 39 aa, Artificial Sequence
  Non-cyclic GFR-binding peptide
  MOD_RES (2)..(4): Xaa is C or S
  MOD_RES (17)..(18)..(19)..(20)..(21): Xaa is A or G
  MOD_RES (22)..(23)..(24)..(25): Xaa is A or G or absent
AXAXELHEELRSMEGIXXXXXXXXXMIQVTINSHHVRSP

SEQ ID NO: 14542 - protein, 35 aa, Artificial Sequence
  Non-cyclic GFR-binding peptide
ALHDELTSMEGIFIPKKRVIEMIQVTINSLQVQTP

SEQ ID NO: 14543 - protein, 40 aa, Artificial Sequence
  Non-cyclic GFR-binding peptide
  MOD_RES (36)..(36): Xaa is C or S
  MOD_RES (12)..(13)..(14)..(15)..(16): Xaa is A or G
  MOD_RES (17)..(18)..(19)..(20): Xaa is A or G or absent
LHDELTSMEGIXXXXXXXXXMIQVTINSLQVQTPRXQVNR

SEQ ID NO: 14544 - protein, 38 aa, Artificial Sequence
  Non-cyclic GFR-binding peptide
  MOD_RES (2)..(36): Xaa is C or S
EXKNHQLFVTAKKHQGQHPKIRIKRMQVPREETPVXEL

SEQ ID NO: 14545 - protein, 43 aa, Artificial Sequence
  Non-cyclic GFR-binding peptide
  MOD_RES (2)..(39): Xaa is C or S
  MOD_RES (15)..(16)..(17)..(18)..(19): Xaa is A or G
  MOD_RES (20)..(21)..(22)..(23): Xaa is A or G or absent
KXALHDELTSMEGLXXXXXXXXXMIQVTINSLQVQTPRXQVNR

SEQ ID NO: 14546 - protein, 41 aa, Artificial Sequence
  Non-cyclic GFR-binding peptide
  MOD_RES (1)..(38): Xaa is C or S
  MOD_RES (14)..(15)..(16)..(17)..(18): Xaa is A or G
  MOD_RES (19)..(20)..(21)..(22): Xaa is A or G or absent
XALHDELTSMEGIXXXXXXXXXMIQVTINSLQVQTPRXQVN

SEQ ID NO: 14547 - protein, 38 aa, Artificial Sequence
  Non-cyclic GFR-binding peptide
  MOD_RES (2)..(2): Xaa is C or S
  MOD_RES (15)..(16)..(17)..(18)..(19): Xaa is A or G
  MOD_RES (20)..(21)..(22)..(23): Xaa is A or G or absent
AXELHEELRSMEGLXXXXXXXXXMIQVTINSHHVRSPQ

SEQ ID NO: 14548 - protein, 34 aa, Artificial Sequence
  Non-cyclic GFR-binding peptide
  MOD_RES (34)..(34): Xaa is C or S
  MOD_RES (12)..(13)..(14)..(15)..(16): Xaa is A or G
  MOD_RES (17)..(18)..(19)..(20): Xaa is A or G or absent
QSHEELVQVEKXXXXXXXXXVKAMKVSRQGTPVX

SEQ ID NO: 14549 - protein, 41 aa, Artificial Sequence
  Non-cyclic GFR-binding peptide
  MOD_RES (2)..(4)..(38): Xaa is C or S
  MOD_RES (16)..(17)..(18)..(19)..(20): Xaa is A or G
  MOD_RES (21)..(22)..(23)..(24): Xaa is A or G or absent
RXEXKNHQLFVTAKKXXXXXXXXXIKRMQVPREETPVXELG

SEQ ID NO: 14550 - protein, 41 aa, Artificial Sequence
  Non-cyclic GFR-binding peptide
  MOD_RES (2)..(39): Xaa is C or S
  MOD_RES (15)..(16)..(17)..(18)..(19): Xaa is A or G
  MOD_RES (20)..(21)..(22)..(23): Xaa is A or G or absent
KXALHDELTSMEGIXXXXXXXXXMIQVTINSLQVQTPRXQV

SEQ ID NO: 14551 - protein, 35 aa, Artificial Sequence
  Non-cyclic GFR-binding peptide
  MOD_RES (1)..(35): Xaa is C or S
  MOD_RES (13)..(14)..(15)..(16)..(17): Xaa is A or G
  MOD_RES (18)..(19)..(20)..(21): Xaa is A or G or absent
XKNHQLFVQVEKXXXXXXXXXVKAMKVSREETPVX

SEQ ID NO: 14552 - protein, 39 aa, Artificial Sequence
  Non-cyclic GFR-binding peptide
  MOD_RES (36)..(36): Xaa is C or S
LHDELTSMEGIFIPKKRVIEMIQVTINSLQVQTPRXQVN

SEQ ID NO: 14553 - protein, 38 aa, Artificial Sequence
  Non-cyclic GFR-binding peptide
  MOD_RES (1)..(35): Xaa is C or S
  MOD_RES (13)..(14)..(15)..(16)..(17): Xaa is A or G
  MOD_RES (18)..(19)..(20)..(21): Xaa is A or G or absent
XQSHEELVTAKKXXXXXXXXXIKRMQVPRQGTPVXELG

SEQ ID NO: 14554 - protein, 40 aa, Artificial Sequence
  Non-cyclic GFR-binding peptide
  MOD_RES (36)..(36): Xaa is C or S
LHDELTVQVEKFIPKKRVIEVKAVKVSRLQVQTPRXQVNR

SEQ ID NO: 14555 - protein, 37 aa, Artificial Sequence
  Non-cyclic GFR-binding peptide
  MOD_RES (2)..(2): Xaa is C or S
AXELHEELRSMEGILKPKKRVYEMIQVTINSHHVRSP

SEQ ID NO: 14556 - protein, 42 aa, Artificial Sequence
  Non-cyclic GFR-binding peptide
  MOD_RES (2)..(36): Xaa is C or S
EXKNHQLFSMEGLHQGQHPKIRMIQMTINSEETPVXELGEDN

SEQ ID NO: 14557 - protein, 41 aa, Artificial Sequence
  Non-cyclic GFR-binding peptide
  MOD_RES (2)..(4)..(41): Xaa is C or S
  MOD_RES (17)..(18)..(19)..(20)..(21): Xaa is A or G
  MOD_RES (22)..(23)..(24)..(25): Xaa is A or G or absent
EXKXALHDELTSMEGLXXXXXXXXXMIQVTINSLQVQTPRX

SEQ ID NO: 14558 - protein, 36 aa, Artificial Sequence
  Non-cyclic GFR-binding peptide
  MOD_RES (1)..(3): Xaa is C or S
XEXKNHQLFSMEGLHQGQHPKIRMIQMTINSEETPV

SEQ ID NO: 14559 - protein, 37 aa, Artificial Sequence
  Non-cyclic GFR-binding peptide
  MOD_RES (37)..(37): Xaa is C or S
  MOD_RES (13)..(14)..(15)..(16)..(17): Xaa is A or G
  MOD_RES (18)..(19)..(20)..(21): Xaa is A or G or absent
ELHEELRSMEGIXXXXXXXXXMIQVTINSHHVRSPQX

SEQ ID NO: 14560 - protein, 41 aa, Artificial Sequence
  Non-cyclic GFR-binding peptide
  MOD_RES (1)..(38): Xaa is C or S
XELHEELRVTAKKLKPKKRVYEIKRVQVPRHHVRSPQXKVS

SEQ ID NO: 14561 - protein, 36 aa, Artificial Sequence
  Non-cyclic GFR-binding peptide
  MOD_RES (34)..(34): Xaa is C or S
QSHEELVTAKKHQGQHPKIRIKRMQVPRQGTPVXEL

SEQ ID NO: 14562 - protein, 40 aa, Artificial Sequence
  Non-cyclic GFR-binding peptide
  MOD_RES (1)..(3)..(40): Xaa is C or S
  MOD_RES (16)..(17)..(18)..(19)..(20): Xaa is A or G
  MOD_RES (21)..(22)..(23)..(24): Xaa is A or G or absent
XAXELHEELRVTAKKXXXXXXXXXIKRVQVPRHHVRSPQX

SEQ ID NO: 14563 - protein, 43 aa, Artificial Sequence
  Non-cyclic GFR-binding peptide
  MOD_RES (2)..(39): Xaa is C or S
KXALHDELTSMEGLFIPKKRVIEMIQVTINSLQVQTPRXQVNR

SEQ ID NO: 14564 - protein, 37 aa, Artificial Sequence
  Non-cyclic GFR-binding peptide
  MOD_RES (2)..(4): Xaa is C or S
  MOD_RES (16)..(17)..(18)..(19)..(20): Xaa is A or G
  MOD_RES (21)..(22)..(23)..(24): Xaa is A or G or absent
RXEXKNHQLFVTAKKXXXXXXXXXIKRMQVPREETPV

SEQ ID NO: 14565 - protein, 37 aa, Artificial Sequence
  Non-cyclic GFR-binding peptide
  MOD_RES (1)..(3): Xaa is C or S
  MOD_RES (16)..(17)..(18)..(19)..(20): Xaa is A or G
  MOD_RES (21)..(22)..(23)..(24): Xaa is A or G or absent
XKXALHDELTVQVEKXXXXXXXXXVKAVKVSRLQVQT

SEQ ID NO: 14566 - protein, 40 aa, Artificial Sequence
  Non-cyclic GFR-binding peptide
  MOD_RES (1)..(3)..(37): Xaa is C or S
  MOD_RES (15)..(16)..(17)..(18)..(19): Xaa is A or G
  MOD_RES (20)..(21)..(22)..(23): Xaa is A or G or absent
XEXQSHEELVTAKKXXXXXXXXXIKRMQVPRQGTPVXELG

SEQ ID NO: 14567 - protein, 39 aa, Artificial Sequence
  Non-cyclic GFR-binding peptide
  MOD_RES (35)..(35): Xaa is C or S
  MOD_RES (11)..(12)..(13)..(14)..(15): Xaa is A or G
  MOD_RES (16)..(17)..(18)..(19): Xaa is A or G or absent
HDELTSMEGIXXXXXXXXXMIQVTINSLQVQTPRXQVNR

SEQ ID NO: 14568 - protein, 34 aa, Artificial Sequence
  Non-cyclic GFR-binding peptide
  MOD_RES (1)..(1): Xaa is C or S
  MOD_RES (13)..(14)..(15)..(16)..(17): Xaa is A or G
  MOD_RES (18)..(19)..(20)..(21): Xaa is A or G or absent
XKNHQLFVQVEKXXXXXXXXXVKAMKVSREETPV

SEQ ID NO: 14569 - protein, 36 aa, Artificial Sequence
  Non-cyclic GFR-binding peptide
  MOD_RES (34)..(34): Xaa is C or S
QSHEELSMEGIHQGQHPKIRMIQMTINSQGTPVXEL

SEQ ID NO: 14570 - protein, 37 aa, Artificial Sequence
  Non-cyclic GFR-binding peptide
  MOD_RES (1)..(1): Xaa is C or S
  MOD_RES (14)..(15)..(16)..(17)..(18): Xaa is A or G
  MOD_RES (19)..(20)..(21)..(22): Xaa is A or G or absent
XALHDELTSMEGLXXXXXXXXXMIQVTINSLQVQTPR

SEQ ID NO: 14571 - protein, 39 aa, Artificial Sequence
  Non-cyclic GFR-binding peptide
  MOD_RES (35)..(35): Xaa is C or S
  MOD_RES (11)..(12)..(13)..(14)..(15): Xaa is A or G
  MOD_RES (16)..(17)..(18)..(19): Xaa is A or G or absent
HDELTSMEGLXXXXXXXXXMIQVTINSLQVQTPRXQVNR

SEQ ID NO: 14572 - protein, 38 aa, Artificial Sequence
  Non-cyclic GFR-binding peptide
  MOD_RES (1)..(3)..(37): Xaa is C or S
  MOD_RES (15)..(16)..(17)..(18)..(19): Xaa is A or G
  MOD_RES (20)..(21)..(22)..(23): Xaa is A or G or absent
XEXKNHQLFVTAKKXXXXXXXXXIKRMQVPREETPVXE

SEQ ID NO: 14573 - protein, 36 aa, Artificial Sequence
  Non-cyclic GFR-binding peptide
ELHEELRSMEGLLKPKKRVYEMIQVTINSHHVRSPQ

SEQ ID NO: 14574 - protein, 39 aa, Artificial Sequence
  Non-cyclic GFR-binding peptide
  MOD_RES (2)..(36): Xaa is C or S
  MOD_RES (14)..(15)..(16)..(17)..(18): Xaa is A or G
  MOD_RES (19)..(20)..(21)..(22): Xaa is A or G or absent
EXKNHQLFVTAKKXXXXXXXXXIKRMQVPREETPVXELG

SEQ ID NO: 14575 - protein, 36 aa, Artificial Sequence
  Non-cyclic GFR-binding peptide
  MOD_RES (36)..(36): Xaa is C or S
  MOD_RES (12)..(13)..(14)..(15)..(16): Xaa is A or G
  MOD_RES (17)..(18)..(19)..(20): Xaa is A or G or absent
LHEELRVTAKKXXXXXXXXXIKRVQVPRHHVRSPQX

SEQ ID NO: 14576 - protein, 42 aa, Artificial Sequence
  Non-cyclic GFR-binding peptide
  MOD_RES (2)..(4)..(41): Xaa is C or S
EXKXALHDELTSMEGIFIPKKRVIEMIQVTINSLQVQTPRXQ

SEQ ID NO: 14577 - protein, 41 aa, Artificial Sequence
  Non-cyclic GFR-binding peptide
  MOD_RES (2)..(36): Xaa is C or S
  MOD_RES (14)..(15)..(16)..(17)..(18): Xaa is A or G
  MOD_RES (19)..(20)..(21)..(22): Xaa is A or G or absent
EXKNHQLFVTAKKXXXXXXXXXIKRMQVPREETPVXELGED

SEQ ID NO: 14578 - protein, 34 aa, Artificial Sequence
  Non-cyclic GFR-binding peptide
  MOD_RES (11)..(12)..(13)..(14)..(15): Xaa is A or G
  MOD_RES (16)..(17)..(18)..(19): Xaa is A or G or absent
HDELTSMEGIXXXXXXXXXMIQVTINSLQVQTPR

SEQ ID NO: 14579 - protein, 34 aa, Artificial Sequence
  Non-cyclic GFR-binding peptide
  MOD_RES (1)..(1): Xaa is C or S
XKNHQLFVQVEKHQGQHPKIRVKAMKVSREETPV

SEQ ID NO: 14580 - protein, 36 aa, Artificial Sequence
  Non-cyclic GFR-binding peptide
  MOD_RES (36)..(36): Xaa is C or S
  MOD_RES (12)..(13)..(14)..(15)..(16): Xaa is A or G
  MOD_RES (17)..(18)..(19)..(20): Xaa is A or G or absent
LHEELRSMEGIXXXXXXXXXMIQVTINSHHVRSPQX

SEQ ID NO: 14581 - protein, 41 aa, Artificial Sequence
  Non-cyclic GFR-binding peptide
  MOD_RES (1)..(3)..(37): Xaa is C or S
  MOD_RES (15)..(16)..(17)..(18)..(19): Xaa is A or G
  MOD_RES (20)..(21)..(22)..(23): Xaa is A or G or absent
XEXQSHEELVTAKKXXXXXXXXXIKRMQVPRQGTPVXELGE

SEQ ID NO: 14582 - protein, 39 aa, Artificial Sequence
  Non-cyclic GFR-binding peptide
  MOD_RES (37)..(37): Xaa is C or S
ALHDELTSMEGLFIPKKRVIEMIQVTINSLQVQTPRXQV

SEQ ID NO: 14583 - protein, 40 aa, Artificial Sequence
  Non-cyclic GFR-binding peptide
  MOD_RES (1)..(38): Xaa is C or S
  MOD_RES (14)..(15)..(16)..(17)..(18): Xaa is A or G
  MOD_RES (19)..(20)..(21)..(22): Xaa is A or G or absent
XELHEELRSMEGIXXXXXXXXXMIQVTINSHHVRSPQXKV

SEQ ID NO: 14584 - protein, 35 aa, Artificial Sequence
  Non-cyclic GFR-binding peptide
  MOD_RES (1)..(1): Xaa is C or S
  MOD_RES (14)..(15)..(16)..(17)..(18): Xaa is A or G
  MOD_RES (19)..(20)..(21)..(22): Xaa is A or G or absent
XELHEELRSMEGLXXXXXXXXXMIQVTINSHHVRS

SEQ ID NO: 14585 - protein, 37 aa, Artificial Sequence
  Non-cyclic GFR-binding peptide
  MOD_RES (1)..(35): Xaa is C or S
XQSHEELVQVEKHQGQHPKIRVKAMKVSRQGTPVXEL

SEQ ID NO: 14586 - protein, 41 aa, Artificial Sequence
  Non-cyclic GFR-binding peptide
  MOD_RES (1)..(35): Xaa is C or S
  MOD_RES (13)..(14)..(15)..(16)..(17): Xaa is A or G
  MOD_RES (18)..(19)..(20)..(21): Xaa is A or G or absent
XKNHQLFVTAKKXXXXXXXXXIKRMQVPREETPVXELGEDN

SEQ ID NO: 14587 - protein, 37 aa, Artificial Sequence
  Non-cyclic GFR-binding peptide
  MOD_RES (1)..(35): Xaa is C or S
  MOD_RES (13)..(14)..(15)..(16)..(17): Xaa is A or G
  MOD_RES (18)..(19)..(20)..(21): Xaa is A or G or absent
XQSHEELVQVEKXXXXXXXXXVKAMKVSRQGTPVXEL

SEQ ID NO: 14588 - protein, 40 aa, Artificial Sequence
  Non-cyclic GFR-binding peptide
  MOD_RES (2)..(4)..(38): Xaa is C or S
  MOD_RES (16)..(17)..(18)..(19)..(20): Xaa is A or G
  MOD_RES (21)..(22)..(23)..(24): Xaa is A or G or absent
RXEXQSHEELVTAKKXXXXXXXXXIKRMQVPRQGTPVXEL

SEQ ID NO: 14589 - protein, 38 aa, Artificial Sequence
  Non-cyclic GFR-binding peptide
  MOD_RES (2)..(2): Xaa is C or S
  MOD_RES (15)..(16)..(17)..(18)..(19): Xaa is A or G
  MOD_RES (20)..(21)..(22)..(23): Xaa is A or G or absent
AXELHEELRVTAKKXXXXXXXXXIKRVQVPRHHVRSPQ

SEQ ID NO: 14590 - protein, 42 aa, Artificial Sequence
  Non-cyclic GFR-binding peptide
  MOD_RES (7)..(41): Xaa is C or S
  MOD_RES (21)..(22)..(23)..(24)..(25): Xaa is A or G
  MOD_RES (26)..(27)..(28)..(29): Xaa is A or G or absent
NDEGLEXVPTEERSVKMAKVXXXXXXXXXKEVQVFLQHNKXE

SEQ ID NO: 14591 - protein, 37 aa, Artificial Sequence
  Non-cyclic GFR-binding peptide
  MOD_RES (37)..(37): Xaa is C or S
  MOD_RES (16)..(17)..(18)..(19)..(20): Xaa is A or G
  MOD_RES (21)..(22)..(23)..(24): Xaa is A or G or absent
QPSRVHHSNITVQIMXXXXXXXXXLGEMSRLEEHLEX

SEQ ID NO: 14592 - protein, 36 aa, Artificial Sequence
  Non-cyclic GFR-binding peptide
  MOD_RES (34)..(36): Xaa is C or S
VPTGQSNITMQIMRIKPHQGQHIGEMSLEEHSQXEX

SEQ ID NO: 14593 - protein, 43 aa, Artificial Sequence
  Non-cyclic GFR-binding peptide
  MOD_RES (7)..(41)..(43): Xaa is C or S
NDEGLEXVPTEESNITMQIMRIKPHQGQHLGEMSFLQHNKXEX

SEQ ID NO: 14594 - protein, 35 aa, Artificial Sequence
  Non-cyclic GFR-binding peptide
  MOD_RES (1)..(35): Xaa is C or S
XVPTGQSNITMQIMRIKPHQGQHIGEMSLEEHSQX

SEQ ID NO: 14595 - protein, 42 aa, Artificial Sequence
  Non-cyclic GFR-binding peptide
  MOD_RES (2)..(39)..(41): Xaa is C or S
  MOD_RES (18)..(19)..(20)..(21)..(22): Xaa is A or G
  MOD_RES (23)..(24)..(25)..(26): Xaa is A or G or absent
KXQPSRVHHSNITVQIMXXXXXXXXXIGEMSRLEEHLEXAXA

SEQ ID NO: 14596 - protein, 38 aa, Artificial Sequence
  Non-cyclic GFR-binding peptide
  MOD_RES (36)..(38): Xaa is C or S
  MOD_RES (15)..(16)..(17)..(18)..(19): Xaa is A or G
  MOD_RES (20)..(21)..(22)..(23): Xaa is A or G or absent
PSRVHHSNITVQIMXXXXXXXXXIGEMSRLEEHLEXAX

SEQ ID NO: 14597 - protein, 41 aa, Artificial Sequence
  Non-cyclic GFR-binding peptide
  MOD_RES (2)..(39)..(41): Xaa is C or S
  MOD_RES (18)..(19)..(20)..(21)..(22): Xaa is A or G
  MOD_RES (23)..(24)..(25)..(26): Xaa is A or G or absent
QXRPTQVQLSNITVQIMXXXXXXXXXIGEMSTLEDHLAXKX

SEQ ID NO: 14598 - protein, 39 aa, Artificial Sequence
  Non-cyclic GFR-binding peptide
  MOD_RES (4)..(38): Xaa is C or S
  MOD_RES (18)..(19)..(20)..(21)..(22): Xaa is A or G
  MOD_RES (23)..(24)..(25)..(26): Xaa is A or G or absent
GLEXVPTEERSVKMAKVXXXXXXXXXKEVQVFLQHNKXE

SEQ ID NO: 14599 - protein, 32 aa, Artificial Sequence
  Non-cyclic GFR-binding peptide
VPTEERPVQMRKIRIKPHQGQHKKATVFLQHN

SEQ ID NO: 14600 - protein, 42 aa, Artificial Sequence
  Non-cyclic GFR-binding peptide
  MOD_RES (5)..(42): Xaa is C or S
SSVKXQPSRVHHRPVQVRKIEYVRKKPKLKKATVRLEEHLEX

SEQ ID NO: 14601 - protein, 34 aa, Artificial Sequence
  Non-cyclic GFR-binding peptide
  MOD_RES (2)..(2): Xaa is C or S
  MOD_RES (16)..(17)..(18)..(19)..(20): Xaa is A or G
  MOD_RES (21)..(22)..(23)..(24): Xaa is A or G or absent
EXVPTGQRPVQMRKIXXXXXXXXXKKATVLEEHS

SEQ ID NO: 14602 - protein, 36 aa, Artificial Sequence
  Non-cyclic GFR-binding peptide
  MOD_RES (2)..(2): Xaa is C or S
  MOD_RES (18)..(19)..(20)..(21)..(22): Xaa is A or G
  MOD_RES (23)..(24)..(25)..(26): Xaa is A or G or absent
KXQPSRVHHSNITVQIMXXXXXXXXXLGEMSRLEEH

SEQ ID NO: 14603 - protein, 43 aa, Artificial Sequence
  Non-cyclic GFR-binding peptide
  MOD_RES (7)..(41)..(43): Xaa is C or S
  MOD_RES (21)..(22)..(23)..(24)..(25): Xaa is A or G
  MOD_RES (26)..(27)..(28)..(29): Xaa is A or G or absent
NDEGLEXVPTGQRSVKMAKVXXXXXXXXXKEVQVLEEHSQXEX

SEQ ID NO: 14604 - protein, 40 aa, Artificial Sequence
  Non-cyclic GFR-binding peptide
  MOD_RES (7)..(7): Xaa is C or S
  MOD_RES (21)..(22)..(23)..(24)..(25): Xaa is A or G
  MOD_RES (26)..(27)..(28)..(29): Xaa is A or G or absent
NDEGLEXVPTGQRSVKMAKVXXXXXXXXXKEVQVLEEHSQ

SEQ ID NO: 14605 - protein, 38 aa, Artificial Sequence
  Non-cyclic GFR-binding peptide
  MOD_RES (2)..(2): Xaa is C or S
  MOD_RES (18)..(19)..(20)..(21)..(22): Xaa is A or G
  MOD_RES (23)..(24)..(25)..(26): Xaa is A or G or absent
QXRPTQVQLRSVKVAKVXXXXXXXXXKEVQVTLEDHLA

SEQ ID NO: 14606 - protein, 41 aa, Artificial Sequence
  Non-cyclic GFR-binding peptide
  MOD_RES (4)..(38)..(40): Xaa is C or S
  MOD_RES (18)..(19)..(20)..(21)..(22): Xaa is A or G
  MOD_RES (23)..(24)..(25)..(26): Xaa is A or G or absent
GLEXVPTGQRSVKMAKVXXXXXXXXXKEVQVLEEHSQXEXR

SEQ ID NO: 14607 - protein, 36 aa, Artificial Sequence
  Non-cyclic GFR-binding peptide
  MOD_RES (1)..(35): Xaa is C or S
  MOD_RES (15)..(16)..(17)..(18)..(19): Xaa is A or G
  MOD_RES (20)..(21)..(22)..(23): Xaa is A or G or absent
XVPTGQRSVKMAKVXXXXXXXXXKEVQVLEEHSQXE

SEQ ID NO: 14608 - protein, 35 aa, Artificial Sequence
  Non-cyclic GFR-binding peptide
  MOD_RES (34)..(34): Xaa is C or S
VPTEESNITMQIMRIKPHQGQHLGEMSFLQHNKXE

SEQ ID NO: 14609 - protein, 39 aa, Artificial Sequence
  Non-cyclic GFR-binding peptide
  MOD_RES (2)..(39): Xaa is C or S
KXQPSRVHHSNITVQIMEYVRKKPKLIGEMSRLEEHLEX

SEQ ID NO: 14610 - protein, 36 aa, Artificial Sequence
  Non-cyclic GFR-binding peptide
  MOD_RES (34)..(36): Xaa is C or S
VPTEERSVKMAKVRIKPHQGQHKEVQVFLQHNKXEX

SEQ ID NO: 14611 - protein, 40 aa, Artificial Sequence
  Non-cyclic GFR-binding peptide
  MOD_RES (2)..(39): Xaa is C or S
  MOD_RES (18)..(19)..(20)..(21)..(22): Xaa is A or G
  MOD_RES (23)..(24)..(25)..(26): Xaa is A or G or absent
QXRPTQVQLRSVKVAKVXXXXXXXXXKEVQVTLEDHLAXK

SEQ ID NO: 14612 - protein, 37 aa, Artificial Sequence
  Non-cyclic GFR-binding peptide
  MOD_RES (4)..(4): Xaa is C or S
  MOD_RES (18)..(19)..(20)..(21)..(22): Xaa is A or G
  MOD_RES (23)..(24)..(25)..(26): Xaa is A or G or absent
GLEXVPTGQRSVKMAKVXXXXXXXXXKEVQVLEEHSQ

SEQ ID NO: 14613 - protein, 40 aa, Artificial Sequence
  Non-cyclic GFR-binding peptide
  MOD_RES (37)..(39): Xaa is C or S
  MOD_RES (16)..(17)..(18)..(19)..(20): Xaa is A or G
  MOD_RES (21)..(22)..(23)..(24): Xaa is A or G or absent
RPTQVQLRSVKVAKVXXXXXXXXXKEVQVTLEDHLAXKXE

SEQ ID NO: 14614 - protein, 37 aa, Artificial Sequence
  Non-cyclic GFR-binding peptide
  MOD_RES (1)..(1): Xaa is C or S
XRPTQVQLRSVKVAKVEIVRKKPIFKEVQVTLEDHLA

SEQ ID NO: 14615 - protein, 42 aa, Artificial Sequence
  Non-cyclic GFR-binding peptide
  MOD_RES (5)..(42): Xaa is C or S
  MOD_RES (21)..(22)..(23)..(24)..(25): Xaa is A or G
  MOD_RES (26)..(27)..(28)..(29): Xaa is A or G or absent
RNVQXRPTQVQLSNITVQIMXXXXXXXXXIGEMSTLEDHLAX

SEQ ID NO: 14616 - protein, 36 aa, Artificial Sequence
  Non-cyclic GFR-binding peptide
  MOD_RES (35)..(35): Xaa is C or S
  MOD_RES (14)..(15)..(16)..(17)..(18): Xaa is A or G
  MOD_RES (19)..(20)..(21)..(22): Xaa is A or G or absent
SRVHHRPVQVRKIXXXXXXXXXKKATVRLEEHLEXA

SEQ ID NO: 14617 - protein, 36 aa, Artificial Sequence
  Non-cyclic GFR-binding peptide
  MOD_RES (1)..(1): Xaa is C or S
XQPSRVHHSNITVQIMEYVRKKPKLIGEMSRLEEHL

SEQ ID NO: 14618 - protein, 45 aa, Artificial Sequence
  Non-cyclic GFR-binding peptide
  MOD_RES (5)..(42)..(44): Xaa is C or S
SSVKXQPSRVHHSNITVQIMEYVRKKPKLIGEMSRLEEHLEXAXA

SEQ ID NO: 14619 - protein, 34 aa, Artificial Sequence
  Non-cyclic GFR-binding peptide
SRVHHRPVQVRKIEYVRKKPKLKKATVRLEEHLE

SEQ ID NO: 14620 - protein, 37 aa, Artificial Sequence
  Non-cyclic GFR-binding peptide
  MOD_RES (34)..(36): Xaa is C or S
VPTGQRPVQMRKIRIKPHQGQHKKATVLEEHSQXEXR

SEQ ID NO: 14621 - protein, 35 aa, Artificial Sequence
  Non-cyclic GFR-binding peptide
  MOD_RES (1)..(1): Xaa is C or S
XRPTQVQLSNITVQIMEIVRKKPIFIGEMSTLEDH

SEQ ID NO: 14622 - protein, 34 aa, Artificial Sequence
  Non-cyclic GFR-binding peptide
  MOD_RES (34)..(34): Xaa is C or S
  MOD_RES (14)..(15)..(16)..(17)..(18): Xaa is A or G
  MOD_RES (19)..(20)..(21)..(22): Xaa is A or G or absent
VPTEESNITMQIMXXXXXXXXXLGEMSFLQHNKX

SEQ ID NO: 14623 - protein, 33 aa, Artificial Sequence
  Non-cyclic GFR-binding peptide
VPTEESNITMQIMRIKPHQGQHLGEMSFLQHNK

SEQ ID NO: 14624 - protein, 44 aa, Artificial Sequence
  Non-cyclic GFR-binding peptide
  MOD_RES (4)..(41)..(43): Xaa is C or S
NVQXRPTQVQLSNITVQIMEIVRKKPIFIGEMSTLEDHLAXKXE

SEQ ID NO: 14625 - protein, 40 aa, Artificial Sequence
  Non-cyclic GFR-binding peptide
  MOD_RES (4)..(38)..(40): Xaa is C or S
  MOD_RES (18)..(19)..(20)..(21)..(22): Xaa is A or G
  MOD_RES (23)..(24)..(25)..(26): Xaa is A or G or absent
GLEXVPTEERSVKMAKVXXXXXXXXXKEVQVFLQHNKXEX

SEQ ID NO: 14626 - protein, 39 aa, Artificial Sequence
  Non-cyclic GFR-binding peptide
  MOD_RES (4)..(38): Xaa is C or S
  MOD_RES (18)..(19)..(20)..(21)..(22): Xaa is A or G
  MOD_RES (23)..(24)..(25)..(26): Xaa is A or G or absent
GLEXVPTEESNITMQIMXXXXXXXXXLGEMSFLQHNKXE

SEQ ID NO: 14627 - protein, 41 aa, Artificial Sequence
  Non-cyclic GFR-binding peptide
  MOD_RES (7)..(41): Xaa is C or S
  MOD_RES (21)..(22)..(23)..(24)..(25): Xaa is A or G
  MOD_RES (26)..(27)..(28)..(29): Xaa is A or G or absent
NDEGLEXVPTGQRSVKMAKVXXXXXXXXXKEVQVLEEHSQX

SEQ ID NO: 14628 - protein, 42 aa, Artificial Sequence
  Non-cyclic GFR-binding peptide
  MOD_RES (4)..(41): Xaa is C or S
  MOD_RES (20)..(21)..(22)..(23)..(24): Xaa is A or G
  MOD_RES (25)..(26)..(27)..(28): Xaa is A or G or absent
NVQXRPTQVQLSNITVQIMXXXXXXXXXIGEMSTLEDHLAXK

SEQ ID NO: 14629 - protein, 36 aa, Artificial Sequence
  Non-cyclic GFR-binding peptide
  MOD_RES (4)..(4): Xaa is C or S
  MOD_RES (18)..(19)..(20)..(21)..(22): Xaa is A or G
  MOD_RES (23)..(24)..(25)..(26): Xaa is A or G or absent
GLEXVPTGQRSVKMAKVXXXXXXXXXKEVQVLEEHS

SEQ ID NO: 14630 - protein, 38 aa, Artificial Sequence
  Non-cyclic GFR-binding peptide
  MOD_RES (3)..(37): Xaa is C or S
LEXVPTGQRSVKMAKVRIKPHQGQHKEVQVLEEHSQXE

SEQ ID NO: 14631 - protein, 38 aa, Artificial Sequence
  Non-cyclic GFR-binding peptide
  MOD_RES (37)..(37): Xaa is C or S
QPSRVHHRPVQVRKIEYVRKKPKLKKATVRLEEHLEXA

SEQ ID NO: 14632 - protein, 40 aa, Artificial Sequence
  Non-cyclic GFR-binding peptide
  MOD_RES (6)..(40): Xaa is C or S
DEGLEXVPTGQSNITMQIMRIKPHQGQHIGEMSLEEHSQX

SEQ ID NO: 14633 - protein, 37 aa, Artificial Sequence
  Non-cyclic GFR-binding peptide
  MOD_RES (34)..(36): Xaa is C or S
  MOD_RES (14)..(15)..(16)..(17)..(18): Xaa is A or G
  MOD_RES (19)..(20)..(21)..(22): Xaa is A or G or absent
VPTGQSNITMQIMXXXXXXXXXIGEMSLEEHSQXEXR

SEQ ID NO: 14634 - protein, 39 aa, Artificial Sequence
  Non-cyclic GFR-binding peptide
  MOD_RES (5)..(5): Xaa is C or S
  MOD_RES (21)..(22)..(23)..(24)..(25): Xaa is A or G
  MOD_RES (26)..(27)..(28)..(29): Xaa is A or G or absent
SSVKXQPSRVHHRPVQVRKIXXXXXXXXXKKATVRLEEH

SEQ ID NO: 14635 - protein, 37 aa, Artificial Sequence
  Non-cyclic GFR-binding peptide
  MOD_RES (3)..(3): Xaa is C or S
VQXRPTQVQLSNITVQIMEIVRKKPIFIGEMSTLEDH

SEQ ID NO: 14636 - protein, 42 aa, Artificial Sequence
  Non-cyclic GFR-binding peptide
  MOD_RES (6)..(40)..(42): Xaa is C or S
DEGLEXVPTEERPVQMRKIRIKPHQGQHKKATVFLQHNKXEX

SEQ ID NO: 14637 - protein, 41 aa, Artificial Sequence
  Non-cyclic GFR-binding peptide
  MOD_RES (4)..(41): Xaa is C or S
SVKXQPSRVHHSNITVQIMEYVRKKPKLIGEMSRLEEHLEX

SEQ ID NO: 14638 - protein, 35 aa, Artificial Sequence
  Non-cyclic GFR-binding peptide
  MOD_RES (15)..(16)..(17)..(18)..(19): Xaa is A or G
  MOD_RES (20)..(21)..(22)..(23): Xaa is A or G or absent
PTQVQLRSVKVAKVXXXXXXXXXKEVQVTLEDHLA

SEQ ID NO: 14639 - protein, 38 aa, Artificial Sequence
  Non-cyclic GFR-binding peptide
  MOD_RES (4)..(4): Xaa is C or S
SVKXQPSRVHHRPVQVRKIEYVRKKPKLKKATVRLEEH

SEQ ID NO: 14640 - protein, 37 aa, Artificial Sequence
  Non-cyclic GFR-binding peptide
  MOD_RES (5)..(5): Xaa is C or S
EGLEXVPTEERSVKMAKVRIKPHQGQHKEVQVFLQHN

SEQ ID NO: 14641 - protein, 38 aa, Artificial Sequence
  Non-cyclic GFR-binding peptide
  MOD_RES (1)..(35)..(37): Xaa is C or S
XVPTGQRPVQMRKIRIKPHQGQHKKATVLEEHSQXEXR

SEQ ID NO: 14642 - protein, 40 aa, Artificial Sequence
  Non-cyclic GFR-binding peptide
  MOD_RES (4)..(38)..(40): Xaa is C or S
  MOD_RES (18)..(19)..(20)..(21)..(22): Xaa is A or G
  MOD_RES (23)..(24)..(25)..(26): Xaa is A or G or absent
GLEXVPTGQSNITMQIMXXXXXXXXXIGEMSLEEHSQXEX

SEQ ID NO: 14643 - protein, 35 aa, Artificial Sequence
  Non-cyclic GFR-binding peptide
  MOD_RES (1)..(1): Xaa is C or S
XQPSRVHHRPVQVRKIEYVRKKPKLKKATVRLEEH

SEQ ID NO: 14644 - protein, 39 aa, Artificial Sequence
  Non-cyclic GFR-binding peptide
  MOD_RES (2)..(36)..(38): Xaa is C or S
EXVPTGQSNITMQIMRIKPHQGQHIGEMSLEEHSQXEXR

SEQ ID NO: 14645 - protein, 35 aa, Artificial Sequence
  Non-cyclic GFR-binding peptide
  MOD_RES (3)..(3): Xaa is C or S
LEXVPTEERSVKMAKVRIKPHQGQHKEVQVFLQHN

SEQ ID NO: 14646 - protein, 40 aa, Artificial Sequence
  Non-cyclic GFR-binding peptide
  MOD_RES (4)..(4): Xaa is C or S
  MOD_RES (20)..(21)..(22)..(23)..(24): Xaa is A or G
  MOD_RES (25)..(26)..(27)..(28): Xaa is A or G or absent
SVKXQPSRVHHRPVQVRKIXXXXXXXXXKKATVRLEEHLE

SEQ ID NO: 14647 - protein, 40 aa, Artificial Sequence
  Non-cyclic GFR-binding peptide
  MOD_RES (4)..(4): Xaa is C or S
NVQXRPTQVQLSNITVQIMEIVRKKPIFLGEMSTLEDHLA

SEQ ID NO: 14648 - protein, 38 aa, Artificial Sequence
  Non-cyclic GFR-binding peptide
  MOD_RES (1)..(35)..(37): Xaa is C or S
XVPTGQRSVKMAKVRIKPHQGQHKEVQVLEEHSQXEXR

SEQ ID NO: 14649 - protein, 42 aa, Artificial Sequence
  Non-cyclic GFR-binding peptide
  MOD_RES (7)..(41): Xaa is C or S
  MOD_RES (21)..(22)..(23)..(24)..(25): Xaa is A or G
  MOD_RES (26)..(27)..(28)..(29): Xaa is A or G or absent
NDEGLEXVPTEESNITMQIMXXXXXXXXXLGEMSFLQHNKXE

SEQ ID NO: 14650 - protein, 45 aa, Artificial Sequence
  Non-cyclic GFR-binding peptide
  MOD_RES (5)..(42)..(44): Xaa is C or S
RNVQXRPTQVQLSNITVQIMEIVRKKPIFLGEMSTLEDHLAXKXE

SEQ ID NO: 14651 - protein, 42 aa, Artificial Sequence
  Non-cyclic GFR-binding peptide
  MOD_RES (5)..(39)..(41): Xaa is C or S
  MOD_RES (19)..(20)..(21)..(22)..(23): Xaa is A or G
  MOD_RES (24)..(25)..(26)..(27): Xaa is A or G or absent
EGLEXVPTGQRSVKMAKVXXXXXXXXXKEVQVLEEHSQXEXR

SEQ ID NO: 14652 - protein, 39 aa, Artificial Sequence
  Non-cyclic GFR-binding peptide
  MOD_RES (5)..(39): Xaa is C or S
EGLEXVPTEESNITMQIMRIKPHQGQHLGEMSFLQHNKX

SEQ ID NO: 14653 - protein, 42 aa, Artificial Sequence
  Non-cyclic GFR-binding peptide
  MOD_RES (5)..(42): Xaa is C or S
RNVQXRPTQVQLSNITVQIMEIVRKKPIFIGEMSTLEDHLAX

SEQ ID NO: 14654 - protein, 37 aa, Artificial Sequence
  Non-cyclic GFR-binding peptide
  MOD_RES (2)..(36): Xaa is C or S
  MOD_RES (16)..(17)..(18)..(19)..(20): Xaa is A or G
  MOD_RES (21)..(22)..(23)..(24): Xaa is A or G or absent
EXVPTGQSNITMQIMXXXXXXXXXIGEMSLEEHSQXE

SEQ ID NO: 14655 - protein, 41 aa, Artificial Sequence
  Non-cyclic GFR-binding peptide
  MOD_RES (4)..(38)..(40): Xaa is C or S
  MOD_RES (18)..(19)..(20)..(21)..(22): Xaa is A or G
  MOD_RES (23)..(24)..(25)..(26): Xaa is A or G or absent
GLEXVPTGQRPVQMRKIXXXXXXXXXKKATVLEEHSQXEXR

SEQ ID NO: 14656 - protein, 35 aa, Artificial Sequence
  Non-cyclic GFR-binding peptide
  MOD_RES (2)..(2): Xaa is C or S
  MOD_RES (16)..(17)..(18)..(19)..(20): Xaa is A or G
  MOD_RES (21)..(22)..(23)..(24): Xaa is A or G or absent
EXVPTEERPVQMRKIXXXXXXXXXKKATVFLQHNK

SEQ ID NO: 14657 - protein, 38 aa, Artificial Sequence
  Non-cyclic GFR-binding peptide
  MOD_RES (5)..(5): Xaa is C or S
  MOD_RES (19)..(20)..(21)..(22)..(23): Xaa is A or G
  MOD_RES (24)..(25)..(26)..(27): Xaa is A or G or absent
EGLEXVPTGQSNITMQIMXXXXXXXXXIGEMSLEEHSQ

SEQ ID NO: 14658 - protein, 39 aa, Artificial Sequence
  Non-cyclic GFR-binding peptide
  MOD_RES (36)..(38): Xaa is C or S
  MOD_RES (15)..(16)..(17)..(18)..(19): Xaa is A or G
  MOD_RES (20)..(21)..(22)..(23): Xaa is A or G or absent
PTQVQLSNITVQIMXXXXXXXXXIGEMSTLEDHLAXKXE

SEQ ID NO: 14659 - protein, 33 aa, Artificial Sequence
  Non-cyclic GFR-binding peptide
VPTGQRPVQMRKIRIKPHQGQHKKATVLEEHSQ

SEQ ID NO: 14660 - protein, 40 aa, Artificial Sequence
  Non-cyclic GFR-binding peptide
  MOD_RES (5)..(5): Xaa is C or S
RNVQXRPTQVQLSNITVQIMEIVRKKPIFLGEMSTLEDHL

SEQ ID NO: 14661 - protein, 35 aa, Artificial Sequence
  Non-cyclic GFR-binding peptide
RPTQVQLRSVKVAKVEIVRKKPIFKEVQVTLEDHL

SEQ ID NO: 14662 - protein, 39 aa, Artificial Sequence
  Non-cyclic GFR-binding peptide
  MOD_RES (3)..(37)..(39): Xaa is C or S
LEXVPTGQRPVQMRKIRIKPHQGQHKKATVLEEHSQXEX

SEQ ID NO: 14663 - protein, 41 aa, Artificial Sequence
  Non-cyclic GFR-binding peptide
  MOD_RES (5)..(5): Xaa is C or S
RNVQXRPTQVQLRSVKVAKVEIVRKKPIFKEVQVTLEDHLA

SEQ ID NO: 14664 - protein, 35 aa, Artificial Sequence
  Non-cyclic GFR-binding peptide
  MOD_RES (34)..(34): Xaa is C or S
VPTEERSVKMAKVRIKPHQGQHKEVQVFLQHNKXE

SEQ ID NO: 14665 - protein, 37 aa, Artificial Sequence
  Non-cyclic GFR-binding peptide
  MOD_RES (2)..(36): Xaa is C or S
  MOD_RES (16)..(17)..(18)..(19)..(20): Xaa is A or G
  MOD_RES (21)..(22)..(23)..(24): Xaa is A or G or absent
EXVPTEERPVQMRKIXXXXXXXXXKKATVFLQHNKXE

SEQ ID NO: 14666 - protein, 38 aa, Artificial Sequence
  Non-cyclic GFR-binding peptide
  MOD_RES (2)..(2): Xaa is C or S
  MOD_RES (18)..(19)..(20)..(21)..(22): Xaa is A or G
  MOD_RES (23)..(24)..(25)..(26): Xaa is A or G or absent
KXQPSRVHHRPVQVRKIXXXXXXXXXKKATVRLEEHLE

SEQ ID NO: 14667 - protein, 39 aa, Artificial Sequence
  Non-cyclic GFR-binding peptide
  MOD_RES (1)..(38): Xaa is C or S
  MOD_RES (17)..(18)..(19)..(20)..(21): Xaa is A or G
  MOD_RES (22)..(23)..(24)..(25): Xaa is A or G or absent
XRPTQVQLSNITVQIMXXXXXXXXXIGEMSTLEDHLAXK

SEQ ID NO: 14668 - protein, 44 aa, Artificial Sequence
  Non-cyclic GFR-binding peptide
  MOD_RES (5)..(42)..(44): Xaa is C or S
  MOD_RES (21)..(22)..(23)..(24)..(25): Xaa is A or G
  MOD_RES (26)..(27)..(28)..(29): Xaa is A or G or absent
RNVQXRPTQVQLSNITVQIMXXXXXXXXXLGEMSTLEDHLAXKX

SEQ ID NO: 14669 - protein, 42 aa, Artificial Sequence
  Non-cyclic GFR-binding peptide
  MOD_RES (5)..(39)..(41): Xaa is C or S
  MOD_RES (19)..(20)..(21)..(22)..(23): Xaa is A or G
  MOD_RES (24)..(25)..(26)..(27): Xaa is A or G or absent
EGLEXVPTGQRPVQMRKIXXXXXXXXXKKATVLEEHSQXEXR

SEQ ID NO: 14670 - protein, 41 aa, Artificial Sequence
  Non-cyclic GFR-binding peptide
  MOD_RES (4)..(41): Xaa is C or S
NVQXRPTQVQLSNITVQIMEIVRKKPIFIGEMSTLEDHLAX

SEQ ID NO: 14671 - protein, 38 aa, Artificial Sequence
  Non-cyclic GFR-binding peptide
  MOD_RES (6)..(6): Xaa is C or S
  MOD_RES (20)..(21)..(22)..(23)..(24): Xaa is A or G
  MOD_RES (25)..(26)..(27)..(28): Xaa is A or G or absent
DEGLEXVPTEERSVKMAKVXXXXXXXXXKEVQVFLQHN

SEQ ID NO: 14672 - protein, 40 aa, Artificial Sequence
  Non-cyclic GFR-binding peptide
  MOD_RES (37)..(39): Xaa is C or S
  MOD_RES (16)..(17)..(18)..(19)..(20): Xaa is A or G
  MOD_RES (21)..(22)..(23)..(24): Xaa is A or G or absent
QPSRVHHSNITVQIMXXXXXXXXXLGEMSRLEEHLEXAXA

SEQ ID NO: 14673 - protein, 36 aa, Artificial Sequence
  Non-cyclic GFR-binding peptide
  MOD_RES (16)..(17)..(18)..(19)..(20): Xaa is A or G
  MOD_RES (21)..(22)..(23)..(24): Xaa is A or G or absent
RPTQVQLSNITVQIMXXXXXXXXXIGEMSTLEDHLA

SEQ ID NO: 14674 - protein, 36 aa, Artificial Sequence
  Non-cyclic GFR-binding peptide
  MOD_RES (2)..(36): Xaa is C or S
EXVPTEERPVQMRKIRIKPHQGQHKKATVFLQHNKX

SEQ ID NO: 14675 - protein, 37 aa, Artificial Sequence
  Non-cyclic GFR-binding peptide
  MOD_RES (1)..(1): Xaa is C or S
XQPSRVHHRPVQVRKIEYVRKKPKLKKATVRLEEHLE

SEQ ID NO: 14676 - protein, 40 aa, Artificial Sequence
  Non-cyclic GFR-binding peptide
  MOD_RES (3)..(40): Xaa is C or S
VQXRPTQVQLRSVKVAKVEIVRKKPIFKEVQVTLEDHLAX

SEQ ID NO: 14677 - protein, 45 aa, Artificial Sequence
  Non-cyclic GFR-binding peptide
  MOD_RES (5)..(42)..(44): Xaa is C or S
  MOD_RES (21)..(22)..(23)..(24)..(25): Xaa is A or G
  MOD_RES (26)..(27)..(28)..(29): Xaa is A or G or absent
RNVQXRPTQVQLRSVKVAKVXXXXXXXXXKEVQVTLEDHLAXKXE

SEQ ID NO: 14678 - protein, 43 aa, Artificial Sequence
  Non-cyclic GFR-binding peptide
  MOD_RES (6)..(40)..(42): Xaa is C or S
DEGLEXVPTEERPVQMRKIRIKPHQGQHKKATVFLQHNKXEXR

SEQ ID NO: 14679 - protein, 39 aa, Artificial Sequence
  Non-cyclic GFR-binding peptide
  MOD_RES (37)..(39): Xaa is C or S
  MOD_RES (16)..(17)..(18)..(19)..(20): Xaa is A or G
  MOD_RES (21)..(22)..(23)..(24): Xaa is A or G or absent
QPSRVHHRPVQVRKIXXXXXXXXXKKATVRLEEHLEXAX

SEQ ID NO: 14680 - protein, 33 aa, Artificial Sequence
  Non-cyclic GFR-binding peptide
  MOD_RES (15)..(16)..(17)..(18)..(19): Xaa is A or G
  MOD_RES (20)..(21)..(22)..(23): Xaa is A or G or absent
PTQVQLSNITVQIMXXXXXXXXXIGEMSTLEDH

SEQ ID NO: 14681 - protein, 40 aa, Artificial Sequence
  Non-cyclic GFR-binding peptide
  MOD_RES (2)..(39): Xaa is C or S
QXRPTQVQLRSVKVAKVEIVRKKPIFKEVQVTLEDHLAXK

SEQ ID NO: 14682 - protein, 35 aa, Artificial Sequence
  Non-cyclic GFR-binding peptide
  MOD_RES (2)..(2): Xaa is C or S
EXVPTEERSVKMAKVRIKPHQGQHKEVQVFLQHNK

SEQ ID NO: 14683 - protein, 37 aa, Artificial Sequence
  Non-cyclic GFR-binding peptide
  MOD_RES (1)..(1): Xaa is C or S
XQPSRVHHSNITVQIMEYVRKKPKLLGEMSRLEEHLE

SEQ ID NO: 14684 - protein, 40 aa, Artificial Sequence
  Non-cyclic GFR-binding peptide
  MOD_RES (37)..(39): Xaa is C or S
  MOD_RES (16)..(17)..(18)..(19)..(20): Xaa is A or G
  MOD_RES (21)..(22)..(23)..(24): Xaa is A or G or absent
RPTQVQLSNITVQIMXXXXXXXXXLGEMSTLEDHLAXKXE

SEQ ID NO: 14685 - protein, 35 aa, Artificial Sequence
  Non-cyclic GFR-binding peptide
QPSRVHHRPVQVRKIEYVRKKPKLKKATVRLEEHL

SEQ ID NO: 14686 - protein, 36 aa, Artificial Sequence
  Non-cyclic GFR-binding peptide
  MOD_RES (2)..(36): Xaa is C or S
EXVPTEESNITMQIMRIKPHQGQHLGEMSFLQHNKX

SEQ ID NO: 14687 - protein, 38 aa, Artificial Sequence
  Non-cyclic GFR-binding peptide
  MOD_RES (3)..(3): Xaa is C or S
  MOD_RES (19)..(20)..(21)..(22)..(23): Xaa is A or G
  MOD_RES (24)..(25)..(26)..(27): Xaa is A or G or absent
VQXRPTQVQLSNITVQIMXXXXXXXXXIGEMSTLEDHL

SEQ ID NO: 14688 - protein, 40 aa, Artificial Sequence
  Non-cyclic GFR-binding peptide
  MOD_RES (37)..(39): Xaa is C or S
  MOD_RES (16)..(17)..(18)..(19)..(20): Xaa is A or G
  MOD_RES (21)..(22)..(23)..(24): Xaa is A or G or absent
QPSRVHHRPVQVRKIXXXXXXXXXKKATVRLEEHLEXAXA

SEQ ID NO: 14689 - protein, 36 aa, Artificial Sequence
  Non-cyclic GFR-binding peptide
  MOD_RES (1)..(35): Xaa is C or S
  MOD_RES (15)..(16)..(17)..(18)..(19): Xaa is A or G
  MOD_RES (20)..(21)..(22)..(23): Xaa is A or G or absent
XVPTGQRPVQMRKIXXXXXXXXXKKATVLEEHSQXE

SEQ ID NO: 14690 - protein, 44 aa, Artificial Sequence
  Non-cyclic GFR-binding peptide
  MOD_RES (4)..(41)..(43): Xaa is C or S
SVKXQPSRVHHSNITVQIMEYVRKKPKLIGEMSRLEEHLEXAXA

SEQ ID NO: 14691 - protein, 43 aa, Artificial Sequence
  Non-cyclic GFR-binding peptide
  MOD_RES (5)..(42): Xaa is C or S
SSVKXQPSRVHHSNITVQIMEYVRKKPKLIGEMSRLEEHLEXA

SEQ ID NO: 14692 - protein, 34 aa, Artificial Sequence
  Non-cyclic GFR-binding peptide
  MOD_RES (34)..(34): Xaa is C or S
  MOD_RES (14)..(15)..(16)..(17)..(18): Xaa is A or G
  MOD_RES (19)..(20)..(21)..(22): Xaa is A or G or absent
VPTGQRPVQMRKIXXXXXXXXXKKATVLEEHSQX

SEQ ID NO: 14693 - protein, 38 aa, Artificial Sequence
  Non-cyclic GFR-binding peptide
  MOD_RES (5)..(5): Xaa is C or S
EGLEXVPTEERSVKMAKVRIKPHQGQHKEVQVFLQHNK

SEQ ID NO: 14694 - protein, 35 aa, Artificial Sequence
  Non-cyclic GFR-binding peptide
PSRVHHSNITVQIMEYVRKKPKLIGEMSRLEEHLE

SEQ ID NO: 14695 - protein, 38 aa, Artificial Sequence
  Non-cyclic GFR-binding peptide
  MOD_RES (4)..(38): Xaa is C or S
GLEXVPTEERPVQMRKIRIKPHQGQHKKATVFLQHNKX

SEQ ID NO: 14696 - protein, 37 aa, Artificial Sequence
  Non-cyclic GFR-binding peptide
  MOD_RES (3)..(3): Xaa is C or S
VKXQPSRVHHRPVQVRKIEYVRKKPKLKKATVRLEEH

SEQ ID NO: 14697 - protein, 37 aa, Artificial Sequence
  Non-cyclic GFR-binding peptide
  MOD_RES (37)..(37): Xaa is C or S
  MOD_RES (16)..(17)..(18)..(19)..(20): Xaa is A or G
  MOD_RES (21)..(22)..(23)..(24): Xaa is A or G or absent
QPSRVHHRPVQVRKIXXXXXXXXXKKATVRLEEHLEX

SEQ ID NO: 14698 - protein, 39 aa, Artificial Sequence
  Non-cyclic GFR-binding peptide
  MOD_RES (2)..(36)..(38): Xaa is C or S
  MOD_RES (16)..(17)..(18)..(19)..(20): Xaa is A or G
  MOD_RES (21)..(22)..(23)..(24): Xaa is A or G or absent
EXVPTEESNITMQIMXXXXXXXXXLGEMSFLQHNKXEXR

SEQ ID NO: 14699 - protein, 34 aa, Artificial Sequence
  Non-cyclic GFR-binding peptide
QPSRVHHSNITVQIMEYVRKKPKLIGEMSRLEEH

SEQ ID NO: 14700 - protein, 38 aa, Artificial Sequence
  Non-cyclic GFR-binding peptide
  MOD_RES (1)..(35)..(37): Xaa is C or S
  MOD_RES (15)..(16)..(17)..(18)..(19): Xaa is A or G
  MOD_RES (20)..(21)..(22)..(23): Xaa is A or G or absent
XVPTGQRSVKMAKVXXXXXXXXXKEVQVLEEHSQXEXR

SEQ ID NO: 14701 - protein, 39 aa, Artificial Sequence
  Non-cyclic GFR-binding peptide
  MOD_RES (4)..(38): Xaa is C or S
GLEXVPTGQRPVQMRKIRIKPHQGQHKKATVLEEHSQXE

SEQ ID NO: 14702 - protein, 40 aa, Artificial Sequence
  Non-cyclic GFR-binding peptide
  MOD_RES (4)..(4): Xaa is C or S
  MOD_RES (20)..(21)..(22)..(23)..(24): Xaa is A or G
  MOD_RES (25)..(26)..(27)..(28): Xaa is A or G or absent
SVKXQPSRVHHSNITVQIMXXXXXXXXXLGEMSRLEEHLE

SEQ ID NO: 14703 - protein, 36 aa, Artificial Sequence
  Non-cyclic GFR-binding peptide
  MOD_RES (4)..(4): Xaa is C or S
  MOD_RES (18)..(19)..(20)..(21)..(22): Xaa is A or G
  MOD_RES (23)..(24)..(25)..(26): Xaa is A or G or absent
GLEXVPTGQRPVQMRKIXXXXXXXXXKKATVLEEHS

SEQ ID NO: 14704 - protein, 36 aa, Artificial Sequence
  Non-cyclic GFR-binding peptide
  MOD_RES (34)..(36): Xaa is C or S
  MOD_RES (14)..(15)..(16)..(17)..(18): Xaa is A or G
  MOD_RES (19)..(20)..(21)..(22): Xaa is A or G or absent
VPTGQRPVQMRKIXXXXXXXXXKKATVLEEHSQXEX

SEQ ID NO: 14705 - protein, 40 aa, Artificial Sequence
  Non-cyclic GFR-binding peptide
  MOD_RES (7)..(7): Xaa is C or S
NDEGLEXVPTGQSNITMQIMRIKPHQGQHIGEMSLEEHSQ

SEQ ID NO: 14706 - protein, 36 aa, Artificial Sequence
  Non-cyclic GFR-binding peptide
  MOD_RES (36)..(36): Xaa is C or S
  MOD_RES (15)..(16)..(17)..(18)..(19): Xaa is A or G
  MOD_RES (20)..(21)..(22)..(23): Xaa is A or G or absent
PTQVQLSNITVQIMXXXXXXXXXIGEMSTLEDHLAX

SEQ ID NO: 14707 - protein, 41 aa, Artificial Sequence
  Non-cyclic GFR-binding peptide
  MOD_RES (3)..(40): Xaa is C or S
  MOD_RES (19)..(20)..(21)..(22)..(23): Xaa is A or G
  MOD_RES (24)..(25)..(26)..(27): Xaa is A or G or absent
VQXRPTQVQLRSVKVAKVXXXXXXXXXKEVQVTLEDHLAXK

SEQ ID NO: 14708 - protein, 40 aa, Artificial Sequence
  Non-cyclic GFR-binding peptide
  MOD_RES (2)..(39): Xaa is C or S
  MOD_RES (18)..(19)..(20)..(21)..(22): Xaa is A or G
  MOD_RES (23)..(24)..(25)..(26): Xaa is A or G or absent
KXQPSRVHHRPVQVRKIXXXXXXXXXKKATVRLEEHLEXA

SEQ ID NO: 14709 - protein, 43 aa, Artificial Sequence
  Non-cyclic GFR-binding peptide
  MOD_RES (5)..(42): Xaa is C or S
RNVQXRPTQVQLRSVKVAKVEIVRKKPIFKEVQVTLEDHLAXK

SEQ ID NO: 14710 - protein, 39 aa, Artificial Sequence
  Non-cyclic GFR-binding peptide
  MOD_RES (5)..(39): Xaa is C or S
EGLEXVPTGQRSVKMAKVRIKPHQGQHKEVQVLEEHSQX

SEQ ID NO: 14711 - protein, 35 aa, Artificial Sequence
  Non-cyclic GFR-binding peptide
  MOD_RES (35)..(35): Xaa is C or S
  MOD_RES (14)..(15)..(16)..(17)..(18): Xaa is A or G
  MOD_RES (19)..(20)..(21)..(22): Xaa is A or G or absent
TQVQLRSVKVAKVXXXXXXXXXKEVQVTLEDHLAX

SEQ ID NO: 14712 - protein, 38 aa, Artificial Sequence
  Non-cyclic GFR-binding peptide
  MOD_RES (1)..(38): Xaa is C or S
XQPSRVHHRPVQVRKIEYVRKKPKLKKATVRLEEHLEX

SEQ ID NO: 14713 - protein, 37 aa, Artificial Sequence
  Non-cyclic GFR-binding peptide
  MOD_RES (4)..(4): Xaa is C or S
GLEXVPTGQSNITMQIMRIKPHQGQHIGEMSLEEHSQ

SEQ ID NO: 14714 - protein, 34 aa, Artificial Sequence
  Non-cyclic GFR-binding peptide
  MOD_RES (1)..(1): Xaa is C or S
  MOD_RES (15)..(16)..(17)..(18)..(19): Xaa is A or G
  MOD_RES (20)..(21)..(22)..(23): Xaa is A or G or absent
XVPTEESNITMQIMXXXXXXXXXLGEMSFLQHNK

SEQ ID NO: 14715 - protein, 41 aa, Artificial Sequence
  Non-cyclic GFR-binding peptide
  MOD_RES (3)..(40): Xaa is C or S
  MOD_RES (19)..(20)..(21)..(22)..(23): Xaa is A or G
  MOD_RES (24)..(25)..(26)..(27): Xaa is A or G or absent
VKXQPSRVHHRPVQVRKIXXXXXXXXXKKATVRLEEHLEXA

SEQ ID NO: 14716 - protein, 35 aa, Artificial Sequence
  Non-cyclic GFR-binding peptide
  MOD_RES (35)..(35): Xaa is C or S
TQVQLSNITVQIMEIVRKKPIFLGEMSTLEDHLAX

SEQ ID NO: 14717 - protein, 33 aa, Artificial Sequence
  Non-cyclic GFR-binding peptide
  MOD_RES (1)..(1): Xaa is C or S
XVPTEERSVKMAKVRIKPHQGQHKEVQVFLQHN

SEQ ID NO: 14718 - protein, 34 aa, Artificial Sequence
  Non-cyclic GFR-binding peptide
  MOD_RES (2)..(2): Xaa is C or S
  MOD_RES (16)..(17)..(18)..(19)..(20): Xaa is A or G
  MOD_RES (21)..(22)..(23)..(24): Xaa is A or G or absent
EXVPTEESNITMQIMXXXXXXXXXLGEMSFLQHN

SEQ ID NO: 14719 - protein, 41 aa, Artificial Sequence
  Non-cyclic GFR-binding peptide
  MOD_RES (6)..(40): Xaa is C or S
DEGLEXVPTEERPVQMRKIRIKPHQGQHKKATVFLQHNKXE

SEQ ID NO: 14720 - protein, 43 aa, Artificial Sequence
  Non-cyclic GFR-binding peptide
  MOD_RES (5)..(42): Xaa is C or S
SSVKXQPSRVHHSNITVQIMEYVRKKPKLLGEMSRLEEHLEXA

SEQ ID NO: 14721 - protein, 42 aa, Artificial Sequence
  Non-cyclic GFR-binding peptide
  MOD_RES (7)..(41): Xaa is C or S
NDEGLEXVPTGQRPVQMRKIRIKPHQGQHKKATVLEEHSQXE

SEQ ID NO: 14722 - protein, 38 aa, Artificial Sequence
  Non-cyclic GFR-binding peptide
  MOD_RES (2)..(2): Xaa is C or S
  MOD_RES (18)..(19)..(20)..(21)..(22): Xaa is A or G
  MOD_RES (23)..(24)..(25)..(26): Xaa is A or G or absent
KXQPSRVHHSNITVQIMXXXXXXXXXLGEMSRLEEHLE

SEQ ID NO: 14723 - protein, 43 aa, Artificial Sequence
  Non-cyclic GFR-binding peptide
  MOD_RES (6)..(40)..(42): Xaa is C or S
  MOD_RES (20)..(21)..(22)..(23)..(24): Xaa is A or G
  MOD_RES (25)..(26)..(27)..(28): Xaa is A or G or absent
DEGLEXVPTEERSVKMAKVXXXXXXXXXKEVQVFLQHNKXEXR

SEQ ID NO: 14724 - protein, 45 aa, Artificial Sequence
  Non-cyclic GFR-binding peptide
  MOD_RES (5)..(42)..(44): Xaa is C or S
RNVQXRPTQVQLRSVKVAKVEIVRKKPIFKEVQVTLEDHLAXKXE

SEQ ID NO: 14725 - protein, 36 aa, Artificial Sequence
  Non-cyclic GFR-binding peptide
  MOD_RES (34)..(36): Xaa is C or S
VPTEERPVQMRKIRIKPHQGQHKKATVFLQHNKXEX

SEQ ID NO: 14726 - protein, 38 aa, Artificial Sequence
  Non-cyclic GFR-binding peptide
  MOD_RES (2)..(2): Xaa is C or S
QXRPTQVQLSNITVQIMEIVRKKPIFIGEMSTLEDHLA

SEQ ID NO: 14727 - protein, 37 aa, Artificial Sequence
  Non-cyclic GFR-binding peptide
  MOD_RES (2)..(2): Xaa is C or S
QXRPTQVQLSNITVQIMEIVRKKPIFLGEMSTLEDHL

SEQ ID NO: 14728 - protein, 43 aa, Artificial Sequence
  Non-cyclic GFR-binding peptide
  MOD_RES (7)..(41)..(43): Xaa is C or S
  MOD_RES (21)..(22)..(23)..(24)..(25): Xaa is A or G
  MOD_RES (26)..(27)..(28)..(29): Xaa is A or G or absent
NDEGLEXVPTGQRPVQMRKIXXXXXXXXXKKATVLEEHSQXEX

SEQ ID NO: 14729 - protein, 35 aa, Artificial Sequence
  Non-cyclic GFR-binding peptide
  MOD_RES (16)..(17)..(18)..(19)..(20): Xaa is A or G
  MOD_RES (21)..(22)..(23)..(24): Xaa is A or G or absent
RPTQVQLSNITVQIMXXXXXXXXXLGEMSTLEDHL

SEQ ID NO: 14730 - protein, 38 aa, Artificial Sequence
  Non-cyclic GFR-binding peptide
  MOD_RES (37)..(37): Xaa is C or S
  MOD_RES (16)..(17)..(18)..(19)..(20): Xaa is A or G
  MOD_RES (21)..(22)..(23)..(24): Xaa is A or G or absent
RPTQVQLSNITVQIMXXXXXXXXXIGEMSTLEDHLAXK

SEQ ID NO: 14731 - protein, 37 aa, Artificial Sequence
  Non-cyclic GFR-binding peptide
  MOD_RES (3)..(3): Xaa is C or S
  MOD_RES (19)..(20)..(21)..(22)..(23): Xaa is A or G
  MOD_RES (24)..(25)..(26)..(27): Xaa is A or G or absent
VQXRPTQVQLRSVKVAKVXXXXXXXXXKEVQVTLEDH

SEQ ID NO: 14732 - protein, 38 aa, Artificial Sequence
  Non-cyclic GFR-binding peptide
  MOD_RES (1)..(38): Xaa is C or S
XQPSRVHHSNITVQIMEYVRKKPKLLGEMSRLEEHLEX

SEQ ID NO: 14733 - protein, 33 aa, Artificial Sequence
  Non-cyclic GFR-binding peptide
PSRVHHSNITVQIMEYVRKKPKLLGEMSRLEEH

SEQ ID NO: 14734 - protein, 41 aa, Artificial Sequence
  Non-cyclic GFR-binding peptide
  MOD_RES (3)..(40): Xaa is C or S
VQXRPTQVQLRSVKVAKVEIVRKKPIFKEVQVTLEDHLAXK

SEQ ID NO: 14735 - protein, 34 aa, Artificial Sequence
  Non-cyclic GFR-binding peptide
  MOD_RES (2)..(2): Xaa is C or S
  MOD_RES (16)..(17)..(18)..(19)..(20): Xaa is A or G
  MOD_RES (21)..(22)..(23)..(24): Xaa is A or G or absent
EXVPTGQRSVKMAKVXXXXXXXXXKEVQVLEEHS

SEQ ID NO: 14736 - protein, 36 aa, Artificial Sequence
  Non-cyclic GFR-binding peptide
  MOD_RES (16)..(17)..(18)..(19)..(20): Xaa is A or G
  MOD_RES (21)..(22)..(23)..(24): Xaa is A or G or absent
QPSRVHHSNITVQIMXXXXXXXXXIGEMSRLEEHLE

SEQ ID NO: 14737 - protein, 40 aa, Artificial Sequence
  Non-cyclic GFR-binding peptide
  MOD_RES (5)..(39): Xaa is C or S
EGLEXVPTGQRPVQMRKIRIKPHQGQHKKATVLEEHSQXE

SEQ ID NO: 14738 - protein, 42 aa, Artificial Sequence
  Non-cyclic GFR-binding peptide
  MOD_RES (3)..(40)..(42): Xaa is C or S
VQXRPTQVQLSNITVQIMEIVRKKPIFIGEMSTLEDHLAXKX

SEQ ID NO: 14739 - protein, 40 aa, Artificial Sequence
  Non-cyclic GFR-binding peptide
  MOD_RES (37)..(39): Xaa is C or S
RPTQVQLSNITVQIMEIVRKKPIFLGEMSTLEDHLAXKXE

SEQ ID NO: 14740 - protein, 39 aa, Artificial Sequence
  Non-cyclic GFR-binding peptide
  MOD_RES (6)..(6): Xaa is C or S
  MOD_RES (20)..(21)..(22)..(23)..(24): Xaa is A or G
  MOD_RES (25)..(26)..(27)..(28): Xaa is A or G or absent
DEGLEXVPTEERSVKMAKVXXXXXXXXXKEVQVFLQHNK

SEQ ID NO: 14741 - protein, 37 aa, Artificial Sequence
  Non-cyclic GFR-binding peptide
  MOD_RES (3)..(37): Xaa is C or S
  MOD_RES (17)..(18)..(19)..(20)..(21): Xaa is A or G
  MOD_RES (22)..(23)..(24)..(25): Xaa is A or G or absent
LEXVPTEERSVKMAKVXXXXXXXXXKEVQVFLQHNKX

SEQ ID NO: 14742 - protein, 39 aa, Artificial Sequence
  Non-cyclic GFR-binding peptide
  MOD_RES (3)..(3): Xaa is C or S
  MOD_RES (19)..(20)..(21)..(22)..(23): Xaa is A or G
  MOD_RES (24)..(25)..(26)..(27): Xaa is A or G or absent
VKXQPSRVHHSNITVQIMXXXXXXXXXIGEMSRLEEHLE

SEQ ID NO: 14743 - protein, 34 aa, Artificial Sequence
  Non-cyclic GFR-binding peptide
  MOD_RES (34)..(34): Xaa is C or S
  MOD_RES (14)..(15)..(16)..(17)..(18): Xaa is A or G
  MOD_RES (19)..(20)..(21)..(22): Xaa is A or G or absent
VPTGQRSVKMAKVXXXXXXXXXKEVQVLEEHSQX

SEQ ID NO: 14744 - protein, 39 aa, Artificial Sequence
  Non-cyclic GFR-binding peptide
  MOD_RES (5)..(39): Xaa is C or S
EGLEXVPTGQRPVQMRKIRIKPHQGQHKKATVLEEHSQX

SEQ ID NO: 14745 - protein, 39 aa, Artificial Sequence
  Non-cyclic GFR-binding peptide
  MOD_RES (4)..(4): Xaa is C or S
NVQXRPTQVQLRSVKVAKVEIVRKKPIFKEVQVTLEDHL

SEQ ID NO: 14746 - protein, 34 aa, Artificial Sequence
  Non-cyclic GFR-binding peptide
  MOD_RES (2)..(2): Xaa is C or S
  MOD_RES (16)..(17)..(18)..(19)..(20): Xaa is A or G
  MOD_RES (21)..(22)..(23)..(24): Xaa is A or G or absent
EXVPTGQSNITMQIMXXXXXXXXXIGEMSLEEHS

SEQ ID NO: 14747 - protein, 37 aa, Artificial Sequence
  Non-cyclic GFR-binding peptide
  MOD_RES (2)..(36): Xaa is C or S
EXVPTEERSVKMAKVRIKPHQGQHKEVQVFLQHNKXE

SEQ ID NO: 14748 - protein, 42 aa, Artificial Sequence
  Non-cyclic GFR-binding peptide
  MOD_RES (3)..(40)..(42): Xaa is C or S
  MOD_RES (19)..(20)..(21)..(22)..(23): Xaa is A or G
  MOD_RES (24)..(25)..(26)..(27): Xaa is A or G or absent
VKXQPSRVHHSNITVQIMXXXXXXXXXLGEMSRLEEHLEXAX

SEQ ID NO: 14749 - protein, 39 aa, Artificial Sequence
  Non-cyclic GFR-binding peptide
  MOD_RES (3)..(37)..(39): Xaa is C or S
  MOD_RES (17)..(18)..(19)..(20)..(21): Xaa is A or G
  MOD_RES (22)..(23)..(24)..(25): Xaa is A or G or absent
LEXVPTGQSNITMQIMXXXXXXXXXIGEMSLEEHSQXEX

SEQ ID NO: 14750 - protein, 37 aa, Artificial Sequence
  Non-cyclic GFR-binding peptide
  MOD_RES (2)..(36): Xaa is C or S
  MOD_RES (16)..(17)..(18)..(19)..(20): Xaa is A or G
  MOD_RES (21)..(22)..(23)..(24): Xaa is A or G or absent
EXVPTEERSVKMAKVXXXXXXXXXKEVQVFLQHNKXE

SEQ ID NO: 14751 - protein, 35 aa, Artificial Sequence
  Non-cyclic GFR-binding peptide
  MOD_RES (3)..(3): Xaa is C or S
LEXVPTGQSNITMQIMRIKPHQGQHIGEMSLEEHS

SEQ ID NO: 14752 - protein, 37 aa, Artificial Sequence
  Non-cyclic GFR-binding peptide
  MOD_RES (1)..(35)..(37): Xaa is C or S
XVPTEESNITMQIMRIKPHQGQHLGEMSFLQHNKXEX

SEQ ID NO: 14753 - protein, 39 aa, Artificial Sequence
  Non-cyclic GFR-binding peptide
  MOD_RES (7)..(7): Xaa is C or S
  MOD_RES (21)..(22)..(23)..(24)..(25): Xaa is A or G
  MOD_RES (26)..(27)..(28)..(29): Xaa is A or G or absent
NDEGLEXVPTGQRSVKMAKVXXXXXXXXXKEVQVLEEHS

SEQ ID NO: 14754 - protein, 40 aa, Artificial Sequence
  Non-cyclic GFR-binding peptide
  MOD_RES (7)..(7): Xaa is C or S
  MOD_RES (21)..(22)..(23)..(24)..(25): Xaa is A or G
  MOD_RES (26)..(27)..(28)..(29): Xaa is A or G or absent
NDEGLEXVPTEERSVKMAKVXXXXXXXXXKEVQVFLQHNK

SEQ ID NO: 14755 - protein, 34 aa, Artificial Sequence
  Non-cyclic GFR-binding peptide
PTQVQLSNITVQIMEIVRKKPIFIGEMSTLEDHL

SEQ ID NO: 14756 - protein, 37 aa, Artificial Sequence
  Non-cyclic GFR-binding peptide
  MOD_RES (3)..(37): Xaa is C or S
  MOD_RES (17)..(18)..(19)..(20)..(21): Xaa is A or G
  MOD_RES (22)..(23)..(24)..(25): Xaa is A or G or absent
LEXVPTGQSNITMQIMXXXXXXXXXIGEMSLEEHSQX

SEQ ID NO: 14757 - protein, 40 aa, Artificial Sequence
  Non-cyclic GFR-binding peptide
  MOD_RES (4)..(4): Xaa is C or S
SVKXQPSRVHHRPVQVRKIEYVRKKPKLKKATVRLEEHLE

SEQ ID NO: 14758 - protein, 34 aa, Artificial Sequence
  Non-cyclic GFR-binding peptide
  MOD_RES (1)..(1): Xaa is C or S
  MOD_RES (15)..(16)..(17)..(18)..(19): Xaa is A or G
  MOD_RES (20)..(21)..(22)..(23): Xaa is A or G or absent
XVPTGQRPVQMRKIXXXXXXXXXKKATVLEEHSQ

SEQ ID NO: 14759 - protein, 39 aa, Artificial Sequence
  Non-cyclic GFR-binding peptide
  MOD_RES (1)..(38): Xaa is C or S
  MOD_RES (17)..(18)..(19)..(20)..(21): Xaa is A or G
  MOD_RES (22)..(23)..(24)..(25): Xaa is A or G or absent
XRPTQVQLSNITVQIMXXXXXXXXXLGEMSTLEDHLAXK

SEQ ID NO: 14760 - protein, 40 aa, Artificial Sequence
  Non-cyclic GFR-binding peptide
  MOD_RES (4)..(4): Xaa is C or S
SVKXQPSRVHHSNITVQIMEYVRKKPKLLGEMSRLEEHLE

SEQ ID NO: 14761 - protein, 37 aa, Artificial Sequence
  Non-cyclic GFR-binding peptide
  MOD_RES (35)..(37): Xaa is C or S
  MOD_RES (14)..(15)..(16)..(17)..(18): Xaa is A or G
  MOD_RES (19)..(20)..(21)..(22): Xaa is A or G or absent
TQVQLSNITVQIMXXXXXXXXXLGEMSTLEDHLAXKX

SEQ ID NO: 14762 - protein, 35 aa, Artificial Sequence
  Non-cyclic GFR-binding peptide
  MOD_RES (34)..(34): Xaa is C or S
VPTGQSNITMQIMRIKPHQGQHIGEMSLEEHSQXE

SEQ ID NO: 14763 - protein, 40 aa, Artificial Sequence
  Non-cyclic GFR-binding peptide
  MOD_RES (3)..(40): Xaa is C or S
  MOD_RES (19)..(20)..(21)..(22)..(23): Xaa is A or G
  MOD_RES (24)..(25)..(26)..(27): Xaa is A or G or absent
VQXRPTQVQLSNITVQIMXXXXXXXXXLGEMSTLEDHLAX

SEQ ID NO: 14764 - protein, 34 aa, Artificial Sequence
  Non-cyclic GFR-binding peptide
  MOD_RES (14)..(15)..(16)..(17)..(18): Xaa is A or G
  MOD_RES (19)..(20)..(21)..(22): Xaa is A or G or absent
SRVHHRPVQVRKIXXXXXXXXXKKATVRLEEHLE

SEQ ID NO: 14765 - protein, 39 aa, Artificial Sequence
  Non-cyclic GFR-binding peptide
  MOD_RES (3)..(37)..(39): Xaa is C or S
  MOD_RES (17)..(18)..(19)..(20)..(21): Xaa is A or G
  MOD_RES (22)..(23)..(24)..(25): Xaa is A or G or absent
LEXVPTEERSVKMAKVXXXXXXXXXKEVQVFLQHNKXEX

SEQ ID NO: 14766 - protein, 43 aa, Artificial Sequence
  Non-cyclic GFR-binding peptide
  MOD_RES (3)..(40)..(42): Xaa is C or S
  MOD_RES (19)..(20)..(21)..(22)..(23): Xaa is A or G
  MOD_RES (24)..(25)..(26)..(27): Xaa is A or G or absent
VKXQPSRVHHSNITVQIMXXXXXXXXXLGEMSRLEEHLEXAXA

SEQ ID NO: 14767 - protein, 35 aa, Artificial Sequence
  Non-cyclic GFR-binding peptide
  MOD_RES (1)..(1): Xaa is C or S
  MOD_RES (17)..(18)..(19)..(20)..(21): Xaa is A or G
  MOD_RES (22)..(23)..(24)..(25): Xaa is A or G or absent
XRPTQVQLRSVKVAKVXXXXXXXXXKEVQVTLEDH

SEQ ID NO: 14768 - protein, 38 aa, Artificial Sequence
  Non-cyclic GFR-binding peptide
  MOD_RES (35)..(37): Xaa is C or S
SRVHHSNITVQIMEYVRKKPKLIGEMSRLEEHLEXAXA

SEQ ID NO: 14769 - protein, 35 aa, Artificial Sequence
  Non-cyclic GFR-binding peptide
  MOD_RES (2)..(2): Xaa is C or S
  MOD_RES (16)..(17)..(18)..(19)..(20): Xaa is A or G
  MOD_RES (21)..(22)..(23)..(24): Xaa is A or G or absent
EXVPTEESNITMQIMXXXXXXXXXLGEMSFLQHNK

SEQ ID NO: 14770 - protein, 37 aa, Artificial Sequence
  Non-cyclic GFR-binding peptide
  MOD_RES (1)..(35)..(37): Xaa is C or S
  MOD_RES (15)..(16)..(17)..(18)..(19): Xaa is A or G
  MOD_RES (20)..(21)..(22)..(23): Xaa is A or G or absent
XVPTGQRSVKMAKVXXXXXXXXXKEVQVLEEHSQXEX

SEQ ID NO: 14771 - protein, 42 aa, Artificial Sequence
  Non-cyclic GFR-binding peptide
  MOD_RES (5)..(39)..(41): Xaa is C or S
EGLEXVPTGQRPVQMRKIRIKPHQGQHKKATVLEEHSQXEXR

SEQ ID NO: 14772 - protein, 41 aa, Artificial Sequence
  Non-cyclic GFR-binding peptide
  MOD_RES (2)..(39)..(41): Xaa is C or S
  MOD_RES (18)..(19)..(20)..(21)..(22): Xaa is A or G
  MOD_RES (23)..(24)..(25)..(26): Xaa is A or G or absent
QXRPTQVQLRSVKVAKVXXXXXXXXXKEVQVTLEDHLAXKX

SEQ ID NO: 14773 - protein, 38 aa, Artificial Sequence
  Non-cyclic GFR-binding peptide
  MOD_RES (37)..(37): Xaa is C or S
  MOD_RES (16)..(17)..(18)..(19)..(20): Xaa is A or G
  MOD_RES (21)..(22)..(23)..(24): Xaa is A or G or absent
QPSRVHHSNITVQIMXXXXXXXXXIGEMSRLEEHLEXA

SEQ ID NO: 14774 - protein, 36 aa, Artificial Sequence
  Non-cyclic GFR-binding peptide
  MOD_RES (2)..(2): Xaa is C or S
  MOD_RES (18)..(19)..(20)..(21)..(22): Xaa is A or G
  MOD_RES (23)..(24)..(25)..(26): Xaa is A or G or absent
QXRPTQVQLSNITVQIMXXXXXXXXXIGEMSTLEDH

SEQ ID NO: 14775 - protein, 33 aa, Artificial Sequence
  Non-cyclic GFR-binding peptide
  MOD_RES (1)..(1): Xaa is C or S
XVPTEESNITMQIMRIKPHQGQHLGEMSFLQHN

SEQ ID NO: 14776 - protein, 39 aa, Artificial Sequence
  Non-cyclic GFR-binding peptide
  MOD_RES (4)..(4): Xaa is C or S
SVKXQPSRVHHSNITVQIMEYVRKKPKLIGEMSRLEEHL

SEQ ID NO: 14777 - protein, 39 aa, Artificial Sequence
  Non-cyclic GFR-binding peptide
  MOD_RES (2)..(39): Xaa is C or S
  MOD_RES (18)..(19)..(20)..(21)..(22): Xaa is A or G
  MOD_RES (23)..(24)..(25)..(26): Xaa is A or G or absent
QXRPTQVQLSNITVQIMXXXXXXXXXIGEMSTLEDHLAX

SEQ ID NO: 14778 - protein, 41 aa, Artificial Sequence
  Non-cyclic GFR-binding peptide
  MOD_RES (4)..(38)..(40): Xaa is C or S
GLEXVPTGQRPVQMRKIRIKPHQGQHKKATVLEEHSQXEXR

SEQ ID NO: 14779 - protein, 33 aa, Artificial Sequence
  Non-cyclic GFR-binding peptide
  MOD_RES (14)..(15)..(16)..(17)..(18): Xaa is A or G
  MOD_RES (19)..(20)..(21)..(22): Xaa is A or G or absent
TQVQLRSVKVAKVXXXXXXXXXKEVQVTLEDHL

SEQ ID NO: 14780 - protein, 38 aa, Artificial Sequence
  Non-cyclic GFR-binding peptide
  MOD_RES (6)..(6): Xaa is C or S
DEGLEXVPTGQRPVQMRKIRIKPHQGQHKKATVLEEHS

SEQ ID NO: 14781 - protein, 39 aa, Artificial Sequence
  Non-cyclic GFR-binding peptide
  MOD_RES (2)..(39): Xaa is C or S
QXRPTQVQLSNITVQIMEIVRKKPIFIGEMSTLEDHLAX

SEQ ID NO: 14782 - protein, 39 aa, Artificial Sequence
  Non-cyclic GFR-binding peptide
  MOD_RES (6)..(6): Xaa is C or S
  MOD_RES (20)..(21)..(22)..(23)..(24): Xaa is A or G
  MOD_RES (25)..(26)..(27)..(28): Xaa is A or G or absent
DEGLEXVPTGQRSVKMAKVXXXXXXXXXKEVQVLEEHSQ

SEQ ID NO: 14783 - protein, 39 aa, Artificial Sequence
  Non-cyclic GFR-binding peptide
  MOD_RES (4)..(4): Xaa is C or S
SVKXQPSRVHHRPVQVRKIEYVRKKPKLKKATVRLEEHL

SEQ ID NO: 14784 - protein, 35 aa, Artificial Sequence
  Non-cyclic GFR-binding peptide
  MOD_RES (34)..(34): Xaa is C or S
  MOD_RES (14)..(15)..(16)..(17)..(18): Xaa is A or G
  MOD_RES (19)..(20)..(21)..(22): Xaa is A or G or absent
VPTGQSNITMQIMXXXXXXXXXIGEMSLEEHSQXE

SEQ ID NO: 14785 - protein, 40 aa, Artificial Sequence
  Non-cyclic GFR-binding peptide
  MOD_RES (5)..(39): Xaa is C or S
  MOD_RES (19)..(20)..(21)..(22)..(23): Xaa is A or G
  MOD_RES (24)..(25)..(26)..(27): Xaa is A or G or absent
EGLEXVPTGQRPVQMRKIXXXXXXXXXKKATVLEEHSQXE

SEQ ID NO: 14786 - protein, 42 aa, Artificial Sequence
  Non-cyclic GFR-binding peptide
  MOD_RES (5)..(39)..(41): Xaa is C or S
EGLEXVPTGQRSVKMAKVRIKPHQGQHKEVQVLEEHSQXEXR

SEQ ID NO: 14787 - protein, 41 aa, Artificial Sequence
  Non-cyclic GFR-binding peptide
  MOD_RES (5)..(39)..(41): Xaa is C or S
  MOD_RES (19)..(20)..(21)..(22)..(23): Xaa is A or G
  MOD_RES (24)..(25)..(26)..(27): Xaa is A or G or absent
EGLEXVPTEERPVQMRKIXXXXXXXXXKKATVFLQHNKXEX

SEQ ID NO: 14788 - protein, 42 aa, Artificial Sequence
  Non-cyclic GFR-binding peptide
  MOD_RES (4)..(41): Xaa is C or S
SVKXQPSRVHHSNITVQIMEYVRKKPKLIGEMSRLEEHLEXA

SEQ ID NO: 14789 - protein, 43 aa, Artificial Sequence
  Non-cyclic GFR-binding peptide
  MOD_RES (7)..(41)..(43): Xaa is C or S
NDEGLEXVPTEERSVKMAKVRIKPHQGQHKEVQVFLQHNKXEX

SEQ ID NO: 14790 - protein, 35 aa, Artificial Sequence
  Non-cyclic GFR-binding peptide
  MOD_RES (35)..(35): Xaa is C or S
  MOD_RES (14)..(15)..(16)..(17)..(18): Xaa is A or G
  MOD_RES (19)..(20)..(21)..(22): Xaa is A or G or absent
SRVHHSNITVQIMXXXXXXXXXIGEMSRLEEHLEX

SEQ ID NO: 14791 - protein, 34 aa, Artificial Sequence
  Non-cyclic GFR-binding peptide
PSRVHHRPVQVRKIEYVRKKPKLKKATVRLEEHL

SEQ ID NO: 14792 - protein, 39 aa, Artificial Sequence
  Non-cyclic GFR-binding peptide
  MOD_RES (2)..(36)..(38): Xaa is C or S
  MOD_RES (16)..(17)..(18)..(19)..(20): Xaa is A or G
  MOD_RES (21)..(22)..(23)..(24): Xaa is A or G or absent
EXVPTGQSNITMQIMXXXXXXXXXIGEMSLEEHSQXEXR

SEQ ID NO: 14793 - protein, 38 aa, Artificial Sequence
  Non-cyclic GFR-binding peptide
  MOD_RES (3)..(3): Xaa is C or S
VKXQPSRVHHSNITVQIMEYVRKKPKLLGEMSRLEEHL

SEQ ID NO: 14794 - protein, 40 aa, Artificial Sequence
  Non-cyclic GFR-binding peptide
  MOD_RES (4)..(4): Xaa is C or S
  MOD_RES (20)..(21)..(22)..(23)..(24): Xaa is A or G
  MOD_RES (25)..(26)..(27)..(28): Xaa is A or G or absent
NVQXRPTQVQLSNITVQIMXXXXXXXXXLGEMSTLEDHLA

SEQ ID NO: 14795 - protein, 34 aa, Artificial Sequence
  Non-cyclic GFR-binding peptide
PSRVHHSNITVQIMEYVRKKPKLIGEMSRLEEHL

SEQ ID NO: 14796 - protein, 33 aa, Artificial Sequence
  Non-cyclic GFR-binding peptide
  MOD_RES (14)..(15)..(16)..(17)..(18): Xaa is A or G
  MOD_RES (19)..(20)..(21)..(22): Xaa is A or G or absent
VPTEERPVQMRKIXXXXXXXXXKKATVFLQHNK

SEQ ID NO: 14797 - protein, 39 aa, Artificial Sequence
  Non-cyclic GFR-binding peptide
  MOD_RES (4)..(4): Xaa is C or S
  MOD_RES (20)..(21)..(22)..(23)..(24): Xaa is A or G
  MOD_RES (25)..(26)..(27)..(28): Xaa is A or G or absent
NVQXRPTQVQLSNITVQIMXXXXXXXXXLGEMSTLEDHL

SEQ ID NO: 14798 - protein, 41 aa, Artificial Sequence
  Non-cyclic GFR-binding peptide
  MOD_RES (4)..(38)..(40): Xaa is C or S
  MOD_RES (18)..(19)..(20)..(21)..(22): Xaa is A or G
  MOD_RES (23)..(24)..(25)..(26): Xaa is A or G or absent
GLEXVPTGQSNITMQIMXXXXXXXXXIGEMSLEEHSQXEXR

SEQ ID NO: 14799 - protein, 38 aa, Artificial Sequence
  Non-cyclic GFR-binding peptide
  MOD_RES (4)..(4): Xaa is C or S
NVQXRPTQVQLSNITVQIMEIVRKKPIFLGEMSTLEDH

SEQ ID NO: 14800 - protein, 35 aa, Artificial Sequence
  Non-cyclic GFR-binding peptide
  MOD_RES (2)..(2): Xaa is C or S
EXVPTGQRSVKMAKVRIKPHQGQHKEVQVLEEHSQ

SEQ ID NO: 14801 - protein, 37 aa, Artificial Sequence
  Non-cyclic GFR-binding peptide
  MOD_RES (3)..(3): Xaa is C or S
  MOD_RES (19)..(20)..(21)..(22)..(23): Xaa is A or G
  MOD_RES (24)..(25)..(26)..(27): Xaa is A or G or absent
VQXRPTQVQLSNITVQIMXXXXXXXXXIGEMSTLEDH

SEQ ID NO: 14802 - protein, 37 aa, Artificial Sequence
  Non-cyclic GFR-binding peptide
  MOD_RES (2)..(2): Xaa is C or S
  MOD_RES (18)..(19)..(20)..(21)..(22): Xaa is A or G
  MOD_RES (23)..(24)..(25)..(26): Xaa is A or G or absent
KXQPSRVHHSNITVQIMXXXXXXXXXLGEMSRLEEHL

SEQ ID NO: 14803 - protein, 36 aa, Artificial Sequence
  Non-cyclic GFR-binding peptide
  MOD_RES (2)..(36): Xaa is C or S
EXVPTGQRPVQMRKIRIKPHQGQHKKATVLEEHSQX

SEQ ID NO: 14804 - protein, 42 aa, Artificial Sequence
  Non-cyclic GFR-binding peptide
  MOD_RES (6)..(40)..(42): Xaa is C or S
DEGLEXVPTEERSVKMAKVRIKPHQGQHKEVQVFLQHNKXEX

SEQ ID NO: 14805 - protein, 38 aa, Artificial Sequence
  Non-cyclic GFR-binding peptide
  MOD_RES (3)..(37): Xaa is C or S
LEXVPTGQRPVQMRKIRIKPHQGQHKKATVLEEHSQXE

SEQ ID NO: 14806 - protein, 37 aa, Artificial Sequence
  Non-cyclic GFR-binding peptide
  MOD_RES (5)..(5): Xaa is C or S
EGLEXVPTEERPVQMRKIRIKPHQGQHKKATVFLQHN

SEQ ID NO: 14807 - protein, 35 aa, Artificial Sequence
  Non-cyclic GFR-binding peptide
  MOD_RES (1)..(35): Xaa is C or S
  MOD_RES (15)..(16)..(17)..(18)..(19): Xaa is A or G
  MOD_RES (20)..(21)..(22)..(23): Xaa is A or G or absent
XVPTGQRPVQMRKIXXXXXXXXXKKATVLEEHSQX

SEQ ID NO: 14808 - protein, 38 aa, Artificial Sequence
  Non-cyclic GFR-binding peptide
  MOD_RES (6)..(6): Xaa is C or S
  MOD_RES (20)..(21)..(22)..(23)..(24): Xaa is A or G
  MOD_RES (25)..(26)..(27)..(28): Xaa is A or G or absent
DEGLEXVPTEESNITMQIMXXXXXXXXXLGEMSFLQHN

SEQ ID NO: 14809 - protein, 35 aa, Artificial Sequence
  Non-cyclic GFR-binding peptide
  MOD_RES (3)..(3): Xaa is C or S
LEXVPTEERPVQMRKIRIKPHQGQHKKATVFLQHN

SEQ ID NO: 14810 - protein, 42 aa, Artificial Sequence
  Non-cyclic GFR-binding peptide
  MOD_RES (7)..(41): Xaa is C or S
  MOD_RES (21)..(22)..(23)..(24)..(25): Xaa is A or G
  MOD_RES (26)..(27)..(28)..(29): Xaa is A or G or absent
NDEGLEXVPTGQSNITMQIMXXXXXXXXXIGEMSLEEHSQXE

SEQ ID NO: 14811 - protein, 42 aa, Artificial Sequence
  Non-cyclic GFR-binding peptide
  MOD_RES (6)..(40)..(42): Xaa is C or S
  MOD_RES (20)..(21)..(22)..(23)..(24): Xaa is A or G
  MOD_RES (25)..(26)..(27)..(28): Xaa is A or G or absent
DEGLEXVPTGQRPVQMRKIXXXXXXXXXKKATVLEEHSQXEX

SEQ ID NO: 14812 - protein, 37 aa, Artificial Sequence
  Non-cyclic GFR-binding peptide
  MOD_RES (36)..(36): Xaa is C or S
  MOD_RES (15)..(16)..(17)..(18)..(19): Xaa is A or G
  MOD_RES (20)..(21)..(22)..(23): Xaa is A or G or absent
PTQVQLSNITVQIMXXXXXXXXXIGEMSTLEDHLAXK

SEQ ID NO: 14813 - protein, 33 aa, Artificial Sequence
  Non-cyclic GFR-binding peptide
  MOD_RES (15)..(16)..(17)..(18)..(19): Xaa is A or G
  MOD_RES (20)..(21)..(22)..(23): Xaa is A or G or absent
PSRVHHSNITVQIMXXXXXXXXXIGEMSRLEEH

SEQ ID NO: 14814 - protein, 43 aa, Artificial Sequence
  Non-cyclic GFR-binding peptide
  MOD_RES (3)..(40)..(42): Xaa is C or S
  MOD_RES (19)..(20)..(21)..(22)..(23): Xaa is A or G
  MOD_RES (24)..(25)..(26)..(27): Xaa is A or G or absent
VQXRPTQVQLSNITVQIMXXXXXXXXXIGEMSTLEDHLAXKXE

SEQ ID NO: 14815 - protein, 40 aa, Artificial Sequence
  Non-cyclic GFR-binding peptide
  MOD_RES (37)..(39): Xaa is C or S
RPTQVQLRSVKVAKVEIVRKKPIFKEVQVTLEDHLAXKXE

SEQ ID NO: 14816 - protein, 37 aa, Artificial Sequence
  Non-cyclic GFR-binding peptide
  MOD_RES (36)..(36): Xaa is C or S
PTQVQLSNITVQIMEIVRKKPIFIGEMSTLEDHLAXK

SEQ ID NO: 14817 - protein, 38 aa, Artificial Sequence
  Non-cyclic GFR-binding peptide
  MOD_RES (2)..(2): Xaa is C or S
KXQPSRVHHSNITVQIMEYVRKKPKLLGEMSRLEEHLE

SEQ ID NO: 14818 - protein, 38 aa, Artificial Sequence
  Non-cyclic GFR-binding peptide
  MOD_RES (5)..(5): Xaa is C or S
  MOD_RES (19)..(20)..(21)..(22)..(23): Xaa is A or G
  MOD_RES (24)..(25)..(26)..(27): Xaa is A or G or absent
EGLEXVPTEERPVQMRKIXXXXXXXXXKKATVFLQHNK

SEQ ID NO: 14819 - protein, 33 aa, Artificial Sequence
  Non-cyclic GFR-binding peptide
  MOD_RES (1)..(1): Xaa is C or S
XVPTGQSNITMQIMRIKPHQGQHIGEMSLEEHS

SEQ ID NO: 14820 - protein, 35 aa, Artificial Sequence
  Non-cyclic GFR-binding peptide
  MOD_RES (34)..(34): Xaa is C or S
VPTEERPVQMRKIRIKPHQGQHKKATVFLQHNKXE

SEQ ID NO: 14821 - protein, 41 aa, Artificial Sequence
  Non-cyclic GFR-binding peptide
  MOD_RES (7)..(41): Xaa is C or S
  MOD_RES (21)..(22)..(23)..(24)..(25): Xaa is A or G
  MOD_RES (26)..(27)..(28)..(29): Xaa is A or G or absent
NDEGLEXVPTEESNITMQIMXXXXXXXXXLGEMSFLQHNKX

SEQ ID NO: 14822 - protein, 39 aa, Artificial Sequence
  Non-cyclic GFR-binding peptide
  MOD_RES (5)..(5): Xaa is C or S
SSVKXQPSRVHHSNITVQIMEYVRKKPKLLGEMSRLEEH

SEQ ID NO: 14823 - protein, 37 aa, Artificial Sequence
  Non-cyclic GFR-binding peptide
  MOD_RES (36)..(36): Xaa is C or S
  MOD_RES (15)..(16)..(17)..(18)..(19): Xaa is A or G
  MOD_RES (20)..(21)..(22)..(23): Xaa is A or G or absent
PSRVHHSNITVQIMXXXXXXXXXLGEMSRLEEHLEXA

SEQ ID NO: 14824 - protein, 42 aa, Artificial Sequence
  Non-cyclic GFR-binding peptide
  MOD_RES (4)..(41): Xaa is C or S
NVQXRPTQVQLSNITVQIMEIVRKKPIFLGEMSTLEDHLAXK

SEQ ID NO: 14825 - protein, 38 aa, Artificial Sequence
  Non-cyclic GFR-binding peptide
  MOD_RES (5)..(5): Xaa is C or S
EGLEXVPTEESNITMQIMRIKPHQGQHLGEMSFLQHNK

SEQ ID NO: 14826 - protein, 42 aa, Artificial Sequence
  Non-cyclic GFR-binding peptide
  MOD_RES (4)..(41): Xaa is C or S
  MOD_RES (20)..(21)..(22)..(23)..(24): Xaa is A or G
  MOD_RES (25)..(26)..(27)..(28): Xaa is A or G or absent
NVQXRPTQVQLSNITVQIMXXXXXXXXXLGEMSTLEDHLAXK

SEQ ID NO: 14827 - protein, 41 aa, Artificial Sequence
  Non-cyclic GFR-binding peptide
  MOD_RES (1)..(38)..(40): Xaa is C or S
  MOD_RES (17)..(18)..(19)..(20)..(21): Xaa is A or G
  MOD_RES (22)..(23)..(24)..(25): Xaa is A or G or absent
XRPTQVQLSNITVQIMXXXXXXXXXIGEMSTLEDHLAXKXE

SEQ ID NO: 14828 - protein, 39 aa, Artificial Sequence
  Non-cyclic GFR-binding peptide
  MOD_RES (37)..(39): Xaa is C or S
RPTQVQLRSVKVAKVEIVRKKPIFKEVQVTLEDHLAXKX

SEQ ID NO: 14829 - protein, 39 aa, Artificial Sequence
  Non-cyclic GFR-binding peptide
  MOD_RES (3)..(3): Xaa is C or S
  MOD_RES (19)..(20)..(21)..(22)..(23): Xaa is A or G
  MOD_RES (24)..(25)..(26)..(27): Xaa is A or G or absent
VQXRPTQVQLSNITVQIMXXXXXXXXXIGEMSTLEDHLA

SEQ ID NO: 14830 - protein, 42 aa, Artificial Sequence
  Non-cyclic GFR-binding peptide
  MOD_RES (2)..(39)..(41): Xaa is C or S
  MOD_RES (18)..(19)..(20)..(21)..(22): Xaa is A or G
  MOD_RES (23)..(24)..(25)..(26): Xaa is A or G or absent
QXRPTQVQLSNITVQIMXXXXXXXXXIGEMSTLEDHLAXKXE

SEQ ID NO: 14831 - protein, 38 aa, Artificial Sequence
  Non-cyclic GFR-binding peptide
  MOD_RES (1)..(38): Xaa is C or S
XRPTQVQLSNITVQIMEIVRKKPIFIGEMSTLEDHLAX

SEQ ID NO: 14832 - protein, 40 aa, Artificial Sequence
  Non-cyclic GFR-binding peptide
  MOD_RES (5)..(5): Xaa is C or S
  MOD_RES (21)..(22)..(23)..(24)..(25): Xaa is A or G
  MOD_RES (26)..(27)..(28)..(29): Xaa is A or G or absent
SSVKXQPSRVHHSNITVQIMXXXXXXXXXLGEMSRLEEHL

SEQ ID NO: 14833 - protein, 42 aa, Artificial Sequence
  Non-cyclic GFR-binding peptide
  MOD_RES (5)..(42): Xaa is C or S
  MOD_RES (21)..(22)..(23)..(24)..(25): Xaa is A or G
  MOD_RES (26)..(27)..(28)..(29): Xaa is A or G or absent
SSVKXQPSRVHHSNITVQIMXXXXXXXXXLGEMSRLEEHLEX

SEQ ID NO: 14834 - protein, 39 aa, Artificial Sequence
  Non-cyclic GFR-binding peptide
  MOD_RES (3)..(37)..(39): Xaa is C or S
LEXVPTGQRSVKMAKVRIKPHQGQHKEVQVLEEHSQXEX

SEQ ID NO: 14835 - protein, 35 aa, Artificial Sequence
  Non-cyclic GFR-binding peptide
  MOD_RES (1)..(35): Xaa is C or S
  MOD_RES (15)..(16)..(17)..(18)..(19): Xaa is A or G
  MOD_RES (20)..(21)..(22)..(23): Xaa is A or G or absent
XVPTEESNITMQIMXXXXXXXXXLGEMSFLQHNKX

SEQ ID NO: 14836 - protein, 34 aa, Artificial Sequence
  Non-cyclic GFR-binding peptide
  MOD_RES (1)..(1): Xaa is C or S
  MOD_RES (15)..(16)..(17)..(18)..(19): Xaa is A or G
  MOD_RES (20)..(21)..(22)..(23): Xaa is A or G or absent
XVPTEERSVKMAKVXXXXXXXXXKEVQVFLQHNK

SEQ ID NO: 14837 - protein, 36 aa, Artificial Sequence
  Non-cyclic GFR-binding peptide
RPTQVQLSNITVQIMEIVRKKPIFIGEMSTLEDHLA

SEQ ID NO: 14838 - protein, 41 aa, Artificial Sequence
  Non-cyclic GFR-binding peptide
  MOD_RES (1)..(38)..(40): Xaa is C or S
  MOD_RES (17)..(18)..(19)..(20)..(21): Xaa is A or G
  MOD_RES (22)..(23)..(24)..(25): Xaa is A or G or absent
XQPSRVHHSNITVQIMXXXXXXXXXIGEMSRLEEHLEXAXA

SEQ ID NO: 14839 - protein, 35 aa, Artificial Sequence
  Non-cyclic GFR-binding peptide
  MOD_RES (35)..(35): Xaa is C or S
TQVQLRSVKVAKVEIVRKKPIFKEVQVTLEDHLAX

SEQ ID NO: 14840 - protein, 36 aa, Artificial Sequence
  Non-cyclic GFR-binding peptide
  MOD_RES (36)..(36): Xaa is C or S
  MOD_RES (15)..(16)..(17)..(18)..(19): Xaa is A or G
  MOD_RES (20)..(21)..(22)..(23): Xaa is A or G or absent
PSRVHHSNITVQIMXXXXXXXXXLGEMSRLEEHLEX

SEQ ID NO: 14841 - protein, 44 aa, Artificial Sequence
  Non-cyclic GFR-binding peptide
  MOD_RES (5)..(42)..(44): Xaa is C or S
SSVKXQPSRVHHSNITVQIMEYVRKKPKLLGEMSRLEEHLEXAX

SEQ ID NO: 14842 - protein, 44 aa, Artificial Sequence
  Non-cyclic GFR-binding peptide
  MOD_RES (7)..(41)..(43): Xaa is C or S
  MOD_RES (21)..(22)..(23)..(24)..(25): Xaa is A or G
  MOD_RES (26)..(27)..(28)..(29): Xaa is A or G or absent
NDEGLEXVPTEERSVKMAKVXXXXXXXXXKEVQVFLQHNKXEXR

SEQ ID NO: 14843 - protein, 40 aa, Artificial Sequence
  Non-cyclic GFR-binding peptide
  MOD_RES (3)..(37)..(39): Xaa is C or S
  MOD_RES (17)..(18)..(19)..(20)..(21): Xaa is A or G
  MOD_RES (22)..(23)..(24)..(25): Xaa is A or G or absent
LEXVPTEERSVKMAKVXXXXXXXXXKEVQVFLQHNKXEXR

SEQ ID NO: 14844 - protein, 42 aa, Artificial Sequence
  Non-cyclic GFR-binding peptide
  MOD_RES (7)..(41): Xaa is C or S
NDEGLEXVPTGQRSVKMAKVRIKPHQGQHKEVQVLEEHSQXE

SEQ ID NO: 14845 - protein, 34 aa, Artificial Sequence
  Non-cyclic GFR-binding peptide
RPTQVQLSNITVQIMEIVRKKPIFIGEMSTLEDH

SEQ ID NO: 14846 - protein, 36 aa, Artificial Sequence
  Non-cyclic GFR-binding peptide
  MOD_RES (2)..(36): Xaa is C or S
EXVPTGQRSVKMAKVRIKPHQGQHKEVQVLEEHSQX

SEQ ID NO: 14847 - protein, 39 aa, Artificial Sequence
  Non-cyclic GFR-binding peptide
  MOD_RES (4)..(38): Xaa is C or S
GLEXVPTGQRSVKMAKVRIKPHQGQHKEVQVLEEHSQXE

SEQ ID NO: 14848 - protein, 38 aa, Artificial Sequence
  Non-cyclic GFR-binding peptide
  MOD_RES (4)..(38): Xaa is C or S
  MOD_RES (18)..(19)..(20)..(21)..(22): Xaa is A or G
  MOD_RES (23)..(24)..(25)..(26): Xaa is A or G or absent
GLEXVPTGQSNITMQIMXXXXXXXXXIGEMSLEEHSQX

SEQ ID NO: 14849 - protein, 41 aa, Artificial Sequence
  Non-cyclic GFR-binding peptide
  MOD_RES (4)..(41): Xaa is C or S
  MOD_RES (20)..(21)..(22)..(23)..(24): Xaa is A or G
  MOD_RES (25)..(26)..(27)..(28): Xaa is A or G or absent
SVKXQPSRVHHRPVQVRKIXXXXXXXXXKKATVRLEEHLEX

SEQ ID NO: 14850 - protein, 43 aa, Artificial Sequence
  Non-cyclic GFR-binding peptide
  MOD_RES (6)..(40)..(42): Xaa is C or S
DEGLEXVPTEERSVKMAKVRIKPHQGQHKEVQVFLQHNKXEXR

SEQ ID NO: 14851 - protein, 40 aa, Artificial Sequence
  Non-cyclic GFR-binding peptide
  MOD_RES (3)..(40): Xaa is C or S
VQXRPTQVQLSNITVQIMEIVRKKPIFLGEMSTLEDHLAX

SEQ ID NO: 14852 - protein, 33 aa, Artificial Sequence
  Non-cyclic GFR-binding peptide
VPTEERPVQMRKIRIKPHQGQHKKATVFLQHNK

SEQ ID NO: 14853 - protein, 39 aa, Artificial Sequence
  Non-cyclic GFR-binding peptide
  MOD_RES (4)..(4): Xaa is C or S
  MOD_RES (20)..(21)..(22)..(23)..(24): Xaa is A or G
  MOD_RES (25)..(26)..(27)..(28): Xaa is A or G or absent
NVQXRPTQVQLRSVKVAKVXXXXXXXXXKEVQVTLEDHL

SEQ ID NO: 14854 - protein, 36 aa, Artificial Sequence
  Non-cyclic GFR-binding peptide
  MOD_RES (35)..(35): Xaa is C or S
TQVQLRSVKVAKVEIVRKKPIFKEVQVTLEDHLAXK

SEQ ID NO: 14855 - protein, 38 aa, Artificial Sequence
  Non-cyclic GFR-binding peptide
  MOD_RES (3)..(3): Xaa is C or S
  MOD_RES (19)..(20)..(21)..(22)..(23): Xaa is A or G
  MOD_RES (24)..(25)..(26)..(27): Xaa is A or G or absent
VKXQPSRVHHSNITVQIMXXXXXXXXXIGEMSRLEEHL

SEQ ID NO: 14856 - protein, 40 aa, Artificial Sequence
  Non-cyclic GFR-binding peptide
  MOD_RES (5)..(39): Xaa is C or S
EGLEXVPTGQRSVKMAKVRIKPHQGQHKEVQVLEEHSQXE

SEQ ID NO: 14857 - protein, 36 aa, Artificial Sequence
  Non-cyclic GFR-binding peptide
  MOD_RES (34)..(36): Xaa is C or S
  MOD_RES (14)..(15)..(16)..(17)..(18): Xaa is A or G
  MOD_RES (19)..(20)..(21)..(22): Xaa is A or G or absent
VPTEESNITMQIMXXXXXXXXXLGEMSFLQHNKXEX

SEQ ID NO: 14858 - protein, 36 aa, Artificial Sequence
  Non-cyclic GFR-binding peptide
  MOD_RES (3)..(3): Xaa is C or S
  MOD_RES (17)..(18)..(19)..(20)..(21): Xaa is A or G
  MOD_RES (22)..(23)..(24)..(25): Xaa is A or G or absent
LEXVPTEESNITMQIMXXXXXXXXXLGEMSFLQHNK

SEQ ID NO: 14859 - protein, 39 aa, Artificial Sequence
  Non-cyclic GFR-binding peptide
  MOD_RES (7)..(7): Xaa is C or S
NDEGLEXVPTEERPVQMRKIRIKPHQGQHKKATVFLQHN

SEQ ID NO: 14860 - protein, 41 aa, Artificial Sequence
  Non-cyclic GFR-binding peptide
  MOD_RES (5)..(5): Xaa is C or S
SSVKXQPSRVHHSNITVQIMEYVRKKPKLLGEMSRLEEHLE

SEQ ID NO: 14861 - protein, 37 aa, Artificial Sequence
  Non-cyclic GFR-binding peptide
  MOD_RES (2)..(36): Xaa is C or S
EXVPTEESNITMQIMRIKPHQGQHLGEMSFLQHNKXE

SEQ ID NO: 14862 - protein, 38 aa, Artificial Sequence
  Non-cyclic GFR-binding peptide
  MOD_RES (3)..(3): Xaa is C or S
  MOD_RES (19)..(20)..(21)..(22)..(23): Xaa is A or G
  MOD_RES (24)..(25)..(26)..(27): Xaa is A or G or absent
VKXQPSRVHHRPVQVRKIXXXXXXXXXKKATVRLEEHL

SEQ ID NO: 14863 - protein, 39 aa, Artificial Sequence
  Non-cyclic GFR-binding peptide
  MOD_RES (7)..(7): Xaa is C or S
NDEGLEXVPTEERSVKMAKVRIKPHQGQHKEVQVFLQHN

SEQ ID NO: 14864 - protein, 39 aa, Artificial Sequence
  Non-cyclic GFR-binding peptide
  MOD_RES (37)..(39): Xaa is C or S
QPSRVHHSNITVQIMEYVRKKPKLIGEMSRLEEHLEXAX

SEQ ID NO: 14865 - protein, 37 aa, Artificial Sequence
  Non-cyclic GFR-binding peptide
  MOD_RES (1)..(1): Xaa is C or S
  MOD_RES (17)..(18)..(19)..(20)..(21): Xaa is A or G
  MOD_RES (22)..(23)..(24)..(25): Xaa is A or G or absent
XQPSRVHHRPVQVRKIXXXXXXXXXKKATVRLEEHLE

SEQ ID NO: 14866 - protein, 38 aa, Artificial Sequence
  Non-cyclic GFR-binding peptide
  MOD_RES (6)..(6): Xaa is C or S
DEGLEXVPTGQRSVKMAKVRIKPHQGQHKEVQVLEEHS

SEQ ID NO: 14867 - protein, 40 aa, Artificial Sequence
  Non-cyclic GFR-binding peptide
  MOD_RES (3)..(37)..(39): Xaa is C or S
  MOD_RES (17)..(18)..(19)..(20)..(21): Xaa is A or G
  MOD_RES (22)..(23)..(24)..(25): Xaa is A or G or absent
LEXVPTGQSNITMQIMXXXXXXXXXIGEMSLEEHSQXEXR

SEQ ID NO: 14868 - protein, 33 aa, Artificial Sequence
  Non-cyclic GFR-binding peptide
  MOD_RES (15)..(16)..(17)..(18)..(19): Xaa is A or G
  MOD_RES (20)..(21)..(22)..(23): Xaa is A or G or absent
PSRVHHRPVQVRKIXXXXXXXXXKKATVRLEEH

SEQ ID NO: 14869 - protein, 43 aa, Artificial Sequence
  Non-cyclic GFR-binding peptide
  MOD_RES (4)..(41)..(43): Xaa is C or S
  MOD_RES (20)..(21)..(22)..(23)..(24): Xaa is A or G
  MOD_RES (25)..(26)..(27)..(28): Xaa is A or G or absent
SVKXQPSRVHHSNITVQIMXXXXXXXXXIGEMSRLEEHLEXAX

SEQ ID NO: 14870 - protein, 37 aa, Artificial Sequence
  Non-cyclic GFR-binding peptide
  MOD_RES (36)..(36): Xaa is C or S
PSRVHHRPVQVRKIEYVRKKPKLKKATVRLEEHLEXA

SEQ ID NO: 14871 - protein, 38 aa, Artificial Sequence
  Non-cyclic GFR-binding peptide
  MOD_RES (3)..(37): Xaa is C or S
  MOD_RES (17)..(18)..(19)..(20)..(21): Xaa is A or G
  MOD_RES (22)..(23)..(24)..(25): Xaa is A or G or absent
LEXVPTEERSVKMAKVXXXXXXXXXKEVQVFLQHNKXE

SEQ ID NO: 14872 - protein, 36 aa, Artificial Sequence
  Non-cyclic GFR-binding peptide
  MOD_RES (16)..(17)..(18)..(19)..(20): Xaa is A or G
  MOD_RES (21)..(22)..(23)..(24): Xaa is A or G or absent
RPTQVQLRSVKVAKVXXXXXXXXXKEVQVTLEDHLA

SEQ ID NO: 14873 - protein, 38 aa, Artificial Sequence
  Non-cyclic GFR-binding peptide
  MOD_RES (2)..(36)..(38): Xaa is C or S
  MOD_RES (16)..(17)..(18)..(19)..(20): Xaa is A or G
  MOD_RES (21)..(22)..(23)..(24): Xaa is A or G or absent
EXVPTGQRPVQMRKIXXXXXXXXXKKATVLEEHSQXEX

SEQ ID NO: 14874 - protein, 36 aa, Artificial Sequence
  Non-cyclic GFR-binding peptide
  MOD_RES (35)..(35): Xaa is C or S
  MOD_RES (14)..(15)..(16)..(17)..(18): Xaa is A or G
  MOD_RES (19)..(20)..(21)..(22): Xaa is A or G or absent
TQVQLRSVKVAKVXXXXXXXXXKEVQVTLEDHLAXK

SEQ ID NO: 14875 - protein, 43 aa, Artificial Sequence
  Non-cyclic GFR-binding peptide
  MOD_RES (3)..(40)..(42): Xaa is C or S
VKXQPSRVHHSNITVQIMEYVRKKPKLIGEMSRLEEHLEXAXA

SEQ ID NO: 14876 - protein, 37 aa, Artificial Sequence
  Non-cyclic GFR-binding peptide
  MOD_RES (36)..(36): Xaa is C or S
PSRVHHSNITVQIMEYVRKKPKLLGEMSRLEEHLEXA

SEQ ID NO: 14877 - protein, 40 aa, Artificial Sequence
  Non-cyclic GFR-binding peptide
  MOD_RES (3)..(40): Xaa is C or S
VKXQPSRVHHSNITVQIMEYVRKKPKLIGEMSRLEEHLEX

SEQ ID NO: 14878 - protein, 38 aa, Artificial Sequence
  Non-cyclic GFR-binding peptide
  MOD_RES (1)..(35)..(37): Xaa is C or S
  MOD_RES (15)..(16)..(17)..(18)..(19): Xaa is A or G
  MOD_RES (20)..(21)..(22)..(23): Xaa is A or G or absent
XVPTGQSNITMQIMXXXXXXXXXIGEMSLEEHSQXEXR

SEQ ID NO: 14879 - protein, 38 aa, Artificial Sequence
  Non-cyclic GFR-binding peptide
  MOD_RES (6)..(6): Xaa is C or S
  MOD_RES (20)..(21)..(22)..(23)..(24): Xaa is A or G
  MOD_RES (25)..(26)..(27)..(28): Xaa is A or G or absent
DEGLEXVPTGQSNITMQIMXXXXXXXXXIGEMSLEEHS

SEQ ID NO: 14880 - protein, 40 aa, Artificial Sequence
  Non-cyclic GFR-binding peptide
  MOD_RES (4)..(38)..(40): Xaa is C or S
  MOD_RES (18)..(19)..(20)..(21)..(22): Xaa is A or G
  MOD_RES (23)..(24)..(25)..(26): Xaa is A or G or absent
GLEXVPTEERPVQMRKIXXXXXXXXXKKATVFLQHNKXEX

SEQ ID NO: 14881 - protein, 43 aa, Artificial Sequence
  Non-cyclic GFR-binding peptide
  MOD_RES (6)..(40)..(42): Xaa is C or S
  MOD_RES (20)..(21)..(22)..(23)..(24): Xaa is A or G
  MOD_RES (25)..(26)..(27)..(28): Xaa is A or G or absent
DEGLEXVPTEERPVQMRKIXXXXXXXXXKKATVFLQHNKXEXR

SEQ ID NO: 14882 - protein, 35 aa, Artificial Sequence
  Non-cyclic GFR-binding peptide
  MOD_RES (35)..(35): Xaa is C or S
  MOD_RES (14)..(15)..(16)..(17)..(18): Xaa is A or G
  MOD_RES (19)..(20)..(21)..(22): Xaa is A or G or absent
TQVQLSNITVQIMXXXXXXXXXLGEMSTLEDHLAX

SEQ ID NO: 14883 - protein, 39 aa, Artificial Sequence
  Non-cyclic GFR-binding peptide
  MOD_RES (5)..(5): Xaa is C or S
RNVQXRPTQVQLSNITVQIMEIVRKKPIFLGEMSTLEDH

SEQ ID NO: 14884 - protein, 41 aa, Artificial Sequence
  Non-cyclic GFR-binding peptide
  MOD_RES (6)..(40): Xaa is C or S
DEGLEXVPTGQSNITMQIMRIKPHQGQHIGEMSLEEHSQXE

SEQ ID NO: 14885 - protein, 38 aa, Artificial Sequence
  Non-cyclic GFR-binding peptide
  MOD_RES (6)..(6): Xaa is C or S
DEGLEXVPTEESNITMQIMRIKPHQGQHLGEMSFLQHN

SEQ ID NO: 14886 - protein, 40 aa, Artificial Sequence
  Non-cyclic GFR-binding peptide
  MOD_RES (5)..(5): Xaa is C or S
  MOD_RES (21)..(22)..(23)..(24)..(25): Xaa is A or G
  MOD_RES (26)..(27)..(28)..(29): Xaa is A or G or absent
SSVKXQPSRVHHRPVQVRKIXXXXXXXXXKKATVRLEEHL

SEQ ID NO: 14887 - protein, 40 aa, Artificial Sequence
  Non-cyclic GFR-binding peptide
  MOD_RES (1)..(38)..(40): Xaa is C or S
  MOD_RES (17)..(18)..(19)..(20)..(21): Xaa is A or G
  MOD_RES (22)..(23)..(24)..(25): Xaa is A or G or absent
XQPSRVHHSNITVQIMXXXXXXXXXIGEMSRLEEHLEXAX

SEQ ID NO: 14888 - protein, 35 aa, Artificial Sequence
  Non-cyclic GFR-binding peptide
  MOD_RES (3)..(3): Xaa is C or S
LEXVPTEESNITMQIMRIKPHQGQHLGEMSFLQHN

SEQ ID NO: 14889 - protein, 39 aa, Artificial Sequence
  Non-cyclic GFR-binding peptide
  MOD_RES (5)..(39): Xaa is C or S
EGLEXVPTEERPVQMRKIRIKPHQGQHKKATVFLQHNKX

SEQ ID NO: 14890 - protein, 41 aa, Artificial Sequence
  Non-cyclic GFR-binding peptide
  MOD_RES (5)..(39)..(41): Xaa is C or S
EGLEXVPTGQRPVQMRKIRIKPHQGQHKKATVLEEHSQXEX

SEQ ID NO: 14891 - protein, 37 aa, Artificial Sequence
  Non-cyclic GFR-binding peptide
  MOD_RES (1)..(1): Xaa is C or S
XRPTQVQLSNITVQIMEIVRKKPIFIGEMSTLEDHLA

SEQ ID NO: 14892 - protein, 42 aa, Artificial Sequence
  Non-cyclic GFR-binding peptide
  MOD_RES (6)..(40)..(42): Xaa is C or S
DEGLEXVPTEESNITMQIMRIKPHQGQHLGEMSFLQHNKXEX

SEQ ID NO: 14893 - protein, 38 aa, Artificial Sequence
  Non-cyclic GFR-binding peptide
  MOD_RES (4)..(4): Xaa is C or S
SVKXQPSRVHHSNITVQIMEYVRKKPKLLGEMSRLEEH

SEQ ID NO: 14894 - protein, 38 aa, Artificial Sequence
  Non-cyclic GFR-binding peptide
  MOD_RES (36)..(38): Xaa is C or S
PTQVQLRSVKVAKVEIVRKKPIFKEVQVTLEDHLAXKX

SEQ ID NO: 14895 - protein, 41 aa, Artificial Sequence
  Non-cyclic GFR-binding peptide
  MOD_RES (3)..(40): Xaa is C or S
VQXRPTQVQLSNITVQIMEIVRKKPIFLGEMSTLEDHLAXK

SEQ ID NO: 14896 - protein, 40 aa, Artificial Sequence
  Non-cyclic GFR-binding peptide
  MOD_RES (37)..(39): Xaa is C or S
QPSRVHHSNITVQIMEYVRKKPKLIGEMSRLEEHLEXAXA

SEQ ID NO: 14897 - protein, 37 aa, Artificial Sequence
  Non-cyclic GFR-binding peptide
  MOD_RES (37)..(37): Xaa is C or S
QPSRVHHSNITVQIMEYVRKKPKLLGEMSRLEEHLEX

SEQ ID NO: 14898 - protein, 40 aa, Artificial Sequence
  Non-cyclic GFR-binding peptide
  MOD_RES (6)..(40): Xaa is C or S
DEGLEXVPTEERPVQMRKIRIKPHQGQHKKATVFLQHNKX

SEQ ID NO: 14899 - protein, 36 aa, Artificial Sequence
  Non-cyclic GFR-binding peptide
  MOD_RES (1)..(1): Xaa is C or S
  MOD_RES (17)..(18)..(19)..(20)..(21): Xaa is A or G
  MOD_RES (22)..(23)..(24)..(25): Xaa is A or G or absent
XRPTQVQLSNITVQIMXXXXXXXXXLGEMSTLEDHL

SEQ ID NO: 14900 - protein, 38 aa, Artificial Sequence
  Non-cyclic GFR-binding peptide
  MOD_RES (2)..(36)..(38): Xaa is C or S
EXVPTGQRSVKMAKVRIKPHQGQHKEVQVLEEHSQXEX

SEQ ID NO: 14901 - protein, 32 aa, Artificial Sequence
  Non-cyclic GFR-binding peptide
  MOD_RES (14)..(15)..(16)..(17)..(18): Xaa is A or G
  MOD_RES (19)..(20)..(21)..(22): Xaa is A or G or absent
TQVQLSNITVQIMXXXXXXXXXIGEMSTLEDH

SEQ ID NO: 14902 - protein, 41 aa, Artificial Sequence
  Non-cyclic GFR-binding peptide
  MOD_RES (4)..(38)..(40): Xaa is C or S
GLEXVPTGQSNITMQIMRIKPHQGQHIGEMSLEEHSQXEXR

SEQ ID NO: 14903 - protein, 42 aa, Artificial Sequence
  Non-cyclic GFR-binding peptide
  MOD_RES (3)..(40)..(42): Xaa is C or S
VKXQPSRVHHSNITVQIMEYVRKKPKLIGEMSRLEEHLEXAX

SEQ ID NO: 14904 - protein, 39 aa, Artificial Sequence
  Non-cyclic GFR-binding peptide
  MOD_RES (5)..(5): Xaa is C or S
  MOD_RES (21)..(22)..(23)..(24)..(25): Xaa is A or G
  MOD_RES (26)..(27)..(28)..(29): Xaa is A or G or absent
SSVKXQPSRVHHSNITVQIMXXXXXXXXXLGEMSRLEEH

SEQ ID NO: 14905 - protein, 41 aa, Artificial Sequence
  Non-cyclic GFR-binding peptide
  MOD_RES (5)..(5): Xaa is C or S
  MOD_RES (21)..(22)..(23)..(24)..(25): Xaa is A or G
  MOD_RES (26)..(27)..(28)..(29): Xaa is A or G or absent
SSVKXQPSRVHHRPVQVRKIXXXXXXXXXKKATVRLEEHLE

SEQ ID NO: 14906 - protein, 37 aa, Artificial Sequence
  Non-cyclic GFR-binding peptide
  MOD_RES (1)..(35)..(37): Xaa is C or S
XVPTGQRSVKMAKVRIKPHQGQHKEVQVLEEHSQXEX

SEQ ID NO: 14907 - protein, 39 aa, Artificial Sequence
  Non-cyclic GFR-binding peptide
  MOD_RES (4)..(4): Xaa is C or S
NVQXRPTQVQLSNITVQIMEIVRKKPIFLGEMSTLEDHL

SEQ ID NO: 14908 - protein, 38 aa, Artificial Sequence
  Non-cyclic GFR-binding peptide
  MOD_RES (35)..(37): Xaa is C or S
  MOD_RES (14)..(15)..(16)..(17)..(18): Xaa is A or G
  MOD_RES (19)..(20)..(21)..(22): Xaa is A or G or absent
TQVQLRSVKVAKVXXXXXXXXXKEVQVTLEDHLAXKXE

SEQ ID NO: 14909 - protein, 42 aa, Artificial Sequence
  Non-cyclic GFR-binding peptide
  MOD_RES (2)..(39)..(41): Xaa is C or S
KXQPSRVHHSNITVQIMEYVRKKPKLLGEMSRLEEHLEXAXA

SEQ ID NO: 14910 - protein, 44 aa, Artificial Sequence
  Non-cyclic GFR-binding peptide
  MOD_RES (7)..(41)..(43): Xaa is C or S
  MOD_RES (21)..(22)..(23)..(24)..(25): Xaa is A or G
  MOD_RES (26)..(27)..(28)..(29): Xaa is A or G or absent
NDEGLEXVPTGQSNITMQIMXXXXXXXXXIGEMSLEEHSQXEXR

SEQ ID NO: 14911 - protein, 42 aa, Artificial Sequence
  Non-cyclic GFR-binding peptide
  MOD_RES (4)..(41): Xaa is C or S
  MOD_RES (20)..(21)..(22)..(23)..(24): Xaa is A or G
  MOD_RES (25)..(26)..(27)..(28): Xaa is A or G or absent
SVKXQPSRVHHSNITVQIMXXXXXXXXXLGEMSRLEEHLEXA

SEQ ID NO: 14912 - protein, 42 aa, Artificial Sequence
  Non-cyclic GFR-binding peptide
  MOD_RES (7)..(41): Xaa is C or S
NDEGLEXVPTEERSVKMAKVRIKPHQGQHKEVQVFLQHNKXE

SEQ ID NO: 14913 - protein, 37 aa, Artificial Sequence
  Non-cyclic GFR-binding peptide
  MOD_RES (37)..(37): Xaa is C or S
RPTQVQLSNITVQIMEIVRKKPIFLGEMSTLEDHLAX

SEQ ID NO: 14914 - protein, 37 aa, Artificial Sequence
  Non-cyclic GFR-binding peptide
  MOD_RES (3)..(37): Xaa is C or S
  MOD_RES (17)..(18)..(19)..(20)..(21): Xaa is A or G
  MOD_RES (22)..(23)..(24)..(25): Xaa is A or G or absent
LEXVPTEESNITMQIMXXXXXXXXXLGEMSFLQHNKX

SEQ ID NO: 14915 - protein, 38 aa, Artificial Sequence
  Non-cyclic GFR-binding peptide
  MOD_RES (36)..(38): Xaa is C or S
PSRVHHRPVQVRKIEYVRKKPKLKKATVRLEEHLEXAX

SEQ ID NO: 14916 - protein, 38 aa, Artificial Sequence
  Non-cyclic GFR-binding peptide
  MOD_RES (6)..(6): Xaa is C or S
DEGLEXVPTGQSNITMQIMRIKPHQGQHIGEMSLEEHS

SEQ ID NO: 14917 - protein, 39 aa, Artificial Sequence
  Non-cyclic GFR-binding peptide
  MOD_RES (2)..(39): Xaa is C or S
  MOD_RES (18)..(19)..(20)..(21)..(22): Xaa is A or G
  MOD_RES (23)..(24)..(25)..(26): Xaa is A or G or absent
KXQPSRVHHRPVQVRKIXXXXXXXXXKKATVRLEEHLEX

SEQ ID NO: 14918 - protein, 40 aa, Artificial Sequence
  Non-cyclic GFR-binding peptide
  MOD_RES (6)..(40): Xaa is C or S
DEGLEXVPTGQRSVKMAKVRIKPHQGQHKEVQVLEEHSQX

SEQ ID NO: 14919 - protein, 39 aa, Artificial Sequence
  Non-cyclic GFR-binding peptide
  MOD_RES (5)..(39): Xaa is C or S
  MOD_RES (19)..(20)..(21)..(22)..(23): Xaa is A or G
  MOD_RES (24)..(25)..(26)..(27): Xaa is A or G or absent
EGLEXVPTEERSVKMAKVXXXXXXXXXKEVQVFLQHNKX

SEQ ID NO: 14920 - protein, 42 aa, Artificial Sequence
  Non-cyclic GFR-binding peptide
  MOD_RES (6)..(40)..(42): Xaa is C or S
  MOD_RES (20)..(21)..(22)..(23)..(24): Xaa is A or G
  MOD_RES (25)..(26)..(27)..(28): Xaa is A or G or absent
DEGLEXVPTGQRSVKMAKVXXXXXXXXXKEVQVLEEHSQXEX

SEQ ID NO: 14921 - protein, 39 aa, Artificial Sequence
  Non-cyclic GFR-binding peptide
  MOD_RES (36)..(38): Xaa is C or S
PTQVQLRSVKVAKVEIVRKKPIFKEVQVTLEDHLAXKXE

SEQ ID NO: 14922 - protein, 39 aa, Artificial Sequence
  Non-cyclic GFR-binding peptide
  MOD_RES (1)..(38): Xaa is C or S
XQPSRVHHSNITVQIMEYVRKKPKLIGEMSRLEEHLEXA

SEQ ID NO: 14923 - protein, 37 aa, Artificial Sequence
  Non-cyclic GFR-binding peptide
  MOD_RES (3)..(37): Xaa is C or S
LEXVPTEESNITMQIMRIKPHQGQHLGEMSFLQHNKX

SEQ ID NO: 14924 - protein, 43 aa, Artificial Sequence
  Non-cyclic GFR-binding peptide
  MOD_RES (3)..(40)..(42): Xaa is C or S
VQXRPTQVQLSNITVQIMEIVRKKPIFLGEMSTLEDHLAXKXE

SEQ ID NO: 14925 - protein, 37 aa, Artificial Sequence
  Non-cyclic GFR-binding peptide
  MOD_RES (37)..(37): Xaa is C or S
  MOD_RES (16)..(17)..(18)..(19)..(20): Xaa is A or G
  MOD_RES (21)..(22)..(23)..(24): Xaa is A or G or absent
RPTQVQLRSVKVAKVXXXXXXXXXKEVQVTLEDHLAX

SEQ ID NO: 14926 - protein, 33 aa, Artificial Sequence
  Non-cyclic GFR-binding peptide
  MOD_RES (14)..(15)..(16)..(17)..(18): Xaa is A or G
  MOD_RES (19)..(20)..(21)..(22): Xaa is A or G or absent
SRVHHSNITVQIMXXXXXXXXXIGEMSRLEEHL

SEQ ID NO: 14927 - protein, 37 aa, Artificial Sequence
  Non-cyclic GFR-binding peptide
  MOD_RES (5)..(5): Xaa is C or S
  MOD_RES (19)..(20)..(21)..(22)..(23): Xaa is A or G
  MOD_RES (24)..(25)..(26)..(27): Xaa is A or G or absent
EGLEXVPTGQRSVKMAKVXXXXXXXXXKEVQVLEEHS

SEQ ID NO: 14928 - protein, 39 aa, Artificial Sequence
  Non-cyclic GFR-binding peptide
  MOD_RES (5)..(39): Xaa is C or S
EGLEXVPTEERSVKMAKVRIKPHQGQHKEVQVFLQHNKX

SEQ ID NO: 14929 - protein, 39 aa, Artificial Sequence
  Non-cyclic GFR-binding peptide
  MOD_RES (4)..(4): Xaa is C or S
SVKXQPSRVHHSNITVQIMEYVRKKPKLLGEMSRLEEHL

SEQ ID NO: 14930 - protein, 39 aa, Artificial Sequence
  Non-cyclic GFR-binding peptide
  MOD_RES (2)..(39): Xaa is C or S
  MOD_RES (18)..(19)..(20)..(21)..(22): Xaa is A or G
  MOD_RES (23)..(24)..(25)..(26): Xaa is A or G or absent
KXQPSRVHHSNITVQIMXXXXXXXXXIGEMSRLEEHLEX

SEQ ID NO: 14931 - protein, 37 aa, Artificial Sequence
  Non-cyclic GFR-binding peptide
  MOD_RES (3)..(37): Xaa is C or S
  MOD_RES (17)..(18)..(19)..(20)..(21): Xaa is A or G
  MOD_RES (22)..(23)..(24)..(25): Xaa is A or G or absent
LEXVPTGQRPVQMRKIXXXXXXXXXKKATVLEEHSQX

SEQ ID NO: 14932 - protein, 38 aa, Artificial Sequence
  Non-cyclic GFR-binding peptide
  MOD_RES (2)..(36)..(38): Xaa is C or S
EXVPTEERSVKMAKVRIKPHQGQHKEVQVFLQHNKXEX

SEQ ID NO: 14933 - protein, 38 aa, Artificial Sequence
  Non-cyclic GFR-binding peptide
  MOD_RES (37)..(37): Xaa is C or S
RPTQVQLSNITVQIMEIVRKKPIFLGEMSTLEDHLAXK

SEQ ID NO: 14934 - protein, 39 aa, Artificial Sequence
  Non-cyclic GFR-binding peptide
  MOD_RES (4)..(38): Xaa is C or S
GLEXVPTEERSVKMAKVRIKPHQGQHKEVQVFLQHNKXE

SEQ ID NO: 14935 - protein, 38 aa, Artificial Sequence
  Non-cyclic GFR-binding peptide
  MOD_RES (35)..(37): Xaa is C or S
SRVHHRPVQVRKIEYVRKKPKLKKATVRLEEHLEXAXA

SEQ ID NO: 14936 - protein, 40 aa, Artificial Sequence
  Non-cyclic GFR-binding peptide
  MOD_RES (3)..(40): Xaa is C or S
VKXQPSRVHHSNITVQIMEYVRKKPKLLGEMSRLEEHLEX

SEQ ID NO: 14937 - protein, 37 aa, Artificial Sequence
  Non-cyclic GFR-binding peptide
  MOD_RES (1)..(35)..(37): Xaa is C or S
XVPTGQSNITMQIMRIKPHQGQHIGEMSLEEHSQXEX

SEQ ID NO: 14938 - protein, 39 aa, Artificial Sequence
  Non-cyclic GFR-binding peptide
  MOD_RES (6)..(6): Xaa is C or S
DEGLEXVPTEERPVQMRKIRIKPHQGQHKKATVFLQHNK

SEQ ID NO: 14939 - protein, 41 aa, Artificial Sequence
  Non-cyclic GFR-binding peptide
  MOD_RES (6)..(40): Xaa is C or S
  MOD_RES (20)..(21)..(22)..(23)..(24): Xaa is A or G
  MOD_RES (25)..(26)..(27)..(28): Xaa is A or G or absent
DEGLEXVPTGQRPVQMRKIXXXXXXXXXKKATVLEEHSQXE

SEQ ID NO: 14940 - protein, 41 aa, Artificial Sequence
  Non-cyclic GFR-binding peptide
  MOD_RES (3)..(40): Xaa is C or S
VKXQPSRVHHSNITVQIMEYVRKKPKLLGEMSRLEEHLEXA

SEQ ID NO: 14941 - protein, 39 aa, Artificial Sequence
  Non-cyclic GFR-binding peptide
  MOD_RES (3)..(37)..(39): Xaa is C or S
  MOD_RES (17)..(18)..(19)..(20)..(21): Xaa is A or G
  MOD_RES (22)..(23)..(24)..(25): Xaa is A or G or absent
LEXVPTEESNITMQIMXXXXXXXXXLGEMSFLQHNKXEX

SEQ ID NO: 14942 - protein, 42 aa, Artificial Sequence
  Non-cyclic GFR-binding peptide
  MOD_RES (5)..(42): Xaa is C or S
  MOD_RES (21)..(22)..(23)..(24)..(25): Xaa is A or G
  MOD_RES (26)..(27)..(28)..(29): Xaa is A or G or absent
SSVKXQPSRVHHSNITVQIMXXXXXXXXXIGEMSRLEEHLEX

SEQ ID NO: 14943 - protein, 39 aa, Artificial Sequence
  Non-cyclic GFR-binding peptide
  MOD_RES (37)..(39): Xaa is C or S
RPTQVQLSNITVQIMEIVRKKPIFIGEMSTLEDHLAXKX

SEQ ID NO: 14944 - protein, 43 aa, Artificial Sequence
  Non-cyclic GFR-binding peptide
  MOD_RES (4)..(41)..(43): Xaa is C or S
NVQXRPTQVQLSNITVQIMEIVRKKPIFIGEMSTLEDHLAXKX

SEQ ID NO: 14945 - protein, 33 aa, Artificial Sequence
  Non-cyclic GFR-binding peptide
VPTGQRSVKMAKVRIKPHQGQHKEVQVLEEHSQ

SEQ ID NO: 14946 - protein, 39 aa, Artificial Sequence
  Non-cyclic GFR-binding peptide
  MOD_RES (6)..(6): Xaa is C or S
  MOD_RES (20)..(21)..(22)..(23)..(24): Xaa is A or G
  MOD_RES (25)..(26)..(27)..(28): Xaa is A or G or absent
DEGLEXVPTEESNITMQIMXXXXXXXXXLGEMSFLQHNK

SEQ ID NO: 14947 - protein, 44 aa, Artificial Sequence
  Non-cyclic GFR-binding peptide
  MOD_RES (5)..(42)..(44): Xaa is C or S
RNVQXRPTQVQLSNITVQIMEIVRKKPIFIGEMSTLEDHLAXKX

SEQ ID NO: 14948 - protein, 44 aa, Artificial Sequence
  Non-cyclic GFR-binding peptide
  MOD_RES (5)..(42)..(44): Xaa is C or S
RNVQXRPTQVQLSNITVQIMEIVRKKPIFLGEMSTLEDHLAXKX

SEQ ID NO: 14949 - protein, 38 aa, Artificial Sequence
  Non-cyclic GFR-binding peptide
  MOD_RES (35)..(37): Xaa is C or S
TQVQLSNITVQIMEIVRKKPIFLGEMSTLEDHLAXKXE

SEQ ID NO: 14950 - protein, 38 aa, Artificial Sequence
  Non-cyclic GFR-binding peptide
  MOD_RES (5)..(5): Xaa is C or S
  MOD_RES (19)..(20)..(21)..(22)..(23): Xaa is A or G
  MOD_RES (24)..(25)..(26)..(27): Xaa is A or G or absent
EGLEXVPTGQRPVQMRKIXXXXXXXXXKKATVLEEHSQ

SEQ ID NO: 14951 - protein, 32 aa, Artificial Sequence
  Non-cyclic GFR-binding peptide
  MOD_RES (14)..(15)..(16)..(17)..(18): Xaa is A or G
  MOD_RES (19)..(20)..(21)..(22): Xaa is A or G or absent
VPTGQRPVQMRKIXXXXXXXXXKKATVLEEHS

SEQ ID NO: 14952 - protein, 40 aa, Artificial Sequence
  Non-cyclic GFR-binding peptide
  MOD_RES (6)..(40): Xaa is C or S
  MOD_RES (20)..(21)..(22)..(23)..(24): Xaa is A or G
  MOD_RES (25)..(26)..(27)..(28): Xaa is A or G or absent
DEGLEXVPTEERPVQMRKIXXXXXXXXXKKATVFLQHNKX

SEQ ID NO: 14953 - protein, 33 aa, Artificial Sequence
  Non-cyclic GFR-binding peptide
VPTGQSNITMQIMRIKPHQGQHIGEMSLEEHSQ

SEQ ID NO: 14954 - protein, 35 aa, Artificial Sequence
  Non-cyclic GFR-binding peptide
  MOD_RES (1)..(35): Xaa is C or S
XVPTEERPVQMRKIRIKPHQGQHKKATVFLQHNKX

SEQ ID NO: 14955 - protein, 40 aa, Artificial Sequence
  Non-cyclic GFR-binding peptide
  MOD_RES (6)..(40): Xaa is C or S
  MOD_RES (20)..(21)..(22)..(23)..(24): Xaa is A or G
  MOD_RES (25)..(26)..(27)..(28): Xaa is A or G or absent
DEGLEXVPTGQRSVKMAKVXXXXXXXXXKEVQVLEEHSQX

SEQ ID NO: 14956 - protein, 39 aa, Artificial Sequence
  Non-cyclic GFR-binding peptide
  MOD_RES (36)..(38): Xaa is C or S
PSRVHHSNITVQIMEYVRKKPKLIGEMSRLEEHLEXAXA

SEQ ID NO: 14957 - protein, 43 aa, Artificial Sequence
  Non-cyclic GFR-binding peptide
  MOD_RES (5)..(42): Xaa is C or S
  MOD_RES (21)..(22)..(23)..(24)..(25): Xaa is A or G
  MOD_RES (26)..(27)..(28)..(29): Xaa is A or G or absent
SSVKXQPSRVHHRPVQVRKIXXXXXXXXXKKATVRLEEHLEXA

SEQ ID NO: 14958 - protein, 37 aa, Artificial Sequence
  Non-cyclic GFR-binding peptide
  MOD_RES (2)..(36): Xaa is C or S
EXVPTGQSNITMQIMRIKPHQGQHIGEMSLEEHSQXE

SEQ ID NO: 14959 - protein, 36 aa, Artificial Sequence
  Non-cyclic GFR-binding peptide
  MOD_RES (1)..(1): Xaa is C or S
  MOD_RES (17)..(18)..(19)..(20)..(21): Xaa is A or G
  MOD_RES (22)..(23)..(24)..(25): Xaa is A or G or absent
XQPSRVHHSNITVQIMXXXXXXXXXLGEMSRLEEHL

SEQ ID NO: 14960 - protein, 33 aa, Artificial Sequence
  Non-cyclic GFR-binding peptide
  MOD_RES (1)..(1): Xaa is C or S
  MOD_RES (15)..(16)..(17)..(18)..(19): Xaa is A or G
  MOD_RES (20)..(21)..(22)..(23): Xaa is A or G or absent
XVPTEERPVQMRKIXXXXXXXXXKKATVFLQHN

SEQ ID NO: 14961 - protein, 34 aa, Artificial Sequence
  Non-cyclic GFR-binding peptide
  MOD_RES (1)..(1): Xaa is C or S
XVPTGQSNITMQIMRIKPHQGQHIGEMSLEEHSQ

SEQ ID NO: 14962 - protein, 33 aa, Artificial Sequence
  Non-cyclic GFR-binding peptide
  MOD_RES (15)..(16)..(17)..(18)..(19): Xaa is A or G
  MOD_RES (20)..(21)..(22)..(23): Xaa is A or G or absent
PTQVQLRSVKVAKVXXXXXXXXXKEVQVTLEDH

SEQ ID NO: 14963 - protein, 37 aa, Artificial Sequence
  Non-cyclic GFR-binding peptide
  MOD_RES (1)..(1): Xaa is C or S
  MOD_RES (17)..(18)..(19)..(20)..(21): Xaa is A or G
  MOD_RES (22)..(23)..(24)..(25): Xaa is A or G or absent
XQPSRVHHSNITVQIMXXXXXXXXXLGEMSRLEEHLE

SEQ ID NO: 14964 - protein, 37 aa, Artificial Sequence
  Non-cyclic GFR-binding peptide
  MOD_RES (5)..(5): Xaa is C or S
EGLEXVPTGQRPVQMRKIRIKPHQGQHKKATVLEEHS

SEQ ID NO: 14965 - protein, 40 aa, Artificial Sequence
  Non-cyclic GFR-binding peptide
  MOD_RES (3)..(37)..(39): Xaa is C or S
  MOD_RES (17)..(18)..(19)..(20)..(21): Xaa is A or G
  MOD_RES (22)..(23)..(24)..(25): Xaa is A or G or absent
LEXVPTEERPVQMRKIXXXXXXXXXKKATVFLQHNKXEXR

SEQ ID NO: 14966 - protein, 38 aa, Artificial Sequence
  Non-cyclic GFR-binding peptide
  MOD_RES (35)..(37): Xaa is C or S
TQVQLSNITVQIMEIVRKKPIFIGEMSTLEDHLAXKXE

SEQ ID NO: 14967 - protein, 37 aa, Artificial Sequence
  Non-cyclic GFR-binding peptide
  MOD_RES (35)..(37): Xaa is C or S
  MOD_RES (14)..(15)..(16)..(17)..(18): Xaa is A or G
  MOD_RES (19)..(20)..(21)..(22): Xaa is A or G or absent
SRVHHSNITVQIMXXXXXXXXXLGEMSRLEEHLEXAX

SEQ ID NO: 14968 - protein, 45 aa, Artificial Sequence
  Non-cyclic GFR-binding peptide
  MOD_RES (5)..(42)..(44): Xaa is C or S
  MOD_RES (21)..(22)..(23)..(24)..(25): Xaa is A or G
  MOD_RES (26)..(27)..(28)..(29): Xaa is A or G or absent
SSVKXQPSRVHHSNITVQIMXXXXXXXXXIGEMSRLEEHLEXAXA

SEQ ID NO: 14969 - protein, 32 aa, Artificial Sequence; identical to SEQ ID NO: 1113
  Non-cyclic GFR-binding peptide

SEQ ID NO: 14970 - protein, 38 aa, Artificial Sequence
  Non-cyclic GFR-binding peptide
  MOD_RES (2)..(36)..(38): Xaa is C or S
EXVPTGQSNITMQIMRIKPHQGQHIGEMSLEEHSQXEX

SEQ ID NO: 14971 - protein, 39 aa, Artificial Sequence
  Non-cyclic GFR-binding peptide
  MOD_RES (3)..(3): Xaa is C or S
VKXQPSRVHHSNITVQIMEYVRKKPKLIGEMSRLEEHLE

SEQ ID NO: 14972 - protein, 45 aa, Artificial Sequence
  Non-cyclic GFR-binding peptide
  MOD_RES (5)..(42)..(44): Xaa is C or S
  MOD_RES (21)..(22)..(23)..(24)..(25): Xaa is A or G
  MOD_RES (26)..(27)..(28)..(29): Xaa is A or G or absent
SSVKXQPSRVHHSNITVQIMXXXXXXXXXLGEMSRLEEHLEXAXA

SEQ ID NO: 14973 - protein, 36 aa, Artificial Sequence
  Non-cyclic GFR-binding peptide
  MOD_RES (4)..(4): Xaa is C or S
GLEXVPTEERSVKMAKVRIKPHQGQHKEVQVFLQHN

SEQ ID NO: 14974 - protein, 35 aa, Artificial Sequence
  Non-cyclic GFR-binding peptide
  MOD_RES (34)..(34): Xaa is C or S
  MOD_RES (14)..(15)..(16)..(17)..(18): Xaa is A or G
  MOD_RES (19)..(20)..(21)..(22): Xaa is A or G or absent
VPTEESNITMQIMXXXXXXXXXLGEMSFLQHNKXE

SEQ ID NO: 14975 - protein, 37 aa, Artificial Sequence
  Non-cyclic GFR-binding peptide
  MOD_RES (1)..(35)..(37): Xaa is C or S
XVPTEERSVKMAKVRIKPHQGQHKEVQVFLQHNKXEX

SEQ ID NO: 14976 - protein, 34 aa, Artificial Sequence
  Non-cyclic GFR-binding peptide
  MOD_RES (15)..(16)..(17)..(18)..(19): Xaa is A or G
  MOD_RES (20)..(21)..(22)..(23): Xaa is A or G or absent
PSRVHHSNITVQIMXXXXXXXXXIGEMSRLEEHL

SEQ ID NO: 14977 - protein, 39 aa, Artificial Sequence
  Non-cyclic GFR-binding peptide
  MOD_RES (7)..(7): Xaa is C or S
NDEGLEXVPTEESNITMQIMRIKPHQGQHLGEMSFLQHN

SEQ ID NO: 14978 - protein, 36 aa, Artificial Sequence
  Non-cyclic GFR-binding peptide
  MOD_RES (1)..(35): Xaa is C or S
XVPTGQSNITMQIMRIKPHQGQHIGEMSLEEHSQXE

SEQ ID NO: 14979 - protein, 41 aa, Artificial Sequence
  Non-cyclic GFR-binding peptide
  MOD_RES (7)..(41): Xaa is C or S
NDEGLEXVPTEESNITMQIMRIKPHQGQHLGEMSFLQHNKX

SEQ ID NO: 14980 - protein, 36 aa, Artificial Sequence
  Non-cyclic GFR-binding peptide
  MOD_RES (4)..(4): Xaa is C or S
GLEXVPTEERPVQMRKIRIKPHQGQHKKATVFLQHN

SEQ ID NO: 14981 - protein, 41 aa, Artificial Sequence
  Non-cyclic GFR-binding peptide
  MOD_RES (7)..(41): Xaa is C or S
  MOD_RES (21)..(22)..(23)..(24)..(25): Xaa is A or G
  MOD_RES (26)..(27)..(28)..(29): Xaa is A or G or absent
NDEGLEXVPTGQSNITMQIMXXXXXXXXXIGEMSLEEHSQX

SEQ ID NO: 14982 - protein, 35 aa, Artificial Sequence
  Non-cyclic GFR-binding peptide
  MOD_RES (34)..(34): Xaa is C or S
  MOD_RES (14)..(15)..(16)..(17)..(18): Xaa is A or G
  MOD_RES (19)..(20)..(21)..(22): Xaa is A or G or absent
VPTGQRSVKMAKVXXXXXXXXXKEVQVLEEHSQXE

SEQ ID NO: 14983 - protein, 36 aa, Artificial Sequence
  Non-cyclic GFR-binding peptide
  MOD_RES (4)..(4): Xaa is C or S
  MOD_RES (18)..(19)..(20)..(21)..(22): Xaa is A or G
  MOD_RES (23)..(24)..(25)..(26): Xaa is A or G or absent
GLEXVPTEESNITMQIMXXXXXXXXXLGEMSFLQHN

SEQ ID NO: 14984 - protein, 42 aa, Artificial Sequence
  Non-cyclic GFR-binding peptide
  MOD_RES (4)..(41): Xaa is C or S
  MOD_RES (20)..(21)..(22)..(23)..(24): Xaa is A or G
  MOD_RES (25)..(26)..(27)..(28): Xaa is A or G or absent
SVKXQPSRVHHSNITVQIMXXXXXXXXXIGEMSRLEEHLEXA

SEQ ID NO: 14985 - protein, 41 aa, Artificial Sequence
  Non-cyclic GFR-binding peptide
  MOD_RES (5)..(5): Xaa is C or S
  MOD_RES (21)..(22)..(23)..(24)..(25): Xaa is A or G
  MOD_RES (26)..(27)..(28)..(29): Xaa is A or G or absent
SSVKXQPSRVHHSNITVQIMXXXXXXXXXIGEMSRLEEHLE

SEQ ID NO: 14986 - protein, 40 aa, Artificial Sequence
  Non-cyclic GFR-binding peptide
  MOD_RES (2)..(39): Xaa is C or S
  MOD_RES (18)..(19)..(20)..(21)..(22): Xaa is A or G
  MOD_RES (23)..(24)..(25)..(26): Xaa is A or G or absent
KXQPSRVHHSNITVQIMXXXXXXXXXIGEMSRLEEHLEXA

SEQ ID NO: 14987 - protein, 43 aa, Artificial Sequence
  Non-cyclic GFR-binding peptide
  MOD_RES (5)..(42): Xaa is C or S
SSVKXQPSRVHHRPVQVRKIEYVRKKPKLKKATVRLEEHLEXA

SEQ ID NO: 14988 - protein, 37 aa, Artificial Sequence
  Non-cyclic GFR-binding peptide
  MOD_RES (4)..(4): Xaa is C or S
GLEXVPTEERPVQMRKIRIKPHQGQHKKATVFLQHNK

SEQ ID NO: 14989 - protein, 37 aa, Artificial Sequence
  Non-cyclic GFR-binding peptide
  MOD_RES (1)..(35)..(37): Xaa is C or S
XVPTGQRPVQMRKIRIKPHQGQHKKATVLEEHSQXEX

SEQ ID NO: 14990 - protein, 38 aa, Artificial Sequence
  Non-cyclic GFR-binding peptide
  MOD_RES (37)..(37): Xaa is C or S
RPTQVQLSNITVQIMEIVRKKPIFIGEMSTLEDHLAXK

SEQ ID NO: 14991 - protein, 41 aa, Artificial Sequence
  Non-cyclic GFR-binding peptide
  MOD_RES (1)..(38)..(40): Xaa is C or S
XQPSRVHHSNITVQIMEYVRKKPKLIGEMSRLEEHLEXAXA

SEQ ID NO: 14992 - protein, 39 aa, Artificial Sequence
  Non-cyclic GFR-binding peptide
  MOD_RES (36)..(38): Xaa is C or S
PSRVHHSNITVQIMEYVRKKPKLLGEMSRLEEHLEXAXA

SEQ ID NO: 14993 - protein, 37 aa, Artificial Sequence
  Non-cyclic GFR-binding peptide
  MOD_RES (34)..(36): Xaa is C or S
VPTEESNITMQIMRIKPHQGQHLGEMSFLQHNKXEXR

SEQ ID NO: 14994 - protein, 35 aa, Artificial Sequence
  Non-cyclic GFR-binding peptide
  MOD_RES (1)..(35): Xaa is C or S
  MOD_RES (15)..(16)..(17)..(18)..(19): Xaa is A or G
  MOD_RES (20)..(21)..(22)..(23): Xaa is A or G or absent
XVPTGQRSVKMAKVXXXXXXXXXKEVQVLEEHSQX

SEQ ID NO: 14995 - protein, 44 aa, Artificial Sequence
  Non-cyclic GFR-binding peptide
  MOD_RES (7)..(41)..(43): Xaa is C or S
NDEGLEXVPTGQRPVQMRKIRIKPHQGQHKKATVLEEHSQXEXR

SEQ ID NO: 14996 - protein, 41 aa, Artificial Sequence
  Non-cyclic GFR-binding peptide
  MOD_RES (4)..(38)..(40): Xaa is C or S
GLEXVPTEESNITMQIMRIKPHQGQHLGEMSFLQHNKXEXR

SEQ ID NO: 14997 - protein, 39 aa, Artificial Sequence
  Non-cyclic GFR-binding peptide
  MOD_RES (2)..(36)..(38): Xaa is C or S
  MOD_RES (16)..(17)..(18)..(19)..(20): Xaa is A or G
  MOD_RES (21)..(22)..(23)..(24): Xaa is A or G or absent
EXVPTEERPVQMRKIXXXXXXXXXKKATVFLQHNKXEXR

SEQ ID NO: 14998 - protein, 41 aa, Artificial Sequence
  Non-cyclic GFR-binding peptide
  MOD_RES (3)..(40): Xaa is C or S
  MOD_RES (19)..(20)..(21)..(22)..(23): Xaa is A or G
  MOD_RES (24)..(25)..(26)..(27): Xaa is A or G or absent
VKXQPSRVHHSNITVQIMXXXXXXXXXLGEMSRLEEHLEXA

SEQ ID NO: 14999 - protein, 35 aa, Artificial Sequence
  Non-cyclic GFR-binding peptide
  MOD_RES (1)..(35): Xaa is C or S
XVPTGQRSVKMAKVRIKPHQGQHKEVQVLEEHSQX

SEQ ID NO: 15000 - protein, 37 aa, Artificial Sequence
  Non-cyclic GFR-binding peptide
  MOD_RES (37)..(37): Xaa is C or S
QPSRVHHRPVQVRKIEYVRKKPKLKKATVRLEEHLEX

SEQ ID NO: 15001 - protein, 44 aa, Artificial Sequence
  Non-cyclic GFR-binding peptide
  MOD_RES (5)..(42)..(44): Xaa is C or S
  MOD_RES (21)..(22)..(23)..(24)..(25): Xaa is A or G
  MOD_RES (26)..(27)..(28)..(29): Xaa is A or G or absent
SSVKXQPSRVHHSNITVQIMXXXXXXXXXLGEMSRLEEHLEXAX

SEQ ID NO: 15002 - protein, 40 aa, Artificial Sequence
  Non-cyclic GFR-binding peptide
  MOD_RES (1)..(38)..(40): Xaa is C or S
XQPSRVHHRPVQVRKIEYVRKKPKLKKATVRLEEHLEXAX

SEQ ID NO: 15003 - protein, 37 aa, Artificial Sequence
  Non-cyclic GFR-binding peptide
  MOD_RES (3)..(3): Xaa is C or S
  MOD_RES (19)..(20)..(21)..(22)..(23): Xaa is A or G
  MOD_RES (24)..(25)..(26)..(27): Xaa is A or G or absent
VKXQPSRVHHSNITVQIMXXXXXXXXXIGEMSRLEEH

SEQ ID NO: 15004 - protein, 36 aa, Artificial Sequence
  Non-cyclic GFR-binding peptide
  MOD_RES (3)..(3): Xaa is C or S
  MOD_RES (17)..(18)..(19)..(20)..(21): Xaa is A or G
  MOD_RES (22)..(23)..(24)..(25): Xaa is A or G or absent
LEXVPTEERPVQMRKIXXXXXXXXXKKATVFLQHNK

SEQ ID NO: 15005 - protein, 33 aa, Artificial Sequence
  Non-cyclic GFR-binding peptide
  MOD_RES (1)..(1): Xaa is C or S
  MOD_RES (15)..(16)..(17)..(18)..(19): Xaa is A or G
  MOD_RES (20)..(21)..(22)..(23): Xaa is A or G or absent
XVPTGQRSVKMAKVXXXXXXXXXKEVQVLEEHS

SEQ ID NO: 15006 - protein, 45 aa, Artificial Sequence
  Non-cyclic GFR-binding peptide
  MOD_RES (5)..(42)..(44): Xaa is C or S
  MOD_RES (21)..(22)..(23)..(24)..(25): Xaa is A or G
  MOD_RES (26)..(27)..(28)..(29): Xaa is A or G or absent
SSVKXQPSRVHHRPVQVRKIXXXXXXXXXKKATVRLEEHLEXAXA

SEQ ID NO: 15007 - protein, 44 aa, Artificial Sequence
  Non-cyclic GFR-binding peptide
  MOD_RES (5)..(42)..(44): Xaa is C or S
  MOD_RES (21)..(22)..(23)..(24)..(25): Xaa is A or G
  MOD_RES (26)..(27)..(28)..(29): Xaa is A or G or absent
SSVKXQPSRVHHSNITVQIMXXXXXXXXXIGEMSRLEEHLEXAX

SEQ ID NO: 15008 - protein, 37 aa, Artificial Sequence
  Non-cyclic GFR-binding peptide
  MOD_RES (4)..(4): Xaa is C or S
  MOD_RES (18)..(19)..(20)..(21)..(22): Xaa is A or G
  MOD_RES (23)..(24)..(25)..(26): Xaa is A or G or absent
GLEXVPTEESNITMQIMXXXXXXXXXLGEMSFLQHNK

SEQ ID NO: 15009 - protein, 37 aa, Artificial Sequence
  Non-cyclic GFR-binding peptide
  MOD_RES (2)..(2): Xaa is C or S
  MOD_RES (18)..(19)..(20)..(21)..(22): Xaa is A or G
  MOD_RES (23)..(24)..(25)..(26): Xaa is A or G or absent
KXQPSRVHHRPVQVRKIXXXXXXXXXKKATVRLEEHL

SEQ ID NO: 15010 - protein, 39 aa, Artificial Sequence
  Non-cyclic GFR-binding peptide
  MOD_RES (37)..(39): Xaa is C or S
RPTQVQLSNITVQIMEIVRKKPIFLGEMSTLEDHLAXKX

SEQ ID NO: 15011 - protein, 38 aa, Artificial Sequence
  Non-cyclic GFR-binding peptide
  MOD_RES (4)..(4): Xaa is C or S
NVQXRPTQVQLRSVKVAKVEIVRKKPIFKEVQVTLEDH

SEQ ID NO: 15012 - protein, 37 aa, Artificial Sequence
  Non-cyclic GFR-binding peptide
  MOD_RES (5)..(5): Xaa is C or S
EGLEXVPTEESNITMQIMRIKPHQGQHLGEMSFLQHN

SEQ ID NO: 15013 - protein, 40 aa, Artificial Sequence
  Non-cyclic GFR-binding peptide
  MOD_RES (3)..(37)..(39): Xaa is C or S
LEXVPTEERSVKMAKVRIKPHQGQHKEVQVFLQHNKXEXR

SEQ ID NO: 15014 - protein, 38 aa, Artificial Sequence
  Non-cyclic GFR-binding peptide
  MOD_RES (37)..(37): Xaa is C or S
  MOD_RES (16)..(17)..(18)..(19)..(20): Xaa is A or G
  MOD_RES (21)..(22)..(23)..(24): Xaa is A or G or absent
RPTQVQLSNITVQIMXXXXXXXXXLGEMSTLEDHLAXK

SEQ ID NO: 15015 - protein, 35 aa, Artificial Sequence
  Non-cyclic GFR-binding peptide
  MOD_RES (35)..(35): Xaa is C or S
  MOD_RES (14)..(15)..(16)..(17)..(18): Xaa is A or G
  MOD_RES (19)..(20)..(21)..(22): Xaa is A or G or absent
TQVQLSNITVQIMXXXXXXXXXIGEMSTLEDHLAX

SEQ ID NO: 15016 - protein, 36 aa, Artificial Sequence
  Non-cyclic GFR-binding peptide
  MOD_RES (36)..(36): Xaa is C or S
PTQVQLRSVKVAKVEIVRKKPIFKEVQVTLEDHLAX

SEQ ID NO: 15017 - protein, 40 aa, Artificial Sequence
  Non-cyclic GFR-binding peptide
  MOD_RES (5)..(39): Xaa is C or S
  MOD_RES (19)..(20)..(21)..(22)..(23): Xaa is A or G
  MOD_RES (24)..(25)..(26)..(27): Xaa is A or G or absent
EGLEXVPTEERSVKMAKVXXXXXXXXXKEVQVFLQHNKXE

SEQ ID NO: 15018 - protein, 39 aa, Artificial Sequence
  Non-cyclic GFR-binding peptide
  MOD_RES (36)..(38): Xaa is C or S
PSRVHHRPVQVRKIEYVRKKPKLKKATVRLEEHLEXAXA

SEQ ID NO: 15019 - protein, 41 aa, Artificial Sequence
  Non-cyclic GFR-binding peptide
  MOD_RES (5)..(5): Xaa is C or S
RNVQXRPTQVQLSNITVQIMEIVRKKPIFLGEMSTLEDHLA

SEQ ID NO: 15020 - protein, 42 aa, Artificial Sequence
  Non-cyclic GFR-binding peptide
  MOD_RES (5)..(39)..(41): Xaa is C or S
EGLEXVPTEERSVKMAKVRIKPHQGQHKEVQVFLQHNKXEXR

SEQ ID NO: 15021 - protein, 39 aa, Artificial Sequence
  Non-cyclic GFR-binding peptide
  MOD_RES (2)..(39): Xaa is C or S
QXRPTQVQLRSVKVAKVEIVRKKPIFKEVQVTLEDHLAX

SEQ ID NO: 15022 - protein, 32 aa, Artificial Sequence; identical to SEQ ID NO: 1132
  Non-cyclic GFR-binding peptide

SEQ ID NO: 15023 - protein, 36 aa, Artificial Sequence
  Non-cyclic GFR-binding peptide
  MOD_RES (35)..(35): Xaa is C or S
  MOD_RES (14)..(15)..(16)..(17)..(18): Xaa is A or G
  MOD_RES (19)..(20)..(21)..(22): Xaa is A or G or absent
TQVQLSNITVQIMXXXXXXXXXLGEMSTLEDHLAXK

SEQ ID NO: 15024 - protein, 36 aa, Artificial Sequence
  Non-cyclic GFR-binding peptide
  MOD_RES (35)..(35): Xaa is C or S
TQVQLSNITVQIMEIVRKKPIFIGEMSTLEDHLAXK

SEQ ID NO: 15025 - protein, 32 aa, Artificial Sequence
  Non-cyclic GFR-binding peptide
  MOD_RES (14)..(15)..(16)..(17)..(18): Xaa is A or G
  MOD_RES (19)..(20)..(21)..(22): Xaa is A or G or absent
TQVQLSNITVQIMXXXXXXXXXLGEMSTLEDH

SEQ ID NO: 15026 - protein, 39 aa, Artificial Sequence
  Non-cyclic GFR-binding peptide
  MOD_RES (1)..(38): Xaa is C or S
  MOD_RES (17)..(18)..(19)..(20)..(21): Xaa is A or G
  MOD_RES (22)..(23)..(24)..(25): Xaa is A or G or absent
XQPSRVHHSNITVQIMXXXXXXXXXIGEMSRLEEHLEXA

SEQ ID NO: 15027 - protein, 43 aa, Artificial Sequence
  Non-cyclic GFR-binding peptide
  MOD_RES (7)..(41)..(43): Xaa is C or S
NDEGLEXVPTEERPVQMRKIRIKPHQGQHKKATVFLQHNKXEX

SEQ ID NO: 15028 - protein, 38 aa, Artificial Sequence
  Non-cyclic GFR-binding peptide
  MOD_RES (4)..(4): Xaa is C or S
SVKXQPSRVHHSNITVQIMEYVRKKPKLIGEMSRLEEH

SEQ ID NO: 15029 - protein, 40 aa, Artificial Sequence
  Non-cyclic GFR-binding peptide
  MOD_RES (5)..(5): Xaa is C or S
  MOD_RES (21)..(22)..(23)..(24)..(25): Xaa is A or G
  MOD_RES (26)..(27)..(28)..(29): Xaa is A or G or absent
RNVQXRPTQVQLSNITVQIMXXXXXXXXXLGEMSTLEDHL

SEQ ID NO: 15030 - protein, 32 aa, Artificial Sequence
  Non-cyclic GFR-binding peptide
SRVHHSNITVQIMEYVRKKPKLIGEMSRLEEH

SEQ ID NO: 15031 - protein, 40 aa, Artificial Sequence
  Non-cyclic GFR-binding peptide
  MOD_RES (5)..(39): Xaa is C or S
  MOD_RES (19)..(20)..(21)..(22)..(23): Xaa is A or G
  MOD_RES (24)..(25)..(26)..(27): Xaa is A or G or absent
EGLEXVPTGQSNITMQIMXXXXXXXXXIGEMSLEEHSQXE

SEQ ID NO: 15032 - protein, 39 aa, Artificial Sequence
  Non-cyclic GFR-binding peptide
  MOD_RES (7)..(7): Xaa is C or S
NDEGLEXVPTGQSNITMQIMRIKPHQGQHIGEMSLEEHS

SEQ ID NO: 15033 - protein, 37 aa, Artificial Sequence
  Non-cyclic GFR-binding peptide
  MOD_RES (2)..(36): Xaa is C or S
EXVPTGQRPVQMRKIRIKPHQGQHKKATVLEEHSQXE

SEQ ID NO: 15034 - protein, 37 aa, Artificial Sequence
  Non-cyclic GFR-binding peptide
  MOD_RES (2)..(2): Xaa is C or S
  MOD_RES (18)..(19)..(20)..(21)..(22): Xaa is A or G
  MOD_RES (23)..(24)..(25)..(26): Xaa is A or G or absent
QXRPTQVQLRSVKVAKVXXXXXXXXXKEVQVTLEDHL

SEQ ID NO: 15035 - protein, 36 aa, Artificial Sequence
  Non-cyclic GFR-binding peptide
  MOD_RES (4)..(4): Xaa is C or S
  MOD_RES (18)..(19)..(20)..(21)..(22): Xaa is A or G
  MOD_RES (23)..(24)..(25)..(26): Xaa is A or G or absent
GLEXVPTEERSVKMAKVXXXXXXXXXKEVQVFLQHN

SEQ ID NO: 15036 - protein, 36 aa, Artificial Sequence
  Non-cyclic GFR-binding peptide
  MOD_RES (36)..(36): Xaa is C or S
  MOD_RES (15)..(16)..(17)..(18)..(19): Xaa is A or G
  MOD_RES (20)..(21)..(22)..(23): Xaa is A or G or absent
PSRVHHSNITVQIMXXXXXXXXXIGEMSRLEEHLEX

SEQ ID NO: 15037 - protein, 41 aa, Artificial Sequence
  Non-cyclic GFR-binding peptide
  MOD_RES (2)..(39)..(41): Xaa is C or S
QXRPTQVQLRSVKVAKVEIVRKKPIFKEVQVTLEDHLAXKX

SEQ ID NO: 15038 - protein, 39 aa, Artificial Sequence
  Non-cyclic GFR-binding peptide
  MOD_RES (2)..(39): Xaa is C or S
  MOD_RES (18)..(19)..(20)..(21)..(22): Xaa is A or G
  MOD_RES (23)..(24)..(25)..(26): Xaa is A or G or absent
QXRPTQVQLSNITVQIMXXXXXXXXXLGEMSTLEDHLAX

SEQ ID NO: 15039 - protein, 38 aa, Artificial Sequence
  Non-cyclic GFR-binding peptide
  MOD_RES (3)..(37): Xaa is C or S
  MOD_RES (17)..(18)..(19)..(20)..(21): Xaa is A or G
  MOD_RES (22)..(23)..(24)..(25): Xaa is A or G or absent
LEXVPTEESNITMQIMXXXXXXXXXLGEMSFLQHNKXE

SEQ ID NO: 15040 - protein, 41 aa, Artificial Sequence
  Non-cyclic GFR-binding peptide
  MOD_RES (7)..(41): Xaa is C or S
NDEGLEXVPTGQSNITMQIMRIKPHQGQHIGEMSLEEHSQX

SEQ ID NO: 15041 - protein, 38 aa, Artificial Sequence
  Non-cyclic GFR-binding peptide
  MOD_RES (35)..(37): Xaa is C or S
TQVQLRSVKVAKVEIVRKKPIFKEVQVTLEDHLAXKXE

SEQ ID NO: 15042 - protein, 41 aa, Artificial Sequence
  Non-cyclic GFR-binding peptide
  MOD_RES (6)..(40): Xaa is C or S
  MOD_RES (20)..(21)..(22)..(23)..(24): Xaa is A or G
  MOD_RES (25)..(26)..(27)..(28): Xaa is A or G or absent
DEGLEXVPTGQSNITMQIMXXXXXXXXXIGEMSLEEHSQXE

SEQ ID NO: 15043 - protein, 39 aa, Artificial Sequence
  Non-cyclic GFR-binding peptide
  MOD_RES (5)..(39): Xaa is C or S
  MOD_RES (19)..(20)..(21)..(22)..(23): Xaa is A or G
  MOD_RES (24)..(25)..(26)..(27): Xaa is A or G or absent
EGLEXVPTGQSNITMQIMXXXXXXXXXIGEMSLEEHSQX

SEQ ID NO: 15044 - protein, 37 aa, Artificial Sequence
  Non-cyclic GFR-binding peptide
  MOD_RES (3)..(3): Xaa is C or S
  MOD_RES (19)..(20)..(21)..(22)..(23): Xaa is A or G
  MOD_RES (24)..(25)..(26)..(27): Xaa is A or G or absent
VKXQPSRVHHSNITVQIMXXXXXXXXXLGEMSRLEEH

SEQ ID NO: 15045 - protein, 43 aa, Artificial Sequence
  Non-cyclic GFR-binding peptide
  MOD_RES (5)..(42): Xaa is C or S
  MOD_RES (21)..(22)..(23)..(24)..(25): Xaa is A or G
  MOD_RES (26)..(27)..(28)..(29): Xaa is A or G or absent
RNVQXRPTQVQLRSVKVAKVXXXXXXXXXKEVQVTLEDHLAXK

SEQ ID NO: 15046 - protein, 37 aa, Artificial Sequence
  Non-cyclic GFR-binding peptide
  MOD_RES (35)..(37): Xaa is C or S
TQVQLSNITVQIMEIVRKKPIFIGEMSTLEDHLAXKX

SEQ ID NO: 15047 - protein, 37 aa, Artificial Sequence
  Non-cyclic GFR-binding peptide
  MOD_RES (5)..(5): Xaa is C or S
EGLEXVPTGQSNITMQIMRIKPHQGQHIGEMSLEEHS

SEQ ID NO: 15048 - protein, 34 aa, Artificial Sequence
  Non-cyclic GFR-binding peptide
  MOD_RES (14)..(15)..(16)..(17)..(18): Xaa is A or G
  MOD_RES (19)..(20)..(21)..(22): Xaa is A or G or absent
TQVQLSNITVQIMXXXXXXXXXLGEMSTLEDHLA

SEQ ID NO: 15049 - protein, 41 aa, Artificial Sequence
  Non-cyclic GFR-binding peptide
  MOD_RES (7)..(41): Xaa is C or S
NDEGLEXVPTGQRPVQMRKIRIKPHQGQHKKATVLEEHSQX

SEQ ID NO: 15050 - protein, 43 aa, Artificial Sequence
  Non-cyclic GFR-binding peptide
  MOD_RES (6)..(40)..(42): Xaa is C or S
DEGLEXVPTEESNITMQIMRIKPHQGQHLGEMSFLQHNKXEXR

SEQ ID NO: 15051 - protein, 36 aa, Artificial Sequence
  Non-cyclic GFR-binding peptide
  MOD_RES (35)..(35): Xaa is C or S
TQVQLSNITVQIMEIVRKKPIFLGEMSTLEDHLAXK

SEQ ID NO: 15052 - protein, 36 aa, Artificial Sequence
  Non-cyclic GFR-binding peptide
  MOD_RES (3)..(3): Xaa is C or S
LEXVPTEERSVKMAKVRIKPHQGQHKEVQVFLQHNK

SEQ ID NO: 15053 - protein, 33 aa, Artificial Sequence
  Non-cyclic GFR-binding peptide
  MOD_RES (1)..(1): Xaa is C or S
XVPTGQRSVKMAKVRIKPHQGQHKEVQVLEEHS

SEQ ID NO: 15054 - protein, 39 aa, Artificial Sequence
  Non-cyclic GFR-binding peptide
  MOD_RES (4)..(4): Xaa is C or S
  MOD_RES (20)..(21)..(22)..(23)..(24): Xaa is A or G
  MOD_RES (25)..(26)..(27)..(28): Xaa is A or G or absent
SVKXQPSRVHHSNITVQIMXXXXXXXXXLGEMSRLEEHL

SEQ ID NO: 15055 - protein, 39 aa, Artificial Sequence
  Non-cyclic GFR-binding peptide
  MOD_RES (37)..(39): Xaa is C or S
  MOD_RES (16)..(17)..(18)..(19)..(20): Xaa is A or G
  MOD_RES (21)..(22)..(23)..(24): Xaa is A or G or absent
QPSRVHHSNITVQIMXXXXXXXXXIGEMSRLEEHLEXAX

SEQ ID NO: 15056 - protein, 32 aa, Artificial Sequence
  Non-cyclic GFR-binding peptide
TQVQLSNITVQIMEIVRKKPIFLGEMSTLEDH

SEQ ID NO: 15057 - protein, 41 aa, Artificial Sequence
  Non-cyclic GFR-binding peptide
  MOD_RES (2)..(39)..(41): Xaa is C or S
  MOD_RES (18)..(19)..(20)..(21)..(22): Xaa is A or G
  MOD_RES (23)..(24)..(25)..(26): Xaa is A or G or absent
KXQPSRVHHSNITVQIMXXXXXXXXXIGEMSRLEEHLEXAX

SEQ ID NO: 15058 - protein, 35 aa, Artificial Sequence
  Non-cyclic GFR-binding peptide
  MOD_RES (15)..(16)..(17)..(18)..(19): Xaa is A or G
  MOD_RES (20)..(21)..(22)..(23): Xaa is A or G or absent
PTQVQLSNITVQIMXXXXXXXXXLGEMSTLEDHLA

SEQ ID NO: 15059 - protein, 38 aa, Artificial Sequence
  Non-cyclic GFR-binding peptide
  MOD_RES (2)..(2): Xaa is C or S
KXQPSRVHHSNITVQIMEYVRKKPKLIGEMSRLEEHLE

SEQ ID NO: 15060 - protein, 39 aa, Artificial Sequence
  Non-cyclic GFR-binding peptide
  MOD_RES (4)..(38): Xaa is C or S
  MOD_RES (18)..(19)..(20)..(21)..(22): Xaa is A or G
  MOD_RES (23)..(24)..(25)..(26): Xaa is A or G or absent
GLEXVPTGQSNITMQIMXXXXXXXXXIGEMSLEEHSQXE

SEQ ID NO: 15061 - protein, 39 aa, Artificial Sequence
  Non-cyclic GFR-binding peptide
  MOD_RES (5)..(39): Xaa is C or S
EGLEXVPTGQSNITMQIMRIKPHQGQHIGEMSLEEHSQX

SEQ ID NO: 15062 - protein, 33 aa, Artificial Sequence
  Non-cyclic GFR-binding peptide
  MOD_RES (1)..(1): Xaa is C or S
XVPTGQRPVQMRKIRIKPHQGQHKKATVLEEHS

SEQ ID NO: 15063 - protein, 41 aa, Artificial Sequence
  Non-cyclic GFR-binding peptide
  MOD_RES (7)..(41): Xaa is C or S
  MOD_RES (21)..(22)..(23)..(24)..(25): Xaa is A or G
  MOD_RES (26)..(27)..(28)..(29): Xaa is A or G or absent
NDEGLEXVPTGQRPVQMRKIXXXXXXXXXKKATVLEEHSQX

SEQ ID NO: 15064 - protein, 43 aa, Artificial Sequence
  Non-cyclic GFR-binding peptide
  MOD_RES (3)..(40)..(42): Xaa is C or S
  MOD_RES (19)..(20)..(21)..(22)..(23): Xaa is A or G
  MOD_RES (24)..(25)..(26)..(27): Xaa is A or G or absent
VQXRPTQVQLRSVKVAKVXXXXXXXXXKEVQVTLEDHLAXKXE

SEQ ID NO: 15065 - protein, 42 aa, Artificial Sequence
  Non-cyclic GFR-binding peptide
  MOD_RES (5)..(39)..(41): Xaa is C or S
  MOD_RES (19)..(20)..(21)..(22)..(23): Xaa is A or G
  MOD_RES (24)..(25)..(26)..(27): Xaa is A or G or absent
EGLEXVPTEERPVQMRKIXXXXXXXXXKKATVFLQHNKXEXR

SEQ ID NO: 15066 - protein, 39 aa, Artificial Sequence
  Non-cyclic GFR-binding peptide
  MOD_RES (5)..(5): Xaa is C or S
  MOD_RES (21)..(22)..(23)..(24)..(25): Xaa is A or G
  MOD_RES (26)..(27)..(28)..(29): Xaa is A or G or absent
SSVKXQPSRVHHSNITVQIMXXXXXXXXXIGEMSRLEEH

SEQ ID NO: 15067 - protein, 37 aa, Artificial Sequence
  Non-cyclic GFR-binding peptide
  MOD_RES (35)..(37): Xaa is C or S
TQVQLSNITVQIMEIVRKKPIFLGEMSTLEDHLAXKX

SEQ ID NO: 15068 - protein, 35 aa, Artificial Sequence
  Non-cyclic GFR-binding peptide
  MOD_RES (34)..(34): Xaa is C or S
VPTGQRPVQMRKIRIKPHQGQHKKATVLEEHSQXE

SEQ ID NO: 15069 - protein, 44 aa, Artificial Sequence
  Non-cyclic GFR-binding peptide
  MOD_RES (7)..(41)..(43): Xaa is C or S
NDEGLEXVPTGQSNITMQIMRIKPHQGQHIGEMSLEEHSQXEXR

SEQ ID NO: 15070 - protein, 35 aa, Artificial Sequence
  Non-cyclic GFR-binding peptide
  MOD_RES (1)..(1): Xaa is C or S
  MOD_RES (17)..(18)..(19)..(20)..(21): Xaa is A or G
  MOD_RES (22)..(23)..(24)..(25): Xaa is A or G or absent
XRPTQVQLSNITVQIMXXXXXXXXXLGEMSTLEDH

SEQ ID NO: 15071 - protein, 42 aa, Artificial Sequence
  Non-cyclic GFR-binding peptide
  MOD_RES (5)..(39)..(41): Xaa is C or S
  MOD_RES (19)..(20)..(21)..(22)..(23): Xaa is A or G
  MOD_RES (24)..(25)..(26)..(27): Xaa is A or G or absent
EGLEXVPTEERSVKMAKVXXXXXXXXXKEVQVFLQHNKXEXR

SEQ ID NO: 15072 - protein, 35 aa, Artificial Sequence
  Non-cyclic GFR-binding peptide
  MOD_RES (1)..(1): Xaa is C or S
  MOD_RES (17)..(18)..(19)..(20)..(21): Xaa is A or G
  MOD_RES (22)..(23)..(24)..(25): Xaa is A or G or absent
XRPTQVQLSNITVQIMXXXXXXXXXIGEMSTLEDH

SEQ ID NO: 15073 - protein, 32 aa, Artificial Sequence
  Non-cyclic GFR-binding peptide
VPTEERSVKMAKVRIKPHQGQHKEVQVFLQHN

SEQ ID NO: 15074 - protein, 38 aa, Artificial Sequence
  Non-cyclic GFR-binding peptide
  MOD_RES (4)..(38): Xaa is C or S
  MOD_RES (18)..(19)..(20)..(21)..(22): Xaa is A or G
  MOD_RES (23)..(24)..(25)..(26): Xaa is A or G or absent
GLEXVPTGQRSVKMAKVXXXXXXXXXKEVQVLEEHSQX

SEQ ID NO: 15075 - protein, 38 aa, Artificial Sequence
  Non-cyclic GFR-binding peptide
  MOD_RES (2)..(36)..(38): Xaa is C or S
EXVPTEESNITMQIMRIKPHQGQHLGEMSFLQHNKXEX

SEQ ID NO: 15076 - protein, 41 aa, Artificial Sequence
  Non-cyclic GFR-binding peptide
  MOD_RES (1)..(38)..(40): Xaa is C or S
XRPTQVQLRSVKVAKVEIVRKKPIFKEVQVTLEDHLAXKXE

SEQ ID NO: 15077 - protein, 42 aa, Artificial Sequence
  Non-cyclic GFR-binding peptide
  MOD_RES (6)..(40)..(42): Xaa is C or S
DEGLEXVPTGQRSVKMAKVRIKPHQGQHKEVQVLEEHSQXEX

SEQ ID NO: 15078 - protein, 33 aa, Artificial Sequence
  Non-cyclic GFR-binding peptide
SRVHHRPVQVRKIEYVRKKPKLKKATVRLEEHL

SEQ ID NO: 15079 - protein, 42 aa, Artificial Sequence
  Non-cyclic GFR-binding peptide
  MOD_RES (2)..(39)..(41): Xaa is C or S
KXQPSRVHHRPVQVRKIEYVRKKPKLKKATVRLEEHLEXAXA

SEQ ID NO: 15080 - protein, 45 aa, Artificial Sequence
  Non-cyclic GFR-binding peptide
  MOD_RES (5)..(42)..(44): Xaa is C or S
  MOD_RES (21)..(22)..(23)..(24)..(25): Xaa is A or G
  MOD_RES (26)..(27)..(28)..(29): Xaa is A or G or absent
RNVQXRPTQVQLSNITVQIMXXXXXXXXXLGEMSTLEDHLAXKXE

SEQ ID NO: 15081 - protein, 32 aa, Artificial Sequence
  Non-cyclic GFR-binding peptide
SRVHHSNITVQIMEYVRKKPKLLGEMSRLEEH

SEQ ID NO: 15082 - protein, 39 aa, Artificial Sequence
  Non-cyclic GFR-binding peptide
  MOD_RES (6)..(6): Xaa is C or S
DEGLEXVPTEERSVKMAKVRIKPHQGQHKEVQVFLQHNK

SEQ ID NO: 15083 - protein, 32 aa, Artificial Sequence
  Non-cyclic GFR-binding peptide
TQVQLSNITVQIMEIVRKKPIFIGEMSTLEDH

SEQ ID NO: 15084 - protein, 37 aa, Artificial Sequence
  Non-cyclic GFR-binding peptide
  MOD_RES (1)..(1): Xaa is C or S
  MOD_RES (17)..(18)..(19)..(20)..(21): Xaa is A or G
  MOD_RES (22)..(23)..(24)..(25): Xaa is A or G or absent
XRPTQVQLSNITVQIMXXXXXXXXXIGEMSTLEDHLA

SEQ ID NO: 15085 - protein, 35 aa, Artificial Sequence
  Non-cyclic GFR-binding peptide
RPTQVQLSNITVQIMEIVRKKPIFLGEMSTLEDHL

SEQ ID NO: 15086 - protein, 37 aa, Artificial Sequence
  Non-cyclic GFR-binding peptide
  MOD_RES (34)..(36): Xaa is C or S
  MOD_RES (14)..(15)..(16)..(17)..(18): Xaa is A or G
  MOD_RES (19)..(20)..(21)..(22): Xaa is A or G or absent
VPTGQRSVKMAKVXXXXXXXXXKEVQVLEEHSQXEXR

SEQ ID NO: 15087 - protein, 41 aa, Artificial Sequence
  Non-cyclic GFR-binding peptide
  MOD_RES (1)..(38)..(40): Xaa is C or S
  MOD_RES (17)..(18)..(19)..(20)..(21): Xaa is A or G
  MOD_RES (22)..(23)..(24)..(25): Xaa is A or G or absent
XQPSRVHHSNITVQIMXXXXXXXXXLGEMSRLEEHLEXAXA

SEQ ID NO: 15088 - protein, 40 aa, Artificial Sequence
  Non-cyclic GFR-binding peptide
  MOD_RES (2)..(39): Xaa is C or S
QXRPTQVQLSNITVQIMEIVRKKPIFIGEMSTLEDHLAXK

SEQ ID NO: 15089 - protein, 32 aa, Artificial Sequence
  Non-cyclic GFR-binding peptide
  MOD_RES (14)..(15)..(16)..(17)..(18): Xaa is A or G
  MOD_RES (19)..(20)..(21)..(22): Xaa is A or G or absent
VPTEESNITMQIMXXXXXXXXXLGEMSFLQHN

SEQ ID NO: 15090 - protein, 35 aa, Artificial Sequence
  Non-cyclic GFR-binding peptide
  MOD_RES (15)..(16)..(17)..(18)..(19): Xaa is A or G
  MOD_RES (20)..(21)..(22)..(23): Xaa is A or G or absent
PSRVHHSNITVQIMXXXXXXXXXIGEMSRLEEHLE

SEQ ID NO: 15091 - protein, 37 aa, Artificial Sequence
  Non-cyclic GFR-binding peptide
  MOD_RES (34)..(36): Xaa is C or S
VPTGQSNITMQIMRIKPHQGQHIGEMSLEEHSQXEXR

SEQ ID NO: 15092 - protein, 34 aa, Artificial Sequence
  Non-cyclic GFR-binding peptide
  MOD_RES (1)..(1): Xaa is C or S
XVPTGQRSVKMAKVRIKPHQGQHKEVQVLEEHSQ

SEQ ID NO: 15093 - protein, 38 aa, Artificial Sequence
  Non-cyclic GFR-binding peptide
  MOD_RES (36)..(38): Xaa is C or S
  MOD_RES (15)..(16)..(17)..(18)..(19): Xaa is A or G
  MOD_RES (20)..(21)..(22)..(23): Xaa is A or G or absent
PTQVQLSNITVQIMXXXXXXXXXLGEMSTLEDHLAXKX

SEQ ID NO: 15094 - protein, 37 aa, Artificial Sequence
  Non-cyclic GFR-binding peptide
  MOD_RES (2)..(36): Xaa is C or S
  MOD_RES (16)..(17)..(18)..(19)..(20): Xaa is A or G
  MOD_RES (21)..(22)..(23)..(24): Xaa is A or G or absent
EXVPTEESNITMQIMXXXXXXXXXLGEMSFLQHNKXE

SEQ ID NO: 15095 - protein, 43 aa, Artificial Sequence
  Non-cyclic GFR-binding peptide
  MOD_RES (5)..(42): Xaa is C or S
  MOD_RES (21)..(22)..(23)..(24)..(25): Xaa is A or G
  MOD_RES (26)..(27)..(28)..(29): Xaa is A or G or absent
SSVKXQPSRVHHSNITVQIMXXXXXXXXXLGEMSRLEEHLEXA

SEQ ID NO: 15096 - protein, 33 aa, Artificial Sequence
  Non-cyclic GFR-binding peptide
  MOD_RES (1)..(1): Xaa is C or S
XVPTEERPVQMRKIRIKPHQGQHKKATVFLQHN

SEQ ID NO: 15097 - protein, 42 aa, Artificial Sequence
  Non-cyclic GFR-binding peptide
  MOD_RES (2)..(39)..(41): Xaa is C or S
  MOD_RES (18)..(19)..(20)..(21)..(22): Xaa is A or G
  MOD_RES (23)..(24)..(25)..(26): Xaa is A or G or absent
QXRPTQVQLSNITVQIMXXXXXXXXXLGEMSTLEDHLAXKXE

SEQ ID NO: 15098 - protein, 41 aa, Artificial Sequence
  Non-cyclic GFR-binding peptide
  MOD_RES (4)..(38)..(40): Xaa is C or S
GLEXVPTGQRSVKMAKVRIKPHQGQHKEVQVLEEHSQXEXR

SEQ ID NO: 15099 - protein, 38 aa, Artificial Sequence
  Non-cyclic GFR-binding peptide
  MOD_RES (35)..(37): Xaa is C or S
  MOD_RES (14)..(15)..(16)..(17)..(18): Xaa is A or G
  MOD_RES (19)..(20)..(21)..(22): Xaa is A or G or absent
TQVQLSNITVQIMXXXXXXXXXIGEMSTLEDHLAXKXE

SEQ ID NO: 15100 - protein, 41 aa, Artificial Sequence
  Non-cyclic GFR-binding peptide
  MOD_RES (7)..(41): Xaa is C or S
NDEGLEXVPTEERSVKMAKVRIKPHQGQHKEVQVFLQHNKX

SEQ ID NO: 15101 - protein, 41 aa, Artificial Sequence
  Non-cyclic GFR-binding peptide
  MOD_RES (7)..(41): Xaa is C or S
  MOD_RES (21)..(22)..(23)..(24)..(25): Xaa is A or G
  MOD_RES (26)..(27)..(28)..(29): Xaa is A or G or absent
NDEGLEXVPTEERSVKMAKVXXXXXXXXXKEVQVFLQHNKX

SEQ ID NO: 15102 - protein, 39 aa, Artificial Sequence
  Non-cyclic GFR-binding peptide
  MOD_RES (36)..(38): Xaa is C or S
PTQVQLSNITVQIMEIVRKKPIFIGEMSTLEDHLAXKXE

SEQ ID NO: 15103 - protein, 34 aa, Artificial Sequence
  Non-cyclic GFR-binding peptide
  MOD_RES (34)..(34): Xaa is C or S
  MOD_RES (14)..(15)..(16)..(17)..(18): Xaa is A or G
  MOD_RES (19)..(20)..(21)..(22): Xaa is A or G or absent
VPTEERPVQMRKIXXXXXXXXXKKATVFLQHNKX

SEQ ID NO: 15104 - protein, 40 aa, Artificial Sequence
  Non-cyclic GFR-binding peptide
  MOD_RES (4)..(38)..(40): Xaa is C or S
GLEXVPTGQRSVKMAKVRIKPHQGQHKEVQVLEEHSQXEX

SEQ ID NO: 15105 - protein, 42 aa, Artificial Sequence
  Non-cyclic GFR-binding peptide
  MOD_RES (4)..(41): Xaa is C or S
  MOD_RES (20)..(21)..(22)..(23)..(24): Xaa is A or G
  MOD_RES (25)..(26)..(27)..(28): Xaa is A or G or absent
SVKXQPSRVHHRPVQVRKIXXXXXXXXXKKATVRLEEHLEXA

SEQ ID NO: 15106 - protein, 37 aa, Artificial Sequence
  Non-cyclic GFR-binding peptide
  MOD_RES (2)..(2): Xaa is C or S
  MOD_RES (18)..(19)..(20)..(21)..(22): Xaa is A or G
  MOD_RES (23)..(24)..(25)..(26): Xaa is A or G or absent
QXRPTQVQLSNITVQIMXXXXXXXXXIGEMSTLEDHL

SEQ ID NO: 15107 - protein, 32 aa, Artificial Sequence
  Non-cyclic GFR-binding peptide
  MOD_RES (14)..(15)..(16)..(17)..(18): Xaa is A or G
  MOD_RES (19)..(20)..(21)..(22): Xaa is A or G or absent
VPTGQRSVKMAKVXXXXXXXXXKEVQVLEEHS

SEQ ID NO: 15108 - protein, 32 aa, Artificial Sequence
  Non-cyclic GFR-binding peptide
  MOD_RES (14)..(15)..(16)..(17)..(18): Xaa is A or G
  MOD_RES (19)..(20)..(21)..(22): Xaa is A or G or absent
VPTEERPVQMRKIXXXXXXXXXKKATVFLQHN

SEQ ID NO: 15109 - protein, 35 aa, Artificial Sequence
  Non-cyclic GFR-binding peptide
  MOD_RES (16)..(17)..(18)..(19)..(20): Xaa is A or G
  MOD_RES (21)..(22)..(23)..(24): Xaa is A or G or absent
QPSRVHHSNITVQIMXXXXXXXXXLGEMSRLEEHL

SEQ ID NO: 15110 - protein, 41 aa, Artificial Sequence
  Non-cyclic GFR-binding peptide
  MOD_RES (5)..(39)..(41): Xaa is C or S
EGLEXVPTGQRSVKMAKVRIKPHQGQHKEVQVLEEHSQXEX

SEQ ID NO: 15111 - protein, 36 aa, Artificial Sequence
  Non-cyclic GFR-binding peptide
  MOD_RES (3)..(3): Xaa is C or S
  MOD_RES (17)..(18)..(19)..(20)..(21): Xaa is A or G
  MOD_RES (22)..(23)..(24)..(25): Xaa is A or G or absent
LEXVPTGQRSVKMAKVXXXXXXXXXKEVQVLEEHSQ

SEQ ID NO: 15112 - protein, 36 aa, Artificial Sequence
  Non-cyclic GFR-binding peptide
  MOD_RES (1)..(1): Xaa is C or S
XRPTQVQLSNITVQIMEIVRKKPIFLGEMSTLEDHL

SEQ ID NO: 15113 - protein, 38 aa, Artificial Sequence
  Non-cyclic GFR-binding peptide
  MOD_RES (35)..(37): Xaa is C or S
SRVHHSNITVQIMEYVRKKPKLLGEMSRLEEHLEXAXA

SEQ ID NO: 15114 - protein, 41 aa, Artificial Sequence
  Non-cyclic GFR-binding peptide
  MOD_RES (4)..(41): Xaa is C or S
  MOD_RES (20)..(21)..(22)..(23)..(24): Xaa is A or G
  MOD_RES (25)..(26)..(27)..(28): Xaa is A or G or absent
NVQXRPTQVQLRSVKVAKVXXXXXXXXXKEVQVTLEDHLAX

SEQ ID NO: 15115 - protein, 38 aa, Artificial Sequence
  Non-cyclic GFR-binding peptide
  MOD_RES (1)..(38): Xaa is C or S
  MOD_RES (17)..(18)..(19)..(20)..(21): Xaa is A or G
  MOD_RES (22)..(23)..(24)..(25): Xaa is A or G or absent
XRPTQVQLSNITVQIMXXXXXXXXXIGEMSTLEDHLAX

SEQ ID NO: 15116 - protein, 35 aa, Artificial Sequence
  Non-cyclic GFR-binding peptide
  MOD_RES (2)..(2): Xaa is C or S
  MOD_RES (16)..(17)..(18)..(19)..(20): Xaa is A or G
  MOD_RES (21)..(22)..(23)..(24): Xaa is A or G or absent
EXVPTGQRPVQMRKIXXXXXXXXXKKATVLEEHSQ

SEQ ID NO: 15117 - protein, 33 aa, Artificial Sequence
  Non-cyclic GFR-binding peptide
  MOD_RES (1)..(1): Xaa is C or S
  MOD_RES (15)..(16)..(17)..(18)..(19): Xaa is A or G
  MOD_RES (20)..(21)..(22)..(23): Xaa is A or G or absent
XVPTGQRPVQMRKIXXXXXXXXXKKATVLEEHS

SEQ ID NO: 15118 - protein, 39 aa, Artificial Sequence
  Non-cyclic GFR-binding peptide
  MOD_RES (1)..(38): Xaa is C or S
  MOD_RES (17)..(18)..(19)..(20)..(21): Xaa is A or G
  MOD_RES (22)..(23)..(24)..(25): Xaa is A or G or absent
XQPSRVHHSNITVQIMXXXXXXXXXLGEMSRLEEHLEXA

SEQ ID NO: 15119 - protein, 37 aa, Artificial Sequence
  Non-cyclic GFR-binding peptide
  MOD_RES (34)..(36): Xaa is C or S
  MOD_RES (14)..(15)..(16)..(17)..(18): Xaa is A or G
  MOD_RES (19)..(20)..(21)..(22): Xaa is A or G or absent
VPTGQRPVQMRKIXXXXXXXXXKKATVLEEHSQXEXR

SEQ ID NO: 15120 - protein, 33 aa, Artificial Sequence
  Non-cyclic GFR-binding peptide
SRVHHSNITVQIMEYVRKKPKLIGEMSRLEEHL

SEQ ID NO: 15121 - protein, 43 aa, Artificial Sequence
  Non-cyclic GFR-binding peptide
  MOD_RES (4)..(41)..(43): Xaa is C or S
  MOD_RES (20)..(21)..(22)..(23)..(24): Xaa is A or G
  MOD_RES (25)..(26)..(27)..(28): Xaa is A or G or absent
NVQXRPTQVQLSNITVQIMXXXXXXXXXLGEMSTLEDHLAXKX

SEQ ID NO: 15122 - protein, 41 aa, Artificial Sequence
  Non-cyclic GFR-binding peptide
  MOD_RES (5)..(5): Xaa is C or S
  MOD_RES (21)..(22)..(23)..(24)..(25): Xaa is A or G
  MOD_RES (26)..(27)..(28)..(29): Xaa is A or G or absent
RNVQXRPTQVQLRSVKVAKVXXXXXXXXXKEVQVTLEDHLA

SEQ ID NO: 15123 - protein, 44 aa, Artificial Sequence
  Non-cyclic GFR-binding peptide
  MOD_RES (7)..(41)..(43): Xaa is C or S
  MOD_RES (21)..(22)..(23)..(24)..(25): Xaa is A or G
  MOD_RES (26)..(27)..(28)..(29): Xaa is A or G or absent
NDEGLEXVPTEESNITMQIMXXXXXXXXXLGEMSFLQHNKXEXR

SEQ ID NO: 15124 - protein, 36 aa, Artificial Sequence
  Non-cyclic GFR-binding peptide
  MOD_RES (1)..(35): Xaa is C or S
XVPTEERSVKMAKVRIKPHQGQHKEVQVFLQHNKXE

SEQ ID NO: 15125 - protein, 35 aa, Artificial Sequence
  Non-cyclic GFR-binding peptide
PTQVQLRSVKVAKVEIVRKKPIFKEVQVTLEDHLA

SEQ ID NO: 15126 - protein, 38 aa, Artificial Sequence
  Non-cyclic GFR-binding peptide
  MOD_RES (2)..(36)..(38): Xaa is C or S
  MOD_RES (16)..(17)..(18)..(19)..(20): Xaa is A or G
  MOD_RES (21)..(22)..(23)..(24): Xaa is A or G or absent
EXVPTGQRSVKMAKVXXXXXXXXXKEVQVLEEHSQXEX

SEQ ID NO: 15127 - protein, 36 aa, Artificial Sequence
  Non-cyclic GFR-binding peptide
  MOD_RES (36)..(36): Xaa is C or S
  MOD_RES (15)..(16)..(17)..(18)..(19): Xaa is A or G
  MOD_RES (20)..(21)..(22)..(23): Xaa is A or G or absent
PTQVQLSNITVQIMXXXXXXXXXLGEMSTLEDHLAX

SEQ ID NO: 15128 - protein, 44 aa, Artificial Sequence
  Non-cyclic GFR-binding peptide
  MOD_RES (7)..(41)..(43): Xaa is C or S
NDEGLEXVPTEESNITMQIMRIKPHQGQHLGEMSFLQHNKXEXR

SEQ ID NO: 15129 - protein, 35 aa, Artificial Sequence
  Non-cyclic GFR-binding peptide
  MOD_RES (2)..(2): Xaa is C or S
  MOD_RES (16)..(17)..(18)..(19)..(20): Xaa is A or G
  MOD_RES (21)..(22)..(23)..(24): Xaa is A or G or absent
EXVPTGQSNITMQIMXXXXXXXXXIGEMSLEEHSQ

SEQ ID NO: 15130 - protein, 38 aa, Artificial Sequence
  Non-cyclic GFR-binding peptide
  MOD_RES (3)..(37): Xaa is C or S
  MOD_RES (17)..(18)..(19)..(20)..(21): Xaa is A or G
  MOD_RES (22)..(23)..(24)..(25): Xaa is A or G or absent
LEXVPTGQRPVQMRKIXXXXXXXXXKKATVLEEHSQXE

SEQ ID NO: 15131 - protein, 36 aa, Artificial Sequence
  Non-cyclic GFR-binding peptide
  MOD_RES (36)..(36): Xaa is C or S
  MOD_RES (15)..(16)..(17)..(18)..(19): Xaa is A or G
  MOD_RES (20)..(21)..(22)..(23): Xaa is A or G or absent
PSRVHHRPVQVRKIXXXXXXXXXKKATVRLEEHLEX

SEQ ID NO: 15132 - protein, 37 aa, Artificial Sequence
  Non-cyclic GFR-binding peptide
  MOD_RES (4)..(4): Xaa is C or S
  MOD_RES (18)..(19)..(20)..(21)..(22): Xaa is A or G
  MOD_RES (23)..(24)..(25)..(26): Xaa is A or G or absent
GLEXVPTGQRPVQMRKIXXXXXXXXXKKATVLEEHSQ

SEQ ID NO: 15133 - protein, 34 aa, Artificial Sequence
  Non-cyclic GFR-binding peptide
TQVQLRSVKVAKVEIVRKKPIFKEVQVTLEDHLA

SEQ ID NO: 15134 - protein, 38 aa, Artificial Sequence
  Non-cyclic GFR-binding peptide
  MOD_RES (4)..(38): Xaa is C or S
GLEXVPTGQRSVKMAKVRIKPHQGQHKEVQVLEEHSQX

SEQ ID NO: 15135 - protein, 33 aa, Artificial Sequence
  Non-cyclic GFR-binding peptide
  MOD_RES (1)..(1): Xaa is C or S
  MOD_RES (15)..(16)..(17)..(18)..(19): Xaa is A or G
  MOD_RES (20)..(21)..(22)..(23): Xaa is A or G or absent
XVPTEERSVKMAKVXXXXXXXXXKEVQVFLQHN

SEQ ID NO: 15136 - protein, 32 aa, Artificial Sequence; identical to SEQ ID NO: 1172
  Non-cyclic GFR-binding peptide

SEQ ID NO: 15137 - protein, 42 aa, Artificial Sequence
  Non-cyclic GFR-binding peptide
  MOD_RES (3)..(40)..(42): Xaa is C or S
VKXQPSRVHHRPVQVRKIEYVRKKPKLKKATVRLEEHLEXAX

SEQ ID NO: 15138 - protein, 36 aa, Artificial Sequence
  Non-cyclic GFR-binding peptide
  MOD_RES (3)..(3): Xaa is C or S
  MOD_RES (17)..(18)..(19)..(20)..(21): Xaa is A or G
  MOD_RES (22)..(23)..(24)..(25): Xaa is A or G or absent
LEXVPTGQSNITMQIMXXXXXXXXXIGEMSLEEHSQ

SEQ ID NO: 15139 - protein, 43 aa, Artificial Sequence
  Non-cyclic GFR-binding peptide
  MOD_RES (3)..(40)..(42): Xaa is C or S
  MOD_RES (19)..(20)..(21)..(22)..(23): Xaa is A or G
  MOD_RES (24)..(25)..(26)..(27): Xaa is A or G or absent
VQXRPTQVQLSNITVQIMXXXXXXXXXLGEMSTLEDHLAXKXE

SEQ ID NO: 15140 - protein, 42 aa, Artificial Sequence
  Non-cyclic GFR-binding peptide
  MOD_RES (6)..(40)..(42): Xaa is C or S
DEGLEXVPTGQRPVQMRKIRIKPHQGQHKKATVLEEHSQXEX

SEQ ID NO: 15141 - protein, 41 aa, Artificial Sequence
  Non-cyclic GFR-binding peptide
  MOD_RES (5)..(5): Xaa is C or S
SSVKXQPSRVHHRPVQVRKIEYVRKKPKLKKATVRLEEHLE

SEQ ID NO: 15142 - protein, 38 aa, Artificial Sequence
  Non-cyclic GFR-binding peptide
  MOD_RES (36)..(38): Xaa is C or S
PTQVQLSNITVQIMEIVRKKPIFIGEMSTLEDHLAXKX

SEQ ID NO: 15143 - protein, 36 aa, Artificial Sequence
  Non-cyclic GFR-binding peptide
  MOD_RES (4)..(4): Xaa is C or S
GLEXVPTGQRSVKMAKVRIKPHQGQHKEVQVLEEHS

SEQ ID NO: 15144 - protein, 37 aa, Artificial Sequence
  Non-cyclic GFR-binding peptide
  MOD_RES (2)..(2): Xaa is C or S
QXRPTQVQLRSVKVAKVEIVRKKPIFKEVQVTLEDHL

SEQ ID NO: 15145 - protein, 43 aa, Artificial Sequence
  Non-cyclic GFR-binding peptide
  MOD_RES (4)..(41)..(43): Xaa is C or S
NVQXRPTQVQLRSVKVAKVEIVRKKPIFKEVQVTLEDHLAXKX

SEQ ID NO: 15146 - protein, 36 aa, Artificial Sequence
  Non-cyclic GFR-binding peptide
  MOD_RES (3)..(3): Xaa is C or S
  MOD_RES (17)..(18)..(19)..(20)..(21): Xaa is A or G
  MOD_RES (22)..(23)..(24)..(25): Xaa is A or G or absent
LEXVPTGQRPVQMRKIXXXXXXXXXKKATVLEEHSQ

SEQ ID NO: 15147 - protein, 35 aa, Artificial Sequence
  Non-cyclic GFR-binding peptide
  MOD_RES (34)..(34): Xaa is C or S
  MOD_RES (14)..(15)..(16)..(17)..(18): Xaa is A or G
  MOD_RES (19)..(20)..(21)..(22): Xaa is A or G or absent
VPTEERPVQMRKIXXXXXXXXXKKATVFLQHNKXE

SEQ ID NO: 15148 - protein, 36 aa, Artificial Sequence
  Non-cyclic GFR-binding peptide
  MOD_RES (1)..(35): Xaa is C or S
  MOD_RES (15)..(16)..(17)..(18)..(19): Xaa is A or G
  MOD_RES (20)..(21)..(22)..(23): Xaa is A or G or absent
XVPTGQSNITMQIMXXXXXXXXXIGEMSLEEHSQXE

SEQ ID NO: 15149 - protein, 39 aa, Artificial Sequence
  Non-cyclic GFR-binding peptide
  MOD_RES (3)..(3): Xaa is C or S
VQXRPTQVQLSNITVQIMEIVRKKPIFIGEMSTLEDHLA

SEQ ID NO: 15150 - protein, 41 aa, Artificial Sequence
  Non-cyclic GFR-binding peptide
  MOD_RES (6)..(40): Xaa is C or S
DEGLEXVPTEERSVKMAKVRIKPHQGQHKEVQVFLQHNKXE

SEQ ID NO: 15151 - protein, 36 aa, Artificial Sequence
  Non-cyclic GFR-binding peptide
  MOD_RES (4)..(4): Xaa is C or S
GLEXVPTGQRPVQMRKIRIKPHQGQHKKATVLEEHS

SEQ ID NO: 15152 - protein, 35 aa, Artificial Sequence
  Non-cyclic GFR-binding peptide
  MOD_RES (1)..(35): Xaa is C or S
  MOD_RES (15)..(16)..(17)..(18)..(19): Xaa is A or G
  MOD_RES (20)..(21)..(22)..(23): Xaa is A or G or absent
XVPTEERPVQMRKIXXXXXXXXXKKATVFLQHNKX

SEQ ID NO: 15153 - protein, 43 aa, Artificial Sequence
  Non-cyclic GFR-binding peptide
  MOD_RES (4)..(41)..(43): Xaa is C or S
  MOD_RES (20)..(21)..(22)..(23)..(24): Xaa is A or G
  MOD_RES (25)..(26)..(27)..(28): Xaa is A or G or absent
SVKXQPSRVHHSNITVQIMXXXXXXXXXLGEMSRLEEHLEXAX

SEQ ID NO: 15154 - protein, 38 aa, Artificial Sequence
  Non-cyclic GFR-binding peptide
  MOD_RES (2)..(36)..(38): Xaa is C or S
EXVPTGQRPVQMRKIRIKPHQGQHKKATVLEEHSQXEX

SEQ ID NO: 15155 - protein, 34 aa, Artificial Sequence
  Non-cyclic GFR-binding peptide
  MOD_RES (14)..(15)..(16)..(17)..(18): Xaa is A or G
  MOD_RES (19)..(20)..(21)..(22): Xaa is A or G or absent
SRVHHSNITVQIMXXXXXXXXXIGEMSRLEEHLE

SEQ ID NO: 15156 - protein, 34 aa, Artificial Sequence
  Non-cyclic GFR-binding peptide
  MOD_RES (34)..(34): Xaa is C or S
VPTEERPVQMRKIRIKPHQGQHKKATVFLQHNKX

SEQ ID NO: 15157 - protein, 37 aa, Artificial Sequence
  Non-cyclic GFR-binding peptide
  MOD_RES (2)..(2): Xaa is C or S
KXQPSRVHHRPVQVRKIEYVRKKPKLKKATVRLEEHL

SEQ ID NO: 15158 - protein, 36 aa, Artificial Sequence
  Non-cyclic GFR-binding peptide
QPSRVHHSNITVQIMEYVRKKPKLIGEMSRLEEHLE

SEQ ID NO: 15159 - protein, 44 aa, Artificial Sequence
  Non-cyclic GFR-binding peptide
  MOD_RES (4)..(41)..(43): Xaa is C or S
NVQXRPTQVQLSNITVQIMEIVRKKPIFLGEMSTLEDHLAXKXE

SEQ ID NO: 15160 - protein, 36 aa, Artificial Sequence
  Non-cyclic GFR-binding peptide
  MOD_RES (4)..(4): Xaa is C or S
GLEXVPTGQSNITMQIMRIKPHQGQHIGEMSLEEHS

SEQ ID NO: 15161 - protein, 40 aa, Artificial Sequence
  Non-cyclic GFR-binding peptide
  MOD_RES (3)..(37)..(39): Xaa is C or S
LEXVPTEERPVQMRKIRIKPHQGQHKKATVFLQHNKXEXR

SEQ ID NO: 15162 - protein, 43 aa, Artificial Sequence
  Non-cyclic GFR-binding peptide
  MOD_RES (7)..(41)..(43): Xaa is C or S
  MOD_RES (21)..(22)..(23)..(24)..(25): Xaa is A or G
  MOD_RES (26)..(27)..(28)..(29): Xaa is A or G or absent
NDEGLEXVPTEERSVKMAKVXXXXXXXXXKEVQVFLQHNKXEX

SEQ ID NO: 15163 - protein, 37 aa, Artificial Sequence
  Non-cyclic GFR-binding peptide
  MOD_RES (2)..(2): Xaa is C or S
KXQPSRVHHSNITVQIMEYVRKKPKLIGEMSRLEEHL

SEQ ID NO: 15164 - protein, 37 aa, Artificial Sequence
  Non-cyclic GFR-binding peptide
  MOD_RES (36)..(36): Xaa is C or S
PTQVQLRSVKVAKVEIVRKKPIFKEVQVTLEDHLAXK

SEQ ID NO: 15165 - protein, 34 aa, Artificial Sequence
  Non-cyclic GFR-binding peptide
  MOD_RES (15)..(16)..(17)..(18)..(19): Xaa is A or G
  MOD_RES (20)..(21)..(22)..(23): Xaa is A or G or absent
PTQVQLSNITVQIMXXXXXXXXXLGEMSTLEDHL

SEQ ID NO: 15166 - protein, 44 aa, Artificial Sequence
  Non-cyclic GFR-binding peptide
  MOD_RES (7)..(41)..(43): Xaa is C or S
NDEGLEXVPTGQRSVKMAKVRIKPHQGQHKEVQVLEEHSQXEXR

SEQ ID NO: 15167 - protein, 39 aa, Artificial Sequence
  Non-cyclic GFR-binding peptide
  MOD_RES (3)..(37)..(39): Xaa is C or S
  MOD_RES (17)..(18)..(19)..(20)..(21): Xaa is A or G
  MOD_RES (22)..(23)..(24)..(25): Xaa is A or G or absent
LEXVPTEERPVQMRKIXXXXXXXXXKKATVFLQHNKXEX

SEQ ID NO: 15168 - protein, 36 aa, Artificial Sequence
  Non-cyclic GFR-binding peptide
  MOD_RES (1)..(1): Xaa is C or S
XQPSRVHHSNITVQIMEYVRKKPKLLGEMSRLEEHL

SEQ ID NO: 15169 - protein, 35 aa, Artificial Sequence
  Non-cyclic GFR-binding peptide
  MOD_RES (1)..(1): Xaa is C or S
XQPSRVHHSNITVQIMEYVRKKPKLLGEMSRLEEH

SEQ ID NO: 15170 - protein, 36 aa, Artificial Sequence
  Non-cyclic GFR-binding peptide
  MOD_RES (4)..(4): Xaa is C or S
  MOD_RES (18)..(19)..(20)..(21)..(22): Xaa is A or G
  MOD_RES (23)..(24)..(25)..(26): Xaa is A or G or absent
GLEXVPTGQSNITMQIMXXXXXXXXXIGEMSLEEHS

SEQ ID NO: 15171 - protein, 37 aa, Artificial Sequence
  Non-cyclic GFR-binding peptide
  MOD_RES (37)..(37): Xaa is C or S
RPTQVQLSNITVQIMEIVRKKPIFIGEMSTLEDHLAX

SEQ ID NO: 15172 - protein, 43 aa, Artificial Sequence
  Non-cyclic GFR-binding peptide
  MOD_RES (3)..(40)..(42): Xaa is C or S
VKXQPSRVHHSNITVQIMEYVRKKPKLLGEMSRLEEHLEXAXA

SEQ ID NO: 15173 - protein, 34 aa, Artificial Sequence
  Non-cyclic GFR-binding peptide
TQVQLSNITVQIMEIVRKKPIFLGEMSTLEDHLA

SEQ ID NO: 15174 - protein, 37 aa, Artificial Sequence
  Non-cyclic GFR-binding peptide
  MOD_RES (4)..(4): Xaa is C or S
GLEXVPTEERSVKMAKVRIKPHQGQHKEVQVFLQHNK

SEQ ID NO: 15175 - protein, 37 aa, Artificial Sequence
  Non-cyclic GFR-binding peptide
  MOD_RES (3)..(37): Xaa is C or S
LEXVPTGQRPVQMRKIRIKPHQGQHKKATVLEEHSQX

SEQ ID NO: 15176 - protein, 37 aa, Artificial Sequence
  Non-cyclic GFR-binding peptide
  MOD_RES (34)..(36): Xaa is C or S
VPTGQRSVKMAKVRIKPHQGQHKEVQVLEEHSQXEXR

SEQ ID NO: 15177 - protein, 40 aa, Artificial Sequence
  Non-cyclic GFR-binding peptide
  MOD_RES (3)..(40): Xaa is C or S
  MOD_RES (19)..(20)..(21)..(22)..(23): Xaa is A or G
  MOD_RES (24)..(25)..(26)..(27): Xaa is A or G or absent
VQXRPTQVQLSNITVQIMXXXXXXXXXIGEMSTLEDHLAX

SEQ ID NO: 15178 - protein, 42 aa, Artificial Sequence
  Non-cyclic GFR-binding peptide
  MOD_RES (6)..(40)..(42): Xaa is C or S
DEGLEXVPTGQSNITMQIMRIKPHQGQHIGEMSLEEHSQXEX

SEQ ID NO: 15179 - protein, 39 aa, Artificial Sequence
  Non-cyclic GFR-binding peptide
  MOD_RES (37)..(39): Xaa is C or S
QPSRVHHSNITVQIMEYVRKKPKLLGEMSRLEEHLEXAX

SEQ ID NO: 15180 - protein, 35 aa, Artificial Sequence
  Non-cyclic GFR-binding peptide
  MOD_RES (1)..(1): Xaa is C or S
XQPSRVHHSNITVQIMEYVRKKPKLIGEMSRLEEH

SEQ ID NO: 15181 - protein, 36 aa, Artificial Sequence
  Non-cyclic GFR-binding peptide
  MOD_RES (4)..(4): Xaa is C or S
GLEXVPTEESNITMQIMRIKPHQGQHLGEMSFLQHN

SEQ ID NO: 15182 - protein, 34 aa, Artificial Sequence
  Non-cyclic GFR-binding peptide
  MOD_RES (16)..(17)..(18)..(19)..(20): Xaa is A or G
  MOD_RES (21)..(22)..(23)..(24): Xaa is A or G or absent
QPSRVHHSNITVQIMXXXXXXXXXIGEMSRLEEH

SEQ ID NO: 15183 - protein, 38 aa, Artificial Sequence
  Non-cyclic GFR-binding peptide
  MOD_RES (1)..(35)..(37): Xaa is C or S
XVPTEERPVQMRKIRIKPHQGQHKKATVFLQHNKXEXR

SEQ ID NO: 15184 - protein, 38 aa, Artificial Sequence
  Non-cyclic GFR-binding peptide
  MOD_RES (3)..(37): Xaa is C or S
  MOD_RES (17)..(18)..(19)..(20)..(21): Xaa is A or G
  MOD_RES (22)..(23)..(24)..(25): Xaa is A or G or absent
LEXVPTGQSNITMQIMXXXXXXXXXIGEMSLEEHSQXE

SEQ ID NO: 15185 - protein, 43 aa, Artificial Sequence
  Non-cyclic GFR-binding peptide
  MOD_RES (3)..(40)..(42): Xaa is C or S
VKXQPSRVHHRPVQVRKIEYVRKKPKLKKATVRLEEHLEXAXA

SEQ ID NO: 15186 - protein, 38 aa, Artificial Sequence
  Non-cyclic GFR-binding peptide
  MOD_RES (3)..(3): Xaa is C or S
VQXRPTQVQLSNITVQIMEIVRKKPIFLGEMSTLEDHL

SEQ ID NO: 15187 - protein, 35 aa, Artificial Sequence
  Non-cyclic GFR-binding peptide
QPSRVHHSNITVQIMEYVRKKPKLLGEMSRLEEHL

SEQ ID NO: 15188 - protein, 42 aa, Artificial Sequence
  Non-cyclic GFR-binding peptide
  MOD_RES (4)..(41): Xaa is C or S
SVKXQPSRVHHSNITVQIMEYVRKKPKLLGEMSRLEEHLEXA

SEQ ID NO: 15189 - protein, 42 aa, Artificial Sequence
  Non-cyclic GFR-binding peptide
  MOD_RES (5)..(42): Xaa is C or S
  MOD_RES (21)..(22)..(23)..(24)..(25): Xaa is A or G
  MOD_RES (26)..(27)..(28)..(29): Xaa is A or G or absent
SSVKXQPSRVHHRPVQVRKIXXXXXXXXXKKATVRLEEHLEX

SEQ ID NO: 15190 - protein, 39 aa, Artificial Sequence
  Non-cyclic GFR-binding peptide
  MOD_RES (1)..(38): Xaa is C or S
XQPSRVHHRPVQVRKIEYVRKKPKLKKATVRLEEHLEXA

SEQ ID NO: 15191 - protein, 43 aa, Artificial Sequence
  Non-cyclic GFR-binding peptide
  MOD_RES (7)..(41)..(43): Xaa is C or S
  MOD_RES (21)..(22)..(23)..(24)..(25): Xaa is A or G
  MOD_RES (26)..(27)..(28)..(29): Xaa is A or G or absent
NDEGLEXVPTEESNITMQIMXXXXXXXXXLGEMSFLQHNKXEX

SEQ ID NO: 15192 - protein, 41 aa, Artificial Sequence
  Non-cyclic GFR-binding peptide
  MOD_RES (1)..(38)..(40): Xaa is C or S
XRPTQVQLSNITVQIMEIVRKKPIFIGEMSTLEDHLAXKXE

SEQ ID NO: 15193 - protein, 44 aa, Artificial Sequence
  Non-cyclic GFR-binding peptide
  MOD_RES (4)..(41)..(43): Xaa is C or S
  MOD_RES (20)..(21)..(22)..(23)..(24): Xaa is A or G
  MOD_RES (25)..(26)..(27)..(28): Xaa is A or G or absent
NVQXRPTQVQLSNITVQIMXXXXXXXXXIGEMSTLEDHLAXKXE

SEQ ID NO: 15194 - protein, 39 aa, Artificial Sequence
  Non-cyclic GFR-binding peptide
  MOD_RES (1)..(38): Xaa is C or S
XQPSRVHHSNITVQIMEYVRKKPKLLGEMSRLEEHLEXA

SEQ ID NO: 15195 - protein, 42 aa, Artificial Sequence
  Non-cyclic GFR-binding peptide
  MOD_RES (4)..(41): Xaa is C or S
SVKXQPSRVHHRPVQVRKIEYVRKKPKLKKATVRLEEHLEXA

SEQ ID NO: 15196 - protein, 41 aa, Artificial Sequence
  Non-cyclic GFR-binding peptide
  MOD_RES (4)..(38)..(40): Xaa is C or S
  MOD_RES (18)..(19)..(20)..(21)..(22): Xaa is A or G
  MOD_RES (23)..(24)..(25)..(26): Xaa is A or G or absent
GLEXVPTEESNITMQIMXXXXXXXXXLGEMSFLQHNKXEXR

SEQ ID NO: 15197 - protein, 37 aa, Artificial Sequence
  Non-cyclic GFR-binding peptide
  MOD_RES (37)..(37): Xaa is C or S
QPSRVHHSNITVQIMEYVRKKPKLIGEMSRLEEHLEX

SEQ ID NO: 15198 - protein, 39 aa, Artificial Sequence
  Non-cyclic GFR-binding peptide
  MOD_RES (6)..(6): Xaa is C or S
  MOD_RES (20)..(21)..(22)..(23)..(24): Xaa is A or G
  MOD_RES (25)..(26)..(27)..(28): Xaa is A or G or absent
DEGLEXVPTGQRPVQMRKIXXXXXXXXXKKATVLEEHSQ

SEQ ID NO: 15199 - protein, 39 aa, Artificial Sequence
  Non-cyclic GFR-binding peptide
  MOD_RES (2)..(36)..(38): Xaa is C or S
EXVPTEERPVQMRKIRIKPHQGQHKKATVFLQHNKXEXR

SEQ ID NO: 15200 - protein, 41 aa, Artificial Sequence
  Non-cyclic GFR-binding peptide
  MOD_RES (2)..(39)..(41): Xaa is C or S
KXQPSRVHHSNITVQIMEYVRKKPKLLGEMSRLEEHLEXAX

SEQ ID NO: 15201 - protein, 34 aa, Artificial Sequence
  Non-cyclic GFR-binding peptide
  MOD_RES (16)..(17)..(18)..(19)..(20): Xaa is A or G
  MOD_RES (21)..(22)..(23)..(24): Xaa is A or G or absent
QPSRVHHSNITVQIMXXXXXXXXXLGEMSRLEEH

SEQ ID NO: 15202 - protein, 37 aa, Artificial Sequence
  Non-cyclic GFR-binding peptide
  MOD_RES (2)..(36): Xaa is C or S
  MOD_RES (16)..(17)..(18)..(19)..(20): Xaa is A or G
  MOD_RES (21)..(22)..(23)..(24): Xaa is A or G or absent
EXVPTGQRPVQMRKIXXXXXXXXXKKATVLEEHSQXE

SEQ ID NO: 15203 - protein, 44 aa, Artificial Sequence
  Non-cyclic GFR-binding peptide
  MOD_RES (7)..(41)..(43): Xaa is C or S
  MOD_RES (21)..(22)..(23)..(24)..(25): Xaa is A or G
  MOD_RES (26)..(27)..(28)..(29): Xaa is A or G or absent
NDEGLEXVPTGQRPVQMRKIXXXXXXXXXKKATVLEEHSQXEXR

SEQ ID NO: 15204 - protein, 40 aa, Artificial Sequence
  Non-cyclic GFR-binding peptide
  MOD_RES (1)..(38)..(40): Xaa is C or S
  MOD_RES (17)..(18)..(19)..(20)..(21): Xaa is A or G
  MOD_RES (22)..(23)..(24)..(25): Xaa is A or G or absent
XQPSRVHHSNITVQIMXXXXXXXXXLGEMSRLEEHLEXAX

SEQ ID NO: 15205 - protein, 39 aa, Artificial Sequence
  Non-cyclic GFR-binding peptide
  MOD_RES (6)..(6): Xaa is C or S
  MOD_RES (20)..(21)..(22)..(23)..(24): Xaa is A or G
  MOD_RES (25)..(26)..(27)..(28): Xaa is A or G or absent
DEGLEXVPTGQSNITMQIMXXXXXXXXXIGEMSLEEHSQ

SEQ ID NO: 15206 - protein, 37 aa, Artificial Sequence
  Non-cyclic GFR-binding peptide
  MOD_RES (34)..(36): Xaa is C or S
  MOD_RES (14)..(15)..(16)..(17)..(18): Xaa is A or G
  MOD_RES (19)..(20)..(21)..(22): Xaa is A or G or absent
VPTEESNITMQIMXXXXXXXXXLGEMSFLQHNKXEXR

SEQ ID NO: 15207 - protein, 34 aa, Artificial Sequence
  Non-cyclic GFR-binding peptide
  MOD_RES (14)..(15)..(16)..(17)..(18): Xaa is A or G
  MOD_RES (19)..(20)..(21)..(22): Xaa is A or G or absent
TQVQLRSVKVAKVXXXXXXXXXKEVQVTLEDHLA

SEQ ID NO: 15208 - protein, 40 aa, Artificial Sequence
  Non-cyclic GFR-binding peptide
  MOD_RES (1)..(38)..(40): Xaa is C or S
  MOD_RES (17)..(18)..(19)..(20)..(21): Xaa is A or G
  MOD_RES (22)..(23)..(24)..(25): Xaa is A or G or absent
XRPTQVQLRSVKVAKVXXXXXXXXXKEVQVTLEDHLAXKX

SEQ ID NO: 15209 - protein, 35 aa, Artificial Sequence
  Non-cyclic GFR-binding peptide
PTQVQLSNITVQIMEIVRKKPIFLGEMSTLEDHLA

SEQ ID NO: 15210 - protein, 36 aa, Artificial Sequence
  Non-cyclic GFR-binding peptide
  MOD_RES (16)..(17)..(18)..(19)..(20): Xaa is A or G
  MOD_RES (21)..(22)..(23)..(24): Xaa is A or G or absent
RPTQVQLSNITVQIMXXXXXXXXXLGEMSTLEDHLA

SEQ ID NO: 15211 - protein, 38 aa, Artificial Sequence
  Non-cyclic GFR-binding peptide
  MOD_RES (36)..(38): Xaa is C or S
  MOD_RES (15)..(16)..(17)..(18)..(19): Xaa is A or G
  MOD_RES (20)..(21)..(22)..(23): Xaa is A or G or absent
PSRVHHSNITVQIMXXXXXXXXXLGEMSRLEEHLEXAX

SEQ ID NO: 15212 - protein, 41 aa, Artificial Sequence
  Non-cyclic GFR-binding peptide
  MOD_RES (2)..(39)..(41): Xaa is C or S
  MOD_RES (18)..(19)..(20)..(21)..(22): Xaa is A or G
  MOD_RES (23)..(24)..(25)..(26): Xaa is A or G or absent
QXRPTQVQLSNITVQIMXXXXXXXXXLGEMSTLEDHLAXKX

SEQ ID NO: 15213 - protein, 39 aa, Artificial Sequence
  Non-cyclic GFR-binding peptide
  MOD_RES (4)..(4): Xaa is C or S
  MOD_RES (20)..(21)..(22)..(23)..(24): Xaa is A or G
  MOD_RES (25)..(26)..(27)..(28): Xaa is A or G or absent
NVQXRPTQVQLSNITVQIMXXXXXXXXXIGEMSTLEDHL

SEQ ID NO: 15214 - protein, 41 aa, Artificial Sequence
  Non-cyclic GFR-binding peptide
  MOD_RES (5)..(39)..(41): Xaa is C or S
EGLEXVPTEERPVQMRKIRIKPHQGQHKKATVFLQHNKXEX

SEQ ID NO: 15215 - protein, 36 aa, Artificial Sequence
  Non-cyclic GFR-binding peptide
  MOD_RES (1)..(35): Xaa is C or S
  MOD_RES (15)..(16)..(17)..(18)..(19): Xaa is A or G
  MOD_RES (20)..(21)..(22)..(23): Xaa is A or G or absent
XVPTEERPVQMRKIXXXXXXXXXKKATVFLQHNKXE

SEQ ID NO: 15216 - protein, 32 aa, Artificial Sequence
  Non-cyclic GFR-binding peptide
VPTGQRSVKMAKVRIKPHQGQHKEVQVLEEHS

SEQ ID NO: 15217 - protein, 36 aa, Artificial Sequence
  Non-cyclic GFR-binding peptide
  MOD_RES (3)..(3): Xaa is C or S
LEXVPTEESNITMQIMRIKPHQGQHLGEMSFLQHNK

SEQ ID NO: 15218 - protein, 35 aa, Artificial Sequence
  Non-cyclic GFR-binding peptide
  MOD_RES (2)..(2): Xaa is C or S
EXVPTGQSNITMQIMRIKPHQGQHIGEMSLEEHSQ

SEQ ID NO: 15219 - protein, 33 aa, Artificial Sequence
  Non-cyclic GFR-binding peptide
  MOD_RES (14)..(15)..(16)..(17)..(18): Xaa is A or G
  MOD_RES (19)..(20)..(21)..(22): Xaa is A or G or absent
SRVHHRPVQVRKIXXXXXXXXXKKATVRLEEHL

SEQ ID NO: 15220 - protein, 35 aa, Artificial Sequence
  Non-cyclic GFR-binding peptide
  MOD_RES (3)..(3): Xaa is C or S
  MOD_RES (17)..(18)..(19)..(20)..(21): Xaa is A or G
  MOD_RES (22)..(23)..(24)..(25): Xaa is A or G or absent
LEXVPTEESNITMQIMXXXXXXXXXLGEMSFLQHN

SEQ ID NO: 15221 - protein, 37 aa, Artificial Sequence
  Non-cyclic GFR-binding peptide
  MOD_RES (5)..(5): Xaa is C or S
  MOD_RES (19)..(20)..(21)..(22)..(23): Xaa is A or G
  MOD_RES (24)..(25)..(26)..(27): Xaa is A or G or absent
EGLEXVPTGQSNITMQIMXXXXXXXXXIGEMSLEEHS

SEQ ID NO: 15222 - protein, 43 aa, Artificial Sequence
  Non-cyclic GFR-binding peptide
  MOD_RES (6)..(40)..(42): Xaa is C or S
DEGLEXVPTGQRPVQMRKIRIKPHQGQHKKATVLEEHSQXEXR

SEQ ID NO: 15223 - protein, 33 aa, Artificial Sequence
  Non-cyclic GFR-binding peptide
TQVQLSNITVQIMEIVRKKPIFLGEMSTLEDHL

SEQ ID NO: 15224 - protein, 42 aa, Artificial Sequence
  Non-cyclic GFR-binding peptide
  MOD_RES (5)..(42): Xaa is C or S
SSVKXQPSRVHHSNITVQIMEYVRKKPKLIGEMSRLEEHLEX

SEQ ID NO: 15225 - protein, 40 aa, Artificial Sequence
  Non-cyclic GFR-binding peptide
  MOD_RES (5)..(5): Xaa is C or S
SSVKXQPSRVHHRPVQVRKIEYVRKKPKLKKATVRLEEHL

SEQ ID NO: 15226 - protein, 38 aa, Artificial Sequence
  Non-cyclic GFR-binding peptide
  MOD_RES (1)..(35)..(37): Xaa is C or S
  MOD_RES (15)..(16)..(17)..(18)..(19): Xaa is A or G
  MOD_RES (20)..(21)..(22)..(23): Xaa is A or G or absent
XVPTEERPVQMRKIXXXXXXXXXKKATVFLQHNKXEXR

SEQ ID NO: 15227 - protein, 35 aa, Artificial Sequence
  Non-cyclic GFR-binding peptide
PSRVHHRPVQVRKIEYVRKKPKLKKATVRLEEHLE

SEQ ID NO: 15228 - protein, 36 aa, Artificial Sequence
  Non-cyclic GFR-binding peptide
  MOD_RES (2)..(2): Xaa is C or S
QXRPTQVQLRSVKVAKVEIVRKKPIFKEVQVTLEDH

SEQ ID NO: 15229 - protein, 38 aa, Artificial Sequence
  Non-cyclic GFR-binding peptide
  MOD_RES (1)..(35)..(37): Xaa is C or S
  MOD_RES (15)..(16)..(17)..(18)..(19): Xaa is A or G
  MOD_RES (20)..(21)..(22)..(23): Xaa is A or G or absent
XVPTEERSVKMAKVXXXXXXXXXKEVQVFLQHNKXEXR

SEQ ID NO: 15230 - protein, 41 aa, Artificial Sequence
  Non-cyclic GFR-binding peptide
  MOD_RES (4)..(41): Xaa is C or S
SVKXQPSRVHHSNITVQIMEYVRKKPKLLGEMSRLEEHLEX

SEQ ID NO: 15231 - protein, 33 aa, Artificial Sequence
  Non-cyclic GFR-binding peptide
  MOD_RES (1)..(1): Xaa is C or S
  MOD_RES (15)..(16)..(17)..(18)..(19): Xaa is A or G
  MOD_RES (20)..(21)..(22)..(23): Xaa is A or G or absent
XVPTEESNITMQIMXXXXXXXXXLGEMSFLQHN

SEQ ID NO: 15232 - protein, 35 aa, Artificial Sequence
  Non-cyclic GFR-binding peptide
RPTQVQLSNITVQIMEIVRKKPIFIGEMSTLEDHL

SEQ ID NO: 15233 - protein, 38 aa, Artificial Sequence
  Non-cyclic GFR-binding peptide
  MOD_RES (4)..(38): Xaa is C or S
  MOD_RES (18)..(19)..(20)..(21)..(22): Xaa is A or G
  MOD_RES (23)..(24)..(25)..(26): Xaa is A or G or absent
GLEXVPTEESNITMQIMXXXXXXXXXLGEMSFLQHNKX

SEQ ID NO: 15234 - protein, 39 aa, Artificial Sequence
  Non-cyclic GFR-binding peptide
  MOD_RES (3)..(37)..(39): Xaa is C or S
LEXVPTGQSNITMQIMRIKPHQGQHIGEMSLEEHSQXEX

SEQ ID NO: 15235 - protein, 33 aa, Artificial Sequence
  Non-cyclic GFR-binding peptide
PSRVHHSNITVQIMEYVRKKPKLIGEMSRLEEH

SEQ ID NO: 15236 - protein, 37 aa, Artificial Sequence
  Non-cyclic GFR-binding peptide
  MOD_RES (35)..(37): Xaa is C or S
SRVHHRPVQVRKIEYVRKKPKLKKATVRLEEHLEXAX

SEQ ID NO: 15237 - protein, 39 aa, Artificial Sequence
  Non-cyclic GFR-binding peptide
  MOD_RES (1)..(38): Xaa is C or S
  MOD_RES (17)..(18)..(19)..(20)..(21): Xaa is A or G
  MOD_RES (22)..(23)..(24)..(25): Xaa is A or G or absent
XRPTQVQLRSVKVAKVXXXXXXXXXKEVQVTLEDHLAXK

SEQ ID NO: 15238 - protein, 37 aa, Artificial Sequence
  Non-cyclic GFR-binding peptide
  MOD_RES (36)..(36): Xaa is C or S
  MOD_RES (15)..(16)..(17)..(18)..(19): Xaa is A or G
  MOD_RES (20)..(21)..(22)..(23): Xaa is A or G or absent
PTQVQLRSVKVAKVXXXXXXXXXKEVQVTLEDHLAXK

SEQ ID NO: 15239 - protein, 39 aa, Artificial Sequence
  Non-cyclic GFR-binding peptide
  MOD_RES (2)..(39): Xaa is C or S
KXQPSRVHHRPVQVRKIEYVRKKPKLKKATVRLEEHLEX

SEQ ID NO: 15240 - protein, 38 aa, Artificial Sequence
  Non-cyclic GFR-binding peptide
  MOD_RES (3)..(37): Xaa is C or S
LEXVPTEESNITMQIMRIKPHQGQHLGEMSFLQHNKXE

SEQ ID NO: 15241 - protein, 37 aa, Artificial Sequence
  Non-cyclic GFR-binding peptide
  MOD_RES (35)..(37): Xaa is C or S
TQVQLRSVKVAKVEIVRKKPIFKEVQVTLEDHLAXKX

SEQ ID NO: 15242 - protein, 43 aa, Artificial Sequence
  Non-cyclic GFR-binding peptide
  MOD_RES (6)..(40)..(42): Xaa is C or S
DEGLEXVPTGQRSVKMAKVRIKPHQGQHKEVQVLEEHSQXEXR

SEQ ID NO: 15243 - protein, 37 aa, Artificial Sequence
  Non-cyclic GFR-binding peptide
  MOD_RES (1)..(1): Xaa is C or S
XQPSRVHHSNITVQIMEYVRKKPKLIGEMSRLEEHLE

SEQ ID NO: 15244 - protein, 33 aa, Artificial Sequence
  Non-cyclic GFR-binding peptide
  MOD_RES (14)..(15)..(16)..(17)..(18): Xaa is A or G
  MOD_RES (19)..(20)..(21)..(22): Xaa is A or G or absent
VPTEERSVKMAKVXXXXXXXXXKEVQVFLQHNK

SEQ ID NO: 15245 - protein, 37 aa, Artificial Sequence
  Non-cyclic GFR-binding peptide
  MOD_RES (1)..(35)..(37): Xaa is C or S
  MOD_RES (15)..(16)..(17)..(18)..(19): Xaa is A or G
  MOD_RES (20)..(21)..(22)..(23): Xaa is A or G or absent
XVPTEESNITMQIMXXXXXXXXXLGEMSFLQHNKXEX

SEQ ID NO: 15246 - protein, 39 aa, Artificial Sequence
  Non-cyclic GFR-binding peptide
  MOD_RES (7)..(7): Xaa is C or S
  MOD_RES (21)..(22)..(23)..(24)..(25): Xaa is A or G
  MOD_RES (26)..(27)..(28)..(29): Xaa is A or G or absent
NDEGLEXVPTEERSVKMAKVXXXXXXXXXKEVQVFLQHN

SEQ ID NO: 15247 - protein, 38 aa, Artificial Sequence
  Non-cyclic GFR-binding peptide
  MOD_RES (1)..(38): Xaa is C or S
XRPTQVQLRSVKVAKVEIVRKKPIFKEVQVTLEDHLAX

SEQ ID NO: 15248 - protein, 32 aa, Artificial Sequence
  Non-cyclic GFR-binding peptide
  MOD_RES (14)..(15)..(16)..(17)..(18): Xaa is A or G
  MOD_RES (19)..(20)..(21)..(22): Xaa is A or G or absent
VPTEERSVKMAKVXXXXXXXXXKEVQVFLQHN

SEQ ID NO: 15249 - protein, 43 aa, Artificial Sequence
  Non-cyclic GFR-binding peptide
  MOD_RES (5)..(42): Xaa is C or S
RNVQXRPTQVQLSNITVQIMEIVRKKPIFIGEMSTLEDHLAXK

SEQ ID NO: 15250 - protein, 38 aa, Artificial Sequence
  Non-cyclic GFR-binding peptide
  MOD_RES (3)..(3): Xaa is C or S
VQXRPTQVQLRSVKVAKVEIVRKKPIFKEVQVTLEDHL

SEQ ID NO: 15251 - protein, 42 aa, Artificial Sequence
  Non-cyclic GFR-binding peptide
  MOD_RES (5)..(42): Xaa is C or S
  MOD_RES (21)..(22)..(23)..(24)..(25): Xaa is A or G
  MOD_RES (26)..(27)..(28)..(29): Xaa is A or G or absent
RNVQXRPTQVQLSNITVQIMXXXXXXXXXLGEMSTLEDHLAX

SEQ ID NO: 15252 - protein, 34 aa, Artificial Sequence
  Non-cyclic GFR-binding peptide
PTQVQLSNITVQIMEIVRKKPIFLGEMSTLEDHL

SEQ ID NO: 15253 - protein, 38 aa, Artificial Sequence
  Non-cyclic GFR-binding peptide
  MOD_RES (2)..(2): Xaa is C or S
  MOD_RES (18)..(19)..(20)..(21)..(22): Xaa is A or G
  MOD_RES (23)..(24)..(25)..(26): Xaa is A or G or absent
KXQPSRVHHSNITVQIMXXXXXXXXXIGEMSRLEEHLE

SEQ ID NO: 15254 - protein, 35 aa, Artificial Sequence
  Non-cyclic GFR-binding peptide
  MOD_RES (1)..(35): Xaa is C or S
  MOD_RES (15)..(16)..(17)..(18)..(19): Xaa is A or G
  MOD_RES (20)..(21)..(22)..(23): Xaa is A or G or absent
XVPTGQSNITMQIMXXXXXXXXXIGEMSLEEHSQX

SEQ ID NO: 15255 - protein, 44 aa, Artificial Sequence
  Non-cyclic GFR-binding peptide
  MOD_RES (4)..(41)..(43): Xaa is C or S
  MOD_RES (20)..(21)..(22)..(23)..(24): Xaa is A or G
  MOD_RES (25)..(26)..(27)..(28): Xaa is A or G or absent
NVQXRPTQVQLRSVKVAKVXXXXXXXXXKEVQVTLEDHLAXKXE

SEQ ID NO: 15256 - protein, 39 aa, Artificial Sequence
  Non-cyclic GFR-binding peptide
  MOD_RES (5)..(5): Xaa is C or S
  MOD_RES (21)..(22)..(23)..(24)..(25): Xaa is A or G
  MOD_RES (26)..(27)..(28)..(29): Xaa is A or G or absent
RNVQXRPTQVQLRSVKVAKVXXXXXXXXXKEVQVTLEDH

SEQ ID NO: 15257 - protein, 40 aa, Artificial Sequence
  Non-cyclic GFR-binding peptide
  MOD_RES (7)..(7): Xaa is C or S
  MOD_RES (21)..(22)..(23)..(24)..(25): Xaa is A or G
  MOD_RES (26)..(27)..(28)..(29): Xaa is A or G or absent
NDEGLEXVPTEERPVQMRKIXXXXXXXXXKKATVFLQHNK

SEQ ID NO: 15258 - protein, 34 aa, Artificial Sequence
  Non-cyclic GFR-binding peptide
  MOD_RES (15)..(16)..(17)..(18)..(19): Xaa is A or G
  MOD_RES (20)..(21)..(22)..(23): Xaa is A or G or absent
PSRVHHRPVQVRKIXXXXXXXXXKKATVRLEEHL

SEQ ID NO: 15259 - protein, 39 aa, Artificial Sequence
  Non-cyclic GFR-binding peptide
  MOD_RES (7)..(7): Xaa is C or S
NDEGLEXVPTGQRSVKMAKVRIKPHQGQHKEVQVLEEHS

SEQ ID NO: 15260 - protein, 42 aa, Artificial Sequence
  Non-cyclic GFR-binding peptide
  MOD_RES (4)..(41): Xaa is C or S
  MOD_RES (20)..(21)..(22)..(23)..(24): Xaa is A or G
  MOD_RES (25)..(26)..(27)..(28): Xaa is A or G or absent
NVQXRPTQVQLRSVKVAKVXXXXXXXXXKEVQVTLEDHLAXK

SEQ ID NO: 15261 - protein, 32 aa, Artificial Sequence
  Non-cyclic GFR-binding peptide
  MOD_RES (14)..(15)..(16)..(17)..(18): Xaa is A or G
  MOD_RES (19)..(20)..(21)..(22): Xaa is A or G or absent
SRVHHSNITVQIMXXXXXXXXXLGEMSRLEEH

SEQ ID NO: 15262 - protein, 40 aa, Artificial Sequence
  Non-cyclic GFR-binding peptide
  MOD_RES (5)..(39): Xaa is C or S
EGLEXVPTEERPVQMRKIRIKPHQGQHKKATVFLQHNKXE

SEQ ID NO: 15263 - protein, 39 aa, Artificial Sequence
  Non-cyclic GFR-binding peptide
  MOD_RES (3)..(37)..(39): Xaa is C or S
LEXVPTEERPVQMRKIRIKPHQGQHKKATVFLQHNKXEX

SEQ ID NO: 15264 - protein, 37 aa, Artificial Sequence
  Non-cyclic GFR-binding peptide
  MOD_RES (36)..(36): Xaa is C or S
  MOD_RES (15)..(16)..(17)..(18)..(19): Xaa is A or G
  MOD_RES (20)..(21)..(22)..(23): Xaa is A or G or absent
PSRVHHRPVQVRKIXXXXXXXXXKKATVRLEEHLEXA

SEQ ID NO: 15265 - protein, 37 aa, Artificial Sequence
  Non-cyclic GFR-binding peptide
  MOD_RES (5)..(5): Xaa is C or S
  MOD_RES (19)..(20)..(21)..(22)..(23): Xaa is A or G
  MOD_RES (24)..(25)..(26)..(27): Xaa is A or G or absent
EGLEXVPTEESNITMQIMXXXXXXXXXLGEMSFLQHN

SEQ ID NO: 15266 - protein, 41 aa, Artificial Sequence
  Non-cyclic GFR-binding peptide
  MOD_RES (1)..(38)..(40): Xaa is C or S
  MOD_RES (17)..(18)..(19)..(20)..(21): Xaa is A or G
  MOD_RES (22)..(23)..(24)..(25): Xaa is A or G or absent
XRPTQVQLRSVKVAKVXXXXXXXXXKEVQVTLEDHLAXKXE

SEQ ID NO: 15267 - protein, 38 aa, Artificial Sequence
  Non-cyclic GFR-binding peptide
  MOD_RES (37)..(37): Xaa is C or S
  MOD_RES (16)..(17)..(18)..(19)..(20): Xaa is A or G
  MOD_RES (21)..(22)..(23)..(24): Xaa is A or G or absent
RPTQVQLRSVKVAKVXXXXXXXXXKEVQVTLEDHLAXK

SEQ ID NO: 15268 - protein, 38 aa, Artificial Sequence
  Non-cyclic GFR-binding peptide
  MOD_RES (36)..(38): Xaa is C or S
  MOD_RES (15)..(16)..(17)..(18)..(19): Xaa is A or G
  MOD_RES (20)..(21)..(22)..(23): Xaa is A or G or absent
PTQVQLRSVKVAKVXXXXXXXXXKEVQVTLEDHLAXKX

SEQ ID NO: 15269 - protein, 37 aa, Artificial Sequence
  Non-cyclic GFR-binding peptide
  MOD_RES (4)..(4): Xaa is C or S
  MOD_RES (18)..(19)..(20)..(21)..(22): Xaa is A or G
  MOD_RES (23)..(24)..(25)..(26): Xaa is A or G or absent
GLEXVPTEERPVQMRKIXXXXXXXXXKKATVFLQHNK

SEQ ID NO: 15270 - protein, 40 aa, Artificial Sequence
  Non-cyclic GFR-binding peptide
  MOD_RES (5)..(39): Xaa is C or S
EGLEXVPTEESNITMQIMRIKPHQGQHLGEMSFLQHNKXE

SEQ ID NO: 15271 - protein, 40 aa, Artificial Sequence
  Non-cyclic GFR-binding peptide
  MOD_RES (4)..(4): Xaa is C or S
  MOD_RES (20)..(21)..(22)..(23)..(24): Xaa is A or G
  MOD_RES (25)..(26)..(27)..(28): Xaa is A or G or absent
SVKXQPSRVHHSNITVQIMXXXXXXXXXIGEMSRLEEHLE

SEQ ID NO: 15272 - protein, 39 aa, Artificial Sequence
  Non-cyclic GFR-binding peptide
  MOD_RES (3)..(37)..(39): Xaa is C or S
LEXVPTEERSVKMAKVRIKPHQGQHKEVQVFLQHNKXEX

SEQ ID NO: 15273 - protein, 38 aa, Artificial Sequence
  Non-cyclic GFR-binding peptide
  MOD_RES (6)..(6): Xaa is C or S
DEGLEXVPTEERPVQMRKIRIKPHQGQHKKATVFLQHN

SEQ ID NO: 15274 - protein, 39 aa, Artificial Sequence
  Non-cyclic GFR-binding peptide
  MOD_RES (3)..(3): Xaa is C or S
  MOD_RES (19)..(20)..(21)..(22)..(23): Xaa is A or G
  MOD_RES (24)..(25)..(26)..(27): Xaa is A or G or absent
VKXQPSRVHHSNITVQIMXXXXXXXXXLGEMSRLEEHLE

SEQ ID NO: 15275 - protein, 43 aa, Artificial Sequence
  Non-cyclic GFR-binding peptide
  MOD_RES (6)..(40)..(42): Xaa is C or S
  MOD_RES (20)..(21)..(22)..(23)..(24): Xaa is A or G
  MOD_RES (25)..(26)..(27)..(28): Xaa is A or G or absent
DEGLEXVPTGQSNITMQIMXXXXXXXXXIGEMSLEEHSQXEXR

SEQ ID NO: 15276 - protein, 41 aa, Artificial Sequence
  Non-cyclic GFR-binding peptide
  MOD_RES (6)..(40): Xaa is C or S
DEGLEXVPTGQRPVQMRKIRIKPHQGQHKKATVLEEHSQXE

SEQ ID NO: 15277 - protein, 34 aa, Artificial Sequence
  Non-cyclic GFR-binding peptide
  MOD_RES (16)..(17)..(18)..(19)..(20): Xaa is A or G
  MOD_RES (21)..(22)..(23)..(24): Xaa is A or G or absent
QPSRVHHRPVQVRKIXXXXXXXXXKKATVRLEEH

SEQ ID NO: 15278 - protein, 41 aa, Artificial Sequence
  Non-cyclic GFR-binding peptide
  MOD_RES (1)..(38)..(40): Xaa is C or S
  MOD_RES (17)..(18)..(19)..(20)..(21): Xaa is A or G
  MOD_RES (22)..(23)..(24)..(25): Xaa is A or G or absent
XQPSRVHHRPVQVRKIXXXXXXXXXKKATVRLEEHLEXAXA

SEQ ID NO: 15279 - protein, 36 aa, Artificial Sequence
  Non-cyclic GFR-binding peptide
  MOD_RES (34)..(36): Xaa is C or S
VPTGQRSVKMAKVRIKPHQGQHKEVQVLEEHSQXEX

SEQ ID NO: 15280 - protein, 40 aa, Artificial Sequence
  Non-cyclic GFR-binding peptide
  MOD_RES (2)..(39): Xaa is C or S
  MOD_RES (18)..(19)..(20)..(21)..(22): Xaa is A or G
  MOD_RES (23)..(24)..(25)..(26): Xaa is A or G or absent
QXRPTQVQLSNITVQIMXXXXXXXXXIGEMSTLEDHLAXK

SEQ ID NO: 15281 - protein, 40 aa, Artificial Sequence
  Non-cyclic GFR-binding peptide
  MOD_RES (3)..(40): Xaa is C or S
  MOD_RES (19)..(20)..(21)..(22)..(23): Xaa is A or G
  MOD_RES (24)..(25)..(26)..(27): Xaa is A or G or absent
VKXQPSRVHHRPVQVRKIXXXXXXXXXKKATVRLEEHLEX

SEQ ID NO: 15282 - protein, 39 aa, Artificial Sequence
  Non-cyclic GFR-binding peptide
  MOD_RES (4)..(4): Xaa is C or S
  MOD_RES (20)..(21)..(22)..(23)..(24): Xaa is A or G
  MOD_RES (25)..(26)..(27)..(28): Xaa is A or G or absent
SVKXQPSRVHHRPVQVRKIXXXXXXXXXKKATVRLEEHL

SEQ ID NO: 15283 - protein, 32 aa, Artificial Sequence
  Non-cyclic GFR-binding peptide
  MOD_RES (14)..(15)..(16)..(17)..(18): Xaa is A or G
  MOD_RES (19)..(20)..(21)..(22): Xaa is A or G or absent
TQVQLRSVKVAKVXXXXXXXXXKEVQVTLEDH

SEQ ID NO: 15284 - protein, 37 aa, Artificial Sequence
  Non-cyclic GFR-binding peptide
  MOD_RES (2)..(2): Xaa is C or S
QXRPTQVQLSNITVQIMEIVRKKPIFIGEMSTLEDHL

SEQ ID NO: 15285 - protein, 40 aa, Artificial Sequence
  Non-cyclic GFR-binding peptide
  MOD_RES (4)..(4): Xaa is C or S
  MOD_RES (20)..(21)..(22)..(23)..(24): Xaa is A or G
  MOD_RES (25)..(26)..(27)..(28): Xaa is A or G or absent
NVQXRPTQVQLRSVKVAKVXXXXXXXXXKEVQVTLEDHLA

SEQ ID NO: 15286 - protein, 40 aa, Artificial Sequence
  Non-cyclic GFR-binding peptide
  MOD_RES (4)..(38)..(40): Xaa is C or S
  MOD_RES (18)..(19)..(20)..(21)..(22): Xaa is A or G
  MOD_RES (23)..(24)..(25)..(26): Xaa is A or G or absent
GLEXVPTGQRSVKMAKVXXXXXXXXXKEVQVLEEHSQXEX

SEQ ID NO: 15287 - protein, 38 aa, Artificial Sequence
  Non-cyclic GFR-binding peptide
  MOD_RES (2)..(2): Xaa is C or S
QXRPTQVQLSNITVQIMEIVRKKPIFLGEMSTLEDHLA

SEQ ID NO: 15288 - protein, 42 aa, Artificial Sequence
  Non-cyclic GFR-binding peptide
  MOD_RES (4)..(41): Xaa is C or S
NVQXRPTQVQLRSVKVAKVEIVRKKPIFKEVQVTLEDHLAXK

SEQ ID NO: 15289 - protein, 40 aa, Artificial Sequence
  Non-cyclic GFR-binding peptide
  MOD_RES (5)..(39): Xaa is C or S
EGLEXVPTEERSVKMAKVRIKPHQGQHKEVQVFLQHNKXE

SEQ ID NO: 15290 - protein, 36 aa, Artificial Sequence
  Non-cyclic GFR-binding peptide
  MOD_RES (36)..(36): Xaa is C or S
PSRVHHSNITVQIMEYVRKKPKLLGEMSRLEEHLEX

SEQ ID NO: 15291 - protein, 42 aa, Artificial Sequence
  Non-cyclic GFR-binding peptide
  MOD_RES (2)..(39)..(41): Xaa is C or S
QXRPTQVQLRSVKVAKVEIVRKKPIFKEVQVTLEDHLAXKXE

SEQ ID NO: 15292 - protein, 40 aa, Artificial Sequence
  Non-cyclic GFR-binding peptide
  MOD_RES (6)..(40): Xaa is C or S
  MOD_RES (20)..(21)..(22)..(23)..(24): Xaa is A or G
  MOD_RES (25)..(26)..(27)..(28): Xaa is A or G or absent
DEGLEXVPTGQSNITMQIMXXXXXXXXXIGEMSLEEHSQX

SEQ ID NO: 15293 - protein, 34 aa, Artificial Sequence
  Non-cyclic GFR-binding peptide
  MOD_RES (1)..(1): Xaa is C or S
XVPTGQRPVQMRKIRIKPHQGQHKKATVLEEHSQ

SEQ ID NO: 15294 - protein, 39 aa, Artificial Sequence
  Non-cyclic GFR-binding peptide
  MOD_RES (36)..(38): Xaa is C or S
  MOD_RES (15)..(16)..(17)..(18)..(19): Xaa is A or G
  MOD_RES (20)..(21)..(22)..(23): Xaa is A or G or absent
PSRVHHRPVQVRKIXXXXXXXXXKKATVRLEEHLEXAXA

SEQ ID NO: 15295 - protein, 36 aa, Artificial Sequence
  Non-cyclic GFR-binding peptide
  MOD_RES (16)..(17)..(18)..(19)..(20): Xaa is A or G
  MOD_RES (21)..(22)..(23)..(24): Xaa is A or G or absent
QPSRVHHSNITVQIMXXXXXXXXXLGEMSRLEEHLE

SEQ ID NO: 15296 - protein, 39 aa, Artificial Sequence
  Non-cyclic GFR-binding peptide
  MOD_RES (5)..(39): Xaa is C or S
  MOD_RES (19)..(20)..(21)..(22)..(23): Xaa is A or G
  MOD_RES (24)..(25)..(26)..(27): Xaa is A or G or absent
EGLEXVPTEESNITMQIMXXXXXXXXXLGEMSFLQHNKX

SEQ ID NO: 15297 - protein, 44 aa, Artificial Sequence
  Non-cyclic GFR-binding peptide
  MOD_RES (5)..(42)..(44): Xaa is C or S
  MOD_RES (21)..(22)..(23)..(24)..(25): Xaa is A or G
  MOD_RES (26)..(27)..(28)..(29): Xaa is A or G or absent
RNVQXRPTQVQLSNITVQIMXXXXXXXXXIGEMSTLEDHLAXKX

SEQ ID NO: 15298 - protein, 44 aa, Artificial Sequence
  Non-cyclic GFR-binding peptide
  MOD_RES (5)..(42)..(44): Xaa is C or S
SSVKXQPSRVHHRPVQVRKIEYVRKKPKLKKATVRLEEHLEXAX

SEQ ID NO: 15299 - protein, 37 aa, Artificial Sequence
  Non-cyclic GFR-binding peptide
  MOD_RES (4)..(4): Xaa is C or S
  MOD_RES (18)..(19)..(20)..(21)..(22): Xaa is A or G
  MOD_RES (23)..(24)..(25)..(26): Xaa is A or G or absent
GLEXVPTGQSNITMQIMXXXXXXXXXIGEMSLEEHSQ

SEQ ID NO: 15300 - protein, 41 aa, Artificial Sequence
  Non-cyclic GFR-binding peptide
  MOD_RES (5)..(5): Xaa is C or S
SSVKXQPSRVHHSNITVQIMEYVRKKPKLIGEMSRLEEHLE

SEQ ID NO: 15301 - protein, 34 aa, Artificial Sequence
  Non-cyclic GFR-binding peptide
  MOD_RES (2)..(2): Xaa is C or S
EXVPTEESNITMQIMRIKPHQGQHLGEMSFLQHN

SEQ ID NO: 15302 - protein, 37 aa, Artificial Sequence
  Non-cyclic GFR-binding peptide
  MOD_RES (2)..(2): Xaa is C or S
  MOD_RES (18)..(19)..(20)..(21)..(22): Xaa is A or G
  MOD_RES (23)..(24)..(25)..(26): Xaa is A or G or absent
KXQPSRVHHSNITVQIMXXXXXXXXXIGEMSRLEEHL

SEQ ID NO: 15303 - protein, 39 aa, Artificial Sequence
  Non-cyclic GFR-binding peptide
  MOD_RES (5)..(5): Xaa is C or S
SSVKXQPSRVHHRPVQVRKIEYVRKKPKLKKATVRLEEH

SEQ ID NO: 15304 - protein, 42 aa, Artificial Sequence
  Non-cyclic GFR-binding peptide
  MOD_RES (5)..(42): Xaa is C or S
RNVQXRPTQVQLSNITVQIMEIVRKKPIFLGEMSTLEDHLAX

SEQ ID NO: 15305 - protein, 36 aa, Artificial Sequence
  Non-cyclic GFR-binding peptide
  MOD_RES (34)..(36): Xaa is C or S
  MOD_RES (14)..(15)..(16)..(17)..(18): Xaa is A or G
  MOD_RES (19)..(20)..(21)..(22): Xaa is A or G or absent
VPTEERPVQMRKIXXXXXXXXXKKATVFLQHNKXEX

SEQ ID NO: 15306 - protein, 38 aa, Artificial Sequence
  Non-cyclic GFR-binding peptide
  MOD_RES (5)..(5): Xaa is C or S
  MOD_RES (19)..(20)..(21)..(22)..(23): Xaa is A or G
  MOD_RES (24)..(25)..(26)..(27): Xaa is A or G or absent
EGLEXVPTGQRSVKMAKVXXXXXXXXXKEVQVLEEHSQ

SEQ ID NO: 15307 - protein, 39 aa, Artificial Sequence
  Non-cyclic GFR-binding peptide
  MOD_RES (2)..(39): Xaa is C or S
KXQPSRVHHSNITVQIMEYVRKKPKLLGEMSRLEEHLEX

SEQ ID NO: 15308 - protein, 43 aa, Artificial Sequence
  Non-cyclic GFR-binding peptide
  MOD_RES (4)..(41)..(43): Xaa is C or S
SVKXQPSRVHHRPVQVRKIEYVRKKPKLKKATVRLEEHLEXAX

SEQ ID NO: 15309 - protein, 41 aa, Artificial Sequence
  Non-cyclic GFR-binding peptide
  MOD_RES (2)..(39)..(41): Xaa is C or S
  MOD_RES (18)..(19)..(20)..(21)..(22): Xaa is A or G
  MOD_RES (23)..(24)..(25)..(26): Xaa is A or G or absent
KXQPSRVHHRPVQVRKIXXXXXXXXXKKATVRLEEHLEXAX

SEQ ID NO: 15310 - protein, 34 aa, Artificial Sequence
  Non-cyclic GFR-binding peptide
  MOD_RES (34)..(34): Xaa is C or S
VPTGQRPVQMRKIRIKPHQGQHKKATVLEEHSQX

SEQ ID NO: 15311 - protein, 41 aa, Artificial Sequence
  Non-cyclic GFR-binding peptide
  MOD_RES (6)..(40): Xaa is C or S
  MOD_RES (20)..(21)..(22)..(23)..(24): Xaa is A or G
  MOD_RES (25)..(26)..(27)..(28): Xaa is A or G or absent
DEGLEXVPTEERSVKMAKVXXXXXXXXXKEVQVFLQHNKXE

SEQ ID NO: 15312 - protein, 43 aa, Artificial Sequence
  Non-cyclic GFR-binding peptide
  MOD_RES (7)..(41)..(43): Xaa is C or S
  MOD_RES (21)..(22)..(23)..(24)..(25): Xaa is A or G
  MOD_RES (26)..(27)..(28)..(29): Xaa is A or G or absent
NDEGLEXVPTGQSNITMQIMXXXXXXXXXIGEMSLEEHSQXEX

SEQ ID NO: 15313 - protein, 41 aa, Artificial Sequence
  Non-cyclic GFR-binding peptide
  MOD_RES (5)..(39)..(41): Xaa is C or S
EGLEXVPTEERSVKMAKVRIKPHQGQHKEVQVFLQHNKXEX

SEQ ID NO: 15314 - protein, 39 aa, Artificial Sequence
  Non-cyclic GFR-binding peptide
  MOD_RES (6)..(6): Xaa is C or S
DEGLEXVPTGQRPVQMRKIRIKPHQGQHKKATVLEEHSQ

SEQ ID NO: 15315 - protein, 39 aa, Artificial Sequence
  Non-cyclic GFR-binding peptide
  MOD_RES (6)..(6): Xaa is C or S
DEGLEXVPTEESNITMQIMRIKPHQGQHLGEMSFLQHNK

SEQ ID NO: 15316 - protein, 37 aa, Artificial Sequence
  Non-cyclic GFR-binding peptide
  MOD_RES (3)..(3): Xaa is C or S
  MOD_RES (19)..(20)..(21)..(22)..(23): Xaa is A or G
  MOD_RES (24)..(25)..(26)..(27): Xaa is A or G or absent
VKXQPSRVHHRPVQVRKIXXXXXXXXXKKATVRLEEH

SEQ ID NO: 15317 - protein, 39 aa, Artificial Sequence
  Non-cyclic GFR-binding peptide
  MOD_RES (1)..(38): Xaa is C or S
  MOD_RES (17)..(18)..(19)..(20)..(21): Xaa is A or G
  MOD_RES (22)..(23)..(24)..(25): Xaa is A or G or absent
XQPSRVHHRPVQVRKIXXXXXXXXXKKATVRLEEHLEXA

SEQ ID NO: 15318 - protein, 40 aa, Artificial Sequence
  Non-cyclic GFR-binding peptide
  MOD_RES (6)..(40): Xaa is C or S
  MOD_RES (20)..(21)..(22)..(23)..(24): Xaa is A or G
  MOD_RES (25)..(26)..(27)..(28): Xaa is A or G or absent
DEGLEXVPTEERSVKMAKVXXXXXXXXXKEVQVFLQHNKX

SEQ ID NO: 15319 - protein, 37 aa, Artificial Sequence
  Non-cyclic GFR-binding peptide
  MOD_RES (2)..(2): Xaa is C or S
KXQPSRVHHSNITVQIMEYVRKKPKLLGEMSRLEEHL

SEQ ID NO: 15320 - protein, 41 aa, Artificial Sequence
  Non-cyclic GFR-binding peptide
  MOD_RES (7)..(41): Xaa is C or S
NDEGLEXVPTGQRSVKMAKVRIKPHQGQHKEVQVLEEHSQX

SEQ ID NO: 15321 - protein, 44 aa, Artificial Sequence
  Non-cyclic GFR-binding peptide
  MOD_RES (5)..(42)..(44): Xaa is C or S
RNVQXRPTQVQLRSVKVAKVEIVRKKPIFKEVQVTLEDHLAXKX

SEQ ID NO: 15322 - protein, 42 aa, Artificial Sequence
  Non-cyclic GFR-binding peptide
  MOD_RES (5)..(42): Xaa is C or S
  MOD_RES (21)..(22)..(23)..(24)..(25): Xaa is A or G
  MOD_RES (26)..(27)..(28)..(29): Xaa is A or G or absent
RNVQXRPTQVQLRSVKVAKVXXXXXXXXXKEVQVTLEDHLAX

SEQ ID NO: 15323 - protein, 38 aa, Artificial Sequence
  Non-cyclic GFR-binding peptide
  MOD_RES (3)..(3): Xaa is C or S
VKXQPSRVHHSNITVQIMEYVRKKPKLIGEMSRLEEHL

SEQ ID NO: 15324 - protein, 38 aa, Artificial Sequence
  Non-cyclic GFR-binding peptide
  MOD_RES (35)..(37): Xaa is C or S
  MOD_RES (14)..(15)..(16)..(17)..(18): Xaa is A or G
  MOD_RES (19)..(20)..(21)..(22): Xaa is A or G or absent
SRVHHRPVQVRKIXXXXXXXXXKKATVRLEEHLEXAXA

SEQ ID NO: 15325 - protein, 40 aa, Artificial Sequence
  Non-cyclic GFR-binding peptide
  MOD_RES (3)..(40): Xaa is C or S
  MOD_RES (19)..(20)..(21)..(22)..(23): Xaa is A or G
  MOD_RES (24)..(25)..(26)..(27): Xaa is A or G or absent
VKXQPSRVHHSNITVQIMXXXXXXXXXLGEMSRLEEHLEX

SEQ ID NO: 15326 - protein, 34 aa, Artificial Sequence
  Non-cyclic GFR-binding peptide
SRVHHSNITVQIMEYVRKKPKLIGEMSRLEEHLE

SEQ ID NO: 15327 - protein, 35 aa, Artificial Sequence
  Non-cyclic GFR-binding peptide
  MOD_RES (2)..(2): Xaa is C or S
  MOD_RES (16)..(17)..(18)..(19)..(20): Xaa is A or G
  MOD_RES (21)..(22)..(23)..(24): Xaa is A or G or absent
EXVPTGQRSVKMAKVXXXXXXXXXKEVQVLEEHSQ

SEQ ID NO: 15328 - protein, 37 aa, Artificial Sequence
  Non-cyclic GFR-binding peptide
  MOD_RES (34)..(36): Xaa is C or S
VPTEERPVQMRKIRIKPHQGQHKKATVFLQHNKXEXR

SEQ ID NO: 15329 - protein, 37 aa, Artificial Sequence
  Non-cyclic GFR-binding peptide
  MOD_RES (34)..(36): Xaa is C or S
  MOD_RES (14)..(15)..(16)..(17)..(18): Xaa is A or G
  MOD_RES (19)..(20)..(21)..(22): Xaa is A or G or absent
VPTEERSVKMAKVXXXXXXXXXKEVQVFLQHNKXEXR

SEQ ID NO: 15330 - protein, 35 aa, Artificial Sequence
  Non-cyclic GFR-binding peptide
  MOD_RES (1)..(1): Xaa is C or S
  MOD_RES (17)..(18)..(19)..(20)..(21): Xaa is A or G
  MOD_RES (22)..(23)..(24)..(25): Xaa is A or G or absent
XQPSRVHHRPVQVRKIXXXXXXXXXKKATVRLEEH

SEQ ID NO: 15331 - protein, 36 aa, Artificial Sequence
  Non-cyclic GFR-binding peptide
  MOD_RES (35)..(35): Xaa is C or S
  MOD_RES (14)..(15)..(16)..(17)..(18): Xaa is A or G
  MOD_RES (19)..(20)..(21)..(22): Xaa is A or G or absent
TQVQLSNITVQIMXXXXXXXXXIGEMSTLEDHLAXK

SEQ ID NO: 15332 - protein, 33 aa, Artificial Sequence
  Non-cyclic GFR-binding peptide
PTQVQLRSVKVAKVEIVRKKPIFKEVQVTLEDH

SEQ ID NO: 15333 - protein, 38 aa, Artificial Sequence
  Non-cyclic GFR-binding peptide
  MOD_RES (1)..(38): Xaa is C or S
  MOD_RES (17)..(18)..(19)..(20)..(21): Xaa is A or G
  MOD_RES (22)..(23)..(24)..(25): Xaa is A or G or absent
XRPTQVQLRSVKVAKVXXXXXXXXXKEVQVTLEDHLAX

SEQ ID NO: 15334 - protein, 36 aa, Artificial Sequence
  Non-cyclic GFR-binding peptide
  MOD_RES (4)..(4): Xaa is C or S
  MOD_RES (18)..(19)..(20)..(21)..(22): Xaa is A or G
  MOD_RES (23)..(24)..(25)..(26): Xaa is A or G or absent
GLEXVPTEERPVQMRKIXXXXXXXXXKKATVFLQHN

SEQ ID NO: 15335 - protein, 40 aa, Artificial Sequence
  Non-cyclic GFR-binding peptide
  MOD_RES (37)..(39): Xaa is C or S
RPTQVQLSNITVQIMEIVRKKPIFIGEMSTLEDHLAXKXE

SEQ ID NO: 15336 - protein, 42 aa, Artificial Sequence
  Non-cyclic GFR-binding peptide
  MOD_RES (2)..(39)..(41): Xaa is C or S
  MOD_RES (18)..(19)..(20)..(21)..(22): Xaa is A or G
  MOD_RES (23)..(24)..(25)..(26): Xaa is A or G or absent
KXQPSRVHHSNITVQIMXXXXXXXXXLGEMSRLEEHLEXAXA

SEQ ID NO: 15337 - protein, 45 aa, Artificial Sequence
  Non-cyclic GFR-binding peptide
  MOD_RES (5)..(42)..(44): Xaa is C or S
SSVKXQPSRVHHSNITVQIMEYVRKKPKLLGEMSRLEEHLEXAXA

SEQ ID NO: 15338 - protein, 34 aa, Artificial Sequence
  Non-cyclic GFR-binding peptide
  MOD_RES (34)..(34): Xaa is C or S
VPTGQRSVKMAKVRIKPHQGQHKEVQVLEEHSQX

SEQ ID NO: 15339 - protein, 41 aa, Artificial Sequence
  Non-cyclic GFR-binding peptide
  MOD_RES (4)..(38)..(40): Xaa is C or S
  MOD_RES (18)..(19)..(20)..(21)..(22): Xaa is A or G
  MOD_RES (23)..(24)..(25)..(26): Xaa is A or G or absent
GLEXVPTEERSVKMAKVXXXXXXXXXKEVQVFLQHNKXEXR

SEQ ID NO: 15340 - protein, 38 aa, Artificial Sequence
  Non-cyclic GFR-binding peptide
  MOD_RES (3)..(37): Xaa is C or S
LEXVPTGQSNITMQIMRIKPHQGQHIGEMSLEEHSQXE

SEQ ID NO: 15341 - protein, 38 aa, Artificial Sequence
  Non-cyclic GFR-binding peptide
  MOD_RES (1)..(35)..(37): Xaa is C or S
XVPTEERSVKMAKVRIKPHQGQHKEVQVFLQHNKXEXR

SEQ ID NO: 15342 - protein, 45 aa, Artificial Sequence
  Non-cyclic GFR-binding peptide
  MOD_RES (5)..(42)..(44): Xaa is C or S
SSVKXQPSRVHHRPVQVRKIEYVRKKPKLKKATVRLEEHLEXAXA

SEQ ID NO: 15343 - protein, 40 aa, Artificial Sequence
  Non-cyclic GFR-binding peptide
  MOD_RES (37)..(39): Xaa is C or S
  MOD_RES (16)..(17)..(18)..(19)..(20): Xaa is A or G
  MOD_RES (21)..(22)..(23)..(24): Xaa is A or G or absent
QPSRVHHSNITVQIMXXXXXXXXXIGEMSRLEEHLEXAXA

SEQ ID NO: 15344 - protein, 35 aa, Artificial Sequence
  Non-cyclic GFR-binding peptide
  MOD_RES (1)..(1): Xaa is C or S
XRPTQVQLSNITVQIMEIVRKKPIFLGEMSTLEDH

SEQ ID NO: 15345 - protein, 40 aa, Artificial Sequence
  Non-cyclic GFR-binding peptide
  MOD_RES (4)..(38)..(40): Xaa is C or S
GLEXVPTEESNITMQIMRIKPHQGQHLGEMSFLQHNKXEX

SEQ ID NO: 15346 - protein, 38 aa, Artificial Sequence
  Non-cyclic GFR-binding peptide
  MOD_RES (3)..(37): Xaa is C or S
LEXVPTEERSVKMAKVRIKPHQGQHKEVQVFLQHNKXE

SEQ ID NO: 15347 - protein, 43 aa, Artificial Sequence
  Non-cyclic GFR-binding peptide
  MOD_RES (7)..(41)..(43): Xaa is C or S
  MOD_RES (21)..(22)..(23)..(24)..(25): Xaa is A or G
  MOD_RES (26)..(27)..(28)..(29): Xaa is A or G or absent
NDEGLEXVPTEERPVQMRKIXXXXXXXXXKKATVFLQHNKXEX

SEQ ID NO: 15348 - protein, 33 aa, Artificial Sequence
  Non-cyclic GFR-binding peptide
  MOD_RES (1)..(1): Xaa is C or S
  MOD_RES (15)..(16)..(17)..(18)..(19): Xaa is A or G
  MOD_RES (20)..(21)..(22)..(23): Xaa is A or G or absent
XVPTGQSNITMQIMXXXXXXXXXIGEMSLEEHS

SEQ ID NO: 15349 - protein, 33 aa, Artificial Sequence
  Non-cyclic GFR-binding peptide
PTQVQLSNITVQIMEIVRKKPIFLGEMSTLEDH

SEQ ID NO: 15350 - protein, 39 aa, Artificial Sequence
  Non-cyclic GFR-binding peptide
  MOD_RES (3)..(3): Xaa is C or S
  MOD_RES (19)..(20)..(21)..(22)..(23): Xaa is A or G
  MOD_RES (24)..(25)..(26)..(27): Xaa is A or G or absent
VQXRPTQVQLRSVKVAKVXXXXXXXXXKEVQVTLEDHLA

SEQ ID NO: 15351 - protein, 38 aa, Artificial Sequence
  Non-cyclic GFR-binding peptide
  MOD_RES (3)..(3): Xaa is C or S
  MOD_RES (19)..(20)..(21)..(22)..(23): Xaa is A or G
  MOD_RES (24)..(25)..(26)..(27): Xaa is A or G or absent
VQXRPTQVQLSNITVQIMXXXXXXXXXLGEMSTLEDHL

SEQ ID NO: 15352 - protein, 39 aa, Artificial Sequence
  Non-cyclic GFR-binding peptide
  MOD_RES (2)..(36)..(38): Xaa is C or S
EXVPTEERSVKMAKVRIKPHQGQHKEVQVFLQHNKXEXR

SEQ ID NO: 15353 - protein, 40 aa, Artificial Sequence
  Non-cyclic GFR-binding peptide
  MOD_RES (2)..(39): Xaa is C or S
KXQPSRVHHSNITVQIMEYVRKKPKLIGEMSRLEEHLEXA

SEQ ID NO: 15354 - protein, 36 aa, Artificial Sequence
  Non-cyclic GFR-binding peptide
  MOD_RES (34)..(36): Xaa is C or S
VPTGQRPVQMRKIRIKPHQGQHKKATVLEEHSQXEX

SEQ ID NO: 15355 - protein, 35 aa, Artificial Sequence
  Non-cyclic GFR-binding peptide
PSRVHHSNITVQIMEYVRKKPKLLGEMSRLEEHLE

SEQ ID NO: 15356 - protein, 38 aa, Artificial Sequence
  Non-cyclic GFR-binding peptide
  MOD_RES (4)..(4): Xaa is C or S
  MOD_RES (20)..(21)..(22)..(23)..(24): Xaa is A or G
  MOD_RES (25)..(26)..(27)..(28): Xaa is A or G or absent
NVQXRPTQVQLRSVKVAKVXXXXXXXXXKEVQVTLEDH

SEQ ID NO: 15357 - protein, 36 aa, Artificial Sequence
  Non-cyclic GFR-binding peptide
  MOD_RES (2)..(2): Xaa is C or S
  MOD_RES (18)..(19)..(20)..(21)..(22): Xaa is A or G
  MOD_RES (23)..(24)..(25)..(26): Xaa is A or G or absent
QXRPTQVQLSNITVQIMXXXXXXXXXLGEMSTLEDH

SEQ ID NO: 15358 - protein, 39 aa, Artificial Sequence
  Non-cyclic GFR-binding peptide
  MOD_RES (3)..(3): Xaa is C or S
  MOD_RES (19)..(20)..(21)..(22)..(23): Xaa is A or G
  MOD_RES (24)..(25)..(26)..(27): Xaa is A or G or absent
VKXQPSRVHHRPVQVRKIXXXXXXXXXKKATVRLEEHLE

SEQ ID NO: 15359 - protein, 39 aa, Artificial Sequence
  Non-cyclic GFR-binding peptide
  MOD_RES (5)..(39): Xaa is C or S
  MOD_RES (19)..(20)..(21)..(22)..(23): Xaa is A or G
  MOD_RES (24)..(25)..(26)..(27): Xaa is A or G or absent
EGLEXVPTGQRPVQMRKIXXXXXXXXXKKATVLEEHSQX

SEQ ID NO: 15360 - protein, 44 aa, Artificial Sequence
  Non-cyclic GFR-binding peptide
  MOD_RES (7)..(41)..(43): Xaa is C or S
  MOD_RES (21)..(22)..(23)..(24)..(25): Xaa is A or G
  MOD_RES (26)..(27)..(28)..(29): Xaa is A or G or absent
NDEGLEXVPTGQRSVKMAKVXXXXXXXXXKEVQVLEEHSQXEXR

SEQ ID NO: 15361 - protein, 42 aa, Artificial Sequence
  Non-cyclic GFR-binding peptide
  MOD_RES (7)..(41): Xaa is C or S
  MOD_RES (21)..(22)..(23)..(24)..(25): Xaa is A or G
  MOD_RES (26)..(27)..(28)..(29): Xaa is A or G or absent
NDEGLEXVPTGQRSVKMAKVXXXXXXXXXKEVQVLEEHSQXE

SEQ ID NO: 15362 - protein, 32 aa, Artificial Sequence
  Non-cyclic GFR-binding peptide
VPTGQRPVQMRKIRIKPHQGQHKKATVLEEHS

SEQ ID NO: 15363 - protein, 44 aa, Artificial Sequence
  Non-cyclic GFR-binding peptide
  MOD_RES (4)..(41)..(43): Xaa is C or S
SVKXQPSRVHHRPVQVRKIEYVRKKPKLKKATVRLEEHLEXAXA

SEQ ID NO: 15364 - protein, 36 aa, Artificial Sequence
  Non-cyclic GFR-binding peptide
  MOD_RES (2)..(36): Xaa is C or S
  MOD_RES (16)..(17)..(18)..(19)..(20): Xaa is A or G
  MOD_RES (21)..(22)..(23)..(24): Xaa is A or G or absent
EXVPTEESNITMQIMXXXXXXXXXLGEMSFLQHNKX

SEQ ID NO: 15365 - protein, 38 aa, Artificial Sequence
  Non-cyclic GFR-binding peptide
  MOD_RES (2)..(36)..(38): Xaa is C or S
  MOD_RES (16)..(17)..(18)..(19)..(20): Xaa is A or G
  MOD_RES (21)..(22)..(23)..(24): Xaa is A or G or absent
EXVPTEESNITMQIMXXXXXXXXXLGEMSFLQHNKXEX

SEQ ID NO: 15366 - protein, 36 aa, Artificial Sequence
  Non-cyclic GFR-binding peptide
  MOD_RES (16)..(17)..(18)..(19)..(20): Xaa is A or G
  MOD_RES (21)..(22)..(23)..(24): Xaa is A or G or absent
QPSRVHHRPVQVRKIXXXXXXXXXKKATVRLEEHLE

SEQ ID NO: 15367 - protein, 33 aa, Artificial Sequence
  Non-cyclic GFR-binding peptide
  MOD_RES (15)..(16)..(17)..(18)..(19): Xaa is A or G
  MOD_RES (20)..(21)..(22)..(23): Xaa is A or G or absent
PTQVQLSNITVQIMXXXXXXXXXLGEMSTLEDH

SEQ ID NO: 15368 - protein, 38 aa, Artificial Sequence
  Non-cyclic GFR-binding peptide
  MOD_RES (1)..(38): Xaa is C or S
XRPTQVQLSNITVQIMEIVRKKPIFLGEMSTLEDHLAX

SEQ ID NO: 15369 - protein, 42 aa, Artificial Sequence
  Non-cyclic GFR-binding peptide
  MOD_RES (3)..(40)..(42): Xaa is C or S
VQXRPTQVQLSNITVQIMEIVRKKPIFLGEMSTLEDHLAXKX

SEQ ID NO: 15370 - protein, 40 aa, Artificial Sequence
  Non-cyclic GFR-binding peptide
  MOD_RES (6)..(40): Xaa is C or S
DEGLEXVPTEESNITMQIMRIKPHQGQHLGEMSFLQHNKX

SEQ ID NO: 15371 - protein, 37 aa, Artificial Sequence
  Non-cyclic GFR-binding peptide
  MOD_RES (2)..(36): Xaa is C or S
  MOD_RES (16)..(17)..(18)..(19)..(20): Xaa is A or G
  MOD_RES (21)..(22)..(23)..(24): Xaa is A or G or absent
EXVPTGQRSVKMAKVXXXXXXXXXKEVQVLEEHSQXE

SEQ ID NO: 15372 - protein, 42 aa, Artificial Sequence
  Non-cyclic GFR-binding peptide
  MOD_RES (2)..(39)..(41): Xaa is C or S
  MOD_RES (18)..(19)..(20)..(21)..(22): Xaa is A or G
  MOD_RES (23)..(24)..(25)..(26): Xaa is A or G or absent
KXQPSRVHHRPVQVRKIXXXXXXXXXKKATVRLEEHLEXAXA

SEQ ID NO: 15373 - protein, 37 aa, Artificial Sequence
  Non-cyclic GFR-binding peptide
  MOD_RES (3)..(37): Xaa is C or S
LEXVPTEERSVKMAKVRIKPHQGQHKEVQVFLQHNKX

SEQ ID NO: 15374 - protein, 40 aa, Artificial Sequence
  Non-cyclic GFR-binding peptide
  MOD_RES (3)..(37)..(39): Xaa is C or S
  MOD_RES (17)..(18)..(19)..(20)..(21): Xaa is A or G
  MOD_RES (22)..(23)..(24)..(25): Xaa is A or G or absent
LEXVPTGQRSVKMAKVXXXXXXXXXKEVQVLEEHSQXEXR

SEQ ID NO: 15375 - protein, 37 aa, Artificial Sequence
  Non-cyclic GFR-binding peptide
  MOD_RES (5)..(5): Xaa is C or S
  MOD_RES (19)..(20)..(21)..(22)..(23): Xaa is A or G
  MOD_RES (24)..(25)..(26)..(27): Xaa is A or G or absent
EGLEXVPTEERSVKMAKVXXXXXXXXXKEVQVFLQHN

SEQ ID NO: 15376 - protein, 41 aa, Artificial Sequence
  Non-cyclic GFR-binding peptide
  MOD_RES (4)..(41): Xaa is C or S
NVQXRPTQVQLRSVKVAKVEIVRKKPIFKEVQVTLEDHLAX

SEQ ID NO: 15377 - protein, 39 aa, Artificial Sequence
  Non-cyclic GFR-binding peptide
  MOD_RES (7)..(7): Xaa is C or S
  MOD_RES (21)..(22)..(23)..(24)..(25): Xaa is A or G
  MOD_RES (26)..(27)..(28)..(29): Xaa is A or G or absent
NDEGLEXVPTEERPVQMRKIXXXXXXXXXKKATVFLQHN

SEQ ID NO: 15378 - protein, 40 aa, Artificial Sequence
  Non-cyclic GFR-binding peptide
  MOD_RES (4)..(38)..(40): Xaa is C or S
GLEXVPTEERSVKMAKVRIKPHQGQHKEVQVFLQHNKXEX

SEQ ID NO: 15379 - protein, 39 aa, Artificial Sequence
  Non-cyclic GFR-binding peptide
  MOD_RES (5)..(39): Xaa is C or S
  MOD_RES (19)..(20)..(21)..(22)..(23): Xaa is A or G
  MOD_RES (24)..(25)..(26)..(27): Xaa is A or G or absent
EGLEXVPTGQRSVKMAKVXXXXXXXXXKEVQVLEEHSQX

SEQ ID NO: 15380 - protein, 43 aa, Artificial Sequence
  Non-cyclic GFR-binding peptide
  MOD_RES (6)..(40)..(42): Xaa is C or S
  MOD_RES (20)..(21)..(22)..(23)..(24): Xaa is A or G
  MOD_RES (25)..(26)..(27)..(28): Xaa is A or G or absent
DEGLEXVPTEESNITMQIMXXXXXXXXXLGEMSFLQHNKXEXR

SEQ ID NO: 15381 - protein, 35 aa, Artificial Sequence
  Non-cyclic GFR-binding peptide
  MOD_RES (1)..(35): Xaa is C or S
XVPTGQRPVQMRKIRIKPHQGQHKKATVLEEHSQX

SEQ ID NO: 15382 - protein, 38 aa, Artificial Sequence
  Non-cyclic GFR-binding peptide
  MOD_RES (37)..(37): Xaa is C or S
RPTQVQLRSVKVAKVEIVRKKPIFKEVQVTLEDHLAXK

SEQ ID NO: 15383 - protein, 40 aa, Artificial Sequence
  Non-cyclic GFR-binding peptide
  MOD_RES (2)..(39): Xaa is C or S
  MOD_RES (18)..(19)..(20)..(21)..(22): Xaa is A or G
  MOD_RES (23)..(24)..(25)..(26): Xaa is A or G or absent
QXRPTQVQLSNITVQIMXXXXXXXXXLGEMSTLEDHLAXK

SEQ ID NO: 15384 - protein, 39 aa, Artificial Sequence
  Non-cyclic GFR-binding peptide
  MOD_RES (7)..(7): Xaa is C or S
  MOD_RES (21)..(22)..(23)..(24)..(25): Xaa is A or G
  MOD_RES (26)..(27)..(28)..(29): Xaa is A or G or absent
NDEGLEXVPTGQSNITMQIMXXXXXXXXXIGEMSLEEHS

SEQ ID NO: 15385 - protein, 40 aa, Artificial Sequence
  Non-cyclic GFR-binding peptide
  MOD_RES (37)..(39): Xaa is C or S
  MOD_RES (16)..(17)..(18)..(19)..(20): Xaa is A or G
  MOD_RES (21)..(22)..(23)..(24): Xaa is A or G or absent
RPTQVQLSNITVQIMXXXXXXXXXIGEMSTLEDHLAXKXE

SEQ ID NO: 15386 - protein, 32 aa, Artificial Sequence; identical to SEQ ID NO: 1153
  Non-cyclic GFR-binding peptide

SEQ ID NO: 15387 - protein, 38 aa, Artificial Sequence
  Non-cyclic GFR-binding peptide
  MOD_RES (36)..(38): Xaa is C or S
PSRVHHSNITVQIMEYVRKKPKLLGEMSRLEEHLEXAX

SEQ ID NO: 15388 - protein, 39 aa, Artificial Sequence
  Non-cyclic GFR-binding peptide
  MOD_RES (6)..(6): Xaa is C or S
  MOD_RES (20)..(21)..(22)..(23)..(24): Xaa is A or G
  MOD_RES (25)..(26)..(27)..(28): Xaa is A or G or absent
DEGLEXVPTEERPVQMRKIXXXXXXXXXKKATVFLQHNK

SEQ ID NO: 15389 - protein, 34 aa, Artificial Sequence
  Non-cyclic GFR-binding peptide
  MOD_RES (2)..(2): Xaa is C or S
EXVPTEERSVKMAKVRIKPHQGQHKEVQVFLQHN

SEQ ID NO: 15390 - protein, 38 aa, Artificial Sequence
  Non-cyclic GFR-binding peptide
  MOD_RES (36)..(38): Xaa is C or S
  MOD_RES (15)..(16)..(17)..(18)..(19): Xaa is A or G
  MOD_RES (20)..(21)..(22)..(23): Xaa is A or G or absent
PTQVQLSNITVQIMXXXXXXXXXIGEMSTLEDHLAXKX

SEQ ID NO: 15391 - protein, 35 aa, Artificial Sequence
  Non-cyclic GFR-binding peptide
  MOD_RES (34)..(34): Xaa is C or S
  MOD_RES (14)..(15)..(16)..(17)..(18): Xaa is A or G
  MOD_RES (19)..(20)..(21)..(22): Xaa is A or G or absent
VPTGQRPVQMRKIXXXXXXXXXKKATVLEEHSQXE

SEQ ID NO: 15392 - protein, 36 aa, Artificial Sequence
  Non-cyclic GFR-binding peptide
QPSRVHHRPVQVRKIEYVRKKPKLKKATVRLEEHLE

SEQ ID NO: 15393 - protein, 36 aa, Artificial Sequence
  Non-cyclic GFR-binding peptide
  MOD_RES (36)..(36): Xaa is C or S
PSRVHHRPVQVRKIEYVRKKPKLKKATVRLEEHLEX

SEQ ID NO: 15394 - protein, 38 aa, Artificial Sequence
  Non-cyclic GFR-binding peptide
  MOD_RES (4)..(38): Xaa is C or S
  MOD_RES (18)..(19)..(20)..(21)..(22): Xaa is A or G
  MOD_RES (23)..(24)..(25)..(26): Xaa is A or G or absent
GLEXVPTEERPVQMRKIXXXXXXXXXKKATVFLQHNKX

SEQ ID NO: 15395 - protein, 33 aa, Artificial Sequence
  Non-cyclic GFR-binding peptide
PSRVHHRPVQVRKIEYVRKKPKLKKATVRLEEH

SEQ ID NO: 15396 - protein, 35 aa, Artificial Sequence
  Non-cyclic GFR-binding peptide
  MOD_RES (3)..(3): Xaa is C or S
LEXVPTGQRSVKMAKVRIKPHQGQHKEVQVLEEHS

SEQ ID NO: 15397 - protein, 32 aa, Artificial Sequence
  Non-cyclic GFR-binding peptide
  MOD_RES (14)..(15)..(16)..(17)..(18): Xaa is A or G
  MOD_RES (19)..(20)..(21)..(22): Xaa is A or G or absent
VPTGQSNITMQIMXXXXXXXXXIGEMSLEEHS

SEQ ID NO: 15398 - protein, 34 aa, Artificial Sequence
  Non-cyclic GFR-binding peptide
  MOD_RES (1)..(1): Xaa is C or S
XVPTEERPVQMRKIRIKPHQGQHKKATVFLQHNK

SEQ ID NO: 15399 - protein, 35 aa, Artificial Sequence
  Non-cyclic GFR-binding peptide
  MOD_RES (35)..(35): Xaa is C or S
  MOD_RES (14)..(15)..(16)..(17)..(18): Xaa is A or G
  MOD_RES (19)..(20)..(21)..(22): Xaa is A or G or absent
SRVHHRPVQVRKIXXXXXXXXXKKATVRLEEHLEX

SEQ ID NO: 15400 - protein, 36 aa, Artificial Sequence
  Non-cyclic GFR-binding peptide
RPTQVQLSNITVQIMEIVRKKPIFLGEMSTLEDHLA

SEQ ID NO: 15401 - protein, 44 aa, Artificial Sequence
  Non-cyclic GFR-binding peptide
  MOD_RES (4)..(41)..(43): Xaa is C or S
NVQXRPTQVQLRSVKVAKVEIVRKKPIFKEVQVTLEDHLAXKXE

SEQ ID NO: 15402 - protein, 37 aa, Artificial Sequence
  Non-cyclic GFR-binding peptide
  MOD_RES (5)..(5): Xaa is C or S
  MOD_RES (19)..(20)..(21)..(22)..(23): Xaa is A or G
  MOD_RES (24)..(25)..(26)..(27): Xaa is A or G or absent
EGLEXVPTGQRPVQMRKIXXXXXXXXXKKATVLEEHS

SEQ ID NO: 15403 - protein, 43 aa, Artificial Sequence
  Non-cyclic GFR-binding peptide
  MOD_RES (5)..(42): Xaa is C or S
  MOD_RES (21)..(22)..(23)..(24)..(25): Xaa is A or G
  MOD_RES (26)..(27)..(28)..(29): Xaa is A or G or absent
RNVQXRPTQVQLSNITVQIMXXXXXXXXXIGEMSTLEDHLAXK

SEQ ID NO: 15404 - protein, 36 aa, Artificial Sequence
  Non-cyclic GFR-binding peptide
  MOD_RES (2)..(36): Xaa is C or S
  MOD_RES (16)..(17)..(18)..(19)..(20): Xaa is A or G
  MOD_RES (21)..(22)..(23)..(24): Xaa is A or G or absent
EXVPTGQRSVKMAKVXXXXXXXXXKEVQVLEEHSQX

SEQ ID NO: 15405 - protein, 44 aa, Artificial Sequence
  Non-cyclic GFR-binding peptide
  MOD_RES (4)..(41)..(43): Xaa is C or S
SVKXQPSRVHHSNITVQIMEYVRKKPKLLGEMSRLEEHLEXAXA

SEQ ID NO: 15406 - protein, 40 aa, Artificial Sequence
  Non-cyclic GFR-binding peptide
  MOD_RES (4)..(4): Xaa is C or S
NVQXRPTQVQLRSVKVAKVEIVRKKPIFKEVQVTLEDHLA

SEQ ID NO: 15407 - protein, 38 aa, Artificial Sequence
  Non-cyclic GFR-binding peptide
  MOD_RES (3)..(3): Xaa is C or S
  MOD_RES (19)..(20)..(21)..(22)..(23): Xaa is A or G
  MOD_RES (24)..(25)..(26)..(27): Xaa is A or G or absent
VQXRPTQVQLRSVKVAKVXXXXXXXXXKEVQVTLEDHL

SEQ ID NO: 15408 - protein, 36 aa, Artificial Sequence
  Non-cyclic GFR-binding peptide
  MOD_RES (34)..(36): Xaa is C or S
  MOD_RES (14)..(15)..(16)..(17)..(18): Xaa is A or G
  MOD_RES (19)..(20)..(21)..(22): Xaa is A or G or absent
VPTEERSVKMAKVXXXXXXXXXKEVQVFLQHNKXEX

SEQ ID NO: 15409 - protein, 41 aa, Artificial Sequence
  Non-cyclic GFR-binding peptide
  MOD_RES (3)..(40): Xaa is C or S
VKXQPSRVHHRPVQVRKIEYVRKKPKLKKATVRLEEHLEXA

SEQ ID NO: 15410 - protein, 36 aa, Artificial Sequence
  Non-cyclic GFR-binding peptide
  MOD_RES (2)..(2): Xaa is C or S
  MOD_RES (18)..(19)..(20)..(21)..(22): Xaa is A or G
  MOD_RES (23)..(24)..(25)..(26): Xaa is A or G or absent
KXQPSRVHHSNITVQIMXXXXXXXXXIGEMSRLEEH

SEQ ID NO: 15411 - protein, 41 aa, Artificial Sequence
  Non-cyclic GFR-binding peptide
  MOD_RES (1)..(38)..(40): Xaa is C or S
XQPSRVHHSNITVQIMEYVRKKPKLLGEMSRLEEHLEXAXA

SEQ ID NO: 15412 - protein, 44 aa, Artificial Sequence
  Non-cyclic GFR-binding peptide
  MOD_RES (5)..(42)..(44): Xaa is C or S
  MOD_RES (21)..(22)..(23)..(24)..(25): Xaa is A or G
  MOD_RES (26)..(27)..(28)..(29): Xaa is A or G or absent
SSVKXQPSRVHHRPVQVRKIXXXXXXXXXKKATVRLEEHLEXAX

SEQ ID NO: 15413 - protein, 39 aa, Artificial Sequence
  Non-cyclic GFR-binding peptide
  MOD_RES (4)..(38): Xaa is C or S
  MOD_RES (18)..(19)..(20)..(21)..(22): Xaa is A or G
  MOD_RES (23)..(24)..(25)..(26): Xaa is A or G or absent
GLEXVPTGQRPVQMRKIXXXXXXXXXKKATVLEEHSQXE

SEQ ID NO: 15414 - protein, 38 aa, Artificial Sequence
  Non-cyclic GFR-binding peptide
  MOD_RES (6)..(6): Xaa is C or S
DEGLEXVPTEERSVKMAKVRIKPHQGQHKEVQVFLQHN

SEQ ID NO: 15415 - protein, 39 aa, Artificial Sequence
  Non-cyclic GFR-binding peptide
  MOD_RES (7)..(7): Xaa is C or S
NDEGLEXVPTGQRPVQMRKIRIKPHQGQHKKATVLEEHS

SEQ ID NO: 15416 - protein, 34 aa, Artificial Sequence
  Non-cyclic GFR-binding peptide
  MOD_RES (2)..(2): Xaa is C or S
EXVPTGQRPVQMRKIRIKPHQGQHKKATVLEEHS

SEQ ID NO: 15417 - protein, 44 aa, Artificial Sequence
  Non-cyclic GFR-binding peptide
  MOD_RES (4)..(41)..(43): Xaa is C or S
  MOD_RES (20)..(21)..(22)..(23)..(24): Xaa is A or G
  MOD_RES (25)..(26)..(27)..(28): Xaa is A or G or absent
SVKXQPSRVHHSNITVQIMXXXXXXXXXIGEMSRLEEHLEXAXA

SEQ ID NO: 15418 - protein, 35 aa, Artificial Sequence
  Non-cyclic GFR-binding peptide
  MOD_RES (3)..(3): Xaa is C or S
  MOD_RES (17)..(18)..(19)..(20)..(21): Xaa is A or G
  MOD_RES (22)..(23)..(24)..(25): Xaa is A or G or absent
LEXVPTGQRPVQMRKIXXXXXXXXXKKATVLEEHS

SEQ ID NO: 15419 - protein, 37 aa, Artificial Sequence
  Non-cyclic GFR-binding peptide
  MOD_RES (35)..(37): Xaa is C or S
SRVHHSNITVQIMEYVRKKPKLIGEMSRLEEHLEXAX

SEQ ID NO: 15420 - protein, 36 aa, Artificial Sequence
  Non-cyclic GFR-binding peptide
  MOD_RES (1)..(35): Xaa is C or S
  MOD_RES (15)..(16)..(17)..(18)..(19): Xaa is A or G
  MOD_RES (20)..(21)..(22)..(23): Xaa is A or G or absent
XVPTEERSVKMAKVXXXXXXXXXKEVQVFLQHNKXE

SEQ ID NO: 15421 - protein, 40 aa, Artificial Sequence
  Non-cyclic GFR-binding peptide
  MOD_RES (7)..(7): Xaa is C or S
NDEGLEXVPTEESNITMQIMRIKPHQGQHLGEMSFLQHNK

SEQ ID NO: 15422 - protein, 37 aa, Artificial Sequence
  Non-cyclic GFR-binding peptide
  MOD_RES (5)..(5): Xaa is C or S
EGLEXVPTGQRSVKMAKVRIKPHQGQHKEVQVLEEHS

SEQ ID NO: 15423 - protein, 40 aa, Artificial Sequence
  Non-cyclic GFR-binding peptide
  MOD_RES (5)..(39): Xaa is C or S
EGLEXVPTGQSNITMQIMRIKPHQGQHIGEMSLEEHSQXE

SEQ ID NO: 15424 - protein, 41 aa, Artificial Sequence
  Non-cyclic GFR-binding peptide
  MOD_RES (6)..(40): Xaa is C or S
DEGLEXVPTGQRSVKMAKVRIKPHQGQHKEVQVLEEHSQXE

SEQ ID NO: 15425 - protein, 41 aa, Artificial Sequence
  Non-cyclic GFR-binding peptide
  MOD_RES (4)..(41): Xaa is C or S
NVQXRPTQVQLSNITVQIMEIVRKKPIFLGEMSTLEDHLAX

SEQ ID NO: 15426 - protein, 43 aa, Artificial Sequence
  Non-cyclic GFR-binding peptide
  MOD_RES (4)..(41)..(43): Xaa is C or S
  MOD_RES (20)..(21)..(22)..(23)..(24): Xaa is A or G
  MOD_RES (25)..(26)..(27)..(28): Xaa is A or G or absent
NVQXRPTQVQLSNITVQIMXXXXXXXXXIGEMSTLEDHLAXKX

SEQ ID NO: 15427 - protein, 41 aa, Artificial Sequence
  Non-cyclic GFR-binding peptide
  MOD_RES (4)..(41): Xaa is C or S
  MOD_RES (20)..(21)..(22)..(23)..(24): Xaa is A or G
  MOD_RES (25)..(26)..(27)..(28): Xaa is A or G or absent
NVQXRPTQVQLSNITVQIMXXXXXXXXXLGEMSTLEDHLAX

SEQ ID NO: 15428 - protein, 43 aa, Artificial Sequence
  Non-cyclic GFR-binding peptide
  MOD_RES (6)..(40)..(42): Xaa is C or S
  MOD_RES (20)..(21)..(22)..(23)..(24): Xaa is A or G
  MOD_RES (25)..(26)..(27)..(28): Xaa is A or G or absent
DEGLEXVPTGQRSVKMAKVXXXXXXXXXKEVQVLEEHSQXEXR

SEQ ID NO: 15429 - protein, 36 aa, Artificial Sequence
  Non-cyclic GFR-binding peptide
  MOD_RES (1)..(1): Xaa is C or S
  MOD_RES (17)..(18)..(19)..(20)..(21): Xaa is A or G
  MOD_RES (22)..(23)..(24)..(25): Xaa is A or G or absent
XRPTQVQLRSVKVAKVXXXXXXXXXKEVQVTLEDHL

SEQ ID NO: 15430 - protein, 33 aa, Artificial Sequence
  Non-cyclic GFR-binding peptide
  MOD_RES (15)..(16)..(17)..(18)..(19): Xaa is A or G
  MOD_RES (20)..(21)..(22)..(23): Xaa is A or G or absent
PSRVHHSNITVQIMXXXXXXXXXLGEMSRLEEH

SEQ ID NO: 15431 - protein, 38 aa, Artificial Sequence
  Non-cyclic GFR-binding peptide
  MOD_RES (5)..(5): Xaa is C or S
  MOD_RES (19)..(20)..(21)..(22)..(23): Xaa is A or G
  MOD_RES (24)..(25)..(26)..(27): Xaa is A or G or absent
EGLEXVPTEERSVKMAKVXXXXXXXXXKEVQVFLQHNK

SEQ ID NO: 15432 - protein, 36 aa, Artificial Sequence
  Non-cyclic GFR-binding peptide
  MOD_RES (36)..(36): Xaa is C or S
PTQVQLSNITVQIMEIVRKKPIFLGEMSTLEDHLAX

SEQ ID NO: 15433 - protein, 42 aa, Artificial Sequence
  Non-cyclic GFR-binding peptide
  MOD_RES (7)..(41): Xaa is C or S
NDEGLEXVPTGQSNITMQIMRIKPHQGQHIGEMSLEEHSQXE

SEQ ID NO: 15434 - protein, 40 aa, Artificial Sequence
  Non-cyclic GFR-binding peptide
  MOD_RES (5)..(5): Xaa is C or S
  MOD_RES (21)..(22)..(23)..(24)..(25): Xaa is A or G
  MOD_RES (26)..(27)..(28)..(29): Xaa is A or G or absent
RNVQXRPTQVQLRSVKVAKVXXXXXXXXXKEVQVTLEDHL

SEQ ID NO: 15435 - protein, 39 aa, Artificial Sequence
  Non-cyclic GFR-binding peptide
  MOD_RES (37)..(39): Xaa is C or S
  MOD_RES (16)..(17)..(18)..(19)..(20): Xaa is A or G
  MOD_RES (21)..(22)..(23)..(24): Xaa is A or G or absent
RPTQVQLSNITVQIMXXXXXXXXXLGEMSTLEDHLAXKX

SEQ ID NO: 15436 - protein, 38 aa, Artificial Sequence
  Non-cyclic GFR-binding peptide
  MOD_RES (36)..(38): Xaa is C or S
PTQVQLSNITVQIMEIVRKKPIFLGEMSTLEDHLAXKX

SEQ ID NO: 15437 - protein, 39 aa, Artificial Sequence
  Non-cyclic GFR-binding peptide
  MOD_RES (3)..(37)..(39): Xaa is C or S
  MOD_RES (17)..(18)..(19)..(20)..(21): Xaa is A or G
  MOD_RES (22)..(23)..(24)..(25): Xaa is A or G or absent
LEXVPTGQRPVQMRKIXXXXXXXXXKKATVLEEHSQXEX

SEQ ID NO: 15438 - protein, 43 aa, Artificial Sequence
  Non-cyclic GFR-binding peptide
  MOD_RES (6)..(40)..(42): Xaa is C or S
  MOD_RES (20)..(21)..(22)..(23)..(24): Xaa is A or G
  MOD_RES (25)..(26)..(27)..(28): Xaa is A or G or absent
DEGLEXVPTGQRPVQMRKIXXXXXXXXXKKATVLEEHSQXEXR

SEQ ID NO: 15439 - protein, 40 aa, Artificial Sequence
  Non-cyclic GFR-binding peptide
  MOD_RES (1)..(38)..(40): Xaa is C or S
  MOD_RES (17)..(18)..(19)..(20)..(21): Xaa is A or G
  MOD_RES (22)..(23)..(24)..(25): Xaa is A or G or absent
XRPTQVQLSNITVQIMXXXXXXXXXIGEMSTLEDHLAXKX

SEQ ID NO: 15440 - protein, 38 aa, Artificial Sequence
  Non-cyclic GFR-binding peptide
  MOD_RES (6)..(6): Xaa is C or S
  MOD_RES (20)..(21)..(22)..(23)..(24): Xaa is A or G
  MOD_RES (25)..(26)..(27)..(28): Xaa is A or G or absent
DEGLEXVPTGQRSVKMAKVXXXXXXXXXKEVQVLEEHS

SEQ ID NO: 15441 - protein, 36 aa, Artificial Sequence
  Non-cyclic GFR-binding peptide
  MOD_RES (2)..(36): Xaa is C or S
  MOD_RES (16)..(17)..(18)..(19)..(20): Xaa is A or G
  MOD_RES (21)..(22)..(23)..(24): Xaa is A or G or absent
EXVPTEERPVQMRKIXXXXXXXXXKKATVFLQHNKX

SEQ ID NO: 15442 - protein, 40 aa, Artificial Sequence
  Non-cyclic GFR-binding peptide
  MOD_RES (4)..(38)..(40): Xaa is C or S
GLEXVPTGQSNITMQIMRIKPHQGQHIGEMSLEEHSQXEX

SEQ ID NO: 15443 - protein, 33 aa, Artificial Sequence
  Non-cyclic GFR-binding peptide
  MOD_RES (14)..(15)..(16)..(17)..(18): Xaa is A or G
  MOD_RES (19)..(20)..(21)..(22): Xaa is A or G or absent
TQVQLSNITVQIMXXXXXXXXXLGEMSTLEDHL

SEQ ID NO: 15444 - protein, 43 aa, Artificial Sequence
  Non-cyclic GFR-binding peptide
  MOD_RES (6)..(40)..(42): Xaa is C or S
DEGLEXVPTGQSNITMQIMRIKPHQGQHIGEMSLEEHSQXEXR

SEQ ID NO: 15445 - protein, 40 aa, Artificial Sequence
  Non-cyclic GFR-binding peptide
  MOD_RES (7)..(7): Xaa is C or S
  MOD_RES (21)..(22)..(23)..(24)..(25): Xaa is A or G
  MOD_RES (26)..(27)..(28)..(29): Xaa is A or G or absent
NDEGLEXVPTGQRPVQMRKIXXXXXXXXXKKATVLEEHSQ

SEQ ID NO: 15446 - protein, 40 aa, Artificial Sequence
  Non-cyclic GFR-binding peptide
  MOD_RES (7)..(7): Xaa is C or S
  MOD_RES (21)..(22)..(23)..(24)..(25): Xaa is A or G
  MOD_RES (26)..(27)..(28)..(29): Xaa is A or G or absent
NDEGLEXVPTGQSNITMQIMXXXXXXXXXIGEMSLEEHSQ

SEQ ID NO: 15447 - protein, 38 aa, Artificial Sequence
  Non-cyclic GFR-binding peptide
  MOD_RES (4)..(4): Xaa is C or S
NVQXRPTQVQLSNITVQIMEIVRKKPIFIGEMSTLEDH

SEQ ID NO: 15448 - protein, 36 aa, Artificial Sequence
  Non-cyclic GFR-binding peptide
  MOD_RES (2)..(36): Xaa is C or S
  MOD_RES (16)..(17)..(18)..(19)..(20): Xaa is A or G
  MOD_RES (21)..(22)..(23)..(24): Xaa is A or G or absent
EXVPTGQRPVQMRKIXXXXXXXXXKKATVLEEHSQX

SEQ ID NO: 15449 - protein, 36 aa, Artificial Sequence
  Non-cyclic GFR-binding peptide
  MOD_RES (1)..(35): Xaa is C or S
  MOD_RES (15)..(16)..(17)..(18)..(19): Xaa is A or G
  MOD_RES (20)..(21)..(22)..(23): Xaa is A or G or absent
XVPTEESNITMQIMXXXXXXXXXLGEMSFLQHNKXE

SEQ ID NO: 15450 - protein, 35 aa, Artificial Sequence
  Non-cyclic GFR-binding peptide
  MOD_RES (35)..(35): Xaa is C or S
SRVHHSNITVQIMEYVRKKPKLLGEMSRLEEHLEX

SEQ ID NO: 15451 - protein, 41 aa, Artificial Sequence
  Non-cyclic GFR-binding peptide
  MOD_RES (5)..(39)..(41): Xaa is C or S
EGLEXVPTGQSNITMQIMRIKPHQGQHIGEMSLEEHSQXEX

SEQ ID NO: 15452 - protein, 38 aa, Artificial Sequence
  Non-cyclic GFR-binding peptide
  MOD_RES (35)..(37): Xaa is C or S
  MOD_RES (14)..(15)..(16)..(17)..(18): Xaa is A or G
  MOD_RES (19)..(20)..(21)..(22): Xaa is A or G or absent
TQVQLSNITVQIMXXXXXXXXXLGEMSTLEDHLAXKXE

SEQ ID NO: 15453 - protein, 39 aa, Artificial Sequence
  Non-cyclic GFR-binding peptide
  MOD_RES (5)..(5): Xaa is C or S
RNVQXRPTQVQLSNITVQIMEIVRKKPIFIGEMSTLEDH

SEQ ID NO: 15454 - protein, 40 aa, Artificial Sequence
  Non-cyclic GFR-binding peptide
  MOD_RES (2)..(39): Xaa is C or S
QXRPTQVQLSNITVQIMEIVRKKPIFLGEMSTLEDHLAXK

SEQ ID NO: 15455 - protein, 38 aa, Artificial Sequence
  Non-cyclic GFR-binding peptide
  MOD_RES (37)..(37): Xaa is C or S
QPSRVHHSNITVQIMEYVRKKPKLIGEMSRLEEHLEXA

SEQ ID NO: 15456 - protein, 38 aa, Artificial Sequence
  Non-cyclic GFR-binding peptide
  MOD_RES (2)..(36)..(38): Xaa is C or S
  MOD_RES (16)..(17)..(18)..(19)..(20): Xaa is A or G
  MOD_RES (21)..(22)..(23)..(24): Xaa is A or G or absent
EXVPTGQSNITMQIMXXXXXXXXXIGEMSLEEHSQXEX

SEQ ID NO: 15457 - protein, 39 aa, Artificial Sequence
  Non-cyclic GFR-binding peptide
  MOD_RES (2)..(39): Xaa is C or S
  MOD_RES (18)..(19)..(20)..(21)..(22): Xaa is A or G
  MOD_RES (23)..(24)..(25)..(26): Xaa is A or G or absent
QXRPTQVQLRSVKVAKVXXXXXXXXXKEVQVTLEDHLAX

SEQ ID NO: 15458 - protein, 39 aa, Artificial Sequence
  Non-cyclic GFR-binding peptide
  MOD_RES (5)..(5): Xaa is C or S
SSVKXQPSRVHHSNITVQIMEYVRKKPKLIGEMSRLEEH

SEQ ID NO: 15459 - protein, 40 aa, Artificial Sequence
  Non-cyclic GFR-binding peptide
  MOD_RES (5)..(5): Xaa is C or S
SSVKXQPSRVHHSNITVQIMEYVRKKPKLLGEMSRLEEHL

SEQ ID NO: 15460 - protein, 40 aa, Artificial Sequence
  Non-cyclic GFR-binding peptide
  MOD_RES (1)..(38)..(40): Xaa is C or S
XRPTQVQLSNITVQIMEIVRKKPIFLGEMSTLEDHLAXKX

SEQ ID NO: 15461 - protein, 38 aa, Artificial Sequence
  Non-cyclic GFR-binding peptide
  MOD_RES (1)..(38): Xaa is C or S
  MOD_RES (17)..(18)..(19)..(20)..(21): Xaa is A or G
  MOD_RES (22)..(23)..(24)..(25): Xaa is A or G or absent
XRPTQVQLSNITVQIMXXXXXXXXXLGEMSTLEDHLAX

SEQ ID NO: 15462 - protein, 41 aa, Artificial Sequence
  Non-cyclic GFR-binding peptide
  MOD_RES (1)..(38)..(40): Xaa is C or S
XRPTQVQLSNITVQIMEIVRKKPIFLGEMSTLEDHLAXKXE

SEQ ID NO: 15463 - protein, 37 aa, Artificial Sequence
  Non-cyclic GFR-binding peptide
  MOD_RES (1)..(35)..(37): Xaa is C or S
  MOD_RES (15)..(16)..(17)..(18)..(19): Xaa is A or G
  MOD_RES (20)..(21)..(22)..(23): Xaa is A or G or absent
XVPTGQSNITMQIMXXXXXXXXXIGEMSLEEHSQXEX

SEQ ID NO: 15464 - protein, 37 aa, Artificial Sequence
  Non-cyclic GFR-binding peptide
  MOD_RES (1)..(1): Xaa is C or S
XRPTQVQLSNITVQIMEIVRKKPIFLGEMSTLEDHLA

SEQ ID NO: 15465 - protein, 33 aa, Artificial Sequence
  Non-cyclic GFR-binding peptide
  MOD_RES (14)..(15)..(16)..(17)..(18): Xaa is A or G
  MOD_RES (19)..(20)..(21)..(22): Xaa is A or G or absent
VPTEESNITMQIMXXXXXXXXXLGEMSFLQHNK

SEQ ID NO: 15466 - protein, 42 aa, Artificial Sequence
  Non-cyclic GFR-binding peptide
  MOD_RES (7)..(41): Xaa is C or S
NDEGLEXVPTEERPVQMRKIRIKPHQGQHKKATVFLQHNKXE

SEQ ID NO: 15467 - protein, 39 aa, Artificial Sequence
  Non-cyclic GFR-binding peptide
  MOD_RES (36)..(38): Xaa is C or S
  MOD_RES (15)..(16)..(17)..(18)..(19): Xaa is A or G
  MOD_RES (20)..(21)..(22)..(23): Xaa is A or G or absent
PSRVHHSNITVQIMXXXXXXXXXLGEMSRLEEHLEXAXA

SEQ ID NO: 15468 - protein, 36 aa, Artificial Sequence
  Non-cyclic GFR-binding peptide
  MOD_RES (35)..(35): Xaa is C or S
SRVHHSNITVQIMEYVRKKPKLIGEMSRLEEHLEXA

SEQ ID NO: 15469 - protein, 33 aa, Artificial Sequence
  Non-cyclic GFR-binding peptide
  MOD_RES (14)..(15)..(16)..(17)..(18): Xaa is A or G
  MOD_RES (19)..(20)..(21)..(22): Xaa is A or G or absent
SRVHHSNITVQIMXXXXXXXXXLGEMSRLEEHL

SEQ ID NO: 15470 - protein, 38 aa, Artificial Sequence
  Non-cyclic GFR-binding peptide
  MOD_RES (2)..(2): Xaa is C or S
  MOD_RES (18)..(19)..(20)..(21)..(22): Xaa is A or G
  MOD_RES (23)..(24)..(25)..(26): Xaa is A or G or absent
QXRPTQVQLSNITVQIMXXXXXXXXXLGEMSTLEDHLA

SEQ ID NO: 15471 - protein, 41 aa, Artificial Sequence
  Non-cyclic GFR-binding peptide
  MOD_RES (2)..(39)..(41): Xaa is C or S
QXRPTQVQLSNITVQIMEIVRKKPIFIGEMSTLEDHLAXKX

SEQ ID NO: 15472 - protein, 34 aa, Artificial Sequence
  Non-cyclic GFR-binding peptide
  MOD_RES (34)..(34): Xaa is C or S
VPTEESNITMQIMRIKPHQGQHLGEMSFLQHNKX

SEQ ID NO: 15473 - protein, 39 aa, Artificial Sequence
  Non-cyclic GFR-binding peptide
  MOD_RES (5)..(5): Xaa is C or S
RNVQXRPTQVQLRSVKVAKVEIVRKKPIFKEVQVTLEDH

SEQ ID NO: 15474 - protein, 42 aa, Artificial Sequence
  Non-cyclic GFR-binding peptide
  MOD_RES (6)..(40)..(42): Xaa is C or S
  MOD_RES (20)..(21)..(22)..(23)..(24): Xaa is A or G
  MOD_RES (25)..(26)..(27)..(28): Xaa is A or G or absent
DEGLEXVPTGQSNITMQIMXXXXXXXXXIGEMSLEEHSQXEX

SEQ ID NO: 15475 - protein, 39 aa, Artificial Sequence
  Non-cyclic GFR-binding peptide
  MOD_RES (36)..(38): Xaa is C or S
PTQVQLSNITVQIMEIVRKKPIFLGEMSTLEDHLAXKXE

SEQ ID NO: 15476 - protein, 34 aa, Artificial Sequence
  Non-cyclic GFR-binding peptide
RPTQVQLRSVKVAKVEIVRKKPIFKEVQVTLEDH

SEQ ID NO: 15477 - protein, 42 aa, Artificial Sequence
  Non-cyclic GFR-binding peptide
  MOD_RES (2)..(39)..(41): Xaa is C or S
  MOD_RES (18)..(19)..(20)..(21)..(22): Xaa is A or G
  MOD_RES (23)..(24)..(25)..(26): Xaa is A or G or absent
QXRPTQVQLRSVKVAKVXXXXXXXXXKEVQVTLEDHLAXKXE

SEQ ID NO: 15478 - protein, 34 aa, Artificial Sequence
  Non-cyclic GFR-binding peptide
  MOD_RES (1)..(1): Xaa is C or S
XVPTEESNITMQIMRIKPHQGQHLGEMSFLQHNK

SEQ ID NO: 15479 - protein, 38 aa, Artificial Sequence
  Non-cyclic GFR-binding peptide
  MOD_RES (1)..(38): Xaa is C or S
XQPSRVHHSNITVQIMEYVRKKPKLIGEMSRLEEHLEX

SEQ ID NO: 15480 - protein, 38 aa, Artificial Sequence
  Non-cyclic GFR-binding peptide
  MOD_RES (4)..(38): Xaa is C or S
GLEXVPTGQSNITMQIMRIKPHQGQHIGEMSLEEHSQX

SEQ ID NO: 15481 - protein, 39 aa, Artificial Sequence
  Non-cyclic GFR-binding peptide
  MOD_RES (1)..(38): Xaa is C or S
XRPTQVQLRSVKVAKVEIVRKKPIFKEVQVTLEDHLAXK

SEQ ID NO: 15482 - protein, 37 aa, Artificial Sequence
  Non-cyclic GFR-binding peptide
  MOD_RES (4)..(4): Xaa is C or S
GLEXVPTGQRSVKMAKVRIKPHQGQHKEVQVLEEHSQ

SEQ ID NO: 15483 - protein, 34 aa, Artificial Sequence
  Non-cyclic GFR-binding peptide
  MOD_RES (2)..(2): Xaa is C or S
EXVPTGQSNITMQIMRIKPHQGQHIGEMSLEEHS

SEQ ID NO: 15484 - protein, 42 aa, Artificial Sequence
  Non-cyclic GFR-binding peptide
  MOD_RES (5)..(39)..(41): Xaa is C or S
EGLEXVPTEERPVQMRKIRIKPHQGQHKKATVFLQHNKXEXR

SEQ ID NO: 15485 - protein, 36 aa, Artificial Sequence
  Non-cyclic GFR-binding peptide
  MOD_RES (2)..(2): Xaa is C or S
  MOD_RES (18)..(19)..(20)..(21)..(22): Xaa is A or G
  MOD_RES (23)..(24)..(25)..(26): Xaa is A or G or absent
KXQPSRVHHRPVQVRKIXXXXXXXXXKKATVRLEEH

SEQ ID NO: 15486 - protein, 40 aa, Artificial Sequence
  Non-cyclic GFR-binding peptide
  MOD_RES (5)..(5): Xaa is C or S
  MOD_RES (21)..(22)..(23)..(24)..(25): Xaa is A or G
  MOD_RES (26)..(27)..(28)..(29): Xaa is A or G or absent
SSVKXQPSRVHHSNITVQIMXXXXXXXXXIGEMSRLEEHL

SEQ ID NO: 15487 - protein, 39 aa, Artificial Sequence
  Non-cyclic GFR-binding peptide
  MOD_RES (7)..(7): Xaa is C or S
  MOD_RES (21)..(22)..(23)..(24)..(25): Xaa is A or G
  MOD_RES (26)..(27)..(28)..(29): Xaa is A or G or absent
NDEGLEXVPTEESNITMQIMXXXXXXXXXLGEMSFLQHN

SEQ ID NO: 15488 - protein, 41 aa, Artificial Sequence
  Non-cyclic GFR-binding peptide
  MOD_RES (2)..(39)..(41): Xaa is C or S
KXQPSRVHHSNITVQIMEYVRKKPKLIGEMSRLEEHLEXAX

SEQ ID NO: 15489 - protein, 37 aa, Artificial Sequence
  Non-cyclic GFR-binding peptide
  MOD_RES (3)..(37): Xaa is C or S
LEXVPTGQSNITMQIMRIKPHQGQHIGEMSLEEHSQX

SEQ ID NO: 15490 - protein, 35 aa, Artificial Sequence
  Non-cyclic GFR-binding peptide
  MOD_RES (1)..(35): Xaa is C or S
XVPTEESNITMQIMRIKPHQGQHLGEMSFLQHNKX

SEQ ID NO: 15491 - protein, 35 aa, Artificial Sequence
  Non-cyclic GFR-binding peptide
  MOD_RES (3)..(3): Xaa is C or S
  MOD_RES (17)..(18)..(19)..(20)..(21): Xaa is A or G
  MOD_RES (22)..(23)..(24)..(25): Xaa is A or G or absent
LEXVPTGQSNITMQIMXXXXXXXXXIGEMSLEEHS

SEQ ID NO: 15492 - protein, 39 aa, Artificial Sequence
  Non-cyclic GFR-binding peptide
  MOD_RES (4)..(38): Xaa is C or S
GLEXVPTGQSNITMQIMRIKPHQGQHIGEMSLEEHSQXE

SEQ ID NO: 15493 - protein, 38 aa, Artificial Sequence
  Non-cyclic GFR-binding peptide
  MOD_RES (2)..(36)..(38): Xaa is C or S
EXVPTEERPVQMRKIRIKPHQGQHKKATVFLQHNKXEX

SEQ ID NO: 15494 - protein, 43 aa, Artificial Sequence
  Non-cyclic GFR-binding peptide
  MOD_RES (5)..(42): Xaa is C or S
  MOD_RES (21)..(22)..(23)..(24)..(25): Xaa is A or G
  MOD_RES (26)..(27)..(28)..(29): Xaa is A or G or absent
SSVKXQPSRVHHSNITVQIMXXXXXXXXXIGEMSRLEEHLEXA

SEQ ID NO: 15495 - protein, 42 aa, Artificial Sequence
  Non-cyclic GFR-binding peptide
  MOD_RES (3)..(40)..(42): Xaa is C or S
  MOD_RES (19)..(20)..(21)..(22)..(23): Xaa is A or G
  MOD_RES (24)..(25)..(26)..(27): Xaa is A or G or absent
VQXRPTQVQLRSVKVAKVXXXXXXXXXKEVQVTLEDHLAXKX

SEQ ID NO: 15496 - protein, 42 aa, Artificial Sequence
  Non-cyclic GFR-binding peptide
  MOD_RES (5)..(42): Xaa is C or S
RNVQXRPTQVQLRSVKVAKVEIVRKKPIFKEVQVTLEDHLAX

SEQ ID NO: 15497 - protein, 45 aa, Artificial Sequence
  Non-cyclic GFR-binding peptide
  MOD_RES (5)..(42)..(44): Xaa is C or S
  MOD_RES (21)..(22)..(23)..(24)..(25): Xaa is A or G
  MOD_RES (26)..(27)..(28)..(29): Xaa is A or G or absent
RNVQXRPTQVQLSNITVQIMXXXXXXXXXIGEMSTLEDHLAXKXE

SEQ ID NO: 15498 - protein, 37 aa, Artificial Sequence
  Non-cyclic GFR-binding peptide
  MOD_RES (37)..(37): Xaa is C or S
  MOD_RES (16)..(17)..(18)..(19)..(20): Xaa is A or G
  MOD_RES (21)..(22)..(23)..(24): Xaa is A or G or absent
QPSRVHHSNITVQIMXXXXXXXXXIGEMSRLEEHLEX

SEQ ID NO: 15499 - protein, 41 aa, Artificial Sequence
  Non-cyclic GFR-binding peptide
  MOD_RES (6)..(40): Xaa is C or S
  MOD_RES (20)..(21)..(22)..(23)..(24): Xaa is A or G
  MOD_RES (25)..(26)..(27)..(28): Xaa is A or G or absent
DEGLEXVPTEESNITMQIMXXXXXXXXXLGEMSFLQHNKXE

SEQ ID NO: 15500 - protein, 42 aa, Artificial Sequence
  Non-cyclic GFR-binding peptide
  MOD_RES (5)..(39)..(41): Xaa is C or S
EGLEXVPTEESNITMQIMRIKPHQGQHLGEMSFLQHNKXEXR

SEQ ID NO: 15501 - protein, 39 aa, Artificial Sequence
  Non-cyclic GFR-binding peptide
  MOD_RES (3)..(3): Xaa is C or S
VKXQPSRVHHSNITVQIMEYVRKKPKLLGEMSRLEEHLE

SEQ ID NO: 15502 - protein, 35 aa, Artificial Sequence
  Non-cyclic GFR-binding peptide
  MOD_RES (15)..(16)..(17)..(18)..(19): Xaa is A or G
  MOD_RES (20)..(21)..(22)..(23): Xaa is A or G or absent
PSRVHHRPVQVRKIXXXXXXXXXKKATVRLEEHLE

SEQ ID NO: 15503 - protein, 39 aa, Artificial Sequence
  Non-cyclic GFR-binding peptide
  MOD_RES (5)..(39): Xaa is C or S
  MOD_RES (19)..(20)..(21)..(22)..(23): Xaa is A or G
  MOD_RES (24)..(25)..(26)..(27): Xaa is A or G or absent
EGLEXVPTEERPVQMRKIXXXXXXXXXKKATVFLQHNKX

SEQ ID NO: 15504 - protein, 36 aa, Artificial Sequence
  Non-cyclic GFR-binding peptide
  MOD_RES (3)..(3): Xaa is C or S
LEXVPTEERPVQMRKIRIKPHQGQHKKATVFLQHNK

SEQ ID NO: 15505 - protein, 34 aa, Artificial Sequence
  Non-cyclic GFR-binding peptide
RPTQVQLSNITVQIMEIVRKKPIFLGEMSTLEDH

SEQ ID NO: 15506 - protein, 42 aa, Artificial Sequence
  Non-cyclic GFR-binding peptide
  MOD_RES (7)..(41): Xaa is C or S
  MOD_RES (21)..(22)..(23)..(24)..(25): Xaa is A or G
  MOD_RES (26)..(27)..(28)..(29): Xaa is A or G or absent
NDEGLEXVPTGQRPVQMRKIXXXXXXXXXKKATVLEEHSQXE

SEQ ID NO: 15507 - protein, 36 aa, Artificial Sequence
  Non-cyclic GFR-binding peptide
  MOD_RES (1)..(35): Xaa is C or S
XVPTGQRPVQMRKIRIKPHQGQHKKATVLEEHSQXE

SEQ ID NO: 15508 - protein, 40 aa, Artificial Sequence
  Non-cyclic GFR-binding peptide
  MOD_RES (4)..(4): Xaa is C or S
NVQXRPTQVQLSNITVQIMEIVRKKPIFIGEMSTLEDHLA

SEQ ID NO: 15509 - protein, 42 aa, Artificial Sequence
  Non-cyclic GFR-binding peptide
  MOD_RES (2)..(39)..(41): Xaa is C or S
QXRPTQVQLSNITVQIMEIVRKKPIFLGEMSTLEDHLAXKXE

SEQ ID NO: 15510 - protein, 35 aa, Artificial Sequence
  Non-cyclic GFR-binding peptide
  MOD_RES (35)..(35): Xaa is C or S
TQVQLSNITVQIMEIVRKKPIFIGEMSTLEDHLAX

SEQ ID NO: 15511 - protein, 38 aa, Artificial Sequence
  Non-cyclic GFR-binding peptide
  MOD_RES (5)..(5): Xaa is C or S
EGLEXVPTEERPVQMRKIRIKPHQGQHKKATVFLQHNK

SEQ ID NO: 15512 - protein, 35 aa, Artificial Sequence
  Non-cyclic GFR-binding peptide
  MOD_RES (34)..(34): Xaa is C or S
VPTGQRSVKMAKVRIKPHQGQHKEVQVLEEHSQXE

SEQ ID NO: 15513 - protein, 39 aa, Artificial Sequence
  Non-cyclic GFR-binding peptide
  MOD_RES (36)..(38): Xaa is C or S
  MOD_RES (15)..(16)..(17)..(18)..(19): Xaa is A or G
  MOD_RES (20)..(21)..(22)..(23): Xaa is A or G or absent
PTQVQLRSVKVAKVXXXXXXXXXKEVQVTLEDHLAXKXE

SEQ ID NO: 15514 - protein, 44 aa, Artificial Sequence
  Non-cyclic GFR-binding peptide
  MOD_RES (4)..(41)..(43): Xaa is C or S
  MOD_RES (20)..(21)..(22)..(23)..(24): Xaa is A or G
  MOD_RES (25)..(26)..(27)..(28): Xaa is A or G or absent
NVQXRPTQVQLSNITVQIMXXXXXXXXXLGEMSTLEDHLAXKXE

SEQ ID NO: 15515 - protein, 37 aa, Artificial Sequence
  Non-cyclic GFR-binding peptide
  MOD_RES (5)..(5): Xaa is C or S
  MOD_RES (19)..(20)..(21)..(22)..(23): Xaa is A or G
  MOD_RES (24)..(25)..(26)..(27): Xaa is A or G or absent
EGLEXVPTEERPVQMRKIXXXXXXXXXKKATVFLQHN

SEQ ID NO: 15516 - protein, 39 aa, Artificial Sequence
  Non-cyclic GFR-binding peptide
  MOD_RES (2)..(36)..(38): Xaa is C or S
  MOD_RES (16)..(17)..(18)..(19)..(20): Xaa is A or G
  MOD_RES (21)..(22)..(23)..(24): Xaa is A or G or absent
EXVPTEERSVKMAKVXXXXXXXXXKEVQVFLQHNKXEXR

SEQ ID NO: 15517 - protein, 40 aa, Artificial Sequence
  Non-cyclic GFR-binding peptide
  MOD_RES (7)..(7): Xaa is C or S
NDEGLEXVPTEERSVKMAKVRIKPHQGQHKEVQVFLQHNK

SEQ ID NO: 15518 - protein, 35 aa, Artificial Sequence
  Non-cyclic GFR-binding peptide
  MOD_RES (2)..(2): Xaa is C or S
EXVPTEERPVQMRKIRIKPHQGQHKKATVFLQHNK

SEQ ID NO: 15519 - protein, 41 aa, Artificial Sequence
  Non-cyclic GFR-binding peptide
  MOD_RES (3)..(40): Xaa is C or S
  MOD_RES (19)..(20)..(21)..(22)..(23): Xaa is A or G
  MOD_RES (24)..(25)..(26)..(27): Xaa is A or G or absent
VQXRPTQVQLSNITVQIMXXXXXXXXXLGEMSTLEDHLAXK

SEQ ID NO: 15520 - protein, 38 aa, Artificial Sequence
  Non-cyclic GFR-binding peptide
  MOD_RES (4)..(38): Xaa is C or S
GLEXVPTEERSVKMAKVRIKPHQGQHKEVQVFLQHNKX

SEQ ID NO: 15521 - protein, 38 aa, Artificial Sequence
  Non-cyclic GFR-binding peptide
  MOD_RES (4)..(4): Xaa is C or S
  MOD_RES (20)..(21)..(22)..(23)..(24): Xaa is A or G
  MOD_RES (25)..(26)..(27)..(28): Xaa is A or G or absent
SVKXQPSRVHHSNITVQIMXXXXXXXXXIGEMSRLEEH

SEQ ID NO: 15522 - protein, 35 aa, Artificial Sequence
  Non-cyclic GFR-binding peptide
  MOD_RES (1)..(1): Xaa is C or S
XRPTQVQLRSVKVAKVEIVRKKPIFKEVQVTLEDH

SEQ ID NO: 15523 - protein, 37 aa, Artificial Sequence
  Non-cyclic GFR-binding peptide
  MOD_RES (36)..(36): Xaa is C or S
  MOD_RES (15)..(16)..(17)..(18)..(19): Xaa is A or G
  MOD_RES (20)..(21)..(22)..(23): Xaa is A or G or absent
PSRVHHSNITVQIMXXXXXXXXXIGEMSRLEEHLEXA

SEQ ID NO: 15524 - protein, 39 aa, Artificial Sequence
  Non-cyclic GFR-binding peptide
  MOD_RES (7)..(7): Xaa is C or S
  MOD_RES (21)..(22)..(23)..(24)..(25): Xaa is A or G
  MOD_RES (26)..(27)..(28)..(29): Xaa is A or G or absent
NDEGLEXVPTGQRPVQMRKIXXXXXXXXXKKATVLEEHS

SEQ ID NO: 15525 - protein, 36 aa, Artificial Sequence
  Non-cyclic GFR-binding peptide
  MOD_RES (1)..(35): Xaa is C or S
XVPTGQRSVKMAKVRIKPHQGQHKEVQVLEEHSQXE

SEQ ID NO: 15526 - protein, 35 aa, Artificial Sequence
  Non-cyclic GFR-binding peptide
  MOD_RES (2)..(2): Xaa is C or S
EXVPTGQRPVQMRKIRIKPHQGQHKKATVLEEHSQ

SEQ ID NO: 15527 - protein, 38 aa, Artificial Sequence
  Non-cyclic GFR-binding peptide
  MOD_RES (5)..(5): Xaa is C or S
  MOD_RES (19)..(20)..(21)..(22)..(23): Xaa is A or G
  MOD_RES (24)..(25)..(26)..(27): Xaa is A or G or absent
EGLEXVPTEESNITMQIMXXXXXXXXXLGEMSFLQHNK

SEQ ID NO: 15528 - protein, 36 aa, Artificial Sequence
  Non-cyclic GFR-binding peptide
  MOD_RES (35)..(35): Xaa is C or S
SRVHHSNITVQIMEYVRKKPKLLGEMSRLEEHLEXA

SEQ ID NO: 15529 - protein, 41 aa, Artificial Sequence
  Non-cyclic GFR-binding peptide
  MOD_RES (5)..(5): Xaa is C or S
  MOD_RES (21)..(22)..(23)..(24)..(25): Xaa is A or G
  MOD_RES (26)..(27)..(28)..(29): Xaa is A or G or absent
SSVKXQPSRVHHSNITVQIMXXXXXXXXXLGEMSRLEEHLE

SEQ ID NO: 15530 - protein, 39 aa, Artificial Sequence
  Non-cyclic GFR-binding peptide
  MOD_RES (3)..(3): Xaa is C or S
  MOD_RES (19)..(20)..(21)..(22)..(23): Xaa is A or G
  MOD_RES (24)..(25)..(26)..(27): Xaa is A or G or absent
VQXRPTQVQLSNITVQIMXXXXXXXXXLGEMSTLEDHLA

SEQ ID NO: 15531 - protein, 38 aa, Artificial Sequence
  Non-cyclic GFR-binding peptide
  MOD_RES (3)..(3): Xaa is C or S
  MOD_RES (19)..(20)..(21)..(22)..(23): Xaa is A or G
  MOD_RES (24)..(25)..(26)..(27): Xaa is A or G or absent
VKXQPSRVHHSNITVQIMXXXXXXXXXLGEMSRLEEHL

SEQ ID NO: 15532 - protein, 38 aa, Artificial Sequence
  Non-cyclic GFR-binding peptide
  MOD_RES (2)..(2): Xaa is C or S
  MOD_RES (18)..(19)..(20)..(21)..(22): Xaa is A or G
  MOD_RES (23)..(24)..(25)..(26): Xaa is A or G or absent
QXRPTQVQLSNITVQIMXXXXXXXXXIGEMSTLEDHLA

SEQ ID NO: 15533 - protein, 35 aa, Artificial Sequence
  Non-cyclic GFR-binding peptide
  MOD_RES (3)..(3): Xaa is C or S
LEXVPTGQRPVQMRKIRIKPHQGQHKKATVLEEHS

SEQ ID NO: 15534 - protein, 41 aa, Artificial Sequence
  Non-cyclic GFR-binding peptide
  MOD_RES (5)..(5): Xaa is C or S
RNVQXRPTQVQLSNITVQIMEIVRKKPIFIGEMSTLEDHLA

SEQ ID NO: 15535 - protein, 32 aa, Artificial Sequence
  Non-cyclic GFR-binding peptide
  MOD_RES (14)..(15)..(16)..(17)..(18): Xaa is A or G
  MOD_RES (19)..(20)..(21)..(22): Xaa is A or G or absent
SRVHHRPVQVRKIXXXXXXXXXKKATVRLEEH

SEQ ID NO: 15536 - protein, 36 aa, Artificial Sequence
  Non-cyclic GFR-binding peptide
  MOD_RES (1)..(1): Xaa is C or S
XRPTQVQLRSVKVAKVEIVRKKPIFKEVQVTLEDHL

SEQ ID NO: 15537 - protein, 36 aa, Artificial Sequence
  Non-cyclic GFR-binding peptide
  MOD_RES (35)..(35): Xaa is C or S
  MOD_RES (14)..(15)..(16)..(17)..(18): Xaa is A or G
  MOD_RES (19)..(20)..(21)..(22): Xaa is A or G or absent
SRVHHSNITVQIMXXXXXXXXXIGEMSRLEEHLEXA

SEQ ID NO: 15538 - protein, 44 aa, Artificial Sequence
  Non-cyclic GFR-binding peptide
  MOD_RES (4)..(41)..(43): Xaa is C or S
  MOD_RES (20)..(21)..(22)..(23)..(24): Xaa is A or G
  MOD_RES (25)..(26)..(27)..(28): Xaa is A or G or absent
SVKXQPSRVHHRPVQVRKIXXXXXXXXXKKATVRLEEHLEXAXA

SEQ ID NO: 15539 - protein, 39 aa, Artificial Sequence
  Non-cyclic GFR-binding peptide
  MOD_RES (2)..(36)..(38): Xaa is C or S
  MOD_RES (16)..(17)..(18)..(19)..(20): Xaa is A or G
  MOD_RES (21)..(22)..(23)..(24): Xaa is A or G or absent
EXVPTGQRPVQMRKIXXXXXXXXXKKATVLEEHSQXEXR

SEQ ID NO: 15540 - protein, 42 aa, Artificial Sequence
  Non-cyclic GFR-binding peptide
  MOD_RES (3)..(40)..(42): Xaa is C or S
VKXQPSRVHHSNITVQIMEYVRKKPKLLGEMSRLEEHLEXAX

SEQ ID NO: 15541 - protein, 34 aa, Artificial Sequence
  Non-cyclic GFR-binding peptide
  MOD_RES (2)..(2): Xaa is C or S
  MOD_RES (16)..(17)..(18)..(19)..(20): Xaa is A or G
  MOD_RES (21)..(22)..(23)..(24): Xaa is A or G or absent
EXVPTEERSVKMAKVXXXXXXXXXKEVQVFLQHN

SEQ ID NO: 15542 - protein, 43 aa, Artificial Sequence
  Non-cyclic GFR-binding peptide
  MOD_RES (3)..(40)..(42): Xaa is C or S
  MOD_RES (19)..(20)..(21)..(22)..(23): Xaa is A or G
  MOD_RES (24)..(25)..(26)..(27): Xaa is A or G or absent
VKXQPSRVHHRPVQVRKIXXXXXXXXXKKATVRLEEHLEXAXA

SEQ ID NO: 15543 - protein, 36 aa, Artificial Sequence
  Non-cyclic GFR-binding peptide
  MOD_RES (2)..(2): Xaa is C or S
QXRPTQVQLSNITVQIMEIVRKKPIFIGEMSTLEDH

SEQ ID NO: 15544 - protein, 40 aa, Artificial Sequence
  Non-cyclic GFR-binding peptide
  MOD_RES (5)..(39): Xaa is C or S
  MOD_RES (19)..(20)..(21)..(22)..(23): Xaa is A or G
  MOD_RES (24)..(25)..(26)..(27): Xaa is A or G or absent
EGLEXVPTEERPVQMRKIXXXXXXXXXKKATVFLQHNKXE

SEQ ID NO: 15545 - protein, 35 aa, Artificial Sequence
  Non-cyclic GFR-binding peptide
  MOD_RES (34)..(34): Xaa is C or S
  MOD_RES (14)..(15)..(16)..(17)..(18): Xaa is A or G
  MOD_RES (19)..(20)..(21)..(22): Xaa is A or G or absent
VPTEERSVKMAKVXXXXXXXXXKEVQVFLQHNKXE

SEQ ID NO: 15546 - protein, 40 aa, Artificial Sequence
  Non-cyclic GFR-binding peptide
  MOD_RES (5)..(39): Xaa is C or S
  MOD_RES (19)..(20)..(21)..(22)..(23): Xaa is A or G
  MOD_RES (24)..(25)..(26)..(27): Xaa is A or G or absent
EGLEXVPTGQRSVKMAKVXXXXXXXXXKEVQVLEEHSQXE

SEQ ID NO: 15547 - protein, 39 aa, Artificial Sequence
  Non-cyclic GFR-binding peptide
  MOD_RES (37)..(39): Xaa is C or S
  MOD_RES (16)..(17)..(18)..(19)..(20): Xaa is A or G
  MOD_RES (21)..(22)..(23)..(24): Xaa is A or G or absent
RPTQVQLRSVKVAKVXXXXXXXXXKEVQVTLEDHLAXKX

SEQ ID NO: 15548 - protein, 36 aa, Artificial Sequence
  Non-cyclic GFR-binding peptide
  MOD_RES (2)..(36): Xaa is C or S
  MOD_RES (16)..(17)..(18)..(19)..(20): Xaa is A or G
  MOD_RES (21)..(22)..(23)..(24): Xaa is A or G or absent
EXVPTEERSVKMAKVXXXXXXXXXKEVQVFLQHNKX

SEQ ID NO: 15549 - protein, 39 aa, Artificial Sequence
  Non-cyclic GFR-binding peptide
  MOD_RES (6)..(6): Xaa is C or S
DEGLEXVPTGQRSVKMAKVRIKPHQGQHKEVQVLEEHSQ

SEQ ID NO: 15550 - protein, 38 aa, Artificial Sequence
  Non-cyclic GFR-binding peptide
  MOD_RES (1)..(35)..(37): Xaa is C or S
XVPTEESNITMQIMRIKPHQGQHLGEMSFLQHNKXEXR

SEQ ID NO: 15551 - protein, 34 aa, Artificial Sequence
  Non-cyclic GFR-binding peptide
  MOD_RES (1)..(1): Xaa is C or S
  MOD_RES (15)..(16)..(17)..(18)..(19): Xaa is A or G
  MOD_RES (20)..(21)..(22)..(23): Xaa is A or G or absent
XVPTEERPVQMRKIXXXXXXXXXKKATVFLQHNK

SEQ ID NO: 15552 - protein, 35 aa, Artificial Sequence
  Non-cyclic GFR-binding peptide
  MOD_RES (16)..(17)..(18)..(19)..(20): Xaa is A or G
  MOD_RES (21)..(22)..(23)..(24): Xaa is A or G or absent
RPTQVQLRSVKVAKVXXXXXXXXXKEVQVTLEDHL

SEQ ID NO: 15553 - protein, 40 aa, Artificial Sequence
  Non-cyclic GFR-binding peptide
  MOD_RES (2)..(39): Xaa is C or S
  MOD_RES (18)..(19)..(20)..(21)..(22): Xaa is A or G
  MOD_RES (23)..(24)..(25)..(26): Xaa is A or G or absent
KXQPSRVHHSNITVQIMXXXXXXXXXLGEMSRLEEHLEXA

SEQ ID NO: 15554 - protein, 44 aa, Artificial Sequence
  Non-cyclic GFR-binding peptide
  MOD_RES (7)..(41)..(43): Xaa is C or S
NDEGLEXVPTEERSVKMAKVRIKPHQGQHKEVQVFLQHNKXEXR

SEQ ID NO: 15555 - protein, 36 aa, Artificial Sequence
  Non-cyclic GFR-binding peptide
  MOD_RES (1)..(1): Xaa is C or S
XQPSRVHHRPVQVRKIEYVRKKPKLKKATVRLEEHL

SEQ ID NO: 15556 - protein, 39 aa, Artificial Sequence
  Non-cyclic GFR-binding peptide
  MOD_RES (4)..(38): Xaa is C or S
GLEXVPTEESNITMQIMRIKPHQGQHLGEMSFLQHNKXE

SEQ ID NO: 15557 - protein, 43 aa, Artificial Sequence
  Non-cyclic GFR-binding peptide
  MOD_RES (3)..(40)..(42): Xaa is C or S
VQXRPTQVQLSNITVQIMEIVRKKPIFIGEMSTLEDHLAXKXE

SEQ ID NO: 15558 - protein, 36 aa, Artificial Sequence
  Non-cyclic GFR-binding peptide
  MOD_RES (2)..(36): Xaa is C or S
EXVPTGQSNITMQIMRIKPHQGQHIGEMSLEEHSQX

SEQ ID NO: 15559 - protein, 42 aa, Artificial Sequence
  Non-cyclic GFR-binding peptide
  MOD_RES (5)..(39)..(41): Xaa is C or S
EGLEXVPTGQSNITMQIMRIKPHQGQHIGEMSLEEHSQXEXR

SEQ ID NO: 15560 - protein, 41 aa, Artificial Sequence
  Non-cyclic GFR-binding peptide
  MOD_RES (4)..(41): Xaa is C or S
  MOD_RES (20)..(21)..(22)..(23)..(24): Xaa is A or G
  MOD_RES (25)..(26)..(27)..(28): Xaa is A or G or absent
SVKXQPSRVHHSNITVQIMXXXXXXXXXIGEMSRLEEHLEX

SEQ ID NO: 15561 - protein, 40 aa, Artificial Sequence
  Non-cyclic GFR-binding peptide
  MOD_RES (5)..(39): Xaa is C or S
  MOD_RES (19)..(20)..(21)..(22)..(23): Xaa is A or G
  MOD_RES (24)..(25)..(26)..(27): Xaa is A or G or absent
EGLEXVPTEESNITMQIMXXXXXXXXXLGEMSFLQHNKXE

SEQ ID NO: 15562 - protein, 44 aa, Artificial Sequence
  Non-cyclic GFR-binding peptide
  MOD_RES (7)..(41)..(43): Xaa is C or S
NDEGLEXVPTEERPVQMRKIRIKPHQGQHKKATVFLQHNKXEXR

SEQ ID NO: 15563 - protein, 37 aa, Artificial Sequence
  Non-cyclic GFR-binding peptide
  MOD_RES (36)..(36): Xaa is C or S
PTQVQLSNITVQIMEIVRKKPIFLGEMSTLEDHLAXK

SEQ ID NO: 15564 - protein, 38 aa, Artificial Sequence
  Non-cyclic GFR-binding peptide
  MOD_RES (3)..(37): Xaa is C or S
  MOD_RES (17)..(18)..(19)..(20)..(21): Xaa is A or G
  MOD_RES (22)..(23)..(24)..(25): Xaa is A or G or absent
LEXVPTGQRSVKMAKVXXXXXXXXXKEVQVLEEHSQXE

SEQ ID NO: 15565 - protein, 43 aa, Artificial Sequence
  Non-cyclic GFR-binding peptide
  MOD_RES (4)..(41)..(43): Xaa is C or S
  MOD_RES (20)..(21)..(22)..(23)..(24): Xaa is A or G
  MOD_RES (25)..(26)..(27)..(28): Xaa is A or G or absent
NVQXRPTQVQLRSVKVAKVXXXXXXXXXKEVQVTLEDHLAXKX

SEQ ID NO: 15566 - protein, 38 aa, Artificial Sequence
  Non-cyclic GFR-binding peptide
  MOD_RES (4)..(38): Xaa is C or S
  MOD_RES (18)..(19)..(20)..(21)..(22): Xaa is A or G
  MOD_RES (23)..(24)..(25)..(26): Xaa is A or G or absent
GLEXVPTEERSVKMAKVXXXXXXXXXKEVQVFLQHNKX

SEQ ID NO: 15567 - protein, 34 aa, Artificial Sequence
  Non-cyclic GFR-binding peptide
  MOD_RES (2)..(2): Xaa is C or S
EXVPTGQRSVKMAKVRIKPHQGQHKEVQVLEEHS

SEQ ID NO: 15568 - protein, 39 aa, Artificial Sequence
  Non-cyclic GFR-binding peptide
  MOD_RES (1)..(38): Xaa is C or S
XRPTQVQLSNITVQIMEIVRKKPIFLGEMSTLEDHLAXK

SEQ ID NO: 15569 - protein, 38 aa, Artificial Sequence
  Non-cyclic GFR-binding peptide
  MOD_RES (4)..(4): Xaa is C or S
  MOD_RES (20)..(21)..(22)..(23)..(24): Xaa is A or G
  MOD_RES (25)..(26)..(27)..(28): Xaa is A or G or absent
NVQXRPTQVQLSNITVQIMXXXXXXXXXLGEMSTLEDH

SEQ ID NO: 15570 - protein, 34 aa, Artificial Sequence
  Non-cyclic GFR-binding peptide
  MOD_RES (14)..(15)..(16)..(17)..(18): Xaa is A or G
  MOD_RES (19)..(20)..(21)..(22): Xaa is A or G or absent
TQVQLSNITVQIMXXXXXXXXXIGEMSTLEDHLA

SEQ ID NO: 15571 - protein, 42 aa, Artificial Sequence
  Non-cyclic GFR-binding peptide
  MOD_RES (6)..(40)..(42): Xaa is C or S
  MOD_RES (20)..(21)..(22)..(23)..(24): Xaa is A or G
  MOD_RES (25)..(26)..(27)..(28): Xaa is A or G or absent
DEGLEXVPTEERSVKMAKVXXXXXXXXXKEVQVFLQHNKXEX

SEQ ID NO: 15572 - protein, 38 aa, Artificial Sequence
  Non-cyclic GFR-binding peptide
  MOD_RES (5)..(5): Xaa is C or S
EGLEXVPTGQRSVKMAKVRIKPHQGQHKEVQVLEEHSQ

SEQ ID NO: 15573 - protein, 42 aa, Artificial Sequence
  Non-cyclic GFR-binding peptide
  MOD_RES (3)..(40)..(42): Xaa is C or S
  MOD_RES (19)..(20)..(21)..(22)..(23): Xaa is A or G
  MOD_RES (24)..(25)..(26)..(27): Xaa is A or G or absent
VKXQPSRVHHRPVQVRKIXXXXXXXXXKKATVRLEEHLEXAX

SEQ ID NO: 15574 - protein, 41 aa, Artificial Sequence
  Non-cyclic GFR-binding peptide
  MOD_RES (4)..(41): Xaa is C or S
  MOD_RES (20)..(21)..(22)..(23)..(24): Xaa is A or G
  MOD_RES (25)..(26)..(27)..(28): Xaa is A or G or absent
SVKXQPSRVHHSNITVQIMXXXXXXXXXLGEMSRLEEHLEX

SEQ ID NO: 15575 - protein, 37 aa, Artificial Sequence
  Non-cyclic GFR-binding peptide
  MOD_RES (35)..(37): Xaa is C or S
  MOD_RES (14)..(15)..(16)..(17)..(18): Xaa is A or G
  MOD_RES (19)..(20)..(21)..(22): Xaa is A or G or absent
SRVHHSNITVQIMXXXXXXXXXIGEMSRLEEHLEXAX

SEQ ID NO: 15576 - protein, 38 aa, Artificial Sequence
  Non-cyclic GFR-binding peptide
  MOD_RES (6)..(6): Xaa is C or S
  MOD_RES (20)..(21)..(22)..(23)..(24): Xaa is A or G
  MOD_RES (25)..(26)..(27)..(28): Xaa is A or G or absent
DEGLEXVPTGQRPVQMRKIXXXXXXXXXKKATVLEEHS

SEQ ID NO: 15577 - protein, 43 aa, Artificial Sequence
  Non-cyclic GFR-binding peptide
  MOD_RES (4)..(41)..(43): Xaa is C or S
NVQXRPTQVQLSNITVQIMEIVRKKPIFLGEMSTLEDHLAXKX

SEQ ID NO: 15578 - protein, 39 aa, Artificial Sequence
  Non-cyclic GFR-binding peptide
  MOD_RES (2)..(36)..(38): Xaa is C or S
  MOD_RES (16)..(17)..(18)..(19)..(20): Xaa is A or G
  MOD_RES (21)..(22)..(23)..(24): Xaa is A or G or absent
EXVPTGQRSVKMAKVXXXXXXXXXKEVQVLEEHSQXEXR

SEQ ID NO: 15579 - protein, 35 aa, Artificial Sequence
  Non-cyclic GFR-binding peptide
  MOD_RES (3)..(3): Xaa is C or S
  MOD_RES (17)..(18)..(19)..(20)..(21): Xaa is A or G
  MOD_RES (22)..(23)..(24)..(25): Xaa is A or G or absent
LEXVPTGQRSVKMAKVXXXXXXXXXKEVQVLEEHS

SEQ ID NO: 15580 - protein, 34 aa, Artificial Sequence
  Non-cyclic GFR-binding peptide
  MOD_RES (1)..(1): Xaa is C or S
XVPTEERSVKMAKVRIKPHQGQHKEVQVFLQHNK

SEQ ID NO: 15581 - protein, 39 aa, Artificial Sequence
  Non-cyclic GFR-binding peptide
  MOD_RES (3)..(3): Xaa is C or S
VKXQPSRVHHRPVQVRKIEYVRKKPKLKKATVRLEEHLE

SEQ ID NO: 15582 - protein, 37 aa, Artificial Sequence
  Non-cyclic GFR-binding peptide
  MOD_RES (3)..(3): Xaa is C or S
  MOD_RES (19)..(20)..(21)..(22)..(23): Xaa is A or G
  MOD_RES (24)..(25)..(26)..(27): Xaa is A or G or absent
VQXRPTQVQLSNITVQIMXXXXXXXXXLGEMSTLEDH

SEQ ID NO: 15583 - protein, 35 aa, Artificial Sequence
  Non-cyclic GFR-binding peptide
  MOD_RES (2)..(2): Xaa is C or S
EXVPTEESNITMQIMRIKPHQGQHLGEMSFLQHNK

SEQ ID NO: 15584 - protein, 38 aa, Artificial Sequence
  Non-cyclic GFR-binding peptide
  MOD_RES (4)..(4): Xaa is C or S
  MOD_RES (20)..(21)..(22)..(23)..(24): Xaa is A or G
  MOD_RES (25)..(26)..(27)..(28): Xaa is A or G or absent
NVQXRPTQVQLSNITVQIMXXXXXXXXXIGEMSTLEDH

SEQ ID NO: 15585 - protein, 37 aa, Artificial Sequence
  Non-cyclic GFR-binding peptide
  MOD_RES (37)..(37): Xaa is C or S
RPTQVQLRSVKVAKVEIVRKKPIFKEVQVTLEDHLAX

SEQ ID NO: 15586 - protein, 36 aa, Artificial Sequence
  Non-cyclic GFR-binding peptide
  MOD_RES (1)..(35): Xaa is C or S
XVPTEERPVQMRKIRIKPHQGQHKKATVFLQHNKXE

SEQ ID NO: 15587 - protein, 35 aa, Artificial Sequence
  Non-cyclic GFR-binding peptide
  MOD_RES (2)..(2): Xaa is C or S
  MOD_RES (16)..(17)..(18)..(19)..(20): Xaa is A or G
  MOD_RES (21)..(22)..(23)..(24): Xaa is A or G or absent
EXVPTEERSVKMAKVXXXXXXXXXKEVQVFLQHNK

SEQ ID NO: 15588 - protein, 39 aa, Artificial Sequence
  Non-cyclic GFR-binding peptide
  MOD_RES (4)..(4): Xaa is C or S
  MOD_RES (20)..(21)..(22)..(23)..(24): Xaa is A or G
  MOD_RES (25)..(26)..(27)..(28): Xaa is A or G or absent
SVKXQPSRVHHSNITVQIMXXXXXXXXXIGEMSRLEEHL

SEQ ID NO: 15589 - protein, 40 aa, Artificial Sequence
  Non-cyclic GFR-binding peptide
  MOD_RES (37)..(39): Xaa is C or S
QPSRVHHSNITVQIMEYVRKKPKLLGEMSRLEEHLEXAXA

SEQ ID NO: 15590 - protein, 40 aa, Artificial Sequence
  Non-cyclic GFR-binding peptide
  MOD_RES (3)..(40): Xaa is C or S
VKXQPSRVHHRPVQVRKIEYVRKKPKLKKATVRLEEHLEX

SEQ ID NO: 15591 - protein, 36 aa, Artificial Sequence
  Non-cyclic GFR-binding peptide
  MOD_RES (2)..(2): Xaa is C or S
KXQPSRVHHRPVQVRKIEYVRKKPKLKKATVRLEEH

SEQ ID NO: 15592 - protein, 35 aa, Artificial Sequence
  Non-cyclic GFR-binding peptide
QPSRVHHSNITVQIMEYVRKKPKLIGEMSRLEEHL

SEQ ID NO: 15593 - protein, 39 aa, Artificial Sequence
  Non-cyclic GFR-binding peptide
  MOD_RES (6)..(6): Xaa is C or S
DEGLEXVPTGQSNITMQIMRIKPHQGQHIGEMSLEEHSQ

SEQ ID NO: 15594 - protein, 38 aa, Artificial Sequence
  Non-cyclic GFR-binding peptide
  MOD_RES (35)..(37): Xaa is C or S
  MOD_RES (14)..(15)..(16)..(17)..(18): Xaa is A or G
  MOD_RES (19)..(20)..(21)..(22): Xaa is A or G or absent
SRVHHSNITVQIMXXXXXXXXXLGEMSRLEEHLEXAXA

SEQ ID NO: 15595 - protein, 43 aa, Artificial Sequence
  Non-cyclic GFR-binding peptide
  MOD_RES (7)..(41)..(43): Xaa is C or S
NDEGLEXVPTGQRPVQMRKIRIKPHQGQHKKATVLEEHSQXEX

SEQ ID NO: 15596 - protein, 40 aa, Artificial Sequence
  Non-cyclic GFR-binding peptide
  MOD_RES (1)..(38)..(40): Xaa is C or S
XQPSRVHHSNITVQIMEYVRKKPKLLGEMSRLEEHLEXAX

SEQ ID NO: 15597 - protein, 40 aa, Artificial Sequence
  Non-cyclic GFR-binding peptide
  MOD_RES (1)..(38)..(40): Xaa is C or S
XQPSRVHHSNITVQIMEYVRKKPKLIGEMSRLEEHLEXAX

SEQ ID NO: 15598 - protein, 44 aa, Artificial Sequence
  Non-cyclic GFR-binding peptide
  MOD_RES (7)..(41)..(43): Xaa is C or S
  MOD_RES (21)..(22)..(23)..(24)..(25): Xaa is A or G
  MOD_RES (26)..(27)..(28)..(29): Xaa is A or G or absent
NDEGLEXVPTEERPVQMRKIXXXXXXXXXKKATVFLQHNKXEXR

SEQ ID NO: 15599 - protein, 33 aa, Artificial Sequence
  Non-cyclic GFR-binding peptide
PTQVQLSNITVQIMEIVRKKPIFIGEMSTLEDH

SEQ ID NO: 15600 - protein, 36 aa, Artificial Sequence
  Non-cyclic GFR-binding peptide
  MOD_RES (1)..(1): Xaa is C or S
XRPTQVQLSNITVQIMEIVRKKPIFIGEMSTLEDHL

SEQ ID NO: 15601 - protein, 33 aa, Artificial Sequence
  Non-cyclic GFR-binding peptide
TQVQLRSVKVAKVEIVRKKPIFKEVQVTLEDHL

SEQ ID NO: 15602 - protein, 34 aa, Artificial Sequence
  Non-cyclic GFR-binding peptide
PSRVHHSNITVQIMEYVRKKPKLLGEMSRLEEHL

SEQ ID NO: 15603 - protein, 40 aa, Artificial Sequence
  Non-cyclic GFR-binding peptide
  MOD_RES (4)..(4): Xaa is C or S
SVKXQPSRVHHSNITVQIMEYVRKKPKLIGEMSRLEEHLE

SEQ ID NO: 15604 - protein, 35 aa, Artificial Sequence
  Non-cyclic GFR-binding peptide
  MOD_RES (15)..(16)..(17)..(18)..(19): Xaa is A or G
  MOD_RES (20)..(21)..(22)..(23): Xaa is A or G or absent
PTQVQLSNITVQIMXXXXXXXXXIGEMSTLEDHLA

SEQ ID NO: 15605 - protein, 41 aa, Artificial Sequence
  Non-cyclic GFR-binding peptide
  MOD_RES (5)..(39)..(41): Xaa is C or S
  MOD_RES (19)..(20)..(21)..(22)..(23): Xaa is A or G
  MOD_RES (24)..(25)..(26)..(27): Xaa is A or G or absent
EGLEXVPTEERSVKMAKVXXXXXXXXXKEVQVFLQHNKXEX

SEQ ID NO: 15606 - protein, 34 aa, Artificial Sequence
  Non-cyclic GFR-binding peptide
  MOD_RES (34)..(34): Xaa is C or S
VPTGQSNITMQIMRIKPHQGQHIGEMSLEEHSQX

SEQ ID NO: 15607 - protein, 36 aa, Artificial Sequence
  Non-cyclic GFR-binding peptide
  MOD_RES (2)..(2): Xaa is C or S
KXQPSRVHHSNITVQIMEYVRKKPKLIGEMSRLEEH

SEQ ID NO: 15608 - protein, 40 aa, Artificial Sequence
  Non-cyclic GFR-binding peptide
  MOD_RES (7)..(7): Xaa is C or S
NDEGLEXVPTEERPVQMRKIRIKPHQGQHKKATVFLQHNK

SEQ ID NO: 15609 - protein, 36 aa, Artificial Sequence
  Non-cyclic GFR-binding peptide
RPTQVQLRSVKVAKVEIVRKKPIFKEVQVTLEDHLA

SEQ ID NO: 15610 - protein, 37 aa, Artificial Sequence
  Non-cyclic GFR-binding peptide
  MOD_RES (37)..(37): Xaa is C or S
  MOD_RES (16)..(17)..(18)..(19)..(20): Xaa is A or G
  MOD_RES (21)..(22)..(23)..(24): Xaa is A or G or absent
RPTQVQLSNITVQIMXXXXXXXXXIGEMSTLEDHLAX

SEQ ID NO: 15611 - protein, 34 aa, Artificial Sequence
  Non-cyclic GFR-binding peptide
  MOD_RES (15)..(16)..(17)..(18)..(19): Xaa is A or G
  MOD_RES (20)..(21)..(22)..(23): Xaa is A or G or absent
PTQVQLSNITVQIMXXXXXXXXXIGEMSTLEDHL

SEQ ID NO: 15612 - protein, 35 aa, Artificial Sequence
  Non-cyclic GFR-binding peptide
  MOD_RES (3)..(3): Xaa is C or S
  MOD_RES (17)..(18)..(19)..(20)..(21): Xaa is A or G
  MOD_RES (22)..(23)..(24)..(25): Xaa is A or G or absent
LEXVPTEERPVQMRKIXXXXXXXXXKKATVFLQHN

SEQ ID NO: 15613 - protein, 40 aa, Artificial Sequence
  Non-cyclic GFR-binding peptide
  MOD_RES (2)..(39): Xaa is C or S
KXQPSRVHHSNITVQIMEYVRKKPKLLGEMSRLEEHLEXA

SEQ ID NO: 15614 - protein, 38 aa, Artificial Sequence
  Non-cyclic GFR-binding peptide
  MOD_RES (3)..(3): Xaa is C or S
VKXQPSRVHHRPVQVRKIEYVRKKPKLKKATVRLEEHL

SEQ ID NO: 15615 - protein, 44 aa, Artificial Sequence
  Non-cyclic GFR-binding peptide
  MOD_RES (5)..(42)..(44): Xaa is C or S
  MOD_RES (21)..(22)..(23)..(24)..(25): Xaa is A or G
  MOD_RES (26)..(27)..(28)..(29): Xaa is A or G or absent
RNVQXRPTQVQLRSVKVAKVXXXXXXXXXKEVQVTLEDHLAXKX

SEQ ID NO: 15616 - protein, 38 aa, Artificial Sequence
  Non-cyclic GFR-binding peptide
  MOD_RES (1)..(35)..(37): Xaa is C or S
XVPTGQSNITMQIMRIKPHQGQHIGEMSLEEHSQXEXR

SEQ ID NO: 15617 - protein, 43 aa, Artificial Sequence
  Non-cyclic GFR-binding peptide
  MOD_RES (4)..(41)..(43): Xaa is C or S
SVKXQPSRVHHSNITVQIMEYVRKKPKLIGEMSRLEEHLEXAX

SEQ ID NO: 15618 - protein, 40 aa, Artificial Sequence
  Non-cyclic GFR-binding peptide
  MOD_RES (2)..(39): Xaa is C or S
KXQPSRVHHRPVQVRKIEYVRKKPKLKKATVRLEEHLEXA

SEQ ID NO: 15619 - protein, 43 aa, Artificial Sequence
  Non-cyclic GFR-binding peptide
  MOD_RES (4)..(41)..(43): Xaa is C or S
SVKXQPSRVHHSNITVQIMEYVRKKPKLLGEMSRLEEHLEXAX

SEQ ID NO: 15620 - protein, 34 aa, Artificial Sequence
  Non-cyclic GFR-binding peptide
  MOD_RES (34)..(34): Xaa is C or S
  MOD_RES (14)..(15)..(16)..(17)..(18): Xaa is A or G
  MOD_RES (19)..(20)..(21)..(22): Xaa is A or G or absent
VPTGQSNITMQIMXXXXXXXXXIGEMSLEEHSQX

SEQ ID NO: 15621 - protein, 37 aa, Artificial Sequence
  Non-cyclic GFR-binding peptide
  MOD_RES (1)..(35)..(37): Xaa is C or S
  MOD_RES (15)..(16)..(17)..(18)..(19): Xaa is A or G
  MOD_RES (20)..(21)..(22)..(23): Xaa is A or G or absent
XVPTGQRPVQMRKIXXXXXXXXXKKATVLEEHSQXEX

SEQ ID NO: 15622 - protein, 43 aa, Artificial Sequence
  Non-cyclic GFR-binding peptide
  MOD_RES (3)..(40)..(42): Xaa is C or S
VQXRPTQVQLRSVKVAKVEIVRKKPIFKEVQVTLEDHLAXKXE

SEQ ID NO: 15623 - protein, 38 aa, Artificial Sequence
  Non-cyclic GFR-binding peptide
  MOD_RES (6)..(6): Xaa is C or S
  MOD_RES (20)..(21)..(22)..(23)..(24): Xaa is A or G
  MOD_RES (25)..(26)..(27)..(28): Xaa is A or G or absent
DEGLEXVPTEERPVQMRKIXXXXXXXXXKKATVFLQHN

SEQ ID NO: 15624 - protein, 40 aa, Artificial Sequence
  Non-cyclic GFR-binding peptide
  MOD_RES (7)..(7): Xaa is C or S
  MOD_RES (21)..(22)..(23)..(24)..(25): Xaa is A or G
  MOD_RES (26)..(27)..(28)..(29): Xaa is A or G or absent
NDEGLEXVPTEESNITMQIMXXXXXXXXXLGEMSFLQHNK

SEQ ID NO: 15625 - protein, 41 aa, Artificial Sequence
  Non-cyclic GFR-binding peptide
  MOD_RES (5)..(39)..(41): Xaa is C or S
  MOD_RES (19)..(20)..(21)..(22)..(23): Xaa is A or G
  MOD_RES (24)..(25)..(26)..(27): Xaa is A or G or absent
EGLEXVPTGQRSVKMAKVXXXXXXXXXKEVQVLEEHSQXEX

SEQ ID NO: 15626 - protein, 41 aa, Artificial Sequence
  Non-cyclic GFR-binding peptide
  MOD_RES (4)..(38)..(40): Xaa is C or S
GLEXVPTEERPVQMRKIRIKPHQGQHKKATVFLQHNKXEXR

SEQ ID NO: 15627 - protein, 38 aa, Artificial Sequence
  Non-cyclic GFR-binding peptide
  MOD_RES (2)..(36)..(38): Xaa is C or S
  MOD_RES (16)..(17)..(18)..(19)..(20): Xaa is A or G
  MOD_RES (21)..(22)..(23)..(24): Xaa is A or G or absent
EXVPTEERSVKMAKVXXXXXXXXXKEVQVFLQHNKXEX

SEQ ID NO: 15628 - protein, 35 aa, Artificial Sequence
  Non-cyclic GFR-binding peptide
  MOD_RES (1)..(1): Xaa is C or S
  MOD_RES (17)..(18)..(19)..(20)..(21): Xaa is A or G
  MOD_RES (22)..(23)..(24)..(25): Xaa is A or G or absent
XQPSRVHHSNITVQIMXXXXXXXXXIGEMSRLEEH

SEQ ID NO: 15629 - protein, 36 aa, Artificial Sequence
  Non-cyclic GFR-binding peptide
  MOD_RES (1)..(35): Xaa is C or S
XVPTEESNITMQIMRIKPHQGQHLGEMSFLQHNKXE

SEQ ID NO: 15630 - protein, 36 aa, Artificial Sequence
  Non-cyclic GFR-binding peptide
  MOD_RES (3)..(3): Xaa is C or S
LEXVPTGQRSVKMAKVRIKPHQGQHKEVQVLEEHSQ

SEQ ID NO: 15631 - protein, 39 aa, Artificial Sequence
  Non-cyclic GFR-binding peptide
  MOD_RES (4)..(38): Xaa is C or S
GLEXVPTEERPVQMRKIRIKPHQGQHKKATVFLQHNKXE

SEQ ID NO: 15632 - protein, 37 aa, Artificial Sequence
  Non-cyclic GFR-binding peptide
  MOD_RES (1)..(1): Xaa is C or S
  MOD_RES (17)..(18)..(19)..(20)..(21): Xaa is A or G
  MOD_RES (22)..(23)..(24)..(25): Xaa is A or G or absent
XRPTQVQLSNITVQIMXXXXXXXXXLGEMSTLEDHLA

SEQ ID NO: 15633 - protein, 35 aa, Artificial Sequence
  Non-cyclic GFR-binding peptide
  MOD_RES (3)..(3): Xaa is C or S
  MOD_RES (17)..(18)..(19)..(20)..(21): Xaa is A or G
  MOD_RES (22)..(23)..(24)..(25): Xaa is A or G or absent
LEXVPTEERSVKMAKVXXXXXXXXXKEVQVFLQHN

SEQ ID NO: 15634 - protein, 37 aa, Artificial Sequence
  Non-cyclic GFR-binding peptide
  MOD_RES (3)..(3): Xaa is C or S
VQXRPTQVQLRSVKVAKVEIVRKKPIFKEVQVTLEDH

SEQ ID NO: 15635 - protein, 33 aa, Artificial Sequence
  Non-cyclic GFR-binding peptide
  MOD_RES (14)..(15)..(16)..(17)..(18): Xaa is A or G
  MOD_RES (19)..(20)..(21)..(22): Xaa is A or G or absent
TQVQLSNITVQIMXXXXXXXXXIGEMSTLEDHL

SEQ ID NO: 15636 - protein, 40 aa, Artificial Sequence
  Non-cyclic GFR-binding peptide
  MOD_RES (4)..(4): Xaa is C or S
  MOD_RES (20)..(21)..(22)..(23)..(24): Xaa is A or G
  MOD_RES (25)..(26)..(27)..(28): Xaa is A or G or absent
NVQXRPTQVQLSNITVQIMXXXXXXXXXIGEMSTLEDHLA

SEQ ID NO: 15637 - protein, 40 aa, Artificial Sequence
  Non-cyclic GFR-binding peptide
  MOD_RES (3)..(37)..(39): Xaa is C or S
LEXVPTGQRPVQMRKIRIKPHQGQHKKATVLEEHSQXEXR

SEQ ID NO: 15638 - protein, 41 aa, Artificial Sequence
  Non-cyclic GFR-binding peptide
  MOD_RES (5)..(39)..(41): Xaa is C or S
EGLEXVPTEESNITMQIMRIKPHQGQHLGEMSFLQHNKXEX

SEQ ID NO: 15639 - protein, 38 aa, Artificial Sequence
  Non-cyclic GFR-binding peptide
  MOD_RES (3)..(37): Xaa is C or S
  MOD_RES (17)..(18)..(19)..(20)..(21): Xaa is A or G
  MOD_RES (22)..(23)..(24)..(25): Xaa is A or G or absent
LEXVPTEERPVQMRKIXXXXXXXXXKKATVFLQHNKXE

SEQ ID NO: 15640 - protein, 38 aa, Artificial Sequence
  Non-cyclic GFR-binding peptide
  MOD_RES (1)..(38): Xaa is C or S
  MOD_RES (17)..(18)..(19)..(20)..(21): Xaa is A or G
  MOD_RES (22)..(23)..(24)..(25): Xaa is A or G or absent
XQPSRVHHRPVQVRKIXXXXXXXXXKKATVRLEEHLEX

SEQ ID NO: 15641 - protein, 36 aa, Artificial Sequence
  Non-cyclic GFR-binding peptide
  MOD_RES (2)..(36): Xaa is C or S
EXVPTEERSVKMAKVRIKPHQGQHKEVQVFLQHNKX

SEQ ID NO: 15642 - protein, 37 aa, Artificial Sequence
  Non-cyclic GFR-binding peptide
  MOD_RES (1)..(1): Xaa is C or S
  MOD_RES (17)..(18)..(19)..(20)..(21): Xaa is A or G
  MOD_RES (22)..(23)..(24)..(25): Xaa is A or G or absent
XRPTQVQLRSVKVAKVXXXXXXXXXKEVQVTLEDHLA

SEQ ID NO: 15643 - protein, 40 aa, Artificial Sequence
  Non-cyclic GFR-binding peptide
  MOD_RES (1)..(38)..(40): Xaa is C or S
XRPTQVQLRSVKVAKVEIVRKKPIFKEVQVTLEDHLAXKX

SEQ ID NO: 15644 - protein, 40 aa, Artificial Sequence
  Non-cyclic GFR-binding peptide
  MOD_RES (5)..(5): Xaa is C or S
SSVKXQPSRVHHSNITVQIMEYVRKKPKLIGEMSRLEEHL

SEQ ID NO: 15645 - protein, 37 aa, Artificial Sequence
  Non-cyclic GFR-binding peptide
  MOD_RES (4)..(4): Xaa is C or S
GLEXVPTGQRPVQMRKIRIKPHQGQHKKATVLEEHSQ

SEQ ID NO: 15646 - protein, 40 aa, Artificial Sequence
  Non-cyclic GFR-binding peptide
  MOD_RES (7)..(7): Xaa is C or S
NDEGLEXVPTGQRPVQMRKIRIKPHQGQHKKATVLEEHSQ

SEQ ID NO: 15647 - protein, 37 aa, Artificial Sequence
  Non-cyclic GFR-binding peptide
  MOD_RES (1)..(35)..(37): Xaa is C or S
XVPTEERPVQMRKIRIKPHQGQHKKATVFLQHNKXEX

SEQ ID NO: 15648 - protein, 42 aa, Artificial Sequence
  Non-cyclic GFR-binding peptide
  MOD_RES (5)..(39)..(41): Xaa is C or S
  MOD_RES (19)..(20)..(21)..(22)..(23): Xaa is A or G
  MOD_RES (24)..(25)..(26)..(27): Xaa is A or G or absent
EGLEXVPTEESNITMQIMXXXXXXXXXLGEMSFLQHNKXEXR

SEQ ID NO: 15649 - protein, 34 aa, Artificial Sequence
  Non-cyclic GFR-binding peptide
  MOD_RES (2)..(2): Xaa is C or S
EXVPTEERPVQMRKIRIKPHQGQHKKATVFLQHN

SEQ ID NO: 15650 - protein, 35 aa, Artificial Sequence
  Non-cyclic GFR-binding peptide
  MOD_RES (1)..(1): Xaa is C or S
  MOD_RES (17)..(18)..(19)..(20)..(21): Xaa is A or G
  MOD_RES (22)..(23)..(24)..(25): Xaa is A or G or absent
XQPSRVHHSNITVQIMXXXXXXXXXLGEMSRLEEH

SEQ ID NO: 15651 - protein, 38 aa, Artificial Sequence
  Non-cyclic GFR-binding peptide
  MOD_RES (1)..(38): Xaa is C or S
  MOD_RES (17)..(18)..(19)..(20)..(21): Xaa is A or G
  MOD_RES (22)..(23)..(24)..(25): Xaa is A or G or absent
XQPSRVHHSNITVQIMXXXXXXXXXLGEMSRLEEHLEX

SEQ ID NO: 15652 - protein, 42 aa, Artificial Sequence
  Non-cyclic GFR-binding peptide
  MOD_RES (2)..(39)..(41): Xaa is C or S
KXQPSRVHHSNITVQIMEYVRKKPKLIGEMSRLEEHLEXAXA

SEQ ID NO: 15653 - protein, 34 aa, Artificial Sequence
  Non-cyclic GFR-binding peptide
PTQVQLRSVKVAKVEIVRKKPIFKEVQVTLEDHL

SEQ ID NO: 15654 - protein, 41 aa, Artificial Sequence
  Non-cyclic GFR-binding peptide
  MOD_RES (1)..(38)..(40): Xaa is C or S
XQPSRVHHRPVQVRKIEYVRKKPKLKKATVRLEEHLEXAXA

SEQ ID NO: 15655 - protein, 34 aa, Artificial Sequence
  Non-cyclic GFR-binding peptide
  MOD_RES (1)..(1): Xaa is C or S
  MOD_RES (15)..(16)..(17)..(18)..(19): Xaa is A or G
  MOD_RES (20)..(21)..(22)..(23): Xaa is A or G or absent
XVPTGQSNITMQIMXXXXXXXXXIGEMSLEEHSQ

SEQ ID NO: 15656 - protein, 37 aa, Artificial Sequence
  Non-cyclic GFR-binding peptide
  MOD_RES (1)..(35)..(37): Xaa is C or S
  MOD_RES (15)..(16)..(17)..(18)..(19): Xaa is A or G
  MOD_RES (20)..(21)..(22)..(23): Xaa is A or G or absent
XVPTEERPVQMRKIXXXXXXXXXKKATVFLQHNKXEX

SEQ ID NO: 15657 - protein, 40 aa, Artificial Sequence
  Non-cyclic GFR-binding peptide
  MOD_RES (3)..(37)..(39): Xaa is C or S
LEXVPTGQSNITMQIMRIKPHQGQHIGEMSLEEHSQXEXR

SEQ ID NO: 15658 - protein, 41 aa, Artificial Sequence
  Non-cyclic GFR-binding peptide
  MOD_RES (3)..(40): Xaa is C or S
  MOD_RES (19)..(20)..(21)..(22)..(23): Xaa is A or G
  MOD_RES (24)..(25)..(26)..(27): Xaa is A or G or absent
VKXQPSRVHHSNITVQIMXXXXXXXXXIGEMSRLEEHLEXA

SEQ ID NO: 15659 - protein, 42 aa, Artificial Sequence
  Non-cyclic GFR-binding peptide
  MOD_RES (3)..(40)..(42): Xaa is C or S
  MOD_RES (19)..(20)..(21)..(22)..(23): Xaa is A or G
  MOD_RES (24)..(25)..(26)..(27): Xaa is A or G or absent
VQXRPTQVQLSNITVQIMXXXXXXXXXIGEMSTLEDHLAXKX

SEQ ID NO: 15660 - protein, 42 aa, Artificial Sequence
  Non-cyclic GFR-binding peptide
  MOD_RES (3)..(40)..(42): Xaa is C or S
  MOD_RES (19)..(20)..(21)..(22)..(23): Xaa is A or G
  MOD_RES (24)..(25)..(26)..(27): Xaa is A or G or absent
VQXRPTQVQLSNITVQIMXXXXXXXXXLGEMSTLEDHLAXKX

SEQ ID NO: 15661 - protein, 40 aa, Artificial Sequence
  Non-cyclic GFR-binding peptide
  MOD_RES (6)..(40): Xaa is C or S
  MOD_RES (20)..(21)..(22)..(23)..(24): Xaa is A or G
  MOD_RES (25)..(26)..(27)..(28): Xaa is A or G or absent
DEGLEXVPTEESNITMQIMXXXXXXXXXLGEMSFLQHNKX

SEQ ID NO: 15662 - protein, 38 aa, Artificial Sequence
  Non-cyclic GFR-binding peptide
  MOD_RES (35)..(37): Xaa is C or S
  MOD_RES (14)..(15)..(16)..(17)..(18): Xaa is A or G
  MOD_RES (19)..(20)..(21)..(22): Xaa is A or G or absent
SRVHHSNITVQIMXXXXXXXXXIGEMSRLEEHLEXAXA

SEQ ID NO: 15663 - protein, 38 aa, Artificial Sequence
  Non-cyclic GFR-binding peptide
  MOD_RES (2)..(2): Xaa is C or S
KXQPSRVHHRPVQVRKIEYVRKKPKLKKATVRLEEHLE

SEQ ID NO: 15664 - protein, 41 aa, Artificial Sequence
  Non-cyclic GFR-binding peptide
  MOD_RES (2)..(39)..(41): Xaa is C or S
  MOD_RES (18)..(19)..(20)..(21)..(22): Xaa is A or G
  MOD_RES (23)..(24)..(25)..(26): Xaa is A or G or absent
KXQPSRVHHSNITVQIMXXXXXXXXXLGEMSRLEEHLEXAX

SEQ ID NO: 15665 - protein, 39 aa, Artificial Sequence
  Non-cyclic GFR-binding peptide
  MOD_RES (37)..(39): Xaa is C or S
  MOD_RES (16)..(17)..(18)..(19)..(20): Xaa is A or G
  MOD_RES (21)..(22)..(23)..(24): Xaa is A or G or absent
QPSRVHHSNITVQIMXXXXXXXXXLGEMSRLEEHLEXAX

SEQ ID NO: 15666 - protein, 41 aa, Artificial Sequence
  Non-cyclic GFR-binding peptide
  MOD_RES (5)..(39)..(41): Xaa is C or S
  MOD_RES (19)..(20)..(21)..(22)..(23): Xaa is A or G
  MOD_RES (24)..(25)..(26)..(27): Xaa is A or G or absent
EGLEXVPTEESNITMQIMXXXXXXXXXLGEMSFLQHNKXEX

SEQ ID NO: 15667 - protein, 33 aa, Artificial Sequence
  Non-cyclic GFR-binding peptide
  MOD_RES (14)..(15)..(16)..(17)..(18): Xaa is A or G
  MOD_RES (19)..(20)..(21)..(22): Xaa is A or G or absent
VPTGQRSVKMAKVXXXXXXXXXKEVQVLEEHSQ

SEQ ID NO: 15668 - protein, 40 aa, Artificial Sequence
  Non-cyclic GFR-binding peptide
  MOD_RES (3)..(40): Xaa is C or S
VQXRPTQVQLSNITVQIMEIVRKKPIFIGEMSTLEDHLAX

SEQ ID NO: 15669 - protein, 39 aa, Artificial Sequence
  Non-cyclic GFR-binding peptide
  MOD_RES (2)..(39): Xaa is C or S
  MOD_RES (18)..(19)..(20)..(21)..(22): Xaa is A or G
  MOD_RES (23)..(24)..(25)..(26): Xaa is A or G or absent
KXQPSRVHHSNITVQIMXXXXXXXXXLGEMSRLEEHLEX

SEQ ID NO: 15670 - protein, 33 aa, Artificial Sequence
  Non-cyclic GFR-binding peptide
SRVHHSNITVQIMEYVRKKPKLLGEMSRLEEHL

SEQ ID NO: 15671 - protein, 40 aa, Artificial Sequence
  Non-cyclic GFR-binding peptide
  MOD_RES (5)..(5): Xaa is C or S
RNVQXRPTQVQLSNITVQIMEIVRKKPIFIGEMSTLEDHL

SEQ ID NO: 15672 - protein, 36 aa, Artificial Sequence
  Non-cyclic GFR-binding peptide
  MOD_RES (36)..(36): Xaa is C or S
PTQVQLSNITVQIMEIVRKKPIFIGEMSTLEDHLAX

SEQ ID NO: 15673 - protein, 43 aa, Artificial Sequence
  Non-cyclic GFR-binding peptide
  MOD_RES (7)..(41)..(43): Xaa is C or S
NDEGLEXVPTGQRSVKMAKVRIKPHQGQHKEVQVLEEHSQXEX

SEQ ID NO: 15674 - protein, 42 aa, Artificial Sequence
  Non-cyclic GFR-binding peptide
  MOD_RES (3)..(40)..(42): Xaa is C or S
  MOD_RES (19)..(20)..(21)..(22)..(23): Xaa is A or G
  MOD_RES (24)..(25)..(26)..(27): Xaa is A or G or absent
VKXQPSRVHHSNITVQIMXXXXXXXXXIGEMSRLEEHLEXAX

SEQ ID NO: 15675 - protein, 40 aa, Artificial Sequence
  Non-cyclic GFR-binding peptide
  MOD_RES (6)..(40): Xaa is C or S
  MOD_RES (20)..(21)..(22)..(23)..(24): Xaa is A or G
  MOD_RES (25)..(26)..(27)..(28): Xaa is A or G or absent
DEGLEXVPTGQRPVQMRKIXXXXXXXXXKKATVLEEHSQX

SEQ ID NO: 15676 - protein, 38 aa, Artificial Sequence
  Non-cyclic GFR-binding peptide
  MOD_RES (4)..(4): Xaa is C or S
  MOD_RES (20)..(21)..(22)..(23)..(24): Xaa is A or G
  MOD_RES (25)..(26)..(27)..(28): Xaa is A or G or absent
SVKXQPSRVHHRPVQVRKIXXXXXXXXXKKATVRLEEH

SEQ ID NO: 15677 - protein, 37 aa, Artificial Sequence
  Non-cyclic GFR-binding peptide
  MOD_RES (4)..(4): Xaa is C or S
  MOD_RES (18)..(19)..(20)..(21)..(22): Xaa is A or G
  MOD_RES (23)..(24)..(25)..(26): Xaa is A or G or absent
GLEXVPTEERSVKMAKVXXXXXXXXXKEVQVFLQHNK

SEQ ID NO: 15678 - protein, 37 aa, Artificial Sequence
  Non-cyclic GFR-binding peptide
  MOD_RES (35)..(37): Xaa is C or S
  MOD_RES (14)..(15)..(16)..(17)..(18): Xaa is A or G
  MOD_RES (19)..(20)..(21)..(22): Xaa is A or G or absent
SRVHHRPVQVRKIXXXXXXXXXKKATVRLEEHLEXAX

SEQ ID NO: 15679 - protein, 32 aa, Artificial Sequence
  Non-cyclic GFR-binding peptide
  MOD_RES (14)..(15)..(16)..(17)..(18): Xaa is A or G
  MOD_RES (19)..(20)..(21)..(22): Xaa is A or G or absent
SRVHHSNITVQIMXXXXXXXXXIGEMSRLEEH

SEQ ID NO: 15680 - protein, 41 aa, Artificial Sequence
  Non-cyclic GFR-binding peptide
  MOD_RES (5)..(5): Xaa is C or S
  MOD_RES (21)..(22)..(23)..(24)..(25): Xaa is A or G
  MOD_RES (26)..(27)..(28)..(29): Xaa is A or G or absent
RNVQXRPTQVQLSNITVQIMXXXXXXXXXIGEMSTLEDHLA

SEQ ID NO: 15681 - protein, 37 aa, Artificial Sequence
  Non-cyclic GFR-binding peptide
  MOD_RES (35)..(37): Xaa is C or S
  MOD_RES (14)..(15)..(16)..(17)..(18): Xaa is A or G
  MOD_RES (19)..(20)..(21)..(22): Xaa is A or G or absent
TQVQLSNITVQIMXXXXXXXXXIGEMSTLEDHLAXKX

SEQ ID NO: 15682 - protein, 36 aa, Artificial Sequence
  Non-cyclic GFR-binding peptide
  MOD_RES (34)..(36): Xaa is C or S
  MOD_RES (14)..(15)..(16)..(17)..(18): Xaa is A or G
  MOD_RES (19)..(20)..(21)..(22): Xaa is A or G or absent
VPTGQSNITMQIMXXXXXXXXXIGEMSLEEHSQXEX

SEQ ID NO: 15683 - protein, 38 aa, Artificial Sequence
  Non-cyclic GFR-binding peptide
  MOD_RES (36)..(38): Xaa is C or S
PSRVHHSNITVQIMEYVRKKPKLIGEMSRLEEHLEXAX

SEQ ID NO: 15684 - protein, 40 aa, Artificial Sequence
  Non-cyclic GFR-binding peptide
  MOD_RES (4)..(38)..(40): Xaa is C or S
  MOD_RES (18)..(19)..(20)..(21)..(22): Xaa is A or G
  MOD_RES (23)..(24)..(25)..(26): Xaa is A or G or absent
GLEXVPTEESNITMQIMXXXXXXXXXLGEMSFLQHNKXEX

SEQ ID NO: 15685 - protein, 37 aa, Artificial Sequence
  Non-cyclic GFR-binding peptide
  MOD_RES (3)..(3): Xaa is C or S
VQXRPTQVQLSNITVQIMEIVRKKPIFLGEMSTLEDH

SEQ ID NO: 15686 - protein, 34 aa, Artificial Sequence
  Non-cyclic GFR-binding peptide
  MOD_RES (15)..(16)..(17)..(18)..(19): Xaa is A or G
  MOD_RES (20)..(21)..(22)..(23): Xaa is A or G or absent
PTQVQLRSVKVAKVXXXXXXXXXKEVQVTLEDHL

SEQ ID NO: 15687 - protein, 35 aa, Artificial Sequence
  Non-cyclic GFR-binding peptide
  MOD_RES (35)..(35): Xaa is C or S
SRVHHSNITVQIMEYVRKKPKLIGEMSRLEEHLEX

SEQ ID NO: 15688 - protein, 38 aa, Artificial Sequence
  Non-cyclic GFR-binding peptide
  MOD_RES (3)..(3): Xaa is C or S
VQXRPTQVQLSNITVQIMEIVRKKPIFIGEMSTLEDHL

SEQ ID NO: 15689 - protein, 34 aa, Artificial Sequence
  Non-cyclic GFR-binding peptide
  MOD_RES (2)..(2): Xaa is C or S
  MOD_RES (16)..(17)..(18)..(19)..(20): Xaa is A or G
  MOD_RES (21)..(22)..(23)..(24): Xaa is A or G or absent
EXVPTEERPVQMRKIXXXXXXXXXKKATVFLQHN

SEQ ID NO: 15690 - protein, 42 aa, Artificial Sequence
  Non-cyclic GFR-binding peptide
  MOD_RES (6)..(40)..(42): Xaa is C or S
  MOD_RES (20)..(21)..(22)..(23)..(24): Xaa is A or G
  MOD_RES (25)..(26)..(27)..(28): Xaa is A or G or absent
DEGLEXVPTEERPVQMRKIXXXXXXXXXKKATVFLQHNKXEX

SEQ ID NO: 15691 - protein, 42 aa, Artificial Sequence
  Non-cyclic GFR-binding peptide
  MOD_RES (4)..(41): Xaa is C or S
NVQXRPTQVQLSNITVQIMEIVRKKPIFIGEMSTLEDHLAXK

SEQ ID NO: 15692 - protein, 38 aa, Artificial Sequence
  Non-cyclic GFR-binding peptide
  MOD_RES (5)..(5): Xaa is C or S
EGLEXVPTGQSNITMQIMRIKPHQGQHIGEMSLEEHSQ

SEQ ID NO: 15693 - protein, 38 aa, Artificial Sequence
  Non-cyclic GFR-binding peptide
  MOD_RES (36)..(38): Xaa is C or S
  MOD_RES (15)..(16)..(17)..(18)..(19): Xaa is A or G
  MOD_RES (20)..(21)..(22)..(23): Xaa is A or G or absent
PSRVHHRPVQVRKIXXXXXXXXXKKATVRLEEHLEXAX

SEQ ID NO: 15694 - protein, 36 aa, Artificial Sequence
  Non-cyclic GFR-binding peptide
  MOD_RES (36)..(36): Xaa is C or S
PSRVHHSNITVQIMEYVRKKPKLIGEMSRLEEHLEX

SEQ ID NO: 15695 - protein, 35 aa, Artificial Sequence
  Non-cyclic GFR-binding peptide
  MOD_RES (35)..(35): Xaa is C or S
SRVHHRPVQVRKIEYVRKKPKLKKATVRLEEHLEX

SEQ ID NO: 15696 - protein, 38 aa, Artificial Sequence
  Non-cyclic GFR-binding peptide
  MOD_RES (5)..(5): Xaa is C or S
EGLEXVPTGQRPVQMRKIRIKPHQGQHKKATVLEEHSQ

SEQ ID NO: 15697 - protein, 36 aa, Artificial Sequence
  Non-cyclic GFR-binding peptide
  MOD_RES (2)..(2): Xaa is C or S
QXRPTQVQLSNITVQIMEIVRKKPIFLGEMSTLEDH

SEQ ID NO: 15698 - protein, 37 aa, Artificial Sequence
  Non-cyclic GFR-binding peptide
  MOD_RES (36)..(36): Xaa is C or S
  MOD_RES (15)..(16)..(17)..(18)..(19): Xaa is A or G
  MOD_RES (20)..(21)..(22)..(23): Xaa is A or G or absent
PTQVQLSNITVQIMXXXXXXXXXLGEMSTLEDHLAXK

SEQ ID NO: 15699 - protein, 33 aa, Artificial Sequence
  Non-cyclic GFR-binding peptide
TQVQLSNITVQIMEIVRKKPIFIGEMSTLEDHL

SEQ ID NO: 15700 - protein, 34 aa, Artificial Sequence
  Non-cyclic GFR-binding peptide
TQVQLSNITVQIMEIVRKKPIFIGEMSTLEDHLA

SEQ ID NO: 15701 - protein, 37 aa, Artificial Sequence
  Non-cyclic GFR-binding peptide
  MOD_RES (3)..(37): Xaa is C or S
LEXVPTEERPVQMRKIRIKPHQGQHKKATVFLQHNKX

SEQ ID NO: 15702 - protein, 36 aa, Artificial Sequence
  Non-cyclic GFR-binding peptide
  MOD_RES (2)..(2): Xaa is C or S
KXQPSRVHHSNITVQIMEYVRKKPKLLGEMSRLEEH

SEQ ID NO: 15703 - protein, 37 aa, Artificial Sequence
  Non-cyclic GFR-binding peptide
  MOD_RES (3)..(37): Xaa is C or S
  MOD_RES (17)..(18)..(19)..(20)..(21): Xaa is A or G
  MOD_RES (22)..(23)..(24)..(25): Xaa is A or G or absent
LEXVPTEERPVQMRKIXXXXXXXXXKKATVFLQHNKX

SEQ ID NO: 15704 - protein, 38 aa, Artificial Sequence
  Non-cyclic GFR-binding peptide
  MOD_RES (2)..(2): Xaa is C or S
QXRPTQVQLRSVKVAKVEIVRKKPIFKEVQVTLEDHLA

SEQ ID NO: 15705 - protein, 38 aa, Artificial Sequence
  Non-cyclic GFR-binding peptide
  MOD_RES (4)..(4): Xaa is C or S
  MOD_RES (20)..(21)..(22)..(23)..(24): Xaa is A or G
  MOD_RES (25)..(26)..(27)..(28): Xaa is A or G or absent
SVKXQPSRVHHSNITVQIMXXXXXXXXXLGEMSRLEEH

SEQ ID NO: 15706 - protein, 36 aa, Artificial Sequence
  Non-cyclic GFR-binding peptide
  MOD_RES (34)..(36): Xaa is C or S
  MOD_RES (14)..(15)..(16)..(17)..(18): Xaa is A or G
  MOD_RES (19)..(20)..(21)..(22): Xaa is A or G or absent
VPTGQRSVKMAKVXXXXXXXXXKEVQVLEEHSQXEX

SEQ ID NO: 15707 - protein, 40 aa, Artificial Sequence
  Non-cyclic GFR-binding peptide
  MOD_RES (6)..(40): Xaa is C or S
DEGLEXVPTEERSVKMAKVRIKPHQGQHKEVQVFLQHNKX

SEQ ID NO: 15708 - protein, 38 aa, Artificial Sequence
  Non-cyclic GFR-binding peptide
  MOD_RES (1)..(35)..(37): Xaa is C or S
  MOD_RES (15)..(16)..(17)..(18)..(19): Xaa is A or G
  MOD_RES (20)..(21)..(22)..(23): Xaa is A or G or absent
XVPTEESNITMQIMXXXXXXXXXLGEMSFLQHNKXEXR

SEQ ID NO: 15709 - protein, 37 aa, Artificial Sequence
  Non-cyclic GFR-binding peptide
  MOD_RES (1)..(35)..(37): Xaa is C or S
  MOD_RES (15)..(16)..(17)..(18)..(19): Xaa is A or G
  MOD_RES (20)..(21)..(22)..(23): Xaa is A or G or absent
XVPTEERSVKMAKVXXXXXXXXXKEVQVFLQHNKXEX

SEQ ID NO: 15710 - protein, 40 aa, Artificial Sequence
  Non-cyclic GFR-binding peptide
  MOD_RES (6)..(40): Xaa is C or S
DEGLEXVPTGQRPVQMRKIRIKPHQGQHKKATVLEEHSQX

SEQ ID NO: 15711 - protein, 36 aa, Artificial Sequence
  Non-cyclic GFR-binding peptide
  MOD_RES (2)..(2): Xaa is C or S
  MOD_RES (18)..(19)..(20)..(21)..(22): Xaa is A or G
  MOD_RES (23)..(24)..(25)..(26): Xaa is A or G or absent
QXRPTQVQLRSVKVAKVXXXXXXXXXKEVQVTLEDH

SEQ ID NO: 15712 - protein, 40 aa, Artificial Sequence
  Non-cyclic GFR-binding peptide
  MOD_RES (3)..(37)..(39): Xaa is C or S
  MOD_RES (17)..(18)..(19)..(20)..(21): Xaa is A or G
  MOD_RES (22)..(23)..(24)..(25): Xaa is A or G or absent
LEXVPTEESNITMQIMXXXXXXXXXLGEMSFLQHNKXEXR

SEQ ID NO: 15713 - protein, 40 aa, Artificial Sequence
  Non-cyclic GFR-binding peptide
  MOD_RES (3)..(40): Xaa is C or S
  MOD_RES (19)..(20)..(21)..(22)..(23): Xaa is A or G
  MOD_RES (24)..(25)..(26)..(27): Xaa is A or G or absent
VQXRPTQVQLRSVKVAKVXXXXXXXXXKEVQVTLEDHLAX

SEQ ID NO: 15714 - protein, 34 aa, Artificial Sequence
  Non-cyclic GFR-binding peptide
  MOD_RES (16)..(17)..(18)..(19)..(20): Xaa is A or G
  MOD_RES (21)..(22)..(23)..(24): Xaa is A or G or absent
RPTQVQLRSVKVAKVXXXXXXXXXKEVQVTLEDH

SEQ ID NO: 15715 - protein, 41 aa, Artificial Sequence
  Non-cyclic GFR-binding peptide
  MOD_RES (6)..(40): Xaa is C or S
DEGLEXVPTEESNITMQIMRIKPHQGQHLGEMSFLQHNKXE

SEQ ID NO: 15716 - protein, 40 aa, Artificial Sequence
  Non-cyclic GFR-binding peptide
  MOD_RES (37)..(39): Xaa is C or S
QPSRVHHRPVQVRKIEYVRKKPKLKKATVRLEEHLEXAXA

SEQ ID NO: 15717 - protein, 36 aa, Artificial Sequence
  Non-cyclic GFR-binding peptide
  MOD_RES (35)..(35): Xaa is C or S
SRVHHRPVQVRKIEYVRKKPKLKKATVRLEEHLEXA

SEQ ID NO: 15718 - protein, 36 aa, Artificial Sequence
  Non-cyclic GFR-binding peptide
  MOD_RES (1)..(1): Xaa is C or S
  MOD_RES (17)..(18)..(19)..(20)..(21): Xaa is A or G
  MOD_RES (22)..(23)..(24)..(25): Xaa is A or G or absent
XRPTQVQLSNITVQIMXXXXXXXXXIGEMSTLEDHL

SEQ ID NO: 15719 - protein, 37 aa, Artificial Sequence
  Non-cyclic GFR-binding peptide
  MOD_RES (35)..(37): Xaa is C or S
SRVHHSNITVQIMEYVRKKPKLLGEMSRLEEHLEXAX

SEQ ID NO: 15720 - protein, 33 aa, Artificial Sequence
  Non-cyclic GFR-binding peptide
VPTEERSVKMAKVRIKPHQGQHKEVQVFLQHNK

SEQ ID NO: 15721 - protein, 43 aa, Artificial Sequence
  Non-cyclic GFR-binding peptide
  MOD_RES (7)..(41)..(43): Xaa is C or S
NDEGLEXVPTGQSNITMQIMRIKPHQGQHIGEMSLEEHSQXEX

SEQ ID NO: 15722 - protein, 45 aa, Artificial Sequence
  Non-cyclic GFR-binding peptide
  MOD_RES (5)..(42)..(44): Xaa is C or S
RNVQXRPTQVQLSNITVQIMEIVRKKPIFIGEMSTLEDHLAXKXE

SEQ ID NO: 15723 - protein, 38 aa, Artificial Sequence
  Non-cyclic GFR-binding peptide
  MOD_RES (1)..(38): Xaa is C or S
  MOD_RES (17)..(18)..(19)..(20)..(21): Xaa is A or G
  MOD_RES (22)..(23)..(24)..(25): Xaa is A or G or absent
XQPSRVHHSNITVQIMXXXXXXXXXIGEMSRLEEHLEX

SEQ ID NO: 15724 - protein, 36 aa, Artificial Sequence
  Non-cyclic GFR-binding peptide
  MOD_RES (36)..(36): Xaa is C or S
  MOD_RES (15)..(16)..(17)..(18)..(19): Xaa is A or G
  MOD_RES (20)..(21)..(22)..(23): Xaa is A or G or absent
PTQVQLRSVKVAKVXXXXXXXXXKEVQVTLEDHLAX

SEQ ID NO: 15725 - protein, 39 aa, Artificial Sequence
  Non-cyclic GFR-binding peptide
  MOD_RES (4)..(38): Xaa is C or S
  MOD_RES (18)..(19)..(20)..(21)..(22): Xaa is A or G
  MOD_RES (23)..(24)..(25)..(26): Xaa is A or G or absent
GLEXVPTGQRSVKMAKVXXXXXXXXXKEVQVLEEHSQXE

SEQ ID NO: 15726 - protein, 34 aa, Artificial Sequence
  Non-cyclic GFR-binding peptide
QPSRVHHSNITVQIMEYVRKKPKLLGEMSRLEEH

SEQ ID NO: 15727 - protein, 37 aa, Artificial Sequence
  Non-cyclic GFR-binding peptide
  MOD_RES (4)..(4): Xaa is C or S
GLEXVPTEESNITMQIMRIKPHQGQHLGEMSFLQHNK

SEQ ID NO: 15728 - protein, 39 aa, Artificial Sequence
  Non-cyclic GFR-binding peptide
  MOD_RES (2)..(36)..(38): Xaa is C or S
EXVPTGQRSVKMAKVRIKPHQGQHKEVQVLEEHSQXEXR

SEQ ID NO: 15729 - protein, 34 aa, Artificial Sequence
  Non-cyclic GFR-binding peptide
  MOD_RES (14)..(15)..(16)..(17)..(18): Xaa is A or G
  MOD_RES (19)..(20)..(21)..(22): Xaa is A or G or absent
SRVHHSNITVQIMXXXXXXXXXLGEMSRLEEHLE

SEQ ID NO: 15730 - protein, 44 aa, Artificial Sequence
  Non-cyclic GFR-binding peptide
  MOD_RES (4)..(41)..(43): Xaa is C or S
  MOD_RES (20)..(21)..(22)..(23)..(24): Xaa is A or G
  MOD_RES (25)..(26)..(27)..(28): Xaa is A or G or absent
SVKXQPSRVHHSNITVQIMXXXXXXXXXLGEMSRLEEHLEXAXA

SEQ ID NO: 15731 - protein, 42 aa, Artificial Sequence
  Non-cyclic GFR-binding peptide
  MOD_RES (6)..(40)..(42): Xaa is C or S
  MOD_RES (20)..(21)..(22)..(23)..(24): Xaa is A or G
  MOD_RES (25)..(26)..(27)..(28): Xaa is A or G or absent
DEGLEXVPTEESNITMQIMXXXXXXXXXLGEMSFLQHNKXEX

SEQ ID NO: 15732 - protein, 42 aa, Artificial Sequence
  Non-cyclic GFR-binding peptide
  MOD_RES (7)..(41): Xaa is C or S
  MOD_RES (21)..(22)..(23)..(24)..(25): Xaa is A or G
  MOD_RES (26)..(27)..(28)..(29): Xaa is A or G or absent
NDEGLEXVPTEERPVQMRKIXXXXXXXXXKKATVFLQHNKXE

SEQ ID NO: 15733 - protein, 41 aa, Artificial Sequence
  Non-cyclic GFR-binding peptide
  MOD_RES (6)..(40): Xaa is C or S
  MOD_RES (20)..(21)..(22)..(23)..(24): Xaa is A or G
  MOD_RES (25)..(26)..(27)..(28): Xaa is A or G or absent
DEGLEXVPTGQRSVKMAKVXXXXXXXXXKEVQVLEEHSQXE

SEQ ID NO: 15734 - protein, 35 aa, Artificial Sequence
  Non-cyclic GFR-binding peptide
  MOD_RES (16)..(17)..(18)..(19)..(20): Xaa is A or G
  MOD_RES (21)..(22)..(23)..(24): Xaa is A or G or absent
RPTQVQLSNITVQIMXXXXXXXXXIGEMSTLEDHL

SEQ ID NO: 15735 - protein, 39 aa, Artificial Sequence
  Non-cyclic GFR-binding peptide
  MOD_RES (37)..(39): Xaa is C or S
  MOD_RES (16)..(17)..(18)..(19)..(20): Xaa is A or G
  MOD_RES (21)..(22)..(23)..(24): Xaa is A or G or absent
RPTQVQLSNITVQIMXXXXXXXXXIGEMSTLEDHLAXKX

SEQ ID NO: 15736 - protein, 39 aa, Artificial Sequence
  Non-cyclic GFR-binding peptide
  MOD_RES (1)..(38): Xaa is C or S
XRPTQVQLSNITVQIMEIVRKKPIFIGEMSTLEDHLAXK

SEQ ID NO: 15737 - protein, 41 aa, Artificial Sequence
  Non-cyclic GFR-binding peptide
  MOD_RES (3)..(40): Xaa is C or S
VKXQPSRVHHSNITVQIMEYVRKKPKLIGEMSRLEEHLEXA

SEQ ID NO: 15738 - protein, 39 aa, Artificial Sequence
  Non-cyclic GFR-binding peptide
  MOD_RES (3)..(37)..(39): Xaa is C or S
LEXVPTEESNITMQIMRIKPHQGQHLGEMSFLQHNKXEX

SEQ ID NO: 15739 - protein, 38 aa, Artificial Sequence
  Non-cyclic GFR-binding peptide
  MOD_RES (37)..(37): Xaa is C or S
QPSRVHHSNITVQIMEYVRKKPKLLGEMSRLEEHLEXA

SEQ ID NO: 15740 - protein, 35 aa, Artificial Sequence
  Non-cyclic GFR-binding peptide
  MOD_RES (15)..(16)..(17)..(18)..(19): Xaa is A or G
  MOD_RES (20)..(21)..(22)..(23): Xaa is A or G or absent
PSRVHHSNITVQIMXXXXXXXXXLGEMSRLEEHLE

SEQ ID NO: 15741 - protein, 39 aa, Artificial Sequence
  Non-cyclic GFR-binding peptide
  MOD_RES (2)..(36)..(38): Xaa is C or S
EXVPTGQRPVQMRKIRIKPHQGQHKKATVLEEHSQXEXR

SEQ ID NO: 15742 - protein, 40 aa, Artificial Sequence
  Non-cyclic GFR-binding peptide
  MOD_RES (1)..(38)..(40): Xaa is C or S
  MOD_RES (17)..(18)..(19)..(20)..(21): Xaa is A or G
  MOD_RES (22)..(23)..(24)..(25): Xaa is A or G or absent
XRPTQVQLSNITVQIMXXXXXXXXXLGEMSTLEDHLAXKX

SEQ ID NO: 15743 - protein, 39 aa, Artificial Sequence
  Non-cyclic GFR-binding peptide
  MOD_RES (36)..(38): Xaa is C or S
  MOD_RES (15)..(16)..(17)..(18)..(19): Xaa is A or G
  MOD_RES (20)..(21)..(22)..(23): Xaa is A or G or absent
PTQVQLSNITVQIMXXXXXXXXXLGEMSTLEDHLAXKXE

SEQ ID NO: 15744 - protein, 40 aa, Artificial Sequence
  Non-cyclic GFR-binding peptide
  MOD_RES (4)..(38)..(40): Xaa is C or S
GLEXVPTEERPVQMRKIRIKPHQGQHKKATVFLQHNKXEX

SEQ ID NO: 15745 - protein, 34 aa, Artificial Sequence
  Non-cyclic GFR-binding peptide
QPSRVHHRPVQVRKIEYVRKKPKLKKATVRLEEH

SEQ ID NO: 15746 - protein, 38 aa, Artificial Sequence
  Non-cyclic GFR-binding peptide
  MOD_RES (1)..(35)..(37): Xaa is C or S
  MOD_RES (15)..(16)..(17)..(18)..(19): Xaa is A or G
  MOD_RES (20)..(21)..(22)..(23): Xaa is A or G or absent
XVPTGQRPVQMRKIXXXXXXXXXKKATVLEEHSQXEXR

SEQ ID NO: 15747 - protein, 34 aa, Artificial Sequence
  Non-cyclic GFR-binding peptide
  MOD_RES (15)..(16)..(17)..(18)..(19): Xaa is A or G
  MOD_RES (20)..(21)..(22)..(23): Xaa is A or G or absent
PSRVHHSNITVQIMXXXXXXXXXLGEMSRLEEHL

SEQ ID NO: 15748 - protein, 39 aa, Artificial Sequence
  Non-cyclic GFR-binding peptide
  MOD_RES (2)..(39): Xaa is C or S
QXRPTQVQLSNITVQIMEIVRKKPIFLGEMSTLEDHLAX

SEQ ID NO: 15749 - protein, 42 aa, Artificial Sequence
  Non-cyclic GFR-binding peptide
  MOD_RES (5)..(42): Xaa is C or S
SSVKXQPSRVHHSNITVQIMEYVRKKPKLLGEMSRLEEHLEX

SEQ ID NO: 15750 - protein, 38 aa, Artificial Sequence
  Non-cyclic GFR-binding peptide
  MOD_RES (4)..(38): Xaa is C or S
GLEXVPTGQRPVQMRKIRIKPHQGQHKKATVLEEHSQX

SEQ ID NO: 15751 - protein, 42 aa, Artificial Sequence
  Non-cyclic GFR-binding peptide
  MOD_RES (3)..(40)..(42): Xaa is C or S
VQXRPTQVQLRSVKVAKVEIVRKKPIFKEVQVTLEDHLAXKX

SEQ ID NO: 15752 - protein, 41 aa, Artificial Sequence
  Non-cyclic GFR-binding peptide
  MOD_RES (7)..(41): Xaa is C or S
NDEGLEXVPTEERPVQMRKIRIKPHQGQHKKATVFLQHNKX

SEQ ID NO: 15753 - protein, 33 aa, Artificial Sequence
  Non-cyclic GFR-binding peptide
  MOD_RES (14)..(15)..(16)..(17)..(18): Xaa is A or G
  MOD_RES (19)..(20)..(21)..(22): Xaa is A or G or absent
VPTGQSNITMQIMXXXXXXXXXIGEMSLEEHSQ

SEQ ID NO: 15754 - protein, 40 aa, Artificial Sequence
  Non-cyclic GFR-binding peptide
  MOD_RES (3)..(37)..(39): Xaa is C or S
LEXVPTEESNITMQIMRIKPHQGQHLGEMSFLQHNKXEXR

SEQ ID NO: 15755 - protein, 42 aa, Artificial Sequence
  Non-cyclic GFR-binding peptide
  MOD_RES (5)..(39)..(41): Xaa is C or S
  MOD_RES (19)..(20)..(21)..(22)..(23): Xaa is A or G
  MOD_RES (24)..(25)..(26)..(27): Xaa is A or G or absent
EGLEXVPTGQSNITMQIMXXXXXXXXXIGEMSLEEHSQXEXR

SEQ ID NO: 15756 - protein, 34 aa, Artificial Sequence
  Non-cyclic GFR-binding peptide
  MOD_RES (16)..(17)..(18)..(19)..(20): Xaa is A or G
  MOD_RES (21)..(22)..(23)..(24): Xaa is A or G or absent
RPTQVQLSNITVQIMXXXXXXXXXLGEMSTLEDH

SEQ ID NO: 15757 - protein, 35 aa, Artificial Sequence
  Non-cyclic GFR-binding peptide
  MOD_RES (16)..(17)..(18)..(19)..(20): Xaa is A or G
  MOD_RES (21)..(22)..(23)..(24): Xaa is A or G or absent
QPSRVHHSNITVQIMXXXXXXXXXIGEMSRLEEHL

SEQ ID NO: 15758 - protein, 43 aa, Artificial Sequence
  Non-cyclic GFR-binding peptide
  MOD_RES (3)..(40)..(42): Xaa is C or S
  MOD_RES (19)..(20)..(21)..(22)..(23): Xaa is A or G
  MOD_RES (24)..(25)..(26)..(27): Xaa is A or G or absent
VKXQPSRVHHSNITVQIMXXXXXXXXXIGEMSRLEEHLEXAXA

SEQ ID NO: 15759 - protein, 35 aa, Artificial Sequence
  Non-cyclic GFR-binding peptide
  MOD_RES (1)..(35): Xaa is C or S
XVPTEERSVKMAKVRIKPHQGQHKEVQVFLQHNKX

SEQ ID NO: 15760 - protein, 39 aa, Artificial Sequence
  Non-cyclic GFR-binding peptide
  MOD_RES (2)..(36)..(38): Xaa is C or S
EXVPTEESNITMQIMRIKPHQGQHLGEMSFLQHNKXEXR

SEQ ID NO: 15761 - protein, 36 aa, Artificial Sequence
  Non-cyclic GFR-binding peptide
  MOD_RES (2)..(36): Xaa is C or S
  MOD_RES (16)..(17)..(18)..(19)..(20): Xaa is A or G
  MOD_RES (21)..(22)..(23)..(24): Xaa is A or G or absent
EXVPTGQSNITMQIMXXXXXXXXXIGEMSLEEHSQX

SEQ ID NO: 15762 - protein, 41 aa, Artificial Sequence
  Non-cyclic GFR-binding peptide
  MOD_RES (2)..(39)..(41): Xaa is C or S
KXQPSRVHHRPVQVRKIEYVRKKPKLKKATVRLEEHLEXAX

SEQ ID NO: 15763 - protein, 37 aa, Artificial Sequence
  Non-cyclic GFR-binding peptide
  MOD_RES (34)..(36): Xaa is C or S
VPTEERSVKMAKVRIKPHQGQHKEVQVFLQHNKXEXR

SEQ ID NO: 15764 - protein, 37 aa, Artificial Sequence
  Non-cyclic GFR-binding peptide
  MOD_RES (2)..(36): Xaa is C or S
EXVPTEERPVQMRKIRIKPHQGQHKKATVFLQHNKXE

SEQ ID NO: 15765 - protein, 40 aa, Artificial Sequence
  Non-cyclic GFR-binding peptide
  MOD_RES (1)..(38)..(40): Xaa is C or S
XRPTQVQLSNITVQIMEIVRKKPIFIGEMSTLEDHLAXKX

SEQ ID NO: 15766 - protein, 33 aa, Artificial Sequence
  Non-cyclic GFR-binding peptide
  MOD_RES (14)..(15)..(16)..(17)..(18): Xaa is A or G
  MOD_RES (19)..(20)..(21)..(22): Xaa is A or G or absent
VPTGQRPVQMRKIXXXXXXXXXKKATVLEEHSQ

SEQ ID NO: 15767 - protein, 44 aa, Artificial Sequence
  Non-cyclic GFR-binding peptide
  MOD_RES (5)..(42)..(44): Xaa is C or S
SSVKXQPSRVHHSNITVQIMEYVRKKPKLIGEMSRLEEHLEXAX

SEQ ID NO: 15768 - protein, 37 aa, Artificial Sequence
  Non-cyclic GFR-binding peptide
  MOD_RES (3)..(3): Xaa is C or S
VKXQPSRVHHSNITVQIMEYVRKKPKLLGEMSRLEEH

SEQ ID NO: 15769 - protein, 37 aa, Artificial Sequence
  Non-cyclic GFR-binding peptide
  MOD_RES (3)..(3): Xaa is C or S
VKXQPSRVHHSNITVQIMEYVRKKPKLIGEMSRLEEH

SEQ ID NO: 15770 - protein, 36 aa, Artificial Sequence
  Non-cyclic GFR-binding peptide
  MOD_RES (35)..(35): Xaa is C or S
  MOD_RES (14)..(15)..(16)..(17)..(18): Xaa is A or G
  MOD_RES (19)..(20)..(21)..(22): Xaa is A or G or absent
SRVHHSNITVQIMXXXXXXXXXLGEMSRLEEHLEXA

SEQ ID NO: 15771 - protein, 41 aa, Artificial Sequence
  Non-cyclic GFR-binding peptide
  MOD_RES (2)..(39)..(41): Xaa is C or S
QXRPTQVQLSNITVQIMEIVRKKPIFLGEMSTLEDHLAXKX

SEQ ID NO: 15772 - protein, 37 aa, Artificial Sequence
  Non-cyclic GFR-binding peptide
  MOD_RES (2)..(36): Xaa is C or S
EXVPTGQRSVKMAKVRIKPHQGQHKEVQVLEEHSQXE

SEQ ID NO: 15773 - protein, 41 aa, Artificial Sequence
  Non-cyclic GFR-binding peptide
  MOD_RES (3)..(40): Xaa is C or S
VQXRPTQVQLSNITVQIMEIVRKKPIFIGEMSTLEDHLAXK

SEQ ID NO: 15774 - protein, 41 aa, Artificial Sequence
  Non-cyclic GFR-binding peptide
  MOD_RES (4)..(38)..(40): Xaa is C or S
GLEXVPTEERSVKMAKVRIKPHQGQHKEVQVFLQHNKXEXR

SEQ ID NO: 15775 - protein, 37 aa, Artificial Sequence
  Non-cyclic GFR-binding peptide
  MOD_RES (2)..(2): Xaa is C or S
  MOD_RES (18)..(19)..(20)..(21)..(22): Xaa is A or G
  MOD_RES (23)..(24)..(25)..(26): Xaa is A or G or absent
QXRPTQVQLSNITVQIMXXXXXXXXXLGEMSTLEDHL

SEQ ID NO: 15776 - protein, 40 aa, Artificial Sequence
  Non-cyclic GFR-binding peptide
  MOD_RES (3)..(37)..(39): Xaa is C or S
LEXVPTGQRSVKMAKVRIKPHQGQHKEVQVLEEHSQXEXR

SEQ ID NO: 15777 - protein, 39 aa, Artificial Sequence
  Non-cyclic GFR-binding peptide
  MOD_RES (37)..(39): Xaa is C or S
QPSRVHHRPVQVRKIEYVRKKPKLKKATVRLEEHLEXAX

SEQ ID NO: 15778 - protein, 38 aa, Artificial Sequence
  Non-cyclic GFR-binding peptide
  MOD_RES (4)..(38): Xaa is C or S
GLEXVPTEESNITMQIMRIKPHQGQHLGEMSFLQHNKX

SEQ ID NO: 15779 - protein, 39 aa, Artificial Sequence
  Non-cyclic GFR-binding peptide
  MOD_RES (3)..(3): Xaa is C or S
VQXRPTQVQLRSVKVAKVEIVRKKPIFKEVQVTLEDHLA

SEQ ID NO: 15780 - protein, 40 aa, Artificial Sequence
  Non-cyclic GFR-binding peptide
  MOD_RES (7)..(7): Xaa is C or S
NDEGLEXVPTGQRSVKMAKVRIKPHQGQHKEVQVLEEHSQ

SEQ ID NO: 15781 - protein, 39 aa, Artificial Sequence
  Non-cyclic GFR-binding peptide
  MOD_RES (3)..(37)..(39): Xaa is C or S
  MOD_RES (17)..(18)..(19)..(20)..(21): Xaa is A or G
  MOD_RES (22)..(23)..(24)..(25): Xaa is A or G or absent
LEXVPTGQRSVKMAKVXXXXXXXXXKEVQVLEEHSQXEX

SEQ ID NO: 15782 - protein, 41 aa, Artificial Sequence
  Non-cyclic GFR-binding peptide
  MOD_RES (5)..(39)..(41): Xaa is C or S
  MOD_RES (19)..(20)..(21)..(22)..(23): Xaa is A or G
  MOD_RES (24)..(25)..(26)..(27): Xaa is A or G or absent
EGLEXVPTGQSNITMQIMXXXXXXXXXIGEMSLEEHSQXEX

SEQ ID NO: 15783 - protein, 35 aa, Artificial Sequence
  Non-cyclic GFR-binding peptide
  MOD_RES (16)..(17)..(18)..(19)..(20): Xaa is A or G
  MOD_RES (21)..(22)..(23)..(24): Xaa is A or G or absent
QPSRVHHRPVQVRKIXXXXXXXXXKKATVRLEEHL

SEQ ID NO: 15784 - protein, 43 aa, Artificial Sequence
  Non-cyclic GFR-binding peptide
  MOD_RES (4)..(41)..(43): Xaa is C or S
  MOD_RES (20)..(21)..(22)..(23)..(24): Xaa is A or G
  MOD_RES (25)..(26)..(27)..(28): Xaa is A or G or absent
SVKXQPSRVHHRPVQVRKIXXXXXXXXXKKATVRLEEHLEXAX

SEQ ID NO: 15785 - protein, 39 aa, Artificial Sequence
  Non-cyclic GFR-binding peptide
  MOD_RES (36)..(38): Xaa is C or S
  MOD_RES (15)..(16)..(17)..(18)..(19): Xaa is A or G
  MOD_RES (20)..(21)..(22)..(23): Xaa is A or G or absent
PSRVHHSNITVQIMXXXXXXXXXIGEMSRLEEHLEXAXA

SEQ ID NO: 15786 - protein, 35 aa, Artificial Sequence
  Non-cyclic GFR-binding peptide
PTQVQLSNITVQIMEIVRKKPIFIGEMSTLEDHLA

SEQ ID NO: 15787 - protein, 40 aa, Artificial Sequence
  Non-cyclic GFR-binding peptide
  MOD_RES (5)..(5): Xaa is C or S
  MOD_RES (21)..(22)..(23)..(24)..(25): Xaa is A or G
  MOD_RES (26)..(27)..(28)..(29): Xaa is A or G or absent
RNVQXRPTQVQLSNITVQIMXXXXXXXXXIGEMSTLEDHL

SEQ ID NO: 15788 - protein, 38 aa, Artificial Sequence
  Non-cyclic GFR-binding peptide
  MOD_RES (3)..(37): Xaa is C or S
LEXVPTEERPVQMRKIRIKPHQGQHKKATVFLQHNKXE

SEQ ID NO: 15789 - protein, 43 aa, Artificial Sequence
  Non-cyclic GFR-binding peptide
  MOD_RES (5)..(42): Xaa is C or S
  MOD_RES (21)..(22)..(23)..(24)..(25): Xaa is A or G
  MOD_RES (26)..(27)..(28)..(29): Xaa is A or G or absent
RNVQXRPTQVQLSNITVQIMXXXXXXXXXLGEMSTLEDHLAXK

SEQ ID NO: 15790 - protein, 41 aa, Artificial Sequence
  Non-cyclic GFR-binding peptide
  MOD_RES (4)..(41): Xaa is C or S
  MOD_RES (20)..(21)..(22)..(23)..(24): Xaa is A or G
  MOD_RES (25)..(26)..(27)..(28): Xaa is A or G or absent
NVQXRPTQVQLSNITVQIMXXXXXXXXXIGEMSTLEDHLAX

SEQ ID NO: 15791 - protein, 38 aa, Artificial Sequence
  Non-cyclic GFR-binding peptide
  MOD_RES (37)..(37): Xaa is C or S
  MOD_RES (16)..(17)..(18)..(19)..(20): Xaa is A or G
  MOD_RES (21)..(22)..(23)..(24): Xaa is A or G or absent
QPSRVHHSNITVQIMXXXXXXXXXLGEMSRLEEHLEXA

SEQ ID NO: 15792 - protein, 34 aa, Artificial Sequence
  Non-cyclic GFR-binding peptide
  MOD_RES (1)..(1): Xaa is C or S
  MOD_RES (15)..(16)..(17)..(18)..(19): Xaa is A or G
  MOD_RES (20)..(21)..(22)..(23): Xaa is A or G or absent
XVPTGQRSVKMAKVXXXXXXXXXKEVQVLEEHSQ

SEQ ID NO: 15793 - protein, 41 aa, Artificial Sequence
  Non-cyclic GFR-binding peptide
  MOD_RES (4)..(38)..(40): Xaa is C or S
  MOD_RES (18)..(19)..(20)..(21)..(22): Xaa is A or G
  MOD_RES (23)..(24)..(25)..(26): Xaa is A or G or absent
GLEXVPTEERPVQMRKIXXXXXXXXXKKATVFLQHNKXEXR

SEQ ID NO: 15794 - protein, 41 aa, Artificial Sequence
  Non-cyclic GFR-binding peptide
  MOD_RES (3)..(40): Xaa is C or S
  MOD_RES (19)..(20)..(21)..(22)..(23): Xaa is A or G
  MOD_RES (24)..(25)..(26)..(27): Xaa is A or G or absent
VQXRPTQVQLSNITVQIMXXXXXXXXXIGEMSTLEDHLAXK

SEQ ID NO: 15795 - protein, 35 aa, Artificial Sequence
  Non-cyclic GFR-binding peptide
  MOD_RES (1)..(35): Xaa is C or S
  MOD_RES (15)..(16)..(17)..(18)..(19): Xaa is A or G
  MOD_RES (20)..(21)..(22)..(23): Xaa is A or G or absent
XVPTEERSVKMAKVXXXXXXXXXKEVQVFLQHNKX

SEQ ID NO: 15796 - protein, 39 aa, Artificial Sequence
  Non-cyclic GFR-binding peptide
  MOD_RES (4)..(4): Xaa is C or S
NVQXRPTQVQLSNITVQIMEIVRKKPIFIGEMSTLEDHL

SEQ ID NO: 15797 - protein, 38 aa, Artificial Sequence
  Non-cyclic GFR-binding peptide
  MOD_RES (4)..(38): Xaa is C or S
  MOD_RES (18)..(19)..(20)..(21)..(22): Xaa is A or G
  MOD_RES (23)..(24)..(25)..(26): Xaa is A or G or absent
GLEXVPTGQRPVQMRKIXXXXXXXXXKKATVLEEHSQX

SEQ ID NO: 15798 - protein, 40 aa, Artificial Sequence
  Non-cyclic GFR-binding peptide
  MOD_RES (5)..(5): Xaa is C or S
RNVQXRPTQVQLRSVKVAKVEIVRKKPIFKEVQVTLEDHL

SEQ ID NO: 15799 - protein, 37 aa, Artificial Sequence
  Non-cyclic GFR-binding peptide
  MOD_RES (36)..(36): Xaa is C or S
PSRVHHSNITVQIMEYVRKKPKLIGEMSRLEEHLEXA

SEQ ID NO: 15800 - protein, 42 aa, Artificial Sequence
  Non-cyclic GFR-binding peptide
  MOD_RES (7)..(41): Xaa is C or S
NDEGLEXVPTEESNITMQIMRIKPHQGQHLGEMSFLQHNKXE

SEQ ID NO: 15801 - protein, 41 aa, Artificial Sequence
  Non-cyclic GFR-binding peptide
  MOD_RES (1)..(38)..(40): Xaa is C or S
  MOD_RES (17)..(18)..(19)..(20)..(21): Xaa is A or G
  MOD_RES (22)..(23)..(24)..(25): Xaa is A or G or absent
XRPTQVQLSNITVQIMXXXXXXXXXLGEMSTLEDHLAXKXE

SEQ ID NO: 15802 - protein, 36 aa, Artificial Sequence
  Non-cyclic GFR-binding peptide
  MOD_RES (34)..(36): Xaa is C or S
VPTEESNITMQIMRIKPHQGQHLGEMSFLQHNKXEX

SEQ ID NO: 15803 - protein, 37 aa, Artificial Sequence
  Non-cyclic GFR-binding peptide
  MOD_RES (1)..(1): Xaa is C or S
  MOD_RES (17)..(18)..(19)..(20)..(21): Xaa is A or G
  MOD_RES (22)..(23)..(24)..(25): Xaa is A or G or absent
XQPSRVHHSNITVQIMXXXXXXXXXIGEMSRLEEHLE

SEQ ID NO: 15804 - protein, 41 aa, Artificial Sequence
  Non-cyclic GFR-binding peptide
  MOD_RES (4)..(41): Xaa is C or S
SVKXQPSRVHHRPVQVRKIEYVRKKPKLKKATVRLEEHLEX

SEQ ID NO: 15805 - protein, 36 aa, Artificial Sequence
  Non-cyclic GFR-binding peptide
  MOD_RES (3)..(3): Xaa is C or S
LEXVPTGQRPVQMRKIRIKPHQGQHKKATVLEEHSQ

SEQ ID NO: 15806 - protein, 40 aa, Artificial Sequence
  Non-cyclic GFR-binding peptide
  MOD_RES (1)..(38)..(40): Xaa is C or S
  MOD_RES (17)..(18)..(19)..(20)..(21): Xaa is A or G
  MOD_RES (22)..(23)..(24)..(25): Xaa is A or G or absent
XQPSRVHHRPVQVRKIXXXXXXXXXKKATVRLEEHLEXAX

SEQ ID NO: 15807 - protein, 43 aa, Artificial Sequence
  Non-cyclic GFR-binding peptide
  MOD_RES (5)..(42): Xaa is C or S
RNVQXRPTQVQLSNITVQIMEIVRKKPIFLGEMSTLEDHLAXK

SEQ ID NO: 15808 - protein, 37 aa, Artificial Sequence
  Non-cyclic GFR-binding peptide
  MOD_RES (34)..(36): Xaa is C or S
  MOD_RES (14)..(15)..(16)..(17)..(18): Xaa is A or G
  MOD_RES (19)..(20)..(21)..(22): Xaa is A or G or absent
VPTEERPVQMRKIXXXXXXXXXKKATVFLQHNKXEXR

SEQ ID NO: 15809 - protein, 37 aa, Artificial Sequence
  Non-cyclic GFR-binding peptide
  MOD_RES (35)..(37): Xaa is C or S
  MOD_RES (14)..(15)..(16)..(17)..(18): Xaa is A or G
  MOD_RES (19)..(20)..(21)..(22): Xaa is A or G or absent
TQVQLRSVKVAKVXXXXXXXXXKEVQVTLEDHLAXKX

SEQ ID NO: 15810 - protein, 40 aa, Artificial Sequence
  Non-cyclic GFR-binding peptide
  MOD_RES (4)..(38)..(40): Xaa is C or S
  MOD_RES (18)..(19)..(20)..(21)..(22): Xaa is A or G
  MOD_RES (23)..(24)..(25)..(26): Xaa is A or G or absent
GLEXVPTGQRPVQMRKIXXXXXXXXXKKATVLEEHSQXEX

SEQ ID NO: 15811 - protein, 39 aa, Artificial Sequence
  Non-cyclic GFR-binding peptide
  MOD_RES (5)..(5): Xaa is C or S
  MOD_RES (21)..(22)..(23)..(24)..(25): Xaa is A or G
  MOD_RES (26)..(27)..(28)..(29): Xaa is A or G or absent
RNVQXRPTQVQLSNITVQIMXXXXXXXXXIGEMSTLEDH

SEQ ID NO: 15812 - protein, 34 aa, Artificial Sequence
  Non-cyclic GFR-binding peptide
  MOD_RES (34)..(34): Xaa is C or S
  MOD_RES (14)..(15)..(16)..(17)..(18): Xaa is A or G
  MOD_RES (19)..(20)..(21)..(22): Xaa is A or G or absent
VPTEERSVKMAKVXXXXXXXXXKEVQVFLQHNKX

SEQ ID NO: 15813 - protein, 36 aa, Artificial Sequence
  Non-cyclic GFR-binding peptide
  MOD_RES (3)..(3): Xaa is C or S
LEXVPTGQSNITMQIMRIKPHQGQHIGEMSLEEHSQ

SEQ ID NO: 15814 - protein, 37 aa, Artificial Sequence
  Non-cyclic GFR-binding peptide
  MOD_RES (37)..(37): Xaa is C or S
  MOD_RES (16)..(17)..(18)..(19)..(20): Xaa is A or G
  MOD_RES (21)..(22)..(23)..(24): Xaa is A or G or absent
RPTQVQLSNITVQIMXXXXXXXXXLGEMSTLEDHLAX

SEQ ID NO: 15815 - protein, 39 aa, Artificial Sequence
  Non-cyclic GFR-binding peptide
  MOD_RES (5)..(5): Xaa is C or S
  MOD_RES (21)..(22)..(23)..(24)..(25): Xaa is A or G
  MOD_RES (26)..(27)..(28)..(29): Xaa is A or G or absent
RNVQXRPTQVQLSNITVQIMXXXXXXXXXLGEMSTLEDH

SEQ ID NO: 15816 - protein, 38 aa, Artificial Sequence
  Non-cyclic GFR-binding peptide
  MOD_RES (2)..(36)..(38): Xaa is C or S
  MOD_RES (16)..(17)..(18)..(19)..(20): Xaa is A or G
  MOD_RES (21)..(22)..(23)..(24): Xaa is A or G or absent
EXVPTEERPVQMRKIXXXXXXXXXKKATVFLQHNKXEX

SEQ ID NO: 15817 - protein, 36 aa, Artificial Sequence
  Non-cyclic GFR-binding peptide
QPSRVHHSNITVQIMEYVRKKPKLLGEMSRLEEHLE

SEQ ID NO: 15818 - protein, 39 aa, Artificial Sequence
  Non-cyclic GFR-binding peptide
  MOD_RES (4)..(38): Xaa is C or S
  MOD_RES (18)..(19)..(20)..(21)..(22): Xaa is A or G
  MOD_RES (23)..(24)..(25)..(26): Xaa is A or G or absent
GLEXVPTEERPVQMRKIXXXXXXXXXKKATVFLQHNKXE

SEQ ID NO: 15819 - protein, 36 aa, Artificial Sequence
  Non-cyclic GFR-binding peptide
  MOD_RES (1)..(1): Xaa is C or S
  MOD_RES (17)..(18)..(19)..(20)..(21): Xaa is A or G
  MOD_RES (22)..(23)..(24)..(25): Xaa is A or G or absent
XQPSRVHHRPVQVRKIXXXXXXXXXKKATVRLEEHL

SEQ ID NO: 15820 - protein, 42 aa, Artificial Sequence
  Non-cyclic GFR-binding peptide
  MOD_RES (2)..(39)..(41): Xaa is C or S
QXRPTQVQLSNITVQIMEIVRKKPIFIGEMSTLEDHLAXKXE

SEQ ID NO: 15821 - protein, 41 aa, Artificial Sequence
  Non-cyclic GFR-binding peptide
  MOD_RES (6)..(40): Xaa is C or S
  MOD_RES (20)..(21)..(22)..(23)..(24): Xaa is A or G
  MOD_RES (25)..(26)..(27)..(28): Xaa is A or G or absent
DEGLEXVPTEERPVQMRKIXXXXXXXXXKKATVFLQHNKXE

SEQ ID NO: 15822 - protein, 34 aa, Artificial Sequence
  Non-cyclic GFR-binding peptide
  MOD_RES (16)..(17)..(18)..(19)..(20): Xaa is A or G
  MOD_RES (21)..(22)..(23)..(24): Xaa is A or G or absent
RPTQVQLSNITVQIMXXXXXXXXXIGEMSTLEDH

SEQ ID NO: 15823 - protein, 34 aa, Artificial Sequence
  Non-cyclic GFR-binding peptide
  MOD_RES (34)..(34): Xaa is C or S
VPTEERSVKMAKVRIKPHQGQHKEVQVFLQHNKX

SEQ ID NO: 15824 - protein, 36 aa, Artificial Sequence
  Non-cyclic GFR-binding peptide
  MOD_RES (1)..(1): Xaa is C or S
  MOD_RES (17)..(18)..(19)..(20)..(21): Xaa is A or G
  MOD_RES (22)..(23)..(24)..(25): Xaa is A or G or absent
XQPSRVHHSNITVQIMXXXXXXXXXIGEMSRLEEHL

SEQ ID NO: 15825 - protein, 41 aa, Artificial Sequence
  Non-cyclic GFR-binding peptide
  MOD_RES (5)..(39)..(41): Xaa is C or S
  MOD_RES (19)..(20)..(21)..(22)..(23): Xaa is A or G
  MOD_RES (24)..(25)..(26)..(27): Xaa is A or G or absent
EGLEXVPTGQRPVQMRKIXXXXXXXXXKKATVLEEHSQXEX

SEQ ID NO: 15826 - protein, 39 aa, Artificial Sequence
  Non-cyclic GFR-binding peptide
  MOD_RES (3)..(3): Xaa is C or S
VQXRPTQVQLSNITVQIMEIVRKKPIFLGEMSTLEDHLA

SEQ ID NO: 15827 - protein, 40 aa, Artificial Sequence
  Non-cyclic GFR-binding peptide
  MOD_RES (3)..(40): Xaa is C or S
  MOD_RES (19)..(20)..(21)..(22)..(23): Xaa is A or G
  MOD_RES (24)..(25)..(26)..(27): Xaa is A or G or absent
VKXQPSRVHHSNITVQIMXXXXXXXXXIGEMSRLEEHLEX

SEQ ID NO: 15828 - protein, 35 aa, Artificial Sequence
  Non-cyclic GFR-binding peptide
  MOD_RES (35)..(35): Xaa is C or S
  MOD_RES (14)..(15)..(16)..(17)..(18): Xaa is A or G
  MOD_RES (19)..(20)..(21)..(22): Xaa is A or G or absent
SRVHHSNITVQIMXXXXXXXXXLGEMSRLEEHLEX

SEQ ID NO: 15829 - protein, 37 aa, Artificial Sequence
  Non-cyclic GFR-binding peptide
  MOD_RES (3)..(37): Xaa is C or S
LEXVPTGQRSVKMAKVRIKPHQGQHKEVQVLEEHSQX

SEQ ID NO: 15830 - protein, 41 aa, Artificial Sequence
  Non-cyclic GFR-binding peptide
  MOD_RES (7)..(41): Xaa is C or S
  MOD_RES (21)..(22)..(23)..(24)..(25): Xaa is A or G
  MOD_RES (26)..(27)..(28)..(29): Xaa is A or G or absent
NDEGLEXVPTEERPVQMRKIXXXXXXXXXKKATVFLQHNKX

SEQ ID NO: 15831 - protein, 37 aa, Artificial Sequence
  Non-cyclic GFR-binding peptide
  MOD_RES (3)..(37): Xaa is C or S
  MOD_RES (17)..(18)..(19)..(20)..(21): Xaa is A or G
  MOD_RES (22)..(23)..(24)..(25): Xaa is A or G or absent
LEXVPTGQRSVKMAKVXXXXXXXXXKEVQVLEEHSQX

SEQ ID NO: 15832 - protein, 40 aa, Artificial Sequence
  Non-cyclic GFR-binding peptide
  MOD_RES (3)..(37)..(39): Xaa is C or S
  MOD_RES (17)..(18)..(19)..(20)..(21): Xaa is A or G
  MOD_RES (22)..(23)..(24)..(25): Xaa is A or G or absent
LEXVPTGQRPVQMRKIXXXXXXXXXKKATVLEEHSQXEXR

SEQ ID NO: 15833 - protein, 38 aa, Artificial Sequence
  Non-cyclic GFR-binding peptide
  MOD_RES (37)..(37): Xaa is C or S
  MOD_RES (16)..(17)..(18)..(19)..(20): Xaa is A or G
  MOD_RES (21)..(22)..(23)..(24): Xaa is A or G or absent
QPSRVHHRPVQVRKIXXXXXXXXXKKATVRLEEHLEXA

SEQ ID NO: 15834 - protein, 40 aa, Artificial Sequence
  Non-cyclic GFR-binding peptide
  MOD_RES (1)..(3)..(38)..(39): Xaa is C or S
  MOD_RES (16)..(17)..(18)..(19)..(20): Xaa is A or G
  MOD_RES (21)..(22)..(23)..(24): Xaa is A or G or absent
XGXEAVSMGEEYQKYXXXXXXXXXIYLVSIPSLKTPVXXA

SEQ ID NO: 15835 - protein, 36 aa, Artificial Sequence
  Non-cyclic GFR-binding peptide
  MOD_RES (2)..(36): Xaa is C or S
  MOD_RES (14)..(15)..(16)..(17)..(18): Xaa is A or G
  MOD_RES (19)..(20)..(21)..(22): Xaa is A or G or absent
GXESVAMGEYQKYXXXXXXXXXIYLISIPSLKTPVX

SEQ ID NO: 15836 - protein, 35 aa, Artificial Sequence
  Non-cyclic GFR-binding peptide
  MOD_RES (1)..(33)..(34): Xaa is C or S
XGEVVMDEYQKYVVKENEDIYLMSIPSLETPVXXA

SEQ ID NO: 15837 - protein, 40 aa, Artificial Sequence
  Non-cyclic GFR-binding peptide
  MOD_RES (2)..(4)..(36)..(37): Xaa is C or S
RXGXGEVVMEEYKFKVVKDYEDLYLMSIPELETPVXXAKP

SEQ ID NO: 15838 - protein, 41 aa, Artificial Sequence
  Non-cyclic GFR-binding peptide
  MOD_RES (2)..(4)..(39)..(40): Xaa is C or S
  MOD_RES (17)..(18)..(19)..(20)..(21): Xaa is A or G
  MOD_RES (22)..(23)..(24)..(25): Xaa is A or G or absent
RXGXEAVSMGEEYQKYXXXXXXXXXIYLVSIPSLKTPVXXA

SEQ ID NO: 15839 - protein, 32 aa, Artificial Sequence
  Non-cyclic GFR-binding peptide
  MOD_RES (31)..(32): Xaa is C or S
KVVMNEYQKYIVNNSSDIYLVSIPSLKTPAXX

SEQ ID NO: 15840 - protein, 40 aa, Artificial Sequence
  Non-cyclic GFR-binding peptide
  MOD_RES (2)..(4)..(39)..(40): Xaa is C or S
  MOD_RES (17)..(18)..(19)..(20)..(21): Xaa is A or G
  MOD_RES (22)..(23)..(24)..(25): Xaa is A or G or absent
RXGXEAVSMGEEYQKYXXXXXXXXXIYLVSIPSLKTPVXX

SEQ ID NO: 15841 - protein, 33 aa, Artificial Sequence
  Non-cyclic GFR-binding peptide
  MOD_RES (31)..(32): Xaa is C or S
SKVVMEYKFKVKPTRGVLYLISIPELDQPVXXP

SEQ ID NO: 15842 - protein, 40 aa, Artificial Sequence
  Non-cyclic GFR-binding peptide
  MOD_RES (1)..(3)..(36)..(37): Xaa is C or S
  MOD_RES (14)..(15)..(16)..(17)..(18): Xaa is A or G
  MOD_RES (19)..(20)..(21)..(22): Xaa is A or G or absent
XKXSKVVMEYKFKXXXXXXXXXLYLISIPELDQPVXXPSA

SEQ ID NO: 15843 - protein, 33 aa, Artificial Sequence
  Non-cyclic GFR-binding peptide
  MOD_RES (1)..(1): Xaa is C or S
  MOD_RES (12)..(13)..(14)..(15)..(16): Xaa is A or G
  MOD_RES (17)..(18)..(19)..(20): Xaa is A or G or absent
XSRVIMEYQKYXXXXXXXXXIYLISIPSLAQPV

SEQ ID NO: 15844 - protein, 39 aa, Artificial Sequence
  Non-cyclic GFR-binding peptide
  MOD_RES (2)..(36): Xaa is C or S
  MOD_RES (14)..(15)..(16)..(17)..(18): Xaa is A or G
  MOD_RES (19)..(20)..(21)..(22): Xaa is A or G or absent
GXSRVVMNEYQKYXXXXXXXXXIYLVSIPSLKTPAXTPK

SEQ ID NO: 15845 - protein, 37 aa, Artificial Sequence
  Non-cyclic GFR-binding peptide
  MOD_RES (2)..(33)..(34): Xaa is C or S
KXSKVIMEYKFKIKPTKGILYLISIPELDQSVXXPSA

SEQ ID NO: 15846 - protein, 40 aa, Artificial Sequence
  Non-cyclic GFR-binding peptide
  MOD_RES (2)..(4)..(36)..(37): Xaa is C or S
HXGXARVVMNEYKFKIVNSSDDLYLVSIPELQTPAXXPKP

SEQ ID NO: 15847 - protein, 36 aa, Artificial Sequence
  Non-cyclic GFR-binding peptide
  MOD_RES (33)..(34): Xaa is C or S
  MOD_RES (11)..(12)..(13)..(14)..(15): Xaa is A or G
  MOD_RES (16)..(17)..(18)..(19): Xaa is A or G or absent
KVVMNEYQKYXXXXXXXXXIYLVSIPSLKTPAXXAK

SEQ ID NO: 15848 - protein, 36 aa, Artificial Sequence
  Non-cyclic GFR-binding peptide
  MOD_RES (31)..(32): Xaa is C or S
EVVMEEYQKYVVKDYEDIYLMSIPSLETPVXXAKPI

SEQ ID NO: 15849 - protein, 38 aa, Artificial Sequence
  Non-cyclic GFR-binding peptide
  MOD_RES (33)..(34): Xaa is C or S
  MOD_RES (11)..(12)..(13)..(14)..(15): Xaa is A or G
  MOD_RES (16)..(17)..(18)..(19): Xaa is A or G or absent
EVVMEEYQKYXXXXXXXXXIYLMSIPSLETPVXXAKPI

SEQ ID NO: 15850 - protein, 34 aa, Artificial Sequence
  Non-cyclic GFR-binding peptide
  MOD_RES (1)..(33)..(34): Xaa is C or S
XAEVVMDYHYKLVVNNAADKYLISIPSLRAPVXX

SEQ ID NO: 15851 - protein, 35 aa, Artificial Sequence
  Non-cyclic GFR-binding peptide
  MOD_RES (1)..(35): Xaa is C or S
  MOD_RES (13)..(14)..(15)..(16)..(17): Xaa is A or G
  MOD_RES (18)..(19)..(20)..(21): Xaa is A or G or absent
XARVVMNEYKFKXXXXXXXXXLYLVSIPELQTPAX

SEQ ID NO: 15852 - protein, 35 aa, Artificial Sequence
  Non-cyclic GFR-binding peptide
  MOD_RES (33)..(34): Xaa is C or S
  MOD_RES (11)..(12)..(13)..(14)..(15): Xaa is A or G
  MOD_RES (16)..(17)..(18)..(19): Xaa is A or G or absent
EVVMDRYKKLXXXXXXXXXFYLISIANLRAPVXXS

SEQ ID NO: 15853 - protein, 36 aa, Artificial Sequence
  Non-cyclic GFR-binding peptide
  MOD_RES (1)..(35)..(36): Xaa is C or S
  MOD_RES (13)..(14)..(15)..(16)..(17): Xaa is A or G
  MOD_RES (18)..(19)..(20)..(21): Xaa is A or G or absent
XESVAMGYHYKLXXXXXXXXXKYLISIPSLKTPVXX

SEQ ID NO: 15854 - protein, 35 aa, Artificial Sequence
  Non-cyclic GFR-binding peptide
  MOD_RES (1)..(3)..(35): Xaa is C or S
XGXGEVVMEEYKFKVVKDYEDLYLMSIPELETPVX

SEQ ID NO: 15855 - protein, 35 aa, Artificial Sequence
  Non-cyclic GFR-binding peptide
  MOD_RES (1)..(3): Xaa is C or S
  MOD_RES (14)..(15)..(16)..(17)..(18): Xaa is A or G
  MOD_RES (19)..(20)..(21)..(22): Xaa is A or G or absent
XKXSKVVMEYKFKXXXXXXXXXLYLISIPELDQPV

SEQ ID NO: 15856 - protein, 31 aa, Artificial Sequence
  Non-cyclic GFR-binding peptide
  MOD_RES (31)..(31): Xaa is C or S
SVAMGRYKKLYTVVGKDFYLISIANLKTPVX

SEQ ID NO: 15857 - protein, 40 aa, Artificial Sequence
  Non-cyclic GFR-binding peptide
  MOD_RES (1)..(35)..(36): Xaa is C or S
  MOD_RES (13)..(14)..(15)..(16)..(17): Xaa is A or G
  MOD_RES (18)..(19)..(20)..(21): Xaa is A or G or absent
XESVAMGRYKKLXXXXXXXXXFYLISIANLKTPVXXAKSA

SEQ ID NO: 15858 - protein, 34 aa, Artificial Sequence
  Non-cyclic GFR-binding peptide
  MOD_RES (2)..(34): Xaa is C or S
GXGEVVMEEYQKYVVKDYEDIYLMSIPSLETPVX

SEQ ID NO: 15859 - protein, 30 aa, Artificial Sequence
  Non-cyclic GFR-binding peptide
KVVMNEYKFKIVNNSSDLYLVSIPELKTPA

SEQ ID NO: 15860 - protein, 42 aa, Artificial Sequence
  Non-cyclic GFR-binding peptide
  MOD_RES (2)..(4)..(36)..(37): Xaa is C or S
RXGXAEVVMDEYKFKVVNNAADLYLISIPELRAPVXXSAPAA

SEQ ID NO: 15861 - protein, 37 aa, Artificial Sequence
  Non-cyclic GFR-binding peptide
  MOD_RES (34)..(35): Xaa is C or S
  MOD_RES (12)..(13)..(14)..(15)..(16): Xaa is A or G
  MOD_RES (17)..(18)..(19)..(20): Xaa is A or G or absent
ESVAMGEYQKYXXXXXXXXXIYLISIPSLKTPVXXAK

SEQ ID NO: 15862 - protein, 36 aa, Artificial Sequence
  Non-cyclic GFR-binding peptide
  MOD_RES (31)..(32): Xaa is C or S
SKVVMEYQKYVKPTRGVIYLISIPSLDQPVXXPSAS

SEQ ID NO: 15863 - protein, 35 aa, Artificial Sequence
  Non-cyclic GFR-binding peptide
  MOD_RES (34)..(35): Xaa is C or S
  MOD_RES (12)..(13)..(14)..(15)..(16): Xaa is A or G
  MOD_RES (17)..(18)..(19)..(20): Xaa is A or G or absent
GEVVMDEYKFKXXXXXXXXXLYLMSIPELETPVXX

SEQ ID NO: 15864 - protein, 40 aa, Artificial Sequence
  Non-cyclic GFR-binding peptide
  MOD_RES (35)..(36): Xaa is C or S
  MOD_RES (13)..(14)..(15)..(16)..(17): Xaa is A or G
  MOD_RES (18)..(19)..(20)..(21): Xaa is A or G or absent
EAVSMGEEYKFKXXXXXXXXXLYLVSIPELKTPVXXAKGV

SEQ ID NO: 15865 - protein, 38 aa, Artificial Sequence
  Non-cyclic GFR-binding peptide
  MOD_RES (2)..(4)..(36): Xaa is C or S
HXGXSRVVMNEYQKYIVNSSDDIYLVSIPSLKTPAXTP

SEQ ID NO: 15866 - protein, 37 aa, Artificial Sequence
  Non-cyclic GFR-binding peptide
  MOD_RES (31)..(32): Xaa is C or S
SRVIMEYQKYVKPKRGVIYLISIPSLAQPVXXPAASA

SEQ ID NO: 15867 - protein, 38 aa, Artificial Sequence
  Non-cyclic GFR-binding peptide
  MOD_RES (2)..(4)..(38): Xaa is C or S
  MOD_RES (16)..(17)..(18)..(19)..(20): Xaa is A or G
  MOD_RES (21)..(22)..(23)..(24): Xaa is A or G or absent
HXGXARVVMNEYQKYXXXXXXXXXIYLVSIPSLQTPAX

SEQ ID NO: 15868 - protein, 41 aa, Artificial Sequence
  Non-cyclic GFR-binding peptide
  MOD_RES (1)..(3)..(35)..(36): Xaa is C or S
XGXSRVVMNEYQKYIVNSSDDIYLVSIPSLKTPAXXPKPVY

SEQ ID NO: 15869 - protein, 32 aa, Artificial Sequence
  Non-cyclic GFR-binding peptide
  MOD_RES (1)..(32): Xaa is C or S
XSKVVMEYQKYVKPTRGVIYLISIPSLDQPVX

SEQ ID NO: 15870 - protein, 40 aa, Artificial Sequence
  Non-cyclic GFR-binding peptide
  MOD_RES (1)..(3)..(35)..(36): Xaa is C or S
XGXSRVVMNEYKFKIVNSSDDLYLVSIPELKTPAXXPKPV

SEQ ID NO: 15871 - protein, 37 aa, Artificial Sequence
  Non-cyclic GFR-binding peptide
  MOD_RES (1)..(33)..(34): Xaa is C or S
XESVAMGRYKKLYTVVGKDFYLISIANLKTPVXXAKS

SEQ ID NO: 15872 - protein, 43 aa, Artificial Sequence
  Non-cyclic GFR-binding peptide
  MOD_RES (2)..(4)..(38)..(39): Xaa is C or S
  MOD_RES (16)..(17)..(18)..(19)..(20): Xaa is A or G
  MOD_RES (21)..(22)..(23)..(24): Xaa is A or G or absent
HXGXARVVMNEYKFKXXXXXXXXXLYLVSIPELQTPAXXPKPV

SEQ ID NO: 15873 - protein, 42 aa, Artificial Sequence
  Non-cyclic GFR-binding peptide
  MOD_RES (2)..(4)..(36)..(37): Xaa is C or S
RXGXAEVVMDYHYKLVVNNAADKYLISIPSLRAPVXXSAPAA

SEQ ID NO: 15874 - protein, 37 aa, Artificial Sequence
  Non-cyclic GFR-binding peptide
  MOD_RES (2)..(35)..(36): Xaa is C or S
  MOD_RES (13)..(14)..(15)..(16)..(17): Xaa is A or G
  MOD_RES (18)..(19)..(20)..(21): Xaa is A or G or absent
KXSKVVMEYKFKXXXXXXXXXLYLISIPELDQPVXXP

SEQ ID NO: 15875 - protein, 41 aa, Artificial Sequence
  Non-cyclic GFR-binding peptide
  MOD_RES (1)..(3)..(35)..(36): Xaa is C or S
XGXGEVVMDEYQKYVVKENEDIYLMSIPSLETPVXXAKPIK

SEQ ID NO: 15876 - protein, 37 aa, Artificial Sequence
  Non-cyclic GFR-binding peptide
  MOD_RES (2)..(34)..(35): Xaa is C or S
GXAEVVMDEYKFKVVNNAADLYLISIPELRAPVXXSA

SEQ ID NO: 15877 - protein, 36 aa, Artificial Sequence
  Non-cyclic GFR-binding peptide
  MOD_RES (2)..(36): Xaa is C or S
  MOD_RES (14)..(15)..(16)..(17)..(18): Xaa is A or G
  MOD_RES (19)..(20)..(21)..(22): Xaa is A or G or absent
GXSRVVMNEYQKYXXXXXXXXXIYLVSIPSLKTPAX

SEQ ID NO: 15878 - protein, 42 aa, Artificial Sequence
  Non-cyclic GFR-binding peptide
  MOD_RES (2)..(36)..(37): Xaa is C or S
  MOD_RES (14)..(15)..(16)..(17)..(18): Xaa is A or G
  MOD_RES (19)..(20)..(21)..(22): Xaa is A or G or absent
GXAKVVMNEYQKYXXXXXXXXXIYLVSIPSLKTPAXXAKPVA

SEQ ID NO: 15879 - protein, 36 aa, Artificial Sequence
  Non-cyclic GFR-binding peptide
  MOD_RES (31)..(31): Xaa is C or S
RVVMNEYQKYIVNSSDDIYLVSIPSLKTPAXTPKTV

SEQ ID NO: 15880 - protein, 37 aa, Artificial Sequence
  Non-cyclic GFR-binding peptide
  MOD_RES (1)..(33)..(34): Xaa is C or S
XGEVVMDEYKFKVVKENEDLYLMSIPELETPVXXAKP

SEQ ID NO: 15881 - protein, 36 aa, Artificial Sequence
  Non-cyclic GFR-binding peptide
  MOD_RES (1)..(3)..(36): Xaa is C or S
  MOD_RES (14)..(15)..(16)..(17)..(18): Xaa is A or G
  MOD_RES (19)..(20)..(21)..(22): Xaa is A or G or absent
XKXSKVVMEYKFKXXXXXXXXXLYLISIPELDQPVX

SEQ ID NO: 15882 - protein, 36 aa, Artificial Sequence
  Non-cyclic GFR-binding peptide
  MOD_RES (34)..(35): Xaa is C or S
  MOD_RES (12)..(13)..(14)..(15)..(16): Xaa is A or G
  MOD_RES (17)..(18)..(19)..(20): Xaa is A or G or absent
SRVVMNEYKFKXXXXXXXXXLYLVSIPELKTPAXXP

SEQ ID NO: 15883 - protein, 35 aa, Artificial Sequence
  Non-cyclic GFR-binding peptide
  MOD_RES (1)..(32)..(33): Xaa is C or S
XSKVVMEYKFKVKPTRGVLYLISIPELDQPVXXPS

SEQ ID NO: 15884 - protein, 36 aa, Artificial Sequence
  Non-cyclic GFR-binding peptide
  MOD_RES (1)..(35)..(36): Xaa is C or S
  MOD_RES (13)..(14)..(15)..(16)..(17): Xaa is A or G
  MOD_RES (18)..(19)..(20)..(21): Xaa is A or G or absent
XARVVMNEYKFKXXXXXXXXXLYLVSIPELQTPAXX

SEQ ID NO: 15885 - protein, 41 aa, Artificial Sequence
  Non-cyclic GFR-binding peptide
  MOD_RES (2)..(4)..(36)..(37): Xaa is C or S
HXGXAKVVMNEYKFKIVNNSSDLYLVSIPELKTPAXXAKPV

SEQ ID NO: 15886 - protein, 39 aa, Artificial Sequence
  Non-cyclic GFR-binding peptide
  MOD_RES (33)..(34): Xaa is C or S
  MOD_RES (11)..(12)..(13)..(14)..(15): Xaa is A or G
  MOD_RES (16)..(17)..(18)..(19): Xaa is A or G or absent
EVVMDEYKFKXXXXXXXXXLYLISIPELRAPVXXSAPAA

SEQ ID NO: 15887 - protein, 33 aa, Artificial Sequence
  Non-cyclic GFR-binding peptide
  MOD_RES (1)..(33): Xaa is C or S
XSRVVMNEYKFKIVNSSDDLYLVSIPELKTPAX

SEQ ID NO: 15888 - protein, 36 aa, Artificial Sequence
  Non-cyclic GFR-binding peptide
  MOD_RES (2)..(4)..(35)..(36): Xaa is C or S
SXKXSKVIMEYKFKIKPTKGILYLISIPELDQSVXX

SEQ ID NO: 15889 - protein, 33 aa, Artificial Sequence
  Non-cyclic GFR-binding peptide
  MOD_RES (2)..(2): Xaa is C or S
GXESVAMGEYQKYYTVVGKDIYLISIPSLKTPV

SEQ ID NO: 15890 - protein, 38 aa, Artificial Sequence
  Non-cyclic GFR-binding peptide
  MOD_RES (32)..(33): Xaa is C or S
GEVVMDEYKFKVVKENEDLYLMSIPELETPVXXAKPIK

SEQ ID NO: 15891 - protein, 38 aa, Artificial Sequence
  Non-cyclic GFR-binding peptide
  MOD_RES (34)..(35): Xaa is C or S
  MOD_RES (12)..(13)..(14)..(15)..(16): Xaa is A or G
  MOD_RES (17)..(18)..(19)..(20): Xaa is A or G or absent
AKVVMNEYKFKXXXXXXXXXLYLVSIPELKTPAXXAKP

SEQ ID NO: 15892 - protein, 38 aa, Artificial Sequence
  Non-cyclic GFR-binding peptide
  MOD_RES (1)..(3)..(35)..(36): Xaa is C or S
XGXGEVVMDEYKFKVVKENEDLYLMSIPELETPVXXAK

SEQ ID NO: 15893 - protein, 39 aa, Artificial Sequence
  Non-cyclic GFR-binding peptide
  MOD_RES (2)..(4)..(36)..(37): Xaa is C or S
HXGXSRVVMNEYQKYIVNSSDDIYLVSIPSLKTPAXXPK

SEQ ID NO: 15894 - protein, 41 aa, Artificial Sequence
  Non-cyclic GFR-binding peptide
  MOD_RES (1)..(3)..(35)..(36): Xaa is C or S
XGXESVAMGYHYKLYTVVGKDKYLISIPSLKTPVXXAKSAK

SEQ ID NO: 15895 - protein, 44 aa, Artificial Sequence
  Non-cyclic GFR-binding peptide
  MOD_RES (1)..(3)..(38)..(39): Xaa is C or S
  MOD_RES (16)..(17)..(18)..(19)..(20): Xaa is A or G
  MOD_RES (21)..(22)..(23)..(24): Xaa is A or G or absent
XGXEAVSMGEEYKFKXXXXXXXXXLYLVSIPELKTPVXXAKGVK

SEQ ID NO: 15896 - protein, 35 aa, Artificial Sequence
  Non-cyclic GFR-binding peptide
  MOD_RES (1)..(3)..(35): Xaa is C or S
XGXAKVVMNEYKFKIVNNSSDLYLVSIPELKTPAX

SEQ ID NO: 15897 - protein, 36 aa, Artificial Sequence
  Non-cyclic GFR-binding peptide
  MOD_RES (33)..(34): Xaa is C or S
  MOD_RES (11)..(12)..(13)..(14)..(15): Xaa is A or G
  MOD_RES (16)..(17)..(18)..(19): Xaa is A or G or absent
EVVMEEYKFKXXXXXXXXXLYLMSIPELETPVXXAK

SEQ ID NO: 15898 - protein, 36 aa, Artificial Sequence
  Non-cyclic GFR-binding peptide
  MOD_RES (33)..(34): Xaa is C or S
  MOD_RES (11)..(12)..(13)..(14)..(15): Xaa is A or G
  MOD_RES (16)..(17)..(18)..(19): Xaa is A or G or absent
SRVIMEYQKYXXXXXXXXXIYLISIPSLAQPVXXPA

SEQ ID NO: 15899 - protein, 39 aa, Artificial Sequence
  Non-cyclic GFR-binding peptide
  MOD_RES (1)..(35)..(36): Xaa is C or S
  MOD_RES (13)..(14)..(15)..(16)..(17): Xaa is A or G
  MOD_RES (18)..(19)..(20)..(21): Xaa is A or G or absent
XARVVMNEYQKYXXXXXXXXXIYLVSIPSLQTPAXXPKP

SEQ ID NO: 15900 - protein, 34 aa, Artificial Sequence
  Non-cyclic GFR-binding peptide
  MOD_RES (1)..(3): Xaa is C or S
XGXESVAMGEYQKYYTVVGKDIYLISIPSLKTPV

SEQ ID NO: 15901 - protein, 35 aa, Artificial Sequence
  Non-cyclic GFR-binding peptide
  MOD_RES (1)..(34)..(35): Xaa is C or S
  MOD_RES (12)..(13)..(14)..(15)..(16): Xaa is A or G
  MOD_RES (17)..(18)..(19)..(20): Xaa is A or G or absent
XSKVVMEYQKYXXXXXXXXXIYLISIPSLDQPVXX

SEQ ID NO: 15902 - protein, 36 aa, Artificial Sequence
  Non-cyclic GFR-binding peptide
  MOD_RES (2)..(34)..(35): Xaa is C or S
GXGEVVMDEYQKYVVKENEDIYLMSIPSLETPVXXA

SEQ ID NO: 15903 - protein, 38 aa, Artificial Sequence
  Non-cyclic GFR-binding peptide
  MOD_RES (1)..(34)..(35): Xaa is C or S
  MOD_RES (12)..(13)..(14)..(15)..(16): Xaa is A or G
  MOD_RES (17)..(18)..(19)..(20): Xaa is A or G or absent
XSRVIMEYQKYXXXXXXXXXIYLISIPSLAQPVXXPAA

SEQ ID NO: 15904 - protein, 39 aa, Artificial Sequence
  Non-cyclic GFR-binding peptide
  MOD_RES (2)..(35)..(36): Xaa is C or S
  MOD_RES (13)..(14)..(15)..(16)..(17): Xaa is A or G
  MOD_RES (18)..(19)..(20)..(21): Xaa is A or G or absent
KXSRVIMEYQKYXXXXXXXXXIYLISIPSLAQPVXXPAA

SEQ ID NO: 15905 - protein, 31 aa, Artificial Sequence
  Non-cyclic GFR-binding peptide
SRVVMNEYQKYIVNSSDDIYLVSIPSLKTPA

SEQ ID NO: 15906 - protein, 42 aa, Artificial Sequence
  Non-cyclic GFR-binding peptide
  MOD_RES (1)..(3)..(37)..(38): Xaa is C or S
  MOD_RES (15)..(16)..(17)..(18)..(19): Xaa is A or G
  MOD_RES (20)..(21)..(22)..(23): Xaa is A or G or absent
XGXAEVVMDEYKFKXXXXXXXXXLYLISIPELRAPVXXSAPA

SEQ ID NO: 15907 - protein, 35 aa, Artificial Sequence
  Non-cyclic GFR-binding peptide
  MOD_RES (1)..(35): Xaa is C or S
  MOD_RES (13)..(14)..(15)..(16)..(17): Xaa is A or G
  MOD_RES (18)..(19)..(20)..(21): Xaa is A or G or absent
XESVAMGEYQKYXXXXXXXXXIYLISIPSLKTPVX

SEQ ID NO: 15908 - protein, 40 aa, Artificial Sequence
  Non-cyclic GFR-binding peptide
  MOD_RES (1)..(3)..(35)..(36): Xaa is C or S
XGXGEVVMEEYKFKVVKDYEDLYLMSIPELETPVXXAKPI

SEQ ID NO: 15909 - protein, 38 aa, Artificial Sequence
  Non-cyclic GFR-binding peptide
  MOD_RES (2)..(4)..(37)..(38): Xaa is C or S
  MOD_RES (15)..(16)..(17)..(18)..(19): Xaa is A or G
  MOD_RES (20)..(21)..(22)..(23): Xaa is A or G or absent
SXKXSKVIMEYKFKXXXXXXXXXLYLISIPELDQSVXX

SEQ ID NO: 15910 - protein, 34 aa, Artificial Sequence
  Non-cyclic GFR-binding peptide
  MOD_RES (31)..(32): Xaa is C or S
EVVMDEYQKYVVKENEDIYLMSIPSLETPVXXAK

SEQ ID NO: 15911 - protein, 37 aa, Artificial Sequence
  Non-cyclic GFR-binding peptide
  MOD_RES (2)..(34)..(35): Xaa is C or S
GXAEVVMDRYKKLVVNNAADFYLISIANLRAPVXXSA

SEQ ID NO: 15912 - protein, 37 aa, Artificial Sequence
  Non-cyclic GFR-binding peptide
  MOD_RES (2)..(4)..(36)..(37): Xaa is C or S
RXGXAEVVMDYHYKLVVNNAADKYLISIPSLRAPVXX

SEQ ID NO: 15913 - protein, 38 aa, Artificial Sequence
  Non-cyclic GFR-binding peptide
  MOD_RES (2)..(34)..(35): Xaa is C or S
GXAEVVMDRYKKLVVNNAADFYLISIANLRAPVXXSAP

SEQ ID NO: 15914 - protein, 40 aa, Artificial Sequence
  Non-cyclic GFR-binding peptide
  MOD_RES (2)..(36): Xaa is C or S
  MOD_RES (14)..(15)..(16)..(17)..(18): Xaa is A or G
  MOD_RES (19)..(20)..(21)..(22): Xaa is A or G or absent
GXSRVVMNEYQKYXXXXXXXXXIYLVSIPSLKTPAXTPKT

SEQ ID NO: 15915 - protein, 41 aa, Artificial Sequence
  Non-cyclic GFR-binding peptide
  MOD_RES (2)..(4)..(36)..(37): Xaa is C or S
RXGXGEVVMEEYKFKVVKDYEDLYLMSIPELETPVXXAKPI

SEQ ID NO: 15916 - protein, 41 aa, Artificial Sequence
  Non-cyclic GFR-binding peptide
  MOD_RES (1)..(3)..(36)..(37): Xaa is C or S
  MOD_RES (14)..(15)..(16)..(17)..(18): Xaa is A or G
  MOD_RES (19)..(20)..(21)..(22): Xaa is A or G or absent
XKXSRVIMEYKFKXXXXXXXXXLYLISIPELAQPVXXPAAS

SEQ ID NO: 15917 - protein, 39 aa, Artificial Sequence
  Non-cyclic GFR-binding peptide
  MOD_RES (1)..(3)..(37)..(38): Xaa is C or S
  MOD_RES (15)..(16)..(17)..(18)..(19): Xaa is A or G
  MOD_RES (20)..(21)..(22)..(23): Xaa is A or G or absent
XGXGEVVMDEYQKYXXXXXXXXXIYLMSIPSLETPVXXA

SEQ ID NO: 15918 - protein, 37 aa, Artificial Sequence
  Non-cyclic GFR-binding peptide
  MOD_RES (34)..(35): Xaa is C or S
  MOD_RES (12)..(13)..(14)..(15)..(16): Xaa is A or G
  MOD_RES (17)..(18)..(19)..(20): Xaa is A or G or absent
SRVVMNEYQKYXXXXXXXXXIYLVSIPSLKTPAXXPK

SEQ ID NO: 15919 - protein, 42 aa, Artificial Sequence
  Non-cyclic GFR-binding peptide
  MOD_RES (2)..(4)..(36)..(37): Xaa is C or S
RXGXESVAMGEYQKYYTVVGKDIYLISIPSLKTPVXXAKSAK

SEQ ID NO: 15920 - protein, 38 aa, Artificial Sequence
  Non-cyclic GFR-binding peptide
  MOD_RES (1)..(3)..(35)..(36): Xaa is C or S
XGXSRVVMNEYQKYIVNSSDDIYLVSIPSLKTPAXXPK

SEQ ID NO: 15921 - protein, 35 aa, Artificial Sequence
  Non-cyclic GFR-binding peptide
  MOD_RES (2)..(35): Xaa is C or S
  MOD_RES (13)..(14)..(15)..(16)..(17): Xaa is A or G
  MOD_RES (18)..(19)..(20)..(21): Xaa is A or G or absent
KXSRVIMEYKFKXXXXXXXXXLYLISIPELAQPVX

SEQ ID NO: 15922 - protein, 40 aa, Artificial Sequence
  Non-cyclic GFR-binding peptide
  MOD_RES (2)..(36)..(37): Xaa is C or S
  MOD_RES (14)..(15)..(16)..(17)..(18): Xaa is A or G
  MOD_RES (19)..(20)..(21)..(22): Xaa is A or G or absent
GXAEVVMDEYKFKXXXXXXXXXLYLISIPELRAPVXXSAP

SEQ ID NO: 15923 - protein, 33 aa, Artificial Sequence
  Non-cyclic GFR-binding peptide
  MOD_RES (31)..(32): Xaa is C or S
SVAMGRYKKLYTVVGKDFYLISIANLKTPVXXA

SEQ ID NO: 15924 - protein, 32 aa, Artificial Sequence
  Non-cyclic GFR-binding peptide
  MOD_RES (11)..(12)..(13)..(14)..(15): Xaa is A or G
  MOD_RES (16)..(17)..(18)..(19): Xaa is A or G or absent
EVVMEEYQKYXXXXXXXXXIYLMSIPSLETPV

SEQ ID NO: 15925 - protein, 43 aa, Artificial Sequence
  Non-cyclic GFR-binding peptide
  MOD_RES (1)..(3)..(37)..(38): Xaa is C or S
  MOD_RES (15)..(16)..(17)..(18)..(19): Xaa is A or G
  MOD_RES (20)..(21)..(22)..(23): Xaa is A or G or absent
XGXSRVVMNEYKFKXXXXXXXXXLYLVSIPELKTPAXXPKPVY

SEQ ID NO: 15926 - protein, 38 aa, Artificial Sequence
  Non-cyclic GFR-binding peptide
  MOD_RES (1)..(35)..(36): Xaa is C or S
  MOD_RES (13)..(14)..(15)..(16)..(17): Xaa is A or G
  MOD_RES (18)..(19)..(20)..(21): Xaa is A or G or absent
XAEVVMDYHYKLXXXXXXXXXKYLISIPSLRAPVXXSA

SEQ ID NO: 15927 - protein, 37 aa, Artificial Sequence
  Non-cyclic GFR-binding peptide
  MOD_RES (33)..(34): Xaa is C or S
  MOD_RES (11)..(12)..(13)..(14)..(15): Xaa is A or G
  MOD_RES (16)..(17)..(18)..(19): Xaa is A or G or absent
EVVMDEYKFKXXXXXXXXXLYLISIPELRAPVXXSAP

SEQ ID NO: 15928 - protein, 36 aa, Artificial Sequence
  Non-cyclic GFR-binding peptide
  MOD_RES (2)..(36): Xaa is C or S
  MOD_RES (14)..(15)..(16)..(17)..(18): Xaa is A or G
  MOD_RES (19)..(20)..(21)..(22): Xaa is A or G or absent
GXAKVVMNEYKFKXXXXXXXXXLYLVSIPELKTPAX

SEQ ID NO: 15929 - protein, 35 aa, Artificial Sequence
  Non-cyclic GFR-binding peptide
  MOD_RES (2)..(34)..(35): Xaa is C or S
GXESVAMGYHYKLYTVVGKDKYLISIPSLKTPVXX

SEQ ID NO: 15930 - protein, 37 aa, Artificial Sequence
  Non-cyclic GFR-binding peptide
  MOD_RES (2)..(36): Xaa is C or S
  MOD_RES (14)..(15)..(16)..(17)..(18): Xaa is A or G
  MOD_RES (19)..(20)..(21)..(22): Xaa is A or G or absent
GXSRVVMNEYKFKXXXXXXXXXLYLVSIPELKTPAXT

SEQ ID NO: 15931 - protein, 41 aa, Artificial Sequence
  Non-cyclic GFR-binding peptide
  MOD_RES (2)..(4)..(36)..(37): Xaa is C or S
HXGXARVVMNEYQKYIVNSSDDIYLVSIPSLQTPAXXPKPV

SEQ ID NO: 15932 - protein, 41 aa, Artificial Sequence
  Non-cyclic GFR-binding peptide
  MOD_RES (2)..(36)..(37): Xaa is C or S
  MOD_RES (14)..(15)..(16)..(17)..(18): Xaa is A or G
  MOD_RES (19)..(20)..(21)..(22): Xaa is A or G or absent
GXAKVVMNEYQKYXXXXXXXXXIYLVSIPSLKTPAXXAKPV

SEQ ID NO: 15933 - protein, 36 aa, Artificial Sequence
  Non-cyclic GFR-binding peptide
  MOD_RES (33)..(34): Xaa is C or S
  MOD_RES (11)..(12)..(13)..(14)..(15): Xaa is A or G
  MOD_RES (16)..(17)..(18)..(19): Xaa is A or G or absent
RVVMNEYQKYXXXXXXXXXIYLVSIPSLQTPAXXPK

SEQ ID NO: 15934 - protein, 35 aa, Artificial Sequence
  Non-cyclic GFR-binding peptide
  MOD_RES (33)..(34): Xaa is C or S
  MOD_RES (11)..(12)..(13)..(14)..(15): Xaa is A or G
  MOD_RES (16)..(17)..(18)..(19): Xaa is A or G or absent
KVVMNEYQKYXXXXXXXXXIYLVSIPSLKTPAXXA

SEQ ID NO: 15935 - protein, 37 aa, Artificial Sequence
  Non-cyclic GFR-binding peptide
  MOD_RES (1)..(3)..(35): Xaa is C or S
XGXSRVVMNEYKFKIVNSSDDLYLVSIPELKTPAXTP

SEQ ID NO: 15936 - protein, 33 aa, Artificial Sequence
  Non-cyclic GFR-binding peptide
  MOD_RES (12)..(13)..(14)..(15)..(16): Xaa is A or G
  MOD_RES (17)..(18)..(19)..(20): Xaa is A or G or absent
ESVAMGEYQKYXXXXXXXXXIYLISIPSLKTPV

SEQ ID NO: 15937 - protein, 40 aa, Artificial Sequence
  Non-cyclic GFR-binding peptide
  MOD_RES (1)..(3)..(36)..(37): Xaa is C or S
  MOD_RES (14)..(15)..(16)..(17)..(18): Xaa is A or G
  MOD_RES (19)..(20)..(21)..(22): Xaa is A or G or absent
XKXSRVIMEYQKYXXXXXXXXXIYLISIPSLAQPVXXPAA

SEQ ID NO: 15938 - protein, 41 aa, Artificial Sequence
  Non-cyclic GFR-binding peptide
  MOD_RES (1)..(3)..(37)..(38): Xaa is C or S
  MOD_RES (15)..(16)..(17)..(18)..(19): Xaa is A or G
  MOD_RES (20)..(21)..(22)..(23): Xaa is A or G or absent
XGXESVAMGRYKKLXXXXXXXXXFYLISIANLKTPVXXAKS

SEQ ID NO: 15939 - protein, 39 aa, Artificial Sequence
  Non-cyclic GFR-binding peptide
  MOD_RES (1)..(3)..(36)..(37): Xaa is C or S
XGXEAVSMGEEYQKYTPVGMDDIYLVSIPSLKTPVXXAK

SEQ ID NO: 15940 - protein, 40 aa, Artificial Sequence
  Non-cyclic GFR-binding peptide
  MOD_RES (1)..(35)..(36): Xaa is C or S
  MOD_RES (13)..(14)..(15)..(16)..(17): Xaa is A or G
  MOD_RES (18)..(19)..(20)..(21): Xaa is A or G or absent
XGEVVMDEYKFKXXXXXXXXXLYLMSIPELETPVXXAKPI

SEQ ID NO: 15941 - protein, 39 aa, Artificial Sequence
  Non-cyclic GFR-binding peptide
  MOD_RES (33)..(34): Xaa is C or S
  MOD_RES (11)..(12)..(13)..(14)..(15): Xaa is A or G
  MOD_RES (16)..(17)..(18)..(19): Xaa is A or G or absent
RVVMNEYKFKXXXXXXXXXLYLVSIPELQTPAXXPKPVT

SEQ ID NO: 15942 - protein, 42 aa, Artificial Sequence
  Non-cyclic GFR-binding peptide
  MOD_RES (1)..(3)..(37)..(38): Xaa is C or S
  MOD_RES (15)..(16)..(17)..(18)..(19): Xaa is A or G
  MOD_RES (20)..(21)..(22)..(23): Xaa is A or G or absent
XGXESVAMGRYKKLXXXXXXXXXFYLISIANLKTPVXXAKSA

SEQ ID NO: 15943 - protein, 42 aa, Artificial Sequence
  Non-cyclic GFR-binding peptide
  MOD_RES (2)..(36)..(37): Xaa is C or S
  MOD_RES (14)..(15)..(16)..(17)..(18): Xaa is A or G
  MOD_RES (19)..(20)..(21)..(22): Xaa is A or G or absent
GXGEVVMDEYKFKXXXXXXXXXLYLMSIPELETPVXXAKPIK

SEQ ID NO: 15944 - protein, 37 aa, Artificial Sequence
  Non-cyclic GFR-binding peptide
  MOD_RES (1)..(3)..(37): Xaa is C or S
  MOD_RES (15)..(16)..(17)..(18)..(19): Xaa is A or G
  MOD_RES (20)..(21)..(22)..(23): Xaa is A or G or absent
XGXESVAMGRYKKLXXXXXXXXXFYLISIANLKTPVX

SEQ ID NO: 15945 - protein, 40 aa, Artificial Sequence
  Non-cyclic GFR-binding peptide
  MOD_RES (1)..(3)..(37)..(38): Xaa is C or S
  MOD_RES (15)..(16)..(17)..(18)..(19): Xaa is A or G
  MOD_RES (20)..(21)..(22)..(23): Xaa is A or G or absent
XGXAEVVMDRYKKLXXXXXXXXXFYLISIANLRAPVXXSA

SEQ ID NO: 15946 - protein, 35 aa, Artificial Sequence
  Non-cyclic GFR-binding peptide
  MOD_RES (2)..(2): Xaa is C or S
  MOD_RES (14)..(15)..(16)..(17)..(18): Xaa is A or G
  MOD_RES (19)..(20)..(21)..(22): Xaa is A or G or absent
GXGEVVMEEYQKYXXXXXXXXXIYLMSIPSLETPV

SEQ ID NO: 15947 - protein, 35 aa, Artificial Sequence
  Non-cyclic GFR-binding peptide
  MOD_RES (2)..(34): Xaa is C or S
GXSRVVMNEYQKYIVNSSDDIYLVSIPSLKTPAXT

SEQ ID NO: 15948 - protein, 38 aa, Artificial Sequence
  Non-cyclic GFR-binding peptide
  MOD_RES (2)..(36)..(37): Xaa is C or S
  MOD_RES (14)..(15)..(16)..(17)..(18): Xaa is A or G
  MOD_RES (19)..(20)..(21)..(22): Xaa is A or G or absent
GXESVAMGYHYKLXXXXXXXXXKYLISIPSLKTPVXXA

SEQ ID NO: 15949 - protein, 35 aa, Artificial Sequence
  Non-cyclic GFR-binding peptide
  MOD_RES (1)..(35): Xaa is C or S
  MOD_RES (13)..(14)..(15)..(16)..(17): Xaa is A or G
  MOD_RES (18)..(19)..(20)..(21): Xaa is A or G or absent
XESVAMGYHYKLXXXXXXXXXKYLISIPSLKTPVX

SEQ ID NO: 15950 - protein, 39 aa, Artificial Sequence
  Non-cyclic GFR-binding peptide
  MOD_RES (1)..(3)..(37)..(38): Xaa is C or S
  MOD_RES (15)..(16)..(17)..(18)..(19): Xaa is A or G
  MOD_RES (20)..(21)..(22)..(23): Xaa is A or G or absent
XGXGEVVMDEYKFKXXXXXXXXXLYLMSIPELETPVXXA

SEQ ID NO: 15951 - protein, 40 aa, Artificial Sequence
  Non-cyclic GFR-binding peptide
  MOD_RES (1)..(3)..(36)..(37): Xaa is C or S
  MOD_RES (14)..(15)..(16)..(17)..(18): Xaa is A or G
  MOD_RES (19)..(20)..(21)..(22): Xaa is A or G or absent
XKXSKVIMEYQKYXXXXXXXXXIYLISIPSLDQSVXXPSA

SEQ ID NO: 15952 - protein, 33 aa, Artificial Sequence
  Non-cyclic GFR-binding peptide
  MOD_RES (2)..(2): Xaa is C or S
GXGEVVMDEYKFKVVKENEDLYLMSIPELETPV

SEQ ID NO: 15953 - protein, 38 aa, Artificial Sequence
  Non-cyclic GFR-binding peptide
  MOD_RES (2)..(35)..(36): Xaa is C or S
  MOD_RES (13)..(14)..(15)..(16)..(17): Xaa is A or G
  MOD_RES (18)..(19)..(20)..(21): Xaa is A or G or absent
KXSKVIMEYQKYXXXXXXXXXIYLISIPSLDQSVXXPS

SEQ ID NO: 15954 - protein, 37 aa, Artificial Sequence
  Non-cyclic GFR-binding peptide
  MOD_RES (31)..(32): Xaa is C or S
SKVVMEYQKYVKPTRGVIYLISIPSLDQPVXXPSASA

SEQ ID NO: 15955 - protein, 39 aa, Artificial Sequence
  Non-cyclic GFR-binding peptide
  MOD_RES (2)..(4)..(38)..(39): Xaa is C or S
  MOD_RES (16)..(17)..(18)..(19)..(20): Xaa is A or G
  MOD_RES (21)..(22)..(23)..(24): Xaa is A or G or absent
RXGXAEVVMDYHYKLXXXXXXXXXKYLISIPSLRAPVXX

SEQ ID NO: 15956 - protein, 32 aa, Artificial Sequence
  Non-cyclic GFR-binding peptide
  MOD_RES (31)..(32): Xaa is C or S
RVVMNEYQKYIVNSSDDIYLVSIPSLKTPAXX

SEQ ID NO: 15957 - protein, 30 aa, Artificial Sequence
  Non-cyclic GFR-binding peptide
RVVMNEYKFKIVNSSDDLYLVSIPELKTPA

SEQ ID NO: 15958 - protein, 43 aa, Artificial Sequence
  Non-cyclic GFR-binding peptide
  MOD_RES (1)..(3)..(37)..(38): Xaa is C or S
  MOD_RES (15)..(16)..(17)..(18)..(19): Xaa is A or G
  MOD_RES (20)..(21)..(22)..(23): Xaa is A or G or absent
XGXSRVVMNEYQKYXXXXXXXXXIYLVSIPSLKTPAXXPKPVY

SEQ ID NO: 15959 - protein, 38 aa, Artificial Sequence
  Non-cyclic GFR-binding peptide
  MOD_RES (2)..(4)..(37)..(38): Xaa is C or S
  MOD_RES (15)..(16)..(17)..(18)..(19): Xaa is A or G
  MOD_RES (20)..(21)..(22)..(23): Xaa is A or G or absent
SXKXSKVIMEYQKYXXXXXXXXXIYLISIPSLDQSVXX

SEQ ID NO: 15960 - protein, 39 aa, Artificial Sequence
  Non-cyclic GFR-binding peptide
  MOD_RES (1)..(3)..(35)..(36): Xaa is C or S
XGXESVAMGEYQKYYTVVGKDIYLISIPSLKTPVXXAKS

SEQ ID NO: 15961 - protein, 40 aa, Artificial Sequence
  Non-cyclic GFR-binding peptide
  MOD_RES (35)..(36): Xaa is C or S
  MOD_RES (13)..(14)..(15)..(16)..(17): Xaa is A or G
  MOD_RES (18)..(19)..(20)..(21): Xaa is A or G or absent
EAVSMGEEYQKYXXXXXXXXXIYLVSIPSLKTPVXXAKGV

SEQ ID NO: 15962 - protein, 37 aa, Artificial Sequence
  Non-cyclic GFR-binding peptide
  MOD_RES (2)..(36)..(37): Xaa is C or S
  MOD_RES (14)..(15)..(16)..(17)..(18): Xaa is A or G
  MOD_RES (19)..(20)..(21)..(22): Xaa is A or G or absent
GXAEVVMDRYKKLXXXXXXXXXFYLISIANLRAPVXX

SEQ ID NO: 15963 - protein, 39 aa, Artificial Sequence
  Non-cyclic GFR-binding peptide
  MOD_RES (1)..(35)..(36): Xaa is C or S
  MOD_RES (13)..(14)..(15)..(16)..(17): Xaa is A or G
  MOD_RES (18)..(19)..(20)..(21): Xaa is A or G or absent
XAKVVMNEYQKYXXXXXXXXXIYLVSIPSLKTPAXXAKP

SEQ ID NO: 15964 - protein, 35 aa, Artificial Sequence
  Non-cyclic GFR-binding peptide
  MOD_RES (1)..(3)..(35): Xaa is C or S
XGXARVVMNEYKFKIVNSSDDLYLVSIPELQTPAX

SEQ ID NO: 15965 - protein, 38 aa, Artificial Sequence
  Non-cyclic GFR-binding peptide
  MOD_RES (2)..(35)..(36): Xaa is C or S
  MOD_RES (13)..(14)..(15)..(16)..(17): Xaa is A or G
  MOD_RES (18)..(19)..(20)..(21): Xaa is A or G or absent
KXSRVIMEYKFKXXXXXXXXXLYLISIPELAQPVXXPA

SEQ ID NO: 15966 - protein, 34 aa, Artificial Sequence
  Non-cyclic GFR-binding peptide
  MOD_RES (31)..(32): Xaa is C or S
SVAMGEYQKYYTVVGKDIYLISIPSLKTPVXXAK

SEQ ID NO: 15967 - protein, 39 aa, Artificial Sequence
  Non-cyclic GFR-binding peptide
  MOD_RES (2)..(4)..(38)..(39): Xaa is C or S
  MOD_RES (16)..(17)..(18)..(19)..(20): Xaa is A or G
  MOD_RES (21)..(22)..(23)..(24): Xaa is A or G or absent
HXGXARVVMNEYKFKXXXXXXXXXLYLVSIPELQTPAXX

SEQ ID NO: 15968 - protein, 35 aa, Artificial Sequence
  Non-cyclic GFR-binding peptide
  MOD_RES (1)..(34)..(35): Xaa is C or S
XEAVSMGEEYKFKTPVGMDDLYLVSIPELKTPVXX

SEQ ID NO: 15969 - protein, 30 aa, Artificial Sequence; identical to SEQ ID NO: 1940
  Non-cyclic GFR-binding peptide

SEQ ID NO: 15970 - protein, 41 aa, Artificial Sequence
  Non-cyclic GFR-binding peptide
  MOD_RES (1)..(3)..(36)..(37): Xaa is C or S
  MOD_RES (14)..(15)..(16)..(17)..(18): Xaa is A or G
  MOD_RES (19)..(20)..(21)..(22): Xaa is A or G or absent
XKXSKVIMEYKFKXXXXXXXXXLYLISIPELDQSVXXPSAS

SEQ ID NO: 15971 - protein, 32 aa, Artificial Sequence
  Non-cyclic GFR-binding peptide
  MOD_RES (11)..(12)..(13)..(14)..(15): Xaa is A or G
  MOD_RES (16)..(17)..(18)..(19): Xaa is A or G or absent
SRVIMEYQKYXXXXXXXXXIYLISIPSLAQPV

SEQ ID NO: 15972 - protein, 39 aa, Artificial Sequence
  Non-cyclic GFR-binding peptide
  MOD_RES (2)..(36)..(37): Xaa is C or S
  MOD_RES (14)..(15)..(16)..(17)..(18): Xaa is A or G
  MOD_RES (19)..(20)..(21)..(22): Xaa is A or G or absent
GXARVVMNEYQKYXXXXXXXXXIYLVSIPSLQTPAXXPK

SEQ ID NO: 15973 - protein, 40 aa, Artificial Sequence
  Non-cyclic GFR-binding peptide
  MOD_RES (1)..(35): Xaa is C or S
  MOD_RES (13)..(14)..(15)..(16)..(17): Xaa is A or G
  MOD_RES (18)..(19)..(20)..(21): Xaa is A or G or absent
XSRVVMNEYQKYXXXXXXXXXIYLVSIPSLKTPAXTPKTV

SEQ ID NO: 15974 - protein, 36 aa, Artificial Sequence
  Non-cyclic GFR-binding peptide
  MOD_RES (34)..(34): Xaa is C or S
  MOD_RES (12)..(13)..(14)..(15)..(16): Xaa is A or G
  MOD_RES (17)..(18)..(19)..(20): Xaa is A or G or absent
SRVVMNEYQKYXXXXXXXXXIYLVSIPSLKTPAXTP

SEQ ID NO: 15975 - protein, 33 aa, Artificial Sequence
  Non-cyclic GFR-binding peptide
  MOD_RES (1)..(1): Xaa is C or S
  MOD_RES (12)..(13)..(14)..(15)..(16): Xaa is A or G
  MOD_RES (17)..(18)..(19)..(20): Xaa is A or G or absent
XSRVIMEYKFKXXXXXXXXXLYLISIPELAQPV

SEQ ID NO: 15976 - protein, 38 aa, Artificial Sequence
  Non-cyclic GFR-binding peptide
  MOD_RES (1)..(3)..(35)..(36): Xaa is C or S
XGXAEVVMDYHYKLVVNNAADKYLISIPSLRAPVXXSA

SEQ ID NO: 15977 - protein, 40 aa, Artificial Sequence
  Non-cyclic GFR-binding peptide
  MOD_RES (2)..(4)..(38)..(39): Xaa is C or S
  MOD_RES (16)..(17)..(18)..(19)..(20): Xaa is A or G
  MOD_RES (21)..(22)..(23)..(24): Xaa is A or G or absent
HXGXSRVVMNEYQKYXXXXXXXXXIYLVSIPSLKTPAXXP

SEQ ID NO: 15978 - protein, 37 aa, Artificial Sequence
  Non-cyclic GFR-binding peptide
  MOD_RES (2)..(4)..(36)..(37): Xaa is C or S
RXGXAEVVMDEYKFKVVNNAADLYLISIPELRAPVXX

SEQ ID NO: 15979 - protein, 41 aa, Artificial Sequence
  Non-cyclic GFR-binding peptide
  MOD_RES (1)..(35)..(36): Xaa is C or S
  MOD_RES (13)..(14)..(15)..(16)..(17): Xaa is A or G
  MOD_RES (18)..(19)..(20)..(21): Xaa is A or G or absent
XGEVVMDEYKFKXXXXXXXXXLYLMSIPELETPVXXAKPIK

SEQ ID NO: 15980 - protein, 35 aa, Artificial Sequence
  Non-cyclic GFR-binding peptide
  MOD_RES (1)..(3)..(34)..(35): Xaa is C or S
XKXSKVIMEYKFKIKPTKGILYLISIPELDQSVXX

SEQ ID NO: 15981 - protein, 38 aa, Artificial Sequence
  Non-cyclic GFR-binding peptide
  MOD_RES (1)..(3)..(35)..(36): Xaa is C or S
XGXSRVVMNEYKFKIVNSSDDLYLVSIPELKTPAXXPK

SEQ ID NO: 15982 - protein, 36 aa, Artificial Sequence
  Non-cyclic GFR-binding peptide
  MOD_RES (2)..(35)..(36): Xaa is C or S
  MOD_RES (13)..(14)..(15)..(16)..(17): Xaa is A or G
  MOD_RES (18)..(19)..(20)..(21): Xaa is A or G or absent
KXSRVIMEYQKYXXXXXXXXXIYLISIPSLAQPVXX

SEQ ID NO: 15983 - protein, 43 aa, Artificial Sequence
  Non-cyclic GFR-binding peptide
  MOD_RES (2)..(4)..(37)..(38): Xaa is C or S
  MOD_RES (15)..(16)..(17)..(18)..(19): Xaa is A or G
  MOD_RES (20)..(21)..(22)..(23): Xaa is A or G or absent
SXKXSRVIMEYKFKXXXXXXXXXLYLISIPELAQPVXXPAASA

SEQ ID NO: 15984 - protein, 41 aa, Artificial Sequence
  Non-cyclic GFR-binding peptide
  MOD_RES (2)..(36)..(37): Xaa is C or S
  MOD_RES (14)..(15)..(16)..(17)..(18): Xaa is A or G
  MOD_RES (19)..(20)..(21)..(22): Xaa is A or G or absent
GXAEVVMDEYKFKXXXXXXXXXLYLISIPELRAPVXXSAPA

SEQ ID NO: 15985 - protein, 36 aa, Artificial Sequence
  Non-cyclic GFR-binding peptide
  MOD_RES (33)..(34): Xaa is C or S
  MOD_RES (11)..(12)..(13)..(14)..(15): Xaa is A or G
  MOD_RES (16)..(17)..(18)..(19): Xaa is A or G or absent
RVVMNEYQKYXXXXXXXXXIYLVSIPSLKTPAXXPK

SEQ ID NO: 15986 - protein, 35 aa, Artificial Sequence
  Non-cyclic GFR-binding peptide
  MOD_RES (1)..(3): Xaa is C or S
  MOD_RES (14)..(15)..(16)..(17)..(18): Xaa is A or G
  MOD_RES (19)..(20)..(21)..(22): Xaa is A or G or absent
XKXSKVIMEYQKYXXXXXXXXXIYLISIPSLDQSV

SEQ ID NO: 15987 - protein, 36 aa, Artificial Sequence
  Non-cyclic GFR-binding peptide
  MOD_RES (1)..(32)..(33): Xaa is C or S
XSKVVMEYKFKVKPTRGVLYLISIPELDQPVXXPSA

SEQ ID NO: 15988 - protein, 35 aa, Artificial Sequence
  Non-cyclic GFR-binding peptide
  MOD_RES (31)..(32): Xaa is C or S
KVVMNEYKFKIVNNSSDLYLVSIPELKTPAXXAKP

SEQ ID NO: 15989 - protein, 40 aa, Artificial Sequence
  Non-cyclic GFR-binding peptide
  MOD_RES (2)..(4)..(38)..(39): Xaa is C or S
  MOD_RES (16)..(17)..(18)..(19)..(20): Xaa is A or G
  MOD_RES (21)..(22)..(23)..(24): Xaa is A or G or absent
HXGXARVVMNEYKFKXXXXXXXXXLYLVSIPELQTPAXXP

SEQ ID NO: 15990 - protein, 36 aa, Artificial Sequence
  Non-cyclic GFR-binding peptide
  MOD_RES (2)..(4)..(36): Xaa is C or S
RXGXAEVVMDYHYKLVVNNAADKYLISIPSLRAPVX

SEQ ID NO: 15991 - protein, 36 aa, Artificial Sequence
  Non-cyclic GFR-binding peptide
  MOD_RES (31)..(32): Xaa is C or S
SRVIMEYQKYVKPKRGVIYLISIPSLAQPVXXPAAS

SEQ ID NO: 15992 - protein, 40 aa, Artificial Sequence
  Non-cyclic GFR-binding peptide
  MOD_RES (1)..(3)..(35)..(36): Xaa is C or S
XGXGEVVMEEYQKYVVKDYEDIYLMSIPSLETPVXXAKPI

SEQ ID NO: 15993 - protein, 42 aa, Artificial Sequence
  Non-cyclic GFR-binding peptide
  MOD_RES (2)..(36): Xaa is C or S
  MOD_RES (14)..(15)..(16)..(17)..(18): Xaa is A or G
  MOD_RES (19)..(20)..(21)..(22): Xaa is A or G or absent
GXSRVVMNEYQKYXXXXXXXXXIYLVSIPSLKTPAXTPKTVH

SEQ ID NO: 15994 - protein, 40 aa, Artificial Sequence
  Non-cyclic GFR-binding peptide
  MOD_RES (1)..(35): Xaa is C or S
  MOD_RES (13)..(14)..(15)..(16)..(17): Xaa is A or G
  MOD_RES (18)..(19)..(20)..(21): Xaa is A or G or absent
XSRVVMNEYKFKXXXXXXXXXLYLVSIPELKTPAXTPKTV

SEQ ID NO: 15995 - protein, 43 aa, Artificial Sequence
  Non-cyclic GFR-binding peptide
  MOD_RES (1)..(3)..(38)..(39): Xaa is C or S
  MOD_RES (16)..(17)..(18)..(19)..(20): Xaa is A or G
  MOD_RES (21)..(22)..(23)..(24): Xaa is A or G or absent
XGXEAVSMGEEYKFKXXXXXXXXXLYLVSIPELKTPVXXAKGV

SEQ ID NO: 15996 - protein, 36 aa, Artificial Sequence
  Non-cyclic GFR-binding peptide
  MOD_RES (2)..(4): Xaa is C or S
  MOD_RES (15)..(16)..(17)..(18)..(19): Xaa is A or G
  MOD_RES (20)..(21)..(22)..(23): Xaa is A or G or absent
SXKXSKVIMEYKFKXXXXXXXXXLYLISIPELDQSV

SEQ ID NO: 15997 - protein, 37 aa, Artificial Sequence
  Non-cyclic GFR-binding peptide
  MOD_RES (1)..(3)..(35): Xaa is C or S
XGXSRVVMNEYQKYIVNSSDDIYLVSIPSLKTPAXTP

SEQ ID NO: 15998 - protein, 37 aa, Artificial Sequence
  Non-cyclic GFR-binding peptide
  MOD_RES (2)..(34): Xaa is C or S
GXSRVVMNEYKFKIVNSSDDLYLVSIPELKTPAXTPK

SEQ ID NO: 15999 - protein, 34 aa, Artificial Sequence
  Non-cyclic GFR-binding peptide
  MOD_RES (33)..(34): Xaa is C or S
  MOD_RES (11)..(12)..(13)..(14)..(15): Xaa is A or G
  MOD_RES (16)..(17)..(18)..(19): Xaa is A or G or absent
EVVMEEYQKYXXXXXXXXXIYLMSIPSLETPVXX

SEQ ID NO: 16000 - protein, 36 aa, Artificial Sequence
  Non-cyclic GFR-binding peptide
  MOD_RES (2)..(4)..(36): Xaa is C or S
RXGXGEVVMDEYQKYVVKENEDIYLMSIPSLETPVX

SEQ ID NO: 16001 - protein, 36 aa, Artificial Sequence
  Non-cyclic GFR-binding peptide
  MOD_RES (34)..(35): Xaa is C or S
  MOD_RES (12)..(13)..(14)..(15)..(16): Xaa is A or G
  MOD_RES (17)..(18)..(19)..(20): Xaa is A or G or absent
ARVVMNEYKFKXXXXXXXXXLYLVSIPELQTPAXXP

SEQ ID NO: 16002 - protein, 39 aa, Artificial Sequence
  Non-cyclic GFR-binding peptide
  MOD_RES (2)..(4)..(36)..(37): Xaa is C or S
RXGXESVAMGEYQKYYTVVGKDIYLISIPSLKTPVXXAK

SEQ ID NO: 16003 - protein, 35 aa, Artificial Sequence
  Non-cyclic GFR-binding peptide
  MOD_RES (1)..(33)..(34): Xaa is C or S
XSRVVMNEYQKYIVNSSDDIYLVSIPSLKTPAXXP

SEQ ID NO: 16004 - protein, 40 aa, Artificial Sequence
  Non-cyclic GFR-binding peptide
  MOD_RES (2)..(4)..(38)..(39): Xaa is C or S
  MOD_RES (16)..(17)..(18)..(19)..(20): Xaa is A or G
  MOD_RES (21)..(22)..(23)..(24): Xaa is A or G or absent
RXGXESVAMGYHYKLXXXXXXXXXKYLISIPSLKTPVXXA

SEQ ID NO: 16005 - protein, 39 aa, Artificial Sequence
  Non-cyclic GFR-binding peptide
  MOD_RES (2)..(4)..(38)..(39): Xaa is C or S
  MOD_RES (16)..(17)..(18)..(19)..(20): Xaa is A or G
  MOD_RES (21)..(22)..(23)..(24): Xaa is A or G or absent
HXGXSRVVMNEYQKYXXXXXXXXXIYLVSIPSLKTPAXX

SEQ ID NO: 16006 - protein, 39 aa, Artificial Sequence
  Non-cyclic GFR-binding peptide
  MOD_RES (2)..(4)..(36)..(37): Xaa is C or S
RXGXAEVVMDYHYKLVVNNAADKYLISIPSLRAPVXXSA

SEQ ID NO: 16007 - protein, 37 aa, Artificial Sequence
  Non-cyclic GFR-binding peptide
  MOD_RES (1)..(3)..(37): Xaa is C or S
  MOD_RES (15)..(16)..(17)..(18)..(19): Xaa is A or G
  MOD_RES (20)..(21)..(22)..(23): Xaa is A or G or absent
XGXAEVVMDRYKKLXXXXXXXXXFYLISIANLRAPVX

SEQ ID NO: 16008 - protein, 41 aa, Artificial Sequence
  Non-cyclic GFR-binding peptide
  MOD_RES (1)..(35)..(36): Xaa is C or S
  MOD_RES (13)..(14)..(15)..(16)..(17): Xaa is A or G
  MOD_RES (18)..(19)..(20)..(21): Xaa is A or G or absent
XGEVVMEEYQKYXXXXXXXXXIYLMSIPSLETPVXXAKPIS

SEQ ID NO: 16009 - protein, 30 aa, Artificial Sequence; identical to SEQ ID NO: 1943
  Non-cyclic GFR-binding peptide

SEQ ID NO: 16010 - protein, 37 aa, Artificial Sequence
  Non-cyclic GFR-binding peptide
  MOD_RES (1)..(35): Xaa is C or S
  MOD_RES (13)..(14)..(15)..(16)..(17): Xaa is A or G
  MOD_RES (18)..(19)..(20)..(21): Xaa is A or G or absent
XSRVVMNEYQKYXXXXXXXXXIYLVSIPSLKTPAXTP

SEQ ID NO: 16011 - protein, 36 aa, Artificial Sequence
  Non-cyclic GFR-binding peptide
  MOD_RES (2)..(4)..(36): Xaa is C or S
RXGXESVAMGEYQKYYTVVGKDIYLISIPSLKTPVX

SEQ ID NO: 16012 - protein, 40 aa, Artificial Sequence
  Non-cyclic GFR-binding peptide
  MOD_RES (1)..(34)..(35): Xaa is C or S
  MOD_RES (12)..(13)..(14)..(15)..(16): Xaa is A or G
  MOD_RES (17)..(18)..(19)..(20): Xaa is A or G or absent
XSKVVMEYKFKXXXXXXXXXLYLISIPELDQPVXXPSASA

SEQ ID NO: 16013 - protein, 32 aa, Artificial Sequence
  Non-cyclic GFR-binding peptide
  MOD_RES (11)..(12)..(13)..(14)..(15): Xaa is A or G
  MOD_RES (16)..(17)..(18)..(19): Xaa is A or G or absent
RVVMNEYKFKXXXXXXXXXLYLVSIPELQTPA

SEQ ID NO: 16014 - protein, 37 aa, Artificial Sequence
  Non-cyclic GFR-binding peptide
  MOD_RES (34)..(35): Xaa is C or S
  MOD_RES (12)..(13)..(14)..(15)..(16): Xaa is A or G
  MOD_RES (17)..(18)..(19)..(20): Xaa is A or G or absent
AEVVMDRYKKLXXXXXXXXXFYLISIANLRAPVXXSA

SEQ ID NO: 16015 - protein, 35 aa, Artificial Sequence
  Non-cyclic GFR-binding peptide
  MOD_RES (1)..(35): Xaa is C or S
  MOD_RES (13)..(14)..(15)..(16)..(17): Xaa is A or G
  MOD_RES (18)..(19)..(20)..(21): Xaa is A or G or absent
XAEVVMDRYKKLXXXXXXXXXFYLISIANLRAPVX

SEQ ID NO: 16016 - protein, 39 aa, Artificial Sequence
  Non-cyclic GFR-binding peptide
  MOD_RES (1)..(3)..(37)..(38): Xaa is C or S
  MOD_RES (15)..(16)..(17)..(18)..(19): Xaa is A or G
  MOD_RES (20)..(21)..(22)..(23): Xaa is A or G or absent
XGXAEVVMDRYKKLXXXXXXXXXFYLISIANLRAPVXXS

SEQ ID NO: 16017 - protein, 42 aa, Artificial Sequence
  Non-cyclic GFR-binding peptide
  MOD_RES (2)..(36)..(37): Xaa is C or S
  MOD_RES (14)..(15)..(16)..(17)..(18): Xaa is A or G
  MOD_RES (19)..(20)..(21)..(22): Xaa is A or G or absent
GXAEVVMDEYKFKXXXXXXXXXLYLISIPELRAPVXXSAPAA

SEQ ID NO: 16018 - protein, 39 aa, Artificial Sequence
  Non-cyclic GFR-binding peptide
  MOD_RES (2)..(36)..(37): Xaa is C or S
  MOD_RES (14)..(15)..(16)..(17)..(18): Xaa is A or G
  MOD_RES (19)..(20)..(21)..(22): Xaa is A or G or absent
GXAKVVMNEYQKYXXXXXXXXXIYLVSIPSLKTPAXXAK

SEQ ID NO: 16019 - protein, 38 aa, Artificial Sequence
  Non-cyclic GFR-binding peptide
  MOD_RES (1)..(3)..(34)..(35): Xaa is C or S
XKXSRVIMEYQKYVKPKRGVIYLISIPSLAQPVXXPAA

SEQ ID NO: 16020 - protein, 37 aa, Artificial Sequence
  Non-cyclic GFR-binding peptide
  MOD_RES (1)..(35)..(36): Xaa is C or S
  MOD_RES (13)..(14)..(15)..(16)..(17): Xaa is A or G
  MOD_RES (18)..(19)..(20)..(21): Xaa is A or G or absent
XGEVVMEEYKFKXXXXXXXXXLYLMSIPELETPVXXA

SEQ ID NO: 16021 - protein, 42 aa, Artificial Sequence
  Non-cyclic GFR-binding peptide
  MOD_RES (2)..(36)..(37): Xaa is C or S
  MOD_RES (14)..(15)..(16)..(17)..(18): Xaa is A or G
  MOD_RES (19)..(20)..(21)..(22): Xaa is A or G or absent
GXAEVVMDYHYKLXXXXXXXXXKYLISIPSLRAPVXXSAPAA

SEQ ID NO: 16022 - protein, 41 aa, Artificial Sequence
  Non-cyclic GFR-binding peptide
  MOD_RES (2)..(4)..(36)..(37): Xaa is C or S
RXGXAEVVMDYHYKLVVNNAADKYLISIPSLRAPVXXSAPA

SEQ ID NO: 16023 - protein, 41 aa, Artificial Sequence
  Non-cyclic GFR-binding peptide
  MOD_RES (2)..(4)..(38)..(39): Xaa is C or S
  MOD_RES (16)..(17)..(18)..(19)..(20): Xaa is A or G
  MOD_RES (21)..(22)..(23)..(24): Xaa is A or G or absent
RXGXGEVVMEEYKFKXXXXXXXXXLYLMSIPELETPVXXAK

SEQ ID NO: 16024 - protein, 38 aa, Artificial Sequence
  Non-cyclic GFR-binding peptide
  MOD_RES (2)..(34)..(35): Xaa is C or S
GXESVAMGYHYKLYTVVGKDKYLISIPSLKTPVXXAKS

SEQ ID NO: 16025 - protein, 38 aa, Artificial Sequence
  Non-cyclic GFR-binding peptide
  MOD_RES (32)..(33): Xaa is C or S
ESVAMGYHYKLYTVVGKDKYLISIPSLKTPVXXAKSAK

SEQ ID NO: 16026 - protein, 36 aa, Artificial Sequence
  Non-cyclic GFR-binding peptide
  MOD_RES (2)..(36): Xaa is C or S
  MOD_RES (14)..(15)..(16)..(17)..(18): Xaa is A or G
  MOD_RES (19)..(20)..(21)..(22): Xaa is A or G or absent
GXGEVVMDEYQKYXXXXXXXXXIYLMSIPSLETPVX

SEQ ID NO: 16027 - protein, 37 aa, Artificial Sequence
  Non-cyclic GFR-binding peptide
  MOD_RES (2)..(4)..(36)..(37): Xaa is C or S
RXGXGEVVMDEYQKYVVKENEDIYLMSIPSLETPVXX

SEQ ID NO: 16028 - protein, 37 aa, Artificial Sequence
  Non-cyclic GFR-binding peptide
  MOD_RES (2)..(4)..(35)..(36): Xaa is C or S
SXKXSKVIMEYQKYIKPTKGIIYLISIPSLDQSVXXP

SEQ ID NO: 16029 - protein, 35 aa, Artificial Sequence
  Non-cyclic GFR-binding peptide
  MOD_RES (1)..(34)..(35): Xaa is C or S
  MOD_RES (12)..(13)..(14)..(15)..(16): Xaa is A or G
  MOD_RES (17)..(18)..(19)..(20): Xaa is A or G or absent
XSKVVMEYKFKXXXXXXXXXLYLISIPELDQPVXX

SEQ ID NO: 16030 - protein, 38 aa, Artificial Sequence
  Non-cyclic GFR-binding peptide
  MOD_RES (1)..(35)..(36): Xaa is C or S
  MOD_RES (13)..(14)..(15)..(16)..(17): Xaa is A or G
  MOD_RES (18)..(19)..(20)..(21): Xaa is A or G or absent
XGEVVMDEYQKYXXXXXXXXXIYLMSIPSLETPVXXAK

SEQ ID NO: 16031 - protein, 35 aa, Artificial Sequence
  Non-cyclic GFR-binding peptide
  MOD_RES (32)..(33): Xaa is C or S
AEVVMDEYKFKVVNNAADLYLISIPELRAPVXXSA

SEQ ID NO: 16032 - protein, 37 aa, Artificial Sequence
  Non-cyclic GFR-binding peptide
  MOD_RES (33)..(34): Xaa is C or S
  MOD_RES (11)..(12)..(13)..(14)..(15): Xaa is A or G
  MOD_RES (16)..(17)..(18)..(19): Xaa is A or G or absent
SKVIMEYKFKXXXXXXXXXLYLISIPELDQSVXXPSA

SEQ ID NO: 16033 - protein, 39 aa, Artificial Sequence
  Non-cyclic GFR-binding peptide
  MOD_RES (34)..(35): Xaa is C or S
  MOD_RES (12)..(13)..(14)..(15)..(16): Xaa is A or G
  MOD_RES (17)..(18)..(19)..(20): Xaa is A or G or absent
ESVAMGYHYKLXXXXXXXXXKYLISIPSLKTPVXXAKSA

SEQ ID NO: 16034 - protein, 39 aa, Artificial Sequence
  Non-cyclic GFR-binding peptide
  MOD_RES (2)..(34)..(35): Xaa is C or S
GXSRVVMNEYQKYIVNSSDDIYLVSIPSLKTPAXXPKPV

SEQ ID NO: 16035 - protein, 35 aa, Artificial Sequence
  Non-cyclic GFR-binding peptide
  MOD_RES (33)..(34): Xaa is C or S
  MOD_RES (11)..(12)..(13)..(14)..(15): Xaa is A or G
  MOD_RES (16)..(17)..(18)..(19): Xaa is A or G or absent
RVVMNEYQKYXXXXXXXXXIYLVSIPSLKTPAXXP

SEQ ID NO: 16036 - protein, 36 aa, Artificial Sequence
  Non-cyclic GFR-binding peptide
  MOD_RES (2)..(34)..(35): Xaa is C or S
GXESVAMGYHYKLYTVVGKDKYLISIPSLKTPVXXA

SEQ ID NO: 16037 - protein, 37 aa, Artificial Sequence
  Non-cyclic GFR-binding peptide
  MOD_RES (2)..(4)..(35)..(36): Xaa is C or S
SXKXSKVIMEYKFKIKPTKGILYLISIPELDQSVXXP

SEQ ID NO: 16038 - protein, 36 aa, Artificial Sequence
  Non-cyclic GFR-binding peptide
  MOD_RES (32)..(32): Xaa is C or S
SRVVMNEYQKYIVNSSDDIYLVSIPSLKTPAXTPKT

SEQ ID NO: 16039 - protein, 41 aa, Artificial Sequence
  Non-cyclic GFR-binding peptide
  MOD_RES (2)..(4)..(36)..(37): Xaa is C or S
RXGXAEVVMDEYKFKVVNNAADLYLISIPELRAPVXXSAPA

SEQ ID NO: 16040 - protein, 38 aa, Artificial Sequence
  Non-cyclic GFR-binding peptide
  MOD_RES (1)..(3)..(36)..(37): Xaa is C or S
XGXEAVSMGEEYKFKTPVGMDDLYLVSIPELKTPVXXA

SEQ ID NO: 16041 - protein, 36 aa, Artificial Sequence
  Non-cyclic GFR-binding peptide
  MOD_RES (2)..(35)..(36): Xaa is C or S
  MOD_RES (13)..(14)..(15)..(16)..(17): Xaa is A or G
  MOD_RES (18)..(19)..(20)..(21): Xaa is A or G or absent
KXSRVIMEYKFKXXXXXXXXXLYLISIPELAQPVXX

SEQ ID NO: 16042 - protein, 40 aa, Artificial Sequence
  Non-cyclic GFR-binding peptide
  MOD_RES (2)..(4)..(36)..(37): Xaa is C or S
RXGXAEVVMDYHYKLVVNNAADKYLISIPSLRAPVXXSAP

SEQ ID NO: 16043 - protein, 34 aa, Artificial Sequence
  Non-cyclic GFR-binding peptide
  MOD_RES (32)..(33): Xaa is C or S
ARVVMNEYQKYIVNSSDDIYLVSIPSLQTPAXXP

SEQ ID NO: 16044 - protein, 33 aa, Artificial Sequence
  Non-cyclic GFR-binding peptide
  MOD_RES (33)..(33): Xaa is C or S
  MOD_RES (11)..(12)..(13)..(14)..(15): Xaa is A or G
  MOD_RES (16)..(17)..(18)..(19): Xaa is A or G or absent
EVVMDRYKKLXXXXXXXXXFYLISIANLRAPVX

SEQ ID NO: 16045 - protein, 41 aa, Artificial Sequence
  Non-cyclic GFR-binding peptide
  MOD_RES (2)..(36)..(37): Xaa is C or S
  MOD_RES (14)..(15)..(16)..(17)..(18): Xaa is A or G
  MOD_RES (19)..(20)..(21)..(22): Xaa is A or G or absent
GXGEVVMDEYQKYXXXXXXXXXIYLMSIPSLETPVXXAKPI

SEQ ID NO: 16046 - protein, 41 aa, Artificial Sequence
  Non-cyclic GFR-binding peptide
  MOD_RES (2)..(4)..(37)..(38): Xaa is C or S
RXGXEAVSMGEEYQKYTPVGMDDIYLVSIPSLKTPVXXAKG

SEQ ID NO: 16047 - protein, 35 aa, Artificial Sequence
  Non-cyclic GFR-binding peptide
  MOD_RES (33)..(34): Xaa is C or S
  MOD_RES (11)..(12)..(13)..(14)..(15): Xaa is A or G
  MOD_RES (16)..(17)..(18)..(19): Xaa is A or G or absent
SRVIMEYKFKXXXXXXXXXLYLISIPELAQPVXXP

SEQ ID NO: 16048 - protein, 36 aa, Artificial Sequence
  Non-cyclic GFR-binding peptide
  MOD_RES (2)..(4)..(36): Xaa is C or S
RXGXAEVVMDEYKFKVVNNAADLYLISIPELRAPVX

SEQ ID NO: 16049 - protein, 30 aa, Artificial Sequence
  Non-cyclic GFR-binding peptide
SVAMGYHYKLYTVVGKDKYLISIPSLKTPV

SEQ ID NO: 16050 - protein, 34 aa, Artificial Sequence
  Non-cyclic GFR-binding peptide
  MOD_RES (1)..(1): Xaa is C or S
  MOD_RES (13)..(14)..(15)..(16)..(17): Xaa is A or G
  MOD_RES (18)..(19)..(20)..(21): Xaa is A or G or absent
XESVAMGEYQKYXXXXXXXXXIYLISIPSLKTPV

SEQ ID NO: 16051 - protein, 42 aa, Artificial Sequence
  Non-cyclic GFR-binding peptide
  MOD_RES (2)..(4)..(37)..(38): Xaa is C or S
RXGXEAVSMGEEYQKYTPVGMDDIYLVSIPSLKTPVXXAKGV

SEQ ID NO: 16052 - protein, 37 aa, Artificial Sequence
  Non-cyclic GFR-binding peptide
  MOD_RES (1)..(35)..(36): Xaa is C or S
  MOD_RES (13)..(14)..(15)..(16)..(17): Xaa is A or G
  MOD_RES (18)..(19)..(20)..(21): Xaa is A or G or absent
XESVAMGRYKKLXXXXXXXXXFYLISIANLKTPVXXA

SEQ ID NO: 16053 - protein, 33 aa, Artificial Sequence
  Non-cyclic GFR-binding peptide
  MOD_RES (32)..(33): Xaa is C or S
AEVVMDYHYKLVVNNAADKYLISIPSLRAPVXX

SEQ ID NO: 16054 - protein, 40 aa, Artificial Sequence
  Non-cyclic GFR-binding peptide
  MOD_RES (1)..(3)..(35)..(36): Xaa is C or S
XGXESVAMGEYQKYYTVVGKDIYLISIPSLKTPVXXAKSA

SEQ ID NO: 16055 - protein, 31 aa, Artificial Sequence
  Non-cyclic GFR-binding peptide
ARVVMNEYKFKIVNSSDDLYLVSIPELQTPA

SEQ ID NO: 16056 - protein, 37 aa, Artificial Sequence
  Non-cyclic GFR-binding peptide
  MOD_RES (34)..(35): Xaa is C or S
  MOD_RES (12)..(13)..(14)..(15)..(16): Xaa is A or G
  MOD_RES (17)..(18)..(19)..(20): Xaa is A or G or absent
ESVAMGRYKKLXXXXXXXXXFYLISIANLKTPVXXAK

SEQ ID NO: 16057 - protein, 37 aa, Artificial Sequence
  Non-cyclic GFR-binding peptide
  MOD_RES (2)..(4)..(36): Xaa is C or S
HXGXSRVVMNEYQKYIVNSSDDIYLVSIPSLKTPAXT

SEQ ID NO: 16058 - protein, 37 aa, Artificial Sequence
  Non-cyclic GFR-binding peptide
  MOD_RES (1)..(3)..(37): Xaa is C or S
  MOD_RES (15)..(16)..(17)..(18)..(19): Xaa is A or G
  MOD_RES (20)..(21)..(22)..(23): Xaa is A or G or absent
XGXAKVVMNEYQKYXXXXXXXXXIYLVSIPSLKTPAX

SEQ ID NO: 16059 - protein, 34 aa, Artificial Sequence
  Non-cyclic GFR-binding peptide
  MOD_RES (31)..(32): Xaa is C or S
RVVMNEYKFKIVNSSDDLYLVSIPELKTPAXXPK

SEQ ID NO: 16060 - protein, 38 aa, Artificial Sequence
  Non-cyclic GFR-binding peptide
  MOD_RES (2)..(4)..(38): Xaa is C or S
  MOD_RES (16)..(17)..(18)..(19)..(20): Xaa is A or G
  MOD_RES (21)..(22)..(23)..(24): Xaa is A or G or absent
HXGXAKVVMNEYKFKXXXXXXXXXLYLVSIPELKTPAX

SEQ ID NO: 16061 - protein, 33 aa, Artificial Sequence
  Non-cyclic GFR-binding peptide
  MOD_RES (1)..(33): Xaa is C or S
XARVVMNEYKFKIVNSSDDLYLVSIPELQTPAX

SEQ ID NO: 16062 - protein, 31 aa, Artificial Sequence
  Non-cyclic GFR-binding peptide
ESVAMGRYKKLYTVVGKDFYLISIANLKTPV

SEQ ID NO: 16063 - protein, 37 aa, Artificial Sequence
  Non-cyclic GFR-binding peptide
  MOD_RES (32)..(33): Xaa is C or S
GEVVMDEYQKYVVKENEDIYLMSIPSLETPVXXAKPI

SEQ ID NO: 16064 - protein, 37 aa, Artificial Sequence
  Non-cyclic GFR-binding peptide
  MOD_RES (1)..(33)..(34): Xaa is C or S
XSRVVMNEYKFKIVNSSDDLYLVSIPELKTPAXXPKP

SEQ ID NO: 16065 - protein, 39 aa, Artificial Sequence
  Non-cyclic GFR-binding peptide
  MOD_RES (1)..(35)..(36): Xaa is C or S
  MOD_RES (13)..(14)..(15)..(16)..(17): Xaa is A or G
  MOD_RES (18)..(19)..(20)..(21): Xaa is A or G or absent
XAKVVMNEYKFKXXXXXXXXXLYLVSIPELKTPAXXAKP

SEQ ID NO: 16066 - protein, 39 aa, Artificial Sequence
  Non-cyclic GFR-binding peptide
  MOD_RES (2)..(36)..(37): Xaa is C or S
  MOD_RES (14)..(15)..(16)..(17)..(18): Xaa is A or G
  MOD_RES (19)..(20)..(21)..(22): Xaa is A or G or absent
GXGEVVMDEYKFKXXXXXXXXXLYLMSIPELETPVXXAK

SEQ ID NO: 16067 - protein, 35 aa, Artificial Sequence
  Non-cyclic GFR-binding peptide
  MOD_RES (31)..(32): Xaa is C or S
EVVMEEYKFKVVKDYEDLYLMSIPELETPVXXAKP

SEQ ID NO: 16068 - protein, 39 aa, Artificial Sequence
  Non-cyclic GFR-binding peptide
  MOD_RES (33)..(33): Xaa is C or S
  MOD_RES (11)..(12)..(13)..(14)..(15): Xaa is A or G
  MOD_RES (16)..(17)..(18)..(19): Xaa is A or G or absent
RVVMNEYQKYXXXXXXXXXIYLVSIPSLKTPAXTPKTVH

SEQ ID NO: 16069 - protein, 38 aa, Artificial Sequence
  Non-cyclic GFR-binding peptide
  MOD_RES (1)..(35)..(36): Xaa is C or S
  MOD_RES (13)..(14)..(15)..(16)..(17): Xaa is A or G
  MOD_RES (18)..(19)..(20)..(21): Xaa is A or G or absent
XGEVVMDEYKFKXXXXXXXXXLYLMSIPELETPVXXAK

SEQ ID NO: 16070 - protein, 41 aa, Artificial Sequence
  Non-cyclic GFR-binding peptide
  MOD_RES (1)..(3)..(37)..(38): Xaa is C or S
  MOD_RES (15)..(16)..(17)..(18)..(19): Xaa is A or G
  MOD_RES (20)..(21)..(22)..(23): Xaa is A or G or absent
XGXAEVVMDEYKFKXXXXXXXXXLYLISIPELRAPVXXSAP

SEQ ID NO: 16071 - protein, 36 aa, Artificial Sequence
  Non-cyclic GFR-binding peptide
  MOD_RES (1)..(35)..(36): Xaa is C or S
  MOD_RES (13)..(14)..(15)..(16)..(17): Xaa is A or G
  MOD_RES (18)..(19)..(20)..(21): Xaa is A or G or absent
XARVVMNEYQKYXXXXXXXXXIYLVSIPSLQTPAXX

SEQ ID NO: 16072 - protein, 37 aa, Artificial Sequence
  Non-cyclic GFR-binding peptide
  MOD_RES (2)..(36)..(37): Xaa is C or S
  MOD_RES (14)..(15)..(16)..(17)..(18): Xaa is A or G
  MOD_RES (19)..(20)..(21)..(22): Xaa is A or G or absent
GXGEVVMEEYKFKXXXXXXXXXLYLMSIPELETPVXX

SEQ ID NO: 16073 - protein, 42 aa, Artificial Sequence
  Non-cyclic GFR-binding peptide
  MOD_RES (2)..(4)..(38)..(39): Xaa is C or S
  MOD_RES (16)..(17)..(18)..(19)..(20): Xaa is A or G
  MOD_RES (21)..(22)..(23)..(24): Xaa is A or G or absent
HXGXSRVVMNEYQKYXXXXXXXXXIYLVSIPSLKTPAXXPKP

SEQ ID NO: 16074 - protein, 39 aa, Artificial Sequence
  Non-cyclic GFR-binding peptide
  MOD_RES (33)..(34): Xaa is C or S
  MOD_RES (11)..(12)..(13)..(14)..(15): Xaa is A or G
  MOD_RES (16)..(17)..(18)..(19): Xaa is A or G or absent
EVVMDRYKKLXXXXXXXXXFYLISIANLRAPVXXSAPAA

SEQ ID NO: 16075 - protein, 35 aa, Artificial Sequence
  Non-cyclic GFR-binding peptide
  MOD_RES (1)..(35): Xaa is C or S
  MOD_RES (13)..(14)..(15)..(16)..(17): Xaa is A or G
  MOD_RES (18)..(19)..(20)..(21): Xaa is A or G or absent
XAKVVMNEYKFKXXXXXXXXXLYLVSIPELKTPAX

SEQ ID NO: 16076 - protein, 42 aa, Artificial Sequence
  Non-cyclic GFR-binding peptide
  MOD_RES (1)..(3)..(37)..(38): Xaa is C or S
  MOD_RES (15)..(16)..(17)..(18)..(19): Xaa is A or G
  MOD_RES (20)..(21)..(22)..(23): Xaa is A or G or absent
XGXARVVMNEYKFKXXXXXXXXXLYLVSIPELQTPAXXPKPV

SEQ ID NO: 16077 - protein, 35 aa, Artificial Sequence
  Non-cyclic GFR-binding peptide
  MOD_RES (2)..(4): Xaa is C or S
RXGXAEVVMDEYKFKVVNNAADLYLISIPELRAPV

SEQ ID NO: 16078 - protein, 40 aa, Artificial Sequence
  Non-cyclic GFR-binding peptide
  MOD_RES (1)..(3)..(35)..(36): Xaa is C or S
XGXAEVVMDYHYKLVVNNAADKYLISIPSLRAPVXXSAPA

SEQ ID NO: 16079 - protein, 37 aa, Artificial Sequence
  Non-cyclic GFR-binding peptide
  MOD_RES (2)..(4): Xaa is C or S
  MOD_RES (16)..(17)..(18)..(19)..(20): Xaa is A or G
  MOD_RES (21)..(22)..(23)..(24): Xaa is A or G or absent
HXGXAKVVMNEYKFKXXXXXXXXXLYLVSIPELKTPA

SEQ ID NO: 16080 - protein, 37 aa, Artificial Sequence
  Non-cyclic GFR-binding peptide
  MOD_RES (1)..(35)..(36): Xaa is C or S
  MOD_RES (13)..(14)..(15)..(16)..(17): Xaa is A or G
  MOD_RES (18)..(19)..(20)..(21): Xaa is A or G or absent
XGEVVMEEYQKYXXXXXXXXXIYLMSIPSLETPVXXA

SEQ ID NO: 16081 - protein, 37 aa, Artificial Sequence
  Non-cyclic GFR-binding peptide
  MOD_RES (33)..(34): Xaa is C or S
  MOD_RES (11)..(12)..(13)..(14)..(15): Xaa is A or G
  MOD_RES (16)..(17)..(18)..(19): Xaa is A or G or absent
RVVMNEYKFKXXXXXXXXXLYLVSIPELKTPAXXPKP

SEQ ID NO: 16082 - protein, 35 aa, Artificial Sequence
  Non-cyclic GFR-binding peptide
  MOD_RES (32)..(33): Xaa is C or S
SRVVMNEYKFKIVNSSDDLYLVSIPELKTPAXXPK

SEQ ID NO: 16083 - protein, 40 aa, Artificial Sequence
  Non-cyclic GFR-binding peptide
  MOD_RES (2)..(37)..(38): Xaa is C or S
  MOD_RES (15)..(16)..(17)..(18)..(19): Xaa is A or G
  MOD_RES (20)..(21)..(22)..(23): Xaa is A or G or absent
GXEAVSMGEEYKFKXXXXXXXXXLYLVSIPELKTPVXXAK

SEQ ID NO: 16084 - protein, 38 aa, Artificial Sequence
  Non-cyclic GFR-binding peptide
  MOD_RES (2)..(34)..(35): Xaa is C or S
GXAEVVMDEYKFKVVNNAADLYLISIPELRAPVXXSAP

SEQ ID NO: 16085 - protein, 32 aa, Artificial Sequence
  Non-cyclic GFR-binding peptide
  MOD_RES (31)..(32): Xaa is C or S
SRVIMEYKFKVKPKRGVLYLISIPELAQPVXX

SEQ ID NO: 16086 - protein, 34 aa, Artificial Sequence
  Non-cyclic GFR-binding peptide
  MOD_RES (1)..(34): Xaa is C or S
  MOD_RES (12)..(13)..(14)..(15)..(16): Xaa is A or G
  MOD_RES (17)..(18)..(19)..(20): Xaa is A or G or absent
XSKVVMEYKFKXXXXXXXXXLYLISIPELDQPVX

SEQ ID NO: 16087 - protein, 38 aa, Artificial Sequence
  Non-cyclic GFR-binding peptide
  MOD_RES (2)..(4)..(36)..(37): Xaa is C or S
RXGXESVAMGYHYKLYTVVGKDKYLISIPSLKTPVXXA

SEQ ID NO: 16088 - protein, 41 aa, Artificial Sequence
  Non-cyclic GFR-binding peptide
  MOD_RES (2)..(4)..(39)..(40): Xaa is C or S
  MOD_RES (17)..(18)..(19)..(20)..(21): Xaa is A or G
  MOD_RES (22)..(23)..(24)..(25): Xaa is A or G or absent
RXGXEAVSMGEEYKFKXXXXXXXXXLYLVSIPELKTPVXXA

SEQ ID NO: 16089 - protein, 43 aa, Artificial Sequence
  Non-cyclic GFR-binding peptide
  MOD_RES (2)..(4)..(38)..(39): Xaa is C or S
  MOD_RES (16)..(17)..(18)..(19)..(20): Xaa is A or G
  MOD_RES (21)..(22)..(23)..(24): Xaa is A or G or absent
RXGXAEVVMDRYKKLXXXXXXXXXFYLISIANLRAPVXXSAPA

SEQ ID NO: 16090 - protein, 41 aa, Artificial Sequence
  Non-cyclic GFR-binding peptide
  MOD_RES (2)..(4)..(37)..(38): Xaa is C or S
RXGXEAVSMGEEYKFKTPVGMDDLYLVSIPELKTPVXXAKG

SEQ ID NO: 16091 - protein, 43 aa, Artificial Sequence
  Non-cyclic GFR-binding peptide
  MOD_RES (1)..(3)..(37)..(38): Xaa is C or S
  MOD_RES (15)..(16)..(17)..(18)..(19): Xaa is A or G
  MOD_RES (20)..(21)..(22)..(23): Xaa is A or G or absent
XGXGEVVMDEYKFKXXXXXXXXXLYLMSIPELETPVXXAKPIK

SEQ ID NO: 16092 - protein, 42 aa, Artificial Sequence
  Non-cyclic GFR-binding peptide
  MOD_RES (1)..(3)..(38)..(39): Xaa is C or S
  MOD_RES (16)..(17)..(18)..(19)..(20): Xaa is A or G
  MOD_RES (21)..(22)..(23)..(24): Xaa is A or G or absent
XGXEAVSMGEEYKFKXXXXXXXXXLYLVSIPELKTPVXXAKG

SEQ ID NO: 16093 - protein, 37 aa, Artificial Sequence
  Non-cyclic GFR-binding peptide
  MOD_RES (1)..(3)..(36)..(37): Xaa is C or S
  MOD_RES (14)..(15)..(16)..(17)..(18): Xaa is A or G
  MOD_RES (19)..(20)..(21)..(22): Xaa is A or G or absent
XKXSKVVMEYKFKXXXXXXXXXLYLISIPELDQPVXX

SEQ ID NO: 16094 - protein, 35 aa, Artificial Sequence
  Non-cyclic GFR-binding peptide
  MOD_RES (2)..(2): Xaa is C or S
  MOD_RES (14)..(15)..(16)..(17)..(18): Xaa is A or G
  MOD_RES (19)..(20)..(21)..(22): Xaa is A or G or absent
GXARVVMNEYKFKXXXXXXXXXLYLVSIPELQTPA

SEQ ID NO: 16095 - protein, 35 aa, Artificial Sequence
  Non-cyclic GFR-binding peptide
  MOD_RES (1)..(32)..(33): Xaa is C or S
XSKVVMEYQKYVKPTRGVIYLISIPSLDQPVXXPS

SEQ ID NO: 16096 - protein, 40 aa, Artificial Sequence
  Non-cyclic GFR-binding peptide
  MOD_RES (1)..(3)..(37)..(38): Xaa is C or S
  MOD_RES (15)..(16)..(17)..(18)..(19): Xaa is A or G
  MOD_RES (20)..(21)..(22)..(23): Xaa is A or G or absent
XGXGEVVMEEYKFKXXXXXXXXXLYLMSIPELETPVXXAK

SEQ ID NO: 16097 - protein, 43 aa, Artificial Sequence
  Non-cyclic GFR-binding peptide
  MOD_RES (2)..(4)..(38)..(39): Xaa is C or S
  MOD_RES (16)..(17)..(18)..(19)..(20): Xaa is A or G
  MOD_RES (21)..(22)..(23)..(24): Xaa is A or G or absent
RXGXAEVVMDEYKFKXXXXXXXXXLYLISIPELRAPVXXSAPA

SEQ ID NO: 16098 - protein, 34 aa, Artificial Sequence
  Non-cyclic GFR-binding peptide
  MOD_RES (32)..(33): Xaa is C or S
ESVAMGEYQKYYTVVGKDIYLISIPSLKTPVXXA

SEQ ID NO: 16099 - protein, 33 aa, Artificial Sequence
  Non-cyclic GFR-binding peptide
  MOD_RES (2)..(33): Xaa is C or S
KXSRVIMEYQKYVKPKRGVIYLISIPSLAQPVX

SEQ ID NO: 16100 - protein, 37 aa, Artificial Sequence
  Non-cyclic GFR-binding peptide
  MOD_RES (1)..(32)..(33): Xaa is C or S
XSRVIMEYKFKVKPKRGVLYLISIPELAQPVXXPAAS

SEQ ID NO: 16101 - protein, 34 aa, Artificial Sequence
  Non-cyclic GFR-binding peptide
  MOD_RES (1)..(3): Xaa is C or S
XGXARVVMNEYKFKIVNSSDDLYLVSIPELQTPA

SEQ ID NO: 16102 - protein, 43 aa, Artificial Sequence
  Non-cyclic GFR-binding peptide
  MOD_RES (1)..(3)..(37)..(38): Xaa is C or S
  MOD_RES (15)..(16)..(17)..(18)..(19): Xaa is A or G
  MOD_RES (20)..(21)..(22)..(23): Xaa is A or G or absent
XGXAEVVMDEYKFKXXXXXXXXXLYLISIPELRAPVXXSAPAA

SEQ ID NO: 16103 - protein, 39 aa, Artificial Sequence
  Non-cyclic GFR-binding peptide
  MOD_RES (33)..(34): Xaa is C or S
  MOD_RES (11)..(12)..(13)..(14)..(15): Xaa is A or G
  MOD_RES (16)..(17)..(18)..(19): Xaa is A or G or absent
SKVVMEYKFKXXXXXXXXXLYLISIPELDQPVXXPSASA

SEQ ID NO: 16104 - protein, 40 aa, Artificial Sequence
  Non-cyclic GFR-binding peptide
  MOD_RES (1)..(3)..(34)..(35): Xaa is C or S
XKXSKVVMEYKFKVKPTRGVLYLISIPELDQPVXXPSASA

SEQ ID NO: 16105 - protein, 37 aa, Artificial Sequence
  Non-cyclic GFR-binding peptide
  MOD_RES (33)..(34): Xaa is C or S
  MOD_RES (11)..(12)..(13)..(14)..(15): Xaa is A or G
  MOD_RES (16)..(17)..(18)..(19): Xaa is A or G or absent
SRVIMEYQKYXXXXXXXXXIYLISIPSLAQPVXXPAA

SEQ ID NO: 16106 - protein, 35 aa, Artificial Sequence
  Non-cyclic GFR-binding peptide
  MOD_RES (1)..(3)..(35): Xaa is C or S
XGXESVAMGRYKKLYTVVGKDFYLISIANLKTPVX

SEQ ID NO: 16107 - protein, 30 aa, Artificial Sequence
  Non-cyclic GFR-binding peptide
EVVMDYHYKLVVNNAADKYLISIPSLRAPV

SEQ ID NO: 16108 - protein, 35 aa, Artificial Sequence
  Non-cyclic GFR-binding peptide
  MOD_RES (33)..(34): Xaa is C or S
EAVSMGEEYKFKTPVGMDDLYLVSIPELKTPVXXA

SEQ ID NO: 16109 - protein, 36 aa, Artificial Sequence
  Non-cyclic GFR-binding peptide
  MOD_RES (31)..(32): Xaa is C or S
EVVMDEYKFKVVKENEDLYLMSIPELETPVXXAKPI

SEQ ID NO: 16110 - protein, 35 aa, Artificial Sequence
  Non-cyclic GFR-binding peptide
  MOD_RES (2)..(2): Xaa is C or S
  MOD_RES (14)..(15)..(16)..(17)..(18): Xaa is A or G
  MOD_RES (19)..(20)..(21)..(22): Xaa is A or G or absent
GXAEVVMDYHYKLXXXXXXXXXKYLISIPSLRAPV

SEQ ID NO: 16111 - protein, 38 aa, Artificial Sequence
  Non-cyclic GFR-binding peptide
  MOD_RES (1)..(3)..(37): Xaa is C or S
  MOD_RES (15)..(16)..(17)..(18)..(19): Xaa is A or G
  MOD_RES (20)..(21)..(22)..(23): Xaa is A or G or absent
XGXSRVVMNEYKFKXXXXXXXXXLYLVSIPELKTPAXT

SEQ ID NO: 16112 - protein, 40 aa, Artificial Sequence
  Non-cyclic GFR-binding peptide
  MOD_RES (1)..(3)..(37)..(38): Xaa is C or S
  MOD_RES (15)..(16)..(17)..(18)..(19): Xaa is A or G
  MOD_RES (20)..(21)..(22)..(23): Xaa is A or G or absent
XGXGEVVMDEYKFKXXXXXXXXXLYLMSIPELETPVXXAK

SEQ ID NO: 16113 - protein, 34 aa, Artificial Sequence
  Non-cyclic GFR-binding peptide
  MOD_RES (31)..(32): Xaa is C or S
EVVMEEYQKYVVKDYEDIYLMSIPSLETPVXXAK

SEQ ID NO: 16114 - protein, 33 aa, Artificial Sequence
  Non-cyclic GFR-binding peptide
  MOD_RES (1)..(3): Xaa is C or S
XKXSRVIMEYKFKVKPKRGVLYLISIPELAQPV

SEQ ID NO: 16115 - protein, 37 aa, Artificial Sequence
  Non-cyclic GFR-binding peptide
  MOD_RES (1)..(32)..(33): Xaa is C or S
XSRVIMEYQKYVKPKRGVIYLISIPSLAQPVXXPAAS

SEQ ID NO: 16116 - protein, 33 aa, Artificial Sequence
  Non-cyclic GFR-binding peptide
  MOD_RES (1)..(33): Xaa is C or S
XGEVVMDEYKFKVVKENEDLYLMSIPELETPVX

SEQ ID NO: 16117 - protein, 35 aa, Artificial Sequence
  Non-cyclic GFR-binding peptide
  MOD_RES (31)..(32): Xaa is C or S
RVVMNEYKFKIVNSSDDLYLVSIPELQTPAXXPKP

SEQ ID NO: 16118 - protein, 43 aa, Artificial Sequence
  Non-cyclic GFR-binding peptide
  MOD_RES (1)..(3)..(37)..(38): Xaa is C or S
  MOD_RES (15)..(16)..(17)..(18)..(19): Xaa is A or G
  MOD_RES (20)..(21)..(22)..(23): Xaa is A or G or absent
XGXESVAMGYHYKLXXXXXXXXXKYLISIPSLKTPVXXAKSAK

SEQ ID NO: 16119 - protein, 44 aa, Artificial Sequence
  Non-cyclic GFR-binding peptide
  MOD_RES (2)..(4)..(39)..(40): Xaa is C or S
  MOD_RES (17)..(18)..(19)..(20)..(21): Xaa is A or G
  MOD_RES (22)..(23)..(24)..(25): Xaa is A or G or absent
RXGXEAVSMGEEYKFKXXXXXXXXXLYLVSIPELKTPVXXAKGV

SEQ ID NO: 16120 - protein, 43 aa, Artificial Sequence
  Non-cyclic GFR-binding peptide
  MOD_RES (2)..(4)..(38)..(39): Xaa is C or S
  MOD_RES (16)..(17)..(18)..(19)..(20): Xaa is A or G
  MOD_RES (21)..(22)..(23)..(24): Xaa is A or G or absent
RXGXGEVVMDEYQKYXXXXXXXXXIYLMSIPSLETPVXXAKPI

SEQ ID NO: 16121 - protein, 42 aa, Artificial Sequence
  Non-cyclic GFR-binding peptide
  MOD_RES (2)..(4)..(38)..(39): Xaa is C or S
  MOD_RES (16)..(17)..(18)..(19)..(20): Xaa is A or G
  MOD_RES (21)..(22)..(23)..(24): Xaa is A or G or absent
HXGXARVVMNEYQKYXXXXXXXXXIYLVSIPSLQTPAXXPKP

SEQ ID NO: 16122 - protein, 37 aa, Artificial Sequence
  Non-cyclic GFR-binding peptide
  MOD_RES (1)..(34)..(35): Xaa is C or S
  MOD_RES (12)..(13)..(14)..(15)..(16): Xaa is A or G
  MOD_RES (17)..(18)..(19)..(20): Xaa is A or G or absent
XSKVIMEYQKYXXXXXXXXXIYLISIPSLDQSVXXPS

SEQ ID NO: 16123 - protein, 34 aa, Artificial Sequence
  Non-cyclic GFR-binding peptide
  MOD_RES (33)..(34): Xaa is C or S
  MOD_RES (11)..(12)..(13)..(14)..(15): Xaa is A or G
  MOD_RES (16)..(17)..(18)..(19): Xaa is A or G or absent
SRVIMEYQKYXXXXXXXXXIYLISIPSLAQPVXX

SEQ ID NO: 16124 - protein, 37 aa, Artificial Sequence
  Non-cyclic GFR-binding peptide
  MOD_RES (34)..(35): Xaa is C or S
  MOD_RES (12)..(13)..(14)..(15)..(16): Xaa is A or G
  MOD_RES (17)..(18)..(19)..(20): Xaa is A or G or absent
ARVVMNEYQKYXXXXXXXXXIYLVSIPSLQTPAXXPK

SEQ ID NO: 16125 - protein, 38 aa, Artificial Sequence
  Non-cyclic GFR-binding peptide
  MOD_RES (1)..(32)..(33): Xaa is C or S
XSKVIMEYQKYIKPTKGIIYLISIPSLDQSVXXPSASA

SEQ ID NO: 16126 - protein, 34 aa, Artificial Sequence
  Non-cyclic GFR-binding peptide
  MOD_RES (2)..(33)..(34): Xaa is C or S
KXSRVIMEYQKYVKPKRGVIYLISIPSLAQPVXX

SEQ ID NO: 16127 - protein, 41 aa, Artificial Sequence
  Non-cyclic GFR-binding peptide
  MOD_RES (1)..(35)..(36): Xaa is C or S
  MOD_RES (13)..(14)..(15)..(16)..(17): Xaa is A or G
  MOD_RES (18)..(19)..(20)..(21): Xaa is A or G or absent
XSRVVMNEYKFKXXXXXXXXXLYLVSIPELKTPAXXPKPVY

SEQ ID NO: 16128 - protein, 43 aa, Artificial Sequence
  Non-cyclic GFR-binding peptide
  MOD_RES (2)..(4)..(38)..(39): Xaa is C or S
  MOD_RES (16)..(17)..(18)..(19)..(20): Xaa is A or G
  MOD_RES (21)..(22)..(23)..(24): Xaa is A or G or absent
HXGXSRVVMNEYQKYXXXXXXXXXIYLVSIPSLKTPAXXPKPV

SEQ ID NO: 16129 - protein, 37 aa, Artificial Sequence
  Non-cyclic GFR-binding peptide
  MOD_RES (33)..(34): Xaa is C or S
  MOD_RES (11)..(12)..(13)..(14)..(15): Xaa is A or G
  MOD_RES (16)..(17)..(18)..(19): Xaa is A or G or absent
EVVMDEYKFKXXXXXXXXXLYLMSIPELETPVXXAKP

SEQ ID NO: 16130 - protein, 34 aa, Artificial Sequence
  Non-cyclic GFR-binding peptide
  MOD_RES (34)..(34): Xaa is C or S
  MOD_RES (12)..(13)..(14)..(15)..(16): Xaa is A or G
  MOD_RES (17)..(18)..(19)..(20): Xaa is A or G or absent
SRVVMNEYKFKXXXXXXXXXLYLVSIPELKTPAX

SEQ ID NO: 16131 - protein, 39 aa, Artificial Sequence
  Non-cyclic GFR-binding peptide
  MOD_RES (2)..(4)..(36)..(37): Xaa is C or S
HXGXARVVMNEYKFKIVNSSDDLYLVSIPELQTPAXXPK

SEQ ID NO: 16132 - protein, 35 aa, Artificial Sequence
  Non-cyclic GFR-binding peptide
  MOD_RES (2)..(34)..(35): Xaa is C or S
GXGEVVMEEYKFKVVKDYEDLYLMSIPELETPVXX

SEQ ID NO: 16133 - protein, 38 aa, Artificial Sequence
  Non-cyclic GFR-binding peptide
  MOD_RES (1)..(3)..(34)..(35): Xaa is C or S
XKXSKVIMEYKFKIKPTKGILYLISIPELDQSVXXPSA

SEQ ID NO: 16134 - protein, 33 aa, Artificial Sequence
  Non-cyclic GFR-binding peptide
  MOD_RES (12)..(13)..(14)..(15)..(16): Xaa is A or G
  MOD_RES (17)..(18)..(19)..(20): Xaa is A or G or absent
ESVAMGRYKKLXXXXXXXXXFYLISIANLKTPV

SEQ ID NO: 16135 - protein, 34 aa, Artificial Sequence
  Non-cyclic GFR-binding peptide
  MOD_RES (31)..(32): Xaa is C or S
EVVMDEYKFKVVNNAADLYLISIPELRAPVXXSA

SEQ ID NO: 16136 - protein, 34 aa, Artificial Sequence
  Non-cyclic GFR-binding peptide
  MOD_RES (1)..(1): Xaa is C or S
  MOD_RES (13)..(14)..(15)..(16)..(17): Xaa is A or G
  MOD_RES (18)..(19)..(20)..(21): Xaa is A or G or absent
XSRVVMNEYQKYXXXXXXXXXIYLVSIPSLKTPA

SEQ ID NO: 16137 - protein, 41 aa, Artificial Sequence
  Non-cyclic GFR-binding peptide
  MOD_RES (1)..(35)..(36): Xaa is C or S
  MOD_RES (13)..(14)..(15)..(16)..(17): Xaa is A or G
  MOD_RES (18)..(19)..(20)..(21): Xaa is A or G or absent
XSRVVMNEYQKYXXXXXXXXXIYLVSIPSLKTPAXXPKPVY

SEQ ID NO: 16138 - protein, 37 aa, Artificial Sequence
  Non-cyclic GFR-binding peptide
  MOD_RES (2)..(4): Xaa is C or S
  MOD_RES (16)..(17)..(18)..(19)..(20): Xaa is A or G
  MOD_RES (21)..(22)..(23)..(24): Xaa is A or G or absent
RXGXAEVVMDYHYKLXXXXXXXXXKYLISIPSLRAPV

SEQ ID NO: 16139 - protein, 34 aa, Artificial Sequence
  Non-cyclic GFR-binding peptide
  MOD_RES (2)..(34): Xaa is C or S
GXAKVVMNEYQKYIVNNSSDIYLVSIPSLKTPAX

SEQ ID NO: 16140 - protein, 36 aa, Artificial Sequence
  Non-cyclic GFR-binding peptide
  MOD_RES (2)..(34)..(35): Xaa is C or S
GXSRVVMNEYQKYIVNSSDDIYLVSIPSLKTPAXXP

SEQ ID NO: 16141 - protein, 36 aa, Artificial Sequence
  Non-cyclic GFR-binding peptide
  MOD_RES (1)..(3)..(35)..(36): Xaa is C or S
XGXAEVVMDEYKFKVVNNAADLYLISIPELRAPVXX

SEQ ID NO: 16142 - protein, 40 aa, Artificial Sequence
  Non-cyclic GFR-binding peptide
  MOD_RES (1)..(3)..(34)..(35): Xaa is C or S
XKXSKVIMEYQKYIKPTKGIIYLISIPSLDQSVXXPSASA

SEQ ID NO: 16143 - protein, 40 aa, Artificial Sequence
  Non-cyclic GFR-binding peptide
  MOD_RES (2)..(34)..(35): Xaa is C or S
GXGEVVMDEYKFKVVKENEDLYLMSIPELETPVXXAKPIK

SEQ ID NO: 16144 - protein, 32 aa, Artificial Sequence
  Non-cyclic GFR-binding peptide
  MOD_RES (31)..(32): Xaa is C or S
RVVMNEYKFKIVNSSDDLYLVSIPELKTPAXX

SEQ ID NO: 16145 - protein, 40 aa, Artificial Sequence
  Non-cyclic GFR-binding peptide
  MOD_RES (2)..(4)..(36)..(37): Xaa is C or S
RXGXGEVVMEEYQKYVVKDYEDIYLMSIPSLETPVXXAKP

SEQ ID NO: 16146 - protein, 35 aa, Artificial Sequence
  Non-cyclic GFR-binding peptide
  MOD_RES (33)..(34): Xaa is C or S
  MOD_RES (11)..(12)..(13)..(14)..(15): Xaa is A or G
  MOD_RES (16)..(17)..(18)..(19): Xaa is A or G or absent
EVVMDEYKFKXXXXXXXXXLYLISIPELRAPVXXS

SEQ ID NO: 16147 - protein, 37 aa, Artificial Sequence
  Non-cyclic GFR-binding peptide
  MOD_RES (2)..(35)..(36): Xaa is C or S
  MOD_RES (13)..(14)..(15)..(16)..(17): Xaa is A or G
  MOD_RES (18)..(19)..(20)..(21): Xaa is A or G or absent
KXSKVVMEYQKYXXXXXXXXXIYLISIPSLDQPVXXP

SEQ ID NO: 16148 - protein, 36 aa, Artificial Sequence
  Non-cyclic GFR-binding peptide
  MOD_RES (31)..(32): Xaa is C or S
EVVMDEYQKYVVKENEDIYLMSIPSLETPVXXAKPI

SEQ ID NO: 16149 - protein, 33 aa, Artificial Sequence
  Non-cyclic GFR-binding peptide
  MOD_RES (32)..(33): Xaa is C or S
GEVVMDEYKFKVVKENEDLYLMSIPELETPVXX

SEQ ID NO: 16150 - protein, 39 aa, Artificial Sequence
  Non-cyclic GFR-binding peptide
  MOD_RES (1)..(35)..(36): Xaa is C or S
  MOD_RES (13)..(14)..(15)..(16)..(17): Xaa is A or G
  MOD_RES (18)..(19)..(20)..(21): Xaa is A or G or absent
XAEVVMDRYKKLXXXXXXXXXFYLISIANLRAPVXXSAP

SEQ ID NO: 16151 - protein, 40 aa, Artificial Sequence
  Non-cyclic GFR-binding peptide
  MOD_RES (2)..(36)..(37): Xaa is C or S
  MOD_RES (14)..(15)..(16)..(17)..(18): Xaa is A or G
  MOD_RES (19)..(20)..(21)..(22): Xaa is A or G or absent
GXSRVVMNEYKFKXXXXXXXXXLYLVSIPELKTPAXXPKP

SEQ ID NO: 16152 - protein, 42 aa, Artificial Sequence
  Non-cyclic GFR-binding peptide
  MOD_RES (1)..(3)..(36)..(37): Xaa is C or S
XGXEAVSMGEEYKFKTPVGMDDLYLVSIPELKTPVXXAKGVK

SEQ ID NO: 16153 - protein, 38 aa, Artificial Sequence
  Non-cyclic GFR-binding peptide
  MOD_RES (1)..(34)..(35): Xaa is C or S
  MOD_RES (12)..(13)..(14)..(15)..(16): Xaa is A or G
  MOD_RES (17)..(18)..(19)..(20): Xaa is A or G or absent
XSKVVMEYQKYXXXXXXXXXIYLISIPSLDQPVXXPSA

SEQ ID NO: 16154 - protein, 38 aa, Artificial Sequence
  Non-cyclic GFR-binding peptide
  MOD_RES (33)..(34): Xaa is C or S
  MOD_RES (11)..(12)..(13)..(14)..(15): Xaa is A or G
  MOD_RES (16)..(17)..(18)..(19): Xaa is A or G or absent
SVAMGEYQKYXXXXXXXXXIYLISIPSLKTPVXXAKSA

SEQ ID NO: 16155 - protein, 34 aa, Artificial Sequence
  Non-cyclic GFR-binding peptide
  MOD_RES (1)..(32)..(33): Xaa is C or S
XSKVIMEYKFKIKPTKGILYLISIPELDQSVXXP

SEQ ID NO: 16156 - protein, 35 aa, Artificial Sequence
  Non-cyclic GFR-binding peptide
  MOD_RES (1)..(33)..(34): Xaa is C or S
XARVVMNEYQKYIVNSSDDIYLVSIPSLQTPAXXP

SEQ ID NO: 16157 - protein, 38 aa, Artificial Sequence
  Non-cyclic GFR-binding peptide
  MOD_RES (2)..(36)..(37): Xaa is C or S
  MOD_RES (14)..(15)..(16)..(17)..(18): Xaa is A or G
  MOD_RES (19)..(20)..(21)..(22): Xaa is A or G or absent
GXGEVVMEEYQKYXXXXXXXXXIYLMSIPSLETPVXXA

SEQ ID NO: 16158 - protein, 40 aa, Artificial Sequence
  Non-cyclic GFR-binding peptide
  MOD_RES (2)..(4)..(36)..(37): Xaa is C or S
HXGXSRVVMNEYQKYIVNSSDDIYLVSIPSLKTPAXXPKP

SEQ ID NO: 16159 - protein, 35 aa, Artificial Sequence
  Non-cyclic GFR-binding peptide
  MOD_RES (1)..(33)..(34): Xaa is C or S
XGEVVMEEYKFKVVKDYEDLYLMSIPELETPVXXA

SEQ ID NO: 16160 - protein, 40 aa, Artificial Sequence
  Non-cyclic GFR-binding peptide
  MOD_RES (34)..(34): Xaa is C or S
  MOD_RES (12)..(13)..(14)..(15)..(16): Xaa is A or G
  MOD_RES (17)..(18)..(19)..(20): Xaa is A or G or absent
SRVVMNEYQKYXXXXXXXXXIYLVSIPSLKTPAXTPKTVH

SEQ ID NO: 16161 - protein, 34 aa, Artificial Sequence
  Non-cyclic GFR-binding peptide
  MOD_RES (2)..(34): Xaa is C or S
GXESVAMGYHYKLYTVVGKDKYLISIPSLKTPVX

SEQ ID NO: 16162 - protein, 38 aa, Artificial Sequence
  Non-cyclic GFR-binding peptide
  MOD_RES (2)..(35)..(36): Xaa is C or S
  MOD_RES (13)..(14)..(15)..(16)..(17): Xaa is A or G
  MOD_RES (18)..(19)..(20)..(21): Xaa is A or G or absent
KXSKVIMEYKFKXXXXXXXXXLYLISIPELDQSVXXPS

SEQ ID NO: 16163 - protein, 43 aa, Artificial Sequence
  Non-cyclic GFR-binding peptide
  MOD_RES (1)..(3)..(37)..(38): Xaa is C or S
  MOD_RES (15)..(16)..(17)..(18)..(19): Xaa is A or G
  MOD_RES (20)..(21)..(22)..(23): Xaa is A or G or absent
XGXARVVMNEYQKYXXXXXXXXXIYLVSIPSLQTPAXXPKPVT

SEQ ID NO: 16164 - protein, 35 aa, Artificial Sequence
  Non-cyclic GFR-binding peptide
  MOD_RES (34)..(35): Xaa is C or S
  MOD_RES (12)..(13)..(14)..(15)..(16): Xaa is A or G
  MOD_RES (17)..(18)..(19)..(20): Xaa is A or G or absent
ESVAMGEYQKYXXXXXXXXXIYLISIPSLKTPVXX

SEQ ID NO: 16165 - protein, 34 aa, Artificial Sequence
  Non-cyclic GFR-binding peptide
  MOD_RES (13)..(14)..(15)..(16)..(17): Xaa is A or G
  MOD_RES (18)..(19)..(20)..(21): Xaa is A or G or absent
EAVSMGEEYQKYXXXXXXXXXIYLVSIPSLKTPV

SEQ ID NO: 16166 - protein, 33 aa, Artificial Sequence
  Non-cyclic GFR-binding peptide
  MOD_RES (33)..(33): Xaa is C or S
  MOD_RES (11)..(12)..(13)..(14)..(15): Xaa is A or G
  MOD_RES (16)..(17)..(18)..(19): Xaa is A or G or absent
SRVIMEYKFKXXXXXXXXXLYLISIPELAQPVX

SEQ ID NO: 16167 - protein, 37 aa, Artificial Sequence
  Non-cyclic GFR-binding peptide
  MOD_RES (1)..(33)..(34): Xaa is C or S
XARVVMNEYKFKIVNSSDDLYLVSIPELQTPAXXPKP

SEQ ID NO: 16168 - protein, 39 aa, Artificial Sequence
  Non-cyclic GFR-binding peptide
  MOD_RES (33)..(34): Xaa is C or S
  MOD_RES (11)..(12)..(13)..(14)..(15): Xaa is A or G
  MOD_RES (16)..(17)..(18)..(19): Xaa is A or G or absent
EVVMDEYKFKXXXXXXXXXLYLMSIPELETPVXXAKPIK

SEQ ID NO: 16169 - protein, 37 aa, Artificial Sequence
  Non-cyclic GFR-binding peptide
  MOD_RES (2)..(36)..(37): Xaa is C or S
  MOD_RES (14)..(15)..(16)..(17)..(18): Xaa is A or G
  MOD_RES (19)..(20)..(21)..(22): Xaa is A or G or absent
GXARVVMNEYQKYXXXXXXXXXIYLVSIPSLQTPAXX

SEQ ID NO: 16170 - protein, 36 aa, Artificial Sequence
  Non-cyclic GFR-binding peptide
  MOD_RES (1)..(32)..(33): Xaa is C or S
XSRVIMEYQKYVKPKRGVIYLISIPSLAQPVXXPAA

SEQ ID NO: 16171 - protein, 41 aa, Artificial Sequence
  Non-cyclic GFR-binding peptide
  MOD_RES (2)..(4)..(36)..(37): Xaa is C or S
RXGXESVAMGYHYKLYTVVGKDKYLISIPSLKTPVXXAKSA

SEQ ID NO: 16172 - protein, 37 aa, Artificial Sequence
  Non-cyclic GFR-binding peptide
  MOD_RES (2)..(35)..(36): Xaa is C or S
GXEAVSMGEEYQKYTPVGMDDIYLVSIPSLKTPVXXA

SEQ ID NO: 16173 - protein, 37 aa, Artificial Sequence
  Non-cyclic GFR-binding peptide
  MOD_RES (32)..(33): Xaa is C or S
ARVVMNEYQKYIVNSSDDIYLVSIPSLQTPAXXPKPV

SEQ ID NO: 16174 - protein, 35 aa, Artificial Sequence
  Non-cyclic GFR-binding peptide
  MOD_RES (1)..(33)..(34): Xaa is C or S
XARVVMNEYKFKIVNSSDDLYLVSIPELQTPAXXP

SEQ ID NO: 16175 - protein, 41 aa, Artificial Sequence
  Non-cyclic GFR-binding peptide
  MOD_RES (2)..(4)..(36)..(37): Xaa is C or S
HXGXAKVVMNEYQKYIVNNSSDIYLVSIPSLKTPAXXAKPV

SEQ ID NO: 16176 - protein, 41 aa, Artificial Sequence
  Non-cyclic GFR-binding peptide
  MOD_RES (1)..(3)..(36)..(37): Xaa is C or S
  MOD_RES (14)..(15)..(16)..(17)..(18): Xaa is A or G
  MOD_RES (19)..(20)..(21)..(22): Xaa is A or G or absent
XKXSKVVMEYQKYXXXXXXXXXIYLISIPSLDQPVXXPSAS

SEQ ID NO: 16177 - protein, 31 aa, Artificial Sequence
  Non-cyclic GFR-binding peptide
  MOD_RES (31)..(31): Xaa is C or S
RVVMNEYKFKIVNSSDDLYLVSIPELQTPAX

SEQ ID NO: 16178 - protein, 39 aa, Artificial Sequence
  Non-cyclic GFR-binding peptide
  MOD_RES (2)..(37)..(38): Xaa is C or S
  MOD_RES (15)..(16)..(17)..(18)..(19): Xaa is A or G
  MOD_RES (20)..(21)..(22)..(23): Xaa is A or G or absent
GXEAVSMGEEYQKYXXXXXXXXXIYLVSIPSLKTPVXXA

SEQ ID NO: 16179 - protein, 35 aa, Artificial Sequence
  Non-cyclic GFR-binding peptide
  MOD_RES (33)..(34): Xaa is C or S
  MOD_RES (11)..(12)..(13)..(14)..(15): Xaa is A or G
  MOD_RES (16)..(17)..(18)..(19): Xaa is A or G or absent
SKVIMEYQKYXXXXXXXXXIYLISIPSLDQSVXXP

SEQ ID NO: 16180 - protein, 37 aa, Artificial Sequence
  Non-cyclic GFR-binding peptide
  MOD_RES (31)..(32): Xaa is C or S
RVVMNEYKFKIVNSSDDLYLVSIPELQTPAXXPKPVT

SEQ ID NO: 16181 - protein, 39 aa, Artificial Sequence
  Non-cyclic GFR-binding peptide
  MOD_RES (1)..(33)..(34): Xaa is C or S
XESVAMGRYKKLYTVVGKDFYLISIANLKTPVXXAKSAK

SEQ ID NO: 16182 - protein, 42 aa, Artificial Sequence
  Non-cyclic GFR-binding peptide
  MOD_RES (2)..(4)..(38)..(39): Xaa is C or S
  MOD_RES (16)..(17)..(18)..(19)..(20): Xaa is A or G
  MOD_RES (21)..(22)..(23)..(24): Xaa is A or G or absent
RXGXAEVVMDRYKKLXXXXXXXXXFYLISIANLRAPVXXSAP

SEQ ID NO: 16183 - protein, 40 aa, Artificial Sequence
  Non-cyclic GFR-binding peptide
  MOD_RES (34)..(35): Xaa is C or S
  MOD_RES (12)..(13)..(14)..(15)..(16): Xaa is A or G
  MOD_RES (17)..(18)..(19)..(20): Xaa is A or G or absent
AKVVMNEYQKYXXXXXXXXXIYLVSIPSLKTPAXXAKPVA

SEQ ID NO: 16184 - protein, 36 aa, Artificial Sequence
  Non-cyclic GFR-binding peptide
  MOD_RES (1)..(34)..(35): Xaa is C or S
  MOD_RES (12)..(13)..(14)..(15)..(16): Xaa is A or G
  MOD_RES (17)..(18)..(19)..(20): Xaa is A or G or absent
XSKVIMEYQKYXXXXXXXXXIYLISIPSLDQSVXXP

SEQ ID NO: 16185 - protein, 33 aa, Artificial Sequence
  Non-cyclic GFR-binding peptide
  MOD_RES (32)..(33): Xaa is C or S
SRVVMNEYKFKIVNSSDDLYLVSIPELKTPAXX

SEQ ID NO: 16186 - protein, 39 aa, Artificial Sequence
  Non-cyclic GFR-binding peptide
  MOD_RES (1)..(3)..(34)..(35): Xaa is C or S
XKXSKVVMEYKFKVKPTRGVLYLISIPELDQPVXXPSAS

SEQ ID NO: 16187 - protein, 40 aa, Artificial Sequence
  Non-cyclic GFR-binding peptide
  MOD_RES (1)..(34)..(35): Xaa is C or S
  MOD_RES (12)..(13)..(14)..(15)..(16): Xaa is A or G
  MOD_RES (17)..(18)..(19)..(20): Xaa is A or G or absent
XSRVIMEYQKYXXXXXXXXXIYLISIPSLAQPVXXPAASA

SEQ ID NO: 16188 - protein, 37 aa, Artificial Sequence
  Non-cyclic GFR-binding peptide
  MOD_RES (32)..(33): Xaa is C or S
GEVVMEEYQKYVVKDYEDIYLMSIPSLETPVXXAKPI

SEQ ID NO: 16189 - protein, 37 aa, Artificial Sequence
  Non-cyclic GFR-binding peptide
  MOD_RES (31)..(32): Xaa is C or S
SKVVMEYKFKVKPTRGVLYLISIPELDQPVXXPSASA

SEQ ID NO: 16190 - protein, 33 aa, Artificial Sequence
  Non-cyclic GFR-binding peptide
  MOD_RES (1)..(33): Xaa is C or S
XAEVVMDYHYKLVVNNAADKYLISIPSLRAPVX

SEQ ID NO: 16191 - protein, 36 aa, Artificial Sequence
  Non-cyclic GFR-binding peptide
  MOD_RES (33)..(34): Xaa is C or S
  MOD_RES (11)..(12)..(13)..(14)..(15): Xaa is A or G
  MOD_RES (16)..(17)..(18)..(19): Xaa is A or G or absent
EVVMDEYQKYXXXXXXXXXIYLMSIPSLETPVXXAK

SEQ ID NO: 16192 - protein, 34 aa, Artificial Sequence
  Non-cyclic GFR-binding peptide
  MOD_RES (1)..(1): Xaa is C or S
  MOD_RES (13)..(14)..(15)..(16)..(17): Xaa is A or G
  MOD_RES (18)..(19)..(20)..(21): Xaa is A or G or absent
XARVVMNEYKFKXXXXXXXXXLYLVSIPELQTPA

SEQ ID NO: 16193 - protein, 38 aa, Artificial Sequence
  Non-cyclic GFR-binding peptide
  MOD_RES (2)..(4)..(36): Xaa is C or S
HXGXSRVVMNEYKFKIVNSSDDLYLVSIPELKTPAXTP

SEQ ID NO: 16194 - protein, 43 aa, Artificial Sequence
  Non-cyclic GFR-binding peptide
  MOD_RES (2)..(4)..(38)..(39): Xaa is C or S
  MOD_RES (16)..(17)..(18)..(19)..(20): Xaa is A or G
  MOD_RES (21)..(22)..(23)..(24): Xaa is A or G or absent
RXGXGEVVMEEYQKYXXXXXXXXXIYLMSIPSLETPVXXAKPI

SEQ ID NO: 16195 - protein, 37 aa, Artificial Sequence
  Non-cyclic GFR-binding peptide
  MOD_RES (1)..(3)..(37): Xaa is C or S
  MOD_RES (15)..(16)..(17)..(18)..(19): Xaa is A or G
  MOD_RES (20)..(21)..(22)..(23): Xaa is A or G or absent
XGXARVVMNEYKFKXXXXXXXXXLYLVSIPELQTPAX

SEQ ID NO: 16196 - protein, 37 aa, Artificial Sequence
  Non-cyclic GFR-binding peptide
  MOD_RES (1)..(35)..(36): Xaa is C or S
  MOD_RES (13)..(14)..(15)..(16)..(17): Xaa is A or G
  MOD_RES (18)..(19)..(20)..(21): Xaa is A or G or absent
XGEVVMDEYQKYXXXXXXXXXIYLMSIPSLETPVXXA

SEQ ID NO: 16197 - protein, 37 aa, Artificial Sequence
  Non-cyclic GFR-binding peptide
  MOD_RES (1)..(3)..(34)..(35): Xaa is C or S
XKXSRVIMEYKFKVKPKRGVLYLISIPELAQPVXXPA

SEQ ID NO: 16198 - protein, 40 aa, Artificial Sequence
  Non-cyclic GFR-binding peptide
  MOD_RES (34)..(35): Xaa is C or S
  MOD_RES (12)..(13)..(14)..(15)..(16): Xaa is A or G
  MOD_RES (17)..(18)..(19)..(20): Xaa is A or G or absent
ESVAMGYHYKLXXXXXXXXXKYLISIPSLKTPVXXAKSAK

SEQ ID NO: 16199 - protein, 35 aa, Artificial Sequence
  Non-cyclic GFR-binding peptide
  MOD_RES (32)..(33): Xaa is C or S
GEVVMEEYQKYVVKDYEDIYLMSIPSLETPVXXAK

SEQ ID NO: 16200 - protein, 40 aa, Artificial Sequence
  Non-cyclic GFR-binding peptide
  MOD_RES (2)..(36)..(37): Xaa is C or S
  MOD_RES (14)..(15)..(16)..(17)..(18): Xaa is A or G
  MOD_RES (19)..(20)..(21)..(22): Xaa is A or G or absent
GXESVAMGEYQKYXXXXXXXXXIYLISIPSLKTPVXXAKS

SEQ ID NO: 16201 - protein, 35 aa, Artificial Sequence
  Non-cyclic GFR-binding peptide
  MOD_RES (32)..(33): Xaa is C or S
GEVVMDEYKFKVVKENEDLYLMSIPELETPVXXAK

SEQ ID NO: 16202 - protein, 39 aa, Artificial Sequence
  Non-cyclic GFR-binding peptide
  MOD_RES (33)..(34): Xaa is C or S
  MOD_RES (11)..(12)..(13)..(14)..(15): Xaa is A or G
  MOD_RES (16)..(17)..(18)..(19): Xaa is A or G or absent
SKVIMEYQKYXXXXXXXXXIYLISIPSLDQSVXXPSASA

SEQ ID NO: 16203 - protein, 35 aa, Artificial Sequence
  Non-cyclic GFR-binding peptide
  MOD_RES (33)..(34): Xaa is C or S
  MOD_RES (11)..(12)..(13)..(14)..(15): Xaa is A or G
  MOD_RES (16)..(17)..(18)..(19): Xaa is A or G or absent
EVVMDEYQKYXXXXXXXXXIYLMSIPSLETPVXXA

SEQ ID NO: 16204 - protein, 37 aa, Artificial Sequence
  Non-cyclic GFR-binding peptide
  MOD_RES (1)..(3)..(37): Xaa is C or S
  MOD_RES (15)..(16)..(17)..(18)..(19): Xaa is A or G
  MOD_RES (20)..(21)..(22)..(23): Xaa is A or G or absent
XGXARVVMNEYQKYXXXXXXXXXIYLVSIPSLQTPAX

SEQ ID NO: 16205 - protein, 36 aa, Artificial Sequence
  Non-cyclic GFR-binding peptide
  MOD_RES (2)..(36): Xaa is C or S
  MOD_RES (14)..(15)..(16)..(17)..(18): Xaa is A or G
  MOD_RES (19)..(20)..(21)..(22): Xaa is A or G or absent
GXAEVVMDYHYKLXXXXXXXXXKYLISIPSLRAPVX

SEQ ID NO: 16206 - protein, 41 aa, Artificial Sequence
  Non-cyclic GFR-binding peptide
  MOD_RES (1)..(3)..(35)..(36): Xaa is C or S
XGXAEVVMDYHYKLVVNNAADKYLISIPSLRAPVXXSAPAA

SEQ ID NO: 16207 - protein, 39 aa, Artificial Sequence
  Non-cyclic GFR-binding peptide
  MOD_RES (2)..(4)..(35)..(36): Xaa is C or S
SXKXSKVIMEYKFKIKPTKGILYLISIPELDQSVXXPSA

SEQ ID NO: 16208 - protein, 42 aa, Artificial Sequence
  Non-cyclic GFR-binding peptide
  MOD_RES (2)..(4)..(38)..(39): Xaa is C or S
  MOD_RES (16)..(17)..(18)..(19)..(20): Xaa is A or G
  MOD_RES (21)..(22)..(23)..(24): Xaa is A or G or absent
HXGXARVVMNEYKFKXXXXXXXXXLYLVSIPELQTPAXXPKP

SEQ ID NO: 16209 - protein, 38 aa, Artificial Sequence
  Non-cyclic GFR-binding peptide
  MOD_RES (33)..(34): Xaa is C or S
  MOD_RES (11)..(12)..(13)..(14)..(15): Xaa is A or G
  MOD_RES (16)..(17)..(18)..(19): Xaa is A or G or absent
SKVIMEYKFKXXXXXXXXXLYLISIPELDQSVXXPSAS

SEQ ID NO: 16210 - protein, 34 aa, Artificial Sequence
  Non-cyclic GFR-binding peptide
  MOD_RES (1)..(33): Xaa is C or S
XSRVVMNEYKFKIVNSSDDLYLVSIPELKTPAXT

SEQ ID NO: 16211 - protein, 39 aa, Artificial Sequence
  Non-cyclic GFR-binding peptide
  MOD_RES (2)..(36)..(37): Xaa is C or S
  MOD_RES (14)..(15)..(16)..(17)..(18): Xaa is A or G
  MOD_RES (19)..(20)..(21)..(22): Xaa is A or G or absent
GXGEVVMEEYKFKXXXXXXXXXLYLMSIPELETPVXXAK

SEQ ID NO: 16212 - protein, 35 aa, Artificial Sequence
  Non-cyclic GFR-binding peptide
  MOD_RES (32)..(33): Xaa is C or S
GEVVMEEYKFKVVKDYEDLYLMSIPELETPVXXAK

SEQ ID NO: 16213 - protein, 38 aa, Artificial Sequence
  Non-cyclic GFR-binding peptide
  MOD_RES (1)..(33)..(34): Xaa is C or S
XAEVVMDYHYKLVVNNAADKYLISIPSLRAPVXXSAPA

SEQ ID NO: 16214 - protein, 39 aa, Artificial Sequence
  Non-cyclic GFR-binding peptide
  MOD_RES (2)..(33)..(34): Xaa is C or S
KXSRVIMEYQKYVKPKRGVIYLISIPSLAQPVXXPAASA

SEQ ID NO: 16215 - protein, 35 aa, Artificial Sequence
  Non-cyclic GFR-binding peptide
  MOD_RES (32)..(33): Xaa is C or S
GEVVMDEYQKYVVKENEDIYLMSIPSLETPVXXAK

SEQ ID NO: 16216 - protein, 39 aa, Artificial Sequence
  Non-cyclic GFR-binding peptide
  MOD_RES (2)..(34)..(35): Xaa is C or S
GXAEVVMDEYKFKVVNNAADLYLISIPELRAPVXXSAPA

SEQ ID NO: 16217 - protein, 37 aa, Artificial Sequence
  Non-cyclic GFR-binding peptide
  MOD_RES (1)..(35)..(36): Xaa is C or S
  MOD_RES (13)..(14)..(15)..(16)..(17): Xaa is A or G
  MOD_RES (18)..(19)..(20)..(21): Xaa is A or G or absent
XSRVVMNEYQKYXXXXXXXXXIYLVSIPSLKTPAXXP

SEQ ID NO: 16218 - protein, 40 aa, Artificial Sequence
  Non-cyclic GFR-binding peptide
  MOD_RES (2)..(4)..(36)..(37): Xaa is C or S
RXGXESVAMGYHYKLYTVVGKDKYLISIPSLKTPVXXAKS

SEQ ID NO: 16219 - protein, 39 aa, Artificial Sequence
  Non-cyclic GFR-binding peptide
  MOD_RES (34)..(35): Xaa is C or S
  MOD_RES (12)..(13)..(14)..(15)..(16): Xaa is A or G
  MOD_RES (17)..(18)..(19)..(20): Xaa is A or G or absent
AEVVMDRYKKLXXXXXXXXXFYLISIANLRAPVXXSAPA

SEQ ID NO: 16220 - protein, 37 aa, Artificial Sequence
  Non-cyclic GFR-binding peptide
  MOD_RES (2)..(4): Xaa is C or S
  MOD_RES (16)..(17)..(18)..(19)..(20): Xaa is A or G
  MOD_RES (21)..(22)..(23)..(24): Xaa is A or G or absent
HXGXAKVVMNEYQKYXXXXXXXXXIYLVSIPSLKTPA

SEQ ID NO: 16221 - protein, 37 aa, Artificial Sequence
  Non-cyclic GFR-binding peptide
  MOD_RES (2)..(34)..(35): Xaa is C or S
GXGEVVMEEYQKYVVKDYEDIYLMSIPSLETPVXXAK

SEQ ID NO: 16222 - protein, 35 aa, Artificial Sequence
  Non-cyclic GFR-binding peptide
  MOD_RES (1)..(3)..(35): Xaa is C or S
XGXGEVVMEEYQKYVVKDYEDIYLMSIPSLETPVX

SEQ ID NO: 16223 - protein, 35 aa, Artificial Sequence
  Non-cyclic GFR-binding peptide
  MOD_RES (31)..(32): Xaa is C or S
RVVMNEYQKYIVNSSDDIYLVSIPSLQTPAXXPKP

SEQ ID NO: 16224 - protein, 36 aa, Artificial Sequence
  Non-cyclic GFR-binding peptide
  MOD_RES (1)..(3)..(35)..(36): Xaa is C or S
XGXAEVVMDRYKKLVVNNAADFYLISIANLRAPVXX

SEQ ID NO: 16225 - protein, 36 aa, Artificial Sequence
  Non-cyclic GFR-binding peptide
  MOD_RES (2)..(4)..(35)..(36): Xaa is C or S
SXKXSKVIMEYQKYIKPTKGIIYLISIPSLDQSVXX

SEQ ID NO: 16226 - protein, 39 aa, Artificial Sequence
  Non-cyclic GFR-binding peptide
  MOD_RES (1)..(35): Xaa is C or S
  MOD_RES (13)..(14)..(15)..(16)..(17): Xaa is A or G
  MOD_RES (18)..(19)..(20)..(21): Xaa is A or G or absent
XSRVVMNEYQKYXXXXXXXXXIYLVSIPSLKTPAXTPKT

SEQ ID NO: 16227 - protein, 36 aa, Artificial Sequence
  Non-cyclic GFR-binding peptide
  MOD_RES (1)..(3)..(35)..(36): Xaa is C or S
XGXSRVVMNEYQKYIVNSSDDIYLVSIPSLKTPAXX

SEQ ID NO: 16228 - protein, 37 aa, Artificial Sequence
  Non-cyclic GFR-binding peptide
  MOD_RES (2)..(4)..(35)..(36): Xaa is C or S
SXKXSKVVMEYQKYVKPTRGVIYLISIPSLDQPVXXP

SEQ ID NO: 16229 - protein, 39 aa, Artificial Sequence
  Non-cyclic GFR-binding peptide
  MOD_RES (1)..(3)..(37)..(38): Xaa is C or S
  MOD_RES (15)..(16)..(17)..(18)..(19): Xaa is A or G
  MOD_RES (20)..(21)..(22)..(23): Xaa is A or G or absent
XGXESVAMGEYQKYXXXXXXXXXIYLISIPSLKTPVXXA

SEQ ID NO: 16230 - protein, 44 aa, Artificial Sequence
  Non-cyclic GFR-binding peptide
  MOD_RES (2)..(4)..(38)..(39): Xaa is C or S
  MOD_RES (16)..(17)..(18)..(19)..(20): Xaa is A or G
  MOD_RES (21)..(22)..(23)..(24): Xaa is A or G or absent
RXGXGEVVMDEYQKYXXXXXXXXXIYLMSIPSLETPVXXAKPIK

SEQ ID NO: 16231 - protein, 37 aa, Artificial Sequence
  Non-cyclic GFR-binding peptide
  MOD_RES (33)..(33): Xaa is C or S
  MOD_RES (11)..(12)..(13)..(14)..(15): Xaa is A or G
  MOD_RES (16)..(17)..(18)..(19): Xaa is A or G or absent
RVVMNEYQKYXXXXXXXXXIYLVSIPSLKTPAXTPKT

SEQ ID NO: 16232 - protein, 34 aa, Artificial Sequence
  Non-cyclic GFR-binding peptide
  MOD_RES (2)..(2): Xaa is C or S
  MOD_RES (13)..(14)..(15)..(16)..(17): Xaa is A or G
  MOD_RES (18)..(19)..(20)..(21): Xaa is A or G or absent
KXSKVVMEYQKYXXXXXXXXXIYLISIPSLDQPV

SEQ ID NO: 16233 - protein, 37 aa, Artificial Sequence
  Non-cyclic GFR-binding peptide
  MOD_RES (1)..(3)..(35)..(36): Xaa is C or S
XGXGEVVMDEYQKYVVKENEDIYLMSIPSLETPVXXA

SEQ ID NO: 16234 - protein, 42 aa, Artificial Sequence
  Non-cyclic GFR-binding peptide
  MOD_RES (1)..(36)..(37): Xaa is C or S
  MOD_RES (14)..(15)..(16)..(17)..(18): Xaa is A or G
  MOD_RES (19)..(20)..(21)..(22): Xaa is A or G or absent
XEAVSMGEEYQKYXXXXXXXXXIYLVSIPSLKTPVXXAKGVK

SEQ ID NO: 16235 - protein, 39 aa, Artificial Sequence
  Non-cyclic GFR-binding peptide
  MOD_RES (1)..(3)..(36)..(37): Xaa is C or S
  MOD_RES (14)..(15)..(16)..(17)..(18): Xaa is A or G
  MOD_RES (19)..(20)..(21)..(22): Xaa is A or G or absent
XKXSKVVMEYKFKXXXXXXXXXLYLISIPELDQPVXXPS

SEQ ID NO: 16236 - protein, 39 aa, Artificial Sequence
  Non-cyclic GFR-binding peptide
  MOD_RES (1)..(3)..(38)..(39): Xaa is C or S
  MOD_RES (16)..(17)..(18)..(19)..(20): Xaa is A or G
  MOD_RES (21)..(22)..(23)..(24): Xaa is A or G or absent
XGXEAVSMGEEYQKYXXXXXXXXXIYLVSIPSLKTPVXX

SEQ ID NO: 16237 - protein, 43 aa, Artificial Sequence
  Non-cyclic GFR-binding peptide
  MOD_RES (2)..(4)..(37)..(38): Xaa is C or S
  MOD_RES (15)..(16)..(17)..(18)..(19): Xaa is A or G
  MOD_RES (20)..(21)..(22)..(23): Xaa is A or G or absent
SXKXSRVIMEYQKYXXXXXXXXXIYLISIPSLAQPVXXPAASA

SEQ ID NO: 16238 - protein, 37 aa, Artificial Sequence
  Non-cyclic GFR-binding peptide
  MOD_RES (1)..(33)..(34): Xaa is C or S
XAEVVMDYHYKLVVNNAADKYLISIPSLRAPVXXSAP

SEQ ID NO: 16239 - protein, 41 aa, Artificial Sequence
  Non-cyclic GFR-binding peptide
  MOD_RES (2)..(4)..(37)..(38): Xaa is C or S
  MOD_RES (15)..(16)..(17)..(18)..(19): Xaa is A or G
  MOD_RES (20)..(21)..(22)..(23): Xaa is A or G or absent
SXKXSKVVMEYQKYXXXXXXXXXIYLISIPSLDQPVXXPSA

SEQ ID NO: 16240 - protein, 33 aa, Artificial Sequence
  Non-cyclic GFR-binding peptide
  MOD_RES (32)..(33): Xaa is C or S
GEVVMDEYQKYVVKENEDIYLMSIPSLETPVXX

SEQ ID NO: 16241 - protein, 38 aa, Artificial Sequence
  Non-cyclic GFR-binding peptide
  MOD_RES (1)..(3)..(35): Xaa is C or S
XGXSRVVMNEYKFKIVNSSDDLYLVSIPELKTPAXTPK

SEQ ID NO: 16242 - protein, 34 aa, Artificial Sequence
  Non-cyclic GFR-binding peptide
  MOD_RES (1)..(32)..(33): Xaa is C or S
XSKVVMEYQKYVKPTRGVIYLISIPSLDQPVXXP

SEQ ID NO: 16243 - protein, 33 aa, Artificial Sequence
  Non-cyclic GFR-binding peptide
  MOD_RES (2)..(2): Xaa is C or S
GXAKVVMNEYKFKIVNNSSDLYLVSIPELKTPA

SEQ ID NO: 16244 - protein, 39 aa, Artificial Sequence
  Non-cyclic GFR-binding peptide
  MOD_RES (34)..(35): Xaa is C or S
  MOD_RES (12)..(13)..(14)..(15)..(16): Xaa is A or G
  MOD_RES (17)..(18)..(19)..(20): Xaa is A or G or absent
GEVVMEEYQKYXXXXXXXXXIYLMSIPSLETPVXXAKPI

SEQ ID NO: 16245 - protein, 36 aa, Artificial Sequence
  Non-cyclic GFR-binding peptide
  MOD_RES (1)..(3)..(36): Xaa is C or S
  MOD_RES (14)..(15)..(16)..(17)..(18): Xaa is A or G
  MOD_RES (19)..(20)..(21)..(22): Xaa is A or G or absent
XKXSKVIMEYQKYXXXXXXXXXIYLISIPSLDQSVX

SEQ ID NO: 16246 - protein, 39 aa, Artificial Sequence
  Non-cyclic GFR-binding peptide
  MOD_RES (1)..(3)..(37)..(38): Xaa is C or S
  MOD_RES (15)..(16)..(17)..(18)..(19): Xaa is A or G
  MOD_RES (20)..(21)..(22)..(23): Xaa is A or G or absent
XGXARVVMNEYQKYXXXXXXXXXIYLVSIPSLQTPAXXP

SEQ ID NO: 16247 - protein, 36 aa, Artificial Sequence
  Non-cyclic GFR-binding peptide
  MOD_RES (34)..(35): Xaa is C or S
  MOD_RES (12)..(13)..(14)..(15)..(16): Xaa is A or G
  MOD_RES (17)..(18)..(19)..(20): Xaa is A or G or absent
AEVVMDRYKKLXXXXXXXXXFYLISIANLRAPVXXS

SEQ ID NO: 16248 - protein, 42 aa, Artificial Sequence
  Non-cyclic GFR-binding peptide
  MOD_RES (1)..(3)..(38)..(39): Xaa is C or S
  MOD_RES (16)..(17)..(18)..(19)..(20): Xaa is A or G
  MOD_RES (21)..(22)..(23)..(24): Xaa is A or G or absent
XGXEAVSMGEEYQKYXXXXXXXXXIYLVSIPSLKTPVXXAKG

SEQ ID NO: 16249 - protein, 37 aa, Artificial Sequence
  Non-cyclic GFR-binding peptide
  MOD_RES (1)..(3)..(36)..(37): Xaa is C or S
  MOD_RES (14)..(15)..(16)..(17)..(18): Xaa is A or G
  MOD_RES (19)..(20)..(21)..(22): Xaa is A or G or absent
XKXSRVIMEYKFKXXXXXXXXXLYLISIPELAQPVXX

SEQ ID NO: 16250 - protein, 37 aa, Artificial Sequence
  Non-cyclic GFR-binding peptide
  MOD_RES (32)..(33): Xaa is C or S
SRVVMNEYQKYIVNSSDDIYLVSIPSLKTPAXXPKPV

SEQ ID NO: 16251 - protein, 37 aa, Artificial Sequence
  Non-cyclic GFR-binding peptide
  MOD_RES (32)..(33): Xaa is C or S
ARVVMNEYKFKIVNSSDDLYLVSIPELQTPAXXPKPV

SEQ ID NO: 16252 - protein, 33 aa, Artificial Sequence
  Non-cyclic GFR-binding peptide
  MOD_RES (1)..(32)..(33): Xaa is C or S
XSKVIMEYQKYIKPTKGIIYLISIPSLDQSVXX

SEQ ID NO: 16253 - protein, 32 aa, Artificial Sequence
  Non-cyclic GFR-binding peptide
  MOD_RES (2)..(2): Xaa is C or S
KXSRVIMEYQKYVKPKRGVIYLISIPSLAQPV

SEQ ID NO: 16254 - protein, 31 aa, Artificial Sequence
  Non-cyclic GFR-binding peptide
  MOD_RES (31)..(31): Xaa is C or S
RVVMNEYQKYIVNSSDDIYLVSIPSLQTPAX

SEQ ID NO: 16255 - protein, 40 aa, Artificial Sequence
  Non-cyclic GFR-binding peptide
  MOD_RES (2)..(34)..(35): Xaa is C or S
GXARVVMNEYQKYIVNSSDDIYLVSIPSLQTPAXXPKPVT

SEQ ID NO: 16256 - protein, 36 aa, Artificial Sequence
  Non-cyclic GFR-binding peptide
  MOD_RES (33)..(34): Xaa is C or S
EAVSMGEEYKFKTPVGMDDLYLVSIPELKTPVXXAK

SEQ ID NO: 16257 - protein, 35 aa, Artificial Sequence
  Non-cyclic GFR-binding peptide
  MOD_RES (33)..(34): Xaa is C or S
  MOD_RES (11)..(12)..(13)..(14)..(15): Xaa is A or G
  MOD_RES (16)..(17)..(18)..(19): Xaa is A or G or absent
EVVMDYHYKLXXXXXXXXXKYLISIPSLRAPVXXS

SEQ ID NO: 16258 - protein, 37 aa, Artificial Sequence
  Non-cyclic GFR-binding peptide
  MOD_RES (2)..(34)..(35): Xaa is C or S
GXESVAMGRYKKLYTVVGKDFYLISIANLKTPVXXAK

SEQ ID NO: 16259 - protein, 41 aa, Artificial Sequence
  Non-cyclic GFR-binding peptide
  MOD_RES (2)..(4)..(36)..(37): Xaa is C or S
HXGXARVVMNEYKFKIVNSSDDLYLVSIPELQTPAXXPKPV

SEQ ID NO: 16260 - protein, 42 aa, Artificial Sequence
  Non-cyclic GFR-binding peptide
  MOD_RES (2)..(4)..(36)..(37): Xaa is C or S
HXGXARVVMNEYQKYIVNSSDDIYLVSIPSLQTPAXXPKPVT

SEQ ID NO: 16261 - protein, 41 aa, Artificial Sequence
  Non-cyclic GFR-binding peptide
  MOD_RES (2)..(36): Xaa is C or S
  MOD_RES (14)..(15)..(16)..(17)..(18): Xaa is A or G
  MOD_RES (19)..(20)..(21)..(22): Xaa is A or G or absent
GXSRVVMNEYKFKXXXXXXXXXLYLVSIPELKTPAXTPKTV

SEQ ID NO: 16262 - protein, 41 aa, Artificial Sequence
  Non-cyclic GFR-binding peptide
  MOD_RES (2)..(4)..(38)..(39): Xaa is C or S
  MOD_RES (16)..(17)..(18)..(19)..(20): Xaa is A or G
  MOD_RES (21)..(22)..(23)..(24): Xaa is A or G or absent
RXGXGEVVMDEYKFKXXXXXXXXXLYLMSIPELETPVXXAK

SEQ ID NO: 16263 - protein, 38 aa, Artificial Sequence
  Non-cyclic GFR-binding peptide
  MOD_RES (1)..(34)..(35): Xaa is C or S
  MOD_RES (12)..(13)..(14)..(15)..(16): Xaa is A or G
  MOD_RES (17)..(18)..(19)..(20): Xaa is A or G or absent
XSRVIMEYKFKXXXXXXXXXLYLISIPELAQPVXXPAA

SEQ ID NO: 16264 - protein, 33 aa, Artificial Sequence
  Non-cyclic GFR-binding peptide
  MOD_RES (33)..(33): Xaa is C or S
  MOD_RES (11)..(12)..(13)..(14)..(15): Xaa is A or G
  MOD_RES (16)..(17)..(18)..(19): Xaa is A or G or absent
EVVMEEYKFKXXXXXXXXXLYLMSIPELETPVX

SEQ ID NO: 16265 - protein, 40 aa, Artificial Sequence
  Non-cyclic GFR-binding peptide
  MOD_RES (2)..(4)..(38)..(39): Xaa is C or S
  MOD_RES (16)..(17)..(18)..(19)..(20): Xaa is A or G
  MOD_RES (21)..(22)..(23)..(24): Xaa is A or G or absent
RXGXESVAMGEYQKYXXXXXXXXXIYLISIPSLKTPVXXA

SEQ ID NO: 16266 - protein, 40 aa, Artificial Sequence
  Non-cyclic GFR-binding peptide
  MOD_RES (1)..(3)..(35)..(36): Xaa is C or S
XGXARVVMNEYQKYIVNSSDDIYLVSIPSLQTPAXXPKPV

SEQ ID NO: 16267 - protein, 37 aa, Artificial Sequence
  Non-cyclic GFR-binding peptide
  MOD_RES (1)..(3)..(35)..(36): Xaa is C or S
XGXESVAMGEYQKYYTVVGKDIYLISIPSLKTPVXXA

SEQ ID NO: 16268 - protein, 39 aa, Artificial Sequence
  Non-cyclic GFR-binding peptide
  MOD_RES (2)..(4)..(38)..(39): Xaa is C or S
  MOD_RES (16)..(17)..(18)..(19)..(20): Xaa is A or G
  MOD_RES (21)..(22)..(23)..(24): Xaa is A or G or absent
RXGXESVAMGEYQKYXXXXXXXXXIYLISIPSLKTPVXX

SEQ ID NO: 16269 - protein, 36 aa, Artificial Sequence
  Non-cyclic GFR-binding peptide
  MOD_RES (32)..(33): Xaa is C or S
AKVVMNEYKFKIVNNSSDLYLVSIPELKTPAXXAKP

SEQ ID NO: 16270 - protein, 34 aa, Artificial Sequence
  Non-cyclic GFR-binding peptide
  MOD_RES (2)..(2): Xaa is C or S
  MOD_RES (13)..(14)..(15)..(16)..(17): Xaa is A or G
  MOD_RES (18)..(19)..(20)..(21): Xaa is A or G or absent
KXSRVIMEYKFKXXXXXXXXXLYLISIPELAQPV

SEQ ID NO: 16271 - protein, 32 aa, Artificial Sequence
  Non-cyclic GFR-binding peptide
  MOD_RES (31)..(32): Xaa is C or S
KVVMNEYKFKIVNNSSDLYLVSIPELKTPAXX

SEQ ID NO: 16272 - protein, 39 aa, Artificial Sequence
  Non-cyclic GFR-binding peptide
  MOD_RES (1)..(33): Xaa is C or S
XSRVVMNEYQKYIVNSSDDIYLVSIPSLKTPAXTPKTVH

SEQ ID NO: 16273 - protein, 39 aa, Artificial Sequence
  Non-cyclic GFR-binding peptide
  MOD_RES (34)..(35): Xaa is C or S
  MOD_RES (12)..(13)..(14)..(15)..(16): Xaa is A or G
  MOD_RES (17)..(18)..(19)..(20): Xaa is A or G or absent
SRVVMNEYQKYXXXXXXXXXIYLVSIPSLKTPAXXPKPV

SEQ ID NO: 16274 - protein, 36 aa, Artificial Sequence
  Non-cyclic GFR-binding peptide
  MOD_RES (31)..(32): Xaa is C or S
SKVVMEYKFKVKPTRGVLYLISIPELDQPVXXPSAS

SEQ ID NO: 16275 - protein, 35 aa, Artificial Sequence
  Non-cyclic GFR-binding peptide
  MOD_RES (1)..(3)..(34)..(35): Xaa is C or S
XKXSRVIMEYKFKVKPKRGVLYLISIPELAQPVXX

SEQ ID NO: 16276 - protein, 36 aa, Artificial Sequence
  Non-cyclic GFR-binding peptide
  MOD_RES (1)..(35)..(36): Xaa is C or S
  MOD_RES (13)..(14)..(15)..(16)..(17): Xaa is A or G
  MOD_RES (18)..(19)..(20)..(21): Xaa is A or G or absent
XAEVVMDRYKKLXXXXXXXXXFYLISIANLRAPVXX

SEQ ID NO: 16277 - protein, 37 aa, Artificial Sequence
  Non-cyclic GFR-binding peptide
  MOD_RES (33)..(34): Xaa is C or S
  MOD_RES (11)..(12)..(13)..(14)..(15): Xaa is A or G
  MOD_RES (16)..(17)..(18)..(19): Xaa is A or G or absent
RVVMNEYKFKXXXXXXXXXLYLVSIPELQTPAXXPKP

SEQ ID NO: 16278 - protein, 37 aa, Artificial Sequence
  Non-cyclic GFR-binding peptide
  MOD_RES (31)..(32): Xaa is C or S
SRVIMEYKFKVKPKRGVLYLISIPELAQPVXXPAASA

SEQ ID NO: 16279 - protein, 38 aa, Artificial Sequence
  Non-cyclic GFR-binding peptide
  MOD_RES (1)..(3)..(37): Xaa is C or S
  MOD_RES (15)..(16)..(17)..(18)..(19): Xaa is A or G
  MOD_RES (20)..(21)..(22)..(23): Xaa is A or G or absent
XGXSRVVMNEYQKYXXXXXXXXXIYLVSIPSLKTPAXT

SEQ ID NO: 16280 - protein, 39 aa, Artificial Sequence
  Non-cyclic GFR-binding peptide
  MOD_RES (2)..(34): Xaa is C or S
GXSRVVMNEYKFKIVNSSDDLYLVSIPELKTPAXTPKTV

SEQ ID NO: 16281 - protein, 36 aa, Artificial Sequence
  Non-cyclic GFR-binding peptide
  MOD_RES (1)..(34)..(35): Xaa is C or S
  MOD_RES (12)..(13)..(14)..(15)..(16): Xaa is A or G
  MOD_RES (17)..(18)..(19)..(20): Xaa is A or G or absent
XSKVIMEYKFKXXXXXXXXXLYLISIPELDQSVXXP

SEQ ID NO: 16282 - protein, 33 aa, Artificial Sequence
  Non-cyclic GFR-binding peptide
  MOD_RES (1)..(3): Xaa is C or S
XKXSRVIMEYQKYVKPKRGVIYLISIPSLAQPV

SEQ ID NO: 16283 - protein, 36 aa, Artificial Sequence
  Non-cyclic GFR-binding peptide
  MOD_RES (2)..(4)..(36): Xaa is C or S
HXGXARVVMNEYQKYIVNSSDDIYLVSIPSLQTPAX

SEQ ID NO: 16284 - protein, 35 aa, Artificial Sequence
  Non-cyclic GFR-binding peptide
  MOD_RES (2)..(2): Xaa is C or S
  MOD_RES (14)..(15)..(16)..(17)..(18): Xaa is A or G
  MOD_RES (19)..(20)..(21)..(22): Xaa is A or G or absent
GXAEVVMDEYKFKXXXXXXXXXLYLISIPELRAPV

SEQ ID NO: 16285 - protein, 37 aa, Artificial Sequence
  Non-cyclic GFR-binding peptide
  MOD_RES (1)..(3)..(35)..(36): Xaa is C or S
XGXAEVVMDYHYKLVVNNAADKYLISIPSLRAPVXXS

SEQ ID NO: 16286 - protein, 32 aa, Artificial Sequence
  Non-cyclic GFR-binding peptide
  MOD_RES (32)..(32): Xaa is C or S
GEVVMDEYQKYVVKENEDIYLMSIPSLETPVX

SEQ ID NO: 16287 - protein, 42 aa, Artificial Sequence
  Non-cyclic GFR-binding peptide
  MOD_RES (2)..(4)..(37)..(38): Xaa is C or S
RXGXEAVSMGEEYKFKTPVGMDDLYLVSIPELKTPVXXAKGV

SEQ ID NO: 16288 - protein, 35 aa, Artificial Sequence
  Non-cyclic GFR-binding peptide
  MOD_RES (2)..(4): Xaa is C or S
RXGXESVAMGYHYKLYTVVGKDKYLISIPSLKTPV

SEQ ID NO: 16289 - protein, 38 aa, Artificial Sequence
  Non-cyclic GFR-binding peptide
  MOD_RES (2)..(4)..(36)..(37): Xaa is C or S
RXGXGEVVMDEYKFKVVKENEDLYLMSIPELETPVXXA

SEQ ID NO: 16290 - protein, 35 aa, Artificial Sequence
  Non-cyclic GFR-binding peptide
  MOD_RES (2)..(4): Xaa is C or S
RXGXAEVVMDYHYKLVVNNAADKYLISIPSLRAPV

SEQ ID NO: 16291 - protein, 34 aa, Artificial Sequence
  Non-cyclic GFR-binding peptide
  MOD_RES (1)..(32)..(33): Xaa is C or S
XSRVIMEYKFKVKPKRGVLYLISIPELAQPVXXP

SEQ ID NO: 16292 - protein, 38 aa, Artificial Sequence
  Non-cyclic GFR-binding peptide
  MOD_RES (2)..(4)..(35)..(36): Xaa is C or S
SXKXSRVIMEYQKYVKPKRGVIYLISIPSLAQPVXXPA

SEQ ID NO: 16293 - protein, 32 aa, Artificial Sequence
  Non-cyclic GFR-binding peptide
  MOD_RES (32)..(32): Xaa is C or S
SRVVMNEYQKYIVNSSDDIYLVSIPSLKTPAX

SEQ ID NO: 16294 - protein, 33 aa, Artificial Sequence
  Non-cyclic GFR-binding peptide
  MOD_RES (33)..(33): Xaa is C or S
  MOD_RES (11)..(12)..(13)..(14)..(15): Xaa is A or G
  MOD_RES (16)..(17)..(18)..(19): Xaa is A or G or absent
SKVIMEYKFKXXXXXXXXXLYLISIPELDQSVX

SEQ ID NO: 16295 - protein, 39 aa, Artificial Sequence
  Non-cyclic GFR-binding peptide
  MOD_RES (33)..(34): Xaa is C or S
EAVSMGEEYKFKTPVGMDDLYLVSIPELKTPVXXAKGVK

SEQ ID NO: 16296 - protein, 37 aa, Artificial Sequence
  Non-cyclic GFR-binding peptide
  MOD_RES (2)..(36)..(37): Xaa is C or S
  MOD_RES (14)..(15)..(16)..(17)..(18): Xaa is A or G
  MOD_RES (19)..(20)..(21)..(22): Xaa is A or G or absent
GXGEVVMDEYKFKXXXXXXXXXLYLMSIPELETPVXX

SEQ ID NO: 16297 - protein, 38 aa, Artificial Sequence
  Non-cyclic GFR-binding peptide
  MOD_RES (34)..(35): Xaa is C or S
  MOD_RES (12)..(13)..(14)..(15)..(16): Xaa is A or G
  MOD_RES (17)..(18)..(19)..(20): Xaa is A or G or absent
GEVVMEEYKFKXXXXXXXXXLYLMSIPELETPVXXAKP

SEQ ID NO: 16298 - protein, 36 aa, Artificial Sequence
  Non-cyclic GFR-binding peptide
  MOD_RES (2)..(35)..(36): Xaa is C or S
  MOD_RES (13)..(14)..(15)..(16)..(17): Xaa is A or G
  MOD_RES (18)..(19)..(20)..(21): Xaa is A or G or absent
KXSKVIMEYQKYXXXXXXXXXIYLISIPSLDQSVXX

SEQ ID NO: 16299 - protein, 33 aa, Artificial Sequence
  Non-cyclic GFR-binding peptide
  MOD_RES (32)..(33): Xaa is C or S
GEVVMEEYQKYVVKDYEDIYLMSIPSLETPVXX

SEQ ID NO: 16300 - protein, 37 aa, Artificial Sequence
  Non-cyclic GFR-binding peptide
  MOD_RES (1)..(33)..(34): Xaa is C or S
XESVAMGEYQKYYTVVGKDIYLISIPSLKTPVXXAKS

SEQ ID NO: 16301 - protein, 39 aa, Artificial Sequence
  Non-cyclic GFR-binding peptide
  MOD_RES (1)..(35)..(36): Xaa is C or S
  MOD_RES (13)..(14)..(15)..(16)..(17): Xaa is A or G
  MOD_RES (18)..(19)..(20)..(21): Xaa is A or G or absent
XESVAMGEYQKYXXXXXXXXXIYLISIPSLKTPVXXAKS

SEQ ID NO: 16302 - protein, 37 aa, Artificial Sequence
  Non-cyclic GFR-binding peptide
  MOD_RES (1)..(35): Xaa is C or S
  MOD_RES (13)..(14)..(15)..(16)..(17): Xaa is A or G
  MOD_RES (18)..(19)..(20)..(21): Xaa is A or G or absent
XSRVVMNEYKFKXXXXXXXXXLYLVSIPELKTPAXTP

SEQ ID NO: 16303 - protein, 35 aa, Artificial Sequence
  Non-cyclic GFR-binding peptide
  MOD_RES (32)..(33): Xaa is C or S
AEVVMDRYKKLVVNNAADFYLISIANLRAPVXXSA

SEQ ID NO: 16304 - protein, 37 aa, Artificial Sequence
  Non-cyclic GFR-binding peptide
  MOD_RES (2)..(4)..(36)..(37): Xaa is C or S
RXGXESVAMGEYQKYYTVVGKDIYLISIPSLKTPVXX

SEQ ID NO: 16305 - protein, 33 aa, Artificial Sequence
  Non-cyclic GFR-binding peptide
  MOD_RES (32)..(33): Xaa is C or S
GEVVMEEYKFKVVKDYEDLYLMSIPELETPVXX

SEQ ID NO: 16306 - protein, 36 aa, Artificial Sequence
  Non-cyclic GFR-binding peptide
  MOD_RES (2)..(34)..(35): Xaa is C or S
GXARVVMNEYQKYIVNSSDDIYLVSIPSLQTPAXXP

SEQ ID NO: 16307 - protein, 37 aa, Artificial Sequence
  Non-cyclic GFR-binding peptide
  MOD_RES (2)..(35)..(36): Xaa is C or S
  MOD_RES (13)..(14)..(15)..(16)..(17): Xaa is A or G
  MOD_RES (18)..(19)..(20)..(21): Xaa is A or G or absent
KXSKVIMEYQKYXXXXXXXXXIYLISIPSLDQSVXXP

SEQ ID NO: 16308 - protein, 42 aa, Artificial Sequence
  Non-cyclic GFR-binding peptide
  MOD_RES (2)..(4)..(36)..(37): Xaa is C or S
HXGXARVVMNEYKFKIVNSSDDLYLVSIPELQTPAXXPKPVT

SEQ ID NO: 16309 - protein, 35 aa, Artificial Sequence
  Non-cyclic GFR-binding peptide
  MOD_RES (2)..(35): Xaa is C or S
  MOD_RES (13)..(14)..(15)..(16)..(17): Xaa is A or G
  MOD_RES (18)..(19)..(20)..(21): Xaa is A or G or absent
KXSKVIMEYQKYXXXXXXXXXIYLISIPSLDQSVX

SEQ ID NO: 16310 - protein, 42 aa, Artificial Sequence
  Non-cyclic GFR-binding peptide
  MOD_RES (2)..(4)..(36)..(37): Xaa is C or S
HXGXAKVVMNEYKFKIVNNSSDLYLVSIPELKTPAXXAKPVA

SEQ ID NO: 16311 - protein, 38 aa, Artificial Sequence
  Non-cyclic GFR-binding peptide
  MOD_RES (2)..(35)..(36): Xaa is C or S
GXEAVSMGEEYQKYTPVGMDDIYLVSIPSLKTPVXXAK

SEQ ID NO: 16312 - protein, 34 aa, Artificial Sequence
  Non-cyclic GFR-binding peptide
  MOD_RES (2)..(2): Xaa is C or S
  MOD_RES (13)..(14)..(15)..(16)..(17): Xaa is A or G
  MOD_RES (18)..(19)..(20)..(21): Xaa is A or G or absent
KXSKVIMEYQKYXXXXXXXXXIYLISIPSLDQSV

SEQ ID NO: 16313 - protein, 39 aa, Artificial Sequence
  Non-cyclic GFR-binding peptide
  MOD_RES (33)..(34): Xaa is C or S
  MOD_RES (11)..(12)..(13)..(14)..(15): Xaa is A or G
  MOD_RES (16)..(17)..(18)..(19): Xaa is A or G or absent
KVVMNEYKFKXXXXXXXXXLYLVSIPELKTPAXXAKPVA

SEQ ID NO: 16314 - protein, 35 aa, Artificial Sequence
  Non-cyclic GFR-binding peptide
  MOD_RES (2)..(4): Xaa is C or S
HXGXARVVMNEYQKYIVNSSDDIYLVSIPSLQTPA

SEQ ID NO: 16315 - protein, 43 aa, Artificial Sequence
  Non-cyclic GFR-binding peptide
  MOD_RES (2)..(4)..(38)..(39): Xaa is C or S
  MOD_RES (16)..(17)..(18)..(19)..(20): Xaa is A or G
  MOD_RES (21)..(22)..(23)..(24): Xaa is A or G or absent
RXGXAEVVMDYHYKLXXXXXXXXXKYLISIPSLRAPVXXSAPA

SEQ ID NO: 16316 - protein, 34 aa, Artificial Sequence
  Non-cyclic GFR-binding peptide
  MOD_RES (1)..(33)..(34): Xaa is C or S
XSRVVMNEYKFKIVNSSDDLYLVSIPELKTPAXX

SEQ ID NO: 16317 - protein, 40 aa, Artificial Sequence
  Non-cyclic GFR-binding peptide
  MOD_RES (2)..(4)..(36)..(37): Xaa is C or S
RXGXAEVVMDEYKFKVVNNAADLYLISIPELRAPVXXSAP

SEQ ID NO: 16318 - protein, 40 aa, Artificial Sequence
  Non-cyclic GFR-binding peptide
  MOD_RES (2)..(34)..(35): Xaa is C or S
GXGEVVMEEYQKYVVKDYEDIYLMSIPSLETPVXXAKPIS

SEQ ID NO: 16319 - protein, 36 aa, Artificial Sequence
  Non-cyclic GFR-binding peptide
  MOD_RES (1)..(35)..(36): Xaa is C or S
  MOD_RES (13)..(14)..(15)..(16)..(17): Xaa is A or G
  MOD_RES (18)..(19)..(20)..(21): Xaa is A or G or absent
XESVAMGEYQKYXXXXXXXXXIYLISIPSLKTPVXX

SEQ ID NO: 16320 - protein, 38 aa, Artificial Sequence
  Non-cyclic GFR-binding peptide
  MOD_RES (2)..(4)..(36)..(37): Xaa is C or S
RXGXGEVVMDEYQKYVVKENEDIYLMSIPSLETPVXXA

SEQ ID NO: 16321 - protein, 40 aa, Artificial Sequence
  Non-cyclic GFR-binding peptide
  MOD_RES (1)..(34)..(35): Xaa is C or S
XEAVSMGEEYKFKTPVGMDDLYLVSIPELKTPVXXAKGVK

SEQ ID NO: 16322 - protein, 39 aa, Artificial Sequence
  Non-cyclic GFR-binding peptide
  MOD_RES (2)..(4)..(36)..(37): Xaa is C or S
RXGXESVAMGYHYKLYTVVGKDKYLISIPSLKTPVXXAK

SEQ ID NO: 16323 - protein, 38 aa, Artificial Sequence
  Non-cyclic GFR-binding peptide
  MOD_RES (2)..(37)..(38): Xaa is C or S
  MOD_RES (15)..(16)..(17)..(18)..(19): Xaa is A or G
  MOD_RES (20)..(21)..(22)..(23): Xaa is A or G or absent
GXEAVSMGEEYKFKXXXXXXXXXLYLVSIPELKTPVXX

SEQ ID NO: 16324 - protein, 38 aa, Artificial Sequence
  Non-cyclic GFR-binding peptide
  MOD_RES (2)..(35)..(36): Xaa is C or S
  MOD_RES (13)..(14)..(15)..(16)..(17): Xaa is A or G
  MOD_RES (18)..(19)..(20)..(21): Xaa is A or G or absent
KXSKVVMEYKFKXXXXXXXXXLYLISIPELDQPVXXPS

SEQ ID NO: 16325 - protein, 32 aa, Artificial Sequence
  Non-cyclic GFR-binding peptide
  MOD_RES (32)..(32): Xaa is C or S
SRVVMNEYKFKIVNSSDDLYLVSIPELKTPAX

SEQ ID NO: 16326 - protein, 38 aa, Artificial Sequence
  Non-cyclic GFR-binding peptide
  MOD_RES (32)..(33): Xaa is C or S
AKVVMNEYQKYIVNNSSDIYLVSIPSLKTPAXXAKPVA

SEQ ID NO: 16327 - protein, 36 aa, Artificial Sequence
  Non-cyclic GFR-binding peptide
  MOD_RES (2)..(34)..(35): Xaa is C or S
GXGEVVMEEYKFKVVKDYEDLYLMSIPELETPVXXA

SEQ ID NO: 16328 - protein, 37 aa, Artificial Sequence
  Non-cyclic GFR-binding peptide
  MOD_RES (2)..(36)..(37): Xaa is C or S
  MOD_RES (14)..(15)..(16)..(17)..(18): Xaa is A or G
  MOD_RES (19)..(20)..(21)..(22): Xaa is A or G or absent
GXAKVVMNEYQKYXXXXXXXXXIYLVSIPSLKTPAXX

SEQ ID NO: 16329 - protein, 37 aa, Artificial Sequence
  Non-cyclic GFR-binding peptide
  MOD_RES (33)..(34): Xaa is C or S
  MOD_RES (11)..(12)..(13)..(14)..(15): Xaa is A or G
  MOD_RES (16)..(17)..(18)..(19): Xaa is A or G or absent
EVVMDYHYKLXXXXXXXXXKYLISIPSLRAPVXXSAP

SEQ ID NO: 16330 - protein, 40 aa, Artificial Sequence
  Non-cyclic GFR-binding peptide
  MOD_RES (2)..(36)..(37): Xaa is C or S
  MOD_RES (14)..(15)..(16)..(17)..(18): Xaa is A or G
  MOD_RES (19)..(20)..(21)..(22): Xaa is A or G or absent
GXGEVVMEEYQKYXXXXXXXXXIYLMSIPSLETPVXXAKP

SEQ ID NO: 16331 - protein, 38 aa, Artificial Sequence
  Non-cyclic GFR-binding peptide
  MOD_RES (1)..(34)..(35): Xaa is C or S
  MOD_RES (12)..(13)..(14)..(15)..(16): Xaa is A or G
  MOD_RES (17)..(18)..(19)..(20): Xaa is A or G or absent
XSKVVMEYKFKXXXXXXXXXLYLISIPELDQPVXXPSA

SEQ ID NO: 16332 - protein, 40 aa, Artificial Sequence
  Non-cyclic GFR-binding peptide
  MOD_RES (1)..(3)..(34)..(35): Xaa is C or S
XKXSKVVMEYQKYVKPTRGVIYLISIPSLDQPVXXPSASA

SEQ ID NO: 16333 - protein, 34 aa, Artificial Sequence
  Non-cyclic GFR-binding peptide
  MOD_RES (13)..(14)..(15)..(16)..(17): Xaa is A or G
  MOD_RES (18)..(19)..(20)..(21): Xaa is A or G or absent
EAVSMGEEYKFKXXXXXXXXXLYLVSIPELKTPV

SEQ ID NO: 16334 - protein, 37 aa, Artificial Sequence
  Non-cyclic GFR-binding peptide
  MOD_RES (1)..(33)..(34): Xaa is C or S
XGEVVMEEYKFKVVKDYEDLYLMSIPELETPVXXAKP

SEQ ID NO: 16335 - protein, 36 aa, Artificial Sequence
  Non-cyclic GFR-binding peptide
  MOD_RES (31)..(32): Xaa is C or S
RVVMNEYKFKIVNSSDDLYLVSIPELKTPAXXPKPV

SEQ ID NO: 16336 - protein, 36 aa, Artificial Sequence
  Non-cyclic GFR-binding peptide
  MOD_RES (2)..(4)..(35)..(36): Xaa is C or S
SXKXSKVVMEYQKYVKPTRGVIYLISIPSLDQPVXX

SEQ ID NO: 16337 - protein, 43 aa, Artificial Sequence
  Non-cyclic GFR-binding peptide
  MOD_RES (1)..(3)..(37)..(38): Xaa is C or S
  MOD_RES (15)..(16)..(17)..(18)..(19): Xaa is A or G
  MOD_RES (20)..(21)..(22)..(23): Xaa is A or G or absent
XGXGEVVMEEYKFKXXXXXXXXXLYLMSIPELETPVXXAKPIS

SEQ ID NO: 16338 - protein, 35 aa, Artificial Sequence
  Non-cyclic GFR-binding peptide
  MOD_RES (2)..(2): Xaa is C or S
  MOD_RES (14)..(15)..(16)..(17)..(18): Xaa is A or G
  MOD_RES (19)..(20)..(21)..(22): Xaa is A or G or absent
GXSRVVMNEYQKYXXXXXXXXXIYLVSIPSLKTPA

SEQ ID NO: 16339 - protein, 38 aa, Artificial Sequence
  Non-cyclic GFR-binding peptide
  MOD_RES (2)..(4)..(36)..(37): Xaa is C or S
RXGXESVAMGEYQKYYTVVGKDIYLISIPSLKTPVXXA

SEQ ID NO: 16340 - protein, 35 aa, Artificial Sequence
  Non-cyclic GFR-binding peptide
  MOD_RES (1)..(3)..(34)..(35): Xaa is C or S
XKXSRVIMEYQKYVKPKRGVIYLISIPSLAQPVXX

SEQ ID NO: 16341 - protein, 34 aa, Artificial Sequence
  Non-cyclic GFR-binding peptide
  MOD_RES (1)..(3)..(34): Xaa is C or S
XKXSRVIMEYQKYVKPKRGVIYLISIPSLAQPVX

SEQ ID NO: 16342 - protein, 45 aa, Artificial Sequence
  Non-cyclic GFR-binding peptide
  MOD_RES (2)..(4)..(39)..(40): Xaa is C or S
  MOD_RES (17)..(18)..(19)..(20)..(21): Xaa is A or G
  MOD_RES (22)..(23)..(24)..(25): Xaa is A or G or absent
RXGXEAVSMGEEYQKYXXXXXXXXXIYLVSIPSLKTPVXXAKGVK

SEQ ID NO: 16343 - protein, 40 aa, Artificial Sequence
  Non-cyclic GFR-binding peptide
  MOD_RES (2)..(35)..(36): Xaa is C or S
GXEAVSMGEEYQKYTPVGMDDIYLVSIPSLKTPVXXAKGV

SEQ ID NO: 16344 - protein, 34 aa, Artificial Sequence
  Non-cyclic GFR-binding peptide
  MOD_RES (1)..(32)..(33): Xaa is C or S
XSKVIMEYQKYIKPTKGIIYLISIPSLDQSVXXP

SEQ ID NO: 16345 - protein, 37 aa, Artificial Sequence
  Non-cyclic GFR-binding peptide
  MOD_RES (33)..(34): Xaa is C or S
  MOD_RES (11)..(12)..(13)..(14)..(15): Xaa is A or G
  MOD_RES (16)..(17)..(18)..(19): Xaa is A or G or absent
KVVMNEYKFKXXXXXXXXXLYLVSIPELKTPAXXAKP

SEQ ID NO: 16346 - protein, 38 aa, Artificial Sequence
  Non-cyclic GFR-binding peptide
  MOD_RES (2)..(34)..(35): Xaa is C or S
GXGEVVMEEYQKYVVKDYEDIYLMSIPSLETPVXXAKP

SEQ ID NO: 16347 - protein, 40 aa, Artificial Sequence
  Non-cyclic GFR-binding peptide
  MOD_RES (34)..(35): Xaa is C or S
  MOD_RES (12)..(13)..(14)..(15)..(16): Xaa is A or G
  MOD_RES (17)..(18)..(19)..(20): Xaa is A or G or absent
AEVVMDRYKKLXXXXXXXXXFYLISIANLRAPVXXSAPAA

SEQ ID NO: 16348 - protein, 38 aa, Artificial Sequence
  Non-cyclic GFR-binding peptide
  MOD_RES (1)..(3)..(34)..(35): Xaa is C or S
XKXSKVVMEYKFKVKPTRGVLYLISIPELDQPVXXPSA

SEQ ID NO: 16349 - protein, 37 aa, Artificial Sequence
  Non-cyclic GFR-binding peptide
  MOD_RES (2)..(4): Xaa is C or S
  MOD_RES (16)..(17)..(18)..(19)..(20): Xaa is A or G
  MOD_RES (21)..(22)..(23)..(24): Xaa is A or G or absent
HXGXARVVMNEYQKYXXXXXXXXXIYLVSIPSLQTPA

SEQ ID NO: 16350 - protein, 33 aa, Artificial Sequence
  Non-cyclic GFR-binding peptide
  MOD_RES (2)..(2): Xaa is C or S
GXSRVVMNEYKFKIVNSSDDLYLVSIPELKTPA

SEQ ID NO: 16351 - protein, 40 aa, Artificial Sequence
  Non-cyclic GFR-binding peptide
  MOD_RES (2)..(36)..(37): Xaa is C or S
  MOD_RES (14)..(15)..(16)..(17)..(18): Xaa is A or G
  MOD_RES (19)..(20)..(21)..(22): Xaa is A or G or absent
GXAEVVMDYHYKLXXXXXXXXXKYLISIPSLRAPVXXSAP

SEQ ID NO: 16352 - protein, 37 aa, Artificial Sequence
  Non-cyclic GFR-binding peptide
  MOD_RES (1)..(3)..(36)..(37): Xaa is C or S
XGXEAVSMGEEYQKYTPVGMDDIYLVSIPSLKTPVXX

SEQ ID NO: 16353 - protein, 37 aa, Artificial Sequence
  Non-cyclic GFR-binding peptide
  MOD_RES (1)..(3)..(36)..(37): Xaa is C or S
XGXEAVSMGEEYKFKTPVGMDDLYLVSIPELKTPVXX

SEQ ID NO: 16354 - protein, 38 aa, Artificial Sequence
  Non-cyclic GFR-binding peptide
  MOD_RES (2)..(36)..(37): Xaa is C or S
  MOD_RES (14)..(15)..(16)..(17)..(18): Xaa is A or G
  MOD_RES (19)..(20)..(21)..(22): Xaa is A or G or absent
GXAKVVMNEYQKYXXXXXXXXXIYLVSIPSLKTPAXXA

SEQ ID NO: 16355 - protein, 35 aa, Artificial Sequence
  Non-cyclic GFR-binding peptide
  MOD_RES (2)..(34)..(35): Xaa is C or S
GXGEVVMDEYQKYVVKENEDIYLMSIPSLETPVXX

SEQ ID NO: 16356 - protein, 38 aa, Artificial Sequence
  Non-cyclic GFR-binding peptide
  MOD_RES (2)..(36)..(37): Xaa is C or S
  MOD_RES (14)..(15)..(16)..(17)..(18): Xaa is A or G
  MOD_RES (19)..(20)..(21)..(22): Xaa is A or G or absent
GXGEVVMDEYKFKXXXXXXXXXLYLMSIPELETPVXXA

SEQ ID NO: 16357 - protein, 38 aa, Artificial Sequence
  Non-cyclic GFR-binding peptide
  MOD_RES (33)..(34): Xaa is C or S
  MOD_RES (11)..(12)..(13)..(14)..(15): Xaa is A or G
  MOD_RES (16)..(17)..(18)..(19): Xaa is A or G or absent
SKVVMEYQKYXXXXXXXXXIYLISIPSLDQPVXXPSAS

SEQ ID NO: 16358 - protein, 39 aa, Artificial Sequence
  Non-cyclic GFR-binding peptide
  MOD_RES (33)..(34): Xaa is C or S
  MOD_RES (11)..(12)..(13)..(14)..(15): Xaa is A or G
  MOD_RES (16)..(17)..(18)..(19): Xaa is A or G or absent
EVVMEEYQKYXXXXXXXXXIYLMSIPSLETPVXXAKPIS

SEQ ID NO: 16359 - protein, 36 aa, Artificial Sequence
  Non-cyclic GFR-binding peptide
  MOD_RES (2)..(4): Xaa is C or S
  MOD_RES (15)..(16)..(17)..(18)..(19): Xaa is A or G
  MOD_RES (20)..(21)..(22)..(23): Xaa is A or G or absent
SXKXSKVIMEYQKYXXXXXXXXXIYLISIPSLDQSV

SEQ ID NO: 16360 - protein, 32 aa, Artificial Sequence
  Non-cyclic GFR-binding peptide
  MOD_RES (32)..(32): Xaa is C or S
ARVVMNEYKFKIVNSSDDLYLVSIPELQTPAX

SEQ ID NO: 16361 - protein, 37 aa, Artificial Sequence
  Non-cyclic GFR-binding peptide
  MOD_RES (2)..(33)..(34): Xaa is C or S
KXSKVVMEYKFKVKPTRGVLYLISIPELDQPVXXPSA

SEQ ID NO: 16362 - protein, 34 aa, Artificial Sequence
  Non-cyclic GFR-binding peptide
  MOD_RES (1)..(33)..(34): Xaa is C or S
XESVAMGYHYKLYTVVGKDKYLISIPSLKTPVXX

SEQ ID NO: 16363 - protein, 40 aa, Artificial Sequence
  Non-cyclic GFR-binding peptide
  MOD_RES (2)..(4)..(35)..(36): Xaa is C or S
SXKXSRVIMEYQKYVKPKRGVIYLISIPSLAQPVXXPAAS

SEQ ID NO: 16364 - protein, 39 aa, Artificial Sequence
  Non-cyclic GFR-binding peptide
  MOD_RES (1)..(3)..(34)..(35): Xaa is C or S
XKXSKVIMEYQKYIKPTKGIIYLISIPSLDQSVXXPSAS

SEQ ID NO: 16365 - protein, 34 aa, Artificial Sequence
  Non-cyclic GFR-binding peptide
  MOD_RES (2)..(34): Xaa is C or S
GXAEVVMDRYKKLVVNNAADFYLISIANLRAPVX

SEQ ID NO: 16366 - protein, 38 aa, Artificial Sequence
  Non-cyclic GFR-binding peptide
  MOD_RES (1)..(33)..(34): Xaa is C or S
XGEVVMEEYQKYVVKDYEDIYLMSIPSLETPVXXAKPI

SEQ ID NO: 16367 - protein, 34 aa, Artificial Sequence
  Non-cyclic GFR-binding peptide
  MOD_RES (1)..(3): Xaa is C or S
XGXGEVVMEEYKFKVVKDYEDLYLMSIPELETPV

SEQ ID NO: 16368 - protein, 33 aa, Artificial Sequence
  Non-cyclic GFR-binding peptide
  MOD_RES (1)..(33): Xaa is C or S
XSRVVMNEYQKYIVNSSDDIYLVSIPSLKTPAX

SEQ ID NO: 16369 - protein, 34 aa, Artificial Sequence
  Non-cyclic GFR-binding peptide
  MOD_RES (1)..(3): Xaa is C or S
XGXAEVVMDYHYKLVVNNAADKYLISIPSLRAPV

SEQ ID NO: 16370 - protein, 35 aa, Artificial Sequence
  Non-cyclic GFR-binding peptide
  MOD_RES (2)..(33)..(34): Xaa is C or S
KXSRVIMEYQKYVKPKRGVIYLISIPSLAQPVXXP

SEQ ID NO: 16371 - protein, 39 aa, Artificial Sequence
  Non-cyclic GFR-binding peptide
  MOD_RES (1)..(3)..(35)..(36): Xaa is C or S
XGXSRVVMNEYQKYIVNSSDDIYLVSIPSLKTPAXXPKP

SEQ ID NO: 16372 - protein, 32 aa, Artificial Sequence
  Non-cyclic GFR-binding peptide
  MOD_RES (31)..(32): Xaa is C or S
EVVMEEYKFKVVKDYEDLYLMSIPELETPVXX

SEQ ID NO: 16373 - protein, 39 aa, Artificial Sequence
  Non-cyclic GFR-binding peptide
  MOD_RES (2)..(35)..(36): Xaa is C or S
  MOD_RES (13)..(14)..(15)..(16)..(17): Xaa is A or G
  MOD_RES (18)..(19)..(20)..(21): Xaa is A or G or absent
KXSRVIMEYKFKXXXXXXXXXLYLISIPELAQPVXXPAA

SEQ ID NO: 16374 - protein, 38 aa, Artificial Sequence
  Non-cyclic GFR-binding peptide
  MOD_RES (1)..(3)..(35)..(36): Xaa is C or S
XGXARVVMNEYQKYIVNSSDDIYLVSIPSLQTPAXXPK

SEQ ID NO: 16375 - protein, 40 aa, Artificial Sequence
  Non-cyclic GFR-binding peptide
  MOD_RES (1)..(34)..(35): Xaa is C or S
  MOD_RES (12)..(13)..(14)..(15)..(16): Xaa is A or G
  MOD_RES (17)..(18)..(19)..(20): Xaa is A or G or absent
XSKVVMEYQKYXXXXXXXXXIYLISIPSLDQPVXXPSASA

SEQ ID NO: 16376 - protein, 36 aa, Artificial Sequence
  Non-cyclic GFR-binding peptide
  MOD_RES (2)..(4): Xaa is C or S
  MOD_RES (15)..(16)..(17)..(18)..(19): Xaa is A or G
  MOD_RES (20)..(21)..(22)..(23): Xaa is A or G or absent
SXKXSKVVMEYQKYXXXXXXXXXIYLISIPSLDQPV

SEQ ID NO: 16377 - protein, 38 aa, Artificial Sequence
  Non-cyclic GFR-binding peptide
  MOD_RES (1)..(35)..(36): Xaa is C or S
  MOD_RES (13)..(14)..(15)..(16)..(17): Xaa is A or G
  MOD_RES (18)..(19)..(20)..(21): Xaa is A or G or absent
XGEVVMEEYQKYXXXXXXXXXIYLMSIPSLETPVXXAK

SEQ ID NO: 16378 - protein, 38 aa, Artificial Sequence
  Non-cyclic GFR-binding peptide
  MOD_RES (1)..(3)..(36)..(37): Xaa is C or S
  MOD_RES (14)..(15)..(16)..(17)..(18): Xaa is A or G
  MOD_RES (19)..(20)..(21)..(22): Xaa is A or G or absent
XKXSKVIMEYKFKXXXXXXXXXLYLISIPELDQSVXXP

SEQ ID NO: 16379 - protein, 34 aa, Artificial Sequence
  Non-cyclic GFR-binding peptide
  MOD_RES (2)..(4): Xaa is C or S
SXKXSRVIMEYKFKVKPKRGVLYLISIPELAQPV

SEQ ID NO: 16380 - protein, 32 aa, Artificial Sequence
  Non-cyclic GFR-binding peptide
  MOD_RES (32)..(32): Xaa is C or S
ESVAMGRYKKLYTVVGKDFYLISIANLKTPVX

SEQ ID NO: 16381 - protein, 36 aa, Artificial Sequence
  Non-cyclic GFR-binding peptide
  MOD_RES (1)..(35)..(36): Xaa is C or S
  MOD_RES (13)..(14)..(15)..(16)..(17): Xaa is A or G
  MOD_RES (18)..(19)..(20)..(21): Xaa is A or G or absent
XSRVVMNEYQKYXXXXXXXXXIYLVSIPSLKTPAXX

SEQ ID NO: 16382 - protein, 37 aa, Artificial Sequence
  Non-cyclic GFR-binding peptide
  MOD_RES (31)..(32): Xaa is C or S
EVVMEEYQKYVVKDYEDIYLMSIPSLETPVXXAKPIS

SEQ ID NO: 16383 - protein, 39 aa, Artificial Sequence
  Non-cyclic GFR-binding peptide
  MOD_RES (33)..(34): Xaa is C or S
EAVSMGEEYQKYTPVGMDDIYLVSIPSLKTPVXXAKGVK

SEQ ID NO: 16384 - protein, 35 aa, Artificial Sequence
  Non-cyclic GFR-binding peptide
  MOD_RES (31)..(32): Xaa is C or S
SKVVMEYQKYVKPTRGVIYLISIPSLDQPVXXPSA

SEQ ID NO: 16385 - protein, 32 aa, Artificial Sequence
  Non-cyclic GFR-binding peptide
  MOD_RES (32)..(32): Xaa is C or S
GEVVMEEYQKYVVKDYEDIYLMSIPSLETPVX

SEQ ID NO: 16386 - protein, 34 aa, Artificial Sequence
  Non-cyclic GFR-binding peptide
  MOD_RES (1)..(34): Xaa is C or S
XEAVSMGEEYKFKTPVGMDDLYLVSIPELKTPVX

SEQ ID NO: 16387 - protein, 40 aa, Artificial Sequence
  Non-cyclic GFR-binding peptide
  MOD_RES (2)..(4)..(37)..(38): Xaa is C or S
  MOD_RES (15)..(16)..(17)..(18)..(19): Xaa is A or G
  MOD_RES (20)..(21)..(22)..(23): Xaa is A or G or absent
SXKXSKVVMEYKFKXXXXXXXXXLYLISIPELDQPVXXPS

SEQ ID NO: 16388 - protein, 35 aa, Artificial Sequence
  Non-cyclic GFR-binding peptide
  MOD_RES (1)..(33)..(34): Xaa is C or S
XGEVVMEEYQKYVVKDYEDIYLMSIPSLETPVXXA

SEQ ID NO: 16389 - protein, 43 aa, Artificial Sequence
  Non-cyclic GFR-binding peptide
  MOD_RES (2)..(37)..(38): Xaa is C or S
  MOD_RES (15)..(16)..(17)..(18)..(19): Xaa is A or G
  MOD_RES (20)..(21)..(22)..(23): Xaa is A or G or absent
GXEAVSMGEEYQKYXXXXXXXXXIYLVSIPSLKTPVXXAKGVK

SEQ ID NO: 16390 - protein, 35 aa, Artificial Sequence
  Non-cyclic GFR-binding peptide
  MOD_RES (33)..(34): Xaa is C or S
  MOD_RES (11)..(12)..(13)..(14)..(15): Xaa is A or G
  MOD_RES (16)..(17)..(18)..(19): Xaa is A or G or absent
RVVMNEYQKYXXXXXXXXXIYLVSIPSLQTPAXXP

SEQ ID NO: 16391 - protein, 36 aa, Artificial Sequence
  Non-cyclic GFR-binding peptide
  MOD_RES (2)..(33)..(34): Xaa is C or S
KXSRVIMEYQKYVKPKRGVIYLISIPSLAQPVXXPA

SEQ ID NO: 16392 - protein, 40 aa, Artificial Sequence
  Non-cyclic GFR-binding peptide
  MOD_RES (1)..(3)..(37)..(38): Xaa is C or S
  MOD_RES (15)..(16)..(17)..(18)..(19): Xaa is A or G
  MOD_RES (20)..(21)..(22)..(23): Xaa is A or G or absent
XGXGEVVMEEYQKYXXXXXXXXXIYLMSIPSLETPVXXAK

SEQ ID NO: 16393 - protein, 39 aa, Artificial Sequence
  Non-cyclic GFR-binding peptide
  MOD_RES (2)..(36)..(37): Xaa is C or S
  MOD_RES (14)..(15)..(16)..(17)..(18): Xaa is A or G
  MOD_RES (19)..(20)..(21)..(22): Xaa is A or G or absent
GXAEVVMDYHYKLXXXXXXXXXKYLISIPSLRAPVXXSA

SEQ ID NO: 16394 - protein, 39 aa, Artificial Sequence
  Non-cyclic GFR-binding peptide
  MOD_RES (2)..(35)..(36): Xaa is C or S
  MOD_RES (13)..(14)..(15)..(16)..(17): Xaa is A or G
  MOD_RES (18)..(19)..(20)..(21): Xaa is A or G or absent
KXSKVIMEYKFKXXXXXXXXXLYLISIPELDQSVXXPSA

SEQ ID NO: 16395 - protein, 36 aa, Artificial Sequence
  Non-cyclic GFR-binding peptide
  MOD_RES (2)..(4)..(36): Xaa is C or S
RXGXESVAMGYHYKLYTVVGKDKYLISIPSLKTPVX

SEQ ID NO: 16396 - protein, 41 aa, Artificial Sequence
  Non-cyclic GFR-binding peptide
  MOD_RES (2)..(36)..(37): Xaa is C or S
  MOD_RES (14)..(15)..(16)..(17)..(18): Xaa is A or G
  MOD_RES (19)..(20)..(21)..(22): Xaa is A or G or absent
GXAEVVMDYHYKLXXXXXXXXXKYLISIPSLRAPVXXSAPA

SEQ ID NO: 16397 - protein, 38 aa, Artificial Sequence
  Non-cyclic GFR-binding peptide
  MOD_RES (1)..(36)..(37): Xaa is C or S
  MOD_RES (14)..(15)..(16)..(17)..(18): Xaa is A or G
  MOD_RES (19)..(20)..(21)..(22): Xaa is A or G or absent
XEAVSMGEEYQKYXXXXXXXXXIYLVSIPSLKTPVXXA

SEQ ID NO: 16398 - protein, 37 aa, Artificial Sequence
  Non-cyclic GFR-binding peptide
  MOD_RES (34)..(35): Xaa is C or S
  MOD_RES (12)..(13)..(14)..(15)..(16): Xaa is A or G
  MOD_RES (17)..(18)..(19)..(20): Xaa is A or G or absent
AKVVMNEYQKYXXXXXXXXXIYLVSIPSLKTPAXXAK

SEQ ID NO: 16399 - protein, 42 aa, Artificial Sequence
  Non-cyclic GFR-binding peptide
  MOD_RES (1)..(3)..(36)..(37): Xaa is C or S
XGXEAVSMGEEYQKYTPVGMDDIYLVSIPSLKTPVXXAKGVK

SEQ ID NO: 16400 - protein, 38 aa, Artificial Sequence
  Non-cyclic GFR-binding peptide
  MOD_RES (1)..(33)..(34): Xaa is C or S
XGEVVMDEYQKYVVKENEDIYLMSIPSLETPVXXAKPI

SEQ ID NO: 16401 - protein, 42 aa, Artificial Sequence
  Non-cyclic GFR-binding peptide
  MOD_RES (2)..(4)..(39)..(40): Xaa is C or S
  MOD_RES (17)..(18)..(19)..(20)..(21): Xaa is A or G
  MOD_RES (22)..(23)..(24)..(25): Xaa is A or G or absent
RXGXEAVSMGEEYKFKXXXXXXXXXLYLVSIPELKTPVXXAK

SEQ ID NO: 16402 - protein, 37 aa, Artificial Sequence
  Non-cyclic GFR-binding peptide
  MOD_RES (31)..(32): Xaa is C or S
KVVMNEYQKYIVNNSSDIYLVSIPSLKTPAXXAKPVA

SEQ ID NO: 16403 - protein, 39 aa, Artificial Sequence
  Non-cyclic GFR-binding peptide
  MOD_RES (1)..(3)..(34)..(35): Xaa is C or S
XKXSKVVMEYQKYVKPTRGVIYLISIPSLDQPVXXPSAS

SEQ ID NO: 16404 - protein, 39 aa, Artificial Sequence
  Non-cyclic GFR-binding peptide
  MOD_RES (2)..(4)..(38)..(39): Xaa is C or S
  MOD_RES (16)..(17)..(18)..(19)..(20): Xaa is A or G
  MOD_RES (21)..(22)..(23)..(24): Xaa is A or G or absent
RXGXAEVVMDEYKFKXXXXXXXXXLYLISIPELRAPVXX

SEQ ID NO: 16405 - protein, 36 aa, Artificial Sequence
  Non-cyclic GFR-binding peptide
  MOD_RES (33)..(34): Xaa is C or S
  MOD_RES (11)..(12)..(13)..(14)..(15): Xaa is A or G
  MOD_RES (16)..(17)..(18)..(19): Xaa is A or G or absent
SVAMGEYQKYXXXXXXXXXIYLISIPSLKTPVXXAK

SEQ ID NO: 16406 - protein, 37 aa, Artificial Sequence
  Non-cyclic GFR-binding peptide
  MOD_RES (1)..(3)..(34)..(35): Xaa is C or S
XKXSRVIMEYQKYVKPKRGVIYLISIPSLAQPVXXPA

SEQ ID NO: 16407 - protein, 32 aa, Artificial Sequence
  Non-cyclic GFR-binding peptide
  MOD_RES (2)..(2): Xaa is C or S
KXSRVIMEYKFKVKPKRGVLYLISIPELAQPV

SEQ ID NO: 16408 - protein, 35 aa, Artificial Sequence
  Non-cyclic GFR-binding peptide
  MOD_RES (31)..(32): Xaa is C or S
KVVMNEYQKYIVNNSSDIYLVSIPSLKTPAXXAKP

SEQ ID NO: 16409 - protein, 37 aa, Artificial Sequence
  Non-cyclic GFR-binding peptide
  MOD_RES (1)..(36)..(37): Xaa is C or S
  MOD_RES (14)..(15)..(16)..(17)..(18): Xaa is A or G
  MOD_RES (19)..(20)..(21)..(22): Xaa is A or G or absent
XEAVSMGEEYKFKXXXXXXXXXLYLVSIPELKTPVXX

SEQ ID NO: 16410 - protein, 41 aa, Artificial Sequence
  Non-cyclic GFR-binding peptide
  MOD_RES (2)..(36)..(37): Xaa is C or S
  MOD_RES (14)..(15)..(16)..(17)..(18): Xaa is A or G
  MOD_RES (19)..(20)..(21)..(22): Xaa is A or G or absent
GXARVVMNEYQKYXXXXXXXXXIYLVSIPSLQTPAXXPKPV

SEQ ID NO: 16411 - protein, 42 aa, Artificial Sequence
  Non-cyclic GFR-binding peptide
  MOD_RES (2)..(4)..(36)..(37): Xaa is C or S
HXGXAKVVMNEYQKYIVNNSSDIYLVSIPSLKTPAXXAKPVA

SEQ ID NO: 16412 - protein, 32 aa, Artificial Sequence
  Non-cyclic GFR-binding peptide
  MOD_RES (11)..(12)..(13)..(14)..(15): Xaa is A or G
  MOD_RES (16)..(17)..(18)..(19): Xaa is A or G or absent
SKVVMEYKFKXXXXXXXXXLYLISIPELDQPV

SEQ ID NO: 16413 - protein, 36 aa, Artificial Sequence
  Non-cyclic GFR-binding peptide
  MOD_RES (2)..(34)..(35): Xaa is C or S
GXAEVVMDYHYKLVVNNAADKYLISIPSLRAPVXXS

SEQ ID NO: 16414 - protein, 33 aa, Artificial Sequence
  Non-cyclic GFR-binding peptide
  MOD_RES (1)..(33): Xaa is C or S
XESVAMGYHYKLYTVVGKDKYLISIPSLKTPVX

SEQ ID NO: 16415 - protein, 38 aa, Artificial Sequence
  Non-cyclic GFR-binding peptide
  MOD_RES (2)..(4)..(38): Xaa is C or S
  MOD_RES (16)..(17)..(18)..(19)..(20): Xaa is A or G
  MOD_RES (21)..(22)..(23)..(24): Xaa is A or G or absent
HXGXARVVMNEYKFKXXXXXXXXXLYLVSIPELQTPAX

SEQ ID NO: 16416 - protein, 39 aa, Artificial Sequence
  Non-cyclic GFR-binding peptide
  MOD_RES (2)..(35)..(36): Xaa is C or S
GXEAVSMGEEYKFKTPVGMDDLYLVSIPELKTPVXXAKG

SEQ ID NO: 16417 - protein, 34 aa, Artificial Sequence
  Non-cyclic GFR-binding peptide
  MOD_RES (1)..(32)..(33): Xaa is C or S
XSRVIMEYQKYVKPKRGVIYLISIPSLAQPVXXP

SEQ ID NO: 16418 - protein, 42 aa, Artificial Sequence
  Non-cyclic GFR-binding peptide
  MOD_RES (2)..(36)..(37): Xaa is C or S
  MOD_RES (14)..(15)..(16)..(17)..(18): Xaa is A or G
  MOD_RES (19)..(20)..(21)..(22): Xaa is A or G or absent
GXSRVVMNEYQKYXXXXXXXXXIYLVSIPSLKTPAXXPKPVY

SEQ ID NO: 16419 - protein, 35 aa, Artificial Sequence
  Non-cyclic GFR-binding peptide
  MOD_RES (31)..(32): Xaa is C or S
EVVMDEYKFKVVNNAADLYLISIPELRAPVXXSAP

SEQ ID NO: 16420 - protein, 37 aa, Artificial Sequence
  Non-cyclic GFR-binding peptide
  MOD_RES (2)..(36)..(37): Xaa is C or S
  MOD_RES (14)..(15)..(16)..(17)..(18): Xaa is A or G
  MOD_RES (19)..(20)..(21)..(22): Xaa is A or G or absent
GXESVAMGYHYKLXXXXXXXXXKYLISIPSLKTPVXX

SEQ ID NO: 16421 - protein, 38 aa, Artificial Sequence
  Non-cyclic GFR-binding peptide
  MOD_RES (32)..(32): Xaa is C or S
SRVVMNEYKFKIVNSSDDLYLVSIPELKTPAXTPKTVH

SEQ ID NO: 16422 - protein, 37 aa, Artificial Sequence
  Non-cyclic GFR-binding peptide
  MOD_RES (33)..(33): Xaa is C or S
  MOD_RES (11)..(12)..(13)..(14)..(15): Xaa is A or G
  MOD_RES (16)..(17)..(18)..(19): Xaa is A or G or absent
RVVMNEYKFKXXXXXXXXXLYLVSIPELKTPAXTPKT

SEQ ID NO: 16423 - protein, 34 aa, Artificial Sequence
  Non-cyclic GFR-binding peptide
  MOD_RES (34)..(34): Xaa is C or S
  MOD_RES (12)..(13)..(14)..(15)..(16): Xaa is A or G
  MOD_RES (17)..(18)..(19)..(20): Xaa is A or G or absent
AEVVMDYHYKLXXXXXXXXXKYLISIPSLRAPVX

SEQ ID NO: 16424 - protein, 34 aa, Artificial Sequence
  Non-cyclic GFR-binding peptide
  MOD_RES (1)..(3): Xaa is C or S
XGXGEVVMEEYQKYVVKDYEDIYLMSIPSLETPV

SEQ ID NO: 16425 - protein, 39 aa, Artificial Sequence
  Non-cyclic GFR-binding peptide
  MOD_RES (2)..(4)..(38)..(39): Xaa is C or S
  MOD_RES (16)..(17)..(18)..(19)..(20): Xaa is A or G
  MOD_RES (21)..(22)..(23)..(24): Xaa is A or G or absent
HXGXSRVVMNEYKFKXXXXXXXXXLYLVSIPELKTPAXX

SEQ ID NO: 16426 - protein, 40 aa, Artificial Sequence
  Non-cyclic GFR-binding peptide
  MOD_RES (34)..(35): Xaa is C or S
  MOD_RES (12)..(13)..(14)..(15)..(16): Xaa is A or G
  MOD_RES (17)..(18)..(19)..(20): Xaa is A or G or absent
ESVAMGRYKKLXXXXXXXXXFYLISIANLKTPVXXAKSAK

SEQ ID NO: 16427 - protein, 35 aa, Artificial Sequence
  Non-cyclic GFR-binding peptide
  MOD_RES (1)..(34)..(35): Xaa is C or S
  MOD_RES (12)..(13)..(14)..(15)..(16): Xaa is A or G
  MOD_RES (17)..(18)..(19)..(20): Xaa is A or G or absent
XSRVIMEYKFKXXXXXXXXXLYLISIPELAQPVXX

SEQ ID NO: 16428 - protein, 34 aa, Artificial Sequence
  Non-cyclic GFR-binding peptide
  MOD_RES (31)..(31): Xaa is C or S
RVVMNEYKFKIVNSSDDLYLVSIPELKTPAXTPK

SEQ ID NO: 16429 - protein, 38 aa, Artificial Sequence
  Non-cyclic GFR-binding peptide
  MOD_RES (33)..(34): Xaa is C or S
  MOD_RES (11)..(12)..(13)..(14)..(15): Xaa is A or G
  MOD_RES (16)..(17)..(18)..(19): Xaa is A or G or absent
KVVMNEYKFKXXXXXXXXXLYLVSIPELKTPAXXAKPV

SEQ ID NO: 16430 - protein, 39 aa, Artificial Sequence
  Non-cyclic GFR-binding peptide
  MOD_RES (2)..(4)..(36)..(37): Xaa is C or S
HXGXARVVMNEYQKYIVNSSDDIYLVSIPSLQTPAXXPK

SEQ ID NO: 16431 - protein, 37 aa, Artificial Sequence
  Non-cyclic GFR-binding peptide
  MOD_RES (2)..(34)..(35): Xaa is C or S
GXSRVVMNEYQKYIVNSSDDIYLVSIPSLKTPAXXPK

SEQ ID NO: 16432 - protein, 34 aa, Artificial Sequence
  Non-cyclic GFR-binding peptide
  MOD_RES (34)..(34): Xaa is C or S
  MOD_RES (12)..(13)..(14)..(15)..(16): Xaa is A or G
  MOD_RES (17)..(18)..(19)..(20): Xaa is A or G or absent
ESVAMGEYQKYXXXXXXXXXIYLISIPSLKTPVX

SEQ ID NO: 16433 - protein, 39 aa, Artificial Sequence
  Non-cyclic GFR-binding peptide
  MOD_RES (1)..(34)..(35): Xaa is C or S
  MOD_RES (12)..(13)..(14)..(15)..(16): Xaa is A or G
  MOD_RES (17)..(18)..(19)..(20): Xaa is A or G or absent
XSKVIMEYQKYXXXXXXXXXIYLISIPSLDQSVXXPSAS

SEQ ID NO: 16434 - protein, 38 aa, Artificial Sequence
  Non-cyclic GFR-binding peptide
  MOD_RES (2)..(4)..(37)..(38): Xaa is C or S
  MOD_RES (15)..(16)..(17)..(18)..(19): Xaa is A or G
  MOD_RES (20)..(21)..(22)..(23): Xaa is A or G or absent
SXKXSRVIMEYKFKXXXXXXXXXLYLISIPELAQPVXX

SEQ ID NO: 16435 - protein, 30 aa, Artificial Sequence
  Non-cyclic GFR-binding peptide
SVAMGRYKKLYTVVGKDFYLISIANLKTPV

SEQ ID NO: 16436 - protein, 33 aa, Artificial Sequence
  Non-cyclic GFR-binding peptide
  MOD_RES (1)..(32)..(33): Xaa is C or S
XSKVIMEYKFKIKPTKGILYLISIPELDQSVXX

SEQ ID NO: 16437 - protein, 30 aa, Artificial Sequence; identical to SEQ ID NO: 2006
  Non-cyclic GFR-binding peptide

SEQ ID NO: 16438 - protein, 39 aa, Artificial Sequence
  Non-cyclic GFR-binding peptide
  MOD_RES (1)..(34)..(35): Xaa is C or S
XEAVSMGEEYQKYTPVGMDDIYLVSIPSLKTPVXXAKGV

SEQ ID NO: 16439 - protein, 37 aa, Artificial Sequence
  Non-cyclic GFR-binding peptide
  MOD_RES (1)..(3)..(34)..(35): Xaa is C or S
XKXSKVIMEYKFKIKPTKGILYLISIPELDQSVXXPS

SEQ ID NO: 16440 - protein, 35 aa, Artificial Sequence
  Non-cyclic GFR-binding peptide
  MOD_RES (33)..(34): Xaa is C or S
  MOD_RES (11)..(12)..(13)..(14)..(15): Xaa is A or G
  MOD_RES (16)..(17)..(18)..(19): Xaa is A or G or absent
SKVVMEYKFKXXXXXXXXXLYLISIPELDQPVXXP

SEQ ID NO: 16441 - protein, 36 aa, Artificial Sequence
  Non-cyclic GFR-binding peptide
  MOD_RES (31)..(32): Xaa is C or S
RVVMNEYQKYIVNSSDDIYLVSIPSLQTPAXXPKPV

SEQ ID NO: 16442 - protein, 40 aa, Artificial Sequence
  Non-cyclic GFR-binding peptide
  MOD_RES (2)..(4)..(36): Xaa is C or S
HXGXSRVVMNEYKFKIVNSSDDLYLVSIPELKTPAXTPKT

SEQ ID NO: 16443 - protein, 38 aa, Artificial Sequence
  Non-cyclic GFR-binding peptide
  MOD_RES (2)..(37)..(38): Xaa is C or S
  MOD_RES (15)..(16)..(17)..(18)..(19): Xaa is A or G
  MOD_RES (20)..(21)..(22)..(23): Xaa is A or G or absent
GXEAVSMGEEYQKYXXXXXXXXXIYLVSIPSLKTPVXX

SEQ ID NO: 16444 - protein, 38 aa, Artificial Sequence
  Non-cyclic GFR-binding peptide
  MOD_RES (2)..(36)..(37): Xaa is C or S
  MOD_RES (14)..(15)..(16)..(17)..(18): Xaa is A or G
  MOD_RES (19)..(20)..(21)..(22): Xaa is A or G or absent
GXGEVVMEEYKFKXXXXXXXXXLYLMSIPELETPVXXA

SEQ ID NO: 16445 - protein, 38 aa, Artificial Sequence
  Non-cyclic GFR-binding peptide
  MOD_RES (2)..(33)..(34): Xaa is C or S
KXSKVVMEYKFKVKPTRGVLYLISIPELDQPVXXPSAS

SEQ ID NO: 16446 - protein, 35 aa, Artificial Sequence
  Non-cyclic GFR-binding peptide
  MOD_RES (34)..(35): Xaa is C or S
  MOD_RES (12)..(13)..(14)..(15)..(16): Xaa is A or G
  MOD_RES (17)..(18)..(19)..(20): Xaa is A or G or absent
AKVVMNEYKFKXXXXXXXXXLYLVSIPELKTPAXX

SEQ ID NO: 16447 - protein, 35 aa, Artificial Sequence
  Non-cyclic GFR-binding peptide
  MOD_RES (1)..(33)..(34): Xaa is C or S
XGEVVMDEYKFKVVKENEDLYLMSIPELETPVXXA

SEQ ID NO: 16448 - protein, 37 aa, Artificial Sequence
  Non-cyclic GFR-binding peptide
  MOD_RES (2)..(34)..(35): Xaa is C or S
GXAKVVMNEYQKYIVNNSSDIYLVSIPSLKTPAXXAK

SEQ ID NO: 16449 - protein, 35 aa, Artificial Sequence
  Non-cyclic GFR-binding peptide
  MOD_RES (34)..(35): Xaa is C or S
  MOD_RES (12)..(13)..(14)..(15)..(16): Xaa is A or G
  MOD_RES (17)..(18)..(19)..(20): Xaa is A or G or absent
ESVAMGRYKKLXXXXXXXXXFYLISIANLKTPVXX

SEQ ID NO: 16450 - protein, 38 aa, Artificial Sequence
  Non-cyclic GFR-binding peptide
  MOD_RES (34)..(35): Xaa is C or S
  MOD_RES (12)..(13)..(14)..(15)..(16): Xaa is A or G
  MOD_RES (17)..(18)..(19)..(20): Xaa is A or G or absent
AEVVMDEYKFKXXXXXXXXXLYLISIPELRAPVXXSAP

SEQ ID NO: 16451 - protein, 39 aa, Artificial Sequence
  Non-cyclic GFR-binding peptide
  MOD_RES (34)..(35): Xaa is C or S
  MOD_RES (12)..(13)..(14)..(15)..(16): Xaa is A or G
  MOD_RES (17)..(18)..(19)..(20): Xaa is A or G or absent
AKVVMNEYQKYXXXXXXXXXIYLVSIPSLKTPAXXAKPV

SEQ ID NO: 16452 - protein, 35 aa, Artificial Sequence
  Non-cyclic GFR-binding peptide
  MOD_RES (31)..(32): Xaa is C or S
EVVMDRYKKLVVNNAADFYLISIANLRAPVXXSAP

SEQ ID NO: 16453 - protein, 41 aa, Artificial Sequence
  Non-cyclic GFR-binding peptide
  MOD_RES (2)..(35)..(36): Xaa is C or S
  MOD_RES (13)..(14)..(15)..(16)..(17): Xaa is A or G
  MOD_RES (18)..(19)..(20)..(21): Xaa is A or G or absent
KXSRVIMEYQKYXXXXXXXXXIYLISIPSLAQPVXXPAASA

SEQ ID NO: 16454 - protein, 34 aa, Artificial Sequence
  Non-cyclic GFR-binding peptide
  MOD_RES (31)..(32): Xaa is C or S
EVVMDYHYKLVVNNAADKYLISIPSLRAPVXXSA

SEQ ID NO: 16455 - protein, 39 aa, Artificial Sequence
  Non-cyclic GFR-binding peptide
  MOD_RES (1)..(33)..(34): Xaa is C or S
XAEVVMDRYKKLVVNNAADFYLISIANLRAPVXXSAPAA

SEQ ID NO: 16456 - protein, 36 aa, Artificial Sequence
  Non-cyclic GFR-binding peptide
  MOD_RES (2)..(4): Xaa is C or S
RXGXEAVSMGEEYKFKTPVGMDDLYLVSIPELKTPV

SEQ ID NO: 16457 - protein, 36 aa, Artificial Sequence
  Non-cyclic GFR-binding peptide
  MOD_RES (1)..(3): Xaa is C or S
  MOD_RES (15)..(16)..(17)..(18)..(19): Xaa is A or G
  MOD_RES (20)..(21)..(22)..(23): Xaa is A or G or absent
XGXGEVVMDEYQKYXXXXXXXXXIYLMSIPSLETPV

SEQ ID NO: 16458 - protein, 40 aa, Artificial Sequence
  Non-cyclic GFR-binding peptide
  MOD_RES (2)..(36)..(37): Xaa is C or S
  MOD_RES (14)..(15)..(16)..(17)..(18): Xaa is A or G
  MOD_RES (19)..(20)..(21)..(22): Xaa is A or G or absent
GXESVAMGYHYKLXXXXXXXXXKYLISIPSLKTPVXXAKS

SEQ ID NO: 16459 - protein, 41 aa, Artificial Sequence
  Non-cyclic GFR-binding peptide
  MOD_RES (1)..(3)..(35)..(36): Xaa is C or S
XGXESVAMGRYKKLYTVVGKDFYLISIANLKTPVXXAKSAK

SEQ ID NO: 16460 - protein, 37 aa, Artificial Sequence
  Non-cyclic GFR-binding peptide
  MOD_RES (31)..(32): Xaa is C or S
EVVMDEYQKYVVKENEDIYLMSIPSLETPVXXAKPIK

SEQ ID NO: 16461 - protein, 34 aa, Artificial Sequence
  Non-cyclic GFR-binding peptide
  MOD_RES (1)..(1): Xaa is C or S
  MOD_RES (13)..(14)..(15)..(16)..(17): Xaa is A or G
  MOD_RES (18)..(19)..(20)..(21): Xaa is A or G or absent
XGEVVMEEYKFKXXXXXXXXXLYLMSIPELETPV

SEQ ID NO: 16462 - protein, 37 aa, Artificial Sequence
  Non-cyclic GFR-binding peptide
  MOD_RES (31)..(32): Xaa is C or S
SKVIMEYKFKIKPTKGILYLISIPELDQSVXXPSASA

SEQ ID NO: 16463 - protein, 39 aa, Artificial Sequence
  Non-cyclic GFR-binding peptide
  MOD_RES (2)..(34)..(35): Xaa is C or S
GXAEVVMDYHYKLVVNNAADKYLISIPSLRAPVXXSAPA

SEQ ID NO: 16464 - protein, 38 aa, Artificial Sequence
  Non-cyclic GFR-binding peptide
  MOD_RES (33)..(34): Xaa is C or S
  MOD_RES (11)..(12)..(13)..(14)..(15): Xaa is A or G
  MOD_RES (16)..(17)..(18)..(19): Xaa is A or G or absent
SRVIMEYQKYXXXXXXXXXIYLISIPSLAQPVXXPAAS

SEQ ID NO: 16465 - protein, 32 aa, Artificial Sequence
  Non-cyclic GFR-binding peptide
  MOD_RES (11)..(12)..(13)..(14)..(15): Xaa is A or G
  MOD_RES (16)..(17)..(18)..(19): Xaa is A or G or absent
SVAMGEYQKYXXXXXXXXXIYLISIPSLKTPV

SEQ ID NO: 16466 - protein, 37 aa, Artificial Sequence
  Non-cyclic GFR-binding peptide
  MOD_RES (33)..(34): Xaa is C or S
  MOD_RES (11)..(12)..(13)..(14)..(15): Xaa is A or G
  MOD_RES (16)..(17)..(18)..(19): Xaa is A or G or absent
EVVMEEYQKYXXXXXXXXXIYLMSIPSLETPVXXAKP

SEQ ID NO: 16467 - protein, 38 aa, Artificial Sequence
  Non-cyclic GFR-binding peptide
  MOD_RES (33)..(34): Xaa is C or S
  MOD_RES (11)..(12)..(13)..(14)..(15): Xaa is A or G
  MOD_RES (16)..(17)..(18)..(19): Xaa is A or G or absent
EVVMDEYKFKXXXXXXXXXLYLISIPELRAPVXXSAPA

SEQ ID NO: 16468 - protein, 33 aa, Artificial Sequence
  Non-cyclic GFR-binding peptide
  MOD_RES (33)..(33): Xaa is C or S
EAVSMGEEYKFKTPVGMDDLYLVSIPELKTPVX

SEQ ID NO: 16469 - protein, 32 aa, Artificial Sequence
  Non-cyclic GFR-binding peptide
  MOD_RES (32)..(32): Xaa is C or S
AEVVMDYHYKLVVNNAADKYLISIPSLRAPVX

SEQ ID NO: 16470 - protein, 43 aa, Artificial Sequence
  Non-cyclic GFR-binding peptide
  MOD_RES (2)..(4)..(38)..(39): Xaa is C or S
  MOD_RES (16)..(17)..(18)..(19)..(20): Xaa is A or G
  MOD_RES (21)..(22)..(23)..(24): Xaa is A or G or absent
RXGXESVAMGYHYKLXXXXXXXXXKYLISIPSLKTPVXXAKSA

SEQ ID NO: 16471 - protein, 41 aa, Artificial Sequence
  Non-cyclic GFR-binding peptide
  MOD_RES (2)..(4)..(38)..(39): Xaa is C or S
  MOD_RES (16)..(17)..(18)..(19)..(20): Xaa is A or G
  MOD_RES (21)..(22)..(23)..(24): Xaa is A or G or absent
HXGXARVVMNEYQKYXXXXXXXXXIYLVSIPSLQTPAXXPK

SEQ ID NO: 16472 - protein, 44 aa, Artificial Sequence
  Non-cyclic GFR-binding peptide
  MOD_RES (2)..(4)..(38): Xaa is C or S
  MOD_RES (16)..(17)..(18)..(19)..(20): Xaa is A or G
  MOD_RES (21)..(22)..(23)..(24): Xaa is A or G or absent
HXGXSRVVMNEYQKYXXXXXXXXXIYLVSIPSLKTPAXTPKTVH

SEQ ID NO: 16473 - protein, 42 aa, Artificial Sequence
  Non-cyclic GFR-binding peptide
  MOD_RES (2)..(4)..(36)..(37): Xaa is C or S
RXGXGEVVMEEYKFKVVKDYEDLYLMSIPELETPVXXAKPIS

SEQ ID NO: 16474 - protein, 42 aa, Artificial Sequence
  Non-cyclic GFR-binding peptide
  MOD_RES (2)..(4)..(38)..(39): Xaa is C or S
  MOD_RES (16)..(17)..(18)..(19)..(20): Xaa is A or G
  MOD_RES (21)..(22)..(23)..(24): Xaa is A or G or absent
HXGXAKVVMNEYQKYXXXXXXXXXIYLVSIPSLKTPAXXAKP

SEQ ID NO: 16475 - protein, 44 aa, Artificial Sequence
  Non-cyclic GFR-binding peptide
  MOD_RES (2)..(4)..(38)..(39): Xaa is C or S
  MOD_RES (16)..(17)..(18)..(19)..(20): Xaa is A or G
  MOD_RES (21)..(22)..(23)..(24): Xaa is A or G or absent
HXGXAKVVMNEYQKYXXXXXXXXXIYLVSIPSLKTPAXXAKPVA

SEQ ID NO: 16476 - protein, 38 aa, Artificial Sequence
  Non-cyclic GFR-binding peptide
  MOD_RES (34)..(35): Xaa is C or S
  MOD_RES (12)..(13)..(14)..(15)..(16): Xaa is A or G
  MOD_RES (17)..(18)..(19)..(20): Xaa is A or G or absent
ESVAMGYHYKLXXXXXXXXXKYLISIPSLKTPVXXAKS

SEQ ID NO: 16477 - protein, 38 aa, Artificial Sequence
  Non-cyclic GFR-binding peptide
  MOD_RES (34)..(35): Xaa is C or S
  MOD_RES (12)..(13)..(14)..(15)..(16): Xaa is A or G
  MOD_RES (17)..(18)..(19)..(20): Xaa is A or G or absent
AEVVMDYHYKLXXXXXXXXXKYLISIPSLRAPVXXSAP

SEQ ID NO: 16478 - protein, 40 aa, Artificial Sequence
  Non-cyclic GFR-binding peptide
  MOD_RES (1)..(3)..(34)..(35): Xaa is C or S
XKXSRVIMEYQKYVKPKRGVIYLISIPSLAQPVXXPAASA

SEQ ID NO: 16479 - protein, 36 aa, Artificial Sequence
  Non-cyclic GFR-binding peptide
  MOD_RES (2)..(35)..(36): Xaa is C or S
GXEAVSMGEEYKFKTPVGMDDLYLVSIPELKTPVXX

SEQ ID NO: 16480 - protein, 34 aa, Artificial Sequence
  Non-cyclic GFR-binding peptide
  MOD_RES (1)..(1): Xaa is C or S
  MOD_RES (13)..(14)..(15)..(16)..(17): Xaa is A or G
  MOD_RES (18)..(19)..(20)..(21): Xaa is A or G or absent
XESVAMGRYKKLXXXXXXXXXFYLISIANLKTPV

SEQ ID NO: 16481 - protein, 43 aa, Artificial Sequence
  Non-cyclic GFR-binding peptide
  MOD_RES (2)..(4)..(38)..(39): Xaa is C or S
  MOD_RES (16)..(17)..(18)..(19)..(20): Xaa is A or G
  MOD_RES (21)..(22)..(23)..(24): Xaa is A or G or absent
RXGXESVAMGEYQKYXXXXXXXXXIYLISIPSLKTPVXXAKSA

SEQ ID NO: 16482 - protein, 38 aa, Artificial Sequence
  Non-cyclic GFR-binding peptide
  MOD_RES (1)..(3)..(35)..(36): Xaa is C or S
XGXESVAMGYHYKLYTVVGKDKYLISIPSLKTPVXXAK

SEQ ID NO: 16483 - protein, 37 aa, Artificial Sequence
  Non-cyclic GFR-binding peptide
  MOD_RES (1)..(33)..(34): Xaa is C or S
XGEVVMDEYQKYVVKENEDIYLMSIPSLETPVXXAKP

SEQ ID NO: 16484 - protein, 39 aa, Artificial Sequence
  Non-cyclic GFR-binding peptide
  MOD_RES (2)..(4)..(37)..(38): Xaa is C or S
  MOD_RES (15)..(16)..(17)..(18)..(19): Xaa is A or G
  MOD_RES (20)..(21)..(22)..(23): Xaa is A or G or absent
SXKXSKVIMEYKFKXXXXXXXXXLYLISIPELDQSVXXP

SEQ ID NO: 16485 - protein, 37 aa, Artificial Sequence
  Non-cyclic GFR-binding peptide
  MOD_RES (2)..(33)..(34): Xaa is C or S
KXSRVIMEYKFKVKPKRGVLYLISIPELAQPVXXPAA

SEQ ID NO: 16486 - protein, 33 aa, Artificial Sequence
  Non-cyclic GFR-binding peptide
  MOD_RES (31)..(32): Xaa is C or S
RVVMNEYQKYIVNSSDDIYLVSIPSLKTPAXXP

SEQ ID NO: 16487 - protein, 34 aa, Artificial Sequence
  Non-cyclic GFR-binding peptide
  MOD_RES (2)..(34): Xaa is C or S
GXGEVVMEEYKFKVVKDYEDLYLMSIPELETPVX

SEQ ID NO: 16488 - protein, 38 aa, Artificial Sequence
  Non-cyclic GFR-binding peptide
  MOD_RES (1)..(33)..(34): Xaa is C or S
XGEVVMEEYKFKVVKDYEDLYLMSIPELETPVXXAKPI

SEQ ID NO: 16489 - protein, 38 aa, Artificial Sequence
  Non-cyclic GFR-binding peptide
  MOD_RES (1)..(3)..(36)..(37): Xaa is C or S
XGXEAVSMGEEYQKYTPVGMDDIYLVSIPSLKTPVXXA

SEQ ID NO: 16490 - protein, 38 aa, Artificial Sequence
  Non-cyclic GFR-binding peptide
  MOD_RES (2)..(4)..(37)..(38): Xaa is C or S
  MOD_RES (15)..(16)..(17)..(18)..(19): Xaa is A or G
  MOD_RES (20)..(21)..(22)..(23): Xaa is A or G or absent
SXKXSRVIMEYQKYXXXXXXXXXIYLISIPSLAQPVXX

SEQ ID NO: 16491 - protein, 31 aa, Artificial Sequence
  Non-cyclic GFR-binding peptide
GEVVMDEYQKYVVKENEDIYLMSIPSLETPV

SEQ ID NO: 16492 - protein, 40 aa, Artificial Sequence
  Non-cyclic GFR-binding peptide
  MOD_RES (2)..(36)..(37): Xaa is C or S
  MOD_RES (14)..(15)..(16)..(17)..(18): Xaa is A or G
  MOD_RES (19)..(20)..(21)..(22): Xaa is A or G or absent
GXARVVMNEYQKYXXXXXXXXXIYLVSIPSLQTPAXXPKP

SEQ ID NO: 16493 - protein, 38 aa, Artificial Sequence
  Non-cyclic GFR-binding peptide
  MOD_RES (33)..(34): Xaa is C or S
  MOD_RES (11)..(12)..(13)..(14)..(15): Xaa is A or G
  MOD_RES (16)..(17)..(18)..(19): Xaa is A or G or absent
RVVMNEYQKYXXXXXXXXXIYLVSIPSLKTPAXXPKPV

SEQ ID NO: 16494 - protein, 35 aa, Artificial Sequence
  Non-cyclic GFR-binding peptide
  MOD_RES (32)..(32): Xaa is C or S
SRVVMNEYKFKIVNSSDDLYLVSIPELKTPAXTPK

SEQ ID NO: 16495 - protein, 37 aa, Artificial Sequence
  Non-cyclic GFR-binding peptide
  MOD_RES (2)..(4): Xaa is C or S
  MOD_RES (16)..(17)..(18)..(19)..(20): Xaa is A or G
  MOD_RES (21)..(22)..(23)..(24): Xaa is A or G or absent
RXGXESVAMGYHYKLXXXXXXXXXKYLISIPSLKTPV

SEQ ID NO: 16496 - protein, 35 aa, Artificial Sequence
  Non-cyclic GFR-binding peptide
  MOD_RES (34)..(35): Xaa is C or S
  MOD_RES (12)..(13)..(14)..(15)..(16): Xaa is A or G
  MOD_RES (17)..(18)..(19)..(20): Xaa is A or G or absent
SRVVMNEYKFKXXXXXXXXXLYLVSIPELKTPAXX

SEQ ID NO: 16497 - protein, 39 aa, Artificial Sequence
  Non-cyclic GFR-binding peptide
  MOD_RES (2)..(36)..(37): Xaa is C or S
  MOD_RES (14)..(15)..(16)..(17)..(18): Xaa is A or G
  MOD_RES (19)..(20)..(21)..(22): Xaa is A or G or absent
GXSRVVMNEYQKYXXXXXXXXXIYLVSIPSLKTPAXXPK

SEQ ID NO: 16498 - protein, 36 aa, Artificial Sequence
  Non-cyclic GFR-binding peptide
  MOD_RES (2)..(36): Xaa is C or S
  MOD_RES (14)..(15)..(16)..(17)..(18): Xaa is A or G
  MOD_RES (19)..(20)..(21)..(22): Xaa is A or G or absent
GXARVVMNEYQKYXXXXXXXXXIYLVSIPSLQTPAX

SEQ ID NO: 16499 - protein, 38 aa, Artificial Sequence
  Non-cyclic GFR-binding peptide
  MOD_RES (33)..(34): Xaa is C or S
  MOD_RES (11)..(12)..(13)..(14)..(15): Xaa is A or G
  MOD_RES (16)..(17)..(18)..(19): Xaa is A or G or absent
RVVMNEYKFKXXXXXXXXXLYLVSIPELQTPAXXPKPV

SEQ ID NO: 16500 - protein, 38 aa, Artificial Sequence
  Non-cyclic GFR-binding peptide
  MOD_RES (34)..(35): Xaa is C or S
  MOD_RES (12)..(13)..(14)..(15)..(16): Xaa is A or G
  MOD_RES (17)..(18)..(19)..(20): Xaa is A or G or absent
ESVAMGEYQKYXXXXXXXXXIYLISIPSLKTPVXXAKS

SEQ ID NO: 16501 - protein, 35 aa, Artificial Sequence
  Non-cyclic GFR-binding peptide
  MOD_RES (2)..(4): Xaa is C or S
RXGXGEVVMEEYKFKVVKDYEDLYLMSIPELETPV

SEQ ID NO: 16502 - protein, 35 aa, Artificial Sequence
  Non-cyclic GFR-binding peptide
  MOD_RES (1)..(35): Xaa is C or S
  MOD_RES (13)..(14)..(15)..(16)..(17): Xaa is A or G
  MOD_RES (18)..(19)..(20)..(21): Xaa is A or G or absent
XSRVVMNEYQKYXXXXXXXXXIYLVSIPSLKTPAX

SEQ ID NO: 16503 - protein, 32 aa, Artificial Sequence
  Non-cyclic GFR-binding peptide
  MOD_RES (31)..(32): Xaa is C or S
SKVVMEYKFKVKPTRGVLYLISIPELDQPVXX

SEQ ID NO: 16504 - protein, 41 aa, Artificial Sequence
  Non-cyclic GFR-binding peptide
  MOD_RES (2)..(4)..(36)..(37): Xaa is C or S
RXGXESVAMGEYQKYYTVVGKDIYLISIPSLKTPVXXAKSA

SEQ ID NO: 16505 - protein, 35 aa, Artificial Sequence
  Non-cyclic GFR-binding peptide
  MOD_RES (1)..(33)..(34): Xaa is C or S
XESVAMGYHYKLYTVVGKDKYLISIPSLKTPVXXA

SEQ ID NO: 16506 - protein, 37 aa, Artificial Sequence
  Non-cyclic GFR-binding peptide
  MOD_RES (1)..(3): Xaa is C or S
  MOD_RES (16)..(17)..(18)..(19)..(20): Xaa is A or G
  MOD_RES (21)..(22)..(23)..(24): Xaa is A or G or absent
XGXEAVSMGEEYQKYXXXXXXXXXIYLVSIPSLKTPV

SEQ ID NO: 16507 - protein, 37 aa, Artificial Sequence
  Non-cyclic GFR-binding peptide
  MOD_RES (2)..(4)..(37): Xaa is C or S
  MOD_RES (15)..(16)..(17)..(18)..(19): Xaa is A or G
  MOD_RES (20)..(21)..(22)..(23): Xaa is A or G or absent
SXKXSKVIMEYKFKXXXXXXXXXLYLISIPELDQSVX

SEQ ID NO: 16508 - protein, 40 aa, Artificial Sequence
  Non-cyclic GFR-binding peptide
  MOD_RES (1)..(3)..(35)..(36): Xaa is C or S
XGXESVAMGRYKKLYTVVGKDFYLISIANLKTPVXXAKSA

SEQ ID NO: 16509 - protein, 38 aa, Artificial Sequence
  Non-cyclic GFR-binding peptide
  MOD_RES (2)..(34)..(35): Xaa is C or S
GXGEVVMDEYQKYVVKENEDIYLMSIPSLETPVXXAKP

SEQ ID NO: 16510 - protein, 37 aa, Artificial Sequence
  Non-cyclic GFR-binding peptide
  MOD_RES (1)..(35)..(36): Xaa is C or S
  MOD_RES (13)..(14)..(15)..(16)..(17): Xaa is A or G
  MOD_RES (18)..(19)..(20)..(21): Xaa is A or G or absent
XESVAMGEYQKYXXXXXXXXXIYLISIPSLKTPVXXA

SEQ ID NO: 16511 - protein, 40 aa, Artificial Sequence
  Non-cyclic GFR-binding peptide
  MOD_RES (1)..(3)..(35)..(36): Xaa is C or S
XGXAKVVMNEYQKYIVNNSSDIYLVSIPSLKTPAXXAKPV

SEQ ID NO: 16512 - protein, 38 aa, Artificial Sequence
  Non-cyclic GFR-binding peptide
  MOD_RES (2)..(33)..(34): Xaa is C or S
KXSKVIMEYKFKIKPTKGILYLISIPELDQSVXXPSAS

SEQ ID NO: 16513 - protein, 37 aa, Artificial Sequence
  Non-cyclic GFR-binding peptide
  MOD_RES (1)..(3)..(37): Xaa is C or S
  MOD_RES (15)..(16)..(17)..(18)..(19): Xaa is A or G
  MOD_RES (20)..(21)..(22)..(23): Xaa is A or G or absent
XGXESVAMGEYQKYXXXXXXXXXIYLISIPSLKTPVX

SEQ ID NO: 16514 - protein, 43 aa, Artificial Sequence
  Non-cyclic GFR-binding peptide
  MOD_RES (2)..(4)..(38)..(39): Xaa is C or S
  MOD_RES (16)..(17)..(18)..(19)..(20): Xaa is A or G
  MOD_RES (21)..(22)..(23)..(24): Xaa is A or G or absent
RXGXGEVVMDEYKFKXXXXXXXXXLYLMSIPELETPVXXAKPI

SEQ ID NO: 16515 - protein, 32 aa, Artificial Sequence
  Non-cyclic GFR-binding peptide
  MOD_RES (1)..(1): Xaa is C or S
XESVAMGRYKKLYTVVGKDFYLISIANLKTPV

SEQ ID NO: 16516 - protein, 40 aa, Artificial Sequence
  Non-cyclic GFR-binding peptide
  MOD_RES (2)..(36)..(37): Xaa is C or S
  MOD_RES (14)..(15)..(16)..(17)..(18): Xaa is A or G
  MOD_RES (19)..(20)..(21)..(22): Xaa is A or G or absent
GXESVAMGRYKKLXXXXXXXXXFYLISIANLKTPVXXAKS

SEQ ID NO: 16517 - protein, 33 aa, Artificial Sequence
  Non-cyclic GFR-binding peptide
  MOD_RES (33)..(33): Xaa is C or S
  MOD_RES (11)..(12)..(13)..(14)..(15): Xaa is A or G
  MOD_RES (16)..(17)..(18)..(19): Xaa is A or G or absent
SKVIMEYQKYXXXXXXXXXIYLISIPSLDQSVX

SEQ ID NO: 16518 - protein, 36 aa, Artificial Sequence
  Non-cyclic GFR-binding peptide
  MOD_RES (2)..(34)..(35): Xaa is C or S
GXAEVVMDEYKFKVVNNAADLYLISIPELRAPVXXS

SEQ ID NO: 16519 - protein, 33 aa, Artificial Sequence
  Non-cyclic GFR-binding peptide
  MOD_RES (33)..(33): Xaa is C or S
  MOD_RES (11)..(12)..(13)..(14)..(15): Xaa is A or G
  MOD_RES (16)..(17)..(18)..(19): Xaa is A or G or absent
EVVMDYHYKLXXXXXXXXXKYLISIPSLRAPVX

SEQ ID NO: 16520 - protein, 32 aa, Artificial Sequence
  Non-cyclic GFR-binding peptide
  MOD_RES (11)..(12)..(13)..(14)..(15): Xaa is A or G
  MOD_RES (16)..(17)..(18)..(19): Xaa is A or G or absent
EVVMDEYKFKXXXXXXXXXLYLMSIPELETPV

SEQ ID NO: 16521 - protein, 36 aa, Artificial Sequence
  Non-cyclic GFR-binding peptide
  MOD_RES (2)..(34): Xaa is C or S
GXSRVVMNEYQKYIVNSSDDIYLVSIPSLKTPAXTP

SEQ ID NO: 16522 - protein, 34 aa, Artificial Sequence
  Non-cyclic GFR-binding peptide
  MOD_RES (32)..(33): Xaa is C or S
AEVVMDRYKKLVVNNAADFYLISIANLRAPVXXS

SEQ ID NO: 16523 - protein, 32 aa, Artificial Sequence
  Non-cyclic GFR-binding peptide
  MOD_RES (1)..(1): Xaa is C or S
XESVAMGYHYKLYTVVGKDKYLISIPSLKTPV

SEQ ID NO: 16524 - protein, 39 aa, Artificial Sequence
  Non-cyclic GFR-binding peptide
  MOD_RES (1)..(3)..(35)..(36): Xaa is C or S
XGXAEVVMDEYKFKVVNNAADLYLISIPELRAPVXXSAP

SEQ ID NO: 16525 - protein, 33 aa, Artificial Sequence
  Non-cyclic GFR-binding peptide
  MOD_RES (12)..(13)..(14)..(15)..(16): Xaa is A or G
  MOD_RES (17)..(18)..(19)..(20): Xaa is A or G or absent
AEVVMDRYKKLXXXXXXXXXFYLISIANLRAPV

SEQ ID NO: 16526 - protein, 36 aa, Artificial Sequence
  Non-cyclic GFR-binding peptide
  MOD_RES (2)..(35)..(36): Xaa is C or S
  MOD_RES (13)..(14)..(15)..(16)..(17): Xaa is A or G
  MOD_RES (18)..(19)..(20)..(21): Xaa is A or G or absent
KXSKVIMEYKFKXXXXXXXXXLYLISIPELDQSVXX

SEQ ID NO: 16527 - protein, 36 aa, Artificial Sequence
  Non-cyclic GFR-binding peptide
  MOD_RES (1)..(33)..(34): Xaa is C or S
XAKVVMNEYQKYIVNNSSDIYLVSIPSLKTPAXXAK

SEQ ID NO: 16528 - protein, 34 aa, Artificial Sequence
  Non-cyclic GFR-binding peptide
  MOD_RES (2)..(2): Xaa is C or S
  MOD_RES (13)..(14)..(15)..(16)..(17): Xaa is A or G
  MOD_RES (18)..(19)..(20)..(21): Xaa is A or G or absent
KXSKVVMEYKFKXXXXXXXXXLYLISIPELDQPV

SEQ ID NO: 16529 - protein, 31 aa, Artificial Sequence
  Non-cyclic GFR-binding peptide
  MOD_RES (31)..(31): Xaa is C or S
SKVVMEYKFKVKPTRGVLYLISIPELDQPVX

SEQ ID NO: 16530 - protein, 37 aa, Artificial Sequence
  Non-cyclic GFR-binding peptide
  MOD_RES (2)..(33)..(34): Xaa is C or S
KXSKVVMEYQKYVKPTRGVIYLISIPSLDQPVXXPSA

SEQ ID NO: 16531 - protein, 36 aa, Artificial Sequence
  Non-cyclic GFR-binding peptide
  MOD_RES (1)..(3): Xaa is C or S
  MOD_RES (15)..(16)..(17)..(18)..(19): Xaa is A or G
  MOD_RES (20)..(21)..(22)..(23): Xaa is A or G or absent
XGXGEVVMDEYKFKXXXXXXXXXLYLMSIPELETPV

SEQ ID NO: 16532 - protein, 34 aa, Artificial Sequence
  Non-cyclic GFR-binding peptide
  MOD_RES (2)..(33)..(34): Xaa is C or S
KXSKVIMEYQKYIKPTKGIIYLISIPSLDQSVXX

SEQ ID NO: 16533 - protein, 41 aa, Artificial Sequence
  Non-cyclic GFR-binding peptide
  MOD_RES (2)..(4)..(36)..(37): Xaa is C or S
HXGXSRVVMNEYQKYIVNSSDDIYLVSIPSLKTPAXXPKPV

SEQ ID NO: 16534 - protein, 42 aa, Artificial Sequence
  Non-cyclic GFR-binding peptide
  MOD_RES (1)..(3)..(37)..(38): Xaa is C or S
  MOD_RES (15)..(16)..(17)..(18)..(19): Xaa is A or G
  MOD_RES (20)..(21)..(22)..(23): Xaa is A or G or absent
XGXSRVVMNEYQKYXXXXXXXXXIYLVSIPSLKTPAXXPKPV

SEQ ID NO: 16535 - protein, 35 aa, Artificial Sequence
  Non-cyclic GFR-binding peptide
  MOD_RES (1)..(33)..(34): Xaa is C or S
XESVAMGRYKKLYTVVGKDFYLISIANLKTPVXXA

SEQ ID NO: 16536 - protein, 40 aa, Artificial Sequence
  Non-cyclic GFR-binding peptide
  MOD_RES (1)..(3)..(35): Xaa is C or S
XGXSRVVMNEYKFKIVNSSDDLYLVSIPELKTPAXTPKTV

SEQ ID NO: 16537 - protein, 36 aa, Artificial Sequence
  Non-cyclic GFR-binding peptide
  MOD_RES (1)..(33)..(34): Xaa is C or S
XARVVMNEYQKYIVNSSDDIYLVSIPSLQTPAXXPK

SEQ ID NO: 16538 - protein, 37 aa, Artificial Sequence
  Non-cyclic GFR-binding peptide
  MOD_RES (1)..(34)..(35): Xaa is C or S
  MOD_RES (12)..(13)..(14)..(15)..(16): Xaa is A or G
  MOD_RES (17)..(18)..(19)..(20): Xaa is A or G or absent
XSRVIMEYKFKXXXXXXXXXLYLISIPELAQPVXXPA

SEQ ID NO: 16539 - protein, 35 aa, Artificial Sequence
  Non-cyclic GFR-binding peptide
  MOD_RES (2)..(4): Xaa is C or S
RXGXGEVVMDEYKFKVVKENEDLYLMSIPELETPV

SEQ ID NO: 16540 - protein, 40 aa, Artificial Sequence
  Non-cyclic GFR-binding peptide
  MOD_RES (2)..(4)..(36)..(37): Xaa is C or S
HXGXAKVVMNEYQKYIVNNSSDIYLVSIPSLKTPAXXAKP

SEQ ID NO: 16541 - protein, 34 aa, Artificial Sequence
  Non-cyclic GFR-binding peptide
  MOD_RES (2)..(33)..(34): Xaa is C or S
KXSKVVMEYQKYVKPTRGVIYLISIPSLDQPVXX

SEQ ID NO: 16542 - protein, 36 aa, Artificial Sequence
  Non-cyclic GFR-binding peptide
  MOD_RES (1)..(3): Xaa is C or S
  MOD_RES (15)..(16)..(17)..(18)..(19): Xaa is A or G
  MOD_RES (20)..(21)..(22)..(23): Xaa is A or G or absent
XGXESVAMGRYKKLXXXXXXXXXFYLISIANLKTPV

SEQ ID NO: 16543 - protein, 39 aa, Artificial Sequence
  Non-cyclic GFR-binding peptide
  MOD_RES (1)..(35)..(36): Xaa is C or S
  MOD_RES (13)..(14)..(15)..(16)..(17): Xaa is A or G
  MOD_RES (18)..(19)..(20)..(21): Xaa is A or G or absent
XESVAMGRYKKLXXXXXXXXXFYLISIANLKTPVXXAKS

SEQ ID NO: 16544 - protein, 35 aa, Artificial Sequence
  Non-cyclic GFR-binding peptide
  MOD_RES (2)..(34)..(35): Xaa is C or S
GXGEVVMDEYKFKVVKENEDLYLMSIPELETPVXX

SEQ ID NO: 16545 - protein, 42 aa, Artificial Sequence
  Non-cyclic GFR-binding peptide
  MOD_RES (2)..(4)..(37)..(38): Xaa is C or S
  MOD_RES (15)..(16)..(17)..(18)..(19): Xaa is A or G
  MOD_RES (20)..(21)..(22)..(23): Xaa is A or G or absent
SXKXSKVIMEYQKYXXXXXXXXXIYLISIPSLDQSVXXPSAS

SEQ ID NO: 16546 - protein, 35 aa, Artificial Sequence
  Non-cyclic GFR-binding peptide
  MOD_RES (2)..(2): Xaa is C or S
  MOD_RES (14)..(15)..(16)..(17)..(18): Xaa is A or G
  MOD_RES (19)..(20)..(21)..(22): Xaa is A or G or absent
GXAKVVMNEYKFKXXXXXXXXXLYLVSIPELKTPA

SEQ ID NO: 16547 - protein, 35 aa, Artificial Sequence
  Non-cyclic GFR-binding peptide
  MOD_RES (2)..(33)..(34): Xaa is C or S
KXSKVVMEYKFKVKPTRGVLYLISIPELDQPVXXP

SEQ ID NO: 16548 - protein, 36 aa, Artificial Sequence
  Non-cyclic GFR-binding peptide
  MOD_RES (2)..(34)..(35): Xaa is C or S
GXAKVVMNEYKFKIVNNSSDLYLVSIPELKTPAXXA

SEQ ID NO: 16549 - protein, 38 aa, Artificial Sequence
  Non-cyclic GFR-binding peptide
  MOD_RES (2)..(4)..(36)..(37): Xaa is C or S
RXGXAEVVMDRYKKLVVNNAADFYLISIANLRAPVXXS

SEQ ID NO: 16550 - protein, 32 aa, Artificial Sequence
  Non-cyclic GFR-binding peptide
  MOD_RES (1)..(1): Xaa is C or S
XSRVVMNEYKFKIVNSSDDLYLVSIPELKTPA

SEQ ID NO: 16551 - protein, 41 aa, Artificial Sequence
  Non-cyclic GFR-binding peptide
  MOD_RES (1)..(35): Xaa is C or S
  MOD_RES (13)..(14)..(15)..(16)..(17): Xaa is A or G
  MOD_RES (18)..(19)..(20)..(21): Xaa is A or G or absent
XSRVVMNEYKFKXXXXXXXXXLYLVSIPELKTPAXTPKTVH

SEQ ID NO: 16552 - protein, 35 aa, Artificial Sequence
  Non-cyclic GFR-binding peptide
  MOD_RES (1)..(33)..(34): Xaa is C or S
XAEVVMDRYKKLVVNNAADFYLISIANLRAPVXXS

SEQ ID NO: 16553 - protein, 35 aa, Artificial Sequence
  Non-cyclic GFR-binding peptide
  MOD_RES (32)..(33): Xaa is C or S
ESVAMGYHYKLYTVVGKDKYLISIPSLKTPVXXAK

SEQ ID NO: 16554 - protein, 34 aa, Artificial Sequence
  Non-cyclic GFR-binding peptide
  MOD_RES (31)..(32): Xaa is C or S
SVAMGRYKKLYTVVGKDFYLISIANLKTPVXXAK

SEQ ID NO: 16555 - protein, 38 aa, Artificial Sequence
  Non-cyclic GFR-binding peptide
  MOD_RES (2)..(34)..(35): Xaa is C or S
GXESVAMGRYKKLYTVVGKDFYLISIANLKTPVXXAKS

SEQ ID NO: 16556 - protein, 39 aa, Artificial Sequence
  Non-cyclic GFR-binding peptide
  MOD_RES (1)..(33)..(34): Xaa is C or S
XGEVVMEEYKFKVVKDYEDLYLMSIPELETPVXXAKPIS

SEQ ID NO: 16557 - protein, 39 aa, Artificial Sequence
  Non-cyclic GFR-binding peptide
  MOD_RES (1)..(3)..(34)..(35): Xaa is C or S
XKXSRVIMEYQKYVKPKRGVIYLISIPSLAQPVXXPAAS

SEQ ID NO: 16558 - protein, 36 aa, Artificial Sequence
  Non-cyclic GFR-binding peptide
  MOD_RES (1)..(3)..(35)..(36): Xaa is C or S
XGXARVVMNEYQKYIVNSSDDIYLVSIPSLQTPAXX

SEQ ID NO: 16559 - protein, 36 aa, Artificial Sequence
  Non-cyclic GFR-binding peptide
  MOD_RES (34)..(35): Xaa is C or S
  MOD_RES (12)..(13)..(14)..(15)..(16): Xaa is A or G
  MOD_RES (17)..(18)..(19)..(20): Xaa is A or G or absent
AKVVMNEYQKYXXXXXXXXXIYLVSIPSLKTPAXXA

SEQ ID NO: 16560 - protein, 38 aa, Artificial Sequence
  Non-cyclic GFR-binding peptide
  MOD_RES (1)..(3)..(37)..(38): Xaa is C or S
  MOD_RES (15)..(16)..(17)..(18)..(19): Xaa is A or G
  MOD_RES (20)..(21)..(22)..(23): Xaa is A or G or absent
XGXAEVVMDRYKKLXXXXXXXXXFYLISIANLRAPVXX

SEQ ID NO: 16561 - protein, 38 aa, Artificial Sequence
  Non-cyclic GFR-binding peptide
  MOD_RES (33)..(34): Xaa is C or S
  MOD_RES (11)..(12)..(13)..(14)..(15): Xaa is A or G
  MOD_RES (16)..(17)..(18)..(19): Xaa is A or G or absent
SKVVMEYKFKXXXXXXXXXLYLISIPELDQPVXXPSAS

SEQ ID NO: 16562 - protein, 37 aa, Artificial Sequence
  Non-cyclic GFR-binding peptide
  MOD_RES (31)..(32): Xaa is C or S
RVVMNEYKFKIVNSSDDLYLVSIPELKTPAXXPKPVY

SEQ ID NO: 16563 - protein, 34 aa, Artificial Sequence
  Non-cyclic GFR-binding peptide
  MOD_RES (32)..(33): Xaa is C or S
GEVVMEEYKFKVVKDYEDLYLMSIPELETPVXXA

SEQ ID NO: 16564 - protein, 41 aa, Artificial Sequence
  Non-cyclic GFR-binding peptide
  MOD_RES (2)..(4)..(38): Xaa is C or S
  MOD_RES (16)..(17)..(18)..(19)..(20): Xaa is A or G
  MOD_RES (21)..(22)..(23)..(24): Xaa is A or G or absent
HXGXSRVVMNEYQKYXXXXXXXXXIYLVSIPSLKTPAXTPK

SEQ ID NO: 16565 - protein, 40 aa, Artificial Sequence
  Non-cyclic GFR-binding peptide
  MOD_RES (2)..(36)..(37): Xaa is C or S
  MOD_RES (14)..(15)..(16)..(17)..(18): Xaa is A or G
  MOD_RES (19)..(20)..(21)..(22): Xaa is A or G or absent
GXAKVVMNEYQKYXXXXXXXXXIYLVSIPSLKTPAXXAKP

SEQ ID NO: 16566 - protein, 38 aa, Artificial Sequence
  Non-cyclic GFR-binding peptide
  MOD_RES (1)..(35)..(36): Xaa is C or S
  MOD_RES (13)..(14)..(15)..(16)..(17): Xaa is A or G
  MOD_RES (18)..(19)..(20)..(21): Xaa is A or G or absent
XAEVVMDEYKFKXXXXXXXXXLYLISIPELRAPVXXSA

SEQ ID NO: 16567 - protein, 35 aa, Artificial Sequence
  Non-cyclic GFR-binding peptide
  MOD_RES (1)..(3)..(35): Xaa is C or S
XGXSRVVMNEYKFKIVNSSDDLYLVSIPELKTPAX

SEQ ID NO: 16568 - protein, 37 aa, Artificial Sequence
  Non-cyclic GFR-binding peptide
  MOD_RES (2)..(4)..(36)..(37): Xaa is C or S
RXGXGEVVMDEYKFKVVKENEDLYLMSIPELETPVXX

SEQ ID NO: 16569 - protein, 33 aa, Artificial Sequence
  Non-cyclic GFR-binding peptide
  MOD_RES (2)..(2): Xaa is C or S
GXGEVVMEEYKFKVVKDYEDLYLMSIPELETPV

SEQ ID NO: 16570 - protein, 38 aa, Artificial Sequence
  Non-cyclic GFR-binding peptide
  MOD_RES (2)..(36): Xaa is C or S
  MOD_RES (14)..(15)..(16)..(17)..(18): Xaa is A or G
  MOD_RES (19)..(20)..(21)..(22): Xaa is A or G or absent
GXSRVVMNEYQKYXXXXXXXXXIYLVSIPSLKTPAXTP

SEQ ID NO: 16571 - protein, 42 aa, Artificial Sequence
  Non-cyclic GFR-binding peptide
  MOD_RES (2)..(36)..(37): Xaa is C or S
  MOD_RES (14)..(15)..(16)..(17)..(18): Xaa is A or G
  MOD_RES (19)..(20)..(21)..(22): Xaa is A or G or absent
GXESVAMGYHYKLXXXXXXXXXKYLISIPSLKTPVXXAKSAK

SEQ ID NO: 16572 - protein, 36 aa, Artificial Sequence
  Non-cyclic GFR-binding peptide
  MOD_RES (1)..(3)..(34)..(35): Xaa is C or S
XKXSKVVMEYQKYVKPTRGVIYLISIPSLDQPVXXP

SEQ ID NO: 16573 - protein, 36 aa, Artificial Sequence
  Non-cyclic GFR-binding peptide
  MOD_RES (1)..(3)..(35): Xaa is C or S
XGXSRVVMNEYQKYIVNSSDDIYLVSIPSLKTPAXT

SEQ ID NO: 16574 - protein, 35 aa, Artificial Sequence
  Non-cyclic GFR-binding peptide
  MOD_RES (2)..(4)..(35): Xaa is C or S
SXKXSKVVMEYQKYVKPTRGVIYLISIPSLDQPVX

SEQ ID NO: 16575 - protein, 36 aa, Artificial Sequence
  Non-cyclic GFR-binding peptide
  MOD_RES (1)..(35)..(36): Xaa is C or S
  MOD_RES (13)..(14)..(15)..(16)..(17): Xaa is A or G
  MOD_RES (18)..(19)..(20)..(21): Xaa is A or G or absent
XAKVVMNEYQKYXXXXXXXXXIYLVSIPSLKTPAXX

SEQ ID NO: 16576 - protein, 40 aa, Artificial Sequence
  Non-cyclic GFR-binding peptide
  MOD_RES (34)..(35): Xaa is C or S
  MOD_RES (12)..(13)..(14)..(15)..(16): Xaa is A or G
  MOD_RES (17)..(18)..(19)..(20): Xaa is A or G or absent
AEVVMDEYKFKXXXXXXXXXLYLISIPELRAPVXXSAPAA

SEQ ID NO: 16577 - protein, 37 aa, Artificial Sequence
  Non-cyclic GFR-binding peptide
  MOD_RES (34)..(35): Xaa is C or S
  MOD_RES (12)..(13)..(14)..(15)..(16): Xaa is A or G
  MOD_RES (17)..(18)..(19)..(20): Xaa is A or G or absent
GEVVMEEYQKYXXXXXXXXXIYLMSIPSLETPVXXAK

SEQ ID NO: 16578 - protein, 34 aa, Artificial Sequence
  Non-cyclic GFR-binding peptide
  MOD_RES (32)..(33): Xaa is C or S
SRVVMNEYQKYIVNSSDDIYLVSIPSLKTPAXXP

SEQ ID NO: 16579 - protein, 39 aa, Artificial Sequence
  Non-cyclic GFR-binding peptide
  MOD_RES (2)..(36)..(37): Xaa is C or S
  MOD_RES (14)..(15)..(16)..(17)..(18): Xaa is A or G
  MOD_RES (19)..(20)..(21)..(22): Xaa is A or G or absent
GXAEVVMDRYKKLXXXXXXXXXFYLISIANLRAPVXXSA

SEQ ID NO: 16580 - protein, 42 aa, Artificial Sequence
  Non-cyclic GFR-binding peptide
  MOD_RES (2)..(36)..(37): Xaa is C or S
  MOD_RES (14)..(15)..(16)..(17)..(18): Xaa is A or G
  MOD_RES (19)..(20)..(21)..(22): Xaa is A or G or absent
GXGEVVMEEYQKYXXXXXXXXXIYLMSIPSLETPVXXAKPIS

SEQ ID NO: 16581 - protein, 42 aa, Artificial Sequence
  Non-cyclic GFR-binding peptide
  MOD_RES (1)..(3)..(37)..(38): Xaa is C or S
  MOD_RES (15)..(16)..(17)..(18)..(19): Xaa is A or G
  MOD_RES (20)..(21)..(22)..(23): Xaa is A or G or absent
XGXSRVVMNEYKFKXXXXXXXXXLYLVSIPELKTPAXXPKPV

SEQ ID NO: 16582 - protein, 40 aa, Artificial Sequence
  Non-cyclic GFR-binding peptide
  MOD_RES (1)..(3)..(37)..(38): Xaa is C or S
  MOD_RES (15)..(16)..(17)..(18)..(19): Xaa is A or G
  MOD_RES (20)..(21)..(22)..(23): Xaa is A or G or absent
XGXAEVVMDYHYKLXXXXXXXXXKYLISIPSLRAPVXXSA

SEQ ID NO: 16583 - protein, 40 aa, Artificial Sequence
  Non-cyclic GFR-binding peptide
  MOD_RES (2)..(34)..(35): Xaa is C or S
GXAKVVMNEYKFKIVNNSSDLYLVSIPELKTPAXXAKPVA

SEQ ID NO: 16584 - protein, 35 aa, Artificial Sequence
  Non-cyclic GFR-binding peptide
  MOD_RES (1)..(33)..(34): Xaa is C or S
XAEVVMDYHYKLVVNNAADKYLISIPSLRAPVXXS

SEQ ID NO: 16585 - protein, 39 aa, Artificial Sequence
  Non-cyclic GFR-binding peptide
  MOD_RES (1)..(3)..(35)..(36): Xaa is C or S
XGXAEVVMDYHYKLVVNNAADKYLISIPSLRAPVXXSAP

SEQ ID NO: 16586 - protein, 42 aa, Artificial Sequence
  Non-cyclic GFR-binding peptide
  MOD_RES (1)..(3)..(37)..(38): Xaa is C or S
  MOD_RES (15)..(16)..(17)..(18)..(19): Xaa is A or G
  MOD_RES (20)..(21)..(22)..(23): Xaa is A or G or absent
XGXGEVVMEEYKFKXXXXXXXXXLYLMSIPELETPVXXAKPI

SEQ ID NO: 16587 - protein, 35 aa, Artificial Sequence
  Non-cyclic GFR-binding peptide
  MOD_RES (34)..(35): Xaa is C or S
  MOD_RES (12)..(13)..(14)..(15)..(16): Xaa is A or G
  MOD_RES (17)..(18)..(19)..(20): Xaa is A or G or absent
AEVVMDRYKKLXXXXXXXXXFYLISIANLRAPVXX

SEQ ID NO: 16588 - protein, 38 aa, Artificial Sequence
  Non-cyclic GFR-binding peptide
  MOD_RES (2)..(4)..(38): Xaa is C or S
  MOD_RES (16)..(17)..(18)..(19)..(20): Xaa is A or G
  MOD_RES (21)..(22)..(23)..(24): Xaa is A or G or absent
HXGXSRVVMNEYQKYXXXXXXXXXIYLVSIPSLKTPAX

SEQ ID NO: 16589 - protein, 35 aa, Artificial Sequence
  Non-cyclic GFR-binding peptide
  MOD_RES (32)..(33): Xaa is C or S
ESVAMGEYQKYYTVVGKDIYLISIPSLKTPVXXAK

SEQ ID NO: 16590 - protein, 36 aa, Artificial Sequence
  Non-cyclic GFR-binding peptide
  MOD_RES (1)..(36): Xaa is C or S
  MOD_RES (14)..(15)..(16)..(17)..(18): Xaa is A or G
  MOD_RES (19)..(20)..(21)..(22): Xaa is A or G or absent
XEAVSMGEEYKFKXXXXXXXXXLYLVSIPELKTPVX

SEQ ID NO: 16591 - protein, 34 aa, Artificial Sequence
  Non-cyclic GFR-binding peptide
  MOD_RES (1)..(1): Xaa is C or S
  MOD_RES (13)..(14)..(15)..(16)..(17): Xaa is A or G
  MOD_RES (18)..(19)..(20)..(21): Xaa is A or G or absent
XGEVVMDEYQKYXXXXXXXXXIYLMSIPSLETPV

SEQ ID NO: 16592 - protein, 41 aa, Artificial Sequence
  Non-cyclic GFR-binding peptide
  MOD_RES (2)..(4)..(38)..(39): Xaa is C or S
  MOD_RES (16)..(17)..(18)..(19)..(20): Xaa is A or G
  MOD_RES (21)..(22)..(23)..(24): Xaa is A or G or absent
RXGXGEVVMDEYQKYXXXXXXXXXIYLMSIPSLETPVXXAK

SEQ ID NO: 16593 - protein, 39 aa, Artificial Sequence
  Non-cyclic GFR-binding peptide
  MOD_RES (2)..(33)..(34): Xaa is C or S
KXSKVIMEYKFKIKPTKGILYLISIPELDQSVXXPSASA

SEQ ID NO: 16594 - protein, 40 aa, Artificial Sequence
  Non-cyclic GFR-binding peptide
  MOD_RES (2)..(34)..(35): Xaa is C or S
GXESVAMGRYKKLYTVVGKDFYLISIANLKTPVXXAKSAK

SEQ ID NO: 16595 - protein, 34 aa, Artificial Sequence
  Non-cyclic GFR-binding peptide
  MOD_RES (31)..(32): Xaa is C or S
SKVIMEYKFKIKPTKGILYLISIPELDQSVXXPS

SEQ ID NO: 16596 - protein, 44 aa, Artificial Sequence
  Non-cyclic GFR-binding peptide
  MOD_RES (1)..(3)..(38)..(39): Xaa is C or S
  MOD_RES (16)..(17)..(18)..(19)..(20): Xaa is A or G
  MOD_RES (21)..(22)..(23)..(24): Xaa is A or G or absent
XGXEAVSMGEEYQKYXXXXXXXXXIYLVSIPSLKTPVXXAKGVK

SEQ ID NO: 16597 - protein, 42 aa, Artificial Sequence
  Non-cyclic GFR-binding peptide
  MOD_RES (1)..(3)..(37)..(38): Xaa is C or S
  MOD_RES (15)..(16)..(17)..(18)..(19): Xaa is A or G
  MOD_RES (20)..(21)..(22)..(23): Xaa is A or G or absent
XGXAEVVMDYHYKLXXXXXXXXXKYLISIPSLRAPVXXSAPA

SEQ ID NO: 16598 - protein, 34 aa, Artificial Sequence
  Non-cyclic GFR-binding peptide
  MOD_RES (1)..(3): Xaa is C or S
XGXARVVMNEYQKYIVNSSDDIYLVSIPSLQTPA

SEQ ID NO: 16599 - protein, 40 aa, Artificial Sequence
  Non-cyclic GFR-binding peptide
  MOD_RES (2)..(34): Xaa is C or S
GXSRVVMNEYQKYIVNSSDDIYLVSIPSLKTPAXTPKTVH

SEQ ID NO: 16600 - protein, 41 aa, Artificial Sequence
  Non-cyclic GFR-binding peptide
  MOD_RES (1)..(35)..(36): Xaa is C or S
  MOD_RES (13)..(14)..(15)..(16)..(17): Xaa is A or G
  MOD_RES (18)..(19)..(20)..(21): Xaa is A or G or absent
XGEVVMEEYKFKXXXXXXXXXLYLMSIPELETPVXXAKPIS

SEQ ID NO: 16601 - protein, 38 aa, Artificial Sequence
  Non-cyclic GFR-binding peptide
  MOD_RES (32)..(33): Xaa is C or S
ESVAMGEYQKYYTVVGKDIYLISIPSLKTPVXXAKSAK

SEQ ID NO: 16602 - protein, 36 aa, Artificial Sequence
  Non-cyclic GFR-binding peptide
  MOD_RES (33)..(34): Xaa is C or S
EAVSMGEEYQKYTPVGMDDIYLVSIPSLKTPVXXAK

SEQ ID NO: 16603 - protein, 41 aa, Artificial Sequence
  Non-cyclic GFR-binding peptide
  MOD_RES (1)..(35)..(36): Xaa is C or S
  MOD_RES (13)..(14)..(15)..(16)..(17): Xaa is A or G
  MOD_RES (18)..(19)..(20)..(21): Xaa is A or G or absent
XARVVMNEYKFKXXXXXXXXXLYLVSIPELQTPAXXPKPVT

SEQ ID NO: 16604 - protein, 39 aa, Artificial Sequence
  Non-cyclic GFR-binding peptide
  MOD_RES (2)..(4)..(37)..(38): Xaa is C or S
RXGXEAVSMGEEYQKYTPVGMDDIYLVSIPSLKTPVXXA

SEQ ID NO: 16605 - protein, 40 aa, Artificial Sequence
  Non-cyclic GFR-binding peptide
  MOD_RES (1)..(3)..(38)..(39): Xaa is C or S
  MOD_RES (16)..(17)..(18)..(19)..(20): Xaa is A or G
  MOD_RES (21)..(22)..(23)..(24): Xaa is A or G or absent
XGXEAVSMGEEYKFKXXXXXXXXXLYLVSIPELKTPVXXA

SEQ ID NO: 16606 - protein, 35 aa, Artificial Sequence
  Non-cyclic GFR-binding peptide
  MOD_RES (2)..(34)..(35): Xaa is C or S
GXESVAMGEYQKYYTVVGKDIYLISIPSLKTPVXX

SEQ ID NO: 16607 - protein, 41 aa, Artificial Sequence
  Non-cyclic GFR-binding peptide
  MOD_RES (1)..(35)..(36): Xaa is C or S
  MOD_RES (13)..(14)..(15)..(16)..(17): Xaa is A or G
  MOD_RES (18)..(19)..(20)..(21): Xaa is A or G or absent
XGEVVMDEYQKYXXXXXXXXXIYLMSIPSLETPVXXAKPIK

SEQ ID NO: 16608 - protein, 36 aa, Artificial Sequence
  Non-cyclic GFR-binding peptide
  MOD_RES (32)..(33): Xaa is C or S
ESVAMGRYKKLYTVVGKDFYLISIANLKTPVXXAKS

SEQ ID NO: 16609 - protein, 38 aa, Artificial Sequence
  Non-cyclic GFR-binding peptide
  MOD_RES (1)..(3)..(37)..(38): Xaa is C or S
  MOD_RES (15)..(16)..(17)..(18)..(19): Xaa is A or G
  MOD_RES (20)..(21)..(22)..(23): Xaa is A or G or absent
XGXGEVVMDEYKFKXXXXXXXXXLYLMSIPELETPVXX

SEQ ID NO: 16610 - protein, 40 aa, Artificial Sequence
  Non-cyclic GFR-binding peptide
  MOD_RES (1)..(3)..(35): Xaa is C or S
XGXSRVVMNEYQKYIVNSSDDIYLVSIPSLKTPAXTPKTV

SEQ ID NO: 16611 - protein, 37 aa, Artificial Sequence
  Non-cyclic GFR-binding peptide
  MOD_RES (1)..(3)..(34)..(35): Xaa is C or S
XKXSKVVMEYKFKVKPTRGVLYLISIPELDQPVXXPS

SEQ ID NO: 16612 - protein, 35 aa, Artificial Sequence
  Non-cyclic GFR-binding peptide
  MOD_RES (1)..(3)..(35): Xaa is C or S
XGXESVAMGEYQKYYTVVGKDIYLISIPSLKTPVX

SEQ ID NO: 16613 - protein, 34 aa, Artificial Sequence
  Non-cyclic GFR-binding peptide
  MOD_RES (1)..(1): Xaa is C or S
  MOD_RES (13)..(14)..(15)..(16)..(17): Xaa is A or G
  MOD_RES (18)..(19)..(20)..(21): Xaa is A or G or absent
XAEVVMDRYKKLXXXXXXXXXFYLISIANLRAPV

SEQ ID NO: 16614 - protein, 34 aa, Artificial Sequence
  Non-cyclic GFR-binding peptide
  MOD_RES (34)..(34): Xaa is C or S
  MOD_RES (12)..(13)..(14)..(15)..(16): Xaa is A or G
  MOD_RES (17)..(18)..(19)..(20): Xaa is A or G or absent
ESVAMGRYKKLXXXXXXXXXFYLISIANLKTPVX

SEQ ID NO: 16615 - protein, 33 aa, Artificial Sequence
  Non-cyclic GFR-binding peptide
  MOD_RES (12)..(13)..(14)..(15)..(16): Xaa is A or G
  MOD_RES (17)..(18)..(19)..(20): Xaa is A or G or absent
SRVVMNEYKFKXXXXXXXXXLYLVSIPELKTPA

SEQ ID NO: 16616 - protein, 38 aa, Artificial Sequence
  Non-cyclic GFR-binding peptide
  MOD_RES (2)..(4)..(36)..(37): Xaa is C or S
RXGXAEVVMDEYKFKVVNNAADLYLISIPELRAPVXXS

SEQ ID NO: 16617 - protein, 39 aa, Artificial Sequence
  Non-cyclic GFR-binding peptide
  MOD_RES (2)..(4)..(35)..(36): Xaa is C or S
SXKXSKVVMEYQKYVKPTRGVIYLISIPSLDQPVXXPSA

SEQ ID NO: 16618 - protein, 35 aa, Artificial Sequence
  Non-cyclic GFR-binding peptide
  MOD_RES (2)..(2): Xaa is C or S
  MOD_RES (14)..(15)..(16)..(17)..(18): Xaa is A or G
  MOD_RES (19)..(20)..(21)..(22): Xaa is A or G or absent
GXGEVVMDEYKFKXXXXXXXXXLYLMSIPELETPV

SEQ ID NO: 16619 - protein, 38 aa, Artificial Sequence
  Non-cyclic GFR-binding peptide
  MOD_RES (1)..(3)..(37)..(38): Xaa is C or S
  MOD_RES (15)..(16)..(17)..(18)..(19): Xaa is A or G
  MOD_RES (20)..(21)..(22)..(23): Xaa is A or G or absent
XGXESVAMGRYKKLXXXXXXXXXFYLISIANLKTPVXX

SEQ ID NO: 16620 - protein, 38 aa, Artificial Sequence
  Non-cyclic GFR-binding peptide
  MOD_RES (1)..(3)..(36)..(37): Xaa is C or S
  MOD_RES (14)..(15)..(16)..(17)..(18): Xaa is A or G
  MOD_RES (19)..(20)..(21)..(22): Xaa is A or G or absent
XKXSKVVMEYQKYXXXXXXXXXIYLISIPSLDQPVXXP

SEQ ID NO: 16621 - protein, 37 aa, Artificial Sequence
  Non-cyclic GFR-binding peptide
  MOD_RES (2)..(4)..(37): Xaa is C or S
  MOD_RES (15)..(16)..(17)..(18)..(19): Xaa is A or G
  MOD_RES (20)..(21)..(22)..(23): Xaa is A or G or absent
SXKXSKVIMEYQKYXXXXXXXXXIYLISIPSLDQSVX

SEQ ID NO: 16622 - protein, 36 aa, Artificial Sequence
  Non-cyclic GFR-binding peptide
  MOD_RES (31)..(32): Xaa is C or S
EVVMDRYKKLVVNNAADFYLISIANLRAPVXXSAPA

SEQ ID NO: 16623 - protein, 35 aa, Artificial Sequence
  Non-cyclic GFR-binding peptide
  MOD_RES (1)..(3)..(34)..(35): Xaa is C or S
XKXSKVIMEYQKYIKPTKGIIYLISIPSLDQSVXX

SEQ ID NO: 16624 - protein, 37 aa, Artificial Sequence
  Non-cyclic GFR-binding peptide
  MOD_RES (33)..(34): Xaa is C or S
  MOD_RES (11)..(12)..(13)..(14)..(15): Xaa is A or G
  MOD_RES (16)..(17)..(18)..(19): Xaa is A or G or absent
SVAMGYHYKLXXXXXXXXXKYLISIPSLKTPVXXAKS

SEQ ID NO: 16625 - protein, 40 aa, Artificial Sequence
  Non-cyclic GFR-binding peptide
  MOD_RES (1)..(35)..(36): Xaa is C or S
  MOD_RES (13)..(14)..(15)..(16)..(17): Xaa is A or G
  MOD_RES (18)..(19)..(20)..(21): Xaa is A or G or absent
XSRVVMNEYQKYXXXXXXXXXIYLVSIPSLKTPAXXPKPV

SEQ ID NO: 16626 - protein, 33 aa, Artificial Sequence
  Non-cyclic GFR-binding peptide
  MOD_RES (31)..(32): Xaa is C or S
RVVMNEYKFKIVNSSDDLYLVSIPELQTPAXXP

SEQ ID NO: 16627 - protein, 40 aa, Artificial Sequence
  Non-cyclic GFR-binding peptide
  MOD_RES (2)..(36)..(37): Xaa is C or S
  MOD_RES (14)..(15)..(16)..(17)..(18): Xaa is A or G
  MOD_RES (19)..(20)..(21)..(22): Xaa is A or G or absent
GXGEVVMDEYQKYXXXXXXXXXIYLMSIPSLETPVXXAKP

SEQ ID NO: 16628 - protein, 37 aa, Artificial Sequence
  Non-cyclic GFR-binding peptide
  MOD_RES (1)..(33)..(34): Xaa is C or S
XARVVMNEYQKYIVNSSDDIYLVSIPSLQTPAXXPKP

SEQ ID NO: 16629 - protein, 38 aa, Artificial Sequence
  Non-cyclic GFR-binding peptide
  MOD_RES (33)..(34): Xaa is C or S
EAVSMGEEYQKYTPVGMDDIYLVSIPSLKTPVXXAKGV

SEQ ID NO: 16630 - protein, 37 aa, Artificial Sequence
  Non-cyclic GFR-binding peptide
  MOD_RES (1)..(3)..(37): Xaa is C or S
  MOD_RES (15)..(16)..(17)..(18)..(19): Xaa is A or G
  MOD_RES (20)..(21)..(22)..(23): Xaa is A or G or absent
XGXSRVVMNEYKFKXXXXXXXXXLYLVSIPELKTPAX

SEQ ID NO: 16631 - protein, 35 aa, Artificial Sequence
  Non-cyclic GFR-binding peptide
  MOD_RES (1)..(3): Xaa is C or S
  MOD_RES (14)..(15)..(16)..(17)..(18): Xaa is A or G
  MOD_RES (19)..(20)..(21)..(22): Xaa is A or G or absent
XKXSRVIMEYQKYXXXXXXXXXIYLISIPSLAQPV

SEQ ID NO: 16632 - protein, 41 aa, Artificial Sequence
  Non-cyclic GFR-binding peptide
  MOD_RES (2)..(35)..(36): Xaa is C or S
  MOD_RES (13)..(14)..(15)..(16)..(17): Xaa is A or G
  MOD_RES (18)..(19)..(20)..(21): Xaa is A or G or absent
KXSRVIMEYKFKXXXXXXXXXLYLISIPELAQPVXXPAASA

SEQ ID NO: 16633 - protein, 31 aa, Artificial Sequence
  Non-cyclic GFR-binding peptide
  MOD_RES (1)..(1): Xaa is C or S
XSRVIMEYQKYVKPKRGVIYLISIPSLAQPV

SEQ ID NO: 16634 - protein, 34 aa, Artificial Sequence
  Non-cyclic GFR-binding peptide
  MOD_RES (34)..(34): Xaa is C or S
  MOD_RES (12)..(13)..(14)..(15)..(16): Xaa is A or G
  MOD_RES (17)..(18)..(19)..(20): Xaa is A or G or absent
AKVVMNEYKFKXXXXXXXXXLYLVSIPELKTPAX

SEQ ID NO: 16635 - protein, 37 aa, Artificial Sequence
  Non-cyclic GFR-binding peptide
  MOD_RES (2)..(4)..(37): Xaa is C or S
RXGXEAVSMGEEYQKYTPVGMDDIYLVSIPSLKTPVX

SEQ ID NO: 16636 - protein, 38 aa, Artificial Sequence
  Non-cyclic GFR-binding peptide
  MOD_RES (32)..(33): Xaa is C or S
GEVVMDEYQKYVVKENEDIYLMSIPSLETPVXXAKPIK

SEQ ID NO: 16637 - protein, 41 aa, Artificial Sequence
  Non-cyclic GFR-binding peptide
  MOD_RES (2)..(36)..(37): Xaa is C or S
  MOD_RES (14)..(15)..(16)..(17)..(18): Xaa is A or G
  MOD_RES (19)..(20)..(21)..(22): Xaa is A or G or absent
GXSRVVMNEYQKYXXXXXXXXXIYLVSIPSLKTPAXXPKPV

SEQ ID NO: 16638 - protein, 32 aa, Artificial Sequence
  Non-cyclic GFR-binding peptide
  MOD_RES (31)..(32): Xaa is C or S
EVVMEEYQKYVVKDYEDIYLMSIPSLETPVXX

SEQ ID NO: 16639 - protein, 37 aa, Artificial Sequence
  Non-cyclic GFR-binding peptide
  MOD_RES (1)..(32)..(33): Xaa is C or S
XSKVVMEYQKYVKPTRGVIYLISIPSLDQPVXXPSAS

SEQ ID NO: 16640 - protein, 32 aa, Artificial Sequence
  Non-cyclic GFR-binding peptide
  MOD_RES (1)..(1): Xaa is C or S
XGEVVMEEYQKYVVKDYEDIYLMSIPSLETPV

SEQ ID NO: 16641 - protein, 33 aa, Artificial Sequence
  Non-cyclic GFR-binding peptide
  MOD_RES (1)..(33): Xaa is C or S
XGEVVMEEYKFKVVKDYEDLYLMSIPELETPVX

SEQ ID NO: 16642 - protein, 33 aa, Artificial Sequence
  Non-cyclic GFR-binding peptide
  MOD_RES (31)..(32): Xaa is C or S
KVVMNEYKFKIVNNSSDLYLVSIPELKTPAXXA

SEQ ID NO: 16643 - protein, 34 aa, Artificial Sequence
  Non-cyclic GFR-binding peptide
  MOD_RES (33)..(34): Xaa is C or S
  MOD_RES (11)..(12)..(13)..(14)..(15): Xaa is A or G
  MOD_RES (16)..(17)..(18)..(19): Xaa is A or G or absent
EVVMDEYQKYXXXXXXXXXIYLMSIPSLETPVXX

SEQ ID NO: 16644 - protein, 36 aa, Artificial Sequence
  Non-cyclic GFR-binding peptide
  MOD_RES (34)..(35): Xaa is C or S
  MOD_RES (12)..(13)..(14)..(15)..(16): Xaa is A or G
  MOD_RES (17)..(18)..(19)..(20): Xaa is A or G or absent
GEVVMEEYKFKXXXXXXXXXLYLMSIPELETPVXXA

SEQ ID NO: 16645 - protein, 42 aa, Artificial Sequence
  Non-cyclic GFR-binding peptide
  MOD_RES (2)..(4)..(38)..(39): Xaa is C or S
  MOD_RES (16)..(17)..(18)..(19)..(20): Xaa is A or G
  MOD_RES (21)..(22)..(23)..(24): Xaa is A or G or absent
HXGXSRVVMNEYKFKXXXXXXXXXLYLVSIPELKTPAXXPKP

SEQ ID NO: 16646 - protein, 39 aa, Artificial Sequence
  Non-cyclic GFR-binding peptide
  MOD_RES (1)..(35)..(36): Xaa is C or S
  MOD_RES (13)..(14)..(15)..(16)..(17): Xaa is A or G
  MOD_RES (18)..(19)..(20)..(21): Xaa is A or G or absent
XAEVVMDYHYKLXXXXXXXXXKYLISIPSLRAPVXXSAP

SEQ ID NO: 16647 - protein, 32 aa, Artificial Sequence
  Non-cyclic GFR-binding peptide
  MOD_RES (1)..(32): Xaa is C or S
XSRVIMEYQKYVKPKRGVIYLISIPSLAQPVX

SEQ ID NO: 16648 - protein, 41 aa, Artificial Sequence
  Non-cyclic GFR-binding peptide
  MOD_RES (2)..(4)..(36)..(37): Xaa is C or S
RXGXGEVVMDEYQKYVVKENEDIYLMSIPSLETPVXXAKPI

SEQ ID NO: 16649 - protein, 38 aa, Artificial Sequence
  Non-cyclic GFR-binding peptide
  MOD_RES (33)..(33): Xaa is C or S
  MOD_RES (11)..(12)..(13)..(14)..(15): Xaa is A or G
  MOD_RES (16)..(17)..(18)..(19): Xaa is A or G or absent
RVVMNEYQKYXXXXXXXXXIYLVSIPSLKTPAXTPKTV

SEQ ID NO: 16650 - protein, 31 aa, Artificial Sequence
  Non-cyclic GFR-binding peptide
  MOD_RES (31)..(31): Xaa is C or S
EVVMDEYQKYVVKENEDIYLMSIPSLETPVX

SEQ ID NO: 16651 - protein, 40 aa, Artificial Sequence
  Non-cyclic GFR-binding peptide
  MOD_RES (2)..(34)..(35): Xaa is C or S
GXAEVVMDRYKKLVVNNAADFYLISIANLRAPVXXSAPAA

SEQ ID NO: 16652 - protein, 32 aa, Artificial Sequence
  Non-cyclic GFR-binding peptide
  MOD_RES (31)..(32): Xaa is C or S
EVVMDEYQKYVVKENEDIYLMSIPSLETPVXX

SEQ ID NO: 16653 - protein, 34 aa, Artificial Sequence
  Non-cyclic GFR-binding peptide
  MOD_RES (32)..(33): Xaa is C or S
ESVAMGYHYKLYTVVGKDKYLISIPSLKTPVXXA

SEQ ID NO: 16654 - protein, 34 aa, Artificial Sequence
  Non-cyclic GFR-binding peptide
  MOD_RES (33)..(34): Xaa is C or S
EAVSMGEEYQKYTPVGMDDIYLVSIPSLKTPVXX

SEQ ID NO: 16655 - protein, 35 aa, Artificial Sequence
  Non-cyclic GFR-binding peptide
  MOD_RES (2)..(34)..(35): Xaa is C or S
GXARVVMNEYKFKIVNSSDDLYLVSIPELQTPAXX

SEQ ID NO: 16656 - protein, 39 aa, Artificial Sequence
  Non-cyclic GFR-binding peptide
  MOD_RES (2)..(4)..(38)..(39): Xaa is C or S
  MOD_RES (16)..(17)..(18)..(19)..(20): Xaa is A or G
  MOD_RES (21)..(22)..(23)..(24): Xaa is A or G or absent
HXGXARVVMNEYQKYXXXXXXXXXIYLVSIPSLQTPAXX

SEQ ID NO: 16657 - protein, 39 aa, Artificial Sequence
  Non-cyclic GFR-binding peptide
  MOD_RES (1)..(34)..(35): Xaa is C or S
  MOD_RES (12)..(13)..(14)..(15)..(16): Xaa is A or G
  MOD_RES (17)..(18)..(19)..(20): Xaa is A or G or absent
XSKVVMEYQKYXXXXXXXXXIYLISIPSLDQPVXXPSAS

SEQ ID NO: 16658 - protein, 37 aa, Artificial Sequence
  Non-cyclic GFR-binding peptide
  MOD_RES (33)..(34): Xaa is C or S
  MOD_RES (11)..(12)..(13)..(14)..(15): Xaa is A or G
  MOD_RES (16)..(17)..(18)..(19): Xaa is A or G or absent
EVVMEEYKFKXXXXXXXXXLYLMSIPELETPVXXAKP

SEQ ID NO: 16659 - protein, 36 aa, Artificial Sequence
  Non-cyclic GFR-binding peptide
  MOD_RES (33)..(34): Xaa is C or S
  MOD_RES (11)..(12)..(13)..(14)..(15): Xaa is A or G
  MOD_RES (16)..(17)..(18)..(19): Xaa is A or G or absent
SVAMGRYKKLXXXXXXXXXFYLISIANLKTPVXXAK

SEQ ID NO: 16660 - protein, 38 aa, Artificial Sequence
  Non-cyclic GFR-binding peptide
  MOD_RES (2)..(4)..(35)..(36): Xaa is C or S
SXKXSKVIMEYQKYIKPTKGIIYLISIPSLDQSVXXPS

SEQ ID NO: 16661 - protein, 41 aa, Artificial Sequence
  Non-cyclic GFR-binding peptide
  MOD_RES (2)..(37)..(38): Xaa is C or S
  MOD_RES (15)..(16)..(17)..(18)..(19): Xaa is A or G
  MOD_RES (20)..(21)..(22)..(23): Xaa is A or G or absent
GXEAVSMGEEYKFKXXXXXXXXXLYLVSIPELKTPVXXAKG

SEQ ID NO: 16662 - protein, 37 aa, Artificial Sequence
  Non-cyclic GFR-binding peptide
  MOD_RES (2)..(36)..(37): Xaa is C or S
  MOD_RES (14)..(15)..(16)..(17)..(18): Xaa is A or G
  MOD_RES (19)..(20)..(21)..(22): Xaa is A or G or absent
GXSRVVMNEYQKYXXXXXXXXXIYLVSIPSLKTPAXX

SEQ ID NO: 16663 - protein, 33 aa, Artificial Sequence
  Non-cyclic GFR-binding peptide
  MOD_RES (31)..(32): Xaa is C or S
SVAMGEYQKYYTVVGKDIYLISIPSLKTPVXXA

SEQ ID NO: 16664 - protein, 36 aa, Artificial Sequence
  Non-cyclic GFR-binding peptide
  MOD_RES (1)..(35)..(36): Xaa is C or S
  MOD_RES (13)..(14)..(15)..(16)..(17): Xaa is A or G
  MOD_RES (18)..(19)..(20)..(21): Xaa is A or G or absent
XGEVVMEEYQKYXXXXXXXXXIYLMSIPSLETPVXX

SEQ ID NO: 16665 - protein, 38 aa, Artificial Sequence
  Non-cyclic GFR-binding peptide
  MOD_RES (1)..(34)..(35): Xaa is C or S
  MOD_RES (12)..(13)..(14)..(15)..(16): Xaa is A or G
  MOD_RES (17)..(18)..(19)..(20): Xaa is A or G or absent
XSKVIMEYQKYXXXXXXXXXIYLISIPSLDQSVXXPSA

SEQ ID NO: 16666 - protein, 41 aa, Artificial Sequence
  Non-cyclic GFR-binding peptide
  MOD_RES (2)..(36)..(37): Xaa is C or S
  MOD_RES (14)..(15)..(16)..(17)..(18): Xaa is A or G
  MOD_RES (19)..(20)..(21)..(22): Xaa is A or G or absent
GXESVAMGYHYKLXXXXXXXXXKYLISIPSLKTPVXXAKSA

SEQ ID NO: 16667 - protein, 34 aa, Artificial Sequence
  Non-cyclic GFR-binding peptide
  MOD_RES (1)..(3)..(34): Xaa is C or S
XKXSRVIMEYKFKVKPKRGVLYLISIPELAQPVX

SEQ ID NO: 16668 - protein, 36 aa, Artificial Sequence
  Non-cyclic GFR-binding peptide
  MOD_RES (32)..(32): Xaa is C or S
SRVVMNEYKFKIVNSSDDLYLVSIPELKTPAXTPKT

SEQ ID NO: 16669 - protein, 34 aa, Artificial Sequence
  Non-cyclic GFR-binding peptide
  MOD_RES (32)..(33): Xaa is C or S
ARVVMNEYKFKIVNSSDDLYLVSIPELQTPAXXP

SEQ ID NO: 16670 - protein, 38 aa, Artificial Sequence
  Non-cyclic GFR-binding peptide
  MOD_RES (1)..(3)..(37)..(38): Xaa is C or S
  MOD_RES (15)..(16)..(17)..(18)..(19): Xaa is A or G
  MOD_RES (20)..(21)..(22)..(23): Xaa is A or G or absent
XGXAKVVMNEYKFKXXXXXXXXXLYLVSIPELKTPAXX

SEQ ID NO: 16671 - protein, 38 aa, Artificial Sequence
  Non-cyclic GFR-binding peptide
  MOD_RES (1)..(3)..(38): Xaa is C or S
  MOD_RES (16)..(17)..(18)..(19)..(20): Xaa is A or G
  MOD_RES (21)..(22)..(23)..(24): Xaa is A or G or absent
XGXEAVSMGEEYQKYXXXXXXXXXIYLVSIPSLKTPVX

SEQ ID NO: 16672 - protein, 33 aa, Artificial Sequence
  Non-cyclic GFR-binding peptide
  MOD_RES (2)..(2): Xaa is C or S
GXAKVVMNEYQKYIVNNSSDIYLVSIPSLKTPA

SEQ ID NO: 16673 - protein, 40 aa, Artificial Sequence
  Non-cyclic GFR-binding peptide
  MOD_RES (2)..(35)..(36): Xaa is C or S
  MOD_RES (13)..(14)..(15)..(16)..(17): Xaa is A or G
  MOD_RES (18)..(19)..(20)..(21): Xaa is A or G or absent
KXSRVIMEYQKYXXXXXXXXXIYLISIPSLAQPVXXPAAS

SEQ ID NO: 16674 - protein, 40 aa, Artificial Sequence
  Non-cyclic GFR-binding peptide
  MOD_RES (2)..(4)..(38)..(39): Xaa is C or S
  MOD_RES (16)..(17)..(18)..(19)..(20): Xaa is A or G
  MOD_RES (21)..(22)..(23)..(24): Xaa is A or G or absent
HXGXARVVMNEYQKYXXXXXXXXXIYLVSIPSLQTPAXXP

SEQ ID NO: 16675 - protein, 38 aa, Artificial Sequence
  Non-cyclic GFR-binding peptide
  MOD_RES (34)..(35): Xaa is C or S
  MOD_RES (12)..(13)..(14)..(15)..(16): Xaa is A or G
  MOD_RES (17)..(18)..(19)..(20): Xaa is A or G or absent
GEVVMDEYKFKXXXXXXXXXLYLMSIPELETPVXXAKP

SEQ ID NO: 16676 - protein, 41 aa, Artificial Sequence
  Non-cyclic GFR-binding peptide
  MOD_RES (1)..(3)..(37)..(38): Xaa is C or S
  MOD_RES (15)..(16)..(17)..(18)..(19): Xaa is A or G
  MOD_RES (20)..(21)..(22)..(23): Xaa is A or G or absent
XGXAEVVMDRYKKLXXXXXXXXXFYLISIANLRAPVXXSAP

SEQ ID NO: 16677 - protein, 35 aa, Artificial Sequence
  Non-cyclic GFR-binding peptide
  MOD_RES (1)..(32)..(33): Xaa is C or S
XSRVIMEYKFKVKPKRGVLYLISIPELAQPVXXPA

SEQ ID NO: 16678 - protein, 34 aa, Artificial Sequence
  Non-cyclic GFR-binding peptide
  MOD_RES (32)..(33): Xaa is C or S
AEVVMDYHYKLVVNNAADKYLISIPSLRAPVXXS

SEQ ID NO: 16679 - protein, 36 aa, Artificial Sequence
  Non-cyclic GFR-binding peptide
  MOD_RES (33)..(34): Xaa is C or S
  MOD_RES (11)..(12)..(13)..(14)..(15): Xaa is A or G
  MOD_RES (16)..(17)..(18)..(19): Xaa is A or G or absent
EVVMDYHYKLXXXXXXXXXKYLISIPSLRAPVXXSA

SEQ ID NO: 16680 - protein, 32 aa, Artificial Sequence
  Non-cyclic GFR-binding peptide
  MOD_RES (2)..(2): Xaa is C or S
KXSKVIMEYQKYIKPTKGIIYLISIPSLDQSV

SEQ ID NO: 16681 - protein, 40 aa, Artificial Sequence
  Non-cyclic GFR-binding peptide
  MOD_RES (2)..(4)..(37)..(38): Xaa is C or S
  MOD_RES (15)..(16)..(17)..(18)..(19): Xaa is A or G
  MOD_RES (20)..(21)..(22)..(23): Xaa is A or G or absent
SXKXSKVVMEYQKYXXXXXXXXXIYLISIPSLDQPVXXPS

SEQ ID NO: 16682 - protein, 36 aa, Artificial Sequence
  Non-cyclic GFR-binding peptide
  MOD_RES (1)..(3)..(34)..(35): Xaa is C or S
XKXSKVIMEYQKYIKPTKGIIYLISIPSLDQSVXXP

SEQ ID NO: 16683 - protein, 37 aa, Artificial Sequence
  Non-cyclic GFR-binding peptide
  MOD_RES (33)..(34): Xaa is C or S
  MOD_RES (11)..(12)..(13)..(14)..(15): Xaa is A or G
  MOD_RES (16)..(17)..(18)..(19): Xaa is A or G or absent
KVVMNEYQKYXXXXXXXXXIYLVSIPSLKTPAXXAKP

SEQ ID NO: 16684 - protein, 38 aa, Artificial Sequence
  Non-cyclic GFR-binding peptide
  MOD_RES (2)..(4)..(36)..(37): Xaa is C or S
HXGXSRVVMNEYQKYIVNSSDDIYLVSIPSLKTPAXXP

SEQ ID NO: 16685 - protein, 38 aa, Artificial Sequence
  Non-cyclic GFR-binding peptide
  MOD_RES (1)..(32)..(33): Xaa is C or S
XSRVIMEYQKYVKPKRGVIYLISIPSLAQPVXXPAASA

SEQ ID NO: 16686 - protein, 36 aa, Artificial Sequence
  Non-cyclic GFR-binding peptide
  MOD_RES (31)..(32): Xaa is C or S
RVVMNEYQKYIVNSSDDIYLVSIPSLKTPAXXPKPV

SEQ ID NO: 16687 - protein, 38 aa, Artificial Sequence
  Non-cyclic GFR-binding peptide
  MOD_RES (32)..(33): Xaa is C or S
SRVVMNEYKFKIVNSSDDLYLVSIPELKTPAXXPKPVY

SEQ ID NO: 16688 - protein, 34 aa, Artificial Sequence
  Non-cyclic GFR-binding peptide
  MOD_RES (1)..(33)..(34): Xaa is C or S
XGEVVMEEYKFKVVKDYEDLYLMSIPELETPVXX

SEQ ID NO: 16689 - protein, 34 aa, Artificial Sequence
  Non-cyclic GFR-binding peptide
  MOD_RES (1)..(1): Xaa is C or S
  MOD_RES (13)..(14)..(15)..(16)..(17): Xaa is A or G
  MOD_RES (18)..(19)..(20)..(21): Xaa is A or G or absent
XAKVVMNEYKFKXXXXXXXXXLYLVSIPELKTPA

SEQ ID NO: 16690 - protein, 34 aa, Artificial Sequence
  Non-cyclic GFR-binding peptide
  MOD_RES (33)..(34): Xaa is C or S
  MOD_RES (11)..(12)..(13)..(14)..(15): Xaa is A or G
  MOD_RES (16)..(17)..(18)..(19): Xaa is A or G or absent
SKVIMEYQKYXXXXXXXXXIYLISIPSLDQSVXX

SEQ ID NO: 16691 - protein, 37 aa, Artificial Sequence
  Non-cyclic GFR-binding peptide
  MOD_RES (1)..(32)..(33): Xaa is C or S
XSKVIMEYQKYIKPTKGIIYLISIPSLDQSVXXPSAS

SEQ ID NO: 16692 - protein, 39 aa, Artificial Sequence
  Non-cyclic GFR-binding peptide
  MOD_RES (1)..(3)..(35)..(36): Xaa is C or S
XGXAKVVMNEYKFKIVNNSSDLYLVSIPELKTPAXXAKP

SEQ ID NO: 16693 - protein, 39 aa, Artificial Sequence
  Non-cyclic GFR-binding peptide
  MOD_RES (1)..(3)..(38)..(39): Xaa is C or S
  MOD_RES (16)..(17)..(18)..(19)..(20): Xaa is A or G
  MOD_RES (21)..(22)..(23)..(24): Xaa is A or G or absent
XGXEAVSMGEEYKFKXXXXXXXXXLYLVSIPELKTPVXX

SEQ ID NO: 16694 - protein, 37 aa, Artificial Sequence
  Non-cyclic GFR-binding peptide
  MOD_RES (1)..(3)..(35)..(36): Xaa is C or S
XGXAEVVMDEYKFKVVNNAADLYLISIPELRAPVXXS

SEQ ID NO: 16695 - protein, 32 aa, Artificial Sequence
  Non-cyclic GFR-binding peptide
  MOD_RES (31)..(32): Xaa is C or S
SKVIMEYKFKIKPTKGILYLISIPELDQSVXX

SEQ ID NO: 16696 - protein, 37 aa, Artificial Sequence
  Non-cyclic GFR-binding peptide
  MOD_RES (31)..(32): Xaa is C or S
SVAMGRYKKLYTVVGKDFYLISIANLKTPVXXAKSAK

SEQ ID NO: 16697 - protein, 41 aa, Artificial Sequence
  Non-cyclic GFR-binding peptide
  MOD_RES (1)..(3)..(37)..(38): Xaa is C or S
  MOD_RES (15)..(16)..(17)..(18)..(19): Xaa is A or G
  MOD_RES (20)..(21)..(22)..(23): Xaa is A or G or absent
XGXSRVVMNEYKFKXXXXXXXXXLYLVSIPELKTPAXXPKP

SEQ ID NO: 16698 - protein, 37 aa, Artificial Sequence
  Non-cyclic GFR-binding peptide
  MOD_RES (1)..(3)..(35)..(36): Xaa is C or S
XGXSRVVMNEYQKYIVNSSDDIYLVSIPSLKTPAXXP

SEQ ID NO: 16699 - protein, 31 aa, Artificial Sequence
  Non-cyclic GFR-binding peptide
AEVVMDRYKKLVVNNAADFYLISIANLRAPV

SEQ ID NO: 16700 - protein, 38 aa, Artificial Sequence
  Non-cyclic GFR-binding peptide
  MOD_RES (2)..(4)..(36)..(37): Xaa is C or S
HXGXSRVVMNEYKFKIVNSSDDLYLVSIPELKTPAXXP

SEQ ID NO: 16701 - protein, 33 aa, Artificial Sequence
  Non-cyclic GFR-binding peptide
  MOD_RES (1)..(1): Xaa is C or S
XEAVSMGEEYKFKTPVGMDDLYLVSIPELKTPV

SEQ ID NO: 16702 - protein, 38 aa, Artificial Sequence
  Non-cyclic GFR-binding peptide
  MOD_RES (1)..(35)..(36): Xaa is C or S
  MOD_RES (13)..(14)..(15)..(16)..(17): Xaa is A or G
  MOD_RES (18)..(19)..(20)..(21): Xaa is A or G or absent
XGEVVMEEYKFKXXXXXXXXXLYLMSIPELETPVXXAK

SEQ ID NO: 16703 - protein, 35 aa, Artificial Sequence
  Non-cyclic GFR-binding peptide
  MOD_RES (33)..(34): Xaa is C or S
  MOD_RES (11)..(12)..(13)..(14)..(15): Xaa is A or G
  MOD_RES (16)..(17)..(18)..(19): Xaa is A or G or absent
SVAMGRYKKLXXXXXXXXXFYLISIANLKTPVXXA

SEQ ID NO: 16704 - protein, 39 aa, Artificial Sequence
  Non-cyclic GFR-binding peptide
  MOD_RES (1)..(3)..(37): Xaa is C or S
  MOD_RES (15)..(16)..(17)..(18)..(19): Xaa is A or G
  MOD_RES (20)..(21)..(22)..(23): Xaa is A or G or absent
XGXSRVVMNEYQKYXXXXXXXXXIYLVSIPSLKTPAXTP

SEQ ID NO: 16705 - protein, 35 aa, Artificial Sequence
  Non-cyclic GFR-binding peptide
  MOD_RES (1)..(33)..(34): Xaa is C or S
XAEVVMDEYKFKVVNNAADLYLISIPELRAPVXXS

SEQ ID NO: 16706 - protein, 37 aa, Artificial Sequence
  Non-cyclic GFR-binding peptide
  MOD_RES (32)..(33): Xaa is C or S
AEVVMDRYKKLVVNNAADFYLISIANLRAPVXXSAPA

SEQ ID NO: 16707 - protein, 41 aa, Artificial Sequence
  Non-cyclic GFR-binding peptide
  MOD_RES (1)..(3)..(37)..(38): Xaa is C or S
  MOD_RES (15)..(16)..(17)..(18)..(19): Xaa is A or G
  MOD_RES (20)..(21)..(22)..(23): Xaa is A or G or absent
XGXSRVVMNEYQKYXXXXXXXXXIYLVSIPSLKTPAXXPKP

SEQ ID NO: 16708 - protein, 35 aa, Artificial Sequence
  Non-cyclic GFR-binding peptide
  MOD_RES (35)..(35): Xaa is C or S
  MOD_RES (13)..(14)..(15)..(16)..(17): Xaa is A or G
  MOD_RES (18)..(19)..(20)..(21): Xaa is A or G or absent
EAVSMGEEYQKYXXXXXXXXXIYLVSIPSLKTPVX

SEQ ID NO: 16709 - protein, 33 aa, Artificial Sequence
  Non-cyclic GFR-binding peptide
  MOD_RES (1)..(32)..(33): Xaa is C or S
XSRVIMEYQKYVKPKRGVIYLISIPSLAQPVXX

SEQ ID NO: 16710 - protein, 32 aa, Artificial Sequence
  Non-cyclic GFR-binding peptide
  MOD_RES (11)..(12)..(13)..(14)..(15): Xaa is A or G
  MOD_RES (16)..(17)..(18)..(19): Xaa is A or G or absent
SKVIMEYQKYXXXXXXXXXIYLISIPSLDQSV

SEQ ID NO: 16711 - protein, 39 aa, Artificial Sequence
  Non-cyclic GFR-binding peptide
  MOD_RES (34)..(35): Xaa is C or S
  MOD_RES (12)..(13)..(14)..(15)..(16): Xaa is A or G
  MOD_RES (17)..(18)..(19)..(20): Xaa is A or G or absent
AKVVMNEYKFKXXXXXXXXXLYLVSIPELKTPAXXAKPV

SEQ ID NO: 16712 - protein, 38 aa, Artificial Sequence
  Non-cyclic GFR-binding peptide
  MOD_RES (2)..(4)..(38): Xaa is C or S
  MOD_RES (16)..(17)..(18)..(19)..(20): Xaa is A or G
  MOD_RES (21)..(22)..(23)..(24): Xaa is A or G or absent
RXGXGEVVMDEYQKYXXXXXXXXXIYLMSIPSLETPVX

SEQ ID NO: 16713 - protein, 37 aa, Artificial Sequence
  Non-cyclic GFR-binding peptide
  MOD_RES (1)..(3)..(35)..(36): Xaa is C or S
XGXARVVMNEYQKYIVNSSDDIYLVSIPSLQTPAXXP

SEQ ID NO: 16714 - protein, 39 aa, Artificial Sequence
  Non-cyclic GFR-binding peptide
  MOD_RES (1)..(35)..(36): Xaa is C or S
  MOD_RES (13)..(14)..(15)..(16)..(17): Xaa is A or G
  MOD_RES (18)..(19)..(20)..(21): Xaa is A or G or absent
XARVVMNEYKFKXXXXXXXXXLYLVSIPELQTPAXXPKP

SEQ ID NO: 16715 - protein, 33 aa, Artificial Sequence
  Non-cyclic GFR-binding peptide
  MOD_RES (31)..(32): Xaa is C or S
SRVIMEYKFKVKPKRGVLYLISIPELAQPVXXP

SEQ ID NO: 16716 - protein, 36 aa, Artificial Sequence
  Non-cyclic GFR-binding peptide
  MOD_RES (2)..(4)..(35)..(36): Xaa is C or S
SXKXSKVVMEYKFKVKPTRGVLYLISIPELDQPVXX

SEQ ID NO: 16717 - protein, 32 aa, Artificial Sequence
  Non-cyclic GFR-binding peptide
  MOD_RES (11)..(12)..(13)..(14)..(15): Xaa is A or G
  MOD_RES (16)..(17)..(18)..(19): Xaa is A or G or absent
EVVMDYHYKLXXXXXXXXXKYLISIPSLRAPV

SEQ ID NO: 16718 - protein, 40 aa, Artificial Sequence
  Non-cyclic GFR-binding peptide
  MOD_RES (34)..(35): Xaa is C or S
  MOD_RES (12)..(13)..(14)..(15)..(16): Xaa is A or G
  MOD_RES (17)..(18)..(19)..(20): Xaa is A or G or absent
AEVVMDYHYKLXXXXXXXXXKYLISIPSLRAPVXXSAPAA

SEQ ID NO: 16719 - protein, 37 aa, Artificial Sequence
  Non-cyclic GFR-binding peptide
  MOD_RES (1)..(34)..(35): Xaa is C or S
  MOD_RES (12)..(13)..(14)..(15)..(16): Xaa is A or G
  MOD_RES (17)..(18)..(19)..(20): Xaa is A or G or absent
XSKVIMEYKFKXXXXXXXXXLYLISIPELDQSVXXPS

SEQ ID NO: 16720 - protein, 35 aa, Artificial Sequence
  Non-cyclic GFR-binding peptide
  MOD_RES (2)..(4)..(35): Xaa is C or S
SXKXSRVIMEYKFKVKPKRGVLYLISIPELAQPVX

SEQ ID NO: 16721 - protein, 39 aa, Artificial Sequence
  Non-cyclic GFR-binding peptide
  MOD_RES (2)..(35)..(36): Xaa is C or S
  MOD_RES (13)..(14)..(15)..(16)..(17): Xaa is A or G
  MOD_RES (18)..(19)..(20)..(21): Xaa is A or G or absent
KXSKVIMEYQKYXXXXXXXXXIYLISIPSLDQSVXXPSA

SEQ ID NO: 16722 - protein, 31 aa, Artificial Sequence
  Non-cyclic GFR-binding peptide
AKVVMNEYQKYIVNNSSDIYLVSIPSLKTPA

SEQ ID NO: 16723 - protein, 33 aa, Artificial Sequence
  Non-cyclic GFR-binding peptide
  MOD_RES (33)..(33): Xaa is C or S
  MOD_RES (11)..(12)..(13)..(14)..(15): Xaa is A or G
  MOD_RES (16)..(17)..(18)..(19): Xaa is A or G or absent
EVVMDEYKFKXXXXXXXXXLYLMSIPELETPVX

SEQ ID NO: 16724 - protein, 37 aa, Artificial Sequence
  Non-cyclic GFR-binding peptide
  MOD_RES (1)..(3)..(35)..(36): Xaa is C or S
XGXAKVVMNEYKFKIVNNSSDLYLVSIPELKTPAXXA

SEQ ID NO: 16725 - protein, 41 aa, Artificial Sequence
  Non-cyclic GFR-binding peptide
  MOD_RES (2)..(4)..(35)..(36): Xaa is C or S
SXKXSRVIMEYKFKVKPKRGVLYLISIPELAQPVXXPAASA

SEQ ID NO: 16726 - protein, 41 aa, Artificial Sequence
  Non-cyclic GFR-binding peptide
  MOD_RES (1)..(3)..(36)..(37): Xaa is C or S
  MOD_RES (14)..(15)..(16)..(17)..(18): Xaa is A or G
  MOD_RES (19)..(20)..(21)..(22): Xaa is A or G or absent
XKXSRVIMEYQKYXXXXXXXXXIYLISIPSLAQPVXXPAAS

SEQ ID NO: 16727 - protein, 42 aa, Artificial Sequence
  Non-cyclic GFR-binding peptide
  MOD_RES (2)..(4)..(38)..(39): Xaa is C or S
  MOD_RES (16)..(17)..(18)..(19)..(20): Xaa is A or G
  MOD_RES (21)..(22)..(23)..(24): Xaa is A or G or absent
RXGXGEVVMEEYQKYXXXXXXXXXIYLMSIPSLETPVXXAKP

SEQ ID NO: 16728 - protein, 34 aa, Artificial Sequence
  Non-cyclic GFR-binding peptide
  MOD_RES (1)..(1): Xaa is C or S
  MOD_RES (13)..(14)..(15)..(16)..(17): Xaa is A or G
  MOD_RES (18)..(19)..(20)..(21): Xaa is A or G or absent
XESVAMGYHYKLXXXXXXXXXKYLISIPSLKTPV

SEQ ID NO: 16729 - protein, 38 aa, Artificial Sequence
  Non-cyclic GFR-binding peptide
  MOD_RES (2)..(34)..(35): Xaa is C or S
GXAEVVMDYHYKLVVNNAADKYLISIPSLRAPVXXSAP

SEQ ID NO: 16730 - protein, 36 aa, Artificial Sequence
  Non-cyclic GFR-binding peptide
  MOD_RES (2)..(2): Xaa is C or S
  MOD_RES (15)..(16)..(17)..(18)..(19): Xaa is A or G
  MOD_RES (20)..(21)..(22)..(23): Xaa is A or G or absent
GXEAVSMGEEYKFKXXXXXXXXXLYLVSIPELKTPV

SEQ ID NO: 16731 - protein, 35 aa, Artificial Sequence
  Non-cyclic GFR-binding peptide
  MOD_RES (1)..(1): Xaa is C or S
  MOD_RES (14)..(15)..(16)..(17)..(18): Xaa is A or G
  MOD_RES (19)..(20)..(21)..(22): Xaa is A or G or absent
XEAVSMGEEYQKYXXXXXXXXXIYLVSIPSLKTPV

SEQ ID NO: 16732 - protein, 39 aa, Artificial Sequence
  Non-cyclic GFR-binding peptide
  MOD_RES (2)..(4)..(36)..(37): Xaa is C or S
HXGXSRVVMNEYKFKIVNSSDDLYLVSIPELKTPAXXPK

SEQ ID NO: 16733 - protein, 39 aa, Artificial Sequence
  Non-cyclic GFR-binding peptide
  MOD_RES (2)..(36)..(37): Xaa is C or S
  MOD_RES (14)..(15)..(16)..(17)..(18): Xaa is A or G
  MOD_RES (19)..(20)..(21)..(22): Xaa is A or G or absent
GXESVAMGYHYKLXXXXXXXXXKYLISIPSLKTPVXXAK

SEQ ID NO: 16734 - protein, 35 aa, Artificial Sequence
  Non-cyclic GFR-binding peptide
  MOD_RES (2)..(35): Xaa is C or S
  MOD_RES (13)..(14)..(15)..(16)..(17): Xaa is A or G
  MOD_RES (18)..(19)..(20)..(21): Xaa is A or G or absent
KXSKVVMEYKFKXXXXXXXXXLYLISIPELDQPVX

SEQ ID NO: 16735 - protein, 36 aa, Artificial Sequence
  Non-cyclic GFR-binding peptide
  MOD_RES (1)..(32)..(33): Xaa is C or S
XSKVIMEYKFKIKPTKGILYLISIPELDQSVXXPSA

SEQ ID NO: 16736 - protein, 41 aa, Artificial Sequence
  Non-cyclic GFR-binding peptide
  MOD_RES (1)..(36)..(37): Xaa is C or S
  MOD_RES (14)..(15)..(16)..(17)..(18): Xaa is A or G
  MOD_RES (19)..(20)..(21)..(22): Xaa is A or G or absent
XEAVSMGEEYQKYXXXXXXXXXIYLVSIPSLKTPVXXAKGV

SEQ ID NO: 16737 - protein, 41 aa, Artificial Sequence
  Non-cyclic GFR-binding peptide
  MOD_RES (1)..(3)..(35)..(36): Xaa is C or S
XGXAKVVMNEYKFKIVNNSSDLYLVSIPELKTPAXXAKPVA

SEQ ID NO: 16738 - protein, 37 aa, Artificial Sequence
  Non-cyclic GFR-binding peptide
  MOD_RES (31)..(32): Xaa is C or S
EVVMEEYKFKVVKDYEDLYLMSIPELETPVXXAKPIS

SEQ ID NO: 16739 - protein, 40 aa, Artificial Sequence
  Non-cyclic GFR-binding peptide
  MOD_RES (1)..(3)..(35)..(36): Xaa is C or S
XGXAEVVMDEYKFKVVNNAADLYLISIPELRAPVXXSAPA

SEQ ID NO: 16740 - protein, 39 aa, Artificial Sequence
  Non-cyclic GFR-binding peptide
  MOD_RES (2)..(34)..(35): Xaa is C or S
GXSRVVMNEYKFKIVNSSDDLYLVSIPELKTPAXXPKPV

SEQ ID NO: 16741 - protein, 40 aa, Artificial Sequence
  Non-cyclic GFR-binding peptide
  MOD_RES (2)..(4)..(36)..(37): Xaa is C or S
HXGXARVVMNEYQKYIVNSSDDIYLVSIPSLQTPAXXPKP

SEQ ID NO: 16742 - protein, 37 aa, Artificial Sequence
  Non-cyclic GFR-binding peptide
  MOD_RES (1)..(35)..(36): Xaa is C or S
  MOD_RES (13)..(14)..(15)..(16)..(17): Xaa is A or G
  MOD_RES (18)..(19)..(20)..(21): Xaa is A or G or absent
XAEVVMDEYKFKXXXXXXXXXLYLISIPELRAPVXXS

SEQ ID NO: 16743 - protein, 35 aa, Artificial Sequence
  Non-cyclic GFR-binding peptide
  MOD_RES (2)..(34)..(35): Xaa is C or S
GXAEVVMDYHYKLVVNNAADKYLISIPSLRAPVXX

SEQ ID NO: 16744 - protein, 35 aa, Artificial Sequence
  Non-cyclic GFR-binding peptide
  MOD_RES (31)..(32): Xaa is C or S
EVVMDYHYKLVVNNAADKYLISIPSLRAPVXXSAP

SEQ ID NO: 16745 - protein, 37 aa, Artificial Sequence
  Non-cyclic GFR-binding peptide
  MOD_RES (1)..(33): Xaa is C or S
XSRVVMNEYKFKIVNSSDDLYLVSIPELKTPAXTPKT

SEQ ID NO: 16746 - protein, 38 aa, Artificial Sequence
  Non-cyclic GFR-binding peptide
  MOD_RES (1)..(3)..(35)..(36): Xaa is C or S
XGXESVAMGEYQKYYTVVGKDIYLISIPSLKTPVXXAK

SEQ ID NO: 16747 - protein, 43 aa, Artificial Sequence
  Non-cyclic GFR-binding peptide
  MOD_RES (2)..(4)..(38)..(39): Xaa is C or S
  MOD_RES (16)..(17)..(18)..(19)..(20): Xaa is A or G
  MOD_RES (21)..(22)..(23)..(24): Xaa is A or G or absent
HXGXAKVVMNEYKFKXXXXXXXXXLYLVSIPELKTPAXXAKPV

SEQ ID NO: 16748 - protein, 37 aa, Artificial Sequence
  Non-cyclic GFR-binding peptide
  MOD_RES (1)..(3)..(35)..(36): Xaa is C or S
XGXESVAMGYHYKLYTVVGKDKYLISIPSLKTPVXXA

SEQ ID NO: 16749 - protein, 36 aa, Artificial Sequence
  Non-cyclic GFR-binding peptide
  MOD_RES (1)..(3): Xaa is C or S
  MOD_RES (15)..(16)..(17)..(18)..(19): Xaa is A or G
  MOD_RES (20)..(21)..(22)..(23): Xaa is A or G or absent
XGXAKVVMNEYQKYXXXXXXXXXIYLVSIPSLKTPA

SEQ ID NO: 16750 - protein, 35 aa, Artificial Sequence
  Non-cyclic GFR-binding peptide
  MOD_RES (31)..(31): Xaa is C or S
RVVMNEYQKYIVNSSDDIYLVSIPSLKTPAXTPKT

SEQ ID NO: 16751 - protein, 37 aa, Artificial Sequence
  Non-cyclic GFR-binding peptide
  MOD_RES (34)..(35): Xaa is C or S
  MOD_RES (12)..(13)..(14)..(15)..(16): Xaa is A or G
  MOD_RES (17)..(18)..(19)..(20): Xaa is A or G or absent
AEVVMDYHYKLXXXXXXXXXKYLISIPSLRAPVXXSA

SEQ ID NO: 16752 - protein, 34 aa, Artificial Sequence
  Non-cyclic GFR-binding peptide
  MOD_RES (33)..(33): Xaa is C or S
  MOD_RES (11)..(12)..(13)..(14)..(15): Xaa is A or G
  MOD_RES (16)..(17)..(18)..(19): Xaa is A or G or absent
RVVMNEYKFKXXXXXXXXXLYLVSIPELKTPAXT

SEQ ID NO: 16753 - protein, 38 aa, Artificial Sequence
  Non-cyclic GFR-binding peptide
  MOD_RES (33)..(34): Xaa is C or S
  MOD_RES (11)..(12)..(13)..(14)..(15): Xaa is A or G
  MOD_RES (16)..(17)..(18)..(19): Xaa is A or G or absent
EVVMEEYKFKXXXXXXXXXLYLMSIPELETPVXXAKPI

SEQ ID NO: 16754 - protein, 39 aa, Artificial Sequence
  Non-cyclic GFR-binding peptide
  MOD_RES (34)..(35): Xaa is C or S
  MOD_RES (12)..(13)..(14)..(15)..(16): Xaa is A or G
  MOD_RES (17)..(18)..(19)..(20): Xaa is A or G or absent
GEVVMDEYQKYXXXXXXXXXIYLMSIPSLETPVXXAKPI

SEQ ID NO: 16755 - protein, 40 aa, Artificial Sequence
  Non-cyclic GFR-binding peptide
  MOD_RES (1)..(35)..(36): Xaa is C or S
  MOD_RES (13)..(14)..(15)..(16)..(17): Xaa is A or G
  MOD_RES (18)..(19)..(20)..(21): Xaa is A or G or absent
XGEVVMEEYKFKXXXXXXXXXLYLMSIPELETPVXXAKPI

SEQ ID NO: 16756 - protein, 40 aa, Artificial Sequence
  Non-cyclic GFR-binding peptide
  MOD_RES (1)..(3)..(35)..(36): Xaa is C or S
XGXAKVVMNEYKFKIVNNSSDLYLVSIPELKTPAXXAKPV

SEQ ID NO: 16757 - protein, 36 aa, Artificial Sequence
  Non-cyclic GFR-binding peptide
  MOD_RES (31)..(32): Xaa is C or S
SKVIMEYQKYIKPTKGIIYLISIPSLDQSVXXPSAS

SEQ ID NO: 16758 - protein, 40 aa, Artificial Sequence
  Non-cyclic GFR-binding peptide
  MOD_RES (2)..(36): Xaa is C or S
  MOD_RES (14)..(15)..(16)..(17)..(18): Xaa is A or G
  MOD_RES (19)..(20)..(21)..(22): Xaa is A or G or absent
GXSRVVMNEYKFKXXXXXXXXXLYLVSIPELKTPAXTPKT

SEQ ID NO: 16759 - protein, 40 aa, Artificial Sequence
  Non-cyclic GFR-binding peptide
  MOD_RES (2)..(4)..(38)..(39): Xaa is C or S
  MOD_RES (16)..(17)..(18)..(19)..(20): Xaa is A or G
  MOD_RES (21)..(22)..(23)..(24): Xaa is A or G or absent
HXGXSRVVMNEYKFKXXXXXXXXXLYLVSIPELKTPAXXP

SEQ ID NO: 16760 - protein, 37 aa, Artificial Sequence
  Non-cyclic GFR-binding peptide
  MOD_RES (33)..(34): Xaa is C or S
  MOD_RES (11)..(12)..(13)..(14)..(15): Xaa is A or G
  MOD_RES (16)..(17)..(18)..(19): Xaa is A or G or absent
SKVIMEYQKYXXXXXXXXXIYLISIPSLDQSVXXPSA

SEQ ID NO: 16761 - protein, 42 aa, Artificial Sequence
  Non-cyclic GFR-binding peptide
  MOD_RES (2)..(4)..(36)..(37): Xaa is C or S
RXGXESVAMGYHYKLYTVVGKDKYLISIPSLKTPVXXAKSAK

SEQ ID NO: 16762 - protein, 41 aa, Artificial Sequence
  Non-cyclic GFR-binding peptide
  MOD_RES (2)..(35)..(36): Xaa is C or S
GXEAVSMGEEYQKYTPVGMDDIYLVSIPSLKTPVXXAKGVK

SEQ ID NO: 16763 - protein, 32 aa, Artificial Sequence
  Non-cyclic GFR-binding peptide
  MOD_RES (1)..(1): Xaa is C or S
XAEVVMDYHYKLVVNNAADKYLISIPSLRAPV

SEQ ID NO: 16764 - protein, 39 aa, Artificial Sequence
  Non-cyclic GFR-binding peptide
  MOD_RES (1)..(3)..(37)..(38): Xaa is C or S
  MOD_RES (15)..(16)..(17)..(18)..(19): Xaa is A or G
  MOD_RES (20)..(21)..(22)..(23): Xaa is A or G or absent
XGXARVVMNEYKFKXXXXXXXXXLYLVSIPELQTPAXXP

SEQ ID NO: 16765 - protein, 38 aa, Artificial Sequence
  Non-cyclic GFR-binding peptide
  MOD_RES (1)..(3)..(37)..(38): Xaa is C or S
  MOD_RES (15)..(16)..(17)..(18)..(19): Xaa is A or G
  MOD_RES (20)..(21)..(22)..(23): Xaa is A or G or absent
XGXESVAMGYHYKLXXXXXXXXXKYLISIPSLKTPVXX

SEQ ID NO: 16766 - protein, 39 aa, Artificial Sequence
  Non-cyclic GFR-binding peptide
  MOD_RES (2)..(33)..(34): Xaa is C or S
KXSKVVMEYQKYVKPTRGVIYLISIPSLDQPVXXPSASA

SEQ ID NO: 16767 - protein, 38 aa, Artificial Sequence
  Non-cyclic GFR-binding peptide
  MOD_RES (2)..(36)..(37): Xaa is C or S
  MOD_RES (14)..(15)..(16)..(17)..(18): Xaa is A or G
  MOD_RES (19)..(20)..(21)..(22): Xaa is A or G or absent
GXSRVVMNEYQKYXXXXXXXXXIYLVSIPSLKTPAXXP

SEQ ID NO: 16768 - protein, 40 aa, Artificial Sequence
  Non-cyclic GFR-binding peptide
  MOD_RES (1)..(3)..(37): Xaa is C or S
  MOD_RES (15)..(16)..(17)..(18)..(19): Xaa is A or G
  MOD_RES (20)..(21)..(22)..(23): Xaa is A or G or absent
XGXSRVVMNEYQKYXXXXXXXXXIYLVSIPSLKTPAXTPK

SEQ ID NO: 16769 - protein, 38 aa, Artificial Sequence
  Non-cyclic GFR-binding peptide
  MOD_RES (2)..(4): Xaa is C or S
  MOD_RES (17)..(18)..(19)..(20)..(21): Xaa is A or G
  MOD_RES (22)..(23)..(24)..(25): Xaa is A or G or absent
RXGXEAVSMGEEYKFKXXXXXXXXXLYLVSIPELKTPV

SEQ ID NO: 16770 - protein, 38 aa, Artificial Sequence
  Non-cyclic GFR-binding peptide
  MOD_RES (33)..(34): Xaa is C or S
  MOD_RES (11)..(12)..(13)..(14)..(15): Xaa is A or G
  MOD_RES (16)..(17)..(18)..(19): Xaa is A or G or absent
SVAMGRYKKLXXXXXXXXXFYLISIANLKTPVXXAKSA

SEQ ID NO: 16771 - protein, 39 aa, Artificial Sequence
  Non-cyclic GFR-binding peptide
  MOD_RES (2)..(33)..(34): Xaa is C or S
KXSKVVMEYKFKVKPTRGVLYLISIPELDQPVXXPSASA

SEQ ID NO: 16772 - protein, 40 aa, Artificial Sequence
  Non-cyclic GFR-binding peptide
  MOD_RES (2)..(34)..(35): Xaa is C or S
GXGEVVMDEYQKYVVKENEDIYLMSIPSLETPVXXAKPIK

SEQ ID NO: 16773 - protein, 38 aa, Artificial Sequence
  Non-cyclic GFR-binding peptide
  MOD_RES (1)..(32)..(33): Xaa is C or S
XSKVVMEYQKYVKPTRGVIYLISIPSLDQPVXXPSASA

SEQ ID NO: 16774 - protein, 38 aa, Artificial Sequence
  Non-cyclic GFR-binding peptide
  MOD_RES (1)..(35)..(36): Xaa is C or S
  MOD_RES (13)..(14)..(15)..(16)..(17): Xaa is A or G
  MOD_RES (18)..(19)..(20)..(21): Xaa is A or G or absent
XESVAMGRYKKLXXXXXXXXXFYLISIANLKTPVXXAK

SEQ ID NO: 16775 - protein, 34 aa, Artificial Sequence
  Non-cyclic GFR-binding peptide
  MOD_RES (31)..(32): Xaa is C or S
SVAMGYHYKLYTVVGKDKYLISIPSLKTPVXXAK

SEQ ID NO: 16776 - protein, 40 aa, Artificial Sequence
  Non-cyclic GFR-binding peptide
  MOD_RES (2)..(4)..(36): Xaa is C or S
HXGXSRVVMNEYQKYIVNSSDDIYLVSIPSLKTPAXTPKT

SEQ ID NO: 16777 - protein, 36 aa, Artificial Sequence
  Non-cyclic GFR-binding peptide
  MOD_RES (2)..(36): Xaa is C or S
  MOD_RES (14)..(15)..(16)..(17)..(18): Xaa is A or G
  MOD_RES (19)..(20)..(21)..(22): Xaa is A or G or absent
GXSRVVMNEYKFKXXXXXXXXXLYLVSIPELKTPAX

SEQ ID NO: 16778 - protein, 35 aa, Artificial Sequence
  Non-cyclic GFR-binding peptide
  MOD_RES (34)..(35): Xaa is C or S
  MOD_RES (12)..(13)..(14)..(15)..(16): Xaa is A or G
  MOD_RES (17)..(18)..(19)..(20): Xaa is A or G or absent
AEVVMDYHYKLXXXXXXXXXKYLISIPSLRAPVXX

SEQ ID NO: 16779 - protein, 31 aa, Artificial Sequence
  Non-cyclic GFR-binding peptide
ESVAMGYHYKLYTVVGKDKYLISIPSLKTPV

SEQ ID NO: 16780 - protein, 34 aa, Artificial Sequence
  Non-cyclic GFR-binding peptide
  MOD_RES (2)..(4): Xaa is C or S
SXKXSRVIMEYQKYVKPKRGVIYLISIPSLAQPV

SEQ ID NO: 16781 - protein, 38 aa, Artificial Sequence
  Non-cyclic GFR-binding peptide
  MOD_RES (34)..(35): Xaa is C or S
  MOD_RES (12)..(13)..(14)..(15)..(16): Xaa is A or G
  MOD_RES (17)..(18)..(19)..(20): Xaa is A or G or absent
ARVVMNEYKFKXXXXXXXXXLYLVSIPELQTPAXXPKP

SEQ ID NO: 16782 - protein, 44 aa, Artificial Sequence
  Non-cyclic GFR-binding peptide
  MOD_RES (2)..(4)..(38)..(39): Xaa is C or S
  MOD_RES (16)..(17)..(18)..(19)..(20): Xaa is A or G
  MOD_RES (21)..(22)..(23)..(24): Xaa is A or G or absent
RXGXGEVVMEEYQKYXXXXXXXXXIYLMSIPSLETPVXXAKPIS

SEQ ID NO: 16783 - protein, 38 aa, Artificial Sequence
  Non-cyclic GFR-binding peptide
  MOD_RES (2)..(34)..(35): Xaa is C or S
GXARVVMNEYQKYIVNSSDDIYLVSIPSLQTPAXXPKP

SEQ ID NO: 16784 - protein, 36 aa, Artificial Sequence
  Non-cyclic GFR-binding peptide
  MOD_RES (1)..(3)..(35)..(36): Xaa is C or S
XGXAEVVMDYHYKLVVNNAADKYLISIPSLRAPVXX

SEQ ID NO: 16785 - protein, 43 aa, Artificial Sequence
  Non-cyclic GFR-binding peptide
  MOD_RES (1)..(3)..(37)..(38): Xaa is C or S
  MOD_RES (15)..(16)..(17)..(18)..(19): Xaa is A or G
  MOD_RES (20)..(21)..(22)..(23): Xaa is A or G or absent
XGXESVAMGEYQKYXXXXXXXXXIYLISIPSLKTPVXXAKSAK

SEQ ID NO: 16786 - protein, 38 aa, Artificial Sequence
  Non-cyclic GFR-binding peptide
  MOD_RES (2)..(4)..(36)..(37): Xaa is C or S
RXGXAEVVMDYHYKLVVNNAADKYLISIPSLRAPVXXS

SEQ ID NO: 16787 - protein, 42 aa, Artificial Sequence
  Non-cyclic GFR-binding peptide
  MOD_RES (2)..(4)..(38)..(39): Xaa is C or S
  MOD_RES (16)..(17)..(18)..(19)..(20): Xaa is A or G
  MOD_RES (21)..(22)..(23)..(24): Xaa is A or G or absent
RXGXAEVVMDEYKFKXXXXXXXXXLYLISIPELRAPVXXSAP

SEQ ID NO: 16788 - protein, 31 aa, Artificial Sequence
  Non-cyclic GFR-binding peptide
  MOD_RES (1)..(1): Xaa is C or S
XSKVVMEYKFKVKPTRGVLYLISIPELDQPV

SEQ ID NO: 16789 - protein, 34 aa, Artificial Sequence
  Non-cyclic GFR-binding peptide
  MOD_RES (2)..(2): Xaa is C or S
GXEAVSMGEEYQKYTPVGMDDIYLVSIPSLKTPV

SEQ ID NO: 16790 - protein, 35 aa, Artificial Sequence
  Non-cyclic GFR-binding peptide
  MOD_RES (2)..(34)..(35): Xaa is C or S
GXGEVVMEEYQKYVVKDYEDIYLMSIPSLETPVXX

SEQ ID NO: 16791 - protein, 38 aa, Artificial Sequence
  Non-cyclic GFR-binding peptide
  MOD_RES (34)..(35): Xaa is C or S
  MOD_RES (12)..(13)..(14)..(15)..(16): Xaa is A or G
  MOD_RES (17)..(18)..(19)..(20): Xaa is A or G or absent
GEVVMDEYQKYXXXXXXXXXIYLMSIPSLETPVXXAKP

SEQ ID NO: 16792 - protein, 37 aa, Artificial Sequence
  Non-cyclic GFR-binding peptide
  MOD_RES (1)..(3)..(37): Xaa is C or S
  MOD_RES (15)..(16)..(17)..(18)..(19): Xaa is A or G
  MOD_RES (20)..(21)..(22)..(23): Xaa is A or G or absent
XGXAEVVMDEYKFKXXXXXXXXXLYLISIPELRAPVX

SEQ ID NO: 16793 - protein, 33 aa, Artificial Sequence
  Non-cyclic GFR-binding peptide
  MOD_RES (2)..(33): Xaa is C or S
KXSKVIMEYQKYIKPTKGIIYLISIPSLDQSVX

SEQ ID NO: 16794 - protein, 38 aa, Artificial Sequence
  Non-cyclic GFR-binding peptide
  MOD_RES (1)..(35)..(36): Xaa is C or S
  MOD_RES (13)..(14)..(15)..(16)..(17): Xaa is A or G
  MOD_RES (18)..(19)..(20)..(21): Xaa is A or G or absent
XSRVVMNEYQKYXXXXXXXXXIYLVSIPSLKTPAXXPK

SEQ ID NO: 16795 - protein, 40 aa, Artificial Sequence
  Non-cyclic GFR-binding peptide
  MOD_RES (2)..(4)..(38)..(39): Xaa is C or S
  MOD_RES (16)..(17)..(18)..(19)..(20): Xaa is A or G
  MOD_RES (21)..(22)..(23)..(24): Xaa is A or G or absent
RXGXGEVVMDEYKFKXXXXXXXXXLYLMSIPELETPVXXA

SEQ ID NO: 16796 - protein, 40 aa, Artificial Sequence
  Non-cyclic GFR-binding peptide
  MOD_RES (2)..(4)..(39)..(40): Xaa is C or S
  MOD_RES (17)..(18)..(19)..(20)..(21): Xaa is A or G
  MOD_RES (22)..(23)..(24)..(25): Xaa is A or G or absent
RXGXEAVSMGEEYKFKXXXXXXXXXLYLVSIPELKTPVXX

SEQ ID NO: 16797 - protein, 36 aa, Artificial Sequence
  Non-cyclic GFR-binding peptide
  MOD_RES (32)..(33): Xaa is C or S
GEVVMEEYQKYVVKDYEDIYLMSIPSLETPVXXAKP

SEQ ID NO: 16798 - protein, 36 aa, Artificial Sequence
  Non-cyclic GFR-binding peptide
  MOD_RES (31)..(32): Xaa is C or S
EVVMDYHYKLVVNNAADKYLISIPSLRAPVXXSAPA

SEQ ID NO: 16799 - protein, 38 aa, Artificial Sequence
  Non-cyclic GFR-binding peptide
  MOD_RES (1)..(35)..(36): Xaa is C or S
  MOD_RES (13)..(14)..(15)..(16)..(17): Xaa is A or G
  MOD_RES (18)..(19)..(20)..(21): Xaa is A or G or absent
XAKVVMNEYKFKXXXXXXXXXLYLVSIPELKTPAXXAK

SEQ ID NO: 16800 - protein, 37 aa, Artificial Sequence
  Non-cyclic GFR-binding peptide
  MOD_RES (33)..(34): Xaa is C or S
  MOD_RES (11)..(12)..(13)..(14)..(15): Xaa is A or G
  MOD_RES (16)..(17)..(18)..(19): Xaa is A or G or absent
RVVMNEYQKYXXXXXXXXXIYLVSIPSLQTPAXXPKP

SEQ ID NO: 16801 - protein, 34 aa, Artificial Sequence
  Non-cyclic GFR-binding peptide
  MOD_RES (2)..(34): Xaa is C or S
GXAEVVMDEYKFKVVNNAADLYLISIPELRAPVX

SEQ ID NO: 16802 - protein, 35 aa, Artificial Sequence
  Non-cyclic GFR-binding peptide
  MOD_RES (2)..(4): Xaa is C or S
HXGXSRVVMNEYKFKIVNSSDDLYLVSIPELKTPA

SEQ ID NO: 16803 - protein, 33 aa, Artificial Sequence
  Non-cyclic GFR-binding peptide
  MOD_RES (2)..(2): Xaa is C or S
GXESVAMGYHYKLYTVVGKDKYLISIPSLKTPV

SEQ ID NO: 16804 - protein, 36 aa, Artificial Sequence
  Non-cyclic GFR-binding peptide
  MOD_RES (32)..(33): Xaa is C or S
GEVVMDEYKFKVVKENEDLYLMSIPELETPVXXAKP

SEQ ID NO: 16805 - protein, 37 aa, Artificial Sequence
  Non-cyclic GFR-binding peptide
  MOD_RES (34)..(35): Xaa is C or S
  MOD_RES (12)..(13)..(14)..(15)..(16): Xaa is A or G
  MOD_RES (17)..(18)..(19)..(20): Xaa is A or G or absent
GEVVMDEYKFKXXXXXXXXXLYLMSIPELETPVXXAK

SEQ ID NO: 16806 - protein, 40 aa, Artificial Sequence
  Non-cyclic GFR-binding peptide
  MOD_RES (1)..(3)..(37): Xaa is C or S
  MOD_RES (15)..(16)..(17)..(18)..(19): Xaa is A or G
  MOD_RES (20)..(21)..(22)..(23): Xaa is A or G or absent
XGXSRVVMNEYKFKXXXXXXXXXLYLVSIPELKTPAXTPK

SEQ ID NO: 16807 - protein, 33 aa, Artificial Sequence
  Non-cyclic GFR-binding peptide
  MOD_RES (33)..(33): Xaa is C or S
  MOD_RES (11)..(12)..(13)..(14)..(15): Xaa is A or G
  MOD_RES (16)..(17)..(18)..(19): Xaa is A or G or absent
SVAMGYHYKLXXXXXXXXXKYLISIPSLKTPVX

SEQ ID NO: 16808 - protein, 36 aa, Artificial Sequence
  Non-cyclic GFR-binding peptide
  MOD_RES (2)..(4): Xaa is C or S
  MOD_RES (15)..(16)..(17)..(18)..(19): Xaa is A or G
  MOD_RES (20)..(21)..(22)..(23): Xaa is A or G or absent
SXKXSRVIMEYKFKXXXXXXXXXLYLISIPELAQPV

SEQ ID NO: 16809 - protein, 36 aa, Artificial Sequence
  Non-cyclic GFR-binding peptide
  MOD_RES (33)..(34): Xaa is C or S
  MOD_RES (11)..(12)..(13)..(14)..(15): Xaa is A or G
  MOD_RES (16)..(17)..(18)..(19): Xaa is A or G or absent
SKVIMEYKFKXXXXXXXXXLYLISIPELDQSVXXPS

SEQ ID NO: 16810 - protein, 39 aa, Artificial Sequence
  Non-cyclic GFR-binding peptide
  MOD_RES (1)..(36)..(37): Xaa is C or S
  MOD_RES (14)..(15)..(16)..(17)..(18): Xaa is A or G
  MOD_RES (19)..(20)..(21)..(22): Xaa is A or G or absent
XEAVSMGEEYKFKXXXXXXXXXLYLVSIPELKTPVXXAK

SEQ ID NO: 16811 - protein, 35 aa, Artificial Sequence
  Non-cyclic GFR-binding peptide
  MOD_RES (2)..(2): Xaa is C or S
  MOD_RES (14)..(15)..(16)..(17)..(18): Xaa is A or G
  MOD_RES (19)..(20)..(21)..(22): Xaa is A or G or absent
GXESVAMGEYQKYXXXXXXXXXIYLISIPSLKTPV

SEQ ID NO: 16812 - protein, 42 aa, Artificial Sequence
  Non-cyclic GFR-binding peptide
  MOD_RES (1)..(3)..(36)..(37): Xaa is C or S
  MOD_RES (14)..(15)..(16)..(17)..(18): Xaa is A or G
  MOD_RES (19)..(20)..(21)..(22): Xaa is A or G or absent
XKXSKVIMEYKFKXXXXXXXXXLYLISIPELDQSVXXPSASA

SEQ ID NO: 16813 - protein, 30 aa, Artificial Sequence
  Non-cyclic GFR-binding peptide
EVVMEEYQKYVVKDYEDIYLMSIPSLETPV

SEQ ID NO: 16814 - protein, 37 aa, Artificial Sequence
  Non-cyclic GFR-binding peptide
  MOD_RES (2)..(34)..(35): Xaa is C or S
GXARVVMNEYQKYIVNSSDDIYLVSIPSLQTPAXXPK

SEQ ID NO: 16815 - protein, 39 aa, Artificial Sequence
  Non-cyclic GFR-binding peptide
  MOD_RES (2)..(4)..(35)..(36): Xaa is C or S
SXKXSRVIMEYKFKVKPKRGVLYLISIPELAQPVXXPAA

SEQ ID NO: 16816 - protein, 35 aa, Artificial Sequence
  Non-cyclic GFR-binding peptide
  MOD_RES (1)..(33)..(34): Xaa is C or S
XSRVVMNEYKFKIVNSSDDLYLVSIPELKTPAXXP

SEQ ID NO: 16817 - protein, 37 aa, Artificial Sequence
  Non-cyclic GFR-binding peptide
  MOD_RES (35)..(36): Xaa is C or S
  MOD_RES (13)..(14)..(15)..(16)..(17): Xaa is A or G
  MOD_RES (18)..(19)..(20)..(21): Xaa is A or G or absent
EAVSMGEEYKFKXXXXXXXXXLYLVSIPELKTPVXXA

SEQ ID NO: 16818 - protein, 40 aa, Artificial Sequence
  Non-cyclic GFR-binding peptide
  MOD_RES (2)..(4)..(38): Xaa is C or S
  MOD_RES (16)..(17)..(18)..(19)..(20): Xaa is A or G
  MOD_RES (21)..(22)..(23)..(24): Xaa is A or G or absent
HXGXSRVVMNEYQKYXXXXXXXXXIYLVSIPSLKTPAXTP

SEQ ID NO: 16819 - protein, 38 aa, Artificial Sequence
  Non-cyclic GFR-binding peptide
  MOD_RES (2)..(35)..(36): Xaa is C or S
  MOD_RES (13)..(14)..(15)..(16)..(17): Xaa is A or G
  MOD_RES (18)..(19)..(20)..(21): Xaa is A or G or absent
KXSRVIMEYQKYXXXXXXXXXIYLISIPSLAQPVXXPA

SEQ ID NO: 16820 - protein, 36 aa, Artificial Sequence
  Non-cyclic GFR-binding peptide
  MOD_RES (2)..(36): Xaa is C or S
  MOD_RES (14)..(15)..(16)..(17)..(18): Xaa is A or G
  MOD_RES (19)..(20)..(21)..(22): Xaa is A or G or absent
GXAEVVMDEYKFKXXXXXXXXXLYLISIPELRAPVX

SEQ ID NO: 16821 - protein, 38 aa, Artificial Sequence
  Non-cyclic GFR-binding peptide
  MOD_RES (2)..(4)..(37)..(38): Xaa is C or S
RXGXEAVSMGEEYKFKTPVGMDDLYLVSIPELKTPVXX

SEQ ID NO: 16822 - protein, 35 aa, Artificial Sequence
  Non-cyclic GFR-binding peptide
  MOD_RES (2)..(4): Xaa is C or S
RXGXGEVVMDEYQKYVVKENEDIYLMSIPSLETPV

SEQ ID NO: 16823 - protein, 44 aa, Artificial Sequence
  Non-cyclic GFR-binding peptide
  MOD_RES (2)..(4)..(38): Xaa is C or S
  MOD_RES (16)..(17)..(18)..(19)..(20): Xaa is A or G
  MOD_RES (21)..(22)..(23)..(24): Xaa is A or G or absent
HXGXSRVVMNEYKFKXXXXXXXXXLYLVSIPELKTPAXTPKTVH

SEQ ID NO: 16824 - protein, 32 aa, Artificial Sequence
  Non-cyclic GFR-binding peptide
  MOD_RES (11)..(12)..(13)..(14)..(15): Xaa is A or G
  MOD_RES (16)..(17)..(18)..(19): Xaa is A or G or absent
SVAMGYHYKLXXXXXXXXXKYLISIPSLKTPV

SEQ ID NO: 16825 - protein, 32 aa, Artificial Sequence
  Non-cyclic GFR-binding peptide
  MOD_RES (1)..(1): Xaa is C or S
XAEVVMDRYKKLVVNNAADFYLISIANLRAPV

SEQ ID NO: 16826 - protein, 40 aa, Artificial Sequence
  Non-cyclic GFR-binding peptide
  MOD_RES (2)..(4)..(37)..(38): Xaa is C or S
  MOD_RES (15)..(16)..(17)..(18)..(19): Xaa is A or G
  MOD_RES (20)..(21)..(22)..(23): Xaa is A or G or absent
SXKXSRVIMEYKFKXXXXXXXXXLYLISIPELAQPVXXPA

SEQ ID NO: 16827 - protein, 37 aa, Artificial Sequence
  Non-cyclic GFR-binding peptide
  MOD_RES (32)..(33): Xaa is C or S
AKVVMNEYKFKIVNNSSDLYLVSIPELKTPAXXAKPV

SEQ ID NO: 16828 - protein, 36 aa, Artificial Sequence
  Non-cyclic GFR-binding peptide
  MOD_RES (31)..(32): Xaa is C or S
SVAMGEYQKYYTVVGKDIYLISIPSLKTPVXXAKSA

SEQ ID NO: 16829 - protein, 35 aa, Artificial Sequence
  Non-cyclic GFR-binding peptide
  MOD_RES (1)..(35): Xaa is C or S
  MOD_RES (13)..(14)..(15)..(16)..(17): Xaa is A or G
  MOD_RES (18)..(19)..(20)..(21): Xaa is A or G or absent
XGEVVMDEYQKYXXXXXXXXXIYLMSIPSLETPVX

SEQ ID NO: 16830 - protein, 34 aa, Artificial Sequence
  Non-cyclic GFR-binding peptide
  MOD_RES (33)..(34): Xaa is C or S
  MOD_RES (11)..(12)..(13)..(14)..(15): Xaa is A or G
  MOD_RES (16)..(17)..(18)..(19): Xaa is A or G or absent
SKVVMEYKFKXXXXXXXXXLYLISIPELDQPVXX

SEQ ID NO: 16831 - protein, 40 aa, Artificial Sequence
  Non-cyclic GFR-binding peptide
  MOD_RES (1)..(35)..(36): Xaa is C or S
  MOD_RES (13)..(14)..(15)..(16)..(17): Xaa is A or G
  MOD_RES (18)..(19)..(20)..(21): Xaa is A or G or absent
XESVAMGEYQKYXXXXXXXXXIYLISIPSLKTPVXXAKSA

SEQ ID NO: 16832 - protein, 39 aa, Artificial Sequence
  Non-cyclic GFR-binding peptide
  MOD_RES (2)..(4)..(38)..(39): Xaa is C or S
  MOD_RES (16)..(17)..(18)..(19)..(20): Xaa is A or G
  MOD_RES (21)..(22)..(23)..(24): Xaa is A or G or absent
RXGXESVAMGYHYKLXXXXXXXXXKYLISIPSLKTPVXX

SEQ ID NO: 16833 - protein, 38 aa, Artificial Sequence
  Non-cyclic GFR-binding peptide
  MOD_RES (1)..(3)..(37)..(38): Xaa is C or S
  MOD_RES (15)..(16)..(17)..(18)..(19): Xaa is A or G
  MOD_RES (20)..(21)..(22)..(23): Xaa is A or G or absent
XGXGEVVMDEYQKYXXXXXXXXXIYLMSIPSLETPVXX

SEQ ID NO: 16834 - protein, 32 aa, Artificial Sequence
  Non-cyclic GFR-binding peptide
  MOD_RES (11)..(12)..(13)..(14)..(15): Xaa is A or G
  MOD_RES (16)..(17)..(18)..(19): Xaa is A or G or absent
KVVMNEYQKYXXXXXXXXXIYLVSIPSLKTPA

SEQ ID NO: 16835 - protein, 36 aa, Artificial Sequence
  Non-cyclic GFR-binding peptide
  MOD_RES (2)..(4)..(36): Xaa is C or S
RXGXAEVVMDRYKKLVVNNAADFYLISIANLRAPVX

SEQ ID NO: 16836 - protein, 33 aa, Artificial Sequence
  Non-cyclic GFR-binding peptide
  MOD_RES (33)..(33): Xaa is C or S
  MOD_RES (11)..(12)..(13)..(14)..(15): Xaa is A or G
  MOD_RES (16)..(17)..(18)..(19): Xaa is A or G or absent
KVVMNEYQKYXXXXXXXXXIYLVSIPSLKTPAX

SEQ ID NO: 16837 - protein, 35 aa, Artificial Sequence
  Non-cyclic GFR-binding peptide
  MOD_RES (1)..(3)..(35): Xaa is C or S
XGXAKVVMNEYQKYIVNNSSDIYLVSIPSLKTPAX

SEQ ID NO: 16838 - protein, 32 aa, Artificial Sequence
  Non-cyclic GFR-binding peptide
  MOD_RES (11)..(12)..(13)..(14)..(15): Xaa is A or G
  MOD_RES (16)..(17)..(18)..(19): Xaa is A or G or absent
RVVMNEYQKYXXXXXXXXXIYLVSIPSLKTPA

SEQ ID NO: 16839 - protein, 33 aa, Artificial Sequence
  Non-cyclic GFR-binding peptide
  MOD_RES (33)..(33): Xaa is C or S
  MOD_RES (11)..(12)..(13)..(14)..(15): Xaa is A or G
  MOD_RES (16)..(17)..(18)..(19): Xaa is A or G or absent
RVVMNEYQKYXXXXXXXXXIYLVSIPSLKTPAX

SEQ ID NO: 16840 - protein, 39 aa, Artificial Sequence
  Non-cyclic GFR-binding peptide
  MOD_RES (35)..(36): Xaa is C or S
  MOD_RES (13)..(14)..(15)..(16)..(17): Xaa is A or G
  MOD_RES (18)..(19)..(20)..(21): Xaa is A or G or absent
EAVSMGEEYQKYXXXXXXXXXIYLVSIPSLKTPVXXAKG

SEQ ID NO: 16841 - protein, 36 aa, Artificial Sequence
  Non-cyclic GFR-binding peptide
  MOD_RES (1)..(35): Xaa is C or S
  MOD_RES (13)..(14)..(15)..(16)..(17): Xaa is A or G
  MOD_RES (18)..(19)..(20)..(21): Xaa is A or G or absent
XSRVVMNEYKFKXXXXXXXXXLYLVSIPELKTPAXT

SEQ ID NO: 16842 - protein, 33 aa, Artificial Sequence
  Non-cyclic GFR-binding peptide
  MOD_RES (12)..(13)..(14)..(15)..(16): Xaa is A or G
  MOD_RES (17)..(18)..(19)..(20): Xaa is A or G or absent
AKVVMNEYKFKXXXXXXXXXLYLVSIPELKTPA

SEQ ID NO: 16843 - protein, 39 aa, Artificial Sequence
  Non-cyclic GFR-binding peptide
  MOD_RES (34)..(35): Xaa is C or S
  MOD_RES (12)..(13)..(14)..(15)..(16): Xaa is A or G
  MOD_RES (17)..(18)..(19)..(20): Xaa is A or G or absent
ESVAMGRYKKLXXXXXXXXXFYLISIANLKTPVXXAKSA

SEQ ID NO: 16844 - protein, 39 aa, Artificial Sequence
  Non-cyclic GFR-binding peptide
  MOD_RES (2)..(34)..(35): Xaa is C or S
GXAKVVMNEYQKYIVNNSSDIYLVSIPSLKTPAXXAKPV

SEQ ID NO: 16845 - protein, 32 aa, Artificial Sequence
  Non-cyclic GFR-binding peptide
  MOD_RES (32)..(32): Xaa is C or S
AKVVMNEYKFKIVNNSSDLYLVSIPELKTPAX

SEQ ID NO: 16846 - protein, 39 aa, Artificial Sequence
  Non-cyclic GFR-binding peptide
  MOD_RES (2)..(36): Xaa is C or S
  MOD_RES (14)..(15)..(16)..(17)..(18): Xaa is A or G
  MOD_RES (19)..(20)..(21)..(22): Xaa is A or G or absent
GXSRVVMNEYKFKXXXXXXXXXLYLVSIPELKTPAXTPK

SEQ ID NO: 16847 - protein, 39 aa, Artificial Sequence
  Non-cyclic GFR-binding peptide
  MOD_RES (35)..(36): Xaa is C or S
  MOD_RES (13)..(14)..(15)..(16)..(17): Xaa is A or G
  MOD_RES (18)..(19)..(20)..(21): Xaa is A or G or absent
EAVSMGEEYKFKXXXXXXXXXLYLVSIPELKTPVXXAKG

SEQ ID NO: 16848 - protein, 37 aa, Artificial Sequence
  Non-cyclic GFR-binding peptide
  MOD_RES (31)..(31): Xaa is C or S
RVVMNEYKFKIVNSSDDLYLVSIPELKTPAXTPKTVH

SEQ ID NO: 16849 - protein, 40 aa, Artificial Sequence
  Non-cyclic GFR-binding peptide
  MOD_RES (2)..(37)..(38): Xaa is C or S
  MOD_RES (15)..(16)..(17)..(18)..(19): Xaa is A or G
  MOD_RES (20)..(21)..(22)..(23): Xaa is A or G or absent
GXEAVSMGEEYQKYXXXXXXXXXIYLVSIPSLKTPVXXAK

SEQ ID NO: 16850 - protein, 32 aa, Artificial Sequence
  Non-cyclic GFR-binding peptide
  MOD_RES (31)..(32): Xaa is C or S
SRVIMEYQKYVKPKRGVIYLISIPSLAQPVXX

SEQ ID NO: 16851 - protein, 35 aa, Artificial Sequence
  Non-cyclic GFR-binding peptide
  MOD_RES (32)..(33): Xaa is C or S
AKVVMNEYQKYIVNNSSDIYLVSIPSLKTPAXXAK

SEQ ID NO: 16852 - protein, 40 aa, Artificial Sequence
  Non-cyclic GFR-binding peptide
  MOD_RES (2)..(34)..(35): Xaa is C or S
GXAEVVMDEYKFKVVNNAADLYLISIPELRAPVXXSAPAA

SEQ ID NO: 16853 - protein, 35 aa, Artificial Sequence
  Non-cyclic GFR-binding peptide
  MOD_RES (33)..(34): Xaa is C or S
  MOD_RES (11)..(12)..(13)..(14)..(15): Xaa is A or G
  MOD_RES (16)..(17)..(18)..(19): Xaa is A or G or absent
KVVMNEYKFKXXXXXXXXXLYLVSIPELKTPAXXA

SEQ ID NO: 16854 - protein, 40 aa, Artificial Sequence
  Non-cyclic GFR-binding peptide
  MOD_RES (2)..(4)..(35)..(36): Xaa is C or S
SXKXSRVIMEYKFKVKPKRGVLYLISIPELAQPVXXPAAS

SEQ ID NO: 16855 - protein, 39 aa, Artificial Sequence
  Non-cyclic GFR-binding peptide
  MOD_RES (1)..(35)..(36): Xaa is C or S
  MOD_RES (13)..(14)..(15)..(16)..(17): Xaa is A or G
  MOD_RES (18)..(19)..(20)..(21): Xaa is A or G or absent
XESVAMGYHYKLXXXXXXXXXKYLISIPSLKTPVXXAKS

SEQ ID NO: 16856 - protein, 39 aa, Artificial Sequence
  Non-cyclic GFR-binding peptide
  MOD_RES (1)..(3)..(37)..(38): Xaa is C or S
  MOD_RES (15)..(16)..(17)..(18)..(19): Xaa is A or G
  MOD_RES (20)..(21)..(22)..(23): Xaa is A or G or absent
XGXGEVVMEEYQKYXXXXXXXXXIYLMSIPSLETPVXXA

SEQ ID NO: 16857 - protein, 32 aa, Artificial Sequence
  Non-cyclic GFR-binding peptide
  MOD_RES (2)..(2): Xaa is C or S
KXSKVVMEYKFKVKPTRGVLYLISIPELDQPV

SEQ ID NO: 16858 - protein, 38 aa, Artificial Sequence
  Non-cyclic GFR-binding peptide
  MOD_RES (34)..(35): Xaa is C or S
  MOD_RES (12)..(13)..(14)..(15)..(16): Xaa is A or G
  MOD_RES (17)..(18)..(19)..(20): Xaa is A or G or absent
ESVAMGRYKKLXXXXXXXXXFYLISIANLKTPVXXAKS

SEQ ID NO: 16859 - protein, 39 aa, Artificial Sequence
  Non-cyclic GFR-binding peptide
  MOD_RES (2)..(4)..(38)..(39): Xaa is C or S
  MOD_RES (16)..(17)..(18)..(19)..(20): Xaa is A or G
  MOD_RES (21)..(22)..(23)..(24): Xaa is A or G or absent
RXGXGEVVMDEYKFKXXXXXXXXXLYLMSIPELETPVXX

SEQ ID NO: 16860 - protein, 36 aa, Artificial Sequence
  Non-cyclic GFR-binding peptide
  MOD_RES (31)..(32): Xaa is C or S
KVVMNEYKFKIVNNSSDLYLVSIPELKTPAXXAKPV

SEQ ID NO: 16861 - protein, 36 aa, Artificial Sequence
  Non-cyclic GFR-binding peptide
  MOD_RES (33)..(34): Xaa is C or S
  MOD_RES (11)..(12)..(13)..(14)..(15): Xaa is A or G
  MOD_RES (16)..(17)..(18)..(19): Xaa is A or G or absent
RVVMNEYKFKXXXXXXXXXLYLVSIPELQTPAXXPK

SEQ ID NO: 16862 - protein, 42 aa, Artificial Sequence
  Non-cyclic GFR-binding peptide
  MOD_RES (1)..(3)..(36)..(37): Xaa is C or S
  MOD_RES (14)..(15)..(16)..(17)..(18): Xaa is A or G
  MOD_RES (19)..(20)..(21)..(22): Xaa is A or G or absent
XKXSRVIMEYKFKXXXXXXXXXLYLISIPELAQPVXXPAASA

SEQ ID NO: 16863 - protein, 39 aa, Artificial Sequence
  Non-cyclic GFR-binding peptide
  MOD_RES (2)..(4)..(38)..(39): Xaa is C or S
  MOD_RES (16)..(17)..(18)..(19)..(20): Xaa is A or G
  MOD_RES (21)..(22)..(23)..(24): Xaa is A or G or absent
RXGXGEVVMEEYQKYXXXXXXXXXIYLMSIPSLETPVXX

SEQ ID NO: 16864 - protein, 40 aa, Artificial Sequence
  Non-cyclic GFR-binding peptide
  MOD_RES (1)..(35)..(36): Xaa is C or S
  MOD_RES (13)..(14)..(15)..(16)..(17): Xaa is A or G
  MOD_RES (18)..(19)..(20)..(21): Xaa is A or G or absent
XGEVVMDEYQKYXXXXXXXXXIYLMSIPSLETPVXXAKPI

SEQ ID NO: 16865 - protein, 38 aa, Artificial Sequence
  Non-cyclic GFR-binding peptide
  MOD_RES (2)..(34)..(35): Xaa is C or S
GXSRVVMNEYQKYIVNSSDDIYLVSIPSLKTPAXXPKP

SEQ ID NO: 16866 - protein, 40 aa, Artificial Sequence
  Non-cyclic GFR-binding peptide
  MOD_RES (1)..(36)..(37): Xaa is C or S
  MOD_RES (14)..(15)..(16)..(17)..(18): Xaa is A or G
  MOD_RES (19)..(20)..(21)..(22): Xaa is A or G or absent
XEAVSMGEEYQKYXXXXXXXXXIYLVSIPSLKTPVXXAKG

SEQ ID NO: 16867 - protein, 36 aa, Artificial Sequence
  Non-cyclic GFR-binding peptide
  MOD_RES (32)..(33): Xaa is C or S
ARVVMNEYQKYIVNSSDDIYLVSIPSLQTPAXXPKP

SEQ ID NO: 16868 - protein, 42 aa, Artificial Sequence
  Non-cyclic GFR-binding peptide
  MOD_RES (1)..(3)..(37)..(38): Xaa is C or S
  MOD_RES (15)..(16)..(17)..(18)..(19): Xaa is A or G
  MOD_RES (20)..(21)..(22)..(23): Xaa is A or G or absent
XGXESVAMGEYQKYXXXXXXXXXIYLISIPSLKTPVXXAKSA

SEQ ID NO: 16869 - protein, 39 aa, Artificial Sequence
  Non-cyclic GFR-binding peptide
  MOD_RES (34)..(35): Xaa is C or S
  MOD_RES (12)..(13)..(14)..(15)..(16): Xaa is A or G
  MOD_RES (17)..(18)..(19)..(20): Xaa is A or G or absent
AEVVMDEYKFKXXXXXXXXXLYLISIPELRAPVXXSAPA

SEQ ID NO: 16870 - protein, 33 aa, Artificial Sequence
  Non-cyclic GFR-binding peptide
  MOD_RES (2)..(33): Xaa is C or S
KXSKVVMEYQKYVKPTRGVIYLISIPSLDQPVX

SEQ ID NO: 16871 - protein, 37 aa, Artificial Sequence
  Non-cyclic GFR-binding peptide
  MOD_RES (1)..(33)..(34): Xaa is C or S
XAKVVMNEYQKYIVNNSSDIYLVSIPSLKTPAXXAKP

SEQ ID NO: 16872 - protein, 34 aa, Artificial Sequence
  Non-cyclic GFR-binding peptide
  MOD_RES (2)..(33)..(34): Xaa is C or S
KXSKVVMEYKFKVKPTRGVLYLISIPELDQPVXX

SEQ ID NO: 16873 - protein, 36 aa, Artificial Sequence
  Non-cyclic GFR-binding peptide
  MOD_RES (2)..(4): Xaa is C or S
  MOD_RES (15)..(16)..(17)..(18)..(19): Xaa is A or G
  MOD_RES (20)..(21)..(22)..(23): Xaa is A or G or absent
SXKXSRVIMEYQKYXXXXXXXXXIYLISIPSLAQPV

SEQ ID NO: 16874 - protein, 41 aa, Artificial Sequence
  Non-cyclic GFR-binding peptide
  MOD_RES (2)..(4)..(36): Xaa is C or S
HXGXSRVVMNEYKFKIVNSSDDLYLVSIPELKTPAXTPKTV

SEQ ID NO: 16875 - protein, 42 aa, Artificial Sequence
  Non-cyclic GFR-binding peptide
  MOD_RES (2)..(4)..(36)..(37): Xaa is C or S
RXGXESVAMGRYKKLYTVVGKDFYLISIANLKTPVXXAKSAK

SEQ ID NO: 16876 - protein, 38 aa, Artificial Sequence
  Non-cyclic GFR-binding peptide
  MOD_RES (2)..(33)..(34): Xaa is C or S
KXSKVIMEYQKYIKPTKGIIYLISIPSLDQSVXXPSAS

SEQ ID NO: 16877 - protein, 30 aa, Artificial Sequence; identical to SEQ ID NO: 1944
  Non-cyclic GFR-binding peptide

SEQ ID NO: 16878 - protein, 36 aa, Artificial Sequence
  Non-cyclic GFR-binding peptide
  MOD_RES (1)..(3): Xaa is C or S
  MOD_RES (15)..(16)..(17)..(18)..(19): Xaa is A or G
  MOD_RES (20)..(21)..(22)..(23): Xaa is A or G or absent
XGXAEVVMDYHYKLXXXXXXXXXKYLISIPSLRAPV

SEQ ID NO: 16879 - protein, 39 aa, Artificial Sequence
  Non-cyclic GFR-binding peptide
  MOD_RES (33)..(34): Xaa is C or S
  MOD_RES (11)..(12)..(13)..(14)..(15): Xaa is A or G
  MOD_RES (16)..(17)..(18)..(19): Xaa is A or G or absent
SVAMGEYQKYXXXXXXXXXIYLISIPSLKTPVXXAKSAK

SEQ ID NO: 16880 - protein, 37 aa, Artificial Sequence
  Non-cyclic GFR-binding peptide
  MOD_RES (2)..(35)..(36): Xaa is C or S
  MOD_RES (13)..(14)..(15)..(16)..(17): Xaa is A or G
  MOD_RES (18)..(19)..(20)..(21): Xaa is A or G or absent
KXSRVIMEYQKYXXXXXXXXXIYLISIPSLAQPVXXP

SEQ ID NO: 16881 - protein, 39 aa, Artificial Sequence
  Non-cyclic GFR-binding peptide
  MOD_RES (1)..(3)..(36)..(37): Xaa is C or S
XGXEAVSMGEEYKFKTPVGMDDLYLVSIPELKTPVXXAK

SEQ ID NO: 16882 - protein, 39 aa, Artificial Sequence
  Non-cyclic GFR-binding peptide
  MOD_RES (2)..(34)..(35): Xaa is C or S
GXESVAMGRYKKLYTVVGKDFYLISIANLKTPVXXAKSA

SEQ ID NO: 16883 - protein, 34 aa, Artificial Sequence
  Non-cyclic GFR-binding peptide
  MOD_RES (31)..(32): Xaa is C or S
SKVVMEYKFKVKPTRGVLYLISIPELDQPVXXPS

SEQ ID NO: 16884 - protein, 41 aa, Artificial Sequence
  Non-cyclic GFR-binding peptide
  MOD_RES (2)..(4)..(38)..(39): Xaa is C or S
  MOD_RES (16)..(17)..(18)..(19)..(20): Xaa is A or G
  MOD_RES (21)..(22)..(23)..(24): Xaa is A or G or absent
RXGXESVAMGRYKKLXXXXXXXXXFYLISIANLKTPVXXAK

SEQ ID NO: 16885 - protein, 40 aa, Artificial Sequence
  Non-cyclic GFR-binding peptide
  MOD_RES (2)..(4)..(36)..(37): Xaa is C or S
HXGXAKVVMNEYKFKIVNNSSDLYLVSIPELKTPAXXAKP

SEQ ID NO: 16886 - protein, 41 aa, Artificial Sequence
  Non-cyclic GFR-binding peptide
  MOD_RES (1)..(3)..(37)..(38): Xaa is C or S
  MOD_RES (15)..(16)..(17)..(18)..(19): Xaa is A or G
  MOD_RES (20)..(21)..(22)..(23): Xaa is A or G or absent
XGXESVAMGYHYKLXXXXXXXXXKYLISIPSLKTPVXXAKS

SEQ ID NO: 16887 - protein, 36 aa, Artificial Sequence
  Non-cyclic GFR-binding peptide
  MOD_RES (1)..(3)..(36): Xaa is C or S
XGXEAVSMGEEYKFKTPVGMDDLYLVSIPELKTPVX

SEQ ID NO: 16888 - protein, 40 aa, Artificial Sequence
  Non-cyclic GFR-binding peptide
  MOD_RES (1)..(3)..(37)..(38): Xaa is C or S
  MOD_RES (15)..(16)..(17)..(18)..(19): Xaa is A or G
  MOD_RES (20)..(21)..(22)..(23): Xaa is A or G or absent
XGXESVAMGEYQKYXXXXXXXXXIYLISIPSLKTPVXXAK

SEQ ID NO: 16889 - protein, 33 aa, Artificial Sequence
  Non-cyclic GFR-binding peptide
  MOD_RES (31)..(32): Xaa is C or S
SKVVMEYQKYVKPTRGVIYLISIPSLDQPVXXP

SEQ ID NO: 16890 - protein, 36 aa, Artificial Sequence
  Non-cyclic GFR-binding peptide
  MOD_RES (31)..(32): Xaa is C or S
EVVMDEYKFKVVNNAADLYLISIPELRAPVXXSAPA

SEQ ID NO: 16891 - protein, 39 aa, Artificial Sequence
  Non-cyclic GFR-binding peptide
  MOD_RES (1)..(3)..(37)..(38): Xaa is C or S
  MOD_RES (15)..(16)..(17)..(18)..(19): Xaa is A or G
  MOD_RES (20)..(21)..(22)..(23): Xaa is A or G or absent
XGXGEVVMEEYKFKXXXXXXXXXLYLMSIPELETPVXXA

SEQ ID NO: 16892 - protein, 41 aa, Artificial Sequence
  Non-cyclic GFR-binding peptide
  MOD_RES (2)..(4)..(36)..(37): Xaa is C or S
HXGXSRVVMNEYKFKIVNSSDDLYLVSIPELKTPAXXPKPV

SEQ ID NO: 16893 - protein, 40 aa, Artificial Sequence
  Non-cyclic GFR-binding peptide
  MOD_RES (1)..(35)..(36): Xaa is C or S
  MOD_RES (13)..(14)..(15)..(16)..(17): Xaa is A or G
  MOD_RES (18)..(19)..(20)..(21): Xaa is A or G or absent
XAEVVMDEYKFKXXXXXXXXXLYLISIPELRAPVXXSAPA

SEQ ID NO: 16894 - protein, 39 aa, Artificial Sequence
  Non-cyclic GFR-binding peptide
  MOD_RES (1)..(34)..(35): Xaa is C or S
  MOD_RES (12)..(13)..(14)..(15)..(16): Xaa is A or G
  MOD_RES (17)..(18)..(19)..(20): Xaa is A or G or absent
XSKVIMEYKFKXXXXXXXXXLYLISIPELDQSVXXPSAS

SEQ ID NO: 16895 - protein, 37 aa, Artificial Sequence
  Non-cyclic GFR-binding peptide
  MOD_RES (2)..(4): Xaa is C or S
  MOD_RES (16)..(17)..(18)..(19)..(20): Xaa is A or G
  MOD_RES (21)..(22)..(23)..(24): Xaa is A or G or absent
HXGXSRVVMNEYQKYXXXXXXXXXIYLVSIPSLKTPA

SEQ ID NO: 16896 - protein, 37 aa, Artificial Sequence
  Non-cyclic GFR-binding peptide
  MOD_RES (2)..(4)..(36)..(37): Xaa is C or S
HXGXARVVMNEYKFKIVNSSDDLYLVSIPELQTPAXX

SEQ ID NO: 16897 - protein, 36 aa, Artificial Sequence
  Non-cyclic GFR-binding peptide
  MOD_RES (2)..(36): Xaa is C or S
  MOD_RES (14)..(15)..(16)..(17)..(18): Xaa is A or G
  MOD_RES (19)..(20)..(21)..(22): Xaa is A or G or absent
GXESVAMGRYKKLXXXXXXXXXFYLISIANLKTPVX

SEQ ID NO: 16898 - protein, 39 aa, Artificial Sequence
  Non-cyclic GFR-binding peptide
  MOD_RES (1)..(3)..(35)..(36): Xaa is C or S
XGXESVAMGRYKKLYTVVGKDFYLISIANLKTPVXXAKS

SEQ ID NO: 16899 - protein, 33 aa, Artificial Sequence
  Non-cyclic GFR-binding peptide
  MOD_RES (31)..(32): Xaa is C or S
SKVIMEYQKYIKPTKGIIYLISIPSLDQSVXXP

SEQ ID NO: 16900 - protein, 34 aa, Artificial Sequence
  Non-cyclic GFR-binding peptide
  MOD_RES (33)..(34): Xaa is C or S
  MOD_RES (11)..(12)..(13)..(14)..(15): Xaa is A or G
  MOD_RES (16)..(17)..(18)..(19): Xaa is A or G or absent
SVAMGEYQKYXXXXXXXXXIYLISIPSLKTPVXX

SEQ ID NO: 16901 - protein, 37 aa, Artificial Sequence
  Non-cyclic GFR-binding peptide
  MOD_RES (2)..(34)..(35): Xaa is C or S
GXAEVVMDYHYKLVVNNAADKYLISIPSLRAPVXXSA

SEQ ID NO: 16902 - protein, 37 aa, Artificial Sequence
  Non-cyclic GFR-binding peptide
  MOD_RES (2)..(35)..(36): Xaa is C or S
  MOD_RES (13)..(14)..(15)..(16)..(17): Xaa is A or G
  MOD_RES (18)..(19)..(20)..(21): Xaa is A or G or absent
KXSKVIMEYKFKXXXXXXXXXLYLISIPELDQSVXXP

SEQ ID NO: 16903 - protein, 39 aa, Artificial Sequence
  Non-cyclic GFR-binding peptide
  MOD_RES (1)..(35)..(36): Xaa is C or S
  MOD_RES (13)..(14)..(15)..(16)..(17): Xaa is A or G
  MOD_RES (18)..(19)..(20)..(21): Xaa is A or G or absent
XGEVVMEEYQKYXXXXXXXXXIYLMSIPSLETPVXXAKP

SEQ ID NO: 16904 - protein, 40 aa, Artificial Sequence
  Non-cyclic GFR-binding peptide
  MOD_RES (2)..(4)..(37)..(38): Xaa is C or S
RXGXEAVSMGEEYQKYTPVGMDDIYLVSIPSLKTPVXXAK

SEQ ID NO: 16905 - protein, 36 aa, Artificial Sequence
  Non-cyclic GFR-binding peptide
  MOD_RES (34)..(35): Xaa is C or S
  MOD_RES (12)..(13)..(14)..(15)..(16): Xaa is A or G
  MOD_RES (17)..(18)..(19)..(20): Xaa is A or G or absent
AKVVMNEYKFKXXXXXXXXXLYLVSIPELKTPAXXA

SEQ ID NO: 16906 - protein, 37 aa, Artificial Sequence
  Non-cyclic GFR-binding peptide
  MOD_RES (31)..(32): Xaa is C or S
SVAMGYHYKLYTVVGKDKYLISIPSLKTPVXXAKSAK

SEQ ID NO: 16907 - protein, 39 aa, Artificial Sequence
  Non-cyclic GFR-binding peptide
  MOD_RES (2)..(4)..(37)..(38): Xaa is C or S
  MOD_RES (15)..(16)..(17)..(18)..(19): Xaa is A or G
  MOD_RES (20)..(21)..(22)..(23): Xaa is A or G or absent
SXKXSRVIMEYQKYXXXXXXXXXIYLISIPSLAQPVXXP

SEQ ID NO: 16908 - protein, 36 aa, Artificial Sequence
  Non-cyclic GFR-binding peptide
  MOD_RES (1)..(3)..(36): Xaa is C or S
XGXEAVSMGEEYQKYTPVGMDDIYLVSIPSLKTPVX

SEQ ID NO: 16909 - protein, 35 aa, Artificial Sequence
  Non-cyclic GFR-binding peptide
  MOD_RES (33)..(34): Xaa is C or S
  MOD_RES (11)..(12)..(13)..(14)..(15): Xaa is A or G
  MOD_RES (16)..(17)..(18)..(19): Xaa is A or G or absent
EVVMEEYKFKXXXXXXXXXLYLMSIPELETPVXXA

SEQ ID NO: 16910 - protein, 38 aa, Artificial Sequence
  Non-cyclic GFR-binding peptide
  MOD_RES (34)..(34): Xaa is C or S
  MOD_RES (12)..(13)..(14)..(15)..(16): Xaa is A or G
  MOD_RES (17)..(18)..(19)..(20): Xaa is A or G or absent
SRVVMNEYKFKXXXXXXXXXLYLVSIPELKTPAXTPKT

SEQ ID NO: 16911 - protein, 39 aa, Artificial Sequence
  Non-cyclic GFR-binding peptide
  MOD_RES (2)..(4)..(38): Xaa is C or S
  MOD_RES (16)..(17)..(18)..(19)..(20): Xaa is A or G
  MOD_RES (21)..(22)..(23)..(24): Xaa is A or G or absent
HXGXSRVVMNEYQKYXXXXXXXXXIYLVSIPSLKTPAXT

SEQ ID NO: 16912 - protein, 37 aa, Artificial Sequence
  Non-cyclic GFR-binding peptide
  MOD_RES (2)..(4): Xaa is C or S
  MOD_RES (16)..(17)..(18)..(19)..(20): Xaa is A or G
  MOD_RES (21)..(22)..(23)..(24): Xaa is A or G or absent
RXGXGEVVMDEYKFKXXXXXXXXXLYLMSIPELETPV

SEQ ID NO: 16913 - protein, 32 aa, Artificial Sequence
  Non-cyclic GFR-binding peptide
  MOD_RES (1)..(32): Xaa is C or S
XSKVVMEYKFKVKPTRGVLYLISIPELDQPVX

SEQ ID NO: 16914 - protein, 38 aa, Artificial Sequence
  Non-cyclic GFR-binding peptide
  MOD_RES (32)..(33): Xaa is C or S
AEVVMDYHYKLVVNNAADKYLISIPSLRAPVXXSAPAA

SEQ ID NO: 16915 - protein, 36 aa, Artificial Sequence
  Non-cyclic GFR-binding peptide
  MOD_RES (32)..(33): Xaa is C or S
SRVVMNEYKFKIVNSSDDLYLVSIPELKTPAXXPKP

SEQ ID NO: 16916 - protein, 33 aa, Artificial Sequence
  Non-cyclic GFR-binding peptide
  MOD_RES (2)..(2): Xaa is C or S
GXAEVVMDYHYKLVVNNAADKYLISIPSLRAPV

SEQ ID NO: 16917 - protein, 38 aa, Artificial Sequence
  Non-cyclic GFR-binding peptide
  MOD_RES (2)..(4)..(35)..(36): Xaa is C or S
SXKXSKVVMEYKFKVKPTRGVLYLISIPELDQPVXXPS

SEQ ID NO: 16918 - protein, 38 aa, Artificial Sequence
  Non-cyclic GFR-binding peptide
  MOD_RES (2)..(36)..(37): Xaa is C or S
  MOD_RES (14)..(15)..(16)..(17)..(18): Xaa is A or G
  MOD_RES (19)..(20)..(21)..(22): Xaa is A or G or absent
GXAEVVMDRYKKLXXXXXXXXXFYLISIANLRAPVXXS

SEQ ID NO: 16919 - protein, 39 aa, Artificial Sequence
  Non-cyclic GFR-binding peptide
  MOD_RES (1)..(3)..(35): Xaa is C or S
XGXSRVVMNEYKFKIVNSSDDLYLVSIPELKTPAXTPKT

SEQ ID NO: 16920 - protein, 36 aa, Artificial Sequence
  Non-cyclic GFR-binding peptide
  MOD_RES (33)..(34): Xaa is C or S
  MOD_RES (11)..(12)..(13)..(14)..(15): Xaa is A or G
  MOD_RES (16)..(17)..(18)..(19): Xaa is A or G or absent
EVVMDEYKFKXXXXXXXXXLYLISIPELRAPVXXSA

SEQ ID NO: 16921 - protein, 41 aa, Artificial Sequence
  Non-cyclic GFR-binding peptide
  MOD_RES (2)..(36)..(37): Xaa is C or S
  MOD_RES (14)..(15)..(16)..(17)..(18): Xaa is A or G
  MOD_RES (19)..(20)..(21)..(22): Xaa is A or G or absent
GXESVAMGRYKKLXXXXXXXXXFYLISIANLKTPVXXAKSA

SEQ ID NO: 16922 - protein, 34 aa, Artificial Sequence
  Non-cyclic GFR-binding peptide
  MOD_RES (32)..(32): Xaa is C or S
SRVVMNEYQKYIVNSSDDIYLVSIPSLKTPAXTP

SEQ ID NO: 16923 - protein, 35 aa, Artificial Sequence
  Non-cyclic GFR-binding peptide
  MOD_RES (31)..(32): Xaa is C or S
EVVMDEYQKYVVKENEDIYLMSIPSLETPVXXAKP

SEQ ID NO: 16924 - protein, 38 aa, Artificial Sequence
  Non-cyclic GFR-binding peptide
  MOD_RES (1)..(3)..(37)..(38): Xaa is C or S
  MOD_RES (15)..(16)..(17)..(18)..(19): Xaa is A or G
  MOD_RES (20)..(21)..(22)..(23): Xaa is A or G or absent
XGXAEVVMDYHYKLXXXXXXXXXKYLISIPSLRAPVXX

SEQ ID NO: 16925 - protein, 36 aa, Artificial Sequence
  Non-cyclic GFR-binding peptide
  MOD_RES (1)..(35)..(36): Xaa is C or S
  MOD_RES (13)..(14)..(15)..(16)..(17): Xaa is A or G
  MOD_RES (18)..(19)..(20)..(21): Xaa is A or G or absent
XSRVVMNEYKFKXXXXXXXXXLYLVSIPELKTPAXX

SEQ ID NO: 16926 - protein, 44 aa, Artificial Sequence
  Non-cyclic GFR-binding peptide
  MOD_RES (2)..(4)..(38)..(39): Xaa is C or S
  MOD_RES (16)..(17)..(18)..(19)..(20): Xaa is A or G
  MOD_RES (21)..(22)..(23)..(24): Xaa is A or G or absent
HXGXARVVMNEYQKYXXXXXXXXXIYLVSIPSLQTPAXXPKPVT

SEQ ID NO: 16927 - protein, 44 aa, Artificial Sequence
  Non-cyclic GFR-binding peptide
  MOD_RES (2)..(4)..(38)..(39): Xaa is C or S
  MOD_RES (16)..(17)..(18)..(19)..(20): Xaa is A or G
  MOD_RES (21)..(22)..(23)..(24): Xaa is A or G or absent
RXGXESVAMGEYQKYXXXXXXXXXIYLISIPSLKTPVXXAKSAK

SEQ ID NO: 16928 - protein, 37 aa, Artificial Sequence
  Non-cyclic GFR-binding peptide
  MOD_RES (2)..(37): Xaa is C or S
  MOD_RES (15)..(16)..(17)..(18)..(19): Xaa is A or G
  MOD_RES (20)..(21)..(22)..(23): Xaa is A or G or absent
GXEAVSMGEEYQKYXXXXXXXXXIYLVSIPSLKTPVX

SEQ ID NO: 16929 - protein, 40 aa, Artificial Sequence
  Non-cyclic GFR-binding peptide
  MOD_RES (2)..(4)..(38)..(39): Xaa is C or S
  MOD_RES (16)..(17)..(18)..(19)..(20): Xaa is A or G
  MOD_RES (21)..(22)..(23)..(24): Xaa is A or G or absent
RXGXGEVVMEEYQKYXXXXXXXXXIYLMSIPSLETPVXXA

SEQ ID NO: 16930 - protein, 32 aa, Artificial Sequence
  Non-cyclic GFR-binding peptide
  MOD_RES (2)..(2): Xaa is C or S
KXSKVVMEYQKYVKPTRGVIYLISIPSLDQPV

SEQ ID NO: 16931 - protein, 37 aa, Artificial Sequence
  Non-cyclic GFR-binding peptide
  MOD_RES (1)..(34)..(35): Xaa is C or S
XEAVSMGEEYQKYTPVGMDDIYLVSIPSLKTPVXXAK

SEQ ID NO: 16932 - protein, 35 aa, Artificial Sequence
  Non-cyclic GFR-binding peptide
  MOD_RES (2)..(34)..(35): Xaa is C or S
GXAKVVMNEYQKYIVNNSSDIYLVSIPSLKTPAXX

SEQ ID NO: 16933 - protein, 43 aa, Artificial Sequence
  Non-cyclic GFR-binding peptide
  MOD_RES (2)..(4)..(39)..(40): Xaa is C or S
  MOD_RES (17)..(18)..(19)..(20)..(21): Xaa is A or G
  MOD_RES (22)..(23)..(24)..(25): Xaa is A or G or absent
RXGXEAVSMGEEYQKYXXXXXXXXXIYLVSIPSLKTPVXXAKG

SEQ ID NO: 16934 - protein, 31 aa, Artificial Sequence
  Non-cyclic GFR-binding peptide
  MOD_RES (31)..(31): Xaa is C or S
SVAMGYHYKLYTVVGKDKYLISIPSLKTPVX

SEQ ID NO: 16935 - protein, 37 aa, Artificial Sequence
  Non-cyclic GFR-binding peptide
  MOD_RES (1)..(35)..(36): Xaa is C or S
  MOD_RES (13)..(14)..(15)..(16)..(17): Xaa is A or G
  MOD_RES (18)..(19)..(20)..(21): Xaa is A or G or absent
XSRVVMNEYKFKXXXXXXXXXLYLVSIPELKTPAXXP

SEQ ID NO: 16936 - protein, 35 aa, Artificial Sequence
  Non-cyclic GFR-binding peptide
  MOD_RES (2)..(2): Xaa is C or S
  MOD_RES (14)..(15)..(16)..(17)..(18): Xaa is A or G
  MOD_RES (19)..(20)..(21)..(22): Xaa is A or G or absent
GXAEVVMDRYKKLXXXXXXXXXFYLISIANLRAPV

SEQ ID NO: 16937 - protein, 36 aa, Artificial Sequence
  Non-cyclic GFR-binding peptide
  MOD_RES (1)..(3)..(36): Xaa is C or S
  MOD_RES (14)..(15)..(16)..(17)..(18): Xaa is A or G
  MOD_RES (19)..(20)..(21)..(22): Xaa is A or G or absent
XKXSRVIMEYKFKXXXXXXXXXLYLISIPELAQPVX

SEQ ID NO: 16938 - protein, 37 aa, Artificial Sequence
  Non-cyclic GFR-binding peptide
  MOD_RES (2)..(4)..(36)..(37): Xaa is C or S
HXGXARVVMNEYQKYIVNSSDDIYLVSIPSLQTPAXX

SEQ ID NO: 16939 - protein, 35 aa, Artificial Sequence
  Non-cyclic GFR-binding peptide
  MOD_RES (1)..(3)..(35): Xaa is C or S
XGXGEVVMDEYKFKVVKENEDLYLMSIPELETPVX

SEQ ID NO: 16940 - protein, 44 aa, Artificial Sequence
  Non-cyclic GFR-binding peptide
  MOD_RES (2)..(4)..(38)..(39): Xaa is C or S
  MOD_RES (16)..(17)..(18)..(19)..(20): Xaa is A or G
  MOD_RES (21)..(22)..(23)..(24): Xaa is A or G or absent
RXGXAEVVMDYHYKLXXXXXXXXXKYLISIPSLRAPVXXSAPAA

SEQ ID NO: 16941 - protein, 37 aa, Artificial Sequence
  Non-cyclic GFR-binding peptide
  MOD_RES (2)..(33)..(34): Xaa is C or S
KXSRVIMEYQKYVKPKRGVIYLISIPSLAQPVXXPAA

SEQ ID NO: 16942 - protein, 38 aa, Artificial Sequence
  Non-cyclic GFR-binding peptide
  MOD_RES (2)..(4)..(38): Xaa is C or S
  MOD_RES (16)..(17)..(18)..(19)..(20): Xaa is A or G
  MOD_RES (21)..(22)..(23)..(24): Xaa is A or G or absent
RXGXAEVVMDYHYKLXXXXXXXXXKYLISIPSLRAPVX

SEQ ID NO: 16943 - protein, 34 aa, Artificial Sequence
  Non-cyclic GFR-binding peptide
  MOD_RES (1)..(3)..(34): Xaa is C or S
XKXSKVVMEYKFKVKPTRGVLYLISIPELDQPVX

SEQ ID NO: 16944 - protein, 32 aa, Artificial Sequence
  Non-cyclic GFR-binding peptide
  MOD_RES (31)..(32): Xaa is C or S
SVAMGYHYKLYTVVGKDKYLISIPSLKTPVXX

SEQ ID NO: 16945 - protein, 37 aa, Artificial Sequence
  Non-cyclic GFR-binding peptide
  MOD_RES (1)..(33)..(34): Xaa is C or S
XAKVVMNEYKFKIVNNSSDLYLVSIPELKTPAXXAKP

SEQ ID NO: 16946 - protein, 34 aa, Artificial Sequence
  Non-cyclic GFR-binding peptide
  MOD_RES (2)..(34): Xaa is C or S
GXAKVVMNEYKFKIVNNSSDLYLVSIPELKTPAX

SEQ ID NO: 16947 - protein, 34 aa, Artificial Sequence
  Non-cyclic GFR-binding peptide
  MOD_RES (33)..(34): Xaa is C or S
  MOD_RES (11)..(12)..(13)..(14)..(15): Xaa is A or G
  MOD_RES (16)..(17)..(18)..(19): Xaa is A or G or absent
RVVMNEYKFKXXXXXXXXXLYLVSIPELQTPAXX

SEQ ID NO: 16948 - protein, 36 aa, Artificial Sequence
  Non-cyclic GFR-binding peptide
  MOD_RES (1)..(3)..(35)..(36): Xaa is C or S
XGXESVAMGYHYKLYTVVGKDKYLISIPSLKTPVXX

SEQ ID NO: 16949 - protein, 36 aa, Artificial Sequence
  Non-cyclic GFR-binding peptide
  MOD_RES (1)..(33)..(34): Xaa is C or S
XAKVVMNEYKFKIVNNSSDLYLVSIPELKTPAXXAK

SEQ ID NO: 16950 - protein, 42 aa, Artificial Sequence
  Non-cyclic GFR-binding peptide
  MOD_RES (2)..(4)..(36)..(37): Xaa is C or S
RXGXGEVVMEEYQKYVVKDYEDIYLMSIPSLETPVXXAKPIS

SEQ ID NO: 16951 - protein, 36 aa, Artificial Sequence
  Non-cyclic GFR-binding peptide
  MOD_RES (1)..(3)..(35)..(36): Xaa is C or S
XGXAKVVMNEYKFKIVNNSSDLYLVSIPELKTPAXX

SEQ ID NO: 16952 - protein, 36 aa, Artificial Sequence
  Non-cyclic GFR-binding peptide
  MOD_RES (33)..(34): Xaa is C or S
  MOD_RES (11)..(12)..(13)..(14)..(15): Xaa is A or G
  MOD_RES (16)..(17)..(18)..(19): Xaa is A or G or absent
SKVVMEYQKYXXXXXXXXXIYLISIPSLDQPVXXPS

SEQ ID NO: 16953 - protein, 41 aa, Artificial Sequence
  Non-cyclic GFR-binding peptide
  MOD_RES (1)..(3)..(35)..(36): Xaa is C or S
XGXARVVMNEYKFKIVNSSDDLYLVSIPELQTPAXXPKPVT

SEQ ID NO: 16954 - protein, 34 aa, Artificial Sequence
  Non-cyclic GFR-binding peptide
  MOD_RES (1)..(3)..(34): Xaa is C or S
XKXSKVIMEYKFKIKPTKGILYLISIPELDQSVX

SEQ ID NO: 16955 - protein, 36 aa, Artificial Sequence
  Non-cyclic GFR-binding peptide
  MOD_RES (1)..(33)..(34): Xaa is C or S
XESVAMGEYQKYYTVVGKDIYLISIPSLKTPVXXAK

SEQ ID NO: 16956 - protein, 33 aa, Artificial Sequence
  Non-cyclic GFR-binding peptide
  MOD_RES (32)..(33): Xaa is C or S
AKVVMNEYKFKIVNNSSDLYLVSIPELKTPAXX

SEQ ID NO: 16957 - protein, 41 aa, Artificial Sequence
  Non-cyclic GFR-binding peptide
  MOD_RES (1)..(35)..(36): Xaa is C or S
  MOD_RES (13)..(14)..(15)..(16)..(17): Xaa is A or G
  MOD_RES (18)..(19)..(20)..(21): Xaa is A or G or absent
XAEVVMDEYKFKXXXXXXXXXLYLISIPELRAPVXXSAPAA

SEQ ID NO: 16958 - protein, 38 aa, Artificial Sequence
  Non-cyclic GFR-binding peptide
  MOD_RES (1)..(3)..(37)..(38): Xaa is C or S
  MOD_RES (15)..(16)..(17)..(18)..(19): Xaa is A or G
  MOD_RES (20)..(21)..(22)..(23): Xaa is A or G or absent
XGXAKVVMNEYQKYXXXXXXXXXIYLVSIPSLKTPAXX

SEQ ID NO: 16959 - protein, 31 aa, Artificial Sequence
  Non-cyclic GFR-binding peptide
  MOD_RES (1)..(1): Xaa is C or S
XSKVIMEYKFKIKPTKGILYLISIPELDQSV

SEQ ID NO: 16960 - protein, 33 aa, Artificial Sequence
  Non-cyclic GFR-binding peptide
  MOD_RES (1)..(3): Xaa is C or S
XKXSKVVMEYKFKVKPTRGVLYLISIPELDQPV

SEQ ID NO: 16961 - protein, 37 aa, Artificial Sequence
  Non-cyclic GFR-binding peptide
  MOD_RES (1)..(35)..(36): Xaa is C or S
  MOD_RES (13)..(14)..(15)..(16)..(17): Xaa is A or G
  MOD_RES (18)..(19)..(20)..(21): Xaa is A or G or absent
XGEVVMDEYKFKXXXXXXXXXLYLMSIPELETPVXXA

SEQ ID NO: 16962 - protein, 38 aa, Artificial Sequence
  Non-cyclic GFR-binding peptide
  MOD_RES (1)..(34)..(35): Xaa is C or S
  MOD_RES (12)..(13)..(14)..(15)..(16): Xaa is A or G
  MOD_RES (17)..(18)..(19)..(20): Xaa is A or G or absent
XSKVIMEYKFKXXXXXXXXXLYLISIPELDQSVXXPSA

SEQ ID NO: 16963 - protein, 36 aa, Artificial Sequence
  Non-cyclic GFR-binding peptide
  MOD_RES (2)..(36): Xaa is C or S
  MOD_RES (14)..(15)..(16)..(17)..(18): Xaa is A or G
  MOD_RES (19)..(20)..(21)..(22): Xaa is A or G or absent
GXGEVVMEEYQKYXXXXXXXXXIYLMSIPSLETPVX

SEQ ID NO: 16964 - protein, 34 aa, Artificial Sequence
  Non-cyclic GFR-binding peptide
  MOD_RES (1)..(3): Xaa is C or S
XGXGEVVMDEYQKYVVKENEDIYLMSIPSLETPV

SEQ ID NO: 16965 - protein, 38 aa, Artificial Sequence
  Non-cyclic GFR-binding peptide
  MOD_RES (33)..(34): Xaa is C or S
  MOD_RES (11)..(12)..(13)..(14)..(15): Xaa is A or G
  MOD_RES (16)..(17)..(18)..(19): Xaa is A or G or absent
EVVMDYHYKLXXXXXXXXXKYLISIPSLRAPVXXSAPA

SEQ ID NO: 16966 - protein, 44 aa, Artificial Sequence
  Non-cyclic GFR-binding peptide
  MOD_RES (2)..(4)..(38)..(39): Xaa is C or S
  MOD_RES (16)..(17)..(18)..(19)..(20): Xaa is A or G
  MOD_RES (21)..(22)..(23)..(24): Xaa is A or G or absent
RXGXGEVVMDEYKFKXXXXXXXXXLYLMSIPELETPVXXAKPIK

SEQ ID NO: 16967 - protein, 37 aa, Artificial Sequence
  Non-cyclic GFR-binding peptide
  MOD_RES (2)..(4)..(35)..(36): Xaa is C or S
SXKXSKVVMEYKFKVKPTRGVLYLISIPELDQPVXXP

SEQ ID NO: 16968 - protein, 36 aa, Artificial Sequence
  Non-cyclic GFR-binding peptide
  MOD_RES (32)..(33): Xaa is C or S
AEVVMDEYKFKVVNNAADLYLISIPELRAPVXXSAP

SEQ ID NO: 16969 - protein, 33 aa, Artificial Sequence
  Non-cyclic GFR-binding peptide
  MOD_RES (1)..(3): Xaa is C or S
XKXSKVIMEYKFKIKPTKGILYLISIPELDQSV

SEQ ID NO: 16970 - protein, 40 aa, Artificial Sequence
  Non-cyclic GFR-binding peptide
  MOD_RES (2)..(4)..(36)..(37): Xaa is C or S
RXGXESVAMGEYQKYYTVVGKDIYLISIPSLKTPVXXAKS

SEQ ID NO: 16971 - protein, 33 aa, Artificial Sequence
  Non-cyclic GFR-binding peptide
  MOD_RES (32)..(32): Xaa is C or S
SRVVMNEYKFKIVNSSDDLYLVSIPELKTPAXT

SEQ ID NO: 16972 - protein, 32 aa, Artificial Sequence
  Non-cyclic GFR-binding peptide
  MOD_RES (1)..(32): Xaa is C or S
XSKVIMEYKFKIKPTKGILYLISIPELDQSVX

SEQ ID NO: 16973 - protein, 37 aa, Artificial Sequence
  Non-cyclic GFR-binding peptide
  MOD_RES (34)..(35): Xaa is C or S
  MOD_RES (12)..(13)..(14)..(15)..(16): Xaa is A or G
  MOD_RES (17)..(18)..(19)..(20): Xaa is A or G or absent
AEVVMDEYKFKXXXXXXXXXLYLISIPELRAPVXXSA

SEQ ID NO: 16974 - protein, 37 aa, Artificial Sequence
  Non-cyclic GFR-binding peptide
  MOD_RES (2)..(34)..(35): Xaa is C or S
GXGEVVMDEYQKYVVKENEDIYLMSIPSLETPVXXAK

SEQ ID NO: 16975 - protein, 33 aa, Artificial Sequence
  Non-cyclic GFR-binding peptide
  MOD_RES (2)..(33): Xaa is C or S
KXSKVVMEYKFKVKPTRGVLYLISIPELDQPVX

SEQ ID NO: 16976 - protein, 39 aa, Artificial Sequence
  Non-cyclic GFR-binding peptide
  MOD_RES (2)..(34): Xaa is C or S
GXSRVVMNEYQKYIVNSSDDIYLVSIPSLKTPAXTPKTV

SEQ ID NO: 16977 - protein, 30 aa, Artificial Sequence; identical to SEQ ID NO: 1945
  Non-cyclic GFR-binding peptide

SEQ ID NO: 16978 - protein, 36 aa, Artificial Sequence
  Non-cyclic GFR-binding peptide
  MOD_RES (1)..(3): Xaa is C or S
  MOD_RES (15)..(16)..(17)..(18)..(19): Xaa is A or G
  MOD_RES (20)..(21)..(22)..(23): Xaa is A or G or absent
XGXESVAMGYHYKLXXXXXXXXXKYLISIPSLKTPV

SEQ ID NO: 16979 - protein, 39 aa, Artificial Sequence
  Non-cyclic GFR-binding peptide
  MOD_RES (33)..(34): Xaa is C or S
  MOD_RES (11)..(12)..(13)..(14)..(15): Xaa is A or G
  MOD_RES (16)..(17)..(18)..(19): Xaa is A or G or absent
EVVMDYHYKLXXXXXXXXXKYLISIPSLRAPVXXSAPAA

SEQ ID NO: 16980 - protein, 38 aa, Artificial Sequence
  Non-cyclic GFR-binding peptide
  MOD_RES (2)..(4)..(38): Xaa is C or S
  MOD_RES (16)..(17)..(18)..(19)..(20): Xaa is A or G
  MOD_RES (21)..(22)..(23)..(24): Xaa is A or G or absent
RXGXESVAMGRYKKLXXXXXXXXXFYLISIANLKTPVX

SEQ ID NO: 16981 - protein, 35 aa, Artificial Sequence
  Non-cyclic GFR-binding peptide
  MOD_RES (31)..(32): Xaa is C or S
RVVMNEYQKYIVNSSDDIYLVSIPSLKTPAXXPKP

SEQ ID NO: 16982 - protein, 39 aa, Artificial Sequence
  Non-cyclic GFR-binding peptide
  MOD_RES (1)..(34)..(35): Xaa is C or S
  MOD_RES (12)..(13)..(14)..(15)..(16): Xaa is A or G
  MOD_RES (17)..(18)..(19)..(20): Xaa is A or G or absent
XSRVIMEYKFKXXXXXXXXXLYLISIPELAQPVXXPAAS

SEQ ID NO: 16983 - protein, 40 aa, Artificial Sequence
  Non-cyclic GFR-binding peptide
  MOD_RES (34)..(35): Xaa is C or S
  MOD_RES (12)..(13)..(14)..(15)..(16): Xaa is A or G
  MOD_RES (17)..(18)..(19)..(20): Xaa is A or G or absent
AKVVMNEYKFKXXXXXXXXXLYLVSIPELKTPAXXAKPVA

SEQ ID NO: 16984 - protein, 41 aa, Artificial Sequence
  Non-cyclic GFR-binding peptide
  MOD_RES (2)..(4)..(38): Xaa is C or S
  MOD_RES (16)..(17)..(18)..(19)..(20): Xaa is A or G
  MOD_RES (21)..(22)..(23)..(24): Xaa is A or G or absent
HXGXSRVVMNEYKFKXXXXXXXXXLYLVSIPELKTPAXTPK

SEQ ID NO: 16985 - protein, 37 aa, Artificial Sequence
  Non-cyclic GFR-binding peptide
  MOD_RES (1)..(3)..(34)..(35): Xaa is C or S
XKXSKVIMEYQKYIKPTKGIIYLISIPSLDQSVXXPS

SEQ ID NO: 16986 - protein, 35 aa, Artificial Sequence
  Non-cyclic GFR-binding peptide
  MOD_RES (1)..(3)..(35): Xaa is C or S
XGXAEVVMDRYKKLVVNNAADFYLISIANLRAPVX

SEQ ID NO: 16987 - protein, 34 aa, Artificial Sequence
  Non-cyclic GFR-binding peptide
  MOD_RES (1)..(33)..(34): Xaa is C or S
XAEVVMDRYKKLVVNNAADFYLISIANLRAPVXX

SEQ ID NO: 16988 - protein, 39 aa, Artificial Sequence
  Non-cyclic GFR-binding peptide
  MOD_RES (1)..(3)..(37)..(38): Xaa is C or S
  MOD_RES (15)..(16)..(17)..(18)..(19): Xaa is A or G
  MOD_RES (20)..(21)..(22)..(23): Xaa is A or G or absent
XGXESVAMGRYKKLXXXXXXXXXFYLISIANLKTPVXXA

SEQ ID NO: 16989 - protein, 33 aa, Artificial Sequence
  Non-cyclic GFR-binding peptide
  MOD_RES (12)..(13)..(14)..(15)..(16): Xaa is A or G
  MOD_RES (17)..(18)..(19)..(20): Xaa is A or G or absent
AEVVMDEYKFKXXXXXXXXXLYLISIPELRAPV

SEQ ID NO: 16990 - protein, 38 aa, Artificial Sequence
  Non-cyclic GFR-binding peptide
  MOD_RES (32)..(32): Xaa is C or S
SRVVMNEYQKYIVNSSDDIYLVSIPSLKTPAXTPKTVH

SEQ ID NO: 16991 - protein, 37 aa, Artificial Sequence
  Non-cyclic GFR-binding peptide
  MOD_RES (1)..(35)..(36): Xaa is C or S
  MOD_RES (13)..(14)..(15)..(16)..(17): Xaa is A or G
  MOD_RES (18)..(19)..(20)..(21): Xaa is A or G or absent
XAKVVMNEYQKYXXXXXXXXXIYLVSIPSLKTPAXXA

SEQ ID NO: 16992 - protein, 33 aa, Artificial Sequence
  Non-cyclic GFR-binding peptide
  MOD_RES (1)..(32)..(33): Xaa is C or S
XSKVVMEYQKYVKPTRGVIYLISIPSLDQPVXX

SEQ ID NO: 16993 - protein, 32 aa, Artificial Sequence
  Non-cyclic GFR-binding peptide
  MOD_RES (11)..(12)..(13)..(14)..(15): Xaa is A or G
  MOD_RES (16)..(17)..(18)..(19): Xaa is A or G or absent
EVVMDRYKKLXXXXXXXXXFYLISIANLRAPV

SEQ ID NO: 16994 - protein, 39 aa, Artificial Sequence
  Non-cyclic GFR-binding peptide
  MOD_RES (34)..(35): Xaa is C or S
  MOD_RES (12)..(13)..(14)..(15)..(16): Xaa is A or G
  MOD_RES (17)..(18)..(19)..(20): Xaa is A or G or absent
ESVAMGEYQKYXXXXXXXXXIYLISIPSLKTPVXXAKSA

SEQ ID NO: 16995 - protein, 43 aa, Artificial Sequence
  Non-cyclic GFR-binding peptide
  MOD_RES (2)..(4)..(37)..(38): Xaa is C or S
  MOD_RES (15)..(16)..(17)..(18)..(19): Xaa is A or G
  MOD_RES (20)..(21)..(22)..(23): Xaa is A or G or absent
SXKXSKVVMEYQKYXXXXXXXXXIYLISIPSLDQPVXXPSASA

SEQ ID NO: 16996 - protein, 40 aa, Artificial Sequence
  Non-cyclic GFR-binding peptide
  MOD_RES (2)..(4)..(38)..(39): Xaa is C or S
  MOD_RES (16)..(17)..(18)..(19)..(20): Xaa is A or G
  MOD_RES (21)..(22)..(23)..(24): Xaa is A or G or absent
RXGXAEVVMDEYKFKXXXXXXXXXLYLISIPELRAPVXXS

SEQ ID NO: 16997 - protein, 37 aa, Artificial Sequence
  Non-cyclic GFR-binding peptide
  MOD_RES (33)..(34): Xaa is C or S
  MOD_RES (11)..(12)..(13)..(14)..(15): Xaa is A or G
  MOD_RES (16)..(17)..(18)..(19): Xaa is A or G or absent
EVVMDEYQKYXXXXXXXXXIYLMSIPSLETPVXXAKP

SEQ ID NO: 16998 - protein, 35 aa, Artificial Sequence
  Non-cyclic GFR-binding peptide
  MOD_RES (2)..(33)..(34): Xaa is C or S
KXSKVIMEYQKYIKPTKGIIYLISIPSLDQSVXXP

SEQ ID NO: 16999 - protein, 33 aa, Artificial Sequence
  Non-cyclic GFR-binding peptide
  MOD_RES (12)..(13)..(14)..(15)..(16): Xaa is A or G
  MOD_RES (17)..(18)..(19)..(20): Xaa is A or G or absent
GEVVMDEYQKYXXXXXXXXXIYLMSIPSLETPV

SEQ ID NO: 17000 - protein, 40 aa, Artificial Sequence
  Non-cyclic GFR-binding peptide
  MOD_RES (2)..(4)..(38)..(39): Xaa is C or S
  MOD_RES (16)..(17)..(18)..(19)..(20): Xaa is A or G
  MOD_RES (21)..(22)..(23)..(24): Xaa is A or G or absent
RXGXAEVVMDRYKKLXXXXXXXXXFYLISIANLRAPVXXS

SEQ ID NO: 17001 - protein, 38 aa, Artificial Sequence
  Non-cyclic GFR-binding peptide
  MOD_RES (2)..(34)..(35): Xaa is C or S
GXAKVVMNEYKFKIVNNSSDLYLVSIPELKTPAXXAKP

SEQ ID NO: 17002 - protein, 38 aa, Artificial Sequence
  Non-cyclic GFR-binding peptide
  MOD_RES (32)..(33): Xaa is C or S
SRVVMNEYQKYIVNSSDDIYLVSIPSLKTPAXXPKPVY

SEQ ID NO: 17003 - protein, 38 aa, Artificial Sequence
  Non-cyclic GFR-binding peptide
  MOD_RES (32)..(33): Xaa is C or S
ESVAMGRYKKLYTVVGKDFYLISIANLKTPVXXAKSAK

SEQ ID NO: 17004 - protein, 41 aa, Artificial Sequence
  Non-cyclic GFR-binding peptide
  MOD_RES (1)..(3)..(35)..(36): Xaa is C or S
XGXGEVVMEEYQKYVVKDYEDIYLMSIPSLETPVXXAKPIS

SEQ ID NO: 17005 - protein, 32 aa, Artificial Sequence
  Non-cyclic GFR-binding peptide
  MOD_RES (1)..(1): Xaa is C or S
XARVVMNEYQKYIVNSSDDIYLVSIPSLQTPA

SEQ ID NO: 17006 - protein, 39 aa, Artificial Sequence
  Non-cyclic GFR-binding peptide
  MOD_RES (1)..(33)..(34): Xaa is C or S
XGEVVMDEYKFKVVKENEDLYLMSIPELETPVXXAKPIK

SEQ ID NO: 17007 - protein, 42 aa, Artificial Sequence
  Non-cyclic GFR-binding peptide
  MOD_RES (2)..(4)..(36)..(37): Xaa is C or S
RXGXGEVVMDEYQKYVVKENEDIYLMSIPSLETPVXXAKPIK

SEQ ID NO: 17008 - protein, 35 aa, Artificial Sequence
  Non-cyclic GFR-binding peptide
  MOD_RES (32)..(32): Xaa is C or S
SRVVMNEYQKYIVNSSDDIYLVSIPSLKTPAXTPK

SEQ ID NO: 17009 - protein, 38 aa, Artificial Sequence
  Non-cyclic GFR-binding peptide
  MOD_RES (2)..(33)..(34): Xaa is C or S
KXSKVVMEYQKYVKPTRGVIYLISIPSLDQPVXXPSAS

SEQ ID NO: 17010 - protein, 44 aa, Artificial Sequence
  Non-cyclic GFR-binding peptide
  MOD_RES (2)..(4)..(38)..(39): Xaa is C or S
  MOD_RES (16)..(17)..(18)..(19)..(20): Xaa is A or G
  MOD_RES (21)..(22)..(23)..(24): Xaa is A or G or absent
HXGXAKVVMNEYKFKXXXXXXXXXLYLVSIPELKTPAXXAKPVA

SEQ ID NO: 17011 - protein, 37 aa, Artificial Sequence
  Non-cyclic GFR-binding peptide
  MOD_RES (33)..(34): Xaa is C or S
  MOD_RES (11)..(12)..(13)..(14)..(15): Xaa is A or G
  MOD_RES (16)..(17)..(18)..(19): Xaa is A or G or absent
SKVVMEYKFKXXXXXXXXXLYLISIPELDQPVXXPSA

SEQ ID NO: 17012 - protein, 35 aa, Artificial Sequence
  Non-cyclic GFR-binding peptide
  MOD_RES (31)..(32): Xaa is C or S
SKVIMEYKFKIKPTKGILYLISIPELDQSVXXPSA

SEQ ID NO: 17013 - protein, 36 aa, Artificial Sequence
  Non-cyclic GFR-binding peptide
  MOD_RES (32)..(33): Xaa is C or S
ESVAMGEYQKYYTVVGKDIYLISIPSLKTPVXXAKS

SEQ ID NO: 17014 - protein, 38 aa, Artificial Sequence
  Non-cyclic GFR-binding peptide
  MOD_RES (1)..(3)..(34)..(35): Xaa is C or S
XKXSKVVMEYQKYVKPTRGVIYLISIPSLDQPVXXPSA

SEQ ID NO: 17015 - protein, 37 aa, Artificial Sequence
  Non-cyclic GFR-binding peptide
  MOD_RES (1)..(3)..(36)..(37): Xaa is C or S
  MOD_RES (14)..(15)..(16)..(17)..(18): Xaa is A or G
  MOD_RES (19)..(20)..(21)..(22): Xaa is A or G or absent
XKXSKVIMEYKFKXXXXXXXXXLYLISIPELDQSVXX

SEQ ID NO: 17016 - protein, 33 aa, Artificial Sequence
  Non-cyclic GFR-binding peptide
  MOD_RES (2)..(2): Xaa is C or S
GXGEVVMEEYQKYVVKDYEDIYLMSIPSLETPV

SEQ ID NO: 17017 - protein, 33 aa, Artificial Sequence
  Non-cyclic GFR-binding peptide
  MOD_RES (31)..(32): Xaa is C or S
EVVMDEYKFKVVKENEDLYLMSIPELETPVXXA

SEQ ID NO: 17018 - protein, 34 aa, Artificial Sequence
  Non-cyclic GFR-binding peptide
  MOD_RES (31)..(32): Xaa is C or S
SKVVMEYQKYVKPTRGVIYLISIPSLDQPVXXPS

SEQ ID NO: 17019 - protein, 34 aa, Artificial Sequence
  Non-cyclic GFR-binding peptide
  MOD_RES (34)..(34): Xaa is C or S
  MOD_RES (12)..(13)..(14)..(15)..(16): Xaa is A or G
  MOD_RES (17)..(18)..(19)..(20): Xaa is A or G or absent
SRVVMNEYQKYXXXXXXXXXIYLVSIPSLKTPAX

SEQ ID NO: 17020 - protein, 39 aa, Artificial Sequence
  Non-cyclic GFR-binding peptide
  MOD_RES (2)..(4)..(38)..(39): Xaa is C or S
  MOD_RES (16)..(17)..(18)..(19)..(20): Xaa is A or G
  MOD_RES (21)..(22)..(23)..(24): Xaa is A or G or absent
RXGXGEVVMEEYKFKXXXXXXXXXLYLMSIPELETPVXX

SEQ ID NO: 17021 - protein, 42 aa, Artificial Sequence
  Non-cyclic GFR-binding peptide
  MOD_RES (2)..(4)..(38)..(39): Xaa is C or S
  MOD_RES (16)..(17)..(18)..(19)..(20): Xaa is A or G
  MOD_RES (21)..(22)..(23)..(24): Xaa is A or G or absent
RXGXGEVVMDEYKFKXXXXXXXXXLYLMSIPELETPVXXAKP

SEQ ID NO: 17022 - protein, 41 aa, Artificial Sequence
  Non-cyclic GFR-binding peptide
  MOD_RES (2)..(4)..(35)..(36): Xaa is C or S
SXKXSKVVMEYQKYVKPTRGVIYLISIPSLDQPVXXPSASA

SEQ ID NO: 17023 - protein, 32 aa, Artificial Sequence
  Non-cyclic GFR-binding peptide
  MOD_RES (11)..(12)..(13)..(14)..(15): Xaa is A or G
  MOD_RES (16)..(17)..(18)..(19): Xaa is A or G or absent
RVVMNEYQKYXXXXXXXXXIYLVSIPSLQTPA

SEQ ID NO: 17024 - protein, 39 aa, Artificial Sequence
  Non-cyclic GFR-binding peptide
  MOD_RES (2)..(34)..(35): Xaa is C or S
GXARVVMNEYKFKIVNSSDDLYLVSIPELQTPAXXPKPV

SEQ ID NO: 17025 - protein, 38 aa, Artificial Sequence
  Non-cyclic GFR-binding peptide
  MOD_RES (1)..(35)..(36): Xaa is C or S
  MOD_RES (13)..(14)..(15)..(16)..(17): Xaa is A or G
  MOD_RES (18)..(19)..(20)..(21): Xaa is A or G or absent
XESVAMGYHYKLXXXXXXXXXKYLISIPSLKTPVXXAK

SEQ ID NO: 17026 - protein, 38 aa, Artificial Sequence
  Non-cyclic GFR-binding peptide
  MOD_RES (2)..(4)..(36)..(37): Xaa is C or S
HXGXARVVMNEYQKYIVNSSDDIYLVSIPSLQTPAXXP

SEQ ID NO: 17027 - protein, 32 aa, Artificial Sequence
  Non-cyclic GFR-binding peptide
  MOD_RES (31)..(32): Xaa is C or S
RVVMNEYKFKIVNSSDDLYLVSIPELQTPAXX

SEQ ID NO: 17028 - protein, 30 aa, Artificial Sequence; identical to SEQ ID NO: 2007
  Non-cyclic GFR-binding peptide

SEQ ID NO: 17029 - protein, 39 aa, Artificial Sequence
  Non-cyclic GFR-binding peptide
  MOD_RES (2)..(4)..(35)..(36): Xaa is C or S
SXKXSRVIMEYQKYVKPKRGVIYLISIPSLAQPVXXPAA

SEQ ID NO: 17030 - protein, 39 aa, Artificial Sequence
  Non-cyclic GFR-binding peptide
  MOD_RES (34)..(35): Xaa is C or S
  MOD_RES (12)..(13)..(14)..(15)..(16): Xaa is A or G
  MOD_RES (17)..(18)..(19)..(20): Xaa is A or G or absent
ARVVMNEYKFKXXXXXXXXXLYLVSIPELQTPAXXPKPV

SEQ ID NO: 17031 - protein, 40 aa, Artificial Sequence
  Non-cyclic GFR-binding peptide
  MOD_RES (1)..(34)..(35): Xaa is C or S
XEAVSMGEEYQKYTPVGMDDIYLVSIPSLKTPVXXAKGVK

SEQ ID NO: 17032 - protein, 39 aa, Artificial Sequence
  Non-cyclic GFR-binding peptide
  MOD_RES (2)..(36)..(37): Xaa is C or S
  MOD_RES (14)..(15)..(16)..(17)..(18): Xaa is A or G
  MOD_RES (19)..(20)..(21)..(22): Xaa is A or G or absent
GXGEVVMDEYQKYXXXXXXXXXIYLMSIPSLETPVXXAK

SEQ ID NO: 17033 - protein, 37 aa, Artificial Sequence
  Non-cyclic GFR-binding peptide
  MOD_RES (1)..(33)..(34): Xaa is C or S
XESVAMGYHYKLYTVVGKDKYLISIPSLKTPVXXAKS

SEQ ID NO: 17034 - protein, 38 aa, Artificial Sequence
  Non-cyclic GFR-binding peptide
  MOD_RES (2)..(33)..(34): Xaa is C or S
KXSRVIMEYKFKVKPKRGVLYLISIPELAQPVXXPAAS

SEQ ID NO: 17035 - protein, 37 aa, Artificial Sequence
  Non-cyclic GFR-binding peptide
  MOD_RES (31)..(32): Xaa is C or S
RVVMNEYQKYIVNSSDDIYLVSIPSLKTPAXXPKPVY

SEQ ID NO: 17036 - protein, 39 aa, Artificial Sequence
  Non-cyclic GFR-binding peptide
  MOD_RES (34)..(35): Xaa is C or S
  MOD_RES (12)..(13)..(14)..(15)..(16): Xaa is A or G
  MOD_RES (17)..(18)..(19)..(20): Xaa is A or G or absent
GEVVMDEYKFKXXXXXXXXXLYLMSIPELETPVXXAKPI

SEQ ID NO: 17037 - protein, 38 aa, Artificial Sequence
  Non-cyclic GFR-binding peptide
  MOD_RES (34)..(35): Xaa is C or S
  MOD_RES (12)..(13)..(14)..(15)..(16): Xaa is A or G
  MOD_RES (17)..(18)..(19)..(20): Xaa is A or G or absent
ARVVMNEYQKYXXXXXXXXXIYLVSIPSLQTPAXXPKP

SEQ ID NO: 17038 - protein, 37 aa, Artificial Sequence
  Non-cyclic GFR-binding peptide
  MOD_RES (34)..(35): Xaa is C or S
  MOD_RES (12)..(13)..(14)..(15)..(16): Xaa is A or G
  MOD_RES (17)..(18)..(19)..(20): Xaa is A or G or absent
ARVVMNEYKFKXXXXXXXXXLYLVSIPELQTPAXXPK

SEQ ID NO: 17039 - protein, 35 aa, Artificial Sequence
  Non-cyclic GFR-binding peptide
  MOD_RES (1)..(35): Xaa is C or S
  MOD_RES (13)..(14)..(15)..(16)..(17): Xaa is A or G
  MOD_RES (18)..(19)..(20)..(21): Xaa is A or G or absent
XGEVVMDEYKFKXXXXXXXXXLYLMSIPELETPVX

SEQ ID NO: 17040 - protein, 36 aa, Artificial Sequence
  Non-cyclic GFR-binding peptide
  MOD_RES (1)..(33)..(34): Xaa is C or S
XGEVVMEEYKFKVVKDYEDLYLMSIPELETPVXXAK

SEQ ID NO: 17041 - protein, 38 aa, Artificial Sequence
  Non-cyclic GFR-binding peptide
  MOD_RES (2)..(34)..(35): Xaa is C or S
GXSRVVMNEYKFKIVNSSDDLYLVSIPELKTPAXXPKP

SEQ ID NO: 17042 - protein, 31 aa, Artificial Sequence
  Non-cyclic GFR-binding peptide
AEVVMDYHYKLVVNNAADKYLISIPSLRAPV

SEQ ID NO: 17043 - protein, 31 aa, Artificial Sequence
  Non-cyclic GFR-binding peptide
  MOD_RES (31)..(31): Xaa is C or S
EVVMDEYKFKVVKENEDLYLMSIPELETPVX

SEQ ID NO: 17044 - protein, 40 aa, Artificial Sequence
  Non-cyclic GFR-binding peptide
  MOD_RES (2)..(4)..(35)..(36): Xaa is C or S
SXKXSKVVMEYQKYVKPTRGVIYLISIPSLDQPVXXPSAS

SEQ ID NO: 17045 - protein, 37 aa, Artificial Sequence
  Non-cyclic GFR-binding peptide
  MOD_RES (32)..(33): Xaa is C or S
AEVVMDYHYKLVVNNAADKYLISIPSLRAPVXXSAPA

SEQ ID NO: 17046 - protein, 39 aa, Artificial Sequence
  Non-cyclic GFR-binding peptide
  MOD_RES (33)..(34): Xaa is C or S
  MOD_RES (11)..(12)..(13)..(14)..(15): Xaa is A or G
  MOD_RES (16)..(17)..(18)..(19): Xaa is A or G or absent
SRVIMEYQKYXXXXXXXXXIYLISIPSLAQPVXXPAASA

SEQ ID NO: 17047 - protein, 31 aa, Artificial Sequence
  Non-cyclic GFR-binding peptide
GEVVMDEYKFKVVKENEDLYLMSIPELETPV

SEQ ID NO: 17048 - protein, 36 aa, Artificial Sequence
  Non-cyclic GFR-binding peptide
  MOD_RES (2)..(34)..(35): Xaa is C or S
GXESVAMGRYKKLYTVVGKDFYLISIANLKTPVXXA

SEQ ID NO: 17049 - protein, 38 aa, Artificial Sequence
  Non-cyclic GFR-binding peptide
  MOD_RES (32)..(33): Xaa is C or S
ARVVMNEYKFKIVNSSDDLYLVSIPELQTPAXXPKPVT

SEQ ID NO: 17050 - protein, 41 aa, Artificial Sequence
  Non-cyclic GFR-binding peptide
  MOD_RES (2)..(36)..(37): Xaa is C or S
  MOD_RES (14)..(15)..(16)..(17)..(18): Xaa is A or G
  MOD_RES (19)..(20)..(21)..(22): Xaa is A or G or absent
GXGEVVMDEYKFKXXXXXXXXXLYLMSIPELETPVXXAKPI

SEQ ID NO: 17051 - protein, 38 aa, Artificial Sequence
  Non-cyclic GFR-binding peptide
  MOD_RES (1)..(35)..(36): Xaa is C or S
  MOD_RES (13)..(14)..(15)..(16)..(17): Xaa is A or G
  MOD_RES (18)..(19)..(20)..(21): Xaa is A or G or absent
XESVAMGEYQKYXXXXXXXXXIYLISIPSLKTPVXXAK

SEQ ID NO: 17052 - protein, 38 aa, Artificial Sequence
  Non-cyclic GFR-binding peptide
  MOD_RES (1)..(3)..(35)..(36): Xaa is C or S
XGXESVAMGRYKKLYTVVGKDFYLISIANLKTPVXXAK

SEQ ID NO: 17053 - protein, 37 aa, Artificial Sequence
  Non-cyclic GFR-binding peptide
  MOD_RES (1)..(3)..(35)..(36): Xaa is C or S
XGXAKVVMNEYQKYIVNNSSDIYLVSIPSLKTPAXXA

SEQ ID NO: 17054 - protein, 40 aa, Artificial Sequence
  Non-cyclic GFR-binding peptide
  MOD_RES (1)..(3)..(37)..(38): Xaa is C or S
  MOD_RES (15)..(16)..(17)..(18)..(19): Xaa is A or G
  MOD_RES (20)..(21)..(22)..(23): Xaa is A or G or absent
XGXSRVVMNEYKFKXXXXXXXXXLYLVSIPELKTPAXXPK

SEQ ID NO: 17055 - protein, 40 aa, Artificial Sequence
  Non-cyclic GFR-binding peptide
  MOD_RES (1)..(3)..(35)..(36): Xaa is C or S
XGXGEVVMDEYQKYVVKENEDIYLMSIPSLETPVXXAKPI

SEQ ID NO: 17056 - protein, 42 aa, Artificial Sequence
  Non-cyclic GFR-binding peptide
  MOD_RES (2)..(4)..(36)..(37): Xaa is C or S
RXGXAEVVMDRYKKLVVNNAADFYLISIANLRAPVXXSAPAA

SEQ ID NO: 17057 - protein, 31 aa, Artificial Sequence
  Non-cyclic GFR-binding peptide
  MOD_RES (31)..(31): Xaa is C or S
RVVMNEYQKYIVNSSDDIYLVSIPSLKTPAX

SEQ ID NO: 17058 - protein, 39 aa, Artificial Sequence
  Non-cyclic GFR-binding peptide
  MOD_RES (2)..(36)..(37): Xaa is C or S
  MOD_RES (14)..(15)..(16)..(17)..(18): Xaa is A or G
  MOD_RES (19)..(20)..(21)..(22): Xaa is A or G or absent
GXESVAMGEYQKYXXXXXXXXXIYLISIPSLKTPVXXAK

SEQ ID NO: 17059 - protein, 41 aa, Artificial Sequence
  Non-cyclic GFR-binding peptide
  MOD_RES (2)..(4)..(38)..(39): Xaa is C or S
  MOD_RES (16)..(17)..(18)..(19)..(20): Xaa is A or G
  MOD_RES (21)..(22)..(23)..(24): Xaa is A or G or absent
HXGXARVVMNEYKFKXXXXXXXXXLYLVSIPELQTPAXXPK

SEQ ID NO: 17060 - protein, 35 aa, Artificial Sequence
  Non-cyclic GFR-binding peptide
  MOD_RES (1)..(35): Xaa is C or S
  MOD_RES (13)..(14)..(15)..(16)..(17): Xaa is A or G
  MOD_RES (18)..(19)..(20)..(21): Xaa is A or G or absent
XAEVVMDYHYKLXXXXXXXXXKYLISIPSLRAPVX

SEQ ID NO: 17061 - protein, 33 aa, Artificial Sequence
  Non-cyclic GFR-binding peptide
  MOD_RES (33)..(33): Xaa is C or S
  MOD_RES (11)..(12)..(13)..(14)..(15): Xaa is A or G
  MOD_RES (16)..(17)..(18)..(19): Xaa is A or G or absent
EVVMEEYQKYXXXXXXXXXIYLMSIPSLETPVX

SEQ ID NO: 17062 - protein, 35 aa, Artificial Sequence
  Non-cyclic GFR-binding peptide
  MOD_RES (1)..(1): Xaa is C or S
  MOD_RES (14)..(15)..(16)..(17)..(18): Xaa is A or G
  MOD_RES (19)..(20)..(21)..(22): Xaa is A or G or absent
XEAVSMGEEYKFKXXXXXXXXXLYLVSIPELKTPV

SEQ ID NO: 17063 - protein, 36 aa, Artificial Sequence
  Non-cyclic GFR-binding peptide
  MOD_RES (1)..(3)..(34)..(35): Xaa is C or S
XKXSKVVMEYKFKVKPTRGVLYLISIPELDQPVXXP

SEQ ID NO: 17064 - protein, 40 aa, Artificial Sequence
  Non-cyclic GFR-binding peptide
  MOD_RES (1)..(3)..(34)..(35): Xaa is C or S
XKXSRVIMEYKFKVKPKRGVLYLISIPELAQPVXXPAASA

SEQ ID NO: 17065 - protein, 41 aa, Artificial Sequence
  Non-cyclic GFR-binding peptide
  MOD_RES (1)..(3)..(38)..(39): Xaa is C or S
  MOD_RES (16)..(17)..(18)..(19)..(20): Xaa is A or G
  MOD_RES (21)..(22)..(23)..(24): Xaa is A or G or absent
XGXEAVSMGEEYQKYXXXXXXXXXIYLVSIPSLKTPVXXAK

SEQ ID NO: 17066 - protein, 36 aa, Artificial Sequence
  Non-cyclic GFR-binding peptide
  MOD_RES (1)..(3): Xaa is C or S
  MOD_RES (15)..(16)..(17)..(18)..(19): Xaa is A or G
  MOD_RES (20)..(21)..(22)..(23): Xaa is A or G or absent
XGXARVVMNEYKFKXXXXXXXXXLYLVSIPELQTPA

SEQ ID NO: 17067 - protein, 30 aa, Artificial Sequence
  Non-cyclic GFR-binding peptide
EVVMDRYKKLVVNNAADFYLISIANLRAPV

SEQ ID NO: 17068 - protein, 41 aa, Artificial Sequence
  Non-cyclic GFR-binding peptide
  MOD_RES (2)..(35)..(36): Xaa is C or S
  MOD_RES (13)..(14)..(15)..(16)..(17): Xaa is A or G
  MOD_RES (18)..(19)..(20)..(21): Xaa is A or G or absent
KXSKVVMEYQKYXXXXXXXXXIYLISIPSLDQPVXXPSASA

SEQ ID NO: 17069 - protein, 36 aa, Artificial Sequence
  Non-cyclic GFR-binding peptide
  MOD_RES (1)..(3)..(35)..(36): Xaa is C or S
XGXESVAMGEYQKYYTVVGKDIYLISIPSLKTPVXX

SEQ ID NO: 17070 - protein, 40 aa, Artificial Sequence
  Non-cyclic GFR-binding peptide
  MOD_RES (1)..(3)..(36)..(37): Xaa is C or S
XGXEAVSMGEEYKFKTPVGMDDLYLVSIPELKTPVXXAKG

SEQ ID NO: 17071 - protein, 38 aa, Artificial Sequence
  Non-cyclic GFR-binding peptide
  MOD_RES (1)..(3)..(35)..(36): Xaa is C or S
XGXAEVVMDEYKFKVVNNAADLYLISIPELRAPVXXSA

SEQ ID NO: 17072 - protein, 37 aa, Artificial Sequence
  Non-cyclic GFR-binding peptide
  MOD_RES (2)..(36)..(37): Xaa is C or S
  MOD_RES (14)..(15)..(16)..(17)..(18): Xaa is A or G
  MOD_RES (19)..(20)..(21)..(22): Xaa is A or G or absent
GXAEVVMDEYKFKXXXXXXXXXLYLISIPELRAPVXX

SEQ ID NO: 17073 - protein, 35 aa, Artificial Sequence
  Non-cyclic GFR-binding peptide
  MOD_RES (33)..(33): Xaa is C or S
  MOD_RES (11)..(12)..(13)..(14)..(15): Xaa is A or G
  MOD_RES (16)..(17)..(18)..(19): Xaa is A or G or absent
RVVMNEYQKYXXXXXXXXXIYLVSIPSLKTPAXTP

SEQ ID NO: 17074 - protein, 36 aa, Artificial Sequence
  Non-cyclic GFR-binding peptide
  MOD_RES (1)..(3): Xaa is C or S
  MOD_RES (15)..(16)..(17)..(18)..(19): Xaa is A or G
  MOD_RES (20)..(21)..(22)..(23): Xaa is A or G or absent
XGXARVVMNEYQKYXXXXXXXXXIYLVSIPSLQTPA

SEQ ID NO: 17075 - protein, 33 aa, Artificial Sequence
  Non-cyclic GFR-binding peptide
  MOD_RES (1)..(33): Xaa is C or S
XGEVVMEEYQKYVVKDYEDIYLMSIPSLETPVX

SEQ ID NO: 17076 - protein, 34 aa, Artificial Sequence
  Non-cyclic GFR-binding peptide
  MOD_RES (2)..(4): Xaa is C or S
SXKXSKVVMEYQKYVKPTRGVIYLISIPSLDQPV

SEQ ID NO: 17077 - protein, 39 aa, Artificial Sequence
  Non-cyclic GFR-binding peptide
  MOD_RES (34)..(35): Xaa is C or S
  MOD_RES (12)..(13)..(14)..(15)..(16): Xaa is A or G
  MOD_RES (17)..(18)..(19)..(20): Xaa is A or G or absent
AEVVMDYHYKLXXXXXXXXXKYLISIPSLRAPVXXSAPA

SEQ ID NO: 17078 - protein, 39 aa, Artificial Sequence
  Non-cyclic GFR-binding peptide
  MOD_RES (2)..(4)..(37)..(38): Xaa is C or S
  MOD_RES (15)..(16)..(17)..(18)..(19): Xaa is A or G
  MOD_RES (20)..(21)..(22)..(23): Xaa is A or G or absent
SXKXSRVIMEYKFKXXXXXXXXXLYLISIPELAQPVXXP

SEQ ID NO: 17079 - protein, 34 aa, Artificial Sequence
  Non-cyclic GFR-binding peptide
  MOD_RES (32)..(33): Xaa is C or S
GEVVMEEYQKYVVKDYEDIYLMSIPSLETPVXXA

SEQ ID NO: 17080 - protein, 42 aa, Artificial Sequence
  Non-cyclic GFR-binding peptide
  MOD_RES (2)..(37)..(38): Xaa is C or S
  MOD_RES (15)..(16)..(17)..(18)..(19): Xaa is A or G
  MOD_RES (20)..(21)..(22)..(23): Xaa is A or G or absent
GXEAVSMGEEYKFKXXXXXXXXXLYLVSIPELKTPVXXAKGV

SEQ ID NO: 17081 - protein, 35 aa, Artificial Sequence
  Non-cyclic GFR-binding peptide
  MOD_RES (2)..(33)..(34): Xaa is C or S
KXSRVIMEYKFKVKPKRGVLYLISIPELAQPVXXP

SEQ ID NO: 17082 - protein, 40 aa, Artificial Sequence
  Non-cyclic GFR-binding peptide
  MOD_RES (2)..(36)..(37): Xaa is C or S
  MOD_RES (14)..(15)..(16)..(17)..(18): Xaa is A or G
  MOD_RES (19)..(20)..(21)..(22): Xaa is A or G or absent
GXSRVVMNEYQKYXXXXXXXXXIYLVSIPSLKTPAXXPKP

SEQ ID NO: 17083 - protein, 38 aa, Artificial Sequence
  Non-cyclic GFR-binding peptide
  MOD_RES (2)..(34): Xaa is C or S
GXSRVVMNEYKFKIVNSSDDLYLVSIPELKTPAXTPKT

SEQ ID NO: 17084 - protein, 41 aa, Artificial Sequence
  Non-cyclic GFR-binding peptide
  MOD_RES (2)..(4)..(36)..(37): Xaa is C or S
RXGXESVAMGRYKKLYTVVGKDFYLISIANLKTPVXXAKSA

SEQ ID NO: 17085 - protein, 35 aa, Artificial Sequence
  Non-cyclic GFR-binding peptide
  MOD_RES (2)..(2): Xaa is C or S
  MOD_RES (14)..(15)..(16)..(17)..(18): Xaa is A or G
  MOD_RES (19)..(20)..(21)..(22): Xaa is A or G or absent
GXGEVVMEEYKFKXXXXXXXXXLYLMSIPELETPV

SEQ ID NO: 17086 - protein, 31 aa, Artificial Sequence
  Non-cyclic GFR-binding peptide
  MOD_RES (31)..(31): Xaa is C or S
SRVIMEYQKYVKPKRGVIYLISIPSLAQPVX

SEQ ID NO: 17087 - protein, 37 aa, Artificial Sequence
  Non-cyclic GFR-binding peptide
  MOD_RES (2)..(4)..(37): Xaa is C or S
  MOD_RES (15)..(16)..(17)..(18)..(19): Xaa is A or G
  MOD_RES (20)..(21)..(22)..(23): Xaa is A or G or absent
SXKXSRVIMEYKFKXXXXXXXXXLYLISIPELAQPVX

SEQ ID NO: 17088 - protein, 34 aa, Artificial Sequence
  Non-cyclic GFR-binding peptide
  MOD_RES (1)..(33)..(34): Xaa is C or S
XGEVVMDEYQKYVVKENEDIYLMSIPSLETPVXX

SEQ ID NO: 17089 - protein, 40 aa, Artificial Sequence
  Non-cyclic GFR-binding peptide
  MOD_RES (1)..(35)..(36): Xaa is C or S
  MOD_RES (13)..(14)..(15)..(16)..(17): Xaa is A or G
  MOD_RES (18)..(19)..(20)..(21): Xaa is A or G or absent
XARVVMNEYQKYXXXXXXXXXIYLVSIPSLQTPAXXPKPV

SEQ ID NO: 17090 - protein, 38 aa, Artificial Sequence
  Non-cyclic GFR-binding peptide
  MOD_RES (1)..(3)..(37)..(38): Xaa is C or S
  MOD_RES (15)..(16)..(17)..(18)..(19): Xaa is A or G
  MOD_RES (20)..(21)..(22)..(23): Xaa is A or G or absent
XGXESVAMGEYQKYXXXXXXXXXIYLISIPSLKTPVXX

SEQ ID NO: 17091 - protein, 34 aa, Artificial Sequence
  Non-cyclic GFR-binding peptide
  MOD_RES (32)..(33): Xaa is C or S
GEVVMDEYQKYVVKENEDIYLMSIPSLETPVXXA

SEQ ID NO: 17092 - protein, 39 aa, Artificial Sequence
  Non-cyclic GFR-binding peptide
  MOD_RES (33)..(34): Xaa is C or S
  MOD_RES (11)..(12)..(13)..(14)..(15): Xaa is A or G
  MOD_RES (16)..(17)..(18)..(19): Xaa is A or G or absent
SKVIMEYKFKXXXXXXXXXLYLISIPELDQSVXXPSASA

SEQ ID NO: 17093 - protein, 37 aa, Artificial Sequence
  Non-cyclic GFR-binding peptide
  MOD_RES (31)..(32): Xaa is C or S
SVAMGEYQKYYTVVGKDIYLISIPSLKTPVXXAKSAK

SEQ ID NO: 17094 - protein, 34 aa, Artificial Sequence
  Non-cyclic GFR-binding peptide
  MOD_RES (31)..(32): Xaa is C or S
KVVMNEYKFKIVNNSSDLYLVSIPELKTPAXXAK

SEQ ID NO: 17095 - protein, 38 aa, Artificial Sequence
  Non-cyclic GFR-binding peptide
  MOD_RES (2)..(4)..(35)..(36): Xaa is C or S
SXKXSKVIMEYKFKIKPTKGILYLISIPELDQSVXXPS

SEQ ID NO: 17096 - protein, 39 aa, Artificial Sequence
  Non-cyclic GFR-binding peptide
  MOD_RES (34)..(34): Xaa is C or S
  MOD_RES (12)..(13)..(14)..(15)..(16): Xaa is A or G
  MOD_RES (17)..(18)..(19)..(20): Xaa is A or G or absent
SRVVMNEYQKYXXXXXXXXXIYLVSIPSLKTPAXTPKTV

SEQ ID NO: 17097 - protein, 35 aa, Artificial Sequence
  Non-cyclic GFR-binding peptide
  MOD_RES (2)..(35): Xaa is C or S
GXEAVSMGEEYQKYTPVGMDDIYLVSIPSLKTPVX

SEQ ID NO: 17098 - protein, 34 aa, Artificial Sequence
  Non-cyclic GFR-binding peptide
  MOD_RES (34)..(34): Xaa is C or S
  MOD_RES (12)..(13)..(14)..(15)..(16): Xaa is A or G
  MOD_RES (17)..(18)..(19)..(20): Xaa is A or G or absent
AKVVMNEYQKYXXXXXXXXXIYLVSIPSLKTPAX

SEQ ID NO: 17099 - protein, 43 aa, Artificial Sequence
  Non-cyclic GFR-binding peptide
  MOD_RES (2)..(4)..(37)..(38): Xaa is C or S
RXGXEAVSMGEEYKFKTPVGMDDLYLVSIPELKTPVXXAKGVK

SEQ ID NO: 17100 - protein, 40 aa, Artificial Sequence
  Non-cyclic GFR-binding peptide
  MOD_RES (2)..(34)..(35): Xaa is C or S
GXSRVVMNEYQKYIVNSSDDIYLVSIPSLKTPAXXPKPVY

SEQ ID NO: 17101 - protein, 40 aa, Artificial Sequence
  Non-cyclic GFR-binding peptide
  MOD_RES (2)..(34)..(35): Xaa is C or S
GXESVAMGEYQKYYTVVGKDIYLISIPSLKTPVXXAKSAK

SEQ ID NO: 17102 - protein, 36 aa, Artificial Sequence
  Non-cyclic GFR-binding peptide
  MOD_RES (34)..(35): Xaa is C or S
  MOD_RES (12)..(13)..(14)..(15)..(16): Xaa is A or G
  MOD_RES (17)..(18)..(19)..(20): Xaa is A or G or absent
GEVVMDEYKFKXXXXXXXXXLYLMSIPELETPVXXA

SEQ ID NO: 17103 - protein, 34 aa, Artificial Sequence
  Non-cyclic GFR-binding peptide
  MOD_RES (1)..(33)..(34): Xaa is C or S
XGEVVMEEYQKYVVKDYEDIYLMSIPSLETPVXX

SEQ ID NO: 17104 - protein, 33 aa, Artificial Sequence
  Non-cyclic GFR-binding peptide
  MOD_RES (33)..(33): Xaa is C or S
  MOD_RES (11)..(12)..(13)..(14)..(15): Xaa is A or G
  MOD_RES (16)..(17)..(18)..(19): Xaa is A or G or absent
SRVIMEYQKYXXXXXXXXXIYLISIPSLAQPVX

SEQ ID NO: 17105 - protein, 38 aa, Artificial Sequence
  Non-cyclic GFR-binding peptide
  MOD_RES (33)..(34): Xaa is C or S
  MOD_RES (11)..(12)..(13)..(14)..(15): Xaa is A or G
  MOD_RES (16)..(17)..(18)..(19): Xaa is A or G or absent
SKVIMEYQKYXXXXXXXXXIYLISIPSLDQSVXXPSAS

SEQ ID NO: 17106 - protein, 35 aa, Artificial Sequence
  Non-cyclic GFR-binding peptide
  MOD_RES (2)..(4): Xaa is C or S
HXGXSRVVMNEYQKYIVNSSDDIYLVSIPSLKTPA

SEQ ID NO: 17107 - protein, 42 aa, Artificial Sequence
  Non-cyclic GFR-binding peptide
  MOD_RES (2)..(36)..(37): Xaa is C or S
  MOD_RES (14)..(15)..(16)..(17)..(18): Xaa is A or G
  MOD_RES (19)..(20)..(21)..(22): Xaa is A or G or absent
GXAEVVMDRYKKLXXXXXXXXXFYLISIANLRAPVXXSAPAA

SEQ ID NO: 17108 - protein, 41 aa, Artificial Sequence
  Non-cyclic GFR-binding peptide
  MOD_RES (2)..(4)..(38)..(39): Xaa is C or S
  MOD_RES (16)..(17)..(18)..(19)..(20): Xaa is A or G
  MOD_RES (21)..(22)..(23)..(24): Xaa is A or G or absent
RXGXAEVVMDRYKKLXXXXXXXXXFYLISIANLRAPVXXSA

SEQ ID NO: 17109 - protein, 44 aa, Artificial Sequence
  Non-cyclic GFR-binding peptide
  MOD_RES (2)..(4)..(38)..(39): Xaa is C or S
  MOD_RES (16)..(17)..(18)..(19)..(20): Xaa is A or G
  MOD_RES (21)..(22)..(23)..(24): Xaa is A or G or absent
RXGXESVAMGRYKKLXXXXXXXXXFYLISIANLKTPVXXAKSAK

SEQ ID NO: 17110 - protein, 40 aa, Artificial Sequence
  Non-cyclic GFR-binding peptide
  MOD_RES (2)..(4)..(37)..(38): Xaa is C or S
  MOD_RES (15)..(16)..(17)..(18)..(19): Xaa is A or G
  MOD_RES (20)..(21)..(22)..(23): Xaa is A or G or absent
SXKXSRVIMEYQKYXXXXXXXXXIYLISIPSLAQPVXXPA

SEQ ID NO: 17111 - protein, 40 aa, Artificial Sequence
  Non-cyclic GFR-binding peptide
  MOD_RES (1)..(3)..(35)..(36): Xaa is C or S
XGXESVAMGYHYKLYTVVGKDKYLISIPSLKTPVXXAKSA

SEQ ID NO: 17112 - protein, 35 aa, Artificial Sequence
  Non-cyclic GFR-binding peptide
  MOD_RES (1)..(3)..(35): Xaa is C or S
XGXGEVVMDEYQKYVVKENEDIYLMSIPSLETPVX

SEQ ID NO: 17113 - protein, 44 aa, Artificial Sequence
  Non-cyclic GFR-binding peptide
  MOD_RES (2)..(4)..(38)..(39): Xaa is C or S
  MOD_RES (16)..(17)..(18)..(19)..(20): Xaa is A or G
  MOD_RES (21)..(22)..(23)..(24): Xaa is A or G or absent
HXGXSRVVMNEYQKYXXXXXXXXXIYLVSIPSLKTPAXXPKPVY

SEQ ID NO: 17114 - protein, 41 aa, Artificial Sequence
  Non-cyclic GFR-binding peptide
  MOD_RES (2)..(4)..(38)..(39): Xaa is C or S
  MOD_RES (16)..(17)..(18)..(19)..(20): Xaa is A or G
  MOD_RES (21)..(22)..(23)..(24): Xaa is A or G or absent
RXGXAEVVMDEYKFKXXXXXXXXXLYLISIPELRAPVXXSA

SEQ ID NO: 17115 - protein, 35 aa, Artificial Sequence
  Non-cyclic GFR-binding peptide
  MOD_RES (1)..(3): Xaa is C or S
  MOD_RES (14)..(15)..(16)..(17)..(18): Xaa is A or G
  MOD_RES (19)..(20)..(21)..(22): Xaa is A or G or absent
XKXSKVIMEYKFKXXXXXXXXXLYLISIPELDQSV

SEQ ID NO: 17116 - protein, 36 aa, Artificial Sequence
  Non-cyclic GFR-binding peptide
  MOD_RES (1)..(34)..(35): Xaa is C or S
  MOD_RES (12)..(13)..(14)..(15)..(16): Xaa is A or G
  MOD_RES (17)..(18)..(19)..(20): Xaa is A or G or absent
XSKVVMEYKFKXXXXXXXXXLYLISIPELDQPVXXP

SEQ ID NO: 17117 - protein, 39 aa, Artificial Sequence
  Non-cyclic GFR-binding peptide
  MOD_RES (1)..(35)..(36): Xaa is C or S
  MOD_RES (13)..(14)..(15)..(16)..(17): Xaa is A or G
  MOD_RES (18)..(19)..(20)..(21): Xaa is A or G or absent
XGEVVMEEYKFKXXXXXXXXXLYLMSIPELETPVXXAKP

SEQ ID NO: 17118 - protein, 41 aa, Artificial Sequence
  Non-cyclic GFR-binding peptide
  MOD_RES (1)..(3)..(35)..(36): Xaa is C or S
XGXESVAMGEYQKYYTVVGKDIYLISIPSLKTPVXXAKSAK

SEQ ID NO: 17119 - protein, 41 aa, Artificial Sequence
  Non-cyclic GFR-binding peptide
  MOD_RES (2)..(36): Xaa is C or S
  MOD_RES (14)..(15)..(16)..(17)..(18): Xaa is A or G
  MOD_RES (19)..(20)..(21)..(22): Xaa is A or G or absent
GXSRVVMNEYQKYXXXXXXXXXIYLVSIPSLKTPAXTPKTV

SEQ ID NO: 17120 - protein, 39 aa, Artificial Sequence
  Non-cyclic GFR-binding peptide
  MOD_RES (1)..(3)..(36)..(37): Xaa is C or S
  MOD_RES (14)..(15)..(16)..(17)..(18): Xaa is A or G
  MOD_RES (19)..(20)..(21)..(22): Xaa is A or G or absent
XKXSRVIMEYKFKXXXXXXXXXLYLISIPELAQPVXXPA

SEQ ID NO: 17121 - protein, 38 aa, Artificial Sequence
  Non-cyclic GFR-binding peptide
  MOD_RES (1)..(3)..(36)..(37): Xaa is C or S
  MOD_RES (14)..(15)..(16)..(17)..(18): Xaa is A or G
  MOD_RES (19)..(20)..(21)..(22): Xaa is A or G or absent
XKXSRVIMEYQKYXXXXXXXXXIYLISIPSLAQPVXXP

SEQ ID NO: 17122 - protein, 35 aa, Artificial Sequence
  Non-cyclic GFR-binding peptide
  MOD_RES (31)..(32): Xaa is C or S
SRVIMEYKFKVKPKRGVLYLISIPELAQPVXXPAA

SEQ ID NO: 17123 - protein, 38 aa, Artificial Sequence
  Non-cyclic GFR-binding peptide
  MOD_RES (34)..(35): Xaa is C or S
  MOD_RES (12)..(13)..(14)..(15)..(16): Xaa is A or G
  MOD_RES (17)..(18)..(19)..(20): Xaa is A or G or absent
GEVVMEEYQKYXXXXXXXXXIYLMSIPSLETPVXXAKP

SEQ ID NO: 17124 - protein, 31 aa, Artificial Sequence
  Non-cyclic GFR-binding peptide
  MOD_RES (31)..(31): Xaa is C or S
SKVIMEYKFKIKPTKGILYLISIPELDQSVX

SEQ ID NO: 17125 - protein, 32 aa, Artificial Sequence
  Non-cyclic GFR-binding peptide
  MOD_RES (11)..(12)..(13)..(14)..(15): Xaa is A or G
  MOD_RES (16)..(17)..(18)..(19): Xaa is A or G or absent
EVVMEEYKFKXXXXXXXXXLYLMSIPELETPV

SEQ ID NO: 17126 - protein, 34 aa, Artificial Sequence
  Non-cyclic GFR-binding peptide
  MOD_RES (31)..(31): Xaa is C or S
RVVMNEYQKYIVNSSDDIYLVSIPSLKTPAXTPK

SEQ ID NO: 17127 - protein, 36 aa, Artificial Sequence
  Non-cyclic GFR-binding peptide
  MOD_RES (33)..(34): Xaa is C or S
  MOD_RES (11)..(12)..(13)..(14)..(15): Xaa is A or G
  MOD_RES (16)..(17)..(18)..(19): Xaa is A or G or absent
SKVVMEYKFKXXXXXXXXXLYLISIPELDQPVXXPS

SEQ ID NO: 17128 - protein, 33 aa, Artificial Sequence
  Non-cyclic GFR-binding peptide
  MOD_RES (32)..(33): Xaa is C or S
AEVVMDEYKFKVVNNAADLYLISIPELRAPVXX

SEQ ID NO: 17129 - protein, 37 aa, Artificial Sequence
  Non-cyclic GFR-binding peptide
  MOD_RES (32)..(33): Xaa is C or S
ESVAMGYHYKLYTVVGKDKYLISIPSLKTPVXXAKSA

SEQ ID NO: 17130 - protein, 37 aa, Artificial Sequence
  Non-cyclic GFR-binding peptide
  MOD_RES (2)..(4)..(36)..(37): Xaa is C or S
HXGXSRVVMNEYKFKIVNSSDDLYLVSIPELKTPAXX

SEQ ID NO: 17131 - protein, 35 aa, Artificial Sequence
  Non-cyclic GFR-binding peptide
  MOD_RES (34)..(35): Xaa is C or S
  MOD_RES (12)..(13)..(14)..(15)..(16): Xaa is A or G
  MOD_RES (17)..(18)..(19)..(20): Xaa is A or G or absent
ARVVMNEYQKYXXXXXXXXXIYLVSIPSLQTPAXX

SEQ ID NO: 17132 - protein, 38 aa, Artificial Sequence
  Non-cyclic GFR-binding peptide
  MOD_RES (32)..(33): Xaa is C or S
AEVVMDRYKKLVVNNAADFYLISIANLRAPVXXSAPAA

SEQ ID NO: 17133 - protein, 41 aa, Artificial Sequence
  Non-cyclic GFR-binding peptide
  MOD_RES (2)..(4)..(37)..(38): Xaa is C or S
  MOD_RES (15)..(16)..(17)..(18)..(19): Xaa is A or G
  MOD_RES (20)..(21)..(22)..(23): Xaa is A or G or absent
SXKXSKVIMEYKFKXXXXXXXXXLYLISIPELDQSVXXPSA

SEQ ID NO: 17134 - protein, 39 aa, Artificial Sequence
  Non-cyclic GFR-binding peptide
  MOD_RES (2)..(33)..(34): Xaa is C or S
KXSKVIMEYQKYIKPTKGIIYLISIPSLDQSVXXPSASA

SEQ ID NO: 17135 - protein, 41 aa, Artificial Sequence
  Non-cyclic GFR-binding peptide
  MOD_RES (2)..(4)..(36): Xaa is C or S
HXGXSRVVMNEYQKYIVNSSDDIYLVSIPSLKTPAXTPKTV

SEQ ID NO: 17136 - protein, 39 aa, Artificial Sequence
  Non-cyclic GFR-binding peptide
  MOD_RES (1)..(3)..(36)..(37): Xaa is C or S
  MOD_RES (14)..(15)..(16)..(17)..(18): Xaa is A or G
  MOD_RES (19)..(20)..(21)..(22): Xaa is A or G or absent
XKXSKVIMEYKFKXXXXXXXXXLYLISIPELDQSVXXPS

SEQ ID NO: 17137 - protein, 35 aa, Artificial Sequence
  Non-cyclic GFR-binding peptide
  MOD_RES (1)..(34)..(35): Xaa is C or S
  MOD_RES (12)..(13)..(14)..(15)..(16): Xaa is A or G
  MOD_RES (17)..(18)..(19)..(20): Xaa is A or G or absent
XSKVIMEYKFKXXXXXXXXXLYLISIPELDQSVXX

SEQ ID NO: 17138 - protein, 39 aa, Artificial Sequence
  Non-cyclic GFR-binding peptide
  MOD_RES (1)..(33)..(34): Xaa is C or S
XAKVVMNEYKFKIVNNSSDLYLVSIPELKTPAXXAKPVA

SEQ ID NO: 17139 - protein, 34 aa, Artificial Sequence
  Non-cyclic GFR-binding peptide
  MOD_RES (1)..(3): Xaa is C or S
XGXSRVVMNEYQKYIVNSSDDIYLVSIPSLKTPA

SEQ ID NO: 17140 - protein, 42 aa, Artificial Sequence
  Non-cyclic GFR-binding peptide
  MOD_RES (2)..(4)..(38)..(39): Xaa is C or S
  MOD_RES (16)..(17)..(18)..(19)..(20): Xaa is A or G
  MOD_RES (21)..(22)..(23)..(24): Xaa is A or G or absent
RXGXGEVVMEEYKFKXXXXXXXXXLYLMSIPELETPVXXAKP

SEQ ID NO: 17141 - protein, 38 aa, Artificial Sequence
  Non-cyclic GFR-binding peptide
  MOD_RES (2)..(34)..(35): Xaa is C or S
GXGEVVMDEYKFKVVKENEDLYLMSIPELETPVXXAKP

SEQ ID NO: 17142 - protein, 32 aa, Artificial Sequence
  Non-cyclic GFR-binding peptide
  MOD_RES (31)..(32): Xaa is C or S
SVAMGRYKKLYTVVGKDFYLISIANLKTPVXX

SEQ ID NO: 17143 - protein, 33 aa, Artificial Sequence
  Non-cyclic GFR-binding peptide
  MOD_RES (1)..(3): Xaa is C or S
XKXSKVIMEYQKYIKPTKGIIYLISIPSLDQSV

SEQ ID NO: 17144 - protein, 40 aa, Artificial Sequence
  Non-cyclic GFR-binding peptide
  MOD_RES (1)..(35)..(36): Xaa is C or S
  MOD_RES (13)..(14)..(15)..(16)..(17): Xaa is A or G
  MOD_RES (18)..(19)..(20)..(21): Xaa is A or G or absent
XAKVVMNEYKFKXXXXXXXXXLYLVSIPELKTPAXXAKPV

SEQ ID NO: 17145 - protein, 39 aa, Artificial Sequence
  Non-cyclic GFR-binding peptide
  MOD_RES (34)..(35): Xaa is C or S
  MOD_RES (12)..(13)..(14)..(15)..(16): Xaa is A or G
  MOD_RES (17)..(18)..(19)..(20): Xaa is A or G or absent
SRVVMNEYKFKXXXXXXXXXLYLVSIPELKTPAXXPKPV

SEQ ID NO: 17146 - protein, 34 aa, Artificial Sequence
  Non-cyclic GFR-binding peptide
  MOD_RES (1)..(3)..(34): Xaa is C or S
XKXSKVVMEYQKYVKPTRGVIYLISIPSLDQPVX

SEQ ID NO: 17147 - protein, 40 aa, Artificial Sequence
  Non-cyclic GFR-binding peptide
  MOD_RES (2)..(4)..(35)..(36): Xaa is C or S
SXKXSKVIMEYKFKIKPTKGILYLISIPELDQSVXXPSAS

SEQ ID NO: 17148 - protein, 40 aa, Artificial Sequence
  Non-cyclic GFR-binding peptide
  MOD_RES (2)..(35)..(36): Xaa is C or S
  MOD_RES (13)..(14)..(15)..(16)..(17): Xaa is A or G
  MOD_RES (18)..(19)..(20)..(21): Xaa is A or G or absent
KXSKVVMEYQKYXXXXXXXXXIYLISIPSLDQPVXXPSAS

SEQ ID NO: 17149 - protein, 39 aa, Artificial Sequence
  Non-cyclic GFR-binding peptide
  MOD_RES (2)..(4)..(36)..(37): Xaa is C or S
HXGXAKVVMNEYQKYIVNNSSDIYLVSIPSLKTPAXXAK

SEQ ID NO: 17150 - protein, 41 aa, Artificial Sequence
  Non-cyclic GFR-binding peptide
  MOD_RES (2)..(4)..(37)..(38): Xaa is C or S
  MOD_RES (15)..(16)..(17)..(18)..(19): Xaa is A or G
  MOD_RES (20)..(21)..(22)..(23): Xaa is A or G or absent
SXKXSRVIMEYQKYXXXXXXXXXIYLISIPSLAQPVXXPAA

SEQ ID NO: 17151 - protein, 40 aa, Artificial Sequence
  Non-cyclic GFR-binding peptide
  MOD_RES (2)..(36)..(37): Xaa is C or S
  MOD_RES (14)..(15)..(16)..(17)..(18): Xaa is A or G
  MOD_RES (19)..(20)..(21)..(22): Xaa is A or G or absent
GXAEVVMDRYKKLXXXXXXXXXFYLISIANLRAPVXXSAP

SEQ ID NO: 17152 - protein, 35 aa, Artificial Sequence
  Non-cyclic GFR-binding peptide
  MOD_RES (32)..(33): Xaa is C or S
ARVVMNEYQKYIVNSSDDIYLVSIPSLQTPAXXPK

SEQ ID NO: 17153 - protein, 41 aa, Artificial Sequence
  Non-cyclic GFR-binding peptide
  MOD_RES (1)..(3)..(36)..(37): Xaa is C or S
  MOD_RES (14)..(15)..(16)..(17)..(18): Xaa is A or G
  MOD_RES (19)..(20)..(21)..(22): Xaa is A or G or absent
XKXSKVVMEYKFKXXXXXXXXXLYLISIPELDQPVXXPSAS

SEQ ID NO: 17154 - protein, 38 aa, Artificial Sequence
  Non-cyclic GFR-binding peptide
  MOD_RES (2)..(36)..(37): Xaa is C or S
  MOD_RES (14)..(15)..(16)..(17)..(18): Xaa is A or G
  MOD_RES (19)..(20)..(21)..(22): Xaa is A or G or absent
GXESVAMGRYKKLXXXXXXXXXFYLISIANLKTPVXXA

SEQ ID NO: 17155 - protein, 40 aa, Artificial Sequence
  Non-cyclic GFR-binding peptide
  MOD_RES (2)..(35)..(36): Xaa is C or S
  MOD_RES (13)..(14)..(15)..(16)..(17): Xaa is A or G
  MOD_RES (18)..(19)..(20)..(21): Xaa is A or G or absent
KXSRVIMEYKFKXXXXXXXXXLYLISIPELAQPVXXPAAS

SEQ ID NO: 17156 - protein, 36 aa, Artificial Sequence
  Non-cyclic GFR-binding peptide
  MOD_RES (34)..(35): Xaa is C or S
  MOD_RES (12)..(13)..(14)..(15)..(16): Xaa is A or G
  MOD_RES (17)..(18)..(19)..(20): Xaa is A or G or absent
AEVVMDYHYKLXXXXXXXXXKYLISIPSLRAPVXXS

SEQ ID NO: 17157 - protein, 41 aa, Artificial Sequence
  Non-cyclic GFR-binding peptide
  MOD_RES (1)..(35)..(36): Xaa is C or S
  MOD_RES (13)..(14)..(15)..(16)..(17): Xaa is A or G
  MOD_RES (18)..(19)..(20)..(21): Xaa is A or G or absent
XARVVMNEYQKYXXXXXXXXXIYLVSIPSLQTPAXXPKPVT

SEQ ID NO: 17158 - protein, 41 aa, Artificial Sequence
  Non-cyclic GFR-binding peptide
  MOD_RES (2)..(4)..(35)..(36): Xaa is C or S
SXKXSKVVMEYKFKVKPTRGVLYLISIPELDQPVXXPSASA

SEQ ID NO: 17159 - protein, 34 aa, Artificial Sequence
  Non-cyclic GFR-binding peptide
  MOD_RES (32)..(33): Xaa is C or S
SRVVMNEYKFKIVNSSDDLYLVSIPELKTPAXXP

SEQ ID NO: 17160 - protein, 37 aa, Artificial Sequence
  Non-cyclic GFR-binding peptide
  MOD_RES (2)..(4): Xaa is C or S
  MOD_RES (16)..(17)..(18)..(19)..(20): Xaa is A or G
  MOD_RES (21)..(22)..(23)..(24): Xaa is A or G or absent
RXGXGEVVMEEYQKYXXXXXXXXXIYLMSIPSLETPV

SEQ ID NO: 17161 - protein, 37 aa, Artificial Sequence
  Non-cyclic GFR-binding peptide
  MOD_RES (2)..(36)..(37): Xaa is C or S
  MOD_RES (14)..(15)..(16)..(17)..(18): Xaa is A or G
  MOD_RES (19)..(20)..(21)..(22): Xaa is A or G or absent
GXGEVVMEEYQKYXXXXXXXXXIYLMSIPSLETPVXX

SEQ ID NO: 17162 - protein, 38 aa, Artificial Sequence
  Non-cyclic GFR-binding peptide
  MOD_RES (1)..(32)..(33): Xaa is C or S
XSKVVMEYKFKVKPTRGVLYLISIPELDQPVXXPSASA

SEQ ID NO: 17163 - protein, 37 aa, Artificial Sequence
  Non-cyclic GFR-binding peptide
  MOD_RES (32)..(33): Xaa is C or S
ESVAMGEYQKYYTVVGKDIYLISIPSLKTPVXXAKSA

SEQ ID NO: 17164 - protein, 40 aa, Artificial Sequence
  Non-cyclic GFR-binding peptide
  MOD_RES (2)..(4)..(36)..(37): Xaa is C or S
RXGXGEVVMDEYKFKVVKENEDLYLMSIPELETPVXXAKP

SEQ ID NO: 17165 - protein, 39 aa, Artificial Sequence
  Non-cyclic GFR-binding peptide
  MOD_RES (1)..(34)..(35): Xaa is C or S
  MOD_RES (12)..(13)..(14)..(15)..(16): Xaa is A or G
  MOD_RES (17)..(18)..(19)..(20): Xaa is A or G or absent
XSRVIMEYQKYXXXXXXXXXIYLISIPSLAQPVXXPAAS

SEQ ID NO: 17166 - protein, 38 aa, Artificial Sequence
  Non-cyclic GFR-binding peptide
  MOD_RES (1)..(3)..(37)..(38): Xaa is C or S
  MOD_RES (15)..(16)..(17)..(18)..(19): Xaa is A or G
  MOD_RES (20)..(21)..(22)..(23): Xaa is A or G or absent
XGXSRVVMNEYQKYXXXXXXXXXIYLVSIPSLKTPAXX

SEQ ID NO: 17167 - protein, 35 aa, Artificial Sequence
  Non-cyclic GFR-binding peptide
  MOD_RES (2)..(33)..(34): Xaa is C or S
KXSKVVMEYQKYVKPTRGVIYLISIPSLDQPVXXP

SEQ ID NO: 17168 - protein, 41 aa, Artificial Sequence
  Non-cyclic GFR-binding peptide
  MOD_RES (1)..(35): Xaa is C or S
  MOD_RES (13)..(14)..(15)..(16)..(17): Xaa is A or G
  MOD_RES (18)..(19)..(20)..(21): Xaa is A or G or absent
XSRVVMNEYQKYXXXXXXXXXIYLVSIPSLKTPAXTPKTVH

SEQ ID NO: 17169 - protein, 41 aa, Artificial Sequence
  Non-cyclic GFR-binding peptide
  MOD_RES (1)..(3)..(37)..(38): Xaa is C or S
  MOD_RES (15)..(16)..(17)..(18)..(19): Xaa is A or G
  MOD_RES (20)..(21)..(22)..(23): Xaa is A or G or absent
XGXAKVVMNEYKFKXXXXXXXXXLYLVSIPELKTPAXXAKP

SEQ ID NO: 17170 - protein, 38 aa, Artificial Sequence
  Non-cyclic GFR-binding peptide
  MOD_RES (2)..(4)..(38): Xaa is C or S
  MOD_RES (16)..(17)..(18)..(19)..(20): Xaa is A or G
  MOD_RES (21)..(22)..(23)..(24): Xaa is A or G or absent
RXGXGEVVMEEYQKYXXXXXXXXXIYLMSIPSLETPVX

SEQ ID NO: 17171 - protein, 37 aa, Artificial Sequence
  Non-cyclic GFR-binding peptide
  MOD_RES (2)..(4)..(37): Xaa is C or S
  MOD_RES (15)..(16)..(17)..(18)..(19): Xaa is A or G
  MOD_RES (20)..(21)..(22)..(23): Xaa is A or G or absent
SXKXSRVIMEYQKYXXXXXXXXXIYLISIPSLAQPVX

SEQ ID NO: 17172 - protein, 35 aa, Artificial Sequence
  Non-cyclic GFR-binding peptide
  MOD_RES (2)..(34)..(35): Xaa is C or S
GXARVVMNEYQKYIVNSSDDIYLVSIPSLQTPAXX

SEQ ID NO: 17173 - protein, 34 aa, Artificial Sequence
  Non-cyclic GFR-binding peptide
  MOD_RES (1)..(33)..(34): Xaa is C or S
XAKVVMNEYQKYIVNNSSDIYLVSIPSLKTPAXX

SEQ ID NO: 17174 - protein, 36 aa, Artificial Sequence
  Non-cyclic GFR-binding peptide
  MOD_RES (1)..(3): Xaa is C or S
  MOD_RES (15)..(16)..(17)..(18)..(19): Xaa is A or G
  MOD_RES (20)..(21)..(22)..(23): Xaa is A or G or absent
XGXAKVVMNEYKFKXXXXXXXXXLYLVSIPELKTPA

SEQ ID NO: 17175 - protein, 36 aa, Artificial Sequence
  Non-cyclic GFR-binding peptide
  MOD_RES (2)..(36): Xaa is C or S
  MOD_RES (14)..(15)..(16)..(17)..(18): Xaa is A or G
  MOD_RES (19)..(20)..(21)..(22): Xaa is A or G or absent
GXAKVVMNEYQKYXXXXXXXXXIYLVSIPSLKTPAX

SEQ ID NO: 17176 - protein, 38 aa, Artificial Sequence
  Non-cyclic GFR-binding peptide
  MOD_RES (1)..(35): Xaa is C or S
  MOD_RES (13)..(14)..(15)..(16)..(17): Xaa is A or G
  MOD_RES (18)..(19)..(20)..(21): Xaa is A or G or absent
XSRVVMNEYQKYXXXXXXXXXIYLVSIPSLKTPAXTPK

SEQ ID NO: 17177 - protein, 36 aa, Artificial Sequence
  Non-cyclic GFR-binding peptide
  MOD_RES (2)..(36): Xaa is C or S
  MOD_RES (14)..(15)..(16)..(17)..(18): Xaa is A or G
  MOD_RES (19)..(20)..(21)..(22): Xaa is A or G or absent
GXGEVVMDEYKFKXXXXXXXXXLYLMSIPELETPVX

SEQ ID NO: 17178 - protein, 34 aa, Artificial Sequence
  Non-cyclic GFR-binding peptide
  MOD_RES (34)..(34): Xaa is C or S
  MOD_RES (12)..(13)..(14)..(15)..(16): Xaa is A or G
  MOD_RES (17)..(18)..(19)..(20): Xaa is A or G or absent
ARVVMNEYQKYXXXXXXXXXIYLVSIPSLQTPAX

SEQ ID NO: 17179 - protein, 36 aa, Artificial Sequence
  Non-cyclic GFR-binding peptide
  MOD_RES (31)..(32): Xaa is C or S
RVVMNEYKFKIVNSSDDLYLVSIPELQTPAXXPKPV

SEQ ID NO: 17180 - protein, 39 aa, Artificial Sequence
  Non-cyclic GFR-binding peptide
  MOD_RES (33)..(34): Xaa is C or S
  MOD_RES (11)..(12)..(13)..(14)..(15): Xaa is A or G
  MOD_RES (16)..(17)..(18)..(19): Xaa is A or G or absent
KVVMNEYQKYXXXXXXXXXIYLVSIPSLKTPAXXAKPVA

SEQ ID NO: 17181 - protein, 36 aa, Artificial Sequence
  Non-cyclic GFR-binding peptide
  MOD_RES (1)..(33): Xaa is C or S
XSRVVMNEYKFKIVNSSDDLYLVSIPELKTPAXTPK

SEQ ID NO: 17182 - protein, 35 aa, Artificial Sequence
  Non-cyclic GFR-binding peptide
  MOD_RES (35)..(35): Xaa is C or S
  MOD_RES (13)..(14)..(15)..(16)..(17): Xaa is A or G
  MOD_RES (18)..(19)..(20)..(21): Xaa is A or G or absent
EAVSMGEEYKFKXXXXXXXXXLYLVSIPELKTPVX

SEQ ID NO: 17183 - protein, 39 aa, Artificial Sequence
  Non-cyclic GFR-binding peptide
  MOD_RES (2)..(4)..(37)..(38): Xaa is C or S
  MOD_RES (15)..(16)..(17)..(18)..(19): Xaa is A or G
  MOD_RES (20)..(21)..(22)..(23): Xaa is A or G or absent
SXKXSKVVMEYKFKXXXXXXXXXLYLISIPELDQPVXXP

SEQ ID NO: 17184 - protein, 41 aa, Artificial Sequence
  Non-cyclic GFR-binding peptide
  MOD_RES (1)..(3)..(37): Xaa is C or S
  MOD_RES (15)..(16)..(17)..(18)..(19): Xaa is A or G
  MOD_RES (20)..(21)..(22)..(23): Xaa is A or G or absent
XGXSRVVMNEYKFKXXXXXXXXXLYLVSIPELKTPAXTPKT

SEQ ID NO: 17185 - protein, 38 aa, Artificial Sequence
  Non-cyclic GFR-binding peptide
  MOD_RES (1)..(33)..(34): Xaa is C or S
XAEVVMDEYKFKVVNNAADLYLISIPELRAPVXXSAPA

SEQ ID NO: 17186 - protein, 39 aa, Artificial Sequence
  Non-cyclic GFR-binding peptide
  MOD_RES (33)..(34): Xaa is C or S
  MOD_RES (11)..(12)..(13)..(14)..(15): Xaa is A or G
  MOD_RES (16)..(17)..(18)..(19): Xaa is A or G or absent
EVVMDEYQKYXXXXXXXXXIYLMSIPSLETPVXXAKPIK

SEQ ID NO: 17187 - protein, 38 aa, Artificial Sequence
  Non-cyclic GFR-binding peptide
  MOD_RES (1)..(3)..(35)..(36): Xaa is C or S
XGXAKVVMNEYKFKIVNNSSDLYLVSIPELKTPAXXAK

SEQ ID NO: 17188 - protein, 36 aa, Artificial Sequence
  Non-cyclic GFR-binding peptide
  MOD_RES (2)..(33)..(34): Xaa is C or S
KXSKVVMEYQKYVKPTRGVIYLISIPSLDQPVXXPS

SEQ ID NO: 17189 - protein, 37 aa, Artificial Sequence
  Non-cyclic GFR-binding peptide
  MOD_RES (2)..(4)..(36)..(37): Xaa is C or S
RXGXAEVVMDRYKKLVVNNAADFYLISIANLRAPVXX

SEQ ID NO: 17190 - protein, 38 aa, Artificial Sequence
  Non-cyclic GFR-binding peptide
  MOD_RES (2)..(4)..(36)..(37): Xaa is C or S
HXGXAKVVMNEYKFKIVNNSSDLYLVSIPELKTPAXXA

SEQ ID NO: 17191 - protein, 34 aa, Artificial Sequence
  Non-cyclic GFR-binding peptide
  MOD_RES (32)..(33): Xaa is C or S
AKVVMNEYQKYIVNNSSDIYLVSIPSLKTPAXXA

SEQ ID NO: 17192 - protein, 36 aa, Artificial Sequence
  Non-cyclic GFR-binding peptide
  MOD_RES (1)..(32)..(33): Xaa is C or S
XSKVIMEYQKYIKPTKGIIYLISIPSLDQSVXXPSA

SEQ ID NO: 17193 - protein, 33 aa, Artificial Sequence
  Non-cyclic GFR-binding peptide
  MOD_RES (12)..(13)..(14)..(15)..(16): Xaa is A or G
  MOD_RES (17)..(18)..(19)..(20): Xaa is A or G or absent
AEVVMDYHYKLXXXXXXXXXKYLISIPSLRAPV

SEQ ID NO: 17194 - protein, 37 aa, Artificial Sequence
  Non-cyclic GFR-binding peptide
  MOD_RES (2)..(4)..(36)..(37): Xaa is C or S
HXGXSRVVMNEYQKYIVNSSDDIYLVSIPSLKTPAXX

SEQ ID NO: 17195 - protein, 39 aa, Artificial Sequence
  Non-cyclic GFR-binding peptide
  MOD_RES (1)..(3)..(35)..(36): Xaa is C or S
XGXAEVVMDRYKKLVVNNAADFYLISIANLRAPVXXSAP

SEQ ID NO: 17196 - protein, 36 aa, Artificial Sequence
  Non-cyclic GFR-binding peptide
  MOD_RES (34)..(35): Xaa is C or S
  MOD_RES (12)..(13)..(14)..(15)..(16): Xaa is A or G
  MOD_RES (17)..(18)..(19)..(20): Xaa is A or G or absent
ESVAMGEYQKYXXXXXXXXXIYLISIPSLKTPVXXA

SEQ ID NO: 17197 - protein, 37 aa, Artificial Sequence
  Non-cyclic GFR-binding peptide
  MOD_RES (33)..(34): Xaa is C or S
EAVSMGEEYQKYTPVGMDDIYLVSIPSLKTPVXXAKG

SEQ ID NO: 17198 - protein, 42 aa, Artificial Sequence
  Non-cyclic GFR-binding peptide
  MOD_RES (1)..(3)..(37)..(38): Xaa is C or S
  MOD_RES (15)..(16)..(17)..(18)..(19): Xaa is A or G
  MOD_RES (20)..(21)..(22)..(23): Xaa is A or G or absent
XGXAKVVMNEYQKYXXXXXXXXXIYLVSIPSLKTPAXXAKPV

SEQ ID NO: 17199 - protein, 41 aa, Artificial Sequence
  Non-cyclic GFR-binding peptide
  MOD_RES (1)..(35)..(36): Xaa is C or S
  MOD_RES (13)..(14)..(15)..(16)..(17): Xaa is A or G
  MOD_RES (18)..(19)..(20)..(21): Xaa is A or G or absent
XAKVVMNEYKFKXXXXXXXXXLYLVSIPELKTPAXXAKPVA

SEQ ID NO: 17200 - protein, 40 aa, Artificial Sequence
  Non-cyclic GFR-binding peptide
  MOD_RES (1)..(35)..(36): Xaa is C or S
  MOD_RES (13)..(14)..(15)..(16)..(17): Xaa is A or G
  MOD_RES (18)..(19)..(20)..(21): Xaa is A or G or absent
XAKVVMNEYQKYXXXXXXXXXIYLVSIPSLKTPAXXAKPV

SEQ ID NO: 17201 - protein, 39 aa, Artificial Sequence
  Non-cyclic GFR-binding peptide
  MOD_RES (1)..(35)..(36): Xaa is C or S
  MOD_RES (13)..(14)..(15)..(16)..(17): Xaa is A or G
  MOD_RES (18)..(19)..(20)..(21): Xaa is A or G or absent
XSRVVMNEYKFKXXXXXXXXXLYLVSIPELKTPAXXPKP

SEQ ID NO: 17202 - protein, 34 aa, Artificial Sequence
  Non-cyclic GFR-binding peptide
  MOD_RES (33)..(34): Xaa is C or S
  MOD_RES (11)..(12)..(13)..(14)..(15): Xaa is A or G
  MOD_RES (16)..(17)..(18)..(19): Xaa is A or G or absent
RVVMNEYQKYXXXXXXXXXIYLVSIPSLQTPAXX

SEQ ID NO: 17203 - protein, 36 aa, Artificial Sequence
  Non-cyclic GFR-binding peptide
  MOD_RES (33)..(34): Xaa is C or S
  MOD_RES (11)..(12)..(13)..(14)..(15): Xaa is A or G
  MOD_RES (16)..(17)..(18)..(19): Xaa is A or G or absent
KVVMNEYKFKXXXXXXXXXLYLVSIPELKTPAXXAK

SEQ ID NO: 17204 - protein, 33 aa, Artificial Sequence
  Non-cyclic GFR-binding peptide
  MOD_RES (1)..(3): Xaa is C or S
XKXSKVVMEYQKYVKPTRGVIYLISIPSLDQPV

SEQ ID NO: 17205 - protein, 36 aa, Artificial Sequence
  Non-cyclic GFR-binding peptide
  MOD_RES (31)..(32): Xaa is C or S
SVAMGYHYKLYTVVGKDKYLISIPSLKTPVXXAKSA

SEQ ID NO: 17206 - protein, 38 aa, Artificial Sequence
  Non-cyclic GFR-binding peptide
  MOD_RES (1)..(33)..(34): Xaa is C or S
XARVVMNEYKFKIVNSSDDLYLVSIPELQTPAXXPKPV

SEQ ID NO: 17207 - protein, 37 aa, Artificial Sequence
  Non-cyclic GFR-binding peptide
  MOD_RES (32)..(33): Xaa is C or S
GEVVMEEYKFKVVKDYEDLYLMSIPELETPVXXAKPI

SEQ ID NO: 17208 - protein, 42 aa, Artificial Sequence
  Non-cyclic GFR-binding peptide
  MOD_RES (2)..(4)..(38)..(39): Xaa is C or S
  MOD_RES (16)..(17)..(18)..(19)..(20): Xaa is A or G
  MOD_RES (21)..(22)..(23)..(24): Xaa is A or G or absent
RXGXESVAMGRYKKLXXXXXXXXXFYLISIANLKTPVXXAKS

SEQ ID NO: 17209 - protein, 41 aa, Artificial Sequence
  Non-cyclic GFR-binding peptide
  MOD_RES (2)..(4)..(36)..(37): Xaa is C or S
RXGXGEVVMDEYKFKVVKENEDLYLMSIPELETPVXXAKPI

SEQ ID NO: 17210 - protein, 34 aa, Artificial Sequence
  Non-cyclic GFR-binding peptide
  MOD_RES (34)..(34): Xaa is C or S
  MOD_RES (12)..(13)..(14)..(15)..(16): Xaa is A or G
  MOD_RES (17)..(18)..(19)..(20): Xaa is A or G or absent
AEVVMDRYKKLXXXXXXXXXFYLISIANLRAPVX

SEQ ID NO: 17211 - protein, 35 aa, Artificial Sequence
  Non-cyclic GFR-binding peptide
  MOD_RES (1)..(32)..(33): Xaa is C or S
XSKVIMEYQKYIKPTKGIIYLISIPSLDQSVXXPS

SEQ ID NO: 17212 - protein, 43 aa, Artificial Sequence
  Non-cyclic GFR-binding peptide
  MOD_RES (2)..(4)..(37)..(38): Xaa is C or S
RXGXEAVSMGEEYQKYTPVGMDDIYLVSIPSLKTPVXXAKGVK

SEQ ID NO: 17213 - protein, 38 aa, Artificial Sequence
  Non-cyclic GFR-binding peptide
  MOD_RES (2)..(4): Xaa is C or S
  MOD_RES (17)..(18)..(19)..(20)..(21): Xaa is A or G
  MOD_RES (22)..(23)..(24)..(25): Xaa is A or G or absent
RXGXEAVSMGEEYQKYXXXXXXXXXIYLVSIPSLKTPV

SEQ ID NO: 17214 - protein, 39 aa, Artificial Sequence
  Non-cyclic GFR-binding peptide
  MOD_RES (1)..(3)..(37)..(38): Xaa is C or S
  MOD_RES (15)..(16)..(17)..(18)..(19): Xaa is A or G
  MOD_RES (20)..(21)..(22)..(23): Xaa is A or G or absent
XGXAKVVMNEYQKYXXXXXXXXXIYLVSIPSLKTPAXXA

SEQ ID NO: 17215 - protein, 36 aa, Artificial Sequence
  Non-cyclic GFR-binding peptide
  MOD_RES (1)..(35)..(36): Xaa is C or S
  MOD_RES (13)..(14)..(15)..(16)..(17): Xaa is A or G
  MOD_RES (18)..(19)..(20)..(21): Xaa is A or G or absent
XAEVVMDYHYKLXXXXXXXXXKYLISIPSLRAPVXX

SEQ ID NO: 17216 - protein, 43 aa, Artificial Sequence
  Non-cyclic GFR-binding peptide
  MOD_RES (2)..(4)..(38): Xaa is C or S
  MOD_RES (16)..(17)..(18)..(19)..(20): Xaa is A or G
  MOD_RES (21)..(22)..(23)..(24): Xaa is A or G or absent
HXGXSRVVMNEYQKYXXXXXXXXXIYLVSIPSLKTPAXTPKTV

SEQ ID NO: 17217 - protein, 32 aa, Artificial Sequence
  Non-cyclic GFR-binding peptide
  MOD_RES (1)..(1): Xaa is C or S
XAEVVMDEYKFKVVNNAADLYLISIPELRAPV

SEQ ID NO: 17218 - protein, 39 aa, Artificial Sequence
  Non-cyclic GFR-binding peptide
  MOD_RES (2)..(34)..(35): Xaa is C or S
GXGEVVMDEYQKYVVKENEDIYLMSIPSLETPVXXAKPI

SEQ ID NO: 17219 - protein, 40 aa, Artificial Sequence
  Non-cyclic GFR-binding peptide
  MOD_RES (1)..(3)..(36)..(37): Xaa is C or S
  MOD_RES (14)..(15)..(16)..(17)..(18): Xaa is A or G
  MOD_RES (19)..(20)..(21)..(22): Xaa is A or G or absent
XKXSRVIMEYKFKXXXXXXXXXLYLISIPELAQPVXXPAA

SEQ ID NO: 17220 - protein, 33 aa, Artificial Sequence
  Non-cyclic GFR-binding peptide
  MOD_RES (12)..(13)..(14)..(15)..(16): Xaa is A or G
  MOD_RES (17)..(18)..(19)..(20): Xaa is A or G or absent
ESVAMGYHYKLXXXXXXXXXKYLISIPSLKTPV

SEQ ID NO: 17221 - protein, 38 aa, Artificial Sequence
  Non-cyclic GFR-binding peptide
  MOD_RES (2)..(36)..(37): Xaa is C or S
  MOD_RES (14)..(15)..(16)..(17)..(18): Xaa is A or G
  MOD_RES (19)..(20)..(21)..(22): Xaa is A or G or absent
GXARVVMNEYKFKXXXXXXXXXLYLVSIPELQTPAXXP

SEQ ID NO: 17222 - protein, 40 aa, Artificial Sequence
  Non-cyclic GFR-binding peptide
  MOD_RES (1)..(34)..(35): Xaa is C or S
  MOD_RES (12)..(13)..(14)..(15)..(16): Xaa is A or G
  MOD_RES (17)..(18)..(19)..(20): Xaa is A or G or absent
XSKVIMEYKFKXXXXXXXXXLYLISIPELDQSVXXPSASA

SEQ ID NO: 17223 - protein, 41 aa, Artificial Sequence
  Non-cyclic GFR-binding peptide
  MOD_RES (2)..(35)..(36): Xaa is C or S
  MOD_RES (13)..(14)..(15)..(16)..(17): Xaa is A or G
  MOD_RES (18)..(19)..(20)..(21): Xaa is A or G or absent
KXSKVIMEYQKYXXXXXXXXXIYLISIPSLDQSVXXPSASA

SEQ ID NO: 17224 - protein, 40 aa, Artificial Sequence
  Non-cyclic GFR-binding peptide
  MOD_RES (2)..(34)..(35): Xaa is C or S
GXAEVVMDYHYKLVVNNAADKYLISIPSLRAPVXXSAPAA

SEQ ID NO: 17225 - protein, 37 aa, Artificial Sequence
  Non-cyclic GFR-binding peptide
  MOD_RES (2)..(4)..(37): Xaa is C or S
  MOD_RES (15)..(16)..(17)..(18)..(19): Xaa is A or G
  MOD_RES (20)..(21)..(22)..(23): Xaa is A or G or absent
SXKXSKVVMEYQKYXXXXXXXXXIYLISIPSLDQPVX

SEQ ID NO: 17226 - protein, 37 aa, Artificial Sequence
  Non-cyclic GFR-binding peptide
  MOD_RES (34)..(35): Xaa is C or S
  MOD_RES (12)..(13)..(14)..(15)..(16): Xaa is A or G
  MOD_RES (17)..(18)..(19)..(20): Xaa is A or G or absent
GEVVMDEYQKYXXXXXXXXXIYLMSIPSLETPVXXAK

SEQ ID NO: 17227 - protein, 40 aa, Artificial Sequence
  Non-cyclic GFR-binding peptide
  MOD_RES (2)..(4)..(37)..(38): Xaa is C or S
  MOD_RES (15)..(16)..(17)..(18)..(19): Xaa is A or G
  MOD_RES (20)..(21)..(22)..(23): Xaa is A or G or absent
SXKXSKVIMEYQKYXXXXXXXXXIYLISIPSLDQSVXXPS

SEQ ID NO: 17228 - protein, 37 aa, Artificial Sequence
  Non-cyclic GFR-binding peptide
  MOD_RES (1)..(35)..(36): Xaa is C or S
  MOD_RES (13)..(14)..(15)..(16)..(17): Xaa is A or G
  MOD_RES (18)..(19)..(20)..(21): Xaa is A or G or absent
XARVVMNEYQKYXXXXXXXXXIYLVSIPSLQTPAXXP

SEQ ID NO: 17229 - protein, 34 aa, Artificial Sequence
  Non-cyclic GFR-binding peptide
  MOD_RES (2)..(4): Xaa is C or S
SXKXSKVIMEYKFKIKPTKGILYLISIPELDQSV

SEQ ID NO: 17230 - protein, 35 aa, Artificial Sequence
  Non-cyclic GFR-binding peptide
  MOD_RES (2)..(34)..(35): Xaa is C or S
GXSRVVMNEYKFKIVNSSDDLYLVSIPELKTPAXX

SEQ ID NO: 17231 - protein, 37 aa, Artificial Sequence
  Non-cyclic GFR-binding peptide
  MOD_RES (1)..(34)..(35): Xaa is C or S
  MOD_RES (12)..(13)..(14)..(15)..(16): Xaa is A or G
  MOD_RES (17)..(18)..(19)..(20): Xaa is A or G or absent
XSKVVMEYQKYXXXXXXXXXIYLISIPSLDQPVXXPS

SEQ ID NO: 17232 - protein, 37 aa, Artificial Sequence
  Non-cyclic GFR-binding peptide
  MOD_RES (2)..(4): Xaa is C or S
  MOD_RES (16)..(17)..(18)..(19)..(20): Xaa is A or G
  MOD_RES (21)..(22)..(23)..(24): Xaa is A or G or absent
RXGXESVAMGRYKKLXXXXXXXXXFYLISIANLKTPV

SEQ ID NO: 17233 - protein, 36 aa, Artificial Sequence
  Non-cyclic GFR-binding peptide
  MOD_RES (2)..(4)..(36): Xaa is C or S
HXGXSRVVMNEYKFKIVNSSDDLYLVSIPELKTPAX

SEQ ID NO: 17234 - protein, 35 aa, Artificial Sequence
  Non-cyclic GFR-binding peptide
  MOD_RES (2)..(2): Xaa is C or S
  MOD_RES (14)..(15)..(16)..(17)..(18): Xaa is A or G
  MOD_RES (19)..(20)..(21)..(22): Xaa is A or G or absent
GXAKVVMNEYQKYXXXXXXXXXIYLVSIPSLKTPA

SEQ ID NO: 17235 - protein, 37 aa, Artificial Sequence
  Non-cyclic GFR-binding peptide
  MOD_RES (1)..(3)..(37): Xaa is C or S
  MOD_RES (15)..(16)..(17)..(18)..(19): Xaa is A or G
  MOD_RES (20)..(21)..(22)..(23): Xaa is A or G or absent
XGXESVAMGYHYKLXXXXXXXXXKYLISIPSLKTPVX

SEQ ID NO: 17236 - protein, 31 aa, Artificial Sequence
  Non-cyclic GFR-binding peptide
  MOD_RES (31)..(31): Xaa is C or S
EVVMEEYQKYVVKDYEDIYLMSIPSLETPVX

SEQ ID NO: 17237 - protein, 34 aa, Artificial Sequence
  Non-cyclic GFR-binding peptide
  MOD_RES (1)..(34): Xaa is C or S
  MOD_RES (12)..(13)..(14)..(15)..(16): Xaa is A or G
  MOD_RES (17)..(18)..(19)..(20): Xaa is A or G or absent
XSRVIMEYKFKXXXXXXXXXLYLISIPELAQPVX

SEQ ID NO: 17238 - protein, 39 aa, Artificial Sequence
  Non-cyclic GFR-binding peptide
  MOD_RES (1)..(3)..(37)..(38): Xaa is C or S
  MOD_RES (15)..(16)..(17)..(18)..(19): Xaa is A or G
  MOD_RES (20)..(21)..(22)..(23): Xaa is A or G or absent
XGXAEVVMDYHYKLXXXXXXXXXKYLISIPSLRAPVXXS

SEQ ID NO: 17239 - protein, 41 aa, Artificial Sequence
  Non-cyclic GFR-binding peptide
  MOD_RES (2)..(36)..(37): Xaa is C or S
  MOD_RES (14)..(15)..(16)..(17)..(18): Xaa is A or G
  MOD_RES (19)..(20)..(21)..(22): Xaa is A or G or absent
GXAEVVMDRYKKLXXXXXXXXXFYLISIANLRAPVXXSAPA

SEQ ID NO: 17240 - protein, 34 aa, Artificial Sequence
  Non-cyclic GFR-binding peptide
  MOD_RES (33)..(34): Xaa is C or S
  MOD_RES (11)..(12)..(13)..(14)..(15): Xaa is A or G
  MOD_RES (16)..(17)..(18)..(19): Xaa is A or G or absent
EVVMDRYKKLXXXXXXXXXFYLISIANLRAPVXX

SEQ ID NO: 17241 - protein, 37 aa, Artificial Sequence
  Non-cyclic GFR-binding peptide
  MOD_RES (1)..(32)..(33): Xaa is C or S
XSKVIMEYKFKIKPTKGILYLISIPELDQSVXXPSAS

SEQ ID NO: 17242 - protein, 39 aa, Artificial Sequence
  Non-cyclic GFR-binding peptide
  MOD_RES (1)..(35)..(36): Xaa is C or S
  MOD_RES (13)..(14)..(15)..(16)..(17): Xaa is A or G
  MOD_RES (18)..(19)..(20)..(21): Xaa is A or G or absent
XGEVVMDEYQKYXXXXXXXXXIYLMSIPSLETPVXXAKP

SEQ ID NO: 17243 - protein, 35 aa, Artificial Sequence
  Non-cyclic GFR-binding peptide
  MOD_RES (33)..(34): Xaa is C or S
  MOD_RES (11)..(12)..(13)..(14)..(15): Xaa is A or G
  MOD_RES (16)..(17)..(18)..(19): Xaa is A or G or absent
RVVMNEYKFKXXXXXXXXXLYLVSIPELQTPAXXP

SEQ ID NO: 17244 - protein, 39 aa, Artificial Sequence
  Non-cyclic GFR-binding peptide
  MOD_RES (2)..(36)..(37): Xaa is C or S
  MOD_RES (14)..(15)..(16)..(17)..(18): Xaa is A or G
  MOD_RES (19)..(20)..(21)..(22): Xaa is A or G or absent
GXAKVVMNEYKFKXXXXXXXXXLYLVSIPELKTPAXXAK

SEQ ID NO: 17245 - protein, 36 aa, Artificial Sequence
  Non-cyclic GFR-binding peptide
  MOD_RES (2)..(4)..(36): Xaa is C or S
HXGXSRVVMNEYQKYIVNSSDDIYLVSIPSLKTPAX

SEQ ID NO: 17246 - protein, 34 aa, Artificial Sequence
  Non-cyclic GFR-binding peptide
  MOD_RES (31)..(32): Xaa is C or S
EVVMDRYKKLVVNNAADFYLISIANLRAPVXXSA

SEQ ID NO: 17247 - protein, 33 aa, Artificial Sequence
  Non-cyclic GFR-binding peptide
  MOD_RES (2)..(33): Xaa is C or S
KXSKVIMEYKFKIKPTKGILYLISIPELDQSVX

SEQ ID NO: 17248 - protein, 37 aa, Artificial Sequence
  Non-cyclic GFR-binding peptide
  MOD_RES (33)..(34): Xaa is C or S
EAVSMGEEYKFKTPVGMDDLYLVSIPELKTPVXXAKG

SEQ ID NO: 17249 - protein, 33 aa, Artificial Sequence
  Non-cyclic GFR-binding peptide
  MOD_RES (1)..(33): Xaa is C or S
XAEVVMDRYKKLVVNNAADFYLISIANLRAPVX

SEQ ID NO: 17250 - protein, 41 aa, Artificial Sequence
  Non-cyclic GFR-binding peptide
  MOD_RES (1)..(3)..(35)..(36): Xaa is C or S
XGXGEVVMEEYKFKVVKDYEDLYLMSIPELETPVXXAKPIS

SEQ ID NO: 17251 - protein, 37 aa, Artificial Sequence
  Non-cyclic GFR-binding peptide
  MOD_RES (34)..(35): Xaa is C or S
  MOD_RES (12)..(13)..(14)..(15)..(16): Xaa is A or G
  MOD_RES (17)..(18)..(19)..(20): Xaa is A or G or absent
ESVAMGYHYKLXXXXXXXXXKYLISIPSLKTPVXXAK

SEQ ID NO: 17252 - protein, 31 aa, Artificial Sequence
  Non-cyclic GFR-binding peptide
  MOD_RES (31)..(31): Xaa is C or S
KVVMNEYQKYIVNNSSDIYLVSIPSLKTPAX

SEQ ID NO: 17253 - protein, 38 aa, Artificial Sequence
  Non-cyclic GFR-binding peptide
  MOD_RES (1)..(3)..(37)..(38): Xaa is C or S
  MOD_RES (15)..(16)..(17)..(18)..(19): Xaa is A or G
  MOD_RES (20)..(21)..(22)..(23): Xaa is A or G or absent
XGXARVVMNEYKFKXXXXXXXXXLYLVSIPELQTPAXX

SEQ ID NO: 17254 - protein, 33 aa, Artificial Sequence
  Non-cyclic GFR-binding peptide
  MOD_RES (1)..(33): Xaa is C or S
XAKVVMNEYQKYIVNNSSDIYLVSIPSLKTPAX

SEQ ID NO: 17255 - protein, 36 aa, Artificial Sequence
  Non-cyclic GFR-binding peptide
  MOD_RES (1)..(35)..(36): Xaa is C or S
  MOD_RES (13)..(14)..(15)..(16)..(17): Xaa is A or G
  MOD_RES (18)..(19)..(20)..(21): Xaa is A or G or absent
XESVAMGRYKKLXXXXXXXXXFYLISIANLKTPVXX

SEQ ID NO: 17256 - protein, 37 aa, Artificial Sequence
  Non-cyclic GFR-binding peptide
  MOD_RES (34)..(35): Xaa is C or S
  MOD_RES (12)..(13)..(14)..(15)..(16): Xaa is A or G
  MOD_RES (17)..(18)..(19)..(20): Xaa is A or G or absent
SRVVMNEYKFKXXXXXXXXXLYLVSIPELKTPAXXPK

SEQ ID NO: 17257 - protein, 38 aa, Artificial Sequence
  Non-cyclic GFR-binding peptide
  MOD_RES (33)..(34): Xaa is C or S
  MOD_RES (11)..(12)..(13)..(14)..(15): Xaa is A or G
  MOD_RES (16)..(17)..(18)..(19): Xaa is A or G or absent
SVAMGYHYKLXXXXXXXXXKYLISIPSLKTPVXXAKSA

SEQ ID NO: 17258 - protein, 41 aa, Artificial Sequence
  Non-cyclic GFR-binding peptide
  MOD_RES (2)..(36)..(37): Xaa is C or S
  MOD_RES (14)..(15)..(16)..(17)..(18): Xaa is A or G
  MOD_RES (19)..(20)..(21)..(22): Xaa is A or G or absent
GXSRVVMNEYKFKXXXXXXXXXLYLVSIPELKTPAXXPKPV

SEQ ID NO: 17259 - protein, 41 aa, Artificial Sequence
  Non-cyclic GFR-binding peptide
  MOD_RES (1)..(3)..(36)..(37): Xaa is C or S
XGXEAVSMGEEYQKYTPVGMDDIYLVSIPSLKTPVXXAKGV

SEQ ID NO: 17260 - protein, 41 aa, Artificial Sequence
  Non-cyclic GFR-binding peptide
  MOD_RES (2)..(4)..(38)..(39): Xaa is C or S
  MOD_RES (16)..(17)..(18)..(19)..(20): Xaa is A or G
  MOD_RES (21)..(22)..(23)..(24): Xaa is A or G or absent
HXGXSRVVMNEYQKYXXXXXXXXXIYLVSIPSLKTPAXXPK

SEQ ID NO: 17261 - protein, 34 aa, Artificial Sequence
  Non-cyclic GFR-binding peptide
  MOD_RES (2)..(33)..(34): Xaa is C or S
KXSKVIMEYKFKIKPTKGILYLISIPELDQSVXX

SEQ ID NO: 17262 - protein, 39 aa, Artificial Sequence
  Non-cyclic GFR-binding peptide
  MOD_RES (1)..(34)..(35): Xaa is C or S
XEAVSMGEEYKFKTPVGMDDLYLVSIPELKTPVXXAKGV

SEQ ID NO: 17263 - protein, 36 aa, Artificial Sequence
  Non-cyclic GFR-binding peptide
  MOD_RES (1)..(33)..(34): Xaa is C or S
XARVVMNEYKFKIVNSSDDLYLVSIPELQTPAXXPK

SEQ ID NO: 17264 - protein, 30 aa, Artificial Sequence; identical to SEQ ID NO: 2002
  Non-cyclic GFR-binding peptide

SEQ ID NO: 17265 - protein, 36 aa, Artificial Sequence
  Non-cyclic GFR-binding peptide
  MOD_RES (1)..(33)..(34): Xaa is C or S
XGEVVMDEYQKYVVKENEDIYLMSIPSLETPVXXAK

SEQ ID NO: 17266 - protein, 37 aa, Artificial Sequence
  Non-cyclic GFR-binding peptide
  MOD_RES (1)..(3)..(35)..(36): Xaa is C or S
XGXARVVMNEYKFKIVNSSDDLYLVSIPELQTPAXXP

SEQ ID NO: 17267 - protein, 38 aa, Artificial Sequence
  Non-cyclic GFR-binding peptide
  MOD_RES (2)..(34)..(35): Xaa is C or S
GXESVAMGEYQKYYTVVGKDIYLISIPSLKTPVXXAKS

SEQ ID NO: 17268 - protein, 37 aa, Artificial Sequence
  Non-cyclic GFR-binding peptide
  MOD_RES (32)..(32): Xaa is C or S
SRVVMNEYQKYIVNSSDDIYLVSIPSLKTPAXTPKTV

SEQ ID NO: 17269 - protein, 36 aa, Artificial Sequence
  Non-cyclic GFR-binding peptide
  MOD_RES (2)..(35)..(36): Xaa is C or S
GXEAVSMGEEYQKYTPVGMDDIYLVSIPSLKTPVXX

SEQ ID NO: 17270 - protein, 43 aa, Artificial Sequence
  Non-cyclic GFR-binding peptide
  MOD_RES (2)..(4)..(37)..(38): Xaa is C or S
  MOD_RES (15)..(16)..(17)..(18)..(19): Xaa is A or G
  MOD_RES (20)..(21)..(22)..(23): Xaa is A or G or absent
SXKXSKVVMEYKFKXXXXXXXXXLYLISIPELDQPVXXPSASA

SEQ ID NO: 17271 - protein, 40 aa, Artificial Sequence
  Non-cyclic GFR-binding peptide
  MOD_RES (2)..(35)..(36): Xaa is C or S
  MOD_RES (13)..(14)..(15)..(16)..(17): Xaa is A or G
  MOD_RES (18)..(19)..(20)..(21): Xaa is A or G or absent
KXSKVIMEYQKYXXXXXXXXXIYLISIPSLDQSVXXPSAS

SEQ ID NO: 17272 - protein, 41 aa, Artificial Sequence
  Non-cyclic GFR-binding peptide
  MOD_RES (2)..(35)..(36): Xaa is C or S
  MOD_RES (13)..(14)..(15)..(16)..(17): Xaa is A or G
  MOD_RES (18)..(19)..(20)..(21): Xaa is A or G or absent
KXSKVIMEYKFKXXXXXXXXXLYLISIPELDQSVXXPSASA

SEQ ID NO: 17273 - protein, 32 aa, Artificial Sequence
  Non-cyclic GFR-binding peptide
  MOD_RES (1)..(1): Xaa is C or S
XGEVVMDEYQKYVVKENEDIYLMSIPSLETPV

SEQ ID NO: 17274 - protein, 40 aa, Artificial Sequence
  Non-cyclic GFR-binding peptide
  MOD_RES (1)..(3)..(36)..(37): Xaa is C or S
  MOD_RES (14)..(15)..(16)..(17)..(18): Xaa is A or G
  MOD_RES (19)..(20)..(21)..(22): Xaa is A or G or absent
XKXSKVIMEYKFKXXXXXXXXXLYLISIPELDQSVXXPSA

SEQ ID NO: 17275 - protein, 40 aa, Artificial Sequence
  Non-cyclic GFR-binding peptide
  MOD_RES (2)..(4)..(38)..(39): Xaa is C or S
  MOD_RES (16)..(17)..(18)..(19)..(20): Xaa is A or G
  MOD_RES (21)..(22)..(23)..(24): Xaa is A or G or absent
HXGXAKVVMNEYQKYXXXXXXXXXIYLVSIPSLKTPAXXA

SEQ ID NO: 17276 - protein, 35 aa, Artificial Sequence
  Non-cyclic GFR-binding peptide
  MOD_RES (1)..(35): Xaa is C or S
  MOD_RES (13)..(14)..(15)..(16)..(17): Xaa is A or G
  MOD_RES (18)..(19)..(20)..(21): Xaa is A or G or absent
XGEVVMEEYKFKXXXXXXXXXLYLMSIPELETPVX

SEQ ID NO: 17277 - protein, 38 aa, Artificial Sequence
  Non-cyclic GFR-binding peptide
  MOD_RES (2)..(36)..(37): Xaa is C or S
  MOD_RES (14)..(15)..(16)..(17)..(18): Xaa is A or G
  MOD_RES (19)..(20)..(21)..(22): Xaa is A or G or absent
GXAKVVMNEYKFKXXXXXXXXXLYLVSIPELKTPAXXA

SEQ ID NO: 17278 - protein, 39 aa, Artificial Sequence
  Non-cyclic GFR-binding peptide
  MOD_RES (2)..(36)..(37): Xaa is C or S
  MOD_RES (14)..(15)..(16)..(17)..(18): Xaa is A or G
  MOD_RES (19)..(20)..(21)..(22): Xaa is A or G or absent
GXSRVVMNEYKFKXXXXXXXXXLYLVSIPELKTPAXXPK

SEQ ID NO: 17279 - protein, 37 aa, Artificial Sequence
  Non-cyclic GFR-binding peptide
  MOD_RES (1)..(33): Xaa is C or S
XSRVVMNEYQKYIVNSSDDIYLVSIPSLKTPAXTPKT

SEQ ID NO: 17280 - protein, 42 aa, Artificial Sequence
  Non-cyclic GFR-binding peptide
  MOD_RES (1)..(3)..(36)..(37): Xaa is C or S
  MOD_RES (14)..(15)..(16)..(17)..(18): Xaa is A or G
  MOD_RES (19)..(20)..(21)..(22): Xaa is A or G or absent
XKXSKVVMEYKFKXXXXXXXXXLYLISIPELDQPVXXPSASA

SEQ ID NO: 17281 - protein, 37 aa, Artificial Sequence
  Non-cyclic GFR-binding peptide
  MOD_RES (32)..(33): Xaa is C or S
SRVVMNEYKFKIVNSSDDLYLVSIPELKTPAXXPKPV

SEQ ID NO: 17282 - protein, 35 aa, Artificial Sequence
  Non-cyclic GFR-binding peptide
  MOD_RES (2)..(4): Xaa is C or S
RXGXESVAMGRYKKLYTVVGKDFYLISIANLKTPV

SEQ ID NO: 17283 - protein, 32 aa, Artificial Sequence
  Non-cyclic GFR-binding peptide
  MOD_RES (31)..(32): Xaa is C or S
EVVMDRYKKLVVNNAADFYLISIANLRAPVXX

SEQ ID NO: 17284 - protein, 39 aa, Artificial Sequence
  Non-cyclic GFR-binding peptide
  MOD_RES (1)..(3)..(35)..(36): Xaa is C or S
XGXAKVVMNEYQKYIVNNSSDIYLVSIPSLKTPAXXAKP

SEQ ID NO: 17285 - protein, 37 aa, Artificial Sequence
  Non-cyclic GFR-binding peptide
  MOD_RES (31)..(32): Xaa is C or S
EVVMDRYKKLVVNNAADFYLISIANLRAPVXXSAPAA

SEQ ID NO: 17286 - protein, 41 aa, Artificial Sequence
  Non-cyclic GFR-binding peptide
  MOD_RES (1)..(3)..(36)..(37): Xaa is C or S
  MOD_RES (14)..(15)..(16)..(17)..(18): Xaa is A or G
  MOD_RES (19)..(20)..(21)..(22): Xaa is A or G or absent
XKXSKVIMEYQKYXXXXXXXXXIYLISIPSLDQSVXXPSAS

SEQ ID NO: 17287 - protein, 37 aa, Artificial Sequence
  Non-cyclic GFR-binding peptide
  MOD_RES (1)..(3)..(35)..(36): Xaa is C or S
XGXESVAMGRYKKLYTVVGKDFYLISIANLKTPVXXA

SEQ ID NO: 17288 - protein, 33 aa, Artificial Sequence
  Non-cyclic GFR-binding peptide
  MOD_RES (31)..(31): Xaa is C or S
RVVMNEYKFKIVNSSDDLYLVSIPELKTPAXTP

SEQ ID NO: 17289 - protein, 39 aa, Artificial Sequence
  Non-cyclic GFR-binding peptide
  MOD_RES (1)..(3)..(37)..(38): Xaa is C or S
  MOD_RES (15)..(16)..(17)..(18)..(19): Xaa is A or G
  MOD_RES (20)..(21)..(22)..(23): Xaa is A or G or absent
XGXAKVVMNEYKFKXXXXXXXXXLYLVSIPELKTPAXXA

SEQ ID NO: 17290 - protein, 36 aa, Artificial Sequence
  Non-cyclic GFR-binding peptide
  MOD_RES (2)..(36): Xaa is C or S
  MOD_RES (14)..(15)..(16)..(17)..(18): Xaa is A or G
  MOD_RES (19)..(20)..(21)..(22): Xaa is A or G or absent
GXAEVVMDRYKKLXXXXXXXXXFYLISIANLRAPVX

SEQ ID NO: 17291 - protein, 34 aa, Artificial Sequence
  Non-cyclic GFR-binding peptide
  MOD_RES (1)..(3): Xaa is C or S
XGXGEVVMDEYKFKVVKENEDLYLMSIPELETPV

SEQ ID NO: 17292 - protein, 33 aa, Artificial Sequence
  Non-cyclic GFR-binding peptide
  MOD_RES (32)..(33): Xaa is C or S
ESVAMGRYKKLYTVVGKDFYLISIANLKTPVXX

SEQ ID NO: 17293 - protein, 37 aa, Artificial Sequence
  Non-cyclic GFR-binding peptide
  MOD_RES (1)..(3)..(37): Xaa is C or S
  MOD_RES (15)..(16)..(17)..(18)..(19): Xaa is A or G
  MOD_RES (20)..(21)..(22)..(23): Xaa is A or G or absent
XGXGEVVMEEYKFKXXXXXXXXXLYLMSIPELETPVX

SEQ ID NO: 17294 - protein, 41 aa, Artificial Sequence
  Non-cyclic GFR-binding peptide
  MOD_RES (2)..(36)..(37): Xaa is C or S
  MOD_RES (14)..(15)..(16)..(17)..(18): Xaa is A or G
  MOD_RES (19)..(20)..(21)..(22): Xaa is A or G or absent
GXAKVVMNEYKFKXXXXXXXXXLYLVSIPELKTPAXXAKPV

SEQ ID NO: 17295 - protein, 36 aa, Artificial Sequence
  Non-cyclic GFR-binding peptide
  MOD_RES (2)..(4)..(35)..(36): Xaa is C or S
SXKXSRVIMEYQKYVKPKRGVIYLISIPSLAQPVXX

SEQ ID NO: 17296 - protein, 35 aa, Artificial Sequence
  Non-cyclic GFR-binding peptide
  MOD_RES (2)..(4)..(35): Xaa is C or S
SXKXSKVIMEYKFKIKPTKGILYLISIPELDQSVX

SEQ ID NO: 17297 - protein, 41 aa, Artificial Sequence
  Non-cyclic GFR-binding peptide
  MOD_RES (2)..(36)..(37): Xaa is C or S
  MOD_RES (14)..(15)..(16)..(17)..(18): Xaa is A or G
  MOD_RES (19)..(20)..(21)..(22): Xaa is A or G or absent
GXGEVVMEEYKFKXXXXXXXXXLYLMSIPELETPVXXAKPI

SEQ ID NO: 17298 - protein, 43 aa, Artificial Sequence
  Non-cyclic GFR-binding peptide
  MOD_RES (1)..(3)..(37)..(38): Xaa is C or S
  MOD_RES (15)..(16)..(17)..(18)..(19): Xaa is A or G
  MOD_RES (20)..(21)..(22)..(23): Xaa is A or G or absent
XGXAKVVMNEYQKYXXXXXXXXXIYLVSIPSLKTPAXXAKPVA

SEQ ID NO: 17299 - protein, 39 aa, Artificial Sequence
  Non-cyclic GFR-binding peptide
  MOD_RES (2)..(4)..(38)..(39): Xaa is C or S
  MOD_RES (16)..(17)..(18)..(19)..(20): Xaa is A or G
  MOD_RES (21)..(22)..(23)..(24): Xaa is A or G or absent
RXGXESVAMGRYKKLXXXXXXXXXFYLISIANLKTPVXX

SEQ ID NO: 17300 - protein, 38 aa, Artificial Sequence
  Non-cyclic GFR-binding peptide
  MOD_RES (2)..(4)..(36)..(37): Xaa is C or S
HXGXARVVMNEYKFKIVNSSDDLYLVSIPELQTPAXXP

SEQ ID NO: 17301 - protein, 32 aa, Artificial Sequence
  Non-cyclic GFR-binding peptide
  MOD_RES (11)..(12)..(13)..(14)..(15): Xaa is A or G
  MOD_RES (16)..(17)..(18)..(19): Xaa is A or G or absent
EVVMDEYKFKXXXXXXXXXLYLISIPELRAPV

SEQ ID NO: 17302 - protein, 38 aa, Artificial Sequence
  Non-cyclic GFR-binding peptide
  MOD_RES (1)..(3)..(35)..(36): Xaa is C or S
XGXAKVVMNEYQKYIVNNSSDIYLVSIPSLKTPAXXAK

SEQ ID NO: 17303 - protein, 39 aa, Artificial Sequence
  Non-cyclic GFR-binding peptide
  MOD_RES (2)..(33)..(34): Xaa is C or S
KXSRVIMEYKFKVKPKRGVLYLISIPELAQPVXXPAASA

SEQ ID NO: 17304 - protein, 33 aa, Artificial Sequence
  Non-cyclic GFR-binding peptide
  MOD_RES (31)..(32): Xaa is C or S
EVVMEEYKFKVVKDYEDLYLMSIPELETPVXXA

SEQ ID NO: 17305 - protein, 35 aa, Artificial Sequence
  Non-cyclic GFR-binding peptide
  MOD_RES (34)..(35): Xaa is C or S
  MOD_RES (12)..(13)..(14)..(15)..(16): Xaa is A or G
  MOD_RES (17)..(18)..(19)..(20): Xaa is A or G or absent
AKVVMNEYQKYXXXXXXXXXIYLVSIPSLKTPAXX

SEQ ID NO: 17306 - protein, 38 aa, Artificial Sequence
  Non-cyclic GFR-binding peptide
  MOD_RES (1)..(3)..(37)..(38): Xaa is C or S
  MOD_RES (15)..(16)..(17)..(18)..(19): Xaa is A or G
  MOD_RES (20)..(21)..(22)..(23): Xaa is A or G or absent
XGXARVVMNEYQKYXXXXXXXXXIYLVSIPSLQTPAXX

SEQ ID NO: 17307 - protein, 36 aa, Artificial Sequence
  Non-cyclic GFR-binding peptide
  MOD_RES (2)..(4)..(36): Xaa is C or S
RXGXESVAMGRYKKLYTVVGKDFYLISIANLKTPVX

SEQ ID NO: 17308 - protein, 38 aa, Artificial Sequence
  Non-cyclic GFR-binding peptide
  MOD_RES (33)..(34): Xaa is C or S
  MOD_RES (11)..(12)..(13)..(14)..(15): Xaa is A or G
  MOD_RES (16)..(17)..(18)..(19): Xaa is A or G or absent
EVVMDRYKKLXXXXXXXXXFYLISIANLRAPVXXSAPA

SEQ ID NO: 17309 - protein, 43 aa, Artificial Sequence
  Non-cyclic GFR-binding peptide
  MOD_RES (2)..(4)..(39)..(40): Xaa is C or S
  MOD_RES (17)..(18)..(19)..(20)..(21): Xaa is A or G
  MOD_RES (22)..(23)..(24)..(25): Xaa is A or G or absent
RXGXEAVSMGEEYKFKXXXXXXXXXLYLVSIPELKTPVXXAKG

SEQ ID NO: 17310 - protein, 38 aa, Artificial Sequence
  Non-cyclic GFR-binding peptide
  MOD_RES (32)..(33): Xaa is C or S
GEVVMEEYKFKVVKDYEDLYLMSIPELETPVXXAKPIS

SEQ ID NO: 17311 - protein, 35 aa, Artificial Sequence
  Non-cyclic GFR-binding peptide
  MOD_RES (34)..(35): Xaa is C or S
  MOD_RES (12)..(13)..(14)..(15)..(16): Xaa is A or G
  MOD_RES (17)..(18)..(19)..(20): Xaa is A or G or absent
SRVVMNEYQKYXXXXXXXXXIYLVSIPSLKTPAXX

SEQ ID NO: 17312 - protein, 42 aa, Artificial Sequence
  Non-cyclic GFR-binding peptide
  MOD_RES (2)..(4)..(38)..(39): Xaa is C or S
  MOD_RES (16)..(17)..(18)..(19)..(20): Xaa is A or G
  MOD_RES (21)..(22)..(23)..(24): Xaa is A or G or absent
RXGXESVAMGEYQKYXXXXXXXXXIYLISIPSLKTPVXXAKS

SEQ ID NO: 17313 - protein, 38 aa, Artificial Sequence
  Non-cyclic GFR-binding peptide
  MOD_RES (2)..(34)..(35): Xaa is C or S
GXARVVMNEYKFKIVNSSDDLYLVSIPELQTPAXXPKP

SEQ ID NO: 17314 - protein, 40 aa, Artificial Sequence
  Non-cyclic GFR-binding peptide
  MOD_RES (2)..(35)..(36): Xaa is C or S
  MOD_RES (13)..(14)..(15)..(16)..(17): Xaa is A or G
  MOD_RES (18)..(19)..(20)..(21): Xaa is A or G or absent
KXSKVIMEYKFKXXXXXXXXXLYLISIPELDQSVXXPSAS

SEQ ID NO: 17315 - protein, 33 aa, Artificial Sequence
  Non-cyclic GFR-binding peptide
  MOD_RES (2)..(2): Xaa is C or S
GXARVVMNEYKFKIVNSSDDLYLVSIPELQTPA

SEQ ID NO: 17316 - protein, 36 aa, Artificial Sequence
  Non-cyclic GFR-binding peptide
  MOD_RES (1)..(34)..(35): Xaa is C or S
XEAVSMGEEYQKYTPVGMDDIYLVSIPSLKTPVXXA

SEQ ID NO: 17317 - protein, 38 aa, Artificial Sequence
  Non-cyclic GFR-binding peptide
  MOD_RES (1)..(33)..(34): Xaa is C or S
XSRVVMNEYQKYIVNSSDDIYLVSIPSLKTPAXXPKPV

SEQ ID NO: 17318 - protein, 41 aa, Artificial Sequence
  Non-cyclic GFR-binding peptide
  MOD_RES (2)..(4)..(38)..(39): Xaa is C or S
  MOD_RES (16)..(17)..(18)..(19)..(20): Xaa is A or G
  MOD_RES (21)..(22)..(23)..(24): Xaa is A or G or absent
HXGXAKVVMNEYKFKXXXXXXXXXLYLVSIPELKTPAXXAK

SEQ ID NO: 17319 - protein, 40 aa, Artificial Sequence
  Non-cyclic GFR-binding peptide
  MOD_RES (2)..(4)..(38): Xaa is C or S
  MOD_RES (16)..(17)..(18)..(19)..(20): Xaa is A or G
  MOD_RES (21)..(22)..(23)..(24): Xaa is A or G or absent
HXGXSRVVMNEYKFKXXXXXXXXXLYLVSIPELKTPAXTP

SEQ ID NO: 17320 - protein, 35 aa, Artificial Sequence
  Non-cyclic GFR-binding peptide
  MOD_RES (33)..(34): Xaa is C or S
  MOD_RES (11)..(12)..(13)..(14)..(15): Xaa is A or G
  MOD_RES (16)..(17)..(18)..(19): Xaa is A or G or absent
RVVMNEYKFKXXXXXXXXXLYLVSIPELKTPAXXP

SEQ ID NO: 17321 - protein, 34 aa, Artificial Sequence
  Non-cyclic GFR-binding peptide
  MOD_RES (1)..(3): Xaa is C or S
XGXAEVVMDEYKFKVVNNAADLYLISIPELRAPV

SEQ ID NO: 17322 - protein, 32 aa, Artificial Sequence
  Non-cyclic GFR-binding peptide
  MOD_RES (32)..(32): Xaa is C or S
GEVVMEEYKFKVVKDYEDLYLMSIPELETPVX

SEQ ID NO: 17323 - protein, 42 aa, Artificial Sequence
  Non-cyclic GFR-binding peptide
  MOD_RES (2)..(36)..(37): Xaa is C or S
  MOD_RES (14)..(15)..(16)..(17)..(18): Xaa is A or G
  MOD_RES (19)..(20)..(21)..(22): Xaa is A or G or absent
GXAKVVMNEYKFKXXXXXXXXXLYLVSIPELKTPAXXAKPVA

SEQ ID NO: 17324 - protein, 42 aa, Artificial Sequence
  Non-cyclic GFR-binding peptide
  MOD_RES (2)..(4)..(38): Xaa is C or S
  MOD_RES (16)..(17)..(18)..(19)..(20): Xaa is A or G
  MOD_RES (21)..(22)..(23)..(24): Xaa is A or G or absent
HXGXSRVVMNEYQKYXXXXXXXXXIYLVSIPSLKTPAXTPKT

SEQ ID NO: 17325 - protein, 30 aa, Artificial Sequence; identical to SEQ ID NO: 2008
  Non-cyclic GFR-binding peptide

SEQ ID NO: 17326 - protein, 38 aa, Artificial Sequence
  Non-cyclic GFR-binding peptide
  MOD_RES (2)..(4)..(38): Xaa is C or S
  MOD_RES (16)..(17)..(18)..(19)..(20): Xaa is A or G
  MOD_RES (21)..(22)..(23)..(24): Xaa is A or G or absent
RXGXGEVVMEEYKFKXXXXXXXXXLYLMSIPELETPVX

SEQ ID NO: 17327 - protein, 39 aa, Artificial Sequence
  Non-cyclic GFR-binding peptide
  MOD_RES (33)..(34): Xaa is C or S
  MOD_RES (11)..(12)..(13)..(14)..(15): Xaa is A or G
  MOD_RES (16)..(17)..(18)..(19): Xaa is A or G or absent
SKVVMEYQKYXXXXXXXXXIYLISIPSLDQPVXXPSASA

SEQ ID NO: 17328 - protein, 40 aa, Artificial Sequence
  Non-cyclic GFR-binding peptide
  MOD_RES (1)..(3)..(36)..(37): Xaa is C or S
XGXEAVSMGEEYQKYTPVGMDDIYLVSIPSLKTPVXXAKG

SEQ ID NO: 17329 - protein, 38 aa, Artificial Sequence
  Non-cyclic GFR-binding peptide
  MOD_RES (1)..(3)..(34)..(35): Xaa is C or S
XKXSKVIMEYQKYIKPTKGIIYLISIPSLDQSVXXPSA

SEQ ID NO: 17330 - protein, 34 aa, Artificial Sequence
  Non-cyclic GFR-binding peptide
  MOD_RES (1)..(34): Xaa is C or S
  MOD_RES (12)..(13)..(14)..(15)..(16): Xaa is A or G
  MOD_RES (17)..(18)..(19)..(20): Xaa is A or G or absent
XSKVIMEYKFKXXXXXXXXXLYLISIPELDQSVX

SEQ ID NO: 17331 - protein, 36 aa, Artificial Sequence
  Non-cyclic GFR-binding peptide
  MOD_RES (34)..(35): Xaa is C or S
  MOD_RES (12)..(13)..(14)..(15)..(16): Xaa is A or G
  MOD_RES (17)..(18)..(19)..(20): Xaa is A or G or absent
SRVVMNEYQKYXXXXXXXXXIYLVSIPSLKTPAXXP

SEQ ID NO: 17332 - protein, 34 aa, Artificial Sequence
  Non-cyclic GFR-binding peptide
  MOD_RES (2)..(4): Xaa is C or S
SXKXSKVIMEYQKYIKPTKGIIYLISIPSLDQSV

SEQ ID NO: 17333 - protein, 39 aa, Artificial Sequence
  Non-cyclic GFR-binding peptide
  MOD_RES (2)..(36)..(37): Xaa is C or S
  MOD_RES (14)..(15)..(16)..(17)..(18): Xaa is A or G
  MOD_RES (19)..(20)..(21)..(22): Xaa is A or G or absent
GXESVAMGRYKKLXXXXXXXXXFYLISIANLKTPVXXAK

SEQ ID NO: 17334 - protein, 37 aa, Artificial Sequence
  Non-cyclic GFR-binding peptide
  MOD_RES (1)..(34)..(35): Xaa is C or S
  MOD_RES (12)..(13)..(14)..(15)..(16): Xaa is A or G
  MOD_RES (17)..(18)..(19)..(20): Xaa is A or G or absent
XSKVVMEYKFKXXXXXXXXXLYLISIPELDQPVXXPS

SEQ ID NO: 17335 - protein, 37 aa, Artificial Sequence
  Non-cyclic GFR-binding peptide
  MOD_RES (35)..(36): Xaa is C or S
  MOD_RES (13)..(14)..(15)..(16)..(17): Xaa is A or G
  MOD_RES (18)..(19)..(20)..(21): Xaa is A or G or absent
EAVSMGEEYQKYXXXXXXXXXIYLVSIPSLKTPVXXA

SEQ ID NO: 17336 - protein, 36 aa, Artificial Sequence
  Non-cyclic GFR-binding peptide
  MOD_RES (1)..(3)..(36): Xaa is C or S
  MOD_RES (14)..(15)..(16)..(17)..(18): Xaa is A or G
  MOD_RES (19)..(20)..(21)..(22): Xaa is A or G or absent
XKXSKVVMEYQKYXXXXXXXXXIYLISIPSLDQPVX

SEQ ID NO: 17337 - protein, 40 aa, Artificial Sequence
  Non-cyclic GFR-binding peptide
  MOD_RES (2)..(36)..(37): Xaa is C or S
  MOD_RES (14)..(15)..(16)..(17)..(18): Xaa is A or G
  MOD_RES (19)..(20)..(21)..(22): Xaa is A or G or absent
GXGEVVMEEYKFKXXXXXXXXXLYLMSIPELETPVXXAKP

SEQ ID NO: 17338 - protein, 37 aa, Artificial Sequence
  Non-cyclic GFR-binding peptide
  MOD_RES (2)..(4): Xaa is C or S
  MOD_RES (16)..(17)..(18)..(19)..(20): Xaa is A or G
  MOD_RES (21)..(22)..(23)..(24): Xaa is A or G or absent
RXGXAEVVMDEYKFKXXXXXXXXXLYLISIPELRAPV

SEQ ID NO: 17339 - protein, 41 aa, Artificial Sequence
  Non-cyclic GFR-binding peptide
  MOD_RES (1)..(3)..(35)..(36): Xaa is C or S
XGXAEVVMDEYKFKVVNNAADLYLISIPELRAPVXXSAPAA

SEQ ID NO: 17340 - protein, 40 aa, Artificial Sequence
  Non-cyclic GFR-binding peptide
  MOD_RES (1)..(35)..(36): Xaa is C or S
  MOD_RES (13)..(14)..(15)..(16)..(17): Xaa is A or G
  MOD_RES (18)..(19)..(20)..(21): Xaa is A or G or absent
XARVVMNEYKFKXXXXXXXXXLYLVSIPELQTPAXXPKPV

SEQ ID NO: 17341 - protein, 38 aa, Artificial Sequence
  Non-cyclic GFR-binding peptide
  MOD_RES (1)..(33)..(34): Xaa is C or S
XSRVVMNEYKFKIVNSSDDLYLVSIPELKTPAXXPKPV

SEQ ID NO: 17342 - protein, 34 aa, Artificial Sequence
  Non-cyclic GFR-binding peptide
  MOD_RES (1)..(3): Xaa is C or S
XGXSRVVMNEYKFKIVNSSDDLYLVSIPELKTPA

SEQ ID NO: 17343 - protein, 32 aa, Artificial Sequence
  Non-cyclic GFR-binding peptide
  MOD_RES (31)..(32): Xaa is C or S
RVVMNEYQKYIVNSSDDIYLVSIPSLQTPAXX

SEQ ID NO: 17344 - protein, 32 aa, Artificial Sequence
  Non-cyclic GFR-binding peptide
  MOD_RES (32)..(32): Xaa is C or S
ARVVMNEYQKYIVNSSDDIYLVSIPSLQTPAX

SEQ ID NO: 17345 - protein, 38 aa, Artificial Sequence
  Non-cyclic GFR-binding peptide
  MOD_RES (2)..(36): Xaa is C or S
  MOD_RES (14)..(15)..(16)..(17)..(18): Xaa is A or G
  MOD_RES (19)..(20)..(21)..(22): Xaa is A or G or absent
GXSRVVMNEYKFKXXXXXXXXXLYLVSIPELKTPAXTP

SEQ ID NO: 17346 - protein, 39 aa, Artificial Sequence
  Non-cyclic GFR-binding peptide
  MOD_RES (2)..(34)..(35): Xaa is C or S
GXGEVVMEEYQKYVVKDYEDIYLMSIPSLETPVXXAKPI

SEQ ID NO: 17347 - protein, 31 aa, Artificial Sequence
  Non-cyclic GFR-binding peptide
GEVVMEEYQKYVVKDYEDIYLMSIPSLETPV

SEQ ID NO: 17348 - protein, 35 aa, Artificial Sequence
  Non-cyclic GFR-binding peptide
  MOD_RES (2)..(4): Xaa is C or S
HXGXAKVVMNEYKFKIVNNSSDLYLVSIPELKTPA

SEQ ID NO: 17349 - protein, 36 aa, Artificial Sequence
  Non-cyclic GFR-binding peptide
  MOD_RES (1)..(3): Xaa is C or S
  MOD_RES (15)..(16)..(17)..(18)..(19): Xaa is A or G
  MOD_RES (20)..(21)..(22)..(23): Xaa is A or G or absent
XGXAEVVMDRYKKLXXXXXXXXXFYLISIANLRAPV

SEQ ID NO: 17350 - protein, 40 aa, Artificial Sequence
  Non-cyclic GFR-binding peptide
  MOD_RES (2)..(4)..(38)..(39): Xaa is C or S
  MOD_RES (16)..(17)..(18)..(19)..(20): Xaa is A or G
  MOD_RES (21)..(22)..(23)..(24): Xaa is A or G or absent
RXGXGEVVMEEYKFKXXXXXXXXXLYLMSIPELETPVXXA

SEQ ID NO: 17351 - protein, 38 aa, Artificial Sequence
  Non-cyclic GFR-binding peptide
  MOD_RES (1)..(33)..(34): Xaa is C or S
XAEVVMDRYKKLVVNNAADFYLISIANLRAPVXXSAPA

SEQ ID NO: 17352 - protein, 35 aa, Artificial Sequence
  Non-cyclic GFR-binding peptide
  MOD_RES (34)..(35): Xaa is C or S
  MOD_RES (12)..(13)..(14)..(15)..(16): Xaa is A or G
  MOD_RES (17)..(18)..(19)..(20): Xaa is A or G or absent
AEVVMDEYKFKXXXXXXXXXLYLISIPELRAPVXX

SEQ ID NO: 17353 - protein, 37 aa, Artificial Sequence
  Non-cyclic GFR-binding peptide
  MOD_RES (2)..(34)..(35): Xaa is C or S
GXESVAMGEYQKYYTVVGKDIYLISIPSLKTPVXXAK

SEQ ID NO: 17354 - protein, 36 aa, Artificial Sequence
  Non-cyclic GFR-binding peptide
  MOD_RES (1)..(3)..(35): Xaa is C or S
XGXSRVVMNEYKFKIVNSSDDLYLVSIPELKTPAXT

SEQ ID NO: 17355 - protein, 40 aa, Artificial Sequence
  Non-cyclic GFR-binding peptide
  MOD_RES (1)..(35)..(36): Xaa is C or S
  MOD_RES (13)..(14)..(15)..(16)..(17): Xaa is A or G
  MOD_RES (18)..(19)..(20)..(21): Xaa is A or G or absent
XESVAMGYHYKLXXXXXXXXXKYLISIPSLKTPVXXAKSA

SEQ ID NO: 17356 - protein, 38 aa, Artificial Sequence
  Non-cyclic GFR-binding peptide
  MOD_RES (1)..(3)..(37)..(38): Xaa is C or S
  MOD_RES (15)..(16)..(17)..(18)..(19): Xaa is A or G
  MOD_RES (20)..(21)..(22)..(23): Xaa is A or G or absent
XGXGEVVMEEYQKYXXXXXXXXXIYLMSIPSLETPVXX

SEQ ID NO: 17357 - protein, 39 aa, Artificial Sequence
  Non-cyclic GFR-binding peptide
  MOD_RES (33)..(34): Xaa is C or S
  MOD_RES (11)..(12)..(13)..(14)..(15): Xaa is A or G
  MOD_RES (16)..(17)..(18)..(19): Xaa is A or G or absent
RVVMNEYKFKXXXXXXXXXLYLVSIPELKTPAXXPKPVY

SEQ ID NO: 17358 - protein, 30 aa, Artificial Sequence
  Non-cyclic GFR-binding peptide
RVVMNEYKFKIVNSSDDLYLVSIPELQTPA

SEQ ID NO: 17359 - protein, 31 aa, Artificial Sequence
  Non-cyclic GFR-binding peptide
GEVVMEEYKFKVVKDYEDLYLMSIPELETPV

SEQ ID NO: 17360 - protein, 37 aa, Artificial Sequence
  Non-cyclic GFR-binding peptide
  MOD_RES (1)..(35)..(36): Xaa is C or S
  MOD_RES (13)..(14)..(15)..(16)..(17): Xaa is A or G
  MOD_RES (18)..(19)..(20)..(21): Xaa is A or G or absent
XAKVVMNEYKFKXXXXXXXXXLYLVSIPELKTPAXXA

SEQ ID NO: 17361 - protein, 35 aa, Artificial Sequence
  Non-cyclic GFR-binding peptide
  MOD_RES (2)..(4): Xaa is C or S
HXGXARVVMNEYKFKIVNSSDDLYLVSIPELQTPA

SEQ ID NO: 17362 - protein, 41 aa, Artificial Sequence
  Non-cyclic GFR-binding peptide
  MOD_RES (2)..(4)..(36)..(37): Xaa is C or S
RXGXAEVVMDRYKKLVVNNAADFYLISIANLRAPVXXSAPA

SEQ ID NO: 17363 - protein, 31 aa, Artificial Sequence
  Non-cyclic GFR-binding peptide
  MOD_RES (31)..(31): Xaa is C or S
SVAMGEYQKYYTVVGKDIYLISIPSLKTPVX

SEQ ID NO: 17364 - protein, 33 aa, Artificial Sequence
  Non-cyclic GFR-binding peptide
  MOD_RES (33)..(33): Xaa is C or S
  MOD_RES (11)..(12)..(13)..(14)..(15): Xaa is A or G
  MOD_RES (16)..(17)..(18)..(19): Xaa is A or G or absent
RVVMNEYKFKXXXXXXXXXLYLVSIPELQTPAX

SEQ ID NO: 17365 - protein, 35 aa, Artificial Sequence
  Non-cyclic GFR-binding peptide
  MOD_RES (1)..(3)..(34)..(35): Xaa is C or S
XKXSKVVMEYQKYVKPTRGVIYLISIPSLDQPVXX

SEQ ID NO: 17366 - protein, 36 aa, Artificial Sequence
  Non-cyclic GFR-binding peptide
  MOD_RES (2)..(33)..(34): Xaa is C or S
KXSRVIMEYKFKVKPKRGVLYLISIPELAQPVXXPA

SEQ ID NO: 17367 - protein, 44 aa, Artificial Sequence
  Non-cyclic GFR-binding peptide
  MOD_RES (2)..(4)..(38)..(39): Xaa is C or S
  MOD_RES (16)..(17)..(18)..(19)..(20): Xaa is A or G
  MOD_RES (21)..(22)..(23)..(24): Xaa is A or G or absent
RXGXGEVVMEEYKFKXXXXXXXXXLYLMSIPELETPVXXAKPIS

SEQ ID NO: 17368 - protein, 39 aa, Artificial Sequence
  Non-cyclic GFR-binding peptide
  MOD_RES (1)..(33)..(34): Xaa is C or S
XGEVVMEEYQKYVVKDYEDIYLMSIPSLETPVXXAKPIS

SEQ ID NO: 17369 - protein, 38 aa, Artificial Sequence
  Non-cyclic GFR-binding peptide
  MOD_RES (2)..(36)..(37): Xaa is C or S
  MOD_RES (14)..(15)..(16)..(17)..(18): Xaa is A or G
  MOD_RES (19)..(20)..(21)..(22): Xaa is A or G or absent
GXAEVVMDYHYKLXXXXXXXXXKYLISIPSLRAPVXXS

SEQ ID NO: 17370 - protein, 37 aa, Artificial Sequence
  Non-cyclic GFR-binding peptide
  MOD_RES (2)..(36): Xaa is C or S
  MOD_RES (14)..(15)..(16)..(17)..(18): Xaa is A or G
  MOD_RES (19)..(20)..(21)..(22): Xaa is A or G or absent
GXSRVVMNEYQKYXXXXXXXXXIYLVSIPSLKTPAXT

SEQ ID NO: 17371 - protein, 39 aa, Artificial Sequence
  Non-cyclic GFR-binding peptide
  MOD_RES (1)..(3)..(37): Xaa is C or S
  MOD_RES (15)..(16)..(17)..(18)..(19): Xaa is A or G
  MOD_RES (20)..(21)..(22)..(23): Xaa is A or G or absent
XGXSRVVMNEYKFKXXXXXXXXXLYLVSIPELKTPAXTP

SEQ ID NO: 17372 - protein, 41 aa, Artificial Sequence
  Non-cyclic GFR-binding peptide
  MOD_RES (1)..(3)..(37)..(38): Xaa is C or S
  MOD_RES (15)..(16)..(17)..(18)..(19): Xaa is A or G
  MOD_RES (20)..(21)..(22)..(23): Xaa is A or G or absent
XGXAKVVMNEYQKYXXXXXXXXXIYLVSIPSLKTPAXXAKP

SEQ ID NO: 17373 - protein, 35 aa, Artificial Sequence
  Non-cyclic GFR-binding peptide
  MOD_RES (33)..(34): Xaa is C or S
  MOD_RES (11)..(12)..(13)..(14)..(15): Xaa is A or G
  MOD_RES (16)..(17)..(18)..(19): Xaa is A or G or absent
SKVVMEYQKYXXXXXXXXXIYLISIPSLDQPVXXP

SEQ ID NO: 17374 - protein, 35 aa, Artificial Sequence
  Non-cyclic GFR-binding peptide
  MOD_RES (2)..(4): Xaa is C or S
RXGXGEVVMEEYQKYVVKDYEDIYLMSIPSLETPV

SEQ ID NO: 17375 - protein, 33 aa, Artificial Sequence
  Non-cyclic GFR-binding peptide
  MOD_RES (33)..(33): Xaa is C or S
EAVSMGEEYQKYTPVGMDDIYLVSIPSLKTPVX

SEQ ID NO: 17376 - protein, 34 aa, Artificial Sequence
  Non-cyclic GFR-binding peptide
  MOD_RES (34)..(34): Xaa is C or S
  MOD_RES (12)..(13)..(14)..(15)..(16): Xaa is A or G
  MOD_RES (17)..(18)..(19)..(20): Xaa is A or G or absent
ESVAMGYHYKLXXXXXXXXXKYLISIPSLKTPVX

SEQ ID NO: 17377 - protein, 39 aa, Artificial Sequence
  Non-cyclic GFR-binding peptide
  MOD_RES (2)..(4)..(38): Xaa is C or S
  MOD_RES (16)..(17)..(18)..(19)..(20): Xaa is A or G
  MOD_RES (21)..(22)..(23)..(24): Xaa is A or G or absent
HXGXSRVVMNEYKFKXXXXXXXXXLYLVSIPELKTPAXT

SEQ ID NO: 17378 - protein, 33 aa, Artificial Sequence
  Non-cyclic GFR-binding peptide
  MOD_RES (32)..(33): Xaa is C or S
ARVVMNEYKFKIVNSSDDLYLVSIPELQTPAXX

SEQ ID NO: 17379 - protein, 33 aa, Artificial Sequence
  Non-cyclic GFR-binding peptide
  MOD_RES (31)..(32): Xaa is C or S
RVVMNEYQKYIVNSSDDIYLVSIPSLQTPAXXP

SEQ ID NO: 17380 - protein, 38 aa, Artificial Sequence
  Non-cyclic GFR-binding peptide
  MOD_RES (32)..(33): Xaa is C or S
AKVVMNEYKFKIVNNSSDLYLVSIPELKTPAXXAKPVA

SEQ ID NO: 17381 - protein, 34 aa, Artificial Sequence
  Non-cyclic GFR-binding peptide
  MOD_RES (1)..(34): Xaa is C or S
  MOD_RES (12)..(13)..(14)..(15)..(16): Xaa is A or G
  MOD_RES (17)..(18)..(19)..(20): Xaa is A or G or absent
XSKVIMEYQKYXXXXXXXXXIYLISIPSLDQSVX

SEQ ID NO: 17382 - protein, 34 aa, Artificial Sequence
  Non-cyclic GFR-binding peptide
  MOD_RES (1)..(1): Xaa is C or S
  MOD_RES (13)..(14)..(15)..(16)..(17): Xaa is A or G
  MOD_RES (18)..(19)..(20)..(21): Xaa is A or G or absent
XAEVVMDEYKFKXXXXXXXXXLYLISIPELRAPV

SEQ ID NO: 17383 - protein, 36 aa, Artificial Sequence
  Non-cyclic GFR-binding peptide
  MOD_RES (31)..(32): Xaa is C or S
SKVIMEYKFKIKPTKGILYLISIPELDQSVXXPSAS

SEQ ID NO: 17384 - protein, 38 aa, Artificial Sequence
  Non-cyclic GFR-binding peptide
  MOD_RES (1)..(3)..(37)..(38): Xaa is C or S
  MOD_RES (15)..(16)..(17)..(18)..(19): Xaa is A or G
  MOD_RES (20)..(21)..(22)..(23): Xaa is A or G or absent
XGXAEVVMDEYKFKXXXXXXXXXLYLISIPELRAPVXX

SEQ ID NO: 17385 - protein, 41 aa, Artificial Sequence
  Non-cyclic GFR-binding peptide
  MOD_RES (2)..(4)..(38)..(39): Xaa is C or S
  MOD_RES (16)..(17)..(18)..(19)..(20): Xaa is A or G
  MOD_RES (21)..(22)..(23)..(24): Xaa is A or G or absent
HXGXSRVVMNEYKFKXXXXXXXXXLYLVSIPELKTPAXXPK

SEQ ID NO: 17386 - protein, 35 aa, Artificial Sequence
  Non-cyclic GFR-binding peptide
  MOD_RES (34)..(35): Xaa is C or S
  MOD_RES (12)..(13)..(14)..(15)..(16): Xaa is A or G
  MOD_RES (17)..(18)..(19)..(20): Xaa is A or G or absent
GEVVMDEYQKYXXXXXXXXXIYLMSIPSLETPVXX

SEQ ID NO: 17387 - protein, 41 aa, Artificial Sequence
  Non-cyclic GFR-binding peptide
  MOD_RES (1)..(3)..(37)..(38): Xaa is C or S
  MOD_RES (15)..(16)..(17)..(18)..(19): Xaa is A or G
  MOD_RES (20)..(21)..(22)..(23): Xaa is A or G or absent
XGXAEVVMDYHYKLXXXXXXXXXKYLISIPSLRAPVXXSAP

SEQ ID NO: 17388 - protein, 35 aa, Artificial Sequence
  Non-cyclic GFR-binding peptide
  MOD_RES (1)..(34)..(35): Xaa is C or S
  MOD_RES (12)..(13)..(14)..(15)..(16): Xaa is A or G
  MOD_RES (17)..(18)..(19)..(20): Xaa is A or G or absent
XSRVIMEYQKYXXXXXXXXXIYLISIPSLAQPVXX

SEQ ID NO: 17389 - protein, 37 aa, Artificial Sequence
  Non-cyclic GFR-binding peptide
  MOD_RES (1)..(33)..(34): Xaa is C or S
XAEVVMDRYKKLVVNNAADFYLISIANLRAPVXXSAP

SEQ ID NO: 17390 - protein, 41 aa, Artificial Sequence
  Non-cyclic GFR-binding peptide
  MOD_RES (1)..(35)..(36): Xaa is C or S
  MOD_RES (13)..(14)..(15)..(16)..(17): Xaa is A or G
  MOD_RES (18)..(19)..(20)..(21): Xaa is A or G or absent
XAKVVMNEYQKYXXXXXXXXXIYLVSIPSLKTPAXXAKPVA

SEQ ID NO: 17391 - protein, 35 aa, Artificial Sequence
  Non-cyclic GFR-binding peptide
  MOD_RES (31)..(31): Xaa is C or S
RVVMNEYKFKIVNSSDDLYLVSIPELKTPAXTPKT

SEQ ID NO: 17392 - protein, 37 aa, Artificial Sequence
  Non-cyclic GFR-binding peptide
  MOD_RES (2)..(34)..(35): Xaa is C or S
GXGEVVMDEYKFKVVKENEDLYLMSIPELETPVXXAK

SEQ ID NO: 17393 - protein, 33 aa, Artificial Sequence
  Non-cyclic GFR-binding peptide
  MOD_RES (32)..(33): Xaa is C or S
SRVVMNEYQKYIVNSSDDIYLVSIPSLKTPAXX

SEQ ID NO: 17394 - protein, 36 aa, Artificial Sequence
  Non-cyclic GFR-binding peptide
  MOD_RES (34)..(34): Xaa is C or S
  MOD_RES (12)..(13)..(14)..(15)..(16): Xaa is A or G
  MOD_RES (17)..(18)..(19)..(20): Xaa is A or G or absent
SRVVMNEYKFKXXXXXXXXXLYLVSIPELKTPAXTP

SEQ ID NO: 17395 - protein, 35 aa, Artificial Sequence
  Non-cyclic GFR-binding peptide
  MOD_RES (1)..(35): Xaa is C or S
  MOD_RES (13)..(14)..(15)..(16)..(17): Xaa is A or G
  MOD_RES (18)..(19)..(20)..(21): Xaa is A or G or absent
XESVAMGRYKKLXXXXXXXXXFYLISIANLKTPVX

SEQ ID NO: 17396 - protein, 36 aa, Artificial Sequence
  Non-cyclic GFR-binding peptide
  MOD_RES (2)..(36): Xaa is C or S
  MOD_RES (14)..(15)..(16)..(17)..(18): Xaa is A or G
  MOD_RES (19)..(20)..(21)..(22): Xaa is A or G or absent
GXESVAMGYHYKLXXXXXXXXXKYLISIPSLKTPVX

SEQ ID NO: 17397 - protein, 32 aa, Artificial Sequence
  Non-cyclic GFR-binding peptide
  MOD_RES (1)..(1): Xaa is C or S
XGEVVMDEYKFKVVKENEDLYLMSIPELETPV

SEQ ID NO: 17398 - protein, 41 aa, Artificial Sequence
  Non-cyclic GFR-binding peptide
  MOD_RES (2)..(4)..(38)..(39): Xaa is C or S
  MOD_RES (16)..(17)..(18)..(19)..(20): Xaa is A or G
  MOD_RES (21)..(22)..(23)..(24): Xaa is A or G or absent
RXGXESVAMGYHYKLXXXXXXXXXKYLISIPSLKTPVXXAK

SEQ ID NO: 17399 - protein, 33 aa, Artificial Sequence
  Non-cyclic GFR-binding peptide
  MOD_RES (1)..(1): Xaa is C or S
  MOD_RES (12)..(13)..(14)..(15)..(16): Xaa is A or G
  MOD_RES (17)..(18)..(19)..(20): Xaa is A or G or absent
XSKVVMEYKFKXXXXXXXXXLYLISIPELDQPV

SEQ ID NO: 17400 - protein, 44 aa, Artificial Sequence
  Non-cyclic GFR-binding peptide
  MOD_RES (2)..(4)..(38)..(39): Xaa is C or S
  MOD_RES (16)..(17)..(18)..(19)..(20): Xaa is A or G
  MOD_RES (21)..(22)..(23)..(24): Xaa is A or G or absent
RXGXAEVVMDRYKKLXXXXXXXXXFYLISIANLRAPVXXSAPAA

SEQ ID NO: 17401 - protein, 37 aa, Artificial Sequence
  Non-cyclic GFR-binding peptide
  MOD_RES (2)..(35)..(36): Xaa is C or S
  MOD_RES (13)..(14)..(15)..(16)..(17): Xaa is A or G
  MOD_RES (18)..(19)..(20)..(21): Xaa is A or G or absent
KXSRVIMEYKFKXXXXXXXXXLYLISIPELAQPVXXP

SEQ ID NO: 17402 - protein, 39 aa, Artificial Sequence
  Non-cyclic GFR-binding peptide
  MOD_RES (2)..(36)..(37): Xaa is C or S
  MOD_RES (14)..(15)..(16)..(17)..(18): Xaa is A or G
  MOD_RES (19)..(20)..(21)..(22): Xaa is A or G or absent
GXARVVMNEYKFKXXXXXXXXXLYLVSIPELQTPAXXPK

SEQ ID NO: 17403 - protein, 35 aa, Artificial Sequence
  Non-cyclic GFR-binding peptide
  MOD_RES (34)..(35): Xaa is C or S
  MOD_RES (12)..(13)..(14)..(15)..(16): Xaa is A or G
  MOD_RES (17)..(18)..(19)..(20): Xaa is A or G or absent
ESVAMGYHYKLXXXXXXXXXKYLISIPSLKTPVXX

SEQ ID NO: 17404 - protein, 43 aa, Artificial Sequence
  Non-cyclic GFR-binding peptide
  MOD_RES (2)..(4)..(38): Xaa is C or S
  MOD_RES (16)..(17)..(18)..(19)..(20): Xaa is A or G
  MOD_RES (21)..(22)..(23)..(24): Xaa is A or G or absent
HXGXSRVVMNEYKFKXXXXXXXXXLYLVSIPELKTPAXTPKTV

SEQ ID NO: 17405 - protein, 35 aa, Artificial Sequence
  Non-cyclic GFR-binding peptide
  MOD_RES (31)..(32): Xaa is C or S
SKVIMEYQKYIKPTKGIIYLISIPSLDQSVXXPSA

SEQ ID NO: 17406 - protein, 38 aa, Artificial Sequence
  Non-cyclic GFR-binding peptide
  MOD_RES (1)..(33)..(34): Xaa is C or S
XGEVVMDEYKFKVVKENEDLYLMSIPELETPVXXAKPI

SEQ ID NO: 17407 - protein, 37 aa, Artificial Sequence
  Non-cyclic GFR-binding peptide
  MOD_RES (33)..(34): Xaa is C or S
  MOD_RES (11)..(12)..(13)..(14)..(15): Xaa is A or G
  MOD_RES (16)..(17)..(18)..(19): Xaa is A or G or absent
SVAMGRYKKLXXXXXXXXXFYLISIANLKTPVXXAKS

SEQ ID NO: 17408 - protein, 32 aa, Artificial Sequence
  Non-cyclic GFR-binding peptide
  MOD_RES (32)..(32): Xaa is C or S
AEVVMDEYKFKVVNNAADLYLISIPELRAPVX

SEQ ID NO: 17409 - protein, 35 aa, Artificial Sequence
  Non-cyclic GFR-binding peptide
  MOD_RES (1)..(35): Xaa is C or S
  MOD_RES (13)..(14)..(15)..(16)..(17): Xaa is A or G
  MOD_RES (18)..(19)..(20)..(21): Xaa is A or G or absent
XAEVVMDEYKFKXXXXXXXXXLYLISIPELRAPVX

SEQ ID NO: 17410 - protein, 42 aa, Artificial Sequence
  Non-cyclic GFR-binding peptide
  MOD_RES (2)..(4)..(37)..(38): Xaa is C or S
  MOD_RES (15)..(16)..(17)..(18)..(19): Xaa is A or G
  MOD_RES (20)..(21)..(22)..(23): Xaa is A or G or absent
SXKXSKVVMEYQKYXXXXXXXXXIYLISIPSLDQPVXXPSAS

SEQ ID NO: 17411 - protein, 36 aa, Artificial Sequence
  Non-cyclic GFR-binding peptide
  MOD_RES (1)..(33)..(34): Xaa is C or S
XGEVVMDEYKFKVVKENEDLYLMSIPELETPVXXAK

SEQ ID NO: 17412 - protein, 38 aa, Artificial Sequence
  Non-cyclic GFR-binding peptide
  MOD_RES (2)..(4)..(38): Xaa is C or S
  MOD_RES (16)..(17)..(18)..(19)..(20): Xaa is A or G
  MOD_RES (21)..(22)..(23)..(24): Xaa is A or G or absent
RXGXAEVVMDRYKKLXXXXXXXXXFYLISIANLRAPVX

SEQ ID NO: 17413 - protein, 40 aa, Artificial Sequence
  Non-cyclic GFR-binding peptide
  MOD_RES (34)..(35): Xaa is C or S
  MOD_RES (12)..(13)..(14)..(15)..(16): Xaa is A or G
  MOD_RES (17)..(18)..(19)..(20): Xaa is A or G or absent
GEVVMDEYQKYXXXXXXXXXIYLMSIPSLETPVXXAKPIK

SEQ ID NO: 17414 - protein, 32 aa, Artificial Sequence
  Non-cyclic GFR-binding peptide
  MOD_RES (1)..(1): Xaa is C or S
XGEVVMEEYKFKVVKDYEDLYLMSIPELETPV

SEQ ID NO: 17415 - protein, 37 aa, Artificial Sequence
  Non-cyclic GFR-binding peptide
  MOD_RES (1)..(3)..(37): Xaa is C or S
  MOD_RES (15)..(16)..(17)..(18)..(19): Xaa is A or G
  MOD_RES (20)..(21)..(22)..(23): Xaa is A or G or absent
XGXGEVVMEEYQKYXXXXXXXXXIYLMSIPSLETPVX

SEQ ID NO: 17416 - protein, 36 aa, Artificial Sequence
  Non-cyclic GFR-binding peptide
  MOD_RES (1)..(33)..(34): Xaa is C or S
XSRVVMNEYKFKIVNSSDDLYLVSIPELKTPAXXPK

SEQ ID NO: 17417 - protein, 32 aa, Artificial Sequence
  Non-cyclic GFR-binding peptide
  MOD_RES (2)..(2): Xaa is C or S
KXSKVIMEYKFKIKPTKGILYLISIPELDQSV

SEQ ID NO: 17418 - protein, 36 aa, Artificial Sequence
  Non-cyclic GFR-binding peptide
  MOD_RES (1)..(33)..(34): Xaa is C or S
XESVAMGYHYKLYTVVGKDKYLISIPSLKTPVXXAK

SEQ ID NO: 17419 - protein, 34 aa, Artificial Sequence
  Non-cyclic GFR-binding peptide
  MOD_RES (1)..(3): Xaa is C or S
XGXESVAMGYHYKLYTVVGKDKYLISIPSLKTPV

SEQ ID NO: 17420 - protein, 33 aa, Artificial Sequence
  Non-cyclic GFR-binding peptide
  MOD_RES (1)..(32)..(33): Xaa is C or S
XSKVVMEYKFKVKPTRGVLYLISIPELDQPVXX

SEQ ID NO: 17421 - protein, 33 aa, Artificial Sequence
  Non-cyclic GFR-binding peptide
  MOD_RES (2)..(33): Xaa is C or S
KXSRVIMEYKFKVKPKRGVLYLISIPELAQPVX

SEQ ID NO: 17422 - protein, 35 aa, Artificial Sequence
  Non-cyclic GFR-binding peptide
  MOD_RES (31)..(32): Xaa is C or S
RVVMNEYKFKIVNSSDDLYLVSIPELKTPAXXPKP

SEQ ID NO: 17423 - protein, 37 aa, Artificial Sequence
  Non-cyclic GFR-binding peptide
  MOD_RES (2)..(4)..(37): Xaa is C or S
  MOD_RES (15)..(16)..(17)..(18)..(19): Xaa is A or G
  MOD_RES (20)..(21)..(22)..(23): Xaa is A or G or absent
SXKXSKVVMEYKFKXXXXXXXXXLYLISIPELDQPVX

SEQ ID NO: 17424 - protein, 35 aa, Artificial Sequence
  Non-cyclic GFR-binding peptide
  MOD_RES (33)..(34): Xaa is C or S
  MOD_RES (11)..(12)..(13)..(14)..(15): Xaa is A or G
  MOD_RES (16)..(17)..(18)..(19): Xaa is A or G or absent
SRVIMEYQKYXXXXXXXXXIYLISIPSLAQPVXXP

SEQ ID NO: 17425 - protein, 39 aa, Artificial Sequence
  Non-cyclic GFR-binding peptide
  MOD_RES (1)..(33)..(34): Xaa is C or S
XARVVMNEYKFKIVNSSDDLYLVSIPELQTPAXXPKPVT

SEQ ID NO: 17426 - protein, 40 aa, Artificial Sequence
  Non-cyclic GFR-binding peptide
  MOD_RES (1)..(3)..(37)..(38): Xaa is C or S
  MOD_RES (15)..(16)..(17)..(18)..(19): Xaa is A or G
  MOD_RES (20)..(21)..(22)..(23): Xaa is A or G or absent
XGXSRVVMNEYQKYXXXXXXXXXIYLVSIPSLKTPAXXPK

SEQ ID NO: 17427 - protein, 39 aa, Artificial Sequence
  Non-cyclic GFR-binding peptide
  MOD_RES (2)..(4)..(37)..(38): Xaa is C or S
RXGXEAVSMGEEYKFKTPVGMDDLYLVSIPELKTPVXXA

SEQ ID NO: 17428 - protein, 37 aa, Artificial Sequence
  Non-cyclic GFR-binding peptide
  MOD_RES (34)..(35): Xaa is C or S
  MOD_RES (12)..(13)..(14)..(15)..(16): Xaa is A or G
  MOD_RES (17)..(18)..(19)..(20): Xaa is A or G or absent
GEVVMEEYKFKXXXXXXXXXLYLMSIPELETPVXXAK

SEQ ID NO: 17429 - protein, 43 aa, Artificial Sequence
  Non-cyclic GFR-binding peptide
  MOD_RES (2)..(37)..(38): Xaa is C or S
  MOD_RES (15)..(16)..(17)..(18)..(19): Xaa is A or G
  MOD_RES (20)..(21)..(22)..(23): Xaa is A or G or absent
GXEAVSMGEEYKFKXXXXXXXXXLYLVSIPELKTPVXXAKGVK

SEQ ID NO: 17430 - protein, 34 aa, Artificial Sequence
  Non-cyclic GFR-binding peptide
  MOD_RES (1)..(33)..(34): Xaa is C or S
XSRVVMNEYQKYIVNSSDDIYLVSIPSLKTPAXX

SEQ ID NO: 17431 - protein, 34 aa, Artificial Sequence
  Non-cyclic GFR-binding peptide
  MOD_RES (31)..(32): Xaa is C or S
SRVIMEYQKYVKPKRGVIYLISIPSLAQPVXXPA

SEQ ID NO: 17432 - protein, 33 aa, Artificial Sequence
  Non-cyclic GFR-binding peptide
  MOD_RES (31)..(32): Xaa is C or S
EVVMEEYQKYVVKDYEDIYLMSIPSLETPVXXA

SEQ ID NO: 17433 - protein, 39 aa, Artificial Sequence
  Non-cyclic GFR-binding peptide
  MOD_RES (2)..(36)..(37): Xaa is C or S
  MOD_RES (14)..(15)..(16)..(17)..(18): Xaa is A or G
  MOD_RES (19)..(20)..(21)..(22): Xaa is A or G or absent
GXGEVVMEEYQKYXXXXXXXXXIYLMSIPSLETPVXXAK

SEQ ID NO: 17434 - protein, 40 aa, Artificial Sequence
  Non-cyclic GFR-binding peptide
  MOD_RES (2)..(4)..(37)..(38): Xaa is C or S
  MOD_RES (15)..(16)..(17)..(18)..(19): Xaa is A or G
  MOD_RES (20)..(21)..(22)..(23): Xaa is A or G or absent
SXKXSKVIMEYKFKXXXXXXXXXLYLISIPELDQSVXXPS

SEQ ID NO: 17435 - protein, 39 aa, Artificial Sequence
  Non-cyclic GFR-binding peptide
  MOD_RES (2)..(35)..(36): Xaa is C or S
  MOD_RES (13)..(14)..(15)..(16)..(17): Xaa is A or G
  MOD_RES (18)..(19)..(20)..(21): Xaa is A or G or absent
KXSKVVMEYKFKXXXXXXXXXLYLISIPELDQPVXXPSA

SEQ ID NO: 17436 - protein, 37 aa, Artificial Sequence
  Non-cyclic GFR-binding peptide
  MOD_RES (1)..(3)..(35)..(36): Xaa is C or S
XGXGEVVMEEYQKYVVKDYEDIYLMSIPSLETPVXXA

SEQ ID NO: 17437 - protein, 37 aa, Artificial Sequence
  Non-cyclic GFR-binding peptide
  MOD_RES (2)..(34)..(35): Xaa is C or S
GXARVVMNEYKFKIVNSSDDLYLVSIPELQTPAXXPK

SEQ ID NO: 17438 - protein, 36 aa, Artificial Sequence
  Non-cyclic GFR-binding peptide
  MOD_RES (34)..(35): Xaa is C or S
  MOD_RES (12)..(13)..(14)..(15)..(16): Xaa is A or G
  MOD_RES (17)..(18)..(19)..(20): Xaa is A or G or absent
ESVAMGRYKKLXXXXXXXXXFYLISIANLKTPVXXA

SEQ ID NO: 17439 - protein, 37 aa, Artificial Sequence
  Non-cyclic GFR-binding peptide
  MOD_RES (2)..(4)..(35)..(36): Xaa is C or S
SXKXSRVIMEYQKYVKPKRGVIYLISIPSLAQPVXXP

SEQ ID NO: 17440 - protein, 40 aa, Artificial Sequence
  Non-cyclic GFR-binding peptide
  MOD_RES (2)..(36)..(37): Xaa is C or S
  MOD_RES (14)..(15)..(16)..(17)..(18): Xaa is A or G
  MOD_RES (19)..(20)..(21)..(22): Xaa is A or G or absent
GXARVVMNEYKFKXXXXXXXXXLYLVSIPELQTPAXXPKP

SEQ ID NO: 17441 - protein, 35 aa, Artificial Sequence
  Non-cyclic GFR-binding peptide
  MOD_RES (33)..(34): Xaa is C or S
  MOD_RES (11)..(12)..(13)..(14)..(15): Xaa is A or G
  MOD_RES (16)..(17)..(18)..(19): Xaa is A or G or absent
EVVMDEYKFKXXXXXXXXXLYLMSIPELETPVXXA

SEQ ID NO: 17442 - protein, 34 aa, Artificial Sequence
  Non-cyclic GFR-binding peptide
  MOD_RES (1)..(1): Xaa is C or S
  MOD_RES (13)..(14)..(15)..(16)..(17): Xaa is A or G
  MOD_RES (18)..(19)..(20)..(21): Xaa is A or G or absent
XGEVVMDEYKFKXXXXXXXXXLYLMSIPELETPV

SEQ ID NO: 17443 - protein, 43 aa, Artificial Sequence
  Non-cyclic GFR-binding peptide
  MOD_RES (2)..(4)..(38)..(39): Xaa is C or S
  MOD_RES (16)..(17)..(18)..(19)..(20): Xaa is A or G
  MOD_RES (21)..(22)..(23)..(24): Xaa is A or G or absent
HXGXAKVVMNEYQKYXXXXXXXXXIYLVSIPSLKTPAXXAKPV

SEQ ID NO: 17444 - protein, 38 aa, Artificial Sequence
  Non-cyclic GFR-binding peptide
  MOD_RES (34)..(35): Xaa is C or S
  MOD_RES (12)..(13)..(14)..(15)..(16): Xaa is A or G
  MOD_RES (17)..(18)..(19)..(20): Xaa is A or G or absent
AEVVMDRYKKLXXXXXXXXXFYLISIANLRAPVXXSAP

SEQ ID NO: 17445 - protein, 36 aa, Artificial Sequence
  Non-cyclic GFR-binding peptide
  MOD_RES (32)..(33): Xaa is C or S
AKVVMNEYQKYIVNNSSDIYLVSIPSLKTPAXXAKP

SEQ ID NO: 17446 - protein, 32 aa, Artificial Sequence
  Non-cyclic GFR-binding peptide
  MOD_RES (11)..(12)..(13)..(14)..(15): Xaa is A or G
  MOD_RES (16)..(17)..(18)..(19): Xaa is A or G or absent
SRVIMEYKFKXXXXXXXXXLYLISIPELAQPV

SEQ ID NO: 17447 - protein, 42 aa, Artificial Sequence
  Non-cyclic GFR-binding peptide
  MOD_RES (2)..(4)..(37)..(38): Xaa is C or S
  MOD_RES (15)..(16)..(17)..(18)..(19): Xaa is A or G
  MOD_RES (20)..(21)..(22)..(23): Xaa is A or G or absent
SXKXSKVVMEYKFKXXXXXXXXXLYLISIPELDQPVXXPSAS

SEQ ID NO: 17448 - protein, 42 aa, Artificial Sequence
  Non-cyclic GFR-binding peptide
  MOD_RES (1)..(36)..(37): Xaa is C or S
  MOD_RES (14)..(15)..(16)..(17)..(18): Xaa is A or G
  MOD_RES (19)..(20)..(21)..(22): Xaa is A or G or absent
XEAVSMGEEYKFKXXXXXXXXXLYLVSIPELKTPVXXAKGVK

SEQ ID NO: 17449 - protein, 38 aa, Artificial Sequence
  Non-cyclic GFR-binding peptide
  MOD_RES (1)..(35)..(36): Xaa is C or S
  MOD_RES (13)..(14)..(15)..(16)..(17): Xaa is A or G
  MOD_RES (18)..(19)..(20)..(21): Xaa is A or G or absent
XARVVMNEYKFKXXXXXXXXXLYLVSIPELQTPAXXPK

SEQ ID NO: 17450 - protein, 34 aa, Artificial Sequence
  Non-cyclic GFR-binding peptide
  MOD_RES (33)..(34): Xaa is C or S
  MOD_RES (11)..(12)..(13)..(14)..(15): Xaa is A or G
  MOD_RES (16)..(17)..(18)..(19): Xaa is A or G or absent
SVAMGYHYKLXXXXXXXXXKYLISIPSLKTPVXX

SEQ ID NO: 17451 - protein, 32 aa, Artificial Sequence
  Non-cyclic GFR-binding peptide
  MOD_RES (32)..(32): Xaa is C or S
ESVAMGEYQKYYTVVGKDIYLISIPSLKTPVX

SEQ ID NO: 17452 - protein, 41 aa, Artificial Sequence
  Non-cyclic GFR-binding peptide
  MOD_RES (1)..(3)..(37): Xaa is C or S
  MOD_RES (15)..(16)..(17)..(18)..(19): Xaa is A or G
  MOD_RES (20)..(21)..(22)..(23): Xaa is A or G or absent
XGXSRVVMNEYQKYXXXXXXXXXIYLVSIPSLKTPAXTPKT

SEQ ID NO: 17453 - protein, 33 aa, Artificial Sequence
  Non-cyclic GFR-binding peptide
  MOD_RES (1)..(33): Xaa is C or S
XESVAMGRYKKLYTVVGKDFYLISIANLKTPVX

SEQ ID NO: 17454 - protein, 34 aa, Artificial Sequence
  Non-cyclic GFR-binding peptide
  MOD_RES (34)..(34): Xaa is C or S
  MOD_RES (12)..(13)..(14)..(15)..(16): Xaa is A or G
  MOD_RES (17)..(18)..(19)..(20): Xaa is A or G or absent
AEVVMDEYKFKXXXXXXXXXLYLISIPELRAPVX

SEQ ID NO: 17455 - protein, 32 aa, Artificial Sequence
  Non-cyclic GFR-binding peptide
  MOD_RES (1)..(1): Xaa is C or S
XSRVVMNEYQKYIVNSSDDIYLVSIPSLKTPA

SEQ ID NO: 17456 - protein, 36 aa, Artificial Sequence
  Non-cyclic GFR-binding peptide
  MOD_RES (33)..(34): Xaa is C or S
  MOD_RES (11)..(12)..(13)..(14)..(15): Xaa is A or G
  MOD_RES (16)..(17)..(18)..(19): Xaa is A or G or absent
EVVMDRYKKLXXXXXXXXXFYLISIANLRAPVXXSA

SEQ ID NO: 17457 - protein, 36 aa, Artificial Sequence
  Non-cyclic GFR-binding peptide
  MOD_RES (2)..(34): Xaa is C or S
GXSRVVMNEYKFKIVNSSDDLYLVSIPELKTPAXTP

SEQ ID NO: 17458 - protein, 41 aa, Artificial Sequence
  Non-cyclic GFR-binding peptide
  MOD_RES (1)..(3)..(35)..(36): Xaa is C or S
XGXARVVMNEYQKYIVNSSDDIYLVSIPSLQTPAXXPKPVT

SEQ ID NO: 17459 - protein, 39 aa, Artificial Sequence
  Non-cyclic GFR-binding peptide
  MOD_RES (1)..(33): Xaa is C or S
XSRVVMNEYKFKIVNSSDDLYLVSIPELKTPAXTPKTVH

SEQ ID NO: 17460 - protein, 37 aa, Artificial Sequence
  Non-cyclic GFR-binding peptide
  MOD_RES (2)..(36)..(37): Xaa is C or S
  MOD_RES (14)..(15)..(16)..(17)..(18): Xaa is A or G
  MOD_RES (19)..(20)..(21)..(22): Xaa is A or G or absent
GXARVVMNEYKFKXXXXXXXXXLYLVSIPELQTPAXX

SEQ ID NO: 17461 - protein, 43 aa, Artificial Sequence
  Non-cyclic GFR-binding peptide
  MOD_RES (2)..(4)..(38)..(39): Xaa is C or S
  MOD_RES (16)..(17)..(18)..(19)..(20): Xaa is A or G
  MOD_RES (21)..(22)..(23)..(24): Xaa is A or G or absent
RXGXESVAMGRYKKLXXXXXXXXXFYLISIANLKTPVXXAKSA

SEQ ID NO: 17462 - protein, 37 aa, Artificial Sequence
  Non-cyclic GFR-binding peptide
  MOD_RES (2)..(36)..(37): Xaa is C or S
  MOD_RES (14)..(15)..(16)..(17)..(18): Xaa is A or G
  MOD_RES (19)..(20)..(21)..(22): Xaa is A or G or absent
GXAKVVMNEYKFKXXXXXXXXXLYLVSIPELKTPAXX

SEQ ID NO: 17463 - protein, 40 aa, Artificial Sequence
  Non-cyclic GFR-binding peptide
  MOD_RES (2)..(4)..(36)..(37): Xaa is C or S
RXGXESVAMGRYKKLYTVVGKDFYLISIANLKTPVXXAKS

SEQ ID NO: 17464 - protein, 34 aa, Artificial Sequence
  Non-cyclic GFR-binding peptide
  MOD_RES (2)..(34): Xaa is C or S
GXESVAMGEYQKYYTVVGKDIYLISIPSLKTPVX

SEQ ID NO: 17465 - protein, 34 aa, Artificial Sequence
  Non-cyclic GFR-binding peptide
  MOD_RES (1)..(1): Xaa is C or S
  MOD_RES (13)..(14)..(15)..(16)..(17): Xaa is A or G
  MOD_RES (18)..(19)..(20)..(21): Xaa is A or G or absent
XAEVVMDYHYKLXXXXXXXXXKYLISIPSLRAPV

SEQ ID NO: 17466 - protein, 38 aa, Artificial Sequence
  Non-cyclic GFR-binding peptide
  MOD_RES (34)..(35): Xaa is C or S
  MOD_RES (12)..(13)..(14)..(15)..(16): Xaa is A or G
  MOD_RES (17)..(18)..(19)..(20): Xaa is A or G or absent
SRVVMNEYQKYXXXXXXXXXIYLVSIPSLKTPAXXPKP

SEQ ID NO: 17467 - protein, 32 aa, Artificial Sequence
  Non-cyclic GFR-binding peptide
  MOD_RES (32)..(32): Xaa is C or S
GEVVMDEYKFKVVKENEDLYLMSIPELETPVX

SEQ ID NO: 17468 - protein, 39 aa, Artificial Sequence
  Non-cyclic GFR-binding peptide
  MOD_RES (1)..(3)..(35)..(36): Xaa is C or S
XGXARVVMNEYQKYIVNSSDDIYLVSIPSLQTPAXXPKP

SEQ ID NO: 17469 - protein, 38 aa, Artificial Sequence
  Non-cyclic GFR-binding peptide
  MOD_RES (34)..(34): Xaa is C or S
  MOD_RES (12)..(13)..(14)..(15)..(16): Xaa is A or G
  MOD_RES (17)..(18)..(19)..(20): Xaa is A or G or absent
SRVVMNEYQKYXXXXXXXXXIYLVSIPSLKTPAXTPKT

SEQ ID NO: 17470 - protein, 36 aa, Artificial Sequence
  Non-cyclic GFR-binding peptide
  MOD_RES (2)..(4)..(36): Xaa is C or S
HXGXAKVVMNEYQKYIVNNSSDIYLVSIPSLKTPAX

SEQ ID NO: 17471 - protein, 34 aa, Artificial Sequence
  Non-cyclic GFR-binding peptide
  MOD_RES (2)..(34): Xaa is C or S
GXSRVVMNEYQKYIVNSSDDIYLVSIPSLKTPAX

SEQ ID NO: 17472 - protein, 34 aa, Artificial Sequence
  Non-cyclic GFR-binding peptide
  MOD_RES (2)..(34): Xaa is C or S
GXAEVVMDYHYKLVVNNAADKYLISIPSLRAPVX

SEQ ID NO: 17473 - protein, 30 aa, Artificial Sequence
  Non-cyclic GFR-binding peptide
EVVMDEYQKYVVKENEDIYLMSIPSLETPV

SEQ ID NO: 17474 - protein, 36 aa, Artificial Sequence
  Non-cyclic GFR-binding peptide
  MOD_RES (2)..(4)..(36): Xaa is C or S
HXGXAKVVMNEYKFKIVNNSSDLYLVSIPELKTPAX

SEQ ID NO: 17475 - protein, 32 aa, Artificial Sequence
  Non-cyclic GFR-binding peptide
  MOD_RES (31)..(31): Xaa is C or S
RVVMNEYQKYIVNSSDDIYLVSIPSLKTPAXT

SEQ ID NO: 17476 - protein, 42 aa, Artificial Sequence
  Non-cyclic GFR-binding peptide
  MOD_RES (2)..(36)..(37): Xaa is C or S
  MOD_RES (14)..(15)..(16)..(17)..(18): Xaa is A or G
  MOD_RES (19)..(20)..(21)..(22): Xaa is A or G or absent
GXARVVMNEYKFKXXXXXXXXXLYLVSIPELQTPAXXPKPVT

SEQ ID NO: 17477 - protein, 39 aa, Artificial Sequence
  Non-cyclic GFR-binding peptide
  MOD_RES (1)..(3)..(35)..(36): Xaa is C or S
XGXESVAMGYHYKLYTVVGKDKYLISIPSLKTPVXXAKS

SEQ ID NO: 17478 - protein, 37 aa, Artificial Sequence
  Non-cyclic GFR-binding peptide
  MOD_RES (1)..(35)..(36): Xaa is C or S
  MOD_RES (13)..(14)..(15)..(16)..(17): Xaa is A or G
  MOD_RES (18)..(19)..(20)..(21): Xaa is A or G or absent
XESVAMGYHYKLXXXXXXXXXKYLISIPSLKTPVXXA

SEQ ID NO: 17479 - protein, 42 aa, Artificial Sequence
  Non-cyclic GFR-binding peptide
  MOD_RES (1)..(3)..(37)..(38): Xaa is C or S
  MOD_RES (15)..(16)..(17)..(18)..(19): Xaa is A or G
  MOD_RES (20)..(21)..(22)..(23): Xaa is A or G or absent
XGXAEVVMDRYKKLXXXXXXXXXFYLISIANLRAPVXXSAPA

SEQ ID NO: 17480 - protein, 38 aa, Artificial Sequence
  Non-cyclic GFR-binding peptide
  MOD_RES (1)..(35)..(36): Xaa is C or S
  MOD_RES (13)..(14)..(15)..(16)..(17): Xaa is A or G
  MOD_RES (18)..(19)..(20)..(21): Xaa is A or G or absent
XAKVVMNEYQKYXXXXXXXXXIYLVSIPSLKTPAXXAK

SEQ ID NO: 17481 - protein, 41 aa, Artificial Sequence
  Non-cyclic GFR-binding peptide
  MOD_RES (2)..(4)..(35)..(36): Xaa is C or S
SXKXSKVIMEYKFKIKPTKGILYLISIPELDQSVXXPSASA

SEQ ID NO: 17482 - protein, 40 aa, Artificial Sequence
  Non-cyclic GFR-binding peptide
  MOD_RES (1)..(3)..(35)..(36): Xaa is C or S
XGXGEVVMDEYKFKVVKENEDLYLMSIPELETPVXXAKPI

SEQ ID NO: 17483 - protein, 39 aa, Artificial Sequence
  Non-cyclic GFR-binding peptide
  MOD_RES (2)..(4)..(37)..(38): Xaa is C or S
  MOD_RES (15)..(16)..(17)..(18)..(19): Xaa is A or G
  MOD_RES (20)..(21)..(22)..(23): Xaa is A or G or absent
SXKXSKVIMEYQKYXXXXXXXXXIYLISIPSLDQSVXXP

SEQ ID NO: 17484 - protein, 34 aa, Artificial Sequence
  Non-cyclic GFR-binding peptide
  MOD_RES (31)..(32): Xaa is C or S
EVVMEEYKFKVVKDYEDLYLMSIPELETPVXXAK

SEQ ID NO: 17485 - protein, 41 aa, Artificial Sequence
  Non-cyclic GFR-binding peptide
  MOD_RES (2)..(4)..(37)..(38): Xaa is C or S
  MOD_RES (15)..(16)..(17)..(18)..(19): Xaa is A or G
  MOD_RES (20)..(21)..(22)..(23): Xaa is A or G or absent
SXKXSRVIMEYKFKXXXXXXXXXLYLISIPELAQPVXXPAA

SEQ ID NO: 17486 - protein, 36 aa, Artificial Sequence
  Non-cyclic GFR-binding peptide
  MOD_RES (32)..(33): Xaa is C or S
AEVVMDYHYKLVVNNAADKYLISIPSLRAPVXXSAP

SEQ ID NO: 17487 - protein, 32 aa, Artificial Sequence
  Non-cyclic GFR-binding peptide
EAVSMGEEYKFKTPVGMDDLYLVSIPELKTPV

SEQ ID NO: 17488 - protein, 38 aa, Artificial Sequence
  Non-cyclic GFR-binding peptide
  MOD_RES (2)..(4)..(37)..(38): Xaa is C or S
  MOD_RES (15)..(16)..(17)..(18)..(19): Xaa is A or G
  MOD_RES (20)..(21)..(22)..(23): Xaa is A or G or absent
SXKXSKVVMEYQKYXXXXXXXXXIYLISIPSLDQPVXX

SEQ ID NO: 17489 - protein, 35 aa, Artificial Sequence
  Non-cyclic GFR-binding peptide
  MOD_RES (34)..(34): Xaa is C or S
  MOD_RES (12)..(13)..(14)..(15)..(16): Xaa is A or G
  MOD_RES (17)..(18)..(19)..(20): Xaa is A or G or absent
SRVVMNEYKFKXXXXXXXXXLYLVSIPELKTPAXT

SEQ ID NO: 17490 - protein, 40 aa, Artificial Sequence
  Non-cyclic GFR-binding peptide
  MOD_RES (1)..(3)..(36)..(37): Xaa is C or S
  MOD_RES (14)..(15)..(16)..(17)..(18): Xaa is A or G
  MOD_RES (19)..(20)..(21)..(22): Xaa is A or G or absent
XKXSKVVMEYQKYXXXXXXXXXIYLISIPSLDQPVXXPSA

SEQ ID NO: 17491 - protein, 33 aa, Artificial Sequence
  Non-cyclic GFR-binding peptide
  MOD_RES (33)..(33): Xaa is C or S
  MOD_RES (11)..(12)..(13)..(14)..(15): Xaa is A or G
  MOD_RES (16)..(17)..(18)..(19): Xaa is A or G or absent
SVAMGEYQKYXXXXXXXXXIYLISIPSLKTPVX

SEQ ID NO: 17492 - protein, 35 aa, Artificial Sequence
  Non-cyclic GFR-binding peptide
  MOD_RES (1)..(3): Xaa is C or S
  MOD_RES (14)..(15)..(16)..(17)..(18): Xaa is A or G
  MOD_RES (19)..(20)..(21)..(22): Xaa is A or G or absent
XKXSKVVMEYQKYXXXXXXXXXIYLISIPSLDQPV

SEQ ID NO: 17493 - protein, 36 aa, Artificial Sequence
  Non-cyclic GFR-binding peptide
  MOD_RES (1)..(35): Xaa is C or S
  MOD_RES (13)..(14)..(15)..(16)..(17): Xaa is A or G
  MOD_RES (18)..(19)..(20)..(21): Xaa is A or G or absent
XSRVVMNEYQKYXXXXXXXXXIYLVSIPSLKTPAXT

SEQ ID NO: 17494 - protein, 33 aa, Artificial Sequence
  Non-cyclic GFR-binding peptide
  MOD_RES (2)..(2): Xaa is C or S
GXAEVVMDEYKFKVVNNAADLYLISIPELRAPV

SEQ ID NO: 17495 - protein, 41 aa, Artificial Sequence
  Non-cyclic GFR-binding peptide
  MOD_RES (2)..(4)..(37)..(38): Xaa is C or S
  MOD_RES (15)..(16)..(17)..(18)..(19): Xaa is A or G
  MOD_RES (20)..(21)..(22)..(23): Xaa is A or G or absent
SXKXSKVIMEYQKYXXXXXXXXXIYLISIPSLDQSVXXPSA

SEQ ID NO: 17496 - protein, 34 aa, Artificial Sequence
  Non-cyclic GFR-binding peptide
  MOD_RES (2)..(34): Xaa is C or S
GXARVVMNEYQKYIVNSSDDIYLVSIPSLQTPAX

SEQ ID NO: 17497 - protein, 43 aa, Artificial Sequence
  Non-cyclic GFR-binding peptide
  MOD_RES (1)..(3)..(37)..(38): Xaa is C or S
  MOD_RES (15)..(16)..(17)..(18)..(19): Xaa is A or G
  MOD_RES (20)..(21)..(22)..(23): Xaa is A or G or absent
XGXAKVVMNEYKFKXXXXXXXXXLYLVSIPELKTPAXXAKPVA

SEQ ID NO: 17498 - protein, 35 aa, Artificial Sequence
  Non-cyclic GFR-binding peptide
  MOD_RES (1)..(33): Xaa is C or S
XSRVVMNEYKFKIVNSSDDLYLVSIPELKTPAXTP

SEQ ID NO: 17499 - protein, 42 aa, Artificial Sequence
  Non-cyclic GFR-binding peptide
  MOD_RES (2)..(36)..(37): Xaa is C or S
  MOD_RES (14)..(15)..(16)..(17)..(18): Xaa is A or G
  MOD_RES (19)..(20)..(21)..(22): Xaa is A or G or absent
GXARVVMNEYQKYXXXXXXXXXIYLVSIPSLQTPAXXPKPVT

SEQ ID NO: 17500 - protein, 38 aa, Artificial Sequence
  Non-cyclic GFR-binding peptide
  MOD_RES (34)..(35): Xaa is C or S
  MOD_RES (12)..(13)..(14)..(15)..(16): Xaa is A or G
  MOD_RES (17)..(18)..(19)..(20): Xaa is A or G or absent
AKVVMNEYQKYXXXXXXXXXIYLVSIPSLKTPAXXAKP

SEQ ID NO: 17501 - protein, 34 aa, Artificial Sequence
  Non-cyclic GFR-binding peptide
  MOD_RES (2)..(34): Xaa is C or S
GXGEVVMDEYKFKVVKENEDLYLMSIPELETPVX

SEQ ID NO: 17502 - protein, 42 aa, Artificial Sequence
  Non-cyclic GFR-binding peptide
  MOD_RES (2)..(4)..(36)..(37): Xaa is C or S
HXGXSRVVMNEYQKYIVNSSDDIYLVSIPSLKTPAXXPKPVY

SEQ ID NO: 17503 - protein, 39 aa, Artificial Sequence
  Non-cyclic GFR-binding peptide
  MOD_RES (1)..(34)..(35): Xaa is C or S
  MOD_RES (12)..(13)..(14)..(15)..(16): Xaa is A or G
  MOD_RES (17)..(18)..(19)..(20): Xaa is A or G or absent
XSKVVMEYKFKXXXXXXXXXLYLISIPELDQPVXXPSAS

SEQ ID NO: 17504 - protein, 33 aa, Artificial Sequence
  Non-cyclic GFR-binding peptide
  MOD_RES (31)..(32): Xaa is C or S
KVVMNEYQKYIVNNSSDIYLVSIPSLKTPAXXA

SEQ ID NO: 17505 - protein, 37 aa, Artificial Sequence
  Non-cyclic GFR-binding peptide
  MOD_RES (2)..(35)..(36): Xaa is C or S
GXEAVSMGEEYKFKTPVGMDDLYLVSIPELKTPVXXA

SEQ ID NO: 17506 - protein, 35 aa, Artificial Sequence
  Non-cyclic GFR-binding peptide
  MOD_RES (31)..(32): Xaa is C or S
EVVMEEYQKYVVKDYEDIYLMSIPSLETPVXXAKP

SEQ ID NO: 17507 - protein, 35 aa, Artificial Sequence
  Non-cyclic GFR-binding peptide
  MOD_RES (32)..(33): Xaa is C or S
ESVAMGRYKKLYTVVGKDFYLISIANLKTPVXXAK

SEQ ID NO: 17508 - protein, 34 aa, Artificial Sequence
  Non-cyclic GFR-binding peptide
  MOD_RES (33)..(34): Xaa is C or S
  MOD_RES (11)..(12)..(13)..(14)..(15): Xaa is A or G
  MOD_RES (16)..(17)..(18)..(19): Xaa is A or G or absent
EVVMDYHYKLXXXXXXXXXKYLISIPSLRAPVXX

SEQ ID NO: 17509 - protein, 39 aa, Artificial Sequence
  Non-cyclic GFR-binding peptide
  MOD_RES (2)..(4)..(38)..(39): Xaa is C or S
  MOD_RES (16)..(17)..(18)..(19)..(20): Xaa is A or G
  MOD_RES (21)..(22)..(23)..(24): Xaa is A or G or absent
HXGXAKVVMNEYQKYXXXXXXXXXIYLVSIPSLKTPAXX

SEQ ID NO: 17510 - protein, 37 aa, Artificial Sequence
  Non-cyclic GFR-binding peptide
  MOD_RES (1)..(3): Xaa is C or S
  MOD_RES (16)..(17)..(18)..(19)..(20): Xaa is A or G
  MOD_RES (21)..(22)..(23)..(24): Xaa is A or G or absent
XGXEAVSMGEEYKFKXXXXXXXXXLYLVSIPELKTPV

SEQ ID NO: 17511 - protein, 37 aa, Artificial Sequence
  Non-cyclic GFR-binding peptide
  MOD_RES (2)..(36)..(37): Xaa is C or S
  MOD_RES (14)..(15)..(16)..(17)..(18): Xaa is A or G
  MOD_RES (19)..(20)..(21)..(22): Xaa is A or G or absent
GXGEVVMDEYQKYXXXXXXXXXIYLMSIPSLETPVXX

SEQ ID NO: 17512 - protein, 35 aa, Artificial Sequence
  Non-cyclic GFR-binding peptide
  MOD_RES (2)..(4): Xaa is C or S
HXGXAKVVMNEYQKYIVNNSSDIYLVSIPSLKTPA

SEQ ID NO: 17513 - protein, 38 aa, Artificial Sequence
  Non-cyclic GFR-binding peptide
  MOD_RES (1)..(34)..(35): Xaa is C or S
XEAVSMGEEYKFKTPVGMDDLYLVSIPELKTPVXXAKG

SEQ ID NO: 17514 - protein, 33 aa, Artificial Sequence
  Non-cyclic GFR-binding peptide
  MOD_RES (32)..(33): Xaa is C or S
ESVAMGEYQKYYTVVGKDIYLISIPSLKTPVXX

SEQ ID NO: 17515 - protein, 34 aa, Artificial Sequence
  Non-cyclic GFR-binding peptide
  MOD_RES (1)..(33)..(34): Xaa is C or S
XESVAMGRYKKLYTVVGKDFYLISIANLKTPVXX

SEQ ID NO: 17516 - protein, 35 aa, Artificial Sequence
  Non-cyclic GFR-binding peptide
  MOD_RES (2)..(33)..(34): Xaa is C or S
KXSKVIMEYKFKIKPTKGILYLISIPELDQSVXXP

SEQ ID NO: 17517 - protein, 42 aa, Artificial Sequence
  Non-cyclic GFR-binding peptide
  MOD_RES (2)..(4)..(37)..(38): Xaa is C or S
  MOD_RES (15)..(16)..(17)..(18)..(19): Xaa is A or G
  MOD_RES (20)..(21)..(22)..(23): Xaa is A or G or absent
SXKXSKVIMEYKFKXXXXXXXXXLYLISIPELDQSVXXPSAS

SEQ ID NO: 17518 - protein, 38 aa, Artificial Sequence
  Non-cyclic GFR-binding peptide
  MOD_RES (1)..(33)..(34): Xaa is C or S
XESVAMGEYQKYYTVVGKDIYLISIPSLKTPVXXAKSA

SEQ ID NO: 17519 - protein, 38 aa, Artificial Sequence
  Non-cyclic GFR-binding peptide
  MOD_RES (2)..(33)..(34): Xaa is C or S
KXSRVIMEYQKYVKPKRGVIYLISIPSLAQPVXXPAAS

SEQ ID NO: 17520 - protein, 31 aa, Artificial Sequence
  Non-cyclic GFR-binding peptide
  MOD_RES (31)..(31): Xaa is C or S
EVVMEEYKFKVVKDYEDLYLMSIPELETPVX

SEQ ID NO: 17521 - protein, 41 aa, Artificial Sequence
  Non-cyclic GFR-binding peptide
  MOD_RES (1)..(35)..(36): Xaa is C or S
  MOD_RES (13)..(14)..(15)..(16)..(17): Xaa is A or G
  MOD_RES (18)..(19)..(20)..(21): Xaa is A or G or absent
XESVAMGEYQKYXXXXXXXXXIYLISIPSLKTPVXXAKSAK

SEQ ID NO: 17522 - protein, 39 aa, Artificial Sequence
  Non-cyclic GFR-binding peptide
  MOD_RES (33)..(34): Xaa is C or S
  MOD_RES (11)..(12)..(13)..(14)..(15): Xaa is A or G
  MOD_RES (16)..(17)..(18)..(19): Xaa is A or G or absent
SVAMGYHYKLXXXXXXXXXKYLISIPSLKTPVXXAKSAK

SEQ ID NO: 17523 - protein, 33 aa, Artificial Sequence
  Non-cyclic GFR-binding peptide
  MOD_RES (31)..(32): Xaa is C or S
RVVMNEYKFKIVNSSDDLYLVSIPELKTPAXXP

SEQ ID NO: 17524 - protein, 39 aa, Artificial Sequence
  Non-cyclic GFR-binding peptide
  MOD_RES (1)..(3)..(35)..(36): Xaa is C or S
XGXGEVVMDEYKFKVVKENEDLYLMSIPELETPVXXAKP

SEQ ID NO: 17525 - protein, 36 aa, Artificial Sequence
  Non-cyclic GFR-binding peptide
  MOD_RES (2)..(34)..(35): Xaa is C or S
GXAEVVMDRYKKLVVNNAADFYLISIANLRAPVXXS

SEQ ID NO: 17526 - protein, 35 aa, Artificial Sequence
  Non-cyclic GFR-binding peptide
  MOD_RES (1)..(34)..(35): Xaa is C or S
XEAVSMGEEYQKYTPVGMDDIYLVSIPSLKTPVXX

SEQ ID NO: 17527 - protein, 34 aa, Artificial Sequence
  Non-cyclic GFR-binding peptide
  MOD_RES (31)..(32): Xaa is C or S
RVVMNEYKFKIVNSSDDLYLVSIPELQTPAXXPK

SEQ ID NO: 17528 - protein, 31 aa, Artificial Sequence
  Non-cyclic GFR-binding peptide
  MOD_RES (31)..(31): Xaa is C or S
RVVMNEYKFKIVNSSDDLYLVSIPELKTPAX

SEQ ID NO: 17529 - protein, 38 aa, Artificial Sequence
  Non-cyclic GFR-binding peptide
  MOD_RES (2)..(36)..(37): Xaa is C or S
  MOD_RES (14)..(15)..(16)..(17)..(18): Xaa is A or G
  MOD_RES (19)..(20)..(21)..(22): Xaa is A or G or absent
GXAEVVMDEYKFKXXXXXXXXXLYLISIPELRAPVXXS

SEQ ID NO: 17530 - protein, 36 aa, Artificial Sequence
  Non-cyclic GFR-binding peptide
  MOD_RES (33)..(33): Xaa is C or S
  MOD_RES (11)..(12)..(13)..(14)..(15): Xaa is A or G
  MOD_RES (16)..(17)..(18)..(19): Xaa is A or G or absent
RVVMNEYKFKXXXXXXXXXLYLVSIPELKTPAXTPK

SEQ ID NO: 17531 - protein, 34 aa, Artificial Sequence
  Non-cyclic GFR-binding peptide
  MOD_RES (31)..(32): Xaa is C or S
SKVIMEYQKYIKPTKGIIYLISIPSLDQSVXXPS

SEQ ID NO: 17532 - protein, 40 aa, Artificial Sequence
  Non-cyclic GFR-binding peptide
  MOD_RES (34)..(35): Xaa is C or S
  MOD_RES (12)..(13)..(14)..(15)..(16): Xaa is A or G
  MOD_RES (17)..(18)..(19)..(20): Xaa is A or G or absent
ARVVMNEYKFKXXXXXXXXXLYLVSIPELQTPAXXPKPVT

SEQ ID NO: 17533 - protein, 39 aa, Artificial Sequence
  Non-cyclic GFR-binding peptide
  MOD_RES (2)..(4)..(36)..(37): Xaa is C or S
RXGXAEVVMDRYKKLVVNNAADFYLISIANLRAPVXXSA

SEQ ID NO: 17534 - protein, 36 aa, Artificial Sequence
  Non-cyclic GFR-binding peptide
  MOD_RES (1)..(35)..(36): Xaa is C or S
  MOD_RES (13)..(14)..(15)..(16)..(17): Xaa is A or G
  MOD_RES (18)..(19)..(20)..(21): Xaa is A or G or absent
XGEVVMDEYKFKXXXXXXXXXLYLMSIPELETPVXX

SEQ ID NO: 17535 - protein, 36 aa, Artificial Sequence
  Non-cyclic GFR-binding peptide
  MOD_RES (33)..(34): Xaa is C or S
  MOD_RES (11)..(12)..(13)..(14)..(15): Xaa is A or G
  MOD_RES (16)..(17)..(18)..(19): Xaa is A or G or absent
SRVIMEYKFKXXXXXXXXXLYLISIPELAQPVXXPA

SEQ ID NO: 17536 - protein, 40 aa, Artificial Sequence
  Non-cyclic GFR-binding peptide
  MOD_RES (34)..(35): Xaa is C or S
  MOD_RES (12)..(13)..(14)..(15)..(16): Xaa is A or G
  MOD_RES (17)..(18)..(19)..(20): Xaa is A or G or absent
GEVVMEEYQKYXXXXXXXXXIYLMSIPSLETPVXXAKPIS

SEQ ID NO: 17537 - protein, 37 aa, Artificial Sequence
  Non-cyclic GFR-binding peptide
  MOD_RES (2)..(4): Xaa is C or S
  MOD_RES (16)..(17)..(18)..(19)..(20): Xaa is A or G
  MOD_RES (21)..(22)..(23)..(24): Xaa is A or G or absent
RXGXGEVVMDEYQKYXXXXXXXXXIYLMSIPSLETPV

SEQ ID NO: 17538 - protein, 39 aa, Artificial Sequence
  Non-cyclic GFR-binding peptide
  MOD_RES (1)..(33)..(34): Xaa is C or S
XARVVMNEYQKYIVNSSDDIYLVSIPSLQTPAXXPKPVT

SEQ ID NO: 17539 - protein, 37 aa, Artificial Sequence
  Non-cyclic GFR-binding peptide
  MOD_RES (31)..(32): Xaa is C or S
EVVMDEYKFKVVKENEDLYLMSIPELETPVXXAKPIK

SEQ ID NO: 17540 - protein, 40 aa, Artificial Sequence
  Non-cyclic GFR-binding peptide
  MOD_RES (2)..(4)..(38)..(39): Xaa is C or S
  MOD_RES (16)..(17)..(18)..(19)..(20): Xaa is A or G
  MOD_RES (21)..(22)..(23)..(24): Xaa is A or G or absent
RXGXESVAMGRYKKLXXXXXXXXXFYLISIANLKTPVXXA

SEQ ID NO: 17541 - protein, 36 aa, Artificial Sequence
  Non-cyclic GFR-binding peptide
  MOD_RES (1)..(33)..(34): Xaa is C or S
XSRVVMNEYQKYIVNSSDDIYLVSIPSLKTPAXXPK

SEQ ID NO: 17542 - protein, 36 aa, Artificial Sequence
  Non-cyclic GFR-binding peptide
  MOD_RES (2)..(35)..(36): Xaa is C or S
  MOD_RES (13)..(14)..(15)..(16)..(17): Xaa is A or G
  MOD_RES (18)..(19)..(20)..(21): Xaa is A or G or absent
KXSKVVMEYQKYXXXXXXXXXIYLISIPSLDQPVXX

SEQ ID NO: 17543 - protein, 39 aa, Artificial Sequence
  Non-cyclic GFR-binding peptide
  MOD_RES (1)..(33)..(34): Xaa is C or S
XESVAMGYHYKLYTVVGKDKYLISIPSLKTPVXXAKSAK

SEQ ID NO: 17544 - protein, 41 aa, Artificial Sequence
  Non-cyclic GFR-binding peptide
  MOD_RES (1)..(3)..(35): Xaa is C or S
XGXSRVVMNEYQKYIVNSSDDIYLVSIPSLKTPAXTPKTVH

SEQ ID NO: 17545 - protein, 38 aa, Artificial Sequence
  Non-cyclic GFR-binding peptide
  MOD_RES (1)..(3)..(35)..(36): Xaa is C or S
XGXGEVVMEEYKFKVVKDYEDLYLMSIPELETPVXXAK

SEQ ID NO: 17546 - protein, 39 aa, Artificial Sequence
  Non-cyclic GFR-binding peptide
  MOD_RES (1)..(3)..(36)..(37): Xaa is C or S
  MOD_RES (14)..(15)..(16)..(17)..(18): Xaa is A or G
  MOD_RES (19)..(20)..(21)..(22): Xaa is A or G or absent
XKXSKVVMEYQKYXXXXXXXXXIYLISIPSLDQPVXXPS

SEQ ID NO: 17547 - protein, 41 aa, Artificial Sequence
  Non-cyclic GFR-binding peptide
  MOD_RES (2)..(4)..(38)..(39): Xaa is C or S
  MOD_RES (16)..(17)..(18)..(19)..(20): Xaa is A or G
  MOD_RES (21)..(22)..(23)..(24): Xaa is A or G or absent
RXGXAEVVMDYHYKLXXXXXXXXXKYLISIPSLRAPVXXSA

SEQ ID NO: 17548 - protein, 33 aa, Artificial Sequence
  Non-cyclic GFR-binding peptide
  MOD_RES (12)..(13)..(14)..(15)..(16): Xaa is A or G
  MOD_RES (17)..(18)..(19)..(20): Xaa is A or G or absent
GEVVMEEYKFKXXXXXXXXXLYLMSIPELETPV

SEQ ID NO: 17549 - protein, 39 aa, Artificial Sequence
  Non-cyclic GFR-binding peptide
  MOD_RES (2)..(4)..(37)..(38): Xaa is C or S
  MOD_RES (15)..(16)..(17)..(18)..(19): Xaa is A or G
  MOD_RES (20)..(21)..(22)..(23): Xaa is A or G or absent
SXKXSKVVMEYQKYXXXXXXXXXIYLISIPSLDQPVXXP

SEQ ID NO: 17550 - protein, 36 aa, Artificial Sequence
  Non-cyclic GFR-binding peptide
  MOD_RES (35)..(36): Xaa is C or S
  MOD_RES (13)..(14)..(15)..(16)..(17): Xaa is A or G
  MOD_RES (18)..(19)..(20)..(21): Xaa is A or G or absent
EAVSMGEEYQKYXXXXXXXXXIYLVSIPSLKTPVXX

SEQ ID NO: 17551 - protein, 36 aa, Artificial Sequence
  Non-cyclic GFR-binding peptide
  MOD_RES (2)..(4)..(36): Xaa is C or S
HXGXARVVMNEYKFKIVNSSDDLYLVSIPELQTPAX

SEQ ID NO: 17552 - protein, 37 aa, Artificial Sequence
  Non-cyclic GFR-binding peptide
  MOD_RES (33)..(34): Xaa is C or S
  MOD_RES (11)..(12)..(13)..(14)..(15): Xaa is A or G
  MOD_RES (16)..(17)..(18)..(19): Xaa is A or G or absent
SRVIMEYKFKXXXXXXXXXLYLISIPELAQPVXXPAA

SEQ ID NO: 17553 - protein, 34 aa, Artificial Sequence
  Non-cyclic GFR-binding peptide
  MOD_RES (2)..(4): Xaa is C or S
SXKXSKVVMEYKFKVKPTRGVLYLISIPELDQPV

SEQ ID NO: 17554 - protein, 34 aa, Artificial Sequence
  Non-cyclic GFR-binding peptide
  MOD_RES (33)..(34): Xaa is C or S
  MOD_RES (11)..(12)..(13)..(14)..(15): Xaa is A or G
  MOD_RES (16)..(17)..(18)..(19): Xaa is A or G or absent
EVVMDEYKFKXXXXXXXXXLYLMSIPELETPVXX

SEQ ID NO: 17555 - protein, 44 aa, Artificial Sequence
  Non-cyclic GFR-binding peptide
  MOD_RES (2)..(4)..(38)..(39): Xaa is C or S
  MOD_RES (16)..(17)..(18)..(19)..(20): Xaa is A or G
  MOD_RES (21)..(22)..(23)..(24): Xaa is A or G or absent
RXGXESVAMGYHYKLXXXXXXXXXKYLISIPSLKTPVXXAKSAK

SEQ ID NO: 17556 - protein, 37 aa, Artificial Sequence
  Non-cyclic GFR-binding peptide
  MOD_RES (2)..(4): Xaa is C or S
  MOD_RES (16)..(17)..(18)..(19)..(20): Xaa is A or G
  MOD_RES (21)..(22)..(23)..(24): Xaa is A or G or absent
HXGXSRVVMNEYKFKXXXXXXXXXLYLVSIPELKTPA

SEQ ID NO: 17557 - protein, 38 aa, Artificial Sequence
  Non-cyclic GFR-binding peptide
  MOD_RES (2)..(4)..(35)..(36): Xaa is C or S
SXKXSKVVMEYQKYVKPTRGVIYLISIPSLDQPVXXPS

SEQ ID NO: 17558 - protein, 40 aa, Artificial Sequence
  Non-cyclic GFR-binding peptide
  MOD_RES (34)..(35): Xaa is C or S
  MOD_RES (12)..(13)..(14)..(15)..(16): Xaa is A or G
  MOD_RES (17)..(18)..(19)..(20): Xaa is A or G or absent
ESVAMGEYQKYXXXXXXXXXIYLISIPSLKTPVXXAKSAK

SEQ ID NO: 17559 - protein, 39 aa, Artificial Sequence
  Non-cyclic GFR-binding peptide
  MOD_RES (1)..(33)..(34): Xaa is C or S
XAEVVMDYHYKLVVNNAADKYLISIPSLRAPVXXSAPAA

SEQ ID NO: 17560 - protein, 36 aa, Artificial Sequence
  Non-cyclic GFR-binding peptide
  MOD_RES (1)..(3)..(35)..(36): Xaa is C or S
XGXESVAMGRYKKLYTVVGKDFYLISIANLKTPVXX

SEQ ID NO: 17561 - protein, 39 aa, Artificial Sequence
  Non-cyclic GFR-binding peptide
  MOD_RES (2)..(34)..(35): Xaa is C or S
GXAKVVMNEYKFKIVNNSSDLYLVSIPELKTPAXXAKPV

SEQ ID NO: 17562 - protein, 37 aa, Artificial Sequence
  Non-cyclic GFR-binding peptide
  MOD_RES (2)..(34)..(35): Xaa is C or S
GXSRVVMNEYKFKIVNSSDDLYLVSIPELKTPAXXPK

SEQ ID NO: 17563 - protein, 38 aa, Artificial Sequence
  Non-cyclic GFR-binding peptide
  MOD_RES (2)..(36)..(37): Xaa is C or S
  MOD_RES (14)..(15)..(16)..(17)..(18): Xaa is A or G
  MOD_RES (19)..(20)..(21)..(22): Xaa is A or G or absent
GXGEVVMDEYQKYXXXXXXXXXIYLMSIPSLETPVXXA

SEQ ID NO: 17564 - protein, 42 aa, Artificial Sequence
  Non-cyclic GFR-binding peptide
  MOD_RES (2)..(4)..(36)..(37): Xaa is C or S
HXGXSRVVMNEYKFKIVNSSDDLYLVSIPELKTPAXXPKPVY

SEQ ID NO: 17565 - protein, 38 aa, Artificial Sequence
  Non-cyclic GFR-binding peptide
  MOD_RES (2)..(4)..(38): Xaa is C or S
  MOD_RES (16)..(17)..(18)..(19)..(20): Xaa is A or G
  MOD_RES (21)..(22)..(23)..(24): Xaa is A or G or absent
RXGXESVAMGYHYKLXXXXXXXXXKYLISIPSLKTPVX

SEQ ID NO: 17566 - protein, 36 aa, Artificial Sequence
  Non-cyclic GFR-binding peptide
  MOD_RES (1)..(3)..(36): Xaa is C or S
  MOD_RES (14)..(15)..(16)..(17)..(18): Xaa is A or G
  MOD_RES (19)..(20)..(21)..(22): Xaa is A or G or absent
XKXSKVIMEYKFKXXXXXXXXXLYLISIPELDQSVX

SEQ ID NO: 17567 - protein, 34 aa, Artificial Sequence
  Non-cyclic GFR-binding peptide
  MOD_RES (33)..(34): Xaa is C or S
  MOD_RES (11)..(12)..(13)..(14)..(15): Xaa is A or G
  MOD_RES (16)..(17)..(18)..(19): Xaa is A or G or absent
KVVMNEYQKYXXXXXXXXXIYLVSIPSLKTPAXX

SEQ ID NO: 17568 - protein, 34 aa, Artificial Sequence
  Non-cyclic GFR-binding peptide
  MOD_RES (33)..(34): Xaa is C or S
  MOD_RES (11)..(12)..(13)..(14)..(15): Xaa is A or G
  MOD_RES (16)..(17)..(18)..(19): Xaa is A or G or absent
RVVMNEYQKYXXXXXXXXXIYLVSIPSLKTPAXX

SEQ ID NO: 17569 - protein, 38 aa, Artificial Sequence
  Non-cyclic GFR-binding peptide
  MOD_RES (1)..(36)..(37): Xaa is C or S
  MOD_RES (14)..(15)..(16)..(17)..(18): Xaa is A or G
  MOD_RES (19)..(20)..(21)..(22): Xaa is A or G or absent
XEAVSMGEEYKFKXXXXXXXXXLYLVSIPELKTPVXXA

SEQ ID NO: 17570 - protein, 38 aa, Artificial Sequence
  Non-cyclic GFR-binding peptide
  MOD_RES (2)..(4)..(38): Xaa is C or S
  MOD_RES (16)..(17)..(18)..(19)..(20): Xaa is A or G
  MOD_RES (21)..(22)..(23)..(24): Xaa is A or G or absent
RXGXGEVVMDEYKFKXXXXXXXXXLYLMSIPELETPVX

SEQ ID NO: 17571 - protein, 37 aa, Artificial Sequence
  Non-cyclic GFR-binding peptide
  MOD_RES (1)..(36)..(37): Xaa is C or S
  MOD_RES (14)..(15)..(16)..(17)..(18): Xaa is A or G
  MOD_RES (19)..(20)..(21)..(22): Xaa is A or G or absent
XEAVSMGEEYQKYXXXXXXXXXIYLVSIPSLKTPVXX

SEQ ID NO: 17572 - protein, 35 aa, Artificial Sequence
  Non-cyclic GFR-binding peptide
  MOD_RES (31)..(32): Xaa is C or S
SVAMGEYQKYYTVVGKDIYLISIPSLKTPVXXAKS

SEQ ID NO: 17573 - protein, 41 aa, Artificial Sequence
  Non-cyclic GFR-binding peptide
  MOD_RES (2)..(36)..(37): Xaa is C or S
  MOD_RES (14)..(15)..(16)..(17)..(18): Xaa is A or G
  MOD_RES (19)..(20)..(21)..(22): Xaa is A or G or absent
GXARVVMNEYKFKXXXXXXXXXLYLVSIPELQTPAXXPKPV

SEQ ID NO: 17574 - protein, 37 aa, Artificial Sequence
  Non-cyclic GFR-binding peptide
  MOD_RES (1)..(3)..(37): Xaa is C or S
  MOD_RES (15)..(16)..(17)..(18)..(19): Xaa is A or G
  MOD_RES (20)..(21)..(22)..(23): Xaa is A or G or absent
XGXSRVVMNEYQKYXXXXXXXXXIYLVSIPSLKTPAX

SEQ ID NO: 17575 - protein, 39 aa, Artificial Sequence
  Non-cyclic GFR-binding peptide
  MOD_RES (2)..(4)..(39): Xaa is C or S
  MOD_RES (17)..(18)..(19)..(20)..(21): Xaa is A or G
  MOD_RES (22)..(23)..(24)..(25): Xaa is A or G or absent
RXGXEAVSMGEEYQKYXXXXXXXXXIYLVSIPSLKTPVX

SEQ ID NO: 17576 - protein, 38 aa, Artificial Sequence
  Non-cyclic GFR-binding peptide
  MOD_RES (32)..(33): Xaa is C or S
AEVVMDEYKFKVVNNAADLYLISIPELRAPVXXSAPAA

SEQ ID NO: 17577 - protein, 42 aa, Artificial Sequence
  Non-cyclic GFR-binding peptide
  MOD_RES (1)..(3)..(37)..(38): Xaa is C or S
  MOD_RES (15)..(16)..(17)..(18)..(19): Xaa is A or G
  MOD_RES (20)..(21)..(22)..(23): Xaa is A or G or absent
XGXGEVVMEEYQKYXXXXXXXXXIYLMSIPSLETPVXXAKPI

SEQ ID NO: 17578 - protein, 33 aa, Artificial Sequence
  Non-cyclic GFR-binding peptide
  MOD_RES (33)..(33): Xaa is C or S
  MOD_RES (11)..(12)..(13)..(14)..(15): Xaa is A or G
  MOD_RES (16)..(17)..(18)..(19): Xaa is A or G or absent
SKVVMEYKFKXXXXXXXXXLYLISIPELDQPVX

SEQ ID NO: 17579 - protein, 36 aa, Artificial Sequence
  Non-cyclic GFR-binding peptide
  MOD_RES (1)..(3)..(34)..(35): Xaa is C or S
XKXSRVIMEYQKYVKPKRGVIYLISIPSLAQPVXXP

SEQ ID NO: 17580 - protein, 40 aa, Artificial Sequence
  Non-cyclic GFR-binding peptide
  MOD_RES (2)..(4)..(36)..(37): Xaa is C or S
HXGXSRVVMNEYKFKIVNSSDDLYLVSIPELKTPAXXPKP

SEQ ID NO: 17581 - protein, 34 aa, Artificial Sequence
  Non-cyclic GFR-binding peptide
  MOD_RES (2)..(34): Xaa is C or S
GXESVAMGRYKKLYTVVGKDFYLISIANLKTPVX

SEQ ID NO: 17582 - protein, 33 aa, Artificial Sequence
  Non-cyclic GFR-binding peptide
  MOD_RES (31)..(32): Xaa is C or S
EVVMDEYKFKVVNNAADLYLISIPELRAPVXXS

SEQ ID NO: 17583 - protein, 37 aa, Artificial Sequence
  Non-cyclic GFR-binding peptide
  MOD_RES (1)..(34)..(35): Xaa is C or S
XEAVSMGEEYKFKTPVGMDDLYLVSIPELKTPVXXAK

SEQ ID NO: 17584 - protein, 41 aa, Artificial Sequence
  Non-cyclic GFR-binding peptide
  MOD_RES (35)..(36): Xaa is C or S
  MOD_RES (13)..(14)..(15)..(16)..(17): Xaa is A or G
  MOD_RES (18)..(19)..(20)..(21): Xaa is A or G or absent
EAVSMGEEYKFKXXXXXXXXXLYLVSIPELKTPVXXAKGVK

SEQ ID NO: 17585 - protein, 37 aa, Artificial Sequence
  Non-cyclic GFR-binding peptide
  MOD_RES (1)..(3)..(36)..(37): Xaa is C or S
  MOD_RES (14)..(15)..(16)..(17)..(18): Xaa is A or G
  MOD_RES (19)..(20)..(21)..(22): Xaa is A or G or absent
XKXSRVIMEYQKYXXXXXXXXXIYLISIPSLAQPVXX

SEQ ID NO: 17586 - protein, 39 aa, Artificial Sequence
  Non-cyclic GFR-binding peptide
  MOD_RES (1)..(33)..(34): Xaa is C or S
XGEVVMDEYQKYVVKENEDIYLMSIPSLETPVXXAKPIK

SEQ ID NO: 17587 - protein, 41 aa, Artificial Sequence
  Non-cyclic GFR-binding peptide
  MOD_RES (2)..(36)..(37): Xaa is C or S
  MOD_RES (14)..(15)..(16)..(17)..(18): Xaa is A or G
  MOD_RES (19)..(20)..(21)..(22): Xaa is A or G or absent
GXESVAMGEYQKYXXXXXXXXXIYLISIPSLKTPVXXAKSA

SEQ ID NO: 17588 - protein, 33 aa, Artificial Sequence
  Non-cyclic GFR-binding peptide
  MOD_RES (33)..(33): Xaa is C or S
  MOD_RES (11)..(12)..(13)..(14)..(15): Xaa is A or G
  MOD_RES (16)..(17)..(18)..(19): Xaa is A or G or absent
RVVMNEYKFKXXXXXXXXXLYLVSIPELKTPAX

SEQ ID NO: 17589 - protein, 31 aa, Artificial Sequence
  Non-cyclic GFR-binding peptide
  MOD_RES (31)..(31): Xaa is C or S
SKVIMEYQKYIKPTKGIIYLISIPSLDQSVX

SEQ ID NO: 17590 - protein, 33 aa, Artificial Sequence
  Non-cyclic GFR-binding peptide
  MOD_RES (33)..(33): Xaa is C or S
  MOD_RES (11)..(12)..(13)..(14)..(15): Xaa is A or G
  MOD_RES (16)..(17)..(18)..(19): Xaa is A or G or absent
KVVMNEYKFKXXXXXXXXXLYLVSIPELKTPAX

SEQ ID NO: 17591 - protein, 33 aa, Artificial Sequence
  Non-cyclic GFR-binding peptide
  MOD_RES (12)..(13)..(14)..(15)..(16): Xaa is A or G
  MOD_RES (17)..(18)..(19)..(20): Xaa is A or G or absent
AKVVMNEYQKYXXXXXXXXXIYLVSIPSLKTPA

SEQ ID NO: 17592 - protein, 36 aa, Artificial Sequence
  Non-cyclic GFR-binding peptide
  MOD_RES (1)..(33)..(34): Xaa is C or S
XAEVVMDYHYKLVVNNAADKYLISIPSLRAPVXXSA

SEQ ID NO: 17593 - protein, 36 aa, Artificial Sequence
  Non-cyclic GFR-binding peptide
  MOD_RES (31)..(32): Xaa is C or S
KVVMNEYQKYIVNNSSDIYLVSIPSLKTPAXXAKPV

SEQ ID NO: 17594 - protein, 42 aa, Artificial Sequence
  Non-cyclic GFR-binding peptide
  MOD_RES (1)..(3)..(37): Xaa is C or S
  MOD_RES (15)..(16)..(17)..(18)..(19): Xaa is A or G
  MOD_RES (20)..(21)..(22)..(23): Xaa is A or G or absent
XGXSRVVMNEYKFKXXXXXXXXXLYLVSIPELKTPAXTPKTV

SEQ ID NO: 17595 - protein, 36 aa, Artificial Sequence
  Non-cyclic GFR-binding peptide
  MOD_RES (31)..(32): Xaa is C or S
SVAMGRYKKLYTVVGKDFYLISIANLKTPVXXAKSA

SEQ ID NO: 17596 - protein, 35 aa, Artificial Sequence
  Non-cyclic GFR-binding peptide
  MOD_RES (2)..(35): Xaa is C or S
  MOD_RES (13)..(14)..(15)..(16)..(17): Xaa is A or G
  MOD_RES (18)..(19)..(20)..(21): Xaa is A or G or absent
KXSKVVMEYQKYXXXXXXXXXIYLISIPSLDQPVX

SEQ ID NO: 17597 - protein, 36 aa, Artificial Sequence
  Non-cyclic GFR-binding peptide
  MOD_RES (1)..(3)..(35)..(36): Xaa is C or S
XGXAKVVMNEYQKYIVNNSSDIYLVSIPSLKTPAXX

SEQ ID NO: 17598 - protein, 36 aa, Artificial Sequence
  Non-cyclic GFR-binding peptide
  MOD_RES (2)..(34)..(35): Xaa is C or S
GXGEVVMDEYKFKVVKENEDLYLMSIPELETPVXXA

SEQ ID NO: 17599 - protein, 35 aa, Artificial Sequence
  Non-cyclic GFR-binding peptide
  MOD_RES (2)..(34)..(35): Xaa is C or S
GXAEVVMDRYKKLVVNNAADFYLISIANLRAPVXX

SEQ ID NO: 17600 - protein, 39 aa, Artificial Sequence
  Non-cyclic GFR-binding peptide
  MOD_RES (1)..(3)..(35)..(36): Xaa is C or S
XGXGEVVMEEYKFKVVKDYEDLYLMSIPELETPVXXAKP

SEQ ID NO: 17601 - protein, 33 aa, Artificial Sequence
  Non-cyclic GFR-binding peptide
  MOD_RES (33)..(33): Xaa is C or S
  MOD_RES (11)..(12)..(13)..(14)..(15): Xaa is A or G
  MOD_RES (16)..(17)..(18)..(19): Xaa is A or G or absent
SKVVMEYQKYXXXXXXXXXIYLISIPSLDQPVX

SEQ ID NO: 17602 - protein, 37 aa, Artificial Sequence
  Non-cyclic GFR-binding peptide
  MOD_RES (2)..(36)..(37): Xaa is C or S
  MOD_RES (14)..(15)..(16)..(17)..(18): Xaa is A or G
  MOD_RES (19)..(20)..(21)..(22): Xaa is A or G or absent
GXSRVVMNEYKFKXXXXXXXXXLYLVSIPELKTPAXX

SEQ ID NO: 17603 - protein, 35 aa, Artificial Sequence
  Non-cyclic GFR-binding peptide
  MOD_RES (2)..(34)..(35): Xaa is C or S
GXAKVVMNEYKFKIVNNSSDLYLVSIPELKTPAXX

SEQ ID NO: 17604 - protein, 35 aa, Artificial Sequence
  Non-cyclic GFR-binding peptide
  MOD_RES (2)..(34)..(35): Xaa is C or S
GXAEVVMDEYKFKVVNNAADLYLISIPELRAPVXX

SEQ ID NO: 17605 - protein, 41 aa, Artificial Sequence
  Non-cyclic GFR-binding peptide
  MOD_RES (2)..(4)..(38)..(39): Xaa is C or S
  MOD_RES (16)..(17)..(18)..(19)..(20): Xaa is A or G
  MOD_RES (21)..(22)..(23)..(24): Xaa is A or G or absent
RXGXGEVVMEEYQKYXXXXXXXXXIYLMSIPSLETPVXXAK

SEQ ID NO: 17606 - protein, 35 aa, Artificial Sequence
  Non-cyclic GFR-binding peptide
  MOD_RES (2)..(34)..(35): Xaa is C or S
GXSRVVMNEYQKYIVNSSDDIYLVSIPSLKTPAXX

SEQ ID NO: 17607 - protein, 39 aa, Artificial Sequence
  Non-cyclic GFR-binding peptide
  MOD_RES (2)..(34)..(35): Xaa is C or S
GXARVVMNEYQKYIVNSSDDIYLVSIPSLQTPAXXPKPV

SEQ ID NO: 17608 - protein, 36 aa, Artificial Sequence
  Non-cyclic GFR-binding peptide
  MOD_RES (31)..(32): Xaa is C or S
SRVIMEYKFKVKPKRGVLYLISIPELAQPVXXPAAS

SEQ ID NO: 17609 - protein, 31 aa, Artificial Sequence
  Non-cyclic GFR-binding peptide
  MOD_RES (31)..(31): Xaa is C or S
KVVMNEYKFKIVNNSSDLYLVSIPELKTPAX

SEQ ID NO: 17610 - protein, 35 aa, Artificial Sequence
  Non-cyclic GFR-binding peptide
  MOD_RES (1)..(3)..(35): Xaa is C or S
XGXAEVVMDYHYKLVVNNAADKYLISIPSLRAPVX

SEQ ID NO: 17611 - protein, 32 aa, Artificial Sequence
  Non-cyclic GFR-binding peptide
EAVSMGEEYQKYTPVGMDDIYLVSIPSLKTPV

SEQ ID NO: 17612 - protein, 42 aa, Artificial Sequence
  Non-cyclic GFR-binding peptide
  MOD_RES (1)..(3)..(37)..(38): Xaa is C or S
  MOD_RES (15)..(16)..(17)..(18)..(19): Xaa is A or G
  MOD_RES (20)..(21)..(22)..(23): Xaa is A or G or absent
XGXGEVVMDEYQKYXXXXXXXXXIYLMSIPSLETPVXXAKPI

SEQ ID NO: 17613 - protein, 42 aa, Artificial Sequence
  Non-cyclic GFR-binding peptide
  MOD_RES (2)..(4)..(39)..(40): Xaa is C or S
  MOD_RES (17)..(18)..(19)..(20)..(21): Xaa is A or G
  MOD_RES (22)..(23)..(24)..(25): Xaa is A or G or absent
RXGXEAVSMGEEYQKYXXXXXXXXXIYLVSIPSLKTPVXXAK

SEQ ID NO: 17614 - protein, 36 aa, Artificial Sequence
  Non-cyclic GFR-binding peptide
  MOD_RES (2)..(4)..(36): Xaa is C or S
RXGXGEVVMEEYKFKVVKDYEDLYLMSIPELETPVX

SEQ ID NO: 17615 - protein, 43 aa, Artificial Sequence
  Non-cyclic GFR-binding peptide
  MOD_RES (1)..(3)..(37)..(38): Xaa is C or S
  MOD_RES (15)..(16)..(17)..(18)..(19): Xaa is A or G
  MOD_RES (20)..(21)..(22)..(23): Xaa is A or G or absent
XGXAEVVMDRYKKLXXXXXXXXXFYLISIANLRAPVXXSAPAA

SEQ ID NO: 17616 - protein, 34 aa, Artificial Sequence
  Non-cyclic GFR-binding peptide
  MOD_RES (33)..(34): Xaa is C or S
  MOD_RES (11)..(12)..(13)..(14)..(15): Xaa is A or G
  MOD_RES (16)..(17)..(18)..(19): Xaa is A or G or absent
SKVVMEYQKYXXXXXXXXXIYLISIPSLDQPVXX

SEQ ID NO: 17617 - protein, 36 aa, Artificial Sequence
  Non-cyclic GFR-binding peptide
  MOD_RES (33)..(34): Xaa is C or S
  MOD_RES (11)..(12)..(13)..(14)..(15): Xaa is A or G
  MOD_RES (16)..(17)..(18)..(19): Xaa is A or G or absent
SVAMGYHYKLXXXXXXXXXKYLISIPSLKTPVXXAK

SEQ ID NO: 17618 - protein, 32 aa, Artificial Sequence
  Non-cyclic GFR-binding peptide
  MOD_RES (31)..(32): Xaa is C or S
SVAMGEYQKYYTVVGKDIYLISIPSLKTPVXX

SEQ ID NO: 17619 - protein, 34 aa, Artificial Sequence
  Non-cyclic GFR-binding peptide
  MOD_RES (32)..(33): Xaa is C or S
ESVAMGRYKKLYTVVGKDFYLISIANLKTPVXXA

SEQ ID NO: 17620 - protein, 39 aa, Artificial Sequence
  Non-cyclic GFR-binding peptide
  MOD_RES (34)..(35): Xaa is C or S
  MOD_RES (12)..(13)..(14)..(15)..(16): Xaa is A or G
  MOD_RES (17)..(18)..(19)..(20): Xaa is A or G or absent
GEVVMEEYKFKXXXXXXXXXLYLMSIPELETPVXXAKPI

SEQ ID NO: 17621 - protein, 36 aa, Artificial Sequence
  Non-cyclic GFR-binding peptide
  MOD_RES (2)..(34)..(35): Xaa is C or S
GXESVAMGEYQKYYTVVGKDIYLISIPSLKTPVXXA

SEQ ID NO: 17622 - protein, 41 aa, Artificial Sequence
  Non-cyclic GFR-binding peptide
  MOD_RES (2)..(36)..(37): Xaa is C or S
  MOD_RES (14)..(15)..(16)..(17)..(18): Xaa is A or G
  MOD_RES (19)..(20)..(21)..(22): Xaa is A or G or absent
GXGEVVMEEYQKYXXXXXXXXXIYLMSIPSLETPVXXAKPI

SEQ ID NO: 17623 - protein, 39 aa, Artificial Sequence
  Non-cyclic GFR-binding peptide
  MOD_RES (2)..(4)..(38)..(39): Xaa is C or S
  MOD_RES (16)..(17)..(18)..(19)..(20): Xaa is A or G
  MOD_RES (21)..(22)..(23)..(24): Xaa is A or G or absent
RXGXGEVVMDEYQKYXXXXXXXXXIYLMSIPSLETPVXX

SEQ ID NO: 17624 - protein, 35 aa, Artificial Sequence
  Non-cyclic GFR-binding peptide
  MOD_RES (31)..(32): Xaa is C or S
SRVIMEYQKYVKPKRGVIYLISIPSLAQPVXXPAA

SEQ ID NO: 17625 - protein, 34 aa, Artificial Sequence
  Non-cyclic GFR-binding peptide
  MOD_RES (33)..(34): Xaa is C or S
  MOD_RES (11)..(12)..(13)..(14)..(15): Xaa is A or G
  MOD_RES (16)..(17)..(18)..(19): Xaa is A or G or absent
RVVMNEYKFKXXXXXXXXXLYLVSIPELKTPAXX

SEQ ID NO: 17626 - protein, 39 aa, Artificial Sequence
  Non-cyclic GFR-binding peptide
  MOD_RES (33)..(34): Xaa is C or S
  MOD_RES (11)..(12)..(13)..(14)..(15): Xaa is A or G
  MOD_RES (16)..(17)..(18)..(19): Xaa is A or G or absent
RVVMNEYQKYXXXXXXXXXIYLVSIPSLKTPAXXPKPVY

SEQ ID NO: 17627 - protein, 35 aa, Artificial Sequence
  Non-cyclic GFR-binding peptide
  MOD_RES (1)..(33): Xaa is C or S
XSRVVMNEYQKYIVNSSDDIYLVSIPSLKTPAXTP

SEQ ID NO: 17628 - protein, 39 aa, Artificial Sequence
  Non-cyclic GFR-binding peptide
  MOD_RES (1)..(33)..(34): Xaa is C or S
XSRVVMNEYKFKIVNSSDDLYLVSIPELKTPAXXPKPVY

SEQ ID NO: 17629 - protein, 41 aa, Artificial Sequence
  Non-cyclic GFR-binding peptide
  MOD_RES (1)..(3)..(35): Xaa is C or S
XGXSRVVMNEYKFKIVNSSDDLYLVSIPELKTPAXTPKTVH

SEQ ID NO: 17630 - protein, 35 aa, Artificial Sequence
  Non-cyclic GFR-binding peptide
  MOD_RES (1)..(35): Xaa is C or S
  MOD_RES (13)..(14)..(15)..(16)..(17): Xaa is A or G
  MOD_RES (18)..(19)..(20)..(21): Xaa is A or G or absent
XGEVVMEEYQKYXXXXXXXXXIYLMSIPSLETPVX

SEQ ID NO: 17631 - protein, 41 aa, Artificial Sequence
  Non-cyclic GFR-binding peptide
  MOD_RES (1)..(3)..(37)..(38): Xaa is C or S
  MOD_RES (15)..(16)..(17)..(18)..(19): Xaa is A or G
  MOD_RES (20)..(21)..(22)..(23): Xaa is A or G or absent
XGXGEVVMDEYQKYXXXXXXXXXIYLMSIPSLETPVXXAKP

SEQ ID NO: 17632 - protein, 40 aa, Artificial Sequence
  Non-cyclic GFR-binding peptide
  MOD_RES (34)..(35): Xaa is C or S
  MOD_RES (12)..(13)..(14)..(15)..(16): Xaa is A or G
  MOD_RES (17)..(18)..(19)..(20): Xaa is A or G or absent
SRVVMNEYQKYXXXXXXXXXIYLVSIPSLKTPAXXPKPVY

SEQ ID NO: 17633 - protein, 37 aa, Artificial Sequence
  Non-cyclic GFR-binding peptide
  MOD_RES (1)..(32)..(33): Xaa is C or S
XSKVVMEYKFKVKPTRGVLYLISIPELDQPVXXPSAS

SEQ ID NO: 17634 - protein, 39 aa, Artificial Sequence
  Non-cyclic GFR-binding peptide
  MOD_RES (1)..(36)..(37): Xaa is C or S
  MOD_RES (14)..(15)..(16)..(17)..(18): Xaa is A or G
  MOD_RES (19)..(20)..(21)..(22): Xaa is A or G or absent
XEAVSMGEEYQKYXXXXXXXXXIYLVSIPSLKTPVXXAK

SEQ ID NO: 17635 - protein, 34 aa, Artificial Sequence
  Non-cyclic GFR-binding peptide
  MOD_RES (32)..(33): Xaa is C or S
GEVVMDEYKFKVVKENEDLYLMSIPELETPVXXA

SEQ ID NO: 17636 - protein, 38 aa, Artificial Sequence
  Non-cyclic GFR-binding peptide
  MOD_RES (33)..(34): Xaa is C or S
  MOD_RES (11)..(12)..(13)..(14)..(15): Xaa is A or G
  MOD_RES (16)..(17)..(18)..(19): Xaa is A or G or absent
EVVMDEYQKYXXXXXXXXXIYLMSIPSLETPVXXAKPI

SEQ ID NO: 17637 - protein, 37 aa, Artificial Sequence
  Non-cyclic GFR-binding peptide
  MOD_RES (1)..(3)..(35)..(36): Xaa is C or S
XGXSRVVMNEYKFKIVNSSDDLYLVSIPELKTPAXXP

SEQ ID NO: 17638 - protein, 43 aa, Artificial Sequence
  Non-cyclic GFR-binding peptide
  MOD_RES (1)..(3)..(38)..(39): Xaa is C or S
  MOD_RES (16)..(17)..(18)..(19)..(20): Xaa is A or G
  MOD_RES (21)..(22)..(23)..(24): Xaa is A or G or absent
XGXEAVSMGEEYQKYXXXXXXXXXIYLVSIPSLKTPVXXAKGV

SEQ ID NO: 17639 - protein, 41 aa, Artificial Sequence
  Non-cyclic GFR-binding peptide
  MOD_RES (1)..(36)..(37): Xaa is C or S
  MOD_RES (14)..(15)..(16)..(17)..(18): Xaa is A or G
  MOD_RES (19)..(20)..(21)..(22): Xaa is A or G or absent
XEAVSMGEEYKFKXXXXXXXXXLYLVSIPELKTPVXXAKGV

SEQ ID NO: 17640 - protein, 33 aa, Artificial Sequence
  Non-cyclic GFR-binding peptide
  MOD_RES (1)..(33): Xaa is C or S
XARVVMNEYQKYIVNSSDDIYLVSIPSLQTPAX

SEQ ID NO: 17641 - protein, 34 aa, Artificial Sequence
  Non-cyclic GFR-binding peptide
  MOD_RES (31)..(32): Xaa is C or S
KVVMNEYQKYIVNNSSDIYLVSIPSLKTPAXXAK

SEQ ID NO: 17642 - protein, 38 aa, Artificial Sequence
  Non-cyclic GFR-binding peptide
  MOD_RES (1)..(3)..(36)..(37): Xaa is C or S
  MOD_RES (14)..(15)..(16)..(17)..(18): Xaa is A or G
  MOD_RES (19)..(20)..(21)..(22): Xaa is A or G or absent
XKXSKVVMEYKFKXXXXXXXXXLYLISIPELDQPVXXP

SEQ ID NO: 17643 - protein, 34 aa, Artificial Sequence
  Non-cyclic GFR-binding peptide
  MOD_RES (33)..(33): Xaa is C or S
  MOD_RES (11)..(12)..(13)..(14)..(15): Xaa is A or G
  MOD_RES (16)..(17)..(18)..(19): Xaa is A or G or absent
RVVMNEYQKYXXXXXXXXXIYLVSIPSLKTPAXT

SEQ ID NO: 17644 - protein, 34 aa, Artificial Sequence
  Non-cyclic GFR-binding peptide
  MOD_RES (32)..(33): Xaa is C or S
AEVVMDEYKFKVVNNAADLYLISIPELRAPVXXS

SEQ ID NO: 17645 - protein, 39 aa, Artificial Sequence
  Non-cyclic GFR-binding peptide
  MOD_RES (1)..(3)..(34)..(35): Xaa is C or S
XKXSKVIMEYKFKIKPTKGILYLISIPELDQSVXXPSAS

SEQ ID NO: 17646 - protein, 40 aa, Artificial Sequence
  Non-cyclic GFR-binding peptide
  MOD_RES (1)..(3)..(37)..(38): Xaa is C or S
  MOD_RES (15)..(16)..(17)..(18)..(19): Xaa is A or G
  MOD_RES (20)..(21)..(22)..(23): Xaa is A or G or absent
XGXARVVMNEYKFKXXXXXXXXXLYLVSIPELQTPAXXPK

SEQ ID NO: 17647 - protein, 42 aa, Artificial Sequence
  Non-cyclic GFR-binding peptide
  MOD_RES (1)..(3)..(37): Xaa is C or S
  MOD_RES (15)..(16)..(17)..(18)..(19): Xaa is A or G
  MOD_RES (20)..(21)..(22)..(23): Xaa is A or G or absent
XGXSRVVMNEYQKYXXXXXXXXXIYLVSIPSLKTPAXTPKTV

SEQ ID NO: 17648 - protein, 36 aa, Artificial Sequence
  Non-cyclic GFR-binding peptide
  MOD_RES (1)..(33)..(34): Xaa is C or S
XAEVVMDRYKKLVVNNAADFYLISIANLRAPVXXSA

SEQ ID NO: 17649 - protein, 35 aa, Artificial Sequence
  Non-cyclic GFR-binding peptide
  MOD_RES (2)..(2): Xaa is C or S
  MOD_RES (14)..(15)..(16)..(17)..(18): Xaa is A or G
  MOD_RES (19)..(20)..(21)..(22): Xaa is A or G or absent
GXSRVVMNEYKFKXXXXXXXXXLYLVSIPELKTPA

SEQ ID NO: 17650 - protein, 35 aa, Artificial Sequence
  Non-cyclic GFR-binding peptide
  MOD_RES (2)..(4)..(35): Xaa is C or S
SXKXSRVIMEYQKYVKPKRGVIYLISIPSLAQPVX

SEQ ID NO: 17651 - protein, 32 aa, Artificial Sequence
  Non-cyclic GFR-binding peptide
  MOD_RES (1)..(1): Xaa is C or S
XARVVMNEYKFKIVNSSDDLYLVSIPELQTPA

SEQ ID NO: 17652 - protein, 35 aa, Artificial Sequence
  Non-cyclic GFR-binding peptide
  MOD_RES (1)..(3)..(35): Xaa is C or S
XGXAEVVMDEYKFKVVNNAADLYLISIPELRAPVX

SEQ ID NO: 17653 - protein, 34 aa, Artificial Sequence
  Non-cyclic GFR-binding peptide
  MOD_RES (31)..(32): Xaa is C or S
SRVIMEYKFKVKPKRGVLYLISIPELAQPVXXPA

SEQ ID NO: 17654 - protein, 36 aa, Artificial Sequence
  Non-cyclic GFR-binding peptide
  MOD_RES (2)..(4)..(35)..(36): Xaa is C or S
SXKXSRVIMEYKFKVKPKRGVLYLISIPELAQPVXX

SEQ ID NO: 17655 - protein, 36 aa, Artificial Sequence
  Non-cyclic GFR-binding peptide
  MOD_RES (1)..(3): Xaa is C or S
  MOD_RES (15)..(16)..(17)..(18)..(19): Xaa is A or G
  MOD_RES (20)..(21)..(22)..(23): Xaa is A or G or absent
XGXAEVVMDEYKFKXXXXXXXXXLYLISIPELRAPV

SEQ ID NO: 17656 - protein, 34 aa, Artificial Sequence
  Non-cyclic GFR-binding peptide
  MOD_RES (33)..(34): Xaa is C or S
EAVSMGEEYKFKTPVGMDDLYLVSIPELKTPVXX

SEQ ID NO: 17657 - protein, 39 aa, Artificial Sequence
  Non-cyclic GFR-binding peptide
  MOD_RES (2)..(36)..(37): Xaa is C or S
  MOD_RES (14)..(15)..(16)..(17)..(18): Xaa is A or G
  MOD_RES (19)..(20)..(21)..(22): Xaa is A or G or absent
GXAEVVMDEYKFKXXXXXXXXXLYLISIPELRAPVXXSA

SEQ ID NO: 17658 - protein, 39 aa, Artificial Sequence
  Non-cyclic GFR-binding peptide
  MOD_RES (2)..(4)..(36)..(37): Xaa is C or S
RXGXGEVVMEEYQKYVVKDYEDIYLMSIPSLETPVXXAK

SEQ ID NO: 17659 - protein, 38 aa, Artificial Sequence
  Non-cyclic GFR-binding peptide
  MOD_RES (1)..(3)..(35): Xaa is C or S
XGXSRVVMNEYQKYIVNSSDDIYLVSIPSLKTPAXTPK

SEQ ID NO: 17660 - protein, 31 aa, Artificial Sequence
  Non-cyclic GFR-binding peptide
ESVAMGEYQKYYTVVGKDIYLISIPSLKTPV

SEQ ID NO: 17661 - protein, 35 aa, Artificial Sequence
  Non-cyclic GFR-binding peptide
  MOD_RES (2)..(2): Xaa is C or S
  MOD_RES (14)..(15)..(16)..(17)..(18): Xaa is A or G
  MOD_RES (19)..(20)..(21)..(22): Xaa is A or G or absent
GXESVAMGRYKKLXXXXXXXXXFYLISIANLKTPV

SEQ ID NO: 17662 - protein, 33 aa, Artificial Sequence
  Non-cyclic GFR-binding peptide
  MOD_RES (12)..(13)..(14)..(15)..(16): Xaa is A or G
  MOD_RES (17)..(18)..(19)..(20): Xaa is A or G or absent
SRVVMNEYQKYXXXXXXXXXIYLVSIPSLKTPA

SEQ ID NO: 17663 - protein, 40 aa, Artificial Sequence
  Non-cyclic GFR-binding peptide
  MOD_RES (1)..(35)..(36): Xaa is C or S
  MOD_RES (13)..(14)..(15)..(16)..(17): Xaa is A or G
  MOD_RES (18)..(19)..(20)..(21): Xaa is A or G or absent
XGEVVMEEYQKYXXXXXXXXXIYLMSIPSLETPVXXAKPI

SEQ ID NO: 17664 - protein, 38 aa, Artificial Sequence
  Non-cyclic GFR-binding peptide
  MOD_RES (32)..(33): Xaa is C or S
ARVVMNEYQKYIVNSSDDIYLVSIPSLQTPAXXPKPVT

SEQ ID NO: 17665 - protein, 35 aa, Artificial Sequence
  Non-cyclic GFR-binding peptide
  MOD_RES (31)..(32): Xaa is C or S
EVVMDEYKFKVVKENEDLYLMSIPELETPVXXAKP

SEQ ID NO: 17666 - protein, 36 aa, Artificial Sequence
  Non-cyclic GFR-binding peptide
  MOD_RES (1)..(3): Xaa is C or S
  MOD_RES (15)..(16)..(17)..(18)..(19): Xaa is A or G
  MOD_RES (20)..(21)..(22)..(23): Xaa is A or G or absent
XGXGEVVMEEYKFKXXXXXXXXXLYLMSIPELETPV

SEQ ID NO: 17667 - protein, 32 aa, Artificial Sequence
  Non-cyclic GFR-binding peptide
  MOD_RES (1)..(32): Xaa is C or S
XSRVIMEYKFKVKPKRGVLYLISIPELAQPVX

SEQ ID NO: 17668 - protein, 39 aa, Artificial Sequence
  Non-cyclic GFR-binding peptide
  MOD_RES (2)..(37)..(38): Xaa is C or S
  MOD_RES (15)..(16)..(17)..(18)..(19): Xaa is A or G
  MOD_RES (20)..(21)..(22)..(23): Xaa is A or G or absent
GXEAVSMGEEYKFKXXXXXXXXXLYLVSIPELKTPVXXA

SEQ ID NO: 17669 - protein, 31 aa, Artificial Sequence
  Non-cyclic GFR-binding peptide
SRVVMNEYKFKIVNSSDDLYLVSIPELKTPA

SEQ ID NO: 17670 - protein, 37 aa, Artificial Sequence
  Non-cyclic GFR-binding peptide
  MOD_RES (1)..(33)..(34): Xaa is C or S
XSRVVMNEYQKYIVNSSDDIYLVSIPSLKTPAXXPKP

SEQ ID NO: 17671 - protein, 36 aa, Artificial Sequence
  Non-cyclic GFR-binding peptide
  MOD_RES (34)..(35): Xaa is C or S
  MOD_RES (12)..(13)..(14)..(15)..(16): Xaa is A or G
  MOD_RES (17)..(18)..(19)..(20): Xaa is A or G or absent
GEVVMEEYQKYXXXXXXXXXIYLMSIPSLETPVXXA

SEQ ID NO: 17672 - protein, 34 aa, Artificial Sequence
  Non-cyclic GFR-binding peptide
  MOD_RES (34)..(34): Xaa is C or S
  MOD_RES (12)..(13)..(14)..(15)..(16): Xaa is A or G
  MOD_RES (17)..(18)..(19)..(20): Xaa is A or G or absent
GEVVMDEYQKYXXXXXXXXXIYLMSIPSLETPVX

SEQ ID NO: 17673 - protein, 42 aa, Artificial Sequence
  Non-cyclic GFR-binding peptide
  MOD_RES (2)..(36)..(37): Xaa is C or S
  MOD_RES (14)..(15)..(16)..(17)..(18): Xaa is A or G
  MOD_RES (19)..(20)..(21)..(22): Xaa is A or G or absent
GXESVAMGEYQKYXXXXXXXXXIYLISIPSLKTPVXXAKSAK

SEQ ID NO: 17674 - protein, 38 aa, Artificial Sequence
  Non-cyclic GFR-binding peptide
  MOD_RES (2)..(34)..(35): Xaa is C or S
GXAKVVMNEYQKYIVNNSSDIYLVSIPSLKTPAXXAKP

SEQ ID NO: 17675 - protein, 40 aa, Artificial Sequence
  Non-cyclic GFR-binding peptide
  MOD_RES (2)..(34)..(35): Xaa is C or S
GXESVAMGYHYKLYTVVGKDKYLISIPSLKTPVXXAKSAK

SEQ ID NO: 17676 - protein, 39 aa, Artificial Sequence
  Non-cyclic GFR-binding peptide
  MOD_RES (1)..(35)..(36): Xaa is C or S
  MOD_RES (13)..(14)..(15)..(16)..(17): Xaa is A or G
  MOD_RES (18)..(19)..(20)..(21): Xaa is A or G or absent
XGEVVMDEYKFKXXXXXXXXXLYLMSIPELETPVXXAKP

SEQ ID NO: 17677 - protein, 33 aa, Artificial Sequence
  Non-cyclic GFR-binding peptide
  MOD_RES (12)..(13)..(14)..(15)..(16): Xaa is A or G
  MOD_RES (17)..(18)..(19)..(20): Xaa is A or G or absent
GEVVMEEYQKYXXXXXXXXXIYLMSIPSLETPV

SEQ ID NO: 17678 - protein, 37 aa, Artificial Sequence
  Non-cyclic GFR-binding peptide
  MOD_RES (2)..(34)..(35): Xaa is C or S
GXESVAMGYHYKLYTVVGKDKYLISIPSLKTPVXXAK

SEQ ID NO: 17679 - protein, 32 aa, Artificial Sequence
  Non-cyclic GFR-binding peptide
  MOD_RES (31)..(32): Xaa is C or S
EVVMDYHYKLVVNNAADKYLISIPSLRAPVXX

SEQ ID NO: 17680 - protein, 33 aa, Artificial Sequence
  Non-cyclic GFR-binding peptide
  MOD_RES (1)..(33): Xaa is C or S
XESVAMGEYQKYYTVVGKDIYLISIPSLKTPVX

SEQ ID NO: 17681 - protein, 42 aa, Artificial Sequence
  Non-cyclic GFR-binding peptide
  MOD_RES (1)..(3)..(36)..(37): Xaa is C or S
  MOD_RES (14)..(15)..(16)..(17)..(18): Xaa is A or G
  MOD_RES (19)..(20)..(21)..(22): Xaa is A or G or absent
XKXSKVVMEYQKYXXXXXXXXXIYLISIPSLDQPVXXPSASA

SEQ ID NO: 17682 - protein, 40 aa, Artificial Sequence
  Non-cyclic GFR-binding peptide
  MOD_RES (34)..(34): Xaa is C or S
  MOD_RES (12)..(13)..(14)..(15)..(16): Xaa is A or G
  MOD_RES (17)..(18)..(19)..(20): Xaa is A or G or absent
SRVVMNEYKFKXXXXXXXXXLYLVSIPELKTPAXTPKTVH

SEQ ID NO: 17683 - protein, 41 aa, Artificial Sequence
  Non-cyclic GFR-binding peptide
  MOD_RES (1)..(3)..(37)..(38): Xaa is C or S
  MOD_RES (15)..(16)..(17)..(18)..(19): Xaa is A or G
  MOD_RES (20)..(21)..(22)..(23): Xaa is A or G or absent
XGXGEVVMDEYKFKXXXXXXXXXLYLMSIPELETPVXXAKP

SEQ ID NO: 17684 - protein, 40 aa, Artificial Sequence
  Non-cyclic GFR-binding peptide
  MOD_RES (1)..(3)..(37)..(38): Xaa is C or S
  MOD_RES (15)..(16)..(17)..(18)..(19): Xaa is A or G
  MOD_RES (20)..(21)..(22)..(23): Xaa is A or G or absent
XGXESVAMGYHYKLXXXXXXXXXKYLISIPSLKTPVXXAK

SEQ ID NO: 17685 - protein, 32 aa, Artificial Sequence
  Non-cyclic GFR-binding peptide
  MOD_RES (11)..(12)..(13)..(14)..(15): Xaa is A or G
  MOD_RES (16)..(17)..(18)..(19): Xaa is A or G or absent
SKVIMEYKFKXXXXXXXXXLYLISIPELDQSV

SEQ ID NO: 17686 - protein, 38 aa, Artificial Sequence
  Non-cyclic GFR-binding peptide
  MOD_RES (1)..(3)..(34)..(35): Xaa is C or S
XKXSRVIMEYKFKVKPKRGVLYLISIPELAQPVXXPAA

SEQ ID NO: 17687 - protein, 37 aa, Artificial Sequence
  Non-cyclic GFR-binding peptide
  MOD_RES (31)..(32): Xaa is C or S
EVVMDYHYKLVVNNAADKYLISIPSLRAPVXXSAPAA

SEQ ID NO: 17688 - protein, 37 aa, Artificial Sequence
  Non-cyclic GFR-binding peptide
  MOD_RES (1)..(35)..(36): Xaa is C or S
  MOD_RES (13)..(14)..(15)..(16)..(17): Xaa is A or G
  MOD_RES (18)..(19)..(20)..(21): Xaa is A or G or absent
XAEVVMDYHYKLXXXXXXXXXKYLISIPSLRAPVXXS

SEQ ID NO: 17689 - protein, 38 aa, Artificial Sequence
  Non-cyclic GFR-binding peptide
  MOD_RES (1)..(3)..(36)..(37): Xaa is C or S
  MOD_RES (14)..(15)..(16)..(17)..(18): Xaa is A or G
  MOD_RES (19)..(20)..(21)..(22): Xaa is A or G or absent
XKXSKVIMEYQKYXXXXXXXXXIYLISIPSLDQSVXXP

SEQ ID NO: 17690 - protein, 39 aa, Artificial Sequence
  Non-cyclic GFR-binding peptide
  MOD_RES (2)..(35)..(36): Xaa is C or S
  MOD_RES (13)..(14)..(15)..(16)..(17): Xaa is A or G
  MOD_RES (18)..(19)..(20)..(21): Xaa is A or G or absent
KXSKVVMEYQKYXXXXXXXXXIYLISIPSLDQPVXXPSA

SEQ ID NO: 17691 - protein, 37 aa, Artificial Sequence
  Non-cyclic GFR-binding peptide
  MOD_RES (2)..(36)..(37): Xaa is C or S
  MOD_RES (14)..(15)..(16)..(17)..(18): Xaa is A or G
  MOD_RES (19)..(20)..(21)..(22): Xaa is A or G or absent
GXESVAMGRYKKLXXXXXXXXXFYLISIANLKTPVXX

SEQ ID NO: 17692 - protein, 39 aa, Artificial Sequence
  Non-cyclic GFR-binding peptide
  MOD_RES (2)..(34)..(35): Xaa is C or S
GXESVAMGEYQKYYTVVGKDIYLISIPSLKTPVXXAKSA

SEQ ID NO: 17693 - protein, 33 aa, Artificial Sequence
  Non-cyclic GFR-binding peptide
  MOD_RES (1)..(33): Xaa is C or S
XAKVVMNEYKFKIVNNSSDLYLVSIPELKTPAX

SEQ ID NO: 17694 - protein, 42 aa, Artificial Sequence
  Non-cyclic GFR-binding peptide
  MOD_RES (2)..(36)..(37): Xaa is C or S
  MOD_RES (14)..(15)..(16)..(17)..(18): Xaa is A or G
  MOD_RES (19)..(20)..(21)..(22): Xaa is A or G or absent
GXGEVVMEEYKFKXXXXXXXXXLYLMSIPELETPVXXAKPIS

SEQ ID NO: 17695 - protein, 40 aa, Artificial Sequence
  Non-cyclic GFR-binding peptide
  MOD_RES (1)..(34)..(35): Xaa is C or S
  MOD_RES (12)..(13)..(14)..(15)..(16): Xaa is A or G
  MOD_RES (17)..(18)..(19)..(20): Xaa is A or G or absent
XSRVIMEYKFKXXXXXXXXXLYLISIPELAQPVXXPAASA

SEQ ID NO: 17696 - protein, 36 aa, Artificial Sequence
  Non-cyclic GFR-binding peptide
  MOD_RES (33)..(34): Xaa is C or S
  MOD_RES (11)..(12)..(13)..(14)..(15): Xaa is A or G
  MOD_RES (16)..(17)..(18)..(19): Xaa is A or G or absent
SKVIMEYQKYXXXXXXXXXIYLISIPSLDQSVXXPS

SEQ ID NO: 17697 - protein, 35 aa, Artificial Sequence
  Non-cyclic GFR-binding peptide
  MOD_RES (31)..(32): Xaa is C or S
SVAMGRYKKLYTVVGKDFYLISIANLKTPVXXAKS

SEQ ID NO: 17698 - protein, 43 aa, Artificial Sequence
  Non-cyclic GFR-binding peptide
  MOD_RES (2)..(4)..(38)..(39): Xaa is C or S
  MOD_RES (16)..(17)..(18)..(19)..(20): Xaa is A or G
  MOD_RES (21)..(22)..(23)..(24): Xaa is A or G or absent
HXGXSRVVMNEYKFKXXXXXXXXXLYLVSIPELKTPAXXPKPV

SEQ ID NO: 17699 - protein, 34 aa, Artificial Sequence
  Non-cyclic GFR-binding peptide
  MOD_RES (1)..(1): Xaa is C or S
  MOD_RES (13)..(14)..(15)..(16)..(17): Xaa is A or G
  MOD_RES (18)..(19)..(20)..(21): Xaa is A or G or absent
XARVVMNEYQKYXXXXXXXXXIYLVSIPSLQTPA

SEQ ID NO: 17700 - protein, 34 aa, Artificial Sequence
  Non-cyclic GFR-binding peptide
  MOD_RES (1)..(1): Xaa is C or S
  MOD_RES (13)..(14)..(15)..(16)..(17): Xaa is A or G
  MOD_RES (18)..(19)..(20)..(21): Xaa is A or G or absent
XSRVVMNEYKFKXXXXXXXXXLYLVSIPELKTPA

SEQ ID NO: 17701 - protein, 39 aa, Artificial Sequence
  Non-cyclic GFR-binding peptide
  MOD_RES (2)..(4)..(36)..(37): Xaa is C or S
HXGXAKVVMNEYKFKIVNNSSDLYLVSIPELKTPAXXAK

SEQ ID NO: 17702 - protein, 33 aa, Artificial Sequence
  Non-cyclic GFR-binding peptide
  MOD_RES (2)..(2): Xaa is C or S
GXESVAMGRYKKLYTVVGKDFYLISIANLKTPV

SEQ ID NO: 17703 - protein, 39 aa, Artificial Sequence
  Non-cyclic GFR-binding peptide
  MOD_RES (1)..(3)..(35): Xaa is C or S
XGXSRVVMNEYQKYIVNSSDDIYLVSIPSLKTPAXTPKT

SEQ ID NO: 17704 - protein, 40 aa, Artificial Sequence
  Non-cyclic GFR-binding peptide
  MOD_RES (1)..(3)..(37)..(38): Xaa is C or S
  MOD_RES (15)..(16)..(17)..(18)..(19): Xaa is A or G
  MOD_RES (20)..(21)..(22)..(23): Xaa is A or G or absent
XGXAKVVMNEYKFKXXXXXXXXXLYLVSIPELKTPAXXAK

SEQ ID NO: 17705 - protein, 37 aa, Artificial Sequence
  Non-cyclic GFR-binding peptide
  MOD_RES (2)..(4)..(36)..(37): Xaa is C or S
RXGXGEVVMEEYKFKVVKDYEDLYLMSIPELETPVXX

SEQ ID NO: 17706 - protein, 37 aa, Artificial Sequence
  Non-cyclic GFR-binding peptide
  MOD_RES (1)..(34)..(35): Xaa is C or S
  MOD_RES (12)..(13)..(14)..(15)..(16): Xaa is A or G
  MOD_RES (17)..(18)..(19)..(20): Xaa is A or G or absent
XSRVIMEYQKYXXXXXXXXXIYLISIPSLAQPVXXPA

SEQ ID NO: 17707 - protein, 44 aa, Artificial Sequence
  Non-cyclic GFR-binding peptide
  MOD_RES (2)..(4)..(38)..(39): Xaa is C or S
  MOD_RES (16)..(17)..(18)..(19)..(20): Xaa is A or G
  MOD_RES (21)..(22)..(23)..(24): Xaa is A or G or absent
HXGXARVVMNEYKFKXXXXXXXXXLYLVSIPELQTPAXXPKPVT

SEQ ID NO: 17708 - protein, 36 aa, Artificial Sequence
  Non-cyclic GFR-binding peptide
  MOD_RES (1)..(3)..(35)..(36): Xaa is C or S
XGXGEVVMEEYQKYVVKDYEDIYLMSIPSLETPVXX

SEQ ID NO: 17709 - protein, 36 aa, Artificial Sequence
  Non-cyclic GFR-binding peptide
  MOD_RES (1)..(3)..(36): Xaa is C or S
  MOD_RES (14)..(15)..(16)..(17)..(18): Xaa is A or G
  MOD_RES (19)..(20)..(21)..(22): Xaa is A or G or absent
XKXSRVIMEYQKYXXXXXXXXXIYLISIPSLAQPVX

SEQ ID NO: 17710 - protein, 34 aa, Artificial Sequence
  Non-cyclic GFR-binding peptide
  MOD_RES (2)..(33)..(34): Xaa is C or S
KXSRVIMEYKFKVKPKRGVLYLISIPELAQPVXX

SEQ ID NO: 17711 - protein, 35 aa, Artificial Sequence
  Non-cyclic GFR-binding peptide
  MOD_RES (1)..(3)..(35): Xaa is C or S
XGXSRVVMNEYQKYIVNSSDDIYLVSIPSLKTPAX

SEQ ID NO: 17712 - protein, 40 aa, Artificial Sequence
  Non-cyclic GFR-binding peptide
  MOD_RES (2)..(4)..(38)..(39): Xaa is C or S
  MOD_RES (16)..(17)..(18)..(19)..(20): Xaa is A or G
  MOD_RES (21)..(22)..(23)..(24): Xaa is A or G or absent
RXGXAEVVMDYHYKLXXXXXXXXXKYLISIPSLRAPVXXS

SEQ ID NO: 17713 - protein, 42 aa, Artificial Sequence
  Non-cyclic GFR-binding peptide
  MOD_RES (2)..(36)..(37): Xaa is C or S
  MOD_RES (14)..(15)..(16)..(17)..(18): Xaa is A or G
  MOD_RES (19)..(20)..(21)..(22): Xaa is A or G or absent
GXESVAMGRYKKLXXXXXXXXXFYLISIANLKTPVXXAKSAK

SEQ ID NO: 17714 - protein, 35 aa, Artificial Sequence
  Non-cyclic GFR-binding peptide
  MOD_RES (33)..(34): Xaa is C or S
  MOD_RES (11)..(12)..(13)..(14)..(15): Xaa is A or G
  MOD_RES (16)..(17)..(18)..(19): Xaa is A or G or absent
SVAMGYHYKLXXXXXXXXXKYLISIPSLKTPVXXA

SEQ ID NO: 17715 - protein, 37 aa, Artificial Sequence
  Non-cyclic GFR-binding peptide
  MOD_RES (2)..(4): Xaa is C or S
  MOD_RES (16)..(17)..(18)..(19)..(20): Xaa is A or G
  MOD_RES (21)..(22)..(23)..(24): Xaa is A or G or absent
RXGXESVAMGEYQKYXXXXXXXXXIYLISIPSLKTPV

SEQ ID NO: 17716 - protein, 35 aa, Artificial Sequence
  Non-cyclic GFR-binding peptide
  MOD_RES (34)..(35): Xaa is C or S
  MOD_RES (12)..(13)..(14)..(15)..(16): Xaa is A or G
  MOD_RES (17)..(18)..(19)..(20): Xaa is A or G or absent
GEVVMEEYKFKXXXXXXXXXLYLMSIPELETPVXX

SEQ ID NO: 17717 - protein, 35 aa, Artificial Sequence
  Non-cyclic GFR-binding peptide
  MOD_RES (2)..(4)..(35): Xaa is C or S
SXKXSKVVMEYKFKVKPTRGVLYLISIPELDQPVX

SEQ ID NO: 17718 - protein, 32 aa, Artificial Sequence
  Non-cyclic GFR-binding peptide
  MOD_RES (11)..(12)..(13)..(14)..(15): Xaa is A or G
  MOD_RES (16)..(17)..(18)..(19): Xaa is A or G or absent
EVVMDEYQKYXXXXXXXXXIYLMSIPSLETPV

SEQ ID NO: 17719 - protein, 40 aa, Artificial Sequence
  Non-cyclic GFR-binding peptide
  MOD_RES (2)..(35)..(36): Xaa is C or S
GXEAVSMGEEYKFKTPVGMDDLYLVSIPELKTPVXXAKGV

SEQ ID NO: 17720 - protein, 43 aa, Artificial Sequence
  Non-cyclic GFR-binding peptide
  MOD_RES (1)..(3)..(37)..(38): Xaa is C or S
  MOD_RES (15)..(16)..(17)..(18)..(19): Xaa is A or G
  MOD_RES (20)..(21)..(22)..(23): Xaa is A or G or absent
XGXESVAMGRYKKLXXXXXXXXXFYLISIANLKTPVXXAKSAK

SEQ ID NO: 17721 - protein, 37 aa, Artificial Sequence
  Non-cyclic GFR-binding peptide
  MOD_RES (2)..(33)..(34): Xaa is C or S
KXSKVIMEYQKYIKPTKGIIYLISIPSLDQSVXXPSA

SEQ ID NO: 17722 - protein, 33 aa, Artificial Sequence
  Non-cyclic GFR-binding peptide
  MOD_RES (33)..(33): Xaa is C or S
  MOD_RES (11)..(12)..(13)..(14)..(15): Xaa is A or G
  MOD_RES (16)..(17)..(18)..(19): Xaa is A or G or absent
EVVMDEYQKYXXXXXXXXXIYLMSIPSLETPVX

SEQ ID NO: 17723 - protein, 39 aa, Artificial Sequence
  Non-cyclic GFR-binding peptide
  MOD_RES (1)..(33)..(34): Xaa is C or S
XESVAMGEYQKYYTVVGKDIYLISIPSLKTPVXXAKSAK

SEQ ID NO: 17724 - protein, 41 aa, Artificial Sequence
  Non-cyclic GFR-binding peptide
  MOD_RES (1)..(3)..(37)..(38): Xaa is C or S
  MOD_RES (15)..(16)..(17)..(18)..(19): Xaa is A or G
  MOD_RES (20)..(21)..(22)..(23): Xaa is A or G or absent
XGXGEVVMEEYKFKXXXXXXXXXLYLMSIPELETPVXXAKP

SEQ ID NO: 17725 - protein, 33 aa, Artificial Sequence
  Non-cyclic GFR-binding peptide
  MOD_RES (31)..(31): Xaa is C or S
RVVMNEYQKYIVNSSDDIYLVSIPSLKTPAXTP

SEQ ID NO: 17726 - protein, 39 aa, Artificial Sequence
  Non-cyclic GFR-binding peptide
  MOD_RES (33)..(34): Xaa is C or S
  MOD_RES (11)..(12)..(13)..(14)..(15): Xaa is A or G
  MOD_RES (16)..(17)..(18)..(19): Xaa is A or G or absent
EVVMEEYKFKXXXXXXXXXLYLMSIPELETPVXXAKPIS

SEQ ID NO: 17727 - protein, 43 aa, Artificial Sequence
  Non-cyclic GFR-binding peptide
  MOD_RES (1)..(3)..(37)..(38): Xaa is C or S
  MOD_RES (15)..(16)..(17)..(18)..(19): Xaa is A or G
  MOD_RES (20)..(21)..(22)..(23): Xaa is A or G or absent
XGXGEVVMEEYQKYXXXXXXXXXIYLMSIPSLETPVXXAKPIS

SEQ ID NO: 17728 - protein, 39 aa, Artificial Sequence
  Non-cyclic GFR-binding peptide
  MOD_RES (2)..(34)..(35): Xaa is C or S
GXGEVVMEEYKFKVVKDYEDLYLMSIPELETPVXXAKPI

SEQ ID NO: 17729 - protein, 37 aa, Artificial Sequence
  Non-cyclic GFR-binding peptide
  MOD_RES (2)..(4)..(36): Xaa is C or S
HXGXSRVVMNEYKFKIVNSSDDLYLVSIPELKTPAXT

SEQ ID NO: 17730 - protein, 36 aa, Artificial Sequence
  Non-cyclic GFR-binding peptide
  MOD_RES (2)..(36): Xaa is C or S
  MOD_RES (14)..(15)..(16)..(17)..(18): Xaa is A or G
  MOD_RES (19)..(20)..(21)..(22): Xaa is A or G or absent
GXARVVMNEYKFKXXXXXXXXXLYLVSIPELQTPAX

SEQ ID NO: 17731 - protein, 39 aa, Artificial Sequence
  Non-cyclic GFR-binding peptide
  MOD_RES (2)..(4)..(36)..(37): Xaa is C or S
RXGXGEVVMDEYQKYVVKENEDIYLMSIPSLETPVXXAK

SEQ ID NO: 17732 - protein, 38 aa, Artificial Sequence
  Non-cyclic GFR-binding peptide
  MOD_RES (2)..(4)..(36)..(37): Xaa is C or S
HXGXAKVVMNEYQKYIVNNSSDIYLVSIPSLKTPAXXA

SEQ ID NO: 17733 - protein, 35 aa, Artificial Sequence
  Non-cyclic GFR-binding peptide
  MOD_RES (32)..(33): Xaa is C or S
ARVVMNEYKFKIVNSSDDLYLVSIPELQTPAXXPK

SEQ ID NO: 17734 - protein, 36 aa, Artificial Sequence
  Non-cyclic GFR-binding peptide
  MOD_RES (33)..(33): Xaa is C or S
  MOD_RES (11)..(12)..(13)..(14)..(15): Xaa is A or G
  MOD_RES (16)..(17)..(18)..(19): Xaa is A or G or absent
RVVMNEYQKYXXXXXXXXXIYLVSIPSLKTPAXTPK

SEQ ID NO: 17735 - protein, 33 aa, Artificial Sequence
  Non-cyclic GFR-binding peptide
  MOD_RES (1)..(1): Xaa is C or S
  MOD_RES (12)..(13)..(14)..(15)..(16): Xaa is A or G
  MOD_RES (17)..(18)..(19)..(20): Xaa is A or G or absent
XSKVIMEYQKYXXXXXXXXXIYLISIPSLDQSV

SEQ ID NO: 17736 - protein, 34 aa, Artificial Sequence
  Non-cyclic GFR-binding peptide
  MOD_RES (1)..(33)..(34): Xaa is C or S
XAKVVMNEYKFKIVNNSSDLYLVSIPELKTPAXX

SEQ ID NO: 17737 - protein, 36 aa, Artificial Sequence
  Non-cyclic GFR-binding peptide
  MOD_RES (1)..(35)..(36): Xaa is C or S
  MOD_RES (13)..(14)..(15)..(16)..(17): Xaa is A or G
  MOD_RES (18)..(19)..(20)..(21): Xaa is A or G or absent
XAEVVMDEYKFKXXXXXXXXXLYLISIPELRAPVXX

SEQ ID NO: 17738 - protein, 37 aa, Artificial Sequence
  Non-cyclic GFR-binding peptide
  MOD_RES (32)..(32): Xaa is C or S
SRVVMNEYKFKIVNSSDDLYLVSIPELKTPAXTPKTV

SEQ ID NO: 17739 - protein, 34 aa, Artificial Sequence
  Non-cyclic GFR-binding peptide
  MOD_RES (33)..(34): Xaa is C or S
  MOD_RES (11)..(12)..(13)..(14)..(15): Xaa is A or G
  MOD_RES (16)..(17)..(18)..(19): Xaa is A or G or absent
SVAMGRYKKLXXXXXXXXXFYLISIANLKTPVXX

SEQ ID NO: 17740 - protein, 34 aa, Artificial Sequence
  Non-cyclic GFR-binding peptide
  MOD_RES (1)..(1): Xaa is C or S
  MOD_RES (13)..(14)..(15)..(16)..(17): Xaa is A or G
  MOD_RES (18)..(19)..(20)..(21): Xaa is A or G or absent
XAKVVMNEYQKYXXXXXXXXXIYLVSIPSLKTPA

SEQ ID NO: 17741 - protein, 35 aa, Artificial Sequence
  Non-cyclic GFR-binding peptide
  MOD_RES (32)..(33): Xaa is C or S
AKVVMNEYKFKIVNNSSDLYLVSIPELKTPAXXAK

SEQ ID NO: 17742 - protein, 39 aa, Artificial Sequence
  Non-cyclic GFR-binding peptide
  MOD_RES (1)..(3)..(37)..(38): Xaa is C or S
  MOD_RES (15)..(16)..(17)..(18)..(19): Xaa is A or G
  MOD_RES (20)..(21)..(22)..(23): Xaa is A or G or absent
XGXAEVVMDEYKFKXXXXXXXXXLYLISIPELRAPVXXS

SEQ ID NO: 17743 - protein, 40 aa, Artificial Sequence
  Non-cyclic GFR-binding peptide
  MOD_RES (2)..(36)..(37): Xaa is C or S
  MOD_RES (14)..(15)..(16)..(17)..(18): Xaa is A or G
  MOD_RES (19)..(20)..(21)..(22): Xaa is A or G or absent
GXGEVVMDEYKFKXXXXXXXXXLYLMSIPELETPVXXAKP

SEQ ID NO: 17744 - protein, 36 aa, Artificial Sequence
  Non-cyclic GFR-binding peptide
  MOD_RES (31)..(32): Xaa is C or S
EVVMEEYKFKVVKDYEDLYLMSIPELETPVXXAKPI

SEQ ID NO: 17745 - protein, 36 aa, Artificial Sequence
  Non-cyclic GFR-binding peptide
  MOD_RES (1)..(3): Xaa is C or S
  MOD_RES (15)..(16)..(17)..(18)..(19): Xaa is A or G
  MOD_RES (20)..(21)..(22)..(23): Xaa is A or G or absent
XGXGEVVMEEYQKYXXXXXXXXXIYLMSIPSLETPV

SEQ ID NO: 17746 - protein, 38 aa, Artificial Sequence
  Non-cyclic GFR-binding peptide
  MOD_RES (1)..(33)..(34): Xaa is C or S
XESVAMGRYKKLYTVVGKDFYLISIANLKTPVXXAKSA

SEQ ID NO: 17747 - protein, 37 aa, Artificial Sequence
  Non-cyclic GFR-binding peptide
  MOD_RES (1)..(33)..(34): Xaa is C or S
XGEVVMEEYQKYVVKDYEDIYLMSIPSLETPVXXAKP

SEQ ID NO: 17748 - protein, 34 aa, Artificial Sequence
  Non-cyclic GFR-binding peptide
  MOD_RES (1)..(3): Xaa is C or S
XGXESVAMGRYKKLYTVVGKDFYLISIANLKTPV

SEQ ID NO: 17749 - protein, 41 aa, Artificial Sequence
  Non-cyclic GFR-binding peptide
  MOD_RES (1)..(3)..(37)..(38): Xaa is C or S
  MOD_RES (15)..(16)..(17)..(18)..(19): Xaa is A or G
  MOD_RES (20)..(21)..(22)..(23): Xaa is A or G or absent
XGXGEVVMEEYQKYXXXXXXXXXIYLMSIPSLETPVXXAKP

SEQ ID NO: 17750 - protein, 35 aa, Artificial Sequence
  Non-cyclic GFR-binding peptide
  MOD_RES (1)..(32)..(33): Xaa is C or S
XSRVIMEYQKYVKPKRGVIYLISIPSLAQPVXXPA

SEQ ID NO: 17751 - protein, 44 aa, Artificial Sequence
  Non-cyclic GFR-binding peptide
  MOD_RES (2)..(4)..(39)..(40): Xaa is C or S
  MOD_RES (17)..(18)..(19)..(20)..(21): Xaa is A or G
  MOD_RES (22)..(23)..(24)..(25): Xaa is A or G or absent
RXGXEAVSMGEEYQKYXXXXXXXXXIYLVSIPSLKTPVXXAKGV

SEQ ID NO: 17752 - protein, 34 aa, Artificial Sequence
  Non-cyclic GFR-binding peptide
  MOD_RES (2)..(34): Xaa is C or S
GXSRVVMNEYKFKIVNSSDDLYLVSIPELKTPAX

SEQ ID NO: 17753 - protein, 34 aa, Artificial Sequence
  Non-cyclic GFR-binding peptide
  MOD_RES (1)..(32)..(33): Xaa is C or S
XSKVVMEYKFKVKPTRGVLYLISIPELDQPVXXP

SEQ ID NO: 17754 - protein, 38 aa, Artificial Sequence
  Non-cyclic GFR-binding peptide
  MOD_RES (2)..(4)..(37)..(38): Xaa is C or S
  MOD_RES (15)..(16)..(17)..(18)..(19): Xaa is A or G
  MOD_RES (20)..(21)..(22)..(23): Xaa is A or G or absent
SXKXSKVVMEYKFKXXXXXXXXXLYLISIPELDQPVXX

SEQ ID NO: 17755 - protein, 37 aa, Artificial Sequence
  Non-cyclic GFR-binding peptide
  MOD_RES (34)..(34): Xaa is C or S
  MOD_RES (12)..(13)..(14)..(15)..(16): Xaa is A or G
  MOD_RES (17)..(18)..(19)..(20): Xaa is A or G or absent
SRVVMNEYKFKXXXXXXXXXLYLVSIPELKTPAXTPK

SEQ ID NO: 17756 - protein, 42 aa, Artificial Sequence
  Non-cyclic GFR-binding peptide
  MOD_RES (2)..(4)..(38)..(39): Xaa is C or S
  MOD_RES (16)..(17)..(18)..(19)..(20): Xaa is A or G
  MOD_RES (21)..(22)..(23)..(24): Xaa is A or G or absent
RXGXGEVVMDEYQKYXXXXXXXXXIYLMSIPSLETPVXXAKP

SEQ ID NO: 17757 - protein, 36 aa, Artificial Sequence
  Non-cyclic GFR-binding peptide
  MOD_RES (1)..(33)..(34): Xaa is C or S
XESVAMGRYKKLYTVVGKDFYLISIANLKTPVXXAK

SEQ ID NO: 17758 - protein, 38 aa, Artificial Sequence
  Non-cyclic GFR-binding peptide
  MOD_RES (35)..(36): Xaa is C or S
  MOD_RES (13)..(14)..(15)..(16)..(17): Xaa is A or G
  MOD_RES (18)..(19)..(20)..(21): Xaa is A or G or absent
EAVSMGEEYKFKXXXXXXXXXLYLVSIPELKTPVXXAK

SEQ ID NO: 17759 - protein, 38 aa, Artificial Sequence
  Non-cyclic GFR-binding peptide
  MOD_RES (1)..(35): Xaa is C or S
  MOD_RES (13)..(14)..(15)..(16)..(17): Xaa is A or G
  MOD_RES (18)..(19)..(20)..(21): Xaa is A or G or absent
XSRVVMNEYKFKXXXXXXXXXLYLVSIPELKTPAXTPK

SEQ ID NO: 17760 - protein, 33 aa, Artificial Sequence
  Non-cyclic GFR-binding peptide
  MOD_RES (31)..(32): Xaa is C or S
SVAMGYHYKLYTVVGKDKYLISIPSLKTPVXXA

SEQ ID NO: 17761 - protein, 36 aa, Artificial Sequence
  Non-cyclic GFR-binding peptide
  MOD_RES (1)..(3)..(35)..(36): Xaa is C or S
XGXGEVVMDEYQKYVVKENEDIYLMSIPSLETPVXX

SEQ ID NO: 17762 - protein, 33 aa, Artificial Sequence
  Non-cyclic GFR-binding peptide
  MOD_RES (1)..(33): Xaa is C or S
XAEVVMDEYKFKVVNNAADLYLISIPELRAPVX

SEQ ID NO: 17763 - protein, 33 aa, Artificial Sequence
  Non-cyclic GFR-binding peptide
  MOD_RES (1)..(1): Xaa is C or S
  MOD_RES (12)..(13)..(14)..(15)..(16): Xaa is A or G
  MOD_RES (17)..(18)..(19)..(20): Xaa is A or G or absent
XSKVVMEYQKYXXXXXXXXXIYLISIPSLDQPV

SEQ ID NO: 17764 - protein, 43 aa, Artificial Sequence
  Non-cyclic GFR-binding peptide
  MOD_RES (2)..(4)..(38)..(39): Xaa is C or S
  MOD_RES (16)..(17)..(18)..(19)..(20): Xaa is A or G
  MOD_RES (21)..(22)..(23)..(24): Xaa is A or G or absent
RXGXGEVVMEEYKFKXXXXXXXXXLYLMSIPELETPVXXAKPI

SEQ ID NO: 17765 - protein, 38 aa, Artificial Sequence
  Non-cyclic GFR-binding peptide
  MOD_RES (1)..(33)..(34): Xaa is C or S
XARVVMNEYQKYIVNSSDDIYLVSIPSLQTPAXXPKPV

SEQ ID NO: 17766 - protein, 32 aa, Artificial Sequence
  Non-cyclic GFR-binding peptide
  MOD_RES (11)..(12)..(13)..(14)..(15): Xaa is A or G
  MOD_RES (16)..(17)..(18)..(19): Xaa is A or G or absent
RVVMNEYKFKXXXXXXXXXLYLVSIPELKTPA

SEQ ID NO: 17767 - protein, 38 aa, Artificial Sequence
  Non-cyclic GFR-binding peptide
  MOD_RES (2)..(35)..(36): Xaa is C or S
GXEAVSMGEEYKFKTPVGMDDLYLVSIPELKTPVXXAK

SEQ ID NO: 17768 - protein, 32 aa, Artificial Sequence
  Non-cyclic GFR-binding peptide
  MOD_RES (11)..(12)..(13)..(14)..(15): Xaa is A or G
  MOD_RES (16)..(17)..(18)..(19): Xaa is A or G or absent
KVVMNEYKFKXXXXXXXXXLYLVSIPELKTPA

SEQ ID NO: 17769 - protein, 31 aa, Artificial Sequence
  Non-cyclic GFR-binding peptide
  MOD_RES (31)..(31): Xaa is C or S
SRVIMEYKFKVKPKRGVLYLISIPELAQPVX

SEQ ID NO: 17770 - protein, 36 aa, Artificial Sequence
  Non-cyclic GFR-binding peptide
  MOD_RES (1)..(3)..(34)..(35): Xaa is C or S
XKXSRVIMEYKFKVKPKRGVLYLISIPELAQPVXXP

SEQ ID NO: 17771 - protein, 38 aa, Artificial Sequence
  Non-cyclic GFR-binding peptide
  MOD_RES (2)..(36)..(37): Xaa is C or S
  MOD_RES (14)..(15)..(16)..(17)..(18): Xaa is A or G
  MOD_RES (19)..(20)..(21)..(22): Xaa is A or G or absent
GXARVVMNEYQKYXXXXXXXXXIYLVSIPSLQTPAXXP

SEQ ID NO: 17772 - protein, 42 aa, Artificial Sequence
  Non-cyclic GFR-binding peptide
  MOD_RES (2)..(36): Xaa is C or S
  MOD_RES (14)..(15)..(16)..(17)..(18): Xaa is A or G
  MOD_RES (19)..(20)..(21)..(22): Xaa is A or G or absent
GXSRVVMNEYKFKXXXXXXXXXLYLVSIPELKTPAXTPKTVH

SEQ ID NO: 17773 - protein, 31 aa, Artificial Sequence
  Non-cyclic GFR-binding peptide
  MOD_RES (1)..(1): Xaa is C or S
XSRVIMEYKFKVKPKRGVLYLISIPELAQPV

SEQ ID NO: 17774 - protein, 33 aa, Artificial Sequence
  Non-cyclic GFR-binding peptide
  MOD_RES (1)..(32)..(33): Xaa is C or S
XSRVIMEYKFKVKPKRGVLYLISIPELAQPVXX

SEQ ID NO: 17775 - protein, 37 aa, Artificial Sequence
  Non-cyclic GFR-binding peptide
  MOD_RES (33)..(34): Xaa is C or S
  MOD_RES (11)..(12)..(13)..(14)..(15): Xaa is A or G
  MOD_RES (16)..(17)..(18)..(19): Xaa is A or G or absent
SVAMGEYQKYXXXXXXXXXIYLISIPSLKTPVXXAKS

SEQ ID NO: 17776 - protein, 39 aa, Artificial Sequence
  Non-cyclic GFR-binding peptide
  MOD_RES (33)..(34): Xaa is C or S
  MOD_RES (11)..(12)..(13)..(14)..(15): Xaa is A or G
  MOD_RES (16)..(17)..(18)..(19): Xaa is A or G or absent
SVAMGRYKKLXXXXXXXXXFYLISIANLKTPVXXAKSAK

SEQ ID NO: 17777 - protein, 38 aa, Artificial Sequence
  Non-cyclic GFR-binding peptide
  MOD_RES (33)..(34): Xaa is C or S
  MOD_RES (11)..(12)..(13)..(14)..(15): Xaa is A or G
  MOD_RES (16)..(17)..(18)..(19): Xaa is A or G or absent
RVVMNEYKFKXXXXXXXXXLYLVSIPELKTPAXXPKPV

SEQ ID NO: 17778 - protein, 41 aa, Artificial Sequence
  Non-cyclic GFR-binding peptide
  MOD_RES (2)..(37)..(38): Xaa is C or S
  MOD_RES (15)..(16)..(17)..(18)..(19): Xaa is A or G
  MOD_RES (20)..(21)..(22)..(23): Xaa is A or G or absent
GXEAVSMGEEYQKYXXXXXXXXXIYLVSIPSLKTPVXXAKG

SEQ ID NO: 17779 - protein, 43 aa, Artificial Sequence
  Non-cyclic GFR-binding peptide
  MOD_RES (2)..(4)..(37)..(38): Xaa is C or S
  MOD_RES (15)..(16)..(17)..(18)..(19): Xaa is A or G
  MOD_RES (20)..(21)..(22)..(23): Xaa is A or G or absent
SXKXSKVIMEYKFKXXXXXXXXXLYLISIPELDQSVXXPSASA

SEQ ID NO: 17780 - protein, 41 aa, Artificial Sequence
  Non-cyclic GFR-binding peptide
  MOD_RES (2)..(4)..(37)..(38): Xaa is C or S
  MOD_RES (15)..(16)..(17)..(18)..(19): Xaa is A or G
  MOD_RES (20)..(21)..(22)..(23): Xaa is A or G or absent
SXKXSKVVMEYKFKXXXXXXXXXLYLISIPELDQPVXXPSA

SEQ ID NO: 17781 - protein, 38 aa, Artificial Sequence
  Non-cyclic GFR-binding peptide
  MOD_RES (34)..(35): Xaa is C or S
  MOD_RES (12)..(13)..(14)..(15)..(16): Xaa is A or G
  MOD_RES (17)..(18)..(19)..(20): Xaa is A or G or absent
SRVVMNEYKFKXXXXXXXXXLYLVSIPELKTPAXXPKP

SEQ ID NO: 17782 - protein, 35 aa, Artificial Sequence
  Non-cyclic GFR-binding peptide
  MOD_RES (33)..(34): Xaa is C or S
  MOD_RES (11)..(12)..(13)..(14)..(15): Xaa is A or G
  MOD_RES (16)..(17)..(18)..(19): Xaa is A or G or absent
SKVIMEYKFKXXXXXXXXXLYLISIPELDQSVXXP

SEQ ID NO: 17783 - protein, 41 aa, Artificial Sequence
  Non-cyclic GFR-binding peptide
  MOD_RES (2)..(4)..(35)..(36): Xaa is C or S
SXKXSRVIMEYQKYVKPKRGVIYLISIPSLAQPVXXPAASA

SEQ ID NO: 17784 - protein, 39 aa, Artificial Sequence
  Non-cyclic GFR-binding peptide
  MOD_RES (2)..(4)..(36)..(37): Xaa is C or S
RXGXGEVVMDEYKFKVVKENEDLYLMSIPELETPVXXAK

SEQ ID NO: 17785 - protein, 43 aa, Artificial Sequence
  Non-cyclic GFR-binding peptide
  MOD_RES (2)..(4)..(38)..(39): Xaa is C or S
  MOD_RES (16)..(17)..(18)..(19)..(20): Xaa is A or G
  MOD_RES (21)..(22)..(23)..(24): Xaa is A or G or absent
HXGXARVVMNEYQKYXXXXXXXXXIYLVSIPSLQTPAXXPKPV

SEQ ID NO: 17786 - protein, 34 aa, Artificial Sequence
  Non-cyclic GFR-binding peptide
  MOD_RES (1)..(3)..(34): Xaa is C or S
XKXSKVIMEYQKYIKPTKGIIYLISIPSLDQSVX

SEQ ID NO: 17787 - protein, 34 aa, Artificial Sequence
  Non-cyclic GFR-binding peptide
  MOD_RES (1)..(3): Xaa is C or S
XGXAKVVMNEYKFKIVNNSSDLYLVSIPELKTPA

SEQ ID NO: 17788 - protein, 38 aa, Artificial Sequence
  Non-cyclic GFR-binding peptide
  MOD_RES (33)..(34): Xaa is C or S
  MOD_RES (11)..(12)..(13)..(14)..(15): Xaa is A or G
  MOD_RES (16)..(17)..(18)..(19): Xaa is A or G or absent
EVVMDEYKFKXXXXXXXXXLYLMSIPELETPVXXAKPI

SEQ ID NO: 17789 - protein, 41 aa, Artificial Sequence
  Non-cyclic GFR-binding peptide
  MOD_RES (2)..(4)..(36)..(37): Xaa is C or S
RXGXGEVVMEEYQKYVVKDYEDIYLMSIPSLETPVXXAKPI

SEQ ID NO: 17790 - protein, 40 aa, Artificial Sequence
  Non-cyclic GFR-binding peptide
  MOD_RES (2)..(35)..(36): Xaa is C or S
  MOD_RES (13)..(14)..(15)..(16)..(17): Xaa is A or G
  MOD_RES (18)..(19)..(20)..(21): Xaa is A or G or absent
KXSKVVMEYKFKXXXXXXXXXLYLISIPELDQPVXXPSAS

SEQ ID NO: 17791 - protein, 36 aa, Artificial Sequence
  Non-cyclic GFR-binding peptide
  MOD_RES (32)..(33): Xaa is C or S
AEVVMDRYKKLVVNNAADFYLISIANLRAPVXXSAP

SEQ ID NO: 17792 - protein, 37 aa, Artificial Sequence
  Non-cyclic GFR-binding peptide
  MOD_RES (2)..(4): Xaa is C or S
  MOD_RES (16)..(17)..(18)..(19)..(20): Xaa is A or G
  MOD_RES (21)..(22)..(23)..(24): Xaa is A or G or absent
RXGXAEVVMDRYKKLXXXXXXXXXFYLISIANLRAPV

SEQ ID NO: 17793 - protein, 40 aa, Artificial Sequence
  Non-cyclic GFR-binding peptide
  MOD_RES (2)..(4)..(36)..(37): Xaa is C or S
RXGXGEVVMDEYQKYVVKENEDIYLMSIPSLETPVXXAKP

SEQ ID NO: 17794 - protein, 32 aa, Artificial Sequence
  Non-cyclic GFR-binding peptide
  MOD_RES (32)..(32): Xaa is C or S
AEVVMDRYKKLVVNNAADFYLISIANLRAPVX

SEQ ID NO: 17795 - protein, 33 aa, Artificial Sequence
  Non-cyclic GFR-binding peptide
  MOD_RES (12)..(13)..(14)..(15)..(16): Xaa is A or G
  MOD_RES (17)..(18)..(19)..(20): Xaa is A or G or absent
ARVVMNEYQKYXXXXXXXXXIYLVSIPSLQTPA

SEQ ID NO: 17796 - protein, 36 aa, Artificial Sequence
  Non-cyclic GFR-binding peptide
  MOD_RES (2)..(33)..(34): Xaa is C or S
KXSKVIMEYKFKIKPTKGILYLISIPELDQSVXXPS

SEQ ID NO: 17797 - protein, 37 aa, Artificial Sequence
  Non-cyclic GFR-binding peptide
  MOD_RES (1)..(33)..(34): Xaa is C or S
XAEVVMDEYKFKVVNNAADLYLISIPELRAPVXXSAP

SEQ ID NO: 17798 - protein, 38 aa, Artificial Sequence
  Non-cyclic GFR-binding peptide
  MOD_RES (1)..(33)..(34): Xaa is C or S
XESVAMGYHYKLYTVVGKDKYLISIPSLKTPVXXAKSA

SEQ ID NO: 17799 - protein, 33 aa, Artificial Sequence
  Non-cyclic GFR-binding peptide
  MOD_RES (1)..(1): Xaa is C or S
XEAVSMGEEYQKYTPVGMDDIYLVSIPSLKTPV

SEQ ID NO: 17800 - protein, 36 aa, Artificial Sequence
  Non-cyclic GFR-binding peptide
  MOD_RES (1)..(36): Xaa is C or S
  MOD_RES (14)..(15)..(16)..(17)..(18): Xaa is A or G
  MOD_RES (19)..(20)..(21)..(22): Xaa is A or G or absent
XEAVSMGEEYQKYXXXXXXXXXIYLVSIPSLKTPVX

SEQ ID NO: 17801 - protein, 33 aa, Artificial Sequence
  Non-cyclic GFR-binding peptide
  MOD_RES (12)..(13)..(14)..(15)..(16): Xaa is A or G
  MOD_RES (17)..(18)..(19)..(20): Xaa is A or G or absent
ARVVMNEYKFKXXXXXXXXXLYLVSIPELQTPA

SEQ ID NO: 17802 - protein, 35 aa, Artificial Sequence
  Non-cyclic GFR-binding peptide
  MOD_RES (32)..(33): Xaa is C or S
SRVVMNEYQKYIVNSSDDIYLVSIPSLKTPAXXPK

SEQ ID NO: 17803 - protein, 35 aa, Artificial Sequence
  Non-cyclic GFR-binding peptide
  MOD_RES (33)..(34): Xaa is C or S
EAVSMGEEYQKYTPVGMDDIYLVSIPSLKTPVXXA

SEQ ID NO: 17804 - protein, 37 aa, Artificial Sequence
  Non-cyclic GFR-binding peptide
  MOD_RES (1)..(3)..(35)..(36): Xaa is C or S
XGXGEVVMEEYKFKVVKDYEDLYLMSIPELETPVXXA

SEQ ID NO: 17805 - protein, 41 aa, Artificial Sequence
  Non-cyclic GFR-binding peptide
  MOD_RES (1)..(3)..(36)..(37): Xaa is C or S
XGXEAVSMGEEYKFKTPVGMDDLYLVSIPELKTPVXXAKGV

SEQ ID NO: 17806 - protein, 39 aa, Artificial Sequence
  Non-cyclic GFR-binding peptide
  MOD_RES (1)..(35)..(36): Xaa is C or S
  MOD_RES (13)..(14)..(15)..(16)..(17): Xaa is A or G
  MOD_RES (18)..(19)..(20)..(21): Xaa is A or G or absent
XSRVVMNEYQKYXXXXXXXXXIYLVSIPSLKTPAXXPKP

SEQ ID NO: 17807 - protein, 42 aa, Artificial Sequence
  Non-cyclic GFR-binding peptide
  MOD_RES (2)..(4)..(36): Xaa is C or S
HXGXSRVVMNEYKFKIVNSSDDLYLVSIPELKTPAXTPKTVH

SEQ ID NO: 17808 - protein, 42 aa, Artificial Sequence
  Non-cyclic GFR-binding peptide
  MOD_RES (2)..(4)..(36): Xaa is C or S
HXGXSRVVMNEYQKYIVNSSDDIYLVSIPSLKTPAXTPKTVH

SEQ ID NO: 17809 - protein, 40 aa, Artificial Sequence
  Non-cyclic GFR-binding peptide
  MOD_RES (1)..(3)..(37)..(38): Xaa is C or S
  MOD_RES (15)..(16)..(17)..(18)..(19): Xaa is A or G
  MOD_RES (20)..(21)..(22)..(23): Xaa is A or G or absent
XGXARVVMNEYQKYXXXXXXXXXIYLVSIPSLQTPAXXPK

SEQ ID NO: 17810 - protein, 40 aa, Artificial Sequence
  Non-cyclic GFR-binding peptide
  MOD_RES (2)..(4)..(35)..(36): Xaa is C or S
SXKXSKVIMEYQKYIKPTKGIIYLISIPSLDQSVXXPSAS

SEQ ID NO: 17811 - protein, 42 aa, Artificial Sequence
  Non-cyclic GFR-binding peptide
  MOD_RES (2)..(36)..(37): Xaa is C or S
  MOD_RES (14)..(15)..(16)..(17)..(18): Xaa is A or G
  MOD_RES (19)..(20)..(21)..(22): Xaa is A or G or absent
GXSRVVMNEYKFKXXXXXXXXXLYLVSIPELKTPAXXPKPVY

SEQ ID NO: 17812 - protein, 38 aa, Artificial Sequence
  Non-cyclic GFR-binding peptide
  MOD_RES (1)..(33): Xaa is C or S
XSRVVMNEYQKYIVNSSDDIYLVSIPSLKTPAXTPKTV

SEQ ID NO: 17813 - protein, 30 aa, Artificial Sequence
  Non-cyclic GFR-binding peptide
RVVMNEYQKYIVNSSDDIYLVSIPSLKTPA

SEQ ID NO: 17814 - protein, 39 aa, Artificial Sequence
  Non-cyclic GFR-binding peptide
  MOD_RES (2)..(4)..(35)..(36): Xaa is C or S
SXKXSKVVMEYKFKVKPTRGVLYLISIPELDQPVXXPSA

SEQ ID NO: 17815 - protein, 41 aa, Artificial Sequence
  Non-cyclic GFR-binding peptide
  MOD_RES (1)..(35)..(36): Xaa is C or S
  MOD_RES (13)..(14)..(15)..(16)..(17): Xaa is A or G
  MOD_RES (18)..(19)..(20)..(21): Xaa is A or G or absent
XAEVVMDRYKKLXXXXXXXXXFYLISIANLRAPVXXSAPAA

SEQ ID NO: 17816 - protein, 38 aa, Artificial Sequence
  Non-cyclic GFR-binding peptide
  MOD_RES (33)..(34): Xaa is C or S
EAVSMGEEYKFKTPVGMDDLYLVSIPELKTPVXXAKGV

SEQ ID NO: 17817 - protein, 40 aa, Artificial Sequence
  Non-cyclic GFR-binding peptide
  MOD_RES (2)..(34)..(35): Xaa is C or S
GXSRVVMNEYKFKIVNSSDDLYLVSIPELKTPAXXPKPVY

SEQ ID NO: 17818 - protein, 31 aa, Artificial Sequence
  Non-cyclic GFR-binding peptide
AEVVMDEYKFKVVNNAADLYLISIPELRAPV

SEQ ID NO: 17819 - protein, 34 aa, Artificial Sequence
  Non-cyclic GFR-binding peptide
  MOD_RES (1)..(3): Xaa is C or S
XGXAKVVMNEYQKYIVNNSSDIYLVSIPSLKTPA

SEQ ID NO: 17820 - protein, 35 aa, Artificial Sequence
  Non-cyclic GFR-binding peptide
  MOD_RES (1)..(35): Xaa is C or S
  MOD_RES (13)..(14)..(15)..(16)..(17): Xaa is A or G
  MOD_RES (18)..(19)..(20)..(21): Xaa is A or G or absent
XAKVVMNEYQKYXXXXXXXXXIYLVSIPSLKTPAX

SEQ ID NO: 17821 - protein, 44 aa, Artificial Sequence
  Non-cyclic GFR-binding peptide
  MOD_RES (2)..(4)..(38)..(39): Xaa is C or S
  MOD_RES (16)..(17)..(18)..(19)..(20): Xaa is A or G
  MOD_RES (21)..(22)..(23)..(24): Xaa is A or G or absent
HXGXSRVVMNEYKFKXXXXXXXXXLYLVSIPELKTPAXXPKPVY

SEQ ID NO: 17822 - protein, 36 aa, Artificial Sequence
  Non-cyclic GFR-binding peptide
  MOD_RES (2)..(4): Xaa is C or S
  MOD_RES (15)..(16)..(17)..(18)..(19): Xaa is A or G
  MOD_RES (20)..(21)..(22)..(23): Xaa is A or G or absent
SXKXSKVVMEYKFKXXXXXXXXXLYLISIPELDQPV

SEQ ID NO: 17823 - protein, 32 aa, Artificial Sequence
  Non-cyclic GFR-binding peptide
  MOD_RES (11)..(12)..(13)..(14)..(15): Xaa is A or G
  MOD_RES (16)..(17)..(18)..(19): Xaa is A or G or absent
SKVVMEYQKYXXXXXXXXXIYLISIPSLDQPV

SEQ ID NO: 17824 - protein, 33 aa, Artificial Sequence
  Non-cyclic GFR-binding peptide
  MOD_RES (2)..(2): Xaa is C or S
GXGEVVMDEYQKYVVKENEDIYLMSIPSLETPV

SEQ ID NO: 17825 - protein, 32 aa, Artificial Sequence
  Non-cyclic GFR-binding peptide
  MOD_RES (11)..(12)..(13)..(14)..(15): Xaa is A or G
  MOD_RES (16)..(17)..(18)..(19): Xaa is A or G or absent
SVAMGRYKKLXXXXXXXXXFYLISIANLKTPV

SEQ ID NO: 17826 - protein, 34 aa, Artificial Sequence
  Non-cyclic GFR-binding peptide
  MOD_RES (1)..(33)..(34): Xaa is C or S
XGEVVMDEYKFKVVKENEDLYLMSIPELETPVXX

SEQ ID NO: 17827 - protein, 36 aa, Artificial Sequence
  Non-cyclic GFR-binding peptide
  MOD_RES (1)..(32)..(33): Xaa is C or S
XSRVIMEYKFKVKPKRGVLYLISIPELAQPVXXPAA

SEQ ID NO: 17828 - protein, 34 aa, Artificial Sequence
  Non-cyclic GFR-binding peptide
  MOD_RES (31)..(32): Xaa is C or S
RVVMNEYQKYIVNSSDDIYLVSIPSLQTPAXXPK

SEQ ID NO: 17829 - protein, 34 aa, Artificial Sequence
  Non-cyclic GFR-binding peptide
  MOD_RES (33)..(34): Xaa is C or S
  MOD_RES (11)..(12)..(13)..(14)..(15): Xaa is A or G
  MOD_RES (16)..(17)..(18)..(19): Xaa is A or G or absent
EVVMDEYKFKXXXXXXXXXLYLISIPELRAPVXX

SEQ ID NO: 17830 - protein, 36 aa, Artificial Sequence
  Non-cyclic GFR-binding peptide
  MOD_RES (1)..(33)..(34): Xaa is C or S
XGEVVMEEYQKYVVKDYEDIYLMSIPSLETPVXXAK

SEQ ID NO: 17831 - protein, 39 aa, Artificial Sequence
  Non-cyclic GFR-binding peptide
  MOD_RES (1)..(3)..(37)..(38): Xaa is C or S
  MOD_RES (15)..(16)..(17)..(18)..(19): Xaa is A or G
  MOD_RES (20)..(21)..(22)..(23): Xaa is A or G or absent
XGXESVAMGYHYKLXXXXXXXXXKYLISIPSLKTPVXXA

SEQ ID NO: 17832 - protein, 33 aa, Artificial Sequence
  Non-cyclic GFR-binding peptide
  MOD_RES (33)..(33): Xaa is C or S
  MOD_RES (11)..(12)..(13)..(14)..(15): Xaa is A or G
  MOD_RES (16)..(17)..(18)..(19): Xaa is A or G or absent
SVAMGRYKKLXXXXXXXXXFYLISIANLKTPVX

SEQ ID NO: 17833 - protein, 34 aa, Artificial Sequence
  Non-cyclic GFR-binding peptide
  MOD_RES (33)..(34): Xaa is C or S
  MOD_RES (11)..(12)..(13)..(14)..(15): Xaa is A or G
  MOD_RES (16)..(17)..(18)..(19): Xaa is A or G or absent
KVVMNEYKFKXXXXXXXXXLYLVSIPELKTPAXX

SEQ ID NO: 17834 - protein, 38 aa, Artificial Sequence
  Non-cyclic GFR-binding peptide
  MOD_RES (1)..(32)..(33): Xaa is C or S
XSRVIMEYKFKVKPKRGVLYLISIPELAQPVXXPAASA

SEQ ID NO: 17835 - protein, 36 aa, Artificial Sequence
  Non-cyclic GFR-binding peptide
  MOD_RES (1)..(3): Xaa is C or S
  MOD_RES (15)..(16)..(17)..(18)..(19): Xaa is A or G
  MOD_RES (20)..(21)..(22)..(23): Xaa is A or G or absent
XGXSRVVMNEYQKYXXXXXXXXXIYLVSIPSLKTPA

SEQ ID NO: 17836 - protein, 36 aa, Artificial Sequence
  Non-cyclic GFR-binding peptide
  MOD_RES (2)..(4)..(36): Xaa is C or S
RXGXGEVVMDEYKFKVVKENEDLYLMSIPELETPVX

SEQ ID NO: 17837 - protein, 34 aa, Artificial Sequence
  Non-cyclic GFR-binding peptide
  MOD_RES (32)..(33): Xaa is C or S
AKVVMNEYKFKIVNNSSDLYLVSIPELKTPAXXA

SEQ ID NO: 17838 - protein, 40 aa, Artificial Sequence
  Non-cyclic GFR-binding peptide
  MOD_RES (2)..(4)..(38)..(39): Xaa is C or S
  MOD_RES (16)..(17)..(18)..(19)..(20): Xaa is A or G
  MOD_RES (21)..(22)..(23)..(24): Xaa is A or G or absent
RXGXGEVVMDEYQKYXXXXXXXXXIYLMSIPSLETPVXXA

SEQ ID NO: 17839 - protein, 40 aa, Artificial Sequence
  Non-cyclic GFR-binding peptide
  MOD_RES (1)..(3)..(34)..(35): Xaa is C or S
XKXSKVIMEYKFKIKPTKGILYLISIPELDQSVXXPSASA

SEQ ID NO: 17840 - protein, 42 aa, Artificial Sequence
  Non-cyclic GFR-binding peptide
  MOD_RES (2)..(4)..(38): Xaa is C or S
  MOD_RES (16)..(17)..(18)..(19)..(20): Xaa is A or G
  MOD_RES (21)..(22)..(23)..(24): Xaa is A or G or absent
HXGXSRVVMNEYKFKXXXXXXXXXLYLVSIPELKTPAXTPKT

SEQ ID NO: 17841 - protein, 41 aa, Artificial Sequence
  Non-cyclic GFR-binding peptide
  MOD_RES (1)..(3)..(38)..(39): Xaa is C or S
  MOD_RES (16)..(17)..(18)..(19)..(20): Xaa is A or G
  MOD_RES (21)..(22)..(23)..(24): Xaa is A or G or absent
XGXEAVSMGEEYKFKXXXXXXXXXLYLVSIPELKTPVXXAK

SEQ ID NO: 17842 - protein, 37 aa, Artificial Sequence
  Non-cyclic GFR-binding peptide
  MOD_RES (1)..(3)..(37): Xaa is C or S
  MOD_RES (15)..(16)..(17)..(18)..(19): Xaa is A or G
  MOD_RES (20)..(21)..(22)..(23): Xaa is A or G or absent
XGXAEVVMDYHYKLXXXXXXXXXKYLISIPSLRAPVX

SEQ ID NO: 17843 - protein, 41 aa, Artificial Sequence
  Non-cyclic GFR-binding peptide
  MOD_RES (1)..(3)..(35)..(36): Xaa is C or S
XGXAKVVMNEYQKYIVNNSSDIYLVSIPSLKTPAXXAKPVA

SEQ ID NO: 17844 - protein, 38 aa, Artificial Sequence
  Non-cyclic GFR-binding peptide
  MOD_RES (1)..(35)..(36): Xaa is C or S
  MOD_RES (13)..(14)..(15)..(16)..(17): Xaa is A or G
  MOD_RES (18)..(19)..(20)..(21): Xaa is A or G or absent
XSRVVMNEYKFKXXXXXXXXXLYLVSIPELKTPAXXPK

SEQ ID NO: 17845 - protein, 42 aa, Artificial Sequence
  Non-cyclic GFR-binding peptide
  MOD_RES (1)..(3)..(37)..(38): Xaa is C or S
  MOD_RES (15)..(16)..(17)..(18)..(19): Xaa is A or G
  MOD_RES (20)..(21)..(22)..(23): Xaa is A or G or absent
XGXESVAMGYHYKLXXXXXXXXXKYLISIPSLKTPVXXAKSA

SEQ ID NO: 17846 - protein, 35 aa, Artificial Sequence
  Non-cyclic GFR-binding peptide
  MOD_RES (2)..(34): Xaa is C or S
GXSRVVMNEYKFKIVNSSDDLYLVSIPELKTPAXT

SEQ ID NO: 17847 - protein, 40 aa, Artificial Sequence
  Non-cyclic GFR-binding peptide
  MOD_RES (2)..(36)..(37): Xaa is C or S
  MOD_RES (14)..(15)..(16)..(17)..(18): Xaa is A or G
  MOD_RES (19)..(20)..(21)..(22): Xaa is A or G or absent
GXAKVVMNEYKFKXXXXXXXXXLYLVSIPELKTPAXXAKP

SEQ ID NO: 17848 - protein, 36 aa, Artificial Sequence
  Non-cyclic GFR-binding peptide
  MOD_RES (1)..(32)..(33): Xaa is C or S
XSKVVMEYQKYVKPTRGVIYLISIPSLDQPVXXPSA

SEQ ID NO: 17849 - protein, 42 aa, Artificial Sequence
  Non-cyclic GFR-binding peptide
  MOD_RES (1)..(3)..(37)..(38): Xaa is C or S
  MOD_RES (15)..(16)..(17)..(18)..(19): Xaa is A or G
  MOD_RES (20)..(21)..(22)..(23): Xaa is A or G or absent
XGXGEVVMDEYKFKXXXXXXXXXLYLMSIPELETPVXXAKPI

SEQ ID NO: 17850 - protein, 35 aa, Artificial Sequence
  Non-cyclic GFR-binding peptide
  MOD_RES (1)..(32)..(33): Xaa is C or S
XSKVIMEYKFKIKPTKGILYLISIPELDQSVXXPS

SEQ ID NO: 17851 - protein, 31 aa, Artificial Sequence
  Non-cyclic GFR-binding peptide
  MOD_RES (31)..(31): Xaa is C or S
EVVMDRYKKLVVNNAADFYLISIANLRAPVX

SEQ ID NO: 17852 - protein, 40 aa, Artificial Sequence
  Non-cyclic GFR-binding peptide
  MOD_RES (1)..(35)..(36): Xaa is C or S
  MOD_RES (13)..(14)..(15)..(16)..(17): Xaa is A or G
  MOD_RES (18)..(19)..(20)..(21): Xaa is A or G or absent
XAEVVMDRYKKLXXXXXXXXXFYLISIANLRAPVXXSAPA

SEQ ID NO: 17853 - protein, 33 aa, Artificial Sequence
  Non-cyclic GFR-binding peptide
  MOD_RES (31)..(32): Xaa is C or S
SKVIMEYKFKIKPTKGILYLISIPELDQSVXXP

SEQ ID NO: 17854 - protein, 40 aa, Artificial Sequence
  Non-cyclic GFR-binding peptide
  MOD_RES (1)..(3)..(35)..(36): Xaa is C or S
XGXAEVVMDRYKKLVVNNAADFYLISIANLRAPVXXSAPA

SEQ ID NO: 17855 - protein, 42 aa, Artificial Sequence
  Non-cyclic GFR-binding peptide
  MOD_RES (2)..(37)..(38): Xaa is C or S
  MOD_RES (15)..(16)..(17)..(18)..(19): Xaa is A or G
  MOD_RES (20)..(21)..(22)..(23): Xaa is A or G or absent
GXEAVSMGEEYQKYXXXXXXXXXIYLVSIPSLKTPVXXAKGV

SEQ ID NO: 17856 - protein, 37 aa, Artificial Sequence
  Non-cyclic GFR-binding peptide
  MOD_RES (1)..(35)..(36): Xaa is C or S
  MOD_RES (13)..(14)..(15)..(16)..(17): Xaa is A or G
  MOD_RES (18)..(19)..(20)..(21): Xaa is A or G or absent
XARVVMNEYKFKXXXXXXXXXLYLVSIPELQTPAXXP

SEQ ID NO: 17857 - protein, 39 aa, Artificial Sequence
  Non-cyclic GFR-binding peptide
  MOD_RES (2)..(4)..(36)..(37): Xaa is C or S
RXGXESVAMGRYKKLYTVVGKDFYLISIANLKTPVXXAK

SEQ ID NO: 17858 - protein, 35 aa, Artificial Sequence
  Non-cyclic GFR-binding peptide
  MOD_RES (1)..(3)..(35): Xaa is C or S
XGXESVAMGYHYKLYTVVGKDKYLISIPSLKTPVX

SEQ ID NO: 17859 - protein, 30 aa, Artificial Sequence
  Non-cyclic GFR-binding peptide
EVVMDEYKFKVVKENEDLYLMSIPELETPV

SEQ ID NO: 17860 - protein, 36 aa, Artificial Sequence
  Non-cyclic GFR-binding peptide
  MOD_RES (1)..(33)..(34): Xaa is C or S
XAEVVMDEYKFKVVNNAADLYLISIPELRAPVXXSA

SEQ ID NO: 17861 - protein, 38 aa, Artificial Sequence
  Non-cyclic GFR-binding peptide
  MOD_RES (32)..(33): Xaa is C or S
GEVVMEEYQKYVVKDYEDIYLMSIPSLETPVXXAKPIS

SEQ ID NO: 17862 - protein, 38 aa, Artificial Sequence
  Non-cyclic GFR-binding peptide
  MOD_RES (1)..(3)..(35)..(36): Xaa is C or S
XGXAEVVMDRYKKLVVNNAADFYLISIANLRAPVXXSA

SEQ ID NO: 17863 - protein, 37 aa, Artificial Sequence
  Non-cyclic GFR-binding peptide
  MOD_RES (1)..(3)..(35)..(36): Xaa is C or S
XGXGEVVMDEYKFKVVKENEDLYLMSIPELETPVXXA

SEQ ID NO: 17864 - protein, 39 aa, Artificial Sequence
  Non-cyclic GFR-binding peptide
  MOD_RES (1)..(3)..(37)..(38): Xaa is C or S
  MOD_RES (15)..(16)..(17)..(18)..(19): Xaa is A or G
  MOD_RES (20)..(21)..(22)..(23): Xaa is A or G or absent
XGXSRVVMNEYQKYXXXXXXXXXIYLVSIPSLKTPAXXP

SEQ ID NO: 17865 - protein, 39 aa, Artificial Sequence
  Non-cyclic GFR-binding peptide
  MOD_RES (1)..(35)..(36): Xaa is C or S
  MOD_RES (13)..(14)..(15)..(16)..(17): Xaa is A or G
  MOD_RES (18)..(19)..(20)..(21): Xaa is A or G or absent
XAEVVMDEYKFKXXXXXXXXXLYLISIPELRAPVXXSAP

SEQ ID NO: 17866 - protein, 31 aa, Artificial Sequence
  Non-cyclic GFR-binding peptide
ARVVMNEYQKYIVNSSDDIYLVSIPSLQTPA

SEQ ID NO: 17867 - protein, 40 aa, Artificial Sequence
  Non-cyclic GFR-binding peptide
  MOD_RES (34)..(35): Xaa is C or S
  MOD_RES (12)..(13)..(14)..(15)..(16): Xaa is A or G
  MOD_RES (17)..(18)..(19)..(20): Xaa is A or G or absent
GEVVMDEYKFKXXXXXXXXXLYLMSIPELETPVXXAKPIK

SEQ ID NO: 17868 - protein, 37 aa, Artificial Sequence
  Non-cyclic GFR-binding peptide
  MOD_RES (32)..(33): Xaa is C or S
GEVVMDEYKFKVVKENEDLYLMSIPELETPVXXAKPI

SEQ ID NO: 17869 - protein, 41 aa, Artificial Sequence
  Non-cyclic GFR-binding peptide
  MOD_RES (1)..(3)..(37)..(38): Xaa is C or S
  MOD_RES (15)..(16)..(17)..(18)..(19): Xaa is A or G
  MOD_RES (20)..(21)..(22)..(23): Xaa is A or G or absent
XGXESVAMGEYQKYXXXXXXXXXIYLISIPSLKTPVXXAKS

SEQ ID NO: 17870 - protein, 34 aa, Artificial Sequence
  Non-cyclic GFR-binding peptide
  MOD_RES (1)..(33)..(34): Xaa is C or S
XARVVMNEYQKYIVNSSDDIYLVSIPSLQTPAXX

SEQ ID NO: 17871 - protein, 37 aa, Artificial Sequence
  Non-cyclic GFR-binding peptide
  MOD_RES (2)..(4): Xaa is C or S
  MOD_RES (16)..(17)..(18)..(19)..(20): Xaa is A or G
  MOD_RES (21)..(22)..(23)..(24): Xaa is A or G or absent
RXGXGEVVMEEYKFKXXXXXXXXXLYLMSIPELETPV

SEQ ID NO: 17872 - protein, 35 aa, Artificial Sequence
  Non-cyclic GFR-binding peptide
  MOD_RES (2)..(2): Xaa is C or S
  MOD_RES (14)..(15)..(16)..(17)..(18): Xaa is A or G
  MOD_RES (19)..(20)..(21)..(22): Xaa is A or G or absent
GXARVVMNEYQKYXXXXXXXXXIYLVSIPSLQTPA

SEQ ID NO: 17873 - protein, 31 aa, Artificial Sequence
  Non-cyclic GFR-binding peptide
AKVVMNEYKFKIVNNSSDLYLVSIPELKTPA

SEQ ID NO: 17874 - protein, 38 aa, Artificial Sequence
  Non-cyclic GFR-binding peptide
  MOD_RES (2)..(34)..(35): Xaa is C or S
GXGEVVMEEYKFKVVKDYEDLYLMSIPELETPVXXAKP

SEQ ID NO: 17875 - protein, 38 aa, Artificial Sequence
  Non-cyclic GFR-binding peptide
  MOD_RES (33)..(34): Xaa is C or S
  MOD_RES (11)..(12)..(13)..(14)..(15): Xaa is A or G
  MOD_RES (16)..(17)..(18)..(19): Xaa is A or G or absent
RVVMNEYQKYXXXXXXXXXIYLVSIPSLQTPAXXPKPV

SEQ ID NO: 17876 - protein, 41 aa, Artificial Sequence
  Non-cyclic GFR-binding peptide
  MOD_RES (1)..(35)..(36): Xaa is C or S
  MOD_RES (13)..(14)..(15)..(16)..(17): Xaa is A or G
  MOD_RES (18)..(19)..(20)..(21): Xaa is A or G or absent
XESVAMGRYKKLXXXXXXXXXFYLISIANLKTPVXXAKSAK

SEQ ID NO: 17877 - protein, 40 aa, Artificial Sequence
  Non-cyclic GFR-binding peptide
  MOD_RES (34)..(35): Xaa is C or S
  MOD_RES (12)..(13)..(14)..(15)..(16): Xaa is A or G
  MOD_RES (17)..(18)..(19)..(20): Xaa is A or G or absent
SRVVMNEYKFKXXXXXXXXXLYLVSIPELKTPAXXPKPVY

SEQ ID NO: 17878 - protein, 35 aa, Artificial Sequence
  Non-cyclic GFR-binding peptide
  MOD_RES (2)..(4): Xaa is C or S
RXGXAEVVMDRYKKLVVNNAADFYLISIANLRAPV

SEQ ID NO: 17879 - protein, 38 aa, Artificial Sequence
  Non-cyclic GFR-binding peptide
  MOD_RES (2)..(4)..(38): Xaa is C or S
  MOD_RES (16)..(17)..(18)..(19)..(20): Xaa is A or G
  MOD_RES (21)..(22)..(23)..(24): Xaa is A or G or absent
RXGXAEVVMDEYKFKXXXXXXXXXLYLISIPELRAPVX

SEQ ID NO: 17880 - protein, 34 aa, Artificial Sequence
  Non-cyclic GFR-binding peptide
  MOD_RES (2)..(34): Xaa is C or S
GXARVVMNEYKFKIVNSSDDLYLVSIPELQTPAX

SEQ ID NO: 17881 - protein, 37 aa, Artificial Sequence
  Non-cyclic GFR-binding peptide
  MOD_RES (1)..(3)..(36)..(37): Xaa is C or S
  MOD_RES (14)..(15)..(16)..(17)..(18): Xaa is A or G
  MOD_RES (19)..(20)..(21)..(22): Xaa is A or G or absent
XKXSKVVMEYQKYXXXXXXXXXIYLISIPSLDQPVXX

SEQ ID NO: 17882 - protein, 38 aa, Artificial Sequence
  Non-cyclic GFR-binding peptide
  MOD_RES (1)..(3)..(37)..(38): Xaa is C or S
  MOD_RES (15)..(16)..(17)..(18)..(19): Xaa is A or G
  MOD_RES (20)..(21)..(22)..(23): Xaa is A or G or absent
XGXGEVVMEEYKFKXXXXXXXXXLYLMSIPELETPVXX

SEQ ID NO: 17883 - protein, 37 aa, Artificial Sequence
  Non-cyclic GFR-binding peptide
  MOD_RES (31)..(32): Xaa is C or S
KVVMNEYKFKIVNNSSDLYLVSIPELKTPAXXAKPVA

SEQ ID NO: 17884 - protein, 37 aa, Artificial Sequence
  Non-cyclic GFR-binding peptide
  MOD_RES (2)..(4)..(37): Xaa is C or S
RXGXEAVSMGEEYKFKTPVGMDDLYLVSIPELKTPVX

SEQ ID NO: 17885 - protein, 38 aa, Artificial Sequence
  Non-cyclic GFR-binding peptide
  MOD_RES (1)..(32)..(33): Xaa is C or S
XSKVIMEYKFKIKPTKGILYLISIPELDQSVXXPSASA

SEQ ID NO: 17886 - protein, 31 aa, Artificial Sequence
  Non-cyclic GFR-binding peptide
  MOD_RES (31)..(31): Xaa is C or S
SKVVMEYQKYVKPTRGVIYLISIPSLDQPVX

SEQ ID NO: 17887 - protein, 36 aa, Artificial Sequence
  Non-cyclic GFR-binding peptide
  MOD_RES (2)..(4): Xaa is C or S
RXGXEAVSMGEEYQKYTPVGMDDIYLVSIPSLKTPV

SEQ ID NO: 17888 - protein, 44 aa, Artificial Sequence
  Non-cyclic GFR-binding peptide
  MOD_RES (2)..(4)..(38)..(39): Xaa is C or S
  MOD_RES (16)..(17)..(18)..(19)..(20): Xaa is A or G
  MOD_RES (21)..(22)..(23)..(24): Xaa is A or G or absent
RXGXAEVVMDEYKFKXXXXXXXXXLYLISIPELRAPVXXSAPAA

SEQ ID NO: 17889 - protein, 36 aa, Artificial Sequence
  Non-cyclic GFR-binding peptide
  MOD_RES (32)..(33): Xaa is C or S
ESVAMGYHYKLYTVVGKDKYLISIPSLKTPVXXAKS

SEQ ID NO: 17890 - protein, 37 aa, Artificial Sequence
  Non-cyclic GFR-binding peptide
  MOD_RES (1)..(35)..(36): Xaa is C or S
  MOD_RES (13)..(14)..(15)..(16)..(17): Xaa is A or G
  MOD_RES (18)..(19)..(20)..(21): Xaa is A or G or absent
XAEVVMDRYKKLXXXXXXXXXFYLISIANLRAPVXXS

SEQ ID NO: 17891 - protein, 32 aa, Artificial Sequence
  Non-cyclic GFR-binding peptide
  MOD_RES (31)..(31): Xaa is C or S
RVVMNEYKFKIVNSSDDLYLVSIPELKTPAXT

SEQ ID NO: 17892 - protein, 36 aa, Artificial Sequence
  Non-cyclic GFR-binding peptide
  MOD_RES (1)..(34)..(35): Xaa is C or S
  MOD_RES (12)..(13)..(14)..(15)..(16): Xaa is A or G
  MOD_RES (17)..(18)..(19)..(20): Xaa is A or G or absent
XSKVVMEYQKYXXXXXXXXXIYLISIPSLDQPVXXP

SEQ ID NO: 17893 - protein, 40 aa, Artificial Sequence
  Non-cyclic GFR-binding peptide
  MOD_RES (1)..(3)..(37)..(38): Xaa is C or S
  MOD_RES (15)..(16)..(17)..(18)..(19): Xaa is A or G
  MOD_RES (20)..(21)..(22)..(23): Xaa is A or G or absent
XGXESVAMGRYKKLXXXXXXXXXFYLISIANLKTPVXXAK

SEQ ID NO: 17894 - protein, 34 aa, Artificial Sequence
  Non-cyclic GFR-binding peptide
  MOD_RES (1)..(33): Xaa is C or S
XSRVVMNEYQKYIVNSSDDIYLVSIPSLKTPAXT

SEQ ID NO: 17895 - protein, 31 aa, Artificial Sequence
  Non-cyclic GFR-binding peptide
  MOD_RES (31)..(31): Xaa is C or S
EVVMDYHYKLVVNNAADKYLISIPSLRAPVX

SEQ ID NO: 17896 - protein, 36 aa, Artificial Sequence
  Non-cyclic GFR-binding peptide
  MOD_RES (2)..(35)..(36): Xaa is C or S
  MOD_RES (13)..(14)..(15)..(16)..(17): Xaa is A or G
  MOD_RES (18)..(19)..(20)..(21): Xaa is A or G or absent
KXSKVVMEYKFKXXXXXXXXXLYLISIPELDQPVXX

SEQ ID NO: 17897 - protein, 39 aa, Artificial Sequence
  Non-cyclic GFR-binding peptide
  MOD_RES (2)..(4)..(39): Xaa is C or S
  MOD_RES (17)..(18)..(19)..(20)..(21): Xaa is A or G
  MOD_RES (22)..(23)..(24)..(25): Xaa is A or G or absent
RXGXEAVSMGEEYKFKXXXXXXXXXLYLVSIPELKTPVX

SEQ ID NO: 17898 - protein, 37 aa, Artificial Sequence
  Non-cyclic GFR-binding peptide
  MOD_RES (32)..(33): Xaa is C or S
AKVVMNEYQKYIVNNSSDIYLVSIPSLKTPAXXAKPV

SEQ ID NO: 17899 - protein, 39 aa, Artificial Sequence
  Non-cyclic GFR-binding peptide
  MOD_RES (2)..(4)..(36)..(37): Xaa is C or S
RXGXGEVVMEEYKFKVVKDYEDLYLMSIPELETPVXXAK

SEQ ID NO: 17900 - protein, 36 aa, Artificial Sequence
  Non-cyclic GFR-binding peptide
  MOD_RES (33)..(34): Xaa is C or S
  MOD_RES (11)..(12)..(13)..(14)..(15): Xaa is A or G
  MOD_RES (16)..(17)..(18)..(19): Xaa is A or G or absent
EVVMEEYQKYXXXXXXXXXIYLMSIPSLETPVXXAK

SEQ ID NO: 17901 - protein, 35 aa, Artificial Sequence
  Non-cyclic GFR-binding peptide
  MOD_RES (1)..(3): Xaa is C or S
  MOD_RES (14)..(15)..(16)..(17)..(18): Xaa is A or G
  MOD_RES (19)..(20)..(21)..(22): Xaa is A or G or absent
XKXSRVIMEYKFKXXXXXXXXXLYLISIPELAQPV

SEQ ID NO: 17902 - protein, 40 aa, Artificial Sequence
  Non-cyclic GFR-binding peptide
  MOD_RES (34)..(35): Xaa is C or S
  MOD_RES (12)..(13)..(14)..(15)..(16): Xaa is A or G
  MOD_RES (17)..(18)..(19)..(20): Xaa is A or G or absent
ARVVMNEYQKYXXXXXXXXXIYLVSIPSLQTPAXXPKPVT

SEQ ID NO: 17903 - protein, 38 aa, Artificial Sequence
  Non-cyclic GFR-binding peptide
  MOD_RES (2)..(4)..(38): Xaa is C or S
  MOD_RES (16)..(17)..(18)..(19)..(20): Xaa is A or G
  MOD_RES (21)..(22)..(23)..(24): Xaa is A or G or absent
HXGXSRVVMNEYKFKXXXXXXXXXLYLVSIPELKTPAX

SEQ ID NO: 17904 - protein, 38 aa, Artificial Sequence
  Non-cyclic GFR-binding peptide
  MOD_RES (2)..(4)..(38): Xaa is C or S
  MOD_RES (16)..(17)..(18)..(19)..(20): Xaa is A or G
  MOD_RES (21)..(22)..(23)..(24): Xaa is A or G or absent
HXGXAKVVMNEYQKYXXXXXXXXXIYLVSIPSLKTPAX

SEQ ID NO: 17905 - protein, 36 aa, Artificial Sequence
  Non-cyclic GFR-binding peptide
  MOD_RES (1)..(34)..(35): Xaa is C or S
XEAVSMGEEYKFKTPVGMDDLYLVSIPELKTPVXXA

SEQ ID NO: 17906 - protein, 42 aa, Artificial Sequence
  Non-cyclic GFR-binding peptide
  MOD_RES (2)..(4)..(37)..(38): Xaa is C or S
  MOD_RES (15)..(16)..(17)..(18)..(19): Xaa is A or G
  MOD_RES (20)..(21)..(22)..(23): Xaa is A or G or absent
SXKXSRVIMEYKFKXXXXXXXXXLYLISIPELAQPVXXPAAS

SEQ ID NO: 17907 - protein, 37 aa, Artificial Sequence
  Non-cyclic GFR-binding peptide
  MOD_RES (32)..(33): Xaa is C or S
AEVVMDEYKFKVVNNAADLYLISIPELRAPVXXSAPA

SEQ ID NO: 17908 - protein, 33 aa, Artificial Sequence
  Non-cyclic GFR-binding peptide
  MOD_RES (12)..(13)..(14)..(15)..(16): Xaa is A or G
  MOD_RES (17)..(18)..(19)..(20): Xaa is A or G or absent
GEVVMDEYKFKXXXXXXXXXLYLMSIPELETPV

SEQ ID NO: 17909 - protein, 36 aa, Artificial Sequence
  Non-cyclic GFR-binding peptide
  MOD_RES (35)..(36): Xaa is C or S
  MOD_RES (13)..(14)..(15)..(16)..(17): Xaa is A or G
  MOD_RES (18)..(19)..(20)..(21): Xaa is A or G or absent
EAVSMGEEYKFKXXXXXXXXXLYLVSIPELKTPVXX

SEQ ID NO: 17910 - protein, 39 aa, Artificial Sequence
  Non-cyclic GFR-binding peptide
  MOD_RES (34)..(35): Xaa is C or S
  MOD_RES (12)..(13)..(14)..(15)..(16): Xaa is A or G
  MOD_RES (17)..(18)..(19)..(20): Xaa is A or G or absent
ARVVMNEYQKYXXXXXXXXXIYLVSIPSLQTPAXXPKPV

SEQ ID NO: 17911 - protein, 36 aa, Artificial Sequence
  Non-cyclic GFR-binding peptide
  MOD_RES (1)..(35)..(36): Xaa is C or S
  MOD_RES (13)..(14)..(15)..(16)..(17): Xaa is A or G
  MOD_RES (18)..(19)..(20)..(21): Xaa is A or G or absent
XGEVVMEEYKFKXXXXXXXXXLYLMSIPELETPVXX

SEQ ID NO: 17912 - protein, 35 aa, Artificial Sequence
  Non-cyclic GFR-binding peptide
  MOD_RES (33)..(34): Xaa is C or S
  MOD_RES (11)..(12)..(13)..(14)..(15): Xaa is A or G
  MOD_RES (16)..(17)..(18)..(19): Xaa is A or G or absent
EVVMEEYQKYXXXXXXXXXIYLMSIPSLETPVXXA

SEQ ID NO: 17913 - protein, 43 aa, Artificial Sequence
  Non-cyclic GFR-binding peptide
  MOD_RES (1)..(3)..(37)..(38): Xaa is C or S
  MOD_RES (15)..(16)..(17)..(18)..(19): Xaa is A or G
  MOD_RES (20)..(21)..(22)..(23): Xaa is A or G or absent
XGXARVVMNEYKFKXXXXXXXXXLYLVSIPELQTPAXXPKPVT

SEQ ID NO: 17914 - protein, 33 aa, Artificial Sequence
  Non-cyclic GFR-binding peptide
  MOD_RES (2)..(2): Xaa is C or S
GXARVVMNEYQKYIVNSSDDIYLVSIPSLQTPA

SEQ ID NO: 17915 - protein, 37 aa, Artificial Sequence
  Non-cyclic GFR-binding peptide
  MOD_RES (2)..(4)..(36)..(37): Xaa is C or S
RXGXGEVVMEEYQKYVVKDYEDIYLMSIPSLETPVXX

SEQ ID NO: 17916 - protein, 40 aa, Artificial Sequence
  Non-cyclic GFR-binding peptide
  MOD_RES (2)..(34)..(35): Xaa is C or S
GXAKVVMNEYQKYIVNNSSDIYLVSIPSLKTPAXXAKPVA

SEQ ID NO: 17917 - protein, 39 aa, Artificial Sequence
  Non-cyclic GFR-binding peptide
  MOD_RES (33)..(34): Xaa is C or S
  MOD_RES (11)..(12)..(13)..(14)..(15): Xaa is A or G
  MOD_RES (16)..(17)..(18)..(19): Xaa is A or G or absent
SRVIMEYKFKXXXXXXXXXLYLISIPELAQPVXXPAASA

SEQ ID NO: 17918 - protein, 34 aa, Artificial Sequence
  Non-cyclic GFR-binding peptide
  MOD_RES (1)..(33)..(34): Xaa is C or S
XARVVMNEYKFKIVNSSDDLYLVSIPELQTPAXX

SEQ ID NO: 17919 - protein, 39 aa, Artificial Sequence
  Non-cyclic GFR-binding peptide
  MOD_RES (2)..(34)..(35): Xaa is C or S
GXAEVVMDRYKKLVVNNAADFYLISIANLRAPVXXSAPA

SEQ ID NO: 17920 - protein, 35 aa, Artificial Sequence
  Non-cyclic GFR-binding peptide
  MOD_RES (1)..(33)..(34): Xaa is C or S
XAKVVMNEYKFKIVNNSSDLYLVSIPELKTPAXXA

SEQ ID NO: 17921 - protein, 37 aa, Artificial Sequence
  Non-cyclic GFR-binding peptide
  MOD_RES (2)..(36)..(37): Xaa is C or S
  MOD_RES (14)..(15)..(16)..(17)..(18): Xaa is A or G
  MOD_RES (19)..(20)..(21)..(22): Xaa is A or G or absent
GXESVAMGEYQKYXXXXXXXXXIYLISIPSLKTPVXX

SEQ ID NO: 17922 - protein, 42 aa, Artificial Sequence
  Non-cyclic GFR-binding peptide
  MOD_RES (2)..(4)..(36)..(37): Xaa is C or S
RXGXGEVVMDEYKFKVVKENEDLYLMSIPELETPVXXAKPIK

SEQ ID NO: 17923 - protein, 30 aa, Artificial Sequence
  Non-cyclic GFR-binding peptide
EVVMEEYKFKVVKDYEDLYLMSIPELETPV

SEQ ID NO: 17924 - protein, 36 aa, Artificial Sequence
  Non-cyclic GFR-binding peptide
  MOD_RES (2)..(33)..(34): Xaa is C or S
KXSKVVMEYKFKVKPTRGVLYLISIPELDQPVXXPS

SEQ ID NO: 17925 - protein, 39 aa, Artificial Sequence
  Non-cyclic GFR-binding peptide
  MOD_RES (1)..(3)..(36)..(37): Xaa is C or S
  MOD_RES (14)..(15)..(16)..(17)..(18): Xaa is A or G
  MOD_RES (19)..(20)..(21)..(22): Xaa is A or G or absent
XKXSKVIMEYQKYXXXXXXXXXIYLISIPSLDQSVXXPS

SEQ ID NO: 17926 - protein, 41 aa, Artificial Sequence
  Non-cyclic GFR-binding peptide
  MOD_RES (2)..(4)..(38)..(39): Xaa is C or S
  MOD_RES (16)..(17)..(18)..(19)..(20): Xaa is A or G
  MOD_RES (21)..(22)..(23)..(24): Xaa is A or G or absent
RXGXESVAMGEYQKYXXXXXXXXXIYLISIPSLKTPVXXAK

SEQ ID NO: 17927 - protein, 36 aa, Artificial Sequence
  Non-cyclic GFR-binding peptide
  MOD_RES (1)..(3): Xaa is C or S
  MOD_RES (15)..(16)..(17)..(18)..(19): Xaa is A or G
  MOD_RES (20)..(21)..(22)..(23): Xaa is A or G or absent
XGXESVAMGEYQKYXXXXXXXXXIYLISIPSLKTPV

SEQ ID NO: 17928 - protein, 35 aa, Artificial Sequence
  Non-cyclic GFR-binding peptide
  MOD_RES (2)..(2): Xaa is C or S
  MOD_RES (14)..(15)..(16)..(17)..(18): Xaa is A or G
  MOD_RES (19)..(20)..(21)..(22): Xaa is A or G or absent
GXGEVVMDEYQKYXXXXXXXXXIYLMSIPSLETPV

SEQ ID NO: 17929 - protein, 36 aa, Artificial Sequence
  Non-cyclic GFR-binding peptide
  MOD_RES (1)..(34)..(35): Xaa is C or S
  MOD_RES (12)..(13)..(14)..(15)..(16): Xaa is A or G
  MOD_RES (17)..(18)..(19)..(20): Xaa is A or G or absent
XSRVIMEYKFKXXXXXXXXXLYLISIPELAQPVXXP

SEQ ID NO: 17930 - protein, 37 aa, Artificial Sequence
  Non-cyclic GFR-binding peptide
  MOD_RES (1)..(3)..(36)..(37): Xaa is C or S
  MOD_RES (14)..(15)..(16)..(17)..(18): Xaa is A or G
  MOD_RES (19)..(20)..(21)..(22): Xaa is A or G or absent
XKXSKVIMEYQKYXXXXXXXXXIYLISIPSLDQSVXX

SEQ ID NO: 17931 - protein, 36 aa, Artificial Sequence
  Non-cyclic GFR-binding peptide
  MOD_RES (1)..(3)..(35)..(36): Xaa is C or S
XGXGEVVMEEYKFKVVKDYEDLYLMSIPELETPVXX

SEQ ID NO: 17932 - protein, 38 aa, Artificial Sequence
  Non-cyclic GFR-binding peptide
  MOD_RES (1)..(3)..(35)..(36): Xaa is C or S
XGXGEVVMEEYQKYVVKDYEDIYLMSIPSLETPVXXAK

SEQ ID NO: 17933 - protein, 37 aa, Artificial Sequence
  Non-cyclic GFR-binding peptide
  MOD_RES (31)..(31): Xaa is C or S
RVVMNEYQKYIVNSSDDIYLVSIPSLKTPAXTPKTVH

SEQ ID NO: 17934 - protein, 34 aa, Artificial Sequence
  Non-cyclic GFR-binding peptide
  MOD_RES (2)..(2): Xaa is C or S
GXEAVSMGEEYKFKTPVGMDDLYLVSIPELKTPV

SEQ ID NO: 17935 - protein, 35 aa, Artificial Sequence
  Non-cyclic GFR-binding peptide
  MOD_RES (1)..(33)..(34): Xaa is C or S
XAKVVMNEYQKYIVNNSSDIYLVSIPSLKTPAXXA

SEQ ID NO: 17936 - protein, 33 aa, Artificial Sequence
  Non-cyclic GFR-binding peptide
  MOD_RES (1)..(1): Xaa is C or S
  MOD_RES (12)..(13)..(14)..(15)..(16): Xaa is A or G
  MOD_RES (17)..(18)..(19)..(20): Xaa is A or G or absent
XSKVIMEYKFKXXXXXXXXXLYLISIPELDQSV

SEQ ID NO: 17937 - protein, 38 aa, Artificial Sequence
  Non-cyclic GFR-binding peptide
  MOD_RES (2)..(4)..(35)..(36): Xaa is C or S
SXKXSRVIMEYKFKVKPKRGVLYLISIPELAQPVXXPA

SEQ ID NO: 17938 - protein, 35 aa, Artificial Sequence
  Non-cyclic GFR-binding peptide
  MOD_RES (1)..(33)..(34): Xaa is C or S
XESVAMGEYQKYYTVVGKDIYLISIPSLKTPVXXA

SEQ ID NO: 17939 - protein, 35 aa, Artificial Sequence
  Non-cyclic GFR-binding peptide
  MOD_RES (31)..(32): Xaa is C or S
SKVVMEYKFKVKPTRGVLYLISIPELDQPVXXPSA

SEQ ID NO: 17940 - protein, 37 aa, Artificial Sequence
  Non-cyclic GFR-binding peptide
  MOD_RES (34)..(35): Xaa is C or S
  MOD_RES (12)..(13)..(14)..(15)..(16): Xaa is A or G
  MOD_RES (17)..(18)..(19)..(20): Xaa is A or G or absent
AKVVMNEYKFKXXXXXXXXXLYLVSIPELKTPAXXAK

SEQ ID NO: 17941 - protein, 42 aa, Artificial Sequence
  Non-cyclic GFR-binding peptide
  MOD_RES (2)..(4)..(38)..(39): Xaa is C or S
  MOD_RES (16)..(17)..(18)..(19)..(20): Xaa is A or G
  MOD_RES (21)..(22)..(23)..(24): Xaa is A or G or absent
RXGXAEVVMDYHYKLXXXXXXXXXKYLISIPSLRAPVXXSAP

SEQ ID NO: 17942 - protein, 41 aa, Artificial Sequence
  Non-cyclic GFR-binding peptide
  MOD_RES (1)..(3)..(37)..(38): Xaa is C or S
  MOD_RES (15)..(16)..(17)..(18)..(19): Xaa is A or G
  MOD_RES (20)..(21)..(22)..(23): Xaa is A or G or absent
XGXARVVMNEYQKYXXXXXXXXXIYLVSIPSLQTPAXXPKP

SEQ ID NO: 17943 - protein, 32 aa, Artificial Sequence
  Non-cyclic GFR-binding peptide
  MOD_RES (1)..(1): Xaa is C or S
XAKVVMNEYQKYIVNNSSDIYLVSIPSLKTPA

SEQ ID NO: 17944 - protein, 34 aa, Artificial Sequence
  Non-cyclic GFR-binding peptide
  MOD_RES (31)..(32): Xaa is C or S
EVVMDEYKFKVVKENEDLYLMSIPELETPVXXAK

SEQ ID NO: 17945 - protein, 32 aa, Artificial Sequence
  Non-cyclic GFR-binding peptide
  MOD_RES (32)..(32): Xaa is C or S
AKVVMNEYQKYIVNNSSDIYLVSIPSLKTPAX

SEQ ID NO: 17946 - protein, 43 aa, Artificial Sequence
  Non-cyclic GFR-binding peptide
  MOD_RES (1)..(3)..(37)..(38): Xaa is C or S
  MOD_RES (15)..(16)..(17)..(18)..(19): Xaa is A or G
  MOD_RES (20)..(21)..(22)..(23): Xaa is A or G or absent
XGXAEVVMDYHYKLXXXXXXXXXKYLISIPSLRAPVXXSAPAA

SEQ ID NO: 17947 - protein, 37 aa, Artificial Sequence
  Non-cyclic GFR-binding peptide
  MOD_RES (1)..(3)..(37): Xaa is C or S
  MOD_RES (15)..(16)..(17)..(18)..(19): Xaa is A or G
  MOD_RES (20)..(21)..(22)..(23): Xaa is A or G or absent
XGXGEVVMDEYQKYXXXXXXXXXIYLMSIPSLETPVX

SEQ ID NO: 17948 - protein, 40 aa, Artificial Sequence
  Non-cyclic GFR-binding peptide
  MOD_RES (1)..(3)..(37)..(38): Xaa is C or S
  MOD_RES (15)..(16)..(17)..(18)..(19): Xaa is A or G
  MOD_RES (20)..(21)..(22)..(23): Xaa is A or G or absent
XGXAEVVMDEYKFKXXXXXXXXXLYLISIPELRAPVXXSA

SEQ ID NO: 17949 - protein, 37 aa, Artificial Sequence
  Non-cyclic GFR-binding peptide
  MOD_RES (1)..(3)..(34)..(35): Xaa is C or S
XKXSKVVMEYQKYVKPTRGVIYLISIPSLDQPVXXPS

SEQ ID NO: 17950 - protein, 38 aa, Artificial Sequence
  Non-cyclic GFR-binding peptide
  MOD_RES (33)..(34): Xaa is C or S
  MOD_RES (11)..(12)..(13)..(14)..(15): Xaa is A or G
  MOD_RES (16)..(17)..(18)..(19): Xaa is A or G or absent
KVVMNEYQKYXXXXXXXXXIYLVSIPSLKTPAXXAKPV

SEQ ID NO: 17951 - protein, 34 aa, Artificial Sequence
  Non-cyclic GFR-binding peptide
  MOD_RES (1)..(1): Xaa is C or S
  MOD_RES (13)..(14)..(15)..(16)..(17): Xaa is A or G
  MOD_RES (18)..(19)..(20)..(21): Xaa is A or G or absent
XGEVVMEEYQKYXXXXXXXXXIYLMSIPSLETPV

SEQ ID NO: 17952 - protein, 36 aa, Artificial Sequence
  Non-cyclic GFR-binding peptide
  MOD_RES (32)..(33): Xaa is C or S
GEVVMDEYQKYVVKENEDIYLMSIPSLETPVXXAKP

SEQ ID NO: 17953 - protein, 35 aa, Artificial Sequence
  Non-cyclic GFR-binding peptide
  MOD_RES (1)..(35): Xaa is C or S
  MOD_RES (13)..(14)..(15)..(16)..(17): Xaa is A or G
  MOD_RES (18)..(19)..(20)..(21): Xaa is A or G or absent
XSRVVMNEYKFKXXXXXXXXXLYLVSIPELKTPAX

SEQ ID NO: 17954 - protein, 38 aa, Artificial Sequence
  Non-cyclic GFR-binding peptide
  MOD_RES (2)..(36)..(37): Xaa is C or S
  MOD_RES (14)..(15)..(16)..(17)..(18): Xaa is A or G
  MOD_RES (19)..(20)..(21)..(22): Xaa is A or G or absent
GXESVAMGEYQKYXXXXXXXXXIYLISIPSLKTPVXXA

SEQ ID NO: 17955 - protein, 35 aa, Artificial Sequence
  Non-cyclic GFR-binding peptide
  MOD_RES (32)..(33): Xaa is C or S
AEVVMDYHYKLVVNNAADKYLISIPSLRAPVXXSA

SEQ ID NO: 17956 - protein, 39 aa, Artificial Sequence
  Non-cyclic GFR-binding peptide
  MOD_RES (1)..(3)..(35)..(36): Xaa is C or S
XGXGEVVMEEYQKYVVKDYEDIYLMSIPSLETPVXXAKP

SEQ ID NO: 17957 - protein, 41 aa, Artificial Sequence
  Non-cyclic GFR-binding peptide
  MOD_RES (1)..(3)..(35)..(36): Xaa is C or S
XGXAEVVMDRYKKLVVNNAADFYLISIANLRAPVXXSAPAA

SEQ ID NO: 17958 - protein, 43 aa, Artificial Sequence
  Non-cyclic GFR-binding peptide
  MOD_RES (1)..(3)..(37): Xaa is C or S
  MOD_RES (15)..(16)..(17)..(18)..(19): Xaa is A or G
  MOD_RES (20)..(21)..(22)..(23): Xaa is A or G or absent
XGXSRVVMNEYKFKXXXXXXXXXLYLVSIPELKTPAXTPKTVH

SEQ ID NO: 17959 - protein, 38 aa, Artificial Sequence
  Non-cyclic GFR-binding peptide
  MOD_RES (1)..(3)..(37)..(38): Xaa is C or S
  MOD_RES (15)..(16)..(17)..(18)..(19): Xaa is A or G
  MOD_RES (20)..(21)..(22)..(23): Xaa is A or G or absent
XGXSRVVMNEYKFKXXXXXXXXXLYLVSIPELKTPAXX

SEQ ID NO: 17960 - protein, 37 aa, Artificial Sequence
  Non-cyclic GFR-binding peptide
  MOD_RES (34)..(34): Xaa is C or S
  MOD_RES (12)..(13)..(14)..(15)..(16): Xaa is A or G
  MOD_RES (17)..(18)..(19)..(20): Xaa is A or G or absent
SRVVMNEYQKYXXXXXXXXXIYLVSIPSLKTPAXTPK

SEQ ID NO: 17961 - protein, 36 aa, Artificial Sequence
  Non-cyclic GFR-binding peptide
  MOD_RES (1)..(3)..(35)..(36): Xaa is C or S
XGXARVVMNEYKFKIVNSSDDLYLVSIPELQTPAXX

SEQ ID NO: 17962 - protein, 40 aa, Artificial Sequence
  Non-cyclic GFR-binding peptide
  MOD_RES (34)..(35): Xaa is C or S
  MOD_RES (12)..(13)..(14)..(15)..(16): Xaa is A or G
  MOD_RES (17)..(18)..(19)..(20): Xaa is A or G or absent
GEVVMEEYKFKXXXXXXXXXLYLMSIPELETPVXXAKPIS

SEQ ID NO: 17963 - protein, 42 aa, Artificial Sequence
  Non-cyclic GFR-binding peptide
  MOD_RES (2)..(4)..(38)..(39): Xaa is C or S
  MOD_RES (16)..(17)..(18)..(19)..(20): Xaa is A or G
  MOD_RES (21)..(22)..(23)..(24): Xaa is A or G or absent
RXGXESVAMGYHYKLXXXXXXXXXKYLISIPSLKTPVXXAKS

SEQ ID NO: 17964 - protein, 42 aa, Artificial Sequence
  Non-cyclic GFR-binding peptide
  MOD_RES (1)..(3)..(37)..(38): Xaa is C or S
  MOD_RES (15)..(16)..(17)..(18)..(19): Xaa is A or G
  MOD_RES (20)..(21)..(22)..(23): Xaa is A or G or absent
XGXAKVVMNEYKFKXXXXXXXXXLYLVSIPELKTPAXXAKPV

SEQ ID NO: 17965 - protein, 35 aa, Artificial Sequence
  Non-cyclic GFR-binding peptide
  MOD_RES (1)..(35): Xaa is C or S
  MOD_RES (13)..(14)..(15)..(16)..(17): Xaa is A or G
  MOD_RES (18)..(19)..(20)..(21): Xaa is A or G or absent
XARVVMNEYQKYXXXXXXXXXIYLVSIPSLQTPAX

SEQ ID NO: 17966 - protein, 39 aa, Artificial Sequence
  Non-cyclic GFR-binding peptide
  MOD_RES (1)..(3)..(36)..(37): Xaa is C or S
  MOD_RES (14)..(15)..(16)..(17)..(18): Xaa is A or G
  MOD_RES (19)..(20)..(21)..(22): Xaa is A or G or absent
XKXSRVIMEYQKYXXXXXXXXXIYLISIPSLAQPVXXPA

SEQ ID NO: 17967 - protein, 37 aa, Artificial Sequence
  Non-cyclic GFR-binding peptide
  MOD_RES (32)..(33): Xaa is C or S
ESVAMGRYKKLYTVVGKDFYLISIANLKTPVXXAKSA

SEQ ID NO: 17968 - protein, 35 aa, Artificial Sequence
  Non-cyclic GFR-binding peptide
  MOD_RES (1)..(3)..(34)..(35): Xaa is C or S
XKXSKVVMEYKFKVKPTRGVLYLISIPELDQPVXX

SEQ ID NO: 17969 - protein, 37 aa, Artificial Sequence
  Non-cyclic GFR-binding peptide
  MOD_RES (33)..(34): Xaa is C or S
  MOD_RES (11)..(12)..(13)..(14)..(15): Xaa is A or G
  MOD_RES (16)..(17)..(18)..(19): Xaa is A or G or absent
EVVMDRYKKLXXXXXXXXXFYLISIANLRAPVXXSAP

SEQ ID NO: 17970 - protein, 40 aa, Artificial Sequence
  Non-cyclic GFR-binding peptide
  MOD_RES (1)..(35)..(36): Xaa is C or S
  MOD_RES (13)..(14)..(15)..(16)..(17): Xaa is A or G
  MOD_RES (18)..(19)..(20)..(21): Xaa is A or G or absent
XSRVVMNEYKFKXXXXXXXXXLYLVSIPELKTPAXXPKPV

SEQ ID NO: 17971 - protein, 37 aa, Artificial Sequence
  Non-cyclic GFR-binding peptide
  MOD_RES (2)..(37): Xaa is C or S
  MOD_RES (15)..(16)..(17)..(18)..(19): Xaa is A or G
  MOD_RES (20)..(21)..(22)..(23): Xaa is A or G or absent
GXEAVSMGEEYKFKXXXXXXXXXLYLVSIPELKTPVX

SEQ ID NO: 17972 - protein, 33 aa, Artificial Sequence
  Non-cyclic GFR-binding peptide
  MOD_RES (31)..(32): Xaa is C or S
EVVMDYHYKLVVNNAADKYLISIPSLRAPVXXS

SEQ ID NO: 17973 - protein, 30 aa, Artificial Sequence
  Non-cyclic GFR-binding peptide
KVVMNEYQKYIVNNSSDIYLVSIPSLKTPA

SEQ ID NO: 17974 - protein, 35 aa, Artificial Sequence
  Non-cyclic GFR-binding peptide
  MOD_RES (33)..(34): Xaa is C or S
  MOD_RES (11)..(12)..(13)..(14)..(15): Xaa is A or G
  MOD_RES (16)..(17)..(18)..(19): Xaa is A or G or absent
SVAMGEYQKYXXXXXXXXXIYLISIPSLKTPVXXA

SEQ ID NO: 17975 - protein, 32 aa, Artificial Sequence
  Non-cyclic GFR-binding peptide
  MOD_RES (32)..(32): Xaa is C or S
ESVAMGYHYKLYTVVGKDKYLISIPSLKTPVX

SEQ ID NO: 17976 - protein, 37 aa, Artificial Sequence
  Non-cyclic GFR-binding peptide
  MOD_RES (31)..(32): Xaa is C or S
RVVMNEYQKYIVNSSDDIYLVSIPSLQTPAXXPKPVT

SEQ ID NO: 17977 - protein, 41 aa, Artificial Sequence
  Non-cyclic GFR-binding peptide
  MOD_RES (2)..(35)..(36): Xaa is C or S
  MOD_RES (13)..(14)..(15)..(16)..(17): Xaa is A or G
  MOD_RES (18)..(19)..(20)..(21): Xaa is A or G or absent
KXSKVVMEYKFKXXXXXXXXXLYLISIPELDQPVXXPSASA

SEQ ID NO: 17978 - protein, 39 aa, Artificial Sequence
  Non-cyclic GFR-binding peptide
  MOD_RES (33)..(34): Xaa is C or S
  MOD_RES (11)..(12)..(13)..(14)..(15): Xaa is A or G
  MOD_RES (16)..(17)..(18)..(19): Xaa is A or G or absent
RVVMNEYQKYXXXXXXXXXIYLVSIPSLQTPAXXPKPVT

SEQ ID NO: 17979 - protein, 36 aa, Artificial Sequence
  Non-cyclic GFR-binding peptide
  MOD_RES (1)..(35)..(36): Xaa is C or S
  MOD_RES (13)..(14)..(15)..(16)..(17): Xaa is A or G
  MOD_RES (18)..(19)..(20)..(21): Xaa is A or G or absent
XAKVVMNEYKFKXXXXXXXXXLYLVSIPELKTPAXX

SEQ ID NO: 17980 - protein, 38 aa, Artificial Sequence
  Non-cyclic GFR-binding peptide
  MOD_RES (1)..(33): Xaa is C or S
XSRVVMNEYKFKIVNSSDDLYLVSIPELKTPAXTPKTV

SEQ ID NO: 17981 - protein, 32 aa, Artificial Sequence
  Non-cyclic GFR-binding peptide
  MOD_RES (31)..(32): Xaa is C or S
EVVMDEYKFKVVKENEDLYLMSIPELETPVXX

SEQ ID NO: 17982 - protein, 41 aa, Artificial Sequence
  Non-cyclic GFR-binding peptide
  MOD_RES (2)..(4)..(35)..(36): Xaa is C or S
SXKXSKVIMEYQKYIKPTKGIIYLISIPSLDQSVXXPSASA

SEQ ID NO: 17983 - protein, 34 aa, Artificial Sequence
  Non-cyclic GFR-binding peptide
  MOD_RES (1)..(33)..(34): Xaa is C or S
XAEVVMDEYKFKVVNNAADLYLISIPELRAPVXX

SEQ ID NO: 17984 - protein, 37 aa, Artificial Sequence
  Non-cyclic GFR-binding peptide
  MOD_RES (2)..(4)..(36)..(37): Xaa is C or S
RXGXESVAMGRYKKLYTVVGKDFYLISIANLKTPVXX

SEQ ID NO: 17985 - protein, 36 aa, Artificial Sequence
  Non-cyclic GFR-binding peptide
  MOD_RES (31)..(31): Xaa is C or S
RVVMNEYKFKIVNSSDDLYLVSIPELKTPAXTPKTV

SEQ ID NO: 17986 - protein, 33 aa, Artificial Sequence
  Non-cyclic GFR-binding peptide
  MOD_RES (1)..(33): Xaa is C or S
XGEVVMDEYQKYVVKENEDIYLMSIPSLETPVX

SEQ ID NO: 17987 - protein, 33 aa, Artificial Sequence
  Non-cyclic GFR-binding peptide
  MOD_RES (31)..(32): Xaa is C or S
SRVIMEYQKYVKPKRGVIYLISIPSLAQPVXXP

SEQ ID NO: 17988 - protein, 39 aa, Artificial Sequence
  Non-cyclic GFR-binding peptide
  MOD_RES (2)..(34)..(35): Xaa is C or S
GXGEVVMDEYKFKVVKENEDLYLMSIPELETPVXXAKPI

SEQ ID NO: 17989 - protein, 38 aa, Artificial Sequence
  Non-cyclic GFR-binding peptide
  MOD_RES (1)..(34)..(35): Xaa is C or S
XEAVSMGEEYQKYTPVGMDDIYLVSIPSLKTPVXXAKG

SEQ ID NO: 17990 - protein, 42 aa, Artificial Sequence
  Non-cyclic GFR-binding peptide
  MOD_RES (2)..(36)..(37): Xaa is C or S
  MOD_RES (14)..(15)..(16)..(17)..(18): Xaa is A or G
  MOD_RES (19)..(20)..(21)..(22): Xaa is A or G or absent
GXGEVVMDEYQKYXXXXXXXXXIYLMSIPSLETPVXXAKPIK

SEQ ID NO: 17991 - protein, 38 aa, Artificial Sequence
  Non-cyclic GFR-binding peptide
  MOD_RES (1)..(3)..(38): Xaa is C or S
  MOD_RES (16)..(17)..(18)..(19)..(20): Xaa is A or G
  MOD_RES (21)..(22)..(23)..(24): Xaa is A or G or absent
XGXEAVSMGEEYKFKXXXXXXXXXLYLVSIPELKTPVX

SEQ ID NO: 17992 - protein, 41 aa, Artificial Sequence
  Non-cyclic GFR-binding peptide
  MOD_RES (1)..(3)..(35)..(36): Xaa is C or S
XGXGEVVMDEYKFKVVKENEDLYLMSIPELETPVXXAKPIK

SEQ ID NO: 17993 - protein, 35 aa, Artificial Sequence
  Non-cyclic GFR-binding peptide
  MOD_RES (2)..(34)..(35): Xaa is C or S
GXESVAMGRYKKLYTVVGKDFYLISIANLKTPVXX

SEQ ID NO: 17994 - protein, 37 aa, Artificial Sequence
  Non-cyclic GFR-binding peptide
  MOD_RES (1)..(3)..(37): Xaa is C or S
  MOD_RES (15)..(16)..(17)..(18)..(19): Xaa is A or G
  MOD_RES (20)..(21)..(22)..(23): Xaa is A or G or absent
XGXAKVVMNEYKFKXXXXXXXXXLYLVSIPELKTPAX

SEQ ID NO: 17995 - protein, 37 aa, Artificial Sequence
  Non-cyclic GFR-binding peptide
  MOD_RES (2)..(4)..(36)..(37): Xaa is C or S
HXGXAKVVMNEYKFKIVNNSSDLYLVSIPELKTPAXX

SEQ ID NO: 17996 - protein, 36 aa, Artificial Sequence
  Non-cyclic GFR-binding peptide
  MOD_RES (34)..(35): Xaa is C or S
  MOD_RES (12)..(13)..(14)..(15)..(16): Xaa is A or G
  MOD_RES (17)..(18)..(19)..(20): Xaa is A or G or absent
GEVVMDEYQKYXXXXXXXXXIYLMSIPSLETPVXXA

SEQ ID NO: 17997 - protein, 33 aa, Artificial Sequence
  Non-cyclic GFR-binding peptide
  MOD_RES (2)..(2): Xaa is C or S
GXSRVVMNEYQKYIVNSSDDIYLVSIPSLKTPA

SEQ ID NO: 17998 - protein, 32 aa, Artificial Sequence
  Non-cyclic GFR-binding peptide
  MOD_RES (1)..(32): Xaa is C or S
XSKVIMEYQKYIKPTKGIIYLISIPSLDQSVX

SEQ ID NO: 17999 - protein, 43 aa, Artificial Sequence
  Non-cyclic GFR-binding peptide
  MOD_RES (1)..(3)..(37)..(38): Xaa is C or S
  MOD_RES (15)..(16)..(17)..(18)..(19): Xaa is A or G
  MOD_RES (20)..(21)..(22)..(23): Xaa is A or G or absent
XGXGEVVMDEYQKYXXXXXXXXXIYLMSIPSLETPVXXAKPIK

SEQ ID NO: 18000 - protein, 34 aa, Artificial Sequence
  Non-cyclic GFR-binding peptide
  MOD_RES (2)..(2): Xaa is C or S
  MOD_RES (13)..(14)..(15)..(16)..(17): Xaa is A or G
  MOD_RES (18)..(19)..(20)..(21): Xaa is A or G or absent
KXSKVIMEYKFKXXXXXXXXXLYLISIPELDQSV

SEQ ID NO: 18001 - protein, 34 aa, Artificial Sequence
  Non-cyclic GFR-binding peptide
  MOD_RES (2)..(34): Xaa is C or S
GXGEVVMDEYQKYVVKENEDIYLMSIPSLETPVX

SEQ ID NO: 18002 - protein, 36 aa, Artificial Sequence
  Non-cyclic GFR-binding peptide
  MOD_RES (32)..(33): Xaa is C or S
ARVVMNEYKFKIVNSSDDLYLVSIPELQTPAXXPKP

SEQ ID NO: 18003 - protein, 36 aa, Artificial Sequence
  Non-cyclic GFR-binding peptide
  MOD_RES (34)..(35): Xaa is C or S
  MOD_RES (12)..(13)..(14)..(15)..(16): Xaa is A or G
  MOD_RES (17)..(18)..(19)..(20): Xaa is A or G or absent
ARVVMNEYQKYXXXXXXXXXIYLVSIPSLQTPAXXP

SEQ ID NO: 18004 - protein, 39 aa, Artificial Sequence
  Non-cyclic GFR-binding peptide
  MOD_RES (2)..(4)..(35)..(36): Xaa is C or S
SXKXSKVIMEYQKYIKPTKGIIYLISIPSLDQSVXXPSA

SEQ ID NO: 18005 - protein, 37 aa, Artificial Sequence
  Non-cyclic GFR-binding peptide
  MOD_RES (1)..(3)..(37): Xaa is C or S
  MOD_RES (15)..(16)..(17)..(18)..(19): Xaa is A or G
  MOD_RES (20)..(21)..(22)..(23): Xaa is A or G or absent
XGXGEVVMDEYKFKXXXXXXXXXLYLMSIPELETPVX

SEQ ID NO: 18006 - protein, 39 aa, Artificial Sequence
  Non-cyclic GFR-binding peptide
  MOD_RES (1)..(3)..(35)..(36): Xaa is C or S
XGXSRVVMNEYKFKIVNSSDDLYLVSIPELKTPAXXPKP

SEQ ID NO: 18007 - protein, 38 aa, Artificial Sequence
  Non-cyclic GFR-binding peptide
  MOD_RES (1)..(33)..(34): Xaa is C or S
XAKVVMNEYKFKIVNNSSDLYLVSIPELKTPAXXAKPV

SEQ ID NO: 18008 - protein, 41 aa, Artificial Sequence
  Non-cyclic GFR-binding peptide
  MOD_RES (1)..(3)..(37)..(38): Xaa is C or S
  MOD_RES (15)..(16)..(17)..(18)..(19): Xaa is A or G
  MOD_RES (20)..(21)..(22)..(23): Xaa is A or G or absent
XGXARVVMNEYKFKXXXXXXXXXLYLVSIPELQTPAXXPKP

SEQ ID NO: 18009 - protein, 36 aa, Artificial Sequence
  Non-cyclic GFR-binding peptide
  MOD_RES (1)..(35)..(36): Xaa is C or S
  MOD_RES (13)..(14)..(15)..(16)..(17): Xaa is A or G
  MOD_RES (18)..(19)..(20)..(21): Xaa is A or G or absent
XGEVVMDEYQKYXXXXXXXXXIYLMSIPSLETPVXX

SEQ ID NO: 18010 - protein, 37 aa, Artificial Sequence
  Non-cyclic GFR-binding peptide
  MOD_RES (33)..(34): Xaa is C or S
  MOD_RES (11)..(12)..(13)..(14)..(15): Xaa is A or G
  MOD_RES (16)..(17)..(18)..(19): Xaa is A or G or absent
RVVMNEYQKYXXXXXXXXXIYLVSIPSLKTPAXXPKP

SEQ ID NO: 18011 - protein, 41 aa, Artificial Sequence
  Non-cyclic GFR-binding peptide
  MOD_RES (1)..(35)..(36): Xaa is C or S
  MOD_RES (13)..(14)..(15)..(16)..(17): Xaa is A or G
  MOD_RES (18)..(19)..(20)..(21): Xaa is A or G or absent
XAEVVMDYHYKLXXXXXXXXXKYLISIPSLRAPVXXSAPAA

SEQ ID NO: 18012 - protein, 38 aa, Artificial Sequence
  Non-cyclic GFR-binding peptide
  MOD_RES (1)..(35)..(36): Xaa is C or S
  MOD_RES (13)..(14)..(15)..(16)..(17): Xaa is A or G
  MOD_RES (18)..(19)..(20)..(21): Xaa is A or G or absent
XAEVVMDRYKKLXXXXXXXXXFYLISIANLRAPVXXSA

SEQ ID NO: 18013 - protein, 42 aa, Artificial Sequence
  Non-cyclic GFR-binding peptide
  MOD_RES (1)..(3)..(36)..(37): Xaa is C or S
  MOD_RES (14)..(15)..(16)..(17)..(18): Xaa is A or G
  MOD_RES (19)..(20)..(21)..(22): Xaa is A or G or absent
XKXSRVIMEYQKYXXXXXXXXXIYLISIPSLAQPVXXPAASA

SEQ ID NO: 18014 - protein, 39 aa, Artificial Sequence
  Non-cyclic GFR-binding peptide
  MOD_RES (2)..(4)..(36): Xaa is C or S
HXGXSRVVMNEYKFKIVNSSDDLYLVSIPELKTPAXTPK

SEQ ID NO: 18015 - protein, 39 aa, Artificial Sequence
  Non-cyclic GFR-binding peptide
  MOD_RES (1)..(35): Xaa is C or S
  MOD_RES (13)..(14)..(15)..(16)..(17): Xaa is A or G
  MOD_RES (18)..(19)..(20)..(21): Xaa is A or G or absent
XSRVVMNEYKFKXXXXXXXXXLYLVSIPELKTPAXTPKT

SEQ ID NO: 18016 - protein, 40 aa, Artificial Sequence
  Non-cyclic GFR-binding peptide
  MOD_RES (2)..(4)..(38)..(39): Xaa is C or S
  MOD_RES (16)..(17)..(18)..(19)..(20): Xaa is A or G
  MOD_RES (21)..(22)..(23)..(24): Xaa is A or G or absent
HXGXAKVVMNEYKFKXXXXXXXXXLYLVSIPELKTPAXXA

SEQ ID NO: 18017 - protein, 34 aa, Artificial Sequence
  Non-cyclic GFR-binding peptide
  MOD_RES (34)..(34): Xaa is C or S
  MOD_RES (12)..(13)..(14)..(15)..(16): Xaa is A or G
  MOD_RES (17)..(18)..(19)..(20): Xaa is A or G or absent
GEVVMEEYQKYXXXXXXXXXIYLMSIPSLETPVX

SEQ ID NO: 18018 - protein, 35 aa, Artificial Sequence
  Non-cyclic GFR-binding peptide
  MOD_RES (33)..(33): Xaa is C or S
  MOD_RES (11)..(12)..(13)..(14)..(15): Xaa is A or G
  MOD_RES (16)..(17)..(18)..(19): Xaa is A or G or absent
RVVMNEYKFKXXXXXXXXXLYLVSIPELKTPAXTP

SEQ ID NO: 18019 - protein, 37 aa, Artificial Sequence
  Non-cyclic GFR-binding peptide
  MOD_RES (1)..(3)..(35)..(36): Xaa is C or S
XGXAEVVMDRYKKLVVNNAADFYLISIANLRAPVXXS

SEQ ID NO: 18020 - protein, 40 aa, Artificial Sequence
  Non-cyclic GFR-binding peptide
  MOD_RES (1)..(3)..(37)..(38): Xaa is C or S
  MOD_RES (15)..(16)..(17)..(18)..(19): Xaa is A or G
  MOD_RES (20)..(21)..(22)..(23): Xaa is A or G or absent
XGXGEVVMDEYQKYXXXXXXXXXIYLMSIPSLETPVXXAK

SEQ ID NO: 18021 - protein, 34 aa, Artificial Sequence
  Non-cyclic GFR-binding peptide
  MOD_RES (1)..(34): Xaa is C or S
XEAVSMGEEYQKYTPVGMDDIYLVSIPSLKTPVX

SEQ ID NO: 18022 - protein, 33 aa, Artificial Sequence
  Non-cyclic GFR-binding peptide
  MOD_RES (2)..(2): Xaa is C or S
GXAEVVMDRYKKLVVNNAADFYLISIANLRAPV

SEQ ID NO: 18023 - protein, 33 aa, Artificial Sequence
  Non-cyclic GFR-binding peptide
  MOD_RES (31)..(32): Xaa is C or S
EVVMDEYQKYVVKENEDIYLMSIPSLETPVXXA

SEQ ID NO: 18024 - protein, 35 aa, Artificial Sequence
  Non-cyclic GFR-binding peptide
  MOD_RES (1)..(3): Xaa is C or S
XGXEAVSMGEEYKFKTPVGMDDLYLVSIPELKTPV

SEQ ID NO: 18025 - protein, 32 aa, Artificial Sequence
  Non-cyclic GFR-binding peptide
  MOD_RES (1)..(1): Xaa is C or S
XESVAMGEYQKYYTVVGKDIYLISIPSLKTPV

SEQ ID NO: 18026 - protein, 38 aa, Artificial Sequence
  Non-cyclic GFR-binding peptide
  MOD_RES (1)..(33)..(34): Xaa is C or S
XAKVVMNEYQKYIVNNSSDIYLVSIPSLKTPAXXAKPV

SEQ ID NO: 18027 - protein, 35 aa, Artificial Sequence
  Non-cyclic GFR-binding peptide
  MOD_RES (2)..(35): Xaa is C or S
  MOD_RES (13)..(14)..(15)..(16)..(17): Xaa is A or G
  MOD_RES (18)..(19)..(20)..(21): Xaa is A or G or absent
KXSRVIMEYQKYXXXXXXXXXIYLISIPSLAQPVX

SEQ ID NO: 18028 - protein, 36 aa, Artificial Sequence
  Non-cyclic GFR-binding peptide
  MOD_RES (1)..(34)..(35): Xaa is C or S
  MOD_RES (12)..(13)..(14)..(15)..(16): Xaa is A or G
  MOD_RES (17)..(18)..(19)..(20): Xaa is A or G or absent
XSRVIMEYQKYXXXXXXXXXIYLISIPSLAQPVXXP

SEQ ID NO: 18029 - protein, 34 aa, Artificial Sequence
  Non-cyclic GFR-binding peptide
  MOD_RES (33)..(34): Xaa is C or S
  MOD_RES (11)..(12)..(13)..(14)..(15): Xaa is A or G
  MOD_RES (16)..(17)..(18)..(19): Xaa is A or G or absent
SKVIMEYKFKXXXXXXXXXLYLISIPELDQSVXX

SEQ ID NO: 18030 - protein, 38 aa, Artificial Sequence
  Non-cyclic GFR-binding peptide
  MOD_RES (2)..(36)..(37): Xaa is C or S
  MOD_RES (14)..(15)..(16)..(17)..(18): Xaa is A or G
  MOD_RES (19)..(20)..(21)..(22): Xaa is A or G or absent
GXSRVVMNEYKFKXXXXXXXXXLYLVSIPELKTPAXXP

SEQ ID NO: 18031 - protein, 40 aa, Artificial Sequence
  Non-cyclic GFR-binding peptide
  MOD_RES (1)..(3)..(37)..(38): Xaa is C or S
  MOD_RES (15)..(16)..(17)..(18)..(19): Xaa is A or G
  MOD_RES (20)..(21)..(22)..(23): Xaa is A or G or absent
XGXAKVVMNEYQKYXXXXXXXXXIYLVSIPSLKTPAXXAK

SEQ ID NO: 18032 - protein, 39 aa, Artificial Sequence
  Non-cyclic GFR-binding peptide
  MOD_RES (1)..(3)..(34)..(35): Xaa is C or S
XKXSRVIMEYKFKVKPKRGVLYLISIPELAQPVXXPAAS

SEQ ID NO: 18033 - protein, 33 aa, Artificial Sequence
  Non-cyclic GFR-binding peptide
  MOD_RES (32)..(32): Xaa is C or S
SRVVMNEYQKYIVNSSDDIYLVSIPSLKTPAXT

SEQ ID NO: 18034 - protein, 33 aa, Artificial Sequence
  Non-cyclic GFR-binding peptide
  MOD_RES (33)..(33): Xaa is C or S
  MOD_RES (11)..(12)..(13)..(14)..(15): Xaa is A or G
  MOD_RES (16)..(17)..(18)..(19): Xaa is A or G or absent
RVVMNEYQKYXXXXXXXXXIYLVSIPSLQTPAX

SEQ ID NO: 18035 - protein, 32 aa, Artificial Sequence
  Non-cyclic GFR-binding peptide
  MOD_RES (1)..(1): Xaa is C or S
XAKVVMNEYKFKIVNNSSDLYLVSIPELKTPA

SEQ ID NO: 18036 - protein, 38 aa, Artificial Sequence
  Non-cyclic GFR-binding peptide
  MOD_RES (2)..(4)..(38): Xaa is C or S
  MOD_RES (16)..(17)..(18)..(19)..(20): Xaa is A or G
  MOD_RES (21)..(22)..(23)..(24): Xaa is A or G or absent
RXGXESVAMGEYQKYXXXXXXXXXIYLISIPSLKTPVX

SEQ ID NO: 18037 - protein, 39 aa, Artificial Sequence
  Non-cyclic GFR-binding peptide
  MOD_RES (1)..(3)..(35)..(36): Xaa is C or S
XGXARVVMNEYKFKIVNSSDDLYLVSIPELQTPAXXPKP

SEQ ID NO: 18038 - protein, 35 aa, Artificial Sequence
  Non-cyclic GFR-binding peptide
  MOD_RES (31)..(32): Xaa is C or S
SVAMGYHYKLYTVVGKDKYLISIPSLKTPVXXAKS

SEQ ID NO: 18039 - protein, 37 aa, Artificial Sequence
  Non-cyclic GFR-binding peptide
  MOD_RES (2)..(34)..(35): Xaa is C or S
GXAKVVMNEYKFKIVNNSSDLYLVSIPELKTPAXXAK

SEQ ID NO: 18040 - protein, 38 aa, Artificial Sequence
  Non-cyclic GFR-binding peptide
  MOD_RES (1)..(3)..(35)..(36): Xaa is C or S
XGXARVVMNEYKFKIVNSSDDLYLVSIPELQTPAXXPK

SEQ ID NO: 18041 - protein, 40 aa, Artificial Sequence
  Non-cyclic GFR-binding peptide
  MOD_RES (2)..(34)..(35): Xaa is C or S
GXGEVVMEEYKFKVVKDYEDLYLMSIPELETPVXXAKPIS

SEQ ID NO: 18042 - protein, 36 aa, Artificial Sequence
  Non-cyclic GFR-binding peptide
  MOD_RES (1)..(3)..(34)..(35): Xaa is C or S
XKXSKVIMEYKFKIKPTKGILYLISIPELDQSVXXP

SEQ ID NO: 18043 - protein, 34 aa, Artificial Sequence
  Non-cyclic GFR-binding peptide
  MOD_RES (34)..(34): Xaa is C or S
  MOD_RES (12)..(13)..(14)..(15)..(16): Xaa is A or G
  MOD_RES (17)..(18)..(19)..(20): Xaa is A or G or absent
ARVVMNEYKFKXXXXXXXXXLYLVSIPELQTPAX

SEQ ID NO: 18044 - protein, 36 aa, Artificial Sequence
  Non-cyclic GFR-binding peptide
  MOD_RES (2)..(34)..(35): Xaa is C or S
GXARVVMNEYKFKIVNSSDDLYLVSIPELQTPAXXP

SEQ ID NO: 18045 - protein, 33 aa, Artificial Sequence
  Non-cyclic GFR-binding peptide
  MOD_RES (32)..(33): Xaa is C or S
AKVVMNEYQKYIVNNSSDIYLVSIPSLKTPAXX

SEQ ID NO: 18046 - protein, 39 aa, Artificial Sequence
  Non-cyclic GFR-binding peptide
  MOD_RES (2)..(4)..(38)..(39): Xaa is C or S
  MOD_RES (16)..(17)..(18)..(19)..(20): Xaa is A or G
  MOD_RES (21)..(22)..(23)..(24): Xaa is A or G or absent
HXGXAKVVMNEYKFKXXXXXXXXXLYLVSIPELKTPAXX

SEQ ID NO: 18047 - protein, 36 aa, Artificial Sequence
  Non-cyclic GFR-binding peptide
  MOD_RES (2)..(33)..(34): Xaa is C or S
KXSKVIMEYQKYIKPTKGIIYLISIPSLDQSVXXPS

SEQ ID NO: 18048 - protein, 37 aa, Artificial Sequence
  Non-cyclic GFR-binding peptide
  MOD_RES (2)..(4): Xaa is C or S
  MOD_RES (16)..(17)..(18)..(19)..(20): Xaa is A or G
  MOD_RES (21)..(22)..(23)..(24): Xaa is A or G or absent
HXGXARVVMNEYKFKXXXXXXXXXLYLVSIPELQTPA

SEQ ID NO: 18049 - protein, 37 aa, Artificial Sequence
  Non-cyclic GFR-binding peptide
  MOD_RES (2)..(36)..(37): Xaa is C or S
  MOD_RES (14)..(15)..(16)..(17)..(18): Xaa is A or G
  MOD_RES (19)..(20)..(21)..(22): Xaa is A or G or absent
GXAEVVMDYHYKLXXXXXXXXXKYLISIPSLRAPVXX

SEQ ID NO: 18050 - protein, 35 aa, Artificial Sequence
  Non-cyclic GFR-binding peptide
  MOD_RES (2)..(35): Xaa is C or S
GXEAVSMGEEYKFKTPVGMDDLYLVSIPELKTPVX

SEQ ID NO: 18051 - protein, 35 aa, Artificial Sequence
  Non-cyclic GFR-binding peptide
  MOD_RES (2)..(4)..(35): Xaa is C or S
SXKXSKVIMEYQKYIKPTKGIIYLISIPSLDQSVX

SEQ ID NO: 18052 - protein, 43 aa, Artificial Sequence
  Non-cyclic GFR-binding peptide
  MOD_RES (1)..(3)..(37): Xaa is C or S
  MOD_RES (15)..(16)..(17)..(18)..(19): Xaa is A or G
  MOD_RES (20)..(21)..(22)..(23): Xaa is A or G or absent
XGXSRVVMNEYQKYXXXXXXXXXIYLVSIPSLKTPAXTPKTVH

SEQ ID NO: 18053 - protein, 36 aa, Artificial Sequence
  Non-cyclic GFR-binding peptide
  MOD_RES (32)..(33): Xaa is C or S
GEVVMEEYKFKVVKDYEDLYLMSIPELETPVXXAKP

SEQ ID NO: 18054 - protein, 37 aa, Artificial Sequence
  Non-cyclic GFR-binding peptide
  MOD_RES (2)..(34): Xaa is C or S
GXSRVVMNEYQKYIVNSSDDIYLVSIPSLKTPAXTPK

SEQ ID NO: 18055 - protein, 32 aa, Artificial Sequence
  Non-cyclic GFR-binding peptide
  MOD_RES (31)..(32): Xaa is C or S
SKVIMEYQKYIKPTKGIIYLISIPSLDQSVXX

SEQ ID NO: 18056 - protein, 36 aa, Artificial Sequence
  Non-cyclic GFR-binding peptide
  MOD_RES (33)..(34): Xaa is C or S
  MOD_RES (11)..(12)..(13)..(14)..(15): Xaa is A or G
  MOD_RES (16)..(17)..(18)..(19): Xaa is A or G or absent
RVVMNEYKFKXXXXXXXXXLYLVSIPELKTPAXXPK

SEQ ID NO: 18057 - protein, 36 aa, Artificial Sequence
  Non-cyclic GFR-binding peptide
  MOD_RES (2)..(34)..(35): Xaa is C or S
GXSRVVMNEYKFKIVNSSDDLYLVSIPELKTPAXXP

SEQ ID NO: 18058 - protein, 36 aa, Artificial Sequence
  Non-cyclic GFR-binding peptide
  MOD_RES (2)..(34)..(35): Xaa is C or S
GXGEVVMEEYQKYVVKDYEDIYLMSIPSLETPVXXA

SEQ ID NO: 18059 - protein, 41 aa, Artificial Sequence
  Non-cyclic GFR-binding peptide
  MOD_RES (35)..(36): Xaa is C or S
  MOD_RES (13)..(14)..(15)..(16)..(17): Xaa is A or G
  MOD_RES (18)..(19)..(20)..(21): Xaa is A or G or absent
EAVSMGEEYQKYXXXXXXXXXIYLVSIPSLKTPVXXAKGVK

SEQ ID NO: 18060 - protein, 36 aa, Artificial Sequence
  Non-cyclic GFR-binding peptide
  MOD_RES (2)..(2): Xaa is C or S
  MOD_RES (15)..(16)..(17)..(18)..(19): Xaa is A or G
  MOD_RES (20)..(21)..(22)..(23): Xaa is A or G or absent
GXEAVSMGEEYQKYXXXXXXXXXIYLVSIPSLKTPV

SEQ ID NO: 18061 - protein, 36 aa, Artificial Sequence
  Non-cyclic GFR-binding peptide
  MOD_RES (1)..(33): Xaa is C or S
XSRVVMNEYQKYIVNSSDDIYLVSIPSLKTPAXTPK

SEQ ID NO: 18062 - protein, 39 aa, Artificial Sequence
  Non-cyclic GFR-binding peptide
  MOD_RES (1)..(3)..(35)..(36): Xaa is C or S
XGXGEVVMDEYQKYVVKENEDIYLMSIPSLETPVXXAKP

SEQ ID NO: 18063 - protein, 39 aa, Artificial Sequence
  Non-cyclic GFR-binding peptide
  MOD_RES (1)..(33)..(34): Xaa is C or S
XAKVVMNEYQKYIVNNSSDIYLVSIPSLKTPAXXAKPVA

SEQ ID NO: 18064 - protein, 33 aa, Artificial Sequence
  Non-cyclic GFR-binding peptide
  MOD_RES (32)..(33): Xaa is C or S
AEVVMDRYKKLVVNNAADFYLISIANLRAPVXX

SEQ ID NO: 18065 - protein, 35 aa, Artificial Sequence
  Non-cyclic GFR-binding peptide
  MOD_RES (34)..(35): Xaa is C or S
  MOD_RES (12)..(13)..(14)..(15)..(16): Xaa is A or G
  MOD_RES (17)..(18)..(19)..(20): Xaa is A or G or absent
ARVVMNEYKFKXXXXXXXXXLYLVSIPELQTPAXX

SEQ ID NO: 18066 - protein, 39 aa, Artificial Sequence
  Non-cyclic GFR-binding peptide
  MOD_RES (2)..(34)..(35): Xaa is C or S
GXESVAMGYHYKLYTVVGKDKYLISIPSLKTPVXXAKSA

SEQ ID NO: 18067 - protein, 42 aa, Artificial Sequence
  Non-cyclic GFR-binding peptide
  MOD_RES (1)..(3)..(36)..(37): Xaa is C or S
  MOD_RES (14)..(15)..(16)..(17)..(18): Xaa is A or G
  MOD_RES (19)..(20)..(21)..(22): Xaa is A or G or absent
XKXSKVIMEYQKYXXXXXXXXXIYLISIPSLDQSVXXPSASA

SEQ ID NO: 18068 - protein, 38 aa, Artificial Sequence
  Non-cyclic GFR-binding peptide
  MOD_RES (33)..(33): Xaa is C or S
  MOD_RES (11)..(12)..(13)..(14)..(15): Xaa is A or G
  MOD_RES (16)..(17)..(18)..(19): Xaa is A or G or absent
RVVMNEYKFKXXXXXXXXXLYLVSIPELKTPAXTPKTV

SEQ ID NO: 18069 - protein, 37 aa, Artificial Sequence
  Non-cyclic GFR-binding peptide
  MOD_RES (2)..(4)..(36)..(37): Xaa is C or S
RXGXESVAMGYHYKLYTVVGKDKYLISIPSLKTPVXX

SEQ ID NO: 18070 - protein, 40 aa, Artificial Sequence
  Non-cyclic GFR-binding peptide
  MOD_RES (2)..(34): Xaa is C or S
GXSRVVMNEYKFKIVNSSDDLYLVSIPELKTPAXTPKTVH

SEQ ID NO: 18071 - protein, 35 aa, Artificial Sequence
  Non-cyclic GFR-binding peptide
  MOD_RES (34)..(34): Xaa is C or S
  MOD_RES (12)..(13)..(14)..(15)..(16): Xaa is A or G
  MOD_RES (17)..(18)..(19)..(20): Xaa is A or G or absent
SRVVMNEYQKYXXXXXXXXXIYLVSIPSLKTPAXT

SEQ ID NO: 18072 - protein, 35 aa, Artificial Sequence
  Non-cyclic GFR-binding peptide
  MOD_RES (1)..(3): Xaa is C or S
XGXEAVSMGEEYQKYTPVGMDDIYLVSIPSLKTPV

SEQ ID NO: 18073 - protein, 38 aa, Artificial Sequence
  Non-cyclic GFR-binding peptide
  MOD_RES (33)..(34): Xaa is C or S
  MOD_RES (11)..(12)..(13)..(14)..(15): Xaa is A or G
  MOD_RES (16)..(17)..(18)..(19): Xaa is A or G or absent
SRVIMEYKFKXXXXXXXXXLYLISIPELAQPVXXPAAS

SEQ ID NO: 18074 - protein, 39 aa, Artificial Sequence
  Non-cyclic GFR-binding peptide
  MOD_RES (1)..(33)..(34): Xaa is C or S
XSRVVMNEYQKYIVNSSDDIYLVSIPSLKTPAXXPKPVY

SEQ ID NO: 18075 - protein, 36 aa, Artificial Sequence
  Non-cyclic GFR-binding peptide
  MOD_RES (2)..(34)..(35): Xaa is C or S
GXAKVVMNEYQKYIVNNSSDIYLVSIPSLKTPAXXA

SEQ ID NO: 18076 - protein, 31 aa, Artificial Sequence
  Non-cyclic GFR-binding peptide
  MOD_RES (31)..(31): Xaa is C or S
EVVMDEYKFKVVNNAADLYLISIPELRAPVX

SEQ ID NO: 18077 - protein, 36 aa, Artificial Sequence
  Non-cyclic GFR-binding peptide
  MOD_RES (34)..(35): Xaa is C or S
  MOD_RES (12)..(13)..(14)..(15)..(16): Xaa is A or G
  MOD_RES (17)..(18)..(19)..(20): Xaa is A or G or absent
AEVVMDEYKFKXXXXXXXXXLYLISIPELRAPVXXS

SEQ ID NO: 18078 - protein, 40 aa, Artificial Sequence
  Non-cyclic GFR-binding peptide
  MOD_RES (1)..(34)..(35): Xaa is C or S
  MOD_RES (12)..(13)..(14)..(15)..(16): Xaa is A or G
  MOD_RES (17)..(18)..(19)..(20): Xaa is A or G or absent
XSKVIMEYQKYXXXXXXXXXIYLISIPSLDQSVXXPSASA

SEQ ID NO: 18079 - protein, 34 aa, Artificial Sequence
  Non-cyclic GFR-binding peptide
  MOD_RES (1)..(34): Xaa is C or S
  MOD_RES (12)..(13)..(14)..(15)..(16): Xaa is A or G
  MOD_RES (17)..(18)..(19)..(20): Xaa is A or G or absent
XSKVVMEYQKYXXXXXXXXXIYLISIPSLDQPVX

SEQ ID NO: 18080 - protein, 41 aa, Artificial Sequence
  Non-cyclic GFR-binding peptide
  MOD_RES (1)..(35)..(36): Xaa is C or S
  MOD_RES (13)..(14)..(15)..(16)..(17): Xaa is A or G
  MOD_RES (18)..(19)..(20)..(21): Xaa is A or G or absent
XESVAMGYHYKLXXXXXXXXXKYLISIPSLKTPVXXAKSAK

SEQ ID NO: 18081 - protein, 40 aa, Artificial Sequence
  Non-cyclic GFR-binding peptide
  MOD_RES (1)..(3)..(35)..(36): Xaa is C or S
XGXARVVMNEYKFKIVNSSDDLYLVSIPELQTPAXXPKPV

SEQ ID NO: 18082 - protein, 34 aa, Artificial Sequence
  Non-cyclic GFR-binding peptide
  MOD_RES (33)..(34): Xaa is C or S
  MOD_RES (11)..(12)..(13)..(14)..(15): Xaa is A or G
  MOD_RES (16)..(17)..(18)..(19): Xaa is A or G or absent
EVVMEEYKFKXXXXXXXXXLYLMSIPELETPVXX

SEQ ID NO: 18083 - protein, 35 aa, Artificial Sequence
  Non-cyclic GFR-binding peptide
  MOD_RES (1)..(3)..(35): Xaa is C or S
XGXARVVMNEYQKYIVNSSDDIYLVSIPSLQTPAX

SEQ ID NO: 18084 - protein, 34 aa, Artificial Sequence
  Non-cyclic GFR-binding peptide
  MOD_RES (34)..(34): Xaa is C or S
  MOD_RES (12)..(13)..(14)..(15)..(16): Xaa is A or G
  MOD_RES (17)..(18)..(19)..(20): Xaa is A or G or absent
GEVVMDEYKFKXXXXXXXXXLYLMSIPELETPVX

SEQ ID NO: 18085 - protein, 41 aa, Artificial Sequence
  Non-cyclic GFR-binding peptide
  MOD_RES (2)..(4)..(38)..(39): Xaa is C or S
  MOD_RES (16)..(17)..(18)..(19)..(20): Xaa is A or G
  MOD_RES (21)..(22)..(23)..(24): Xaa is A or G or absent
HXGXAKVVMNEYQKYXXXXXXXXXIYLVSIPSLKTPAXXAK

SEQ ID NO: 18086 - protein, 40 aa, Artificial Sequence
  Non-cyclic GFR-binding peptide
  MOD_RES (1)..(36)..(37): Xaa is C or S
  MOD_RES (14)..(15)..(16)..(17)..(18): Xaa is A or G
  MOD_RES (19)..(20)..(21)..(22): Xaa is A or G or absent
XEAVSMGEEYKFKXXXXXXXXXLYLVSIPELKTPVXXAKG

SEQ ID NO: 18087 - protein, 32 aa, Artificial Sequence
  Non-cyclic GFR-binding peptide
  MOD_RES (31)..(32): Xaa is C or S
EVVMDEYKFKVVNNAADLYLISIPELRAPVXX

SEQ ID NO: 18088 - protein, 35 aa, Artificial Sequence
  Non-cyclic GFR-binding peptide
  MOD_RES (2)..(4): Xaa is C or S
RXGXESVAMGEYQKYYTVVGKDIYLISIPSLKTPV

SEQ ID NO: 18089 - protein, 39 aa, Artificial Sequence
  Non-cyclic GFR-binding peptide
  MOD_RES (1)..(3)..(37)..(38): Xaa is C or S
  MOD_RES (15)..(16)..(17)..(18)..(19): Xaa is A or G
  MOD_RES (20)..(21)..(22)..(23): Xaa is A or G or absent
XGXSRVVMNEYKFKXXXXXXXXXLYLVSIPELKTPAXXP

SEQ ID NO: 18090 - protein, 38 aa, Artificial Sequence
  Non-cyclic GFR-binding peptide
  MOD_RES (1)..(3)..(36)..(37): Xaa is C or S
  MOD_RES (14)..(15)..(16)..(17)..(18): Xaa is A or G
  MOD_RES (19)..(20)..(21)..(22): Xaa is A or G or absent
XKXSRVIMEYKFKXXXXXXXXXLYLISIPELAQPVXXP

SEQ ID NO: 18091 - protein, 36 aa, Artificial Sequence
  Non-cyclic GFR-binding peptide
  MOD_RES (33)..(34): Xaa is C or S
  MOD_RES (11)..(12)..(13)..(14)..(15): Xaa is A or G
  MOD_RES (16)..(17)..(18)..(19): Xaa is A or G or absent
EVVMDEYKFKXXXXXXXXXLYLMSIPELETPVXXAK

SEQ ID NO: 18092 - protein, 38 aa, Artificial Sequence
  Non-cyclic GFR-binding peptide
  MOD_RES (2)..(4)..(36)..(37): Xaa is C or S
RXGXESVAMGRYKKLYTVVGKDFYLISIANLKTPVXXA

SEQ ID NO: 18093 - protein, 37 aa, Artificial Sequence
  Non-cyclic GFR-binding peptide
  MOD_RES (2)..(4)..(35)..(36): Xaa is C or S
SXKXSRVIMEYKFKVKPKRGVLYLISIPELAQPVXXP

SEQ ID NO: 18094 - protein, 39 aa, Artificial Sequence
  Non-cyclic GFR-binding peptide
  MOD_RES (2)..(4)..(36)..(37): Xaa is C or S
RXGXAEVVMDEYKFKVVNNAADLYLISIPELRAPVXXSA

SEQ ID NO: 18095 - protein, 34 aa, Artificial Sequence
  Non-cyclic GFR-binding peptide
  MOD_RES (33)..(34): Xaa is C or S
  MOD_RES (11)..(12)..(13)..(14)..(15): Xaa is A or G
  MOD_RES (16)..(17)..(18)..(19): Xaa is A or G or absent
SRVIMEYKFKXXXXXXXXXLYLISIPELAQPVXX

SEQ ID NO: 18096 - protein, 35 aa, Artificial Sequence
  Non-cyclic GFR-binding peptide
  MOD_RES (2)..(2): Xaa is C or S
  MOD_RES (14)..(15)..(16)..(17)..(18): Xaa is A or G
  MOD_RES (19)..(20)..(21)..(22): Xaa is A or G or absent
GXESVAMGYHYKLXXXXXXXXXKYLISIPSLKTPV

SEQ ID NO: 18097 - protein, 39 aa, Artificial Sequence
  Non-cyclic GFR-binding peptide
  MOD_RES (1)..(33)..(34): Xaa is C or S
XAEVVMDEYKFKVVNNAADLYLISIPELRAPVXXSAPAA

SEQ ID NO: 18098 - protein, 31 aa, Artificial Sequence
  Non-cyclic GFR-binding peptide
  MOD_RES (1)..(1): Xaa is C or S
XSKVVMEYQKYVKPTRGVIYLISIPSLDQPV

SEQ ID NO: 18099 - protein, 45 aa, Artificial Sequence
  Non-cyclic GFR-binding peptide
  MOD_RES (2)..(4)..(39)..(40): Xaa is C or S
  MOD_RES (17)..(18)..(19)..(20)..(21): Xaa is A or G
  MOD_RES (22)..(23)..(24)..(25): Xaa is A or G or absent
RXGXEAVSMGEEYKFKXXXXXXXXXLYLVSIPELKTPVXXAKGVK

SEQ ID NO: 18100 - protein, 32 aa, Artificial Sequence
  Non-cyclic GFR-binding peptide
  MOD_RES (31)..(32): Xaa is C or S
SKVVMEYQKYVKPTRGVIYLISIPSLDQPVXX

SEQ ID NO: 18101 - protein, 35 aa, Artificial Sequence
  Non-cyclic GFR-binding peptide
  MOD_RES (34)..(35): Xaa is C or S
  MOD_RES (12)..(13)..(14)..(15)..(16): Xaa is A or G
  MOD_RES (17)..(18)..(19)..(20): Xaa is A or G or absent
GEVVMEEYQKYXXXXXXXXXIYLMSIPSLETPVXX

SEQ ID NO: 18102 - protein, 43 aa, Artificial Sequence
  Non-cyclic GFR-binding peptide
  MOD_RES (2)..(4)..(37)..(38): Xaa is C or S
  MOD_RES (15)..(16)..(17)..(18)..(19): Xaa is A or G
  MOD_RES (20)..(21)..(22)..(23): Xaa is A or G or absent
SXKXSKVIMEYQKYXXXXXXXXXIYLISIPSLDQSVXXPSASA

SEQ ID NO: 18103 - protein, 39 aa, Artificial Sequence
  Non-cyclic GFR-binding peptide
  MOD_RES (2)..(4)..(36): Xaa is C or S
HXGXSRVVMNEYQKYIVNSSDDIYLVSIPSLKTPAXTPK

SEQ ID NO: 18104 - protein, 33 aa, Artificial Sequence
  Non-cyclic GFR-binding peptide
  MOD_RES (31)..(32): Xaa is C or S
EVVMDRYKKLVVNNAADFYLISIANLRAPVXXS

SEQ ID NO: 18105 - protein, 38 aa, Artificial Sequence
  Non-cyclic GFR-binding peptide
  MOD_RES (35)..(36): Xaa is C or S
  MOD_RES (13)..(14)..(15)..(16)..(17): Xaa is A or G
  MOD_RES (18)..(19)..(20)..(21): Xaa is A or G or absent
EAVSMGEEYQKYXXXXXXXXXIYLVSIPSLKTPVXXAK

SEQ ID NO: 18106 - protein, 34 aa, Artificial Sequence
  Non-cyclic GFR-binding peptide
  MOD_RES (2)..(2): Xaa is C or S
  MOD_RES (13)..(14)..(15)..(16)..(17): Xaa is A or G
  MOD_RES (18)..(19)..(20)..(21): Xaa is A or G or absent
KXSRVIMEYQKYXXXXXXXXXIYLISIPSLAQPV

SEQ ID NO: 18107 - protein, 39 aa, Artificial Sequence
  Non-cyclic GFR-binding peptide
  MOD_RES (34)..(34): Xaa is C or S
  MOD_RES (12)..(13)..(14)..(15)..(16): Xaa is A or G
  MOD_RES (17)..(18)..(19)..(20): Xaa is A or G or absent
SRVVMNEYKFKXXXXXXXXXLYLVSIPELKTPAXTPKTV

SEQ ID NO: 18108 - protein, 31 aa, Artificial Sequence
  Non-cyclic GFR-binding peptide
  MOD_RES (1)..(1): Xaa is C or S
XSKVIMEYQKYIKPTKGIIYLISIPSLDQSV

SEQ ID NO: 18109 - protein, 36 aa, Artificial Sequence
  Non-cyclic GFR-binding peptide
  MOD_RES (34)..(35): Xaa is C or S
  MOD_RES (12)..(13)..(14)..(15)..(16): Xaa is A or G
  MOD_RES (17)..(18)..(19)..(20): Xaa is A or G or absent
ESVAMGYHYKLXXXXXXXXXKYLISIPSLKTPVXXA

SEQ ID NO: 18110 - protein, 36 aa, Artificial Sequence
  Non-cyclic GFR-binding peptide
  MOD_RES (1)..(3)..(35)..(36): Xaa is C or S
XGXSRVVMNEYKFKIVNSSDDLYLVSIPELKTPAXX

SEQ ID NO: 18111 - protein, 41 aa, Artificial Sequence
  Non-cyclic GFR-binding peptide
  MOD_RES (2)..(35)..(36): Xaa is C or S
GXEAVSMGEEYKFKTPVGMDDLYLVSIPELKTPVXXAKGVK

SEQ ID NO: 18112 - protein, 38 aa, Artificial Sequence
  Non-cyclic GFR-binding peptide
  MOD_RES (1)..(35)..(36): Xaa is C or S
  MOD_RES (13)..(14)..(15)..(16)..(17): Xaa is A or G
  MOD_RES (18)..(19)..(20)..(21): Xaa is A or G or absent
XARVVMNEYQKYXXXXXXXXXIYLVSIPSLQTPAXXPK

SEQ ID NO: 18113 - protein, 40 aa, Artificial Sequence
  Non-cyclic GFR-binding peptide
  MOD_RES (2)..(4)..(37)..(38): Xaa is C or S
RXGXEAVSMGEEYKFKTPVGMDDLYLVSIPELKTPVXXAK

SEQ ID NO: 18114 - protein, 39 aa, Artificial Sequence
  Non-cyclic GFR-binding peptide
  MOD_RES (2)..(35)..(36): Xaa is C or S
GXEAVSMGEEYQKYTPVGMDDIYLVSIPSLKTPVXXAKG

SEQ ID NO: 18115 - protein, 35 aa, Artificial Sequence
  Non-cyclic GFR-binding peptide
  MOD_RES (2)..(35): Xaa is C or S
  MOD_RES (13)..(14)..(15)..(16)..(17): Xaa is A or G
  MOD_RES (18)..(19)..(20)..(21): Xaa is A or G or absent
KXSKVIMEYKFKXXXXXXXXXLYLISIPELDQSVX

SEQ ID NO: 18116 - protein, 35 aa, Artificial Sequence
  Non-cyclic GFR-binding peptide
  MOD_RES (1)..(34)..(35): Xaa is C or S
  MOD_RES (12)..(13)..(14)..(15)..(16): Xaa is A or G
  MOD_RES (17)..(18)..(19)..(20): Xaa is A or G or absent
XSKVIMEYQKYXXXXXXXXXIYLISIPSLDQSVXX

SEQ ID NO: 18117 - protein, 37 aa, Artificial Sequence
  Non-cyclic GFR-binding peptide
  MOD_RES (31)..(32): Xaa is C or S
EVVMDEYKFKVVNNAADLYLISIPELRAPVXXSAPAA

SEQ ID NO: 18118 - protein, 42 aa, Artificial Sequence
  Non-cyclic GFR-binding peptide
  MOD_RES (2)..(4)..(38)..(39): Xaa is C or S
  MOD_RES (16)..(17)..(18)..(19)..(20): Xaa is A or G
  MOD_RES (21)..(22)..(23)..(24): Xaa is A or G or absent
HXGXAKVVMNEYKFKXXXXXXXXXLYLVSIPELKTPAXXAKP

SEQ ID NO: 18119 - protein, 41 aa, Artificial Sequence
  Non-cyclic GFR-binding peptide
  MOD_RES (1)..(3)..(35)..(36): Xaa is C or S
XGXSRVVMNEYKFKIVNSSDDLYLVSIPELKTPAXXPKPVY

SEQ ID NO: 18120 - protein, 36 aa, Artificial Sequence
  Non-cyclic GFR-binding peptide
  MOD_RES (1)..(3): Xaa is C or S
  MOD_RES (15)..(16)..(17)..(18)..(19): Xaa is A or G
  MOD_RES (20)..(21)..(22)..(23): Xaa is A or G or absent
XGXSRVVMNEYKFKXXXXXXXXXLYLVSIPELKTPA

SEQ ID NO: 18121 - protein, 38 aa, Artificial Sequence
  Non-cyclic GFR-binding peptide
  MOD_RES (2)..(4)..(36)..(37): Xaa is C or S
RXGXGEVVMEEYQKYVVKDYEDIYLMSIPSLETPVXXA

SEQ ID NO: 18122 - protein, 37 aa, Artificial Sequence
  Non-cyclic GFR-binding peptide
  MOD_RES (33)..(34): Xaa is C or S
  MOD_RES (11)..(12)..(13)..(14)..(15): Xaa is A or G
  MOD_RES (16)..(17)..(18)..(19): Xaa is A or G or absent
SKVVMEYQKYXXXXXXXXXIYLISIPSLDQPVXXPSA

SEQ ID NO: 18123 - protein, 40 aa, Artificial Sequence
  Non-cyclic GFR-binding peptide
  MOD_RES (1)..(35)..(36): Xaa is C or S
  MOD_RES (13)..(14)..(15)..(16)..(17): Xaa is A or G
  MOD_RES (18)..(19)..(20)..(21): Xaa is A or G or absent
XAEVVMDYHYKLXXXXXXXXXKYLISIPSLRAPVXXSAPA

SEQ ID NO: 18124 - protein, 38 aa, Artificial Sequence
  Non-cyclic GFR-binding peptide
  MOD_RES (1)..(3)..(35)..(36): Xaa is C or S
XGXGEVVMDEYQKYVVKENEDIYLMSIPSLETPVXXAK

SEQ ID NO: 18125 - protein, 39 aa, Artificial Sequence
  Non-cyclic GFR-binding peptide
  MOD_RES (33)..(33): Xaa is C or S
  MOD_RES (11)..(12)..(13)..(14)..(15): Xaa is A or G
  MOD_RES (16)..(17)..(18)..(19): Xaa is A or G or absent
RVVMNEYKFKXXXXXXXXXLYLVSIPELKTPAXTPKTVH

SEQ ID NO: 18126 - protein, 42 aa, Artificial Sequence
  Non-cyclic GFR-binding peptide
  MOD_RES (1)..(3)..(37)..(38): Xaa is C or S
  MOD_RES (15)..(16)..(17)..(18)..(19): Xaa is A or G
  MOD_RES (20)..(21)..(22)..(23): Xaa is A or G or absent
XGXARVVMNEYQKYXXXXXXXXXIYLVSIPSLQTPAXXPKPV

SEQ ID NO: 18127 - protein, 40 aa, Artificial Sequence
  Non-cyclic GFR-binding peptide
  MOD_RES (2)..(4)..(36)..(37): Xaa is C or S
RXGXAEVVMDRYKKLVVNNAADFYLISIANLRAPVXXSAP

SEQ ID NO: 18128 - protein, 33 aa, Artificial Sequence
  Non-cyclic GFR-binding peptide
  MOD_RES (32)..(33): Xaa is C or S
ESVAMGYHYKLYTVVGKDKYLISIPSLKTPVXX

SEQ ID NO: 18129 - protein, 38 aa, Artificial Sequence
  Non-cyclic GFR-binding peptide
  MOD_RES (2)..(4)..(36)..(37): Xaa is C or S
RXGXGEVVMEEYKFKVVKDYEDLYLMSIPELETPVXXA

SEQ ID NO: 18130 - protein, 37 aa, Artificial Sequence
  Non-cyclic GFR-binding peptide
  MOD_RES (2)..(4)..(36)..(37): Xaa is C or S
HXGXAKVVMNEYQKYIVNNSSDIYLVSIPSLKTPAXX

SEQ ID NO: 18131 - protein, 38 aa, Artificial Sequence
  Non-cyclic GFR-binding peptide
  MOD_RES (2)..(4)..(37)..(38): Xaa is C or S
RXGXEAVSMGEEYQKYTPVGMDDIYLVSIPSLKTPVXX

SEQ ID NO: 18132 - protein, 36 aa, Artificial Sequence
  Non-cyclic GFR-binding peptide
  MOD_RES (32)..(33): Xaa is C or S
SRVVMNEYQKYIVNSSDDIYLVSIPSLKTPAXXPKP

SEQ ID NO: 18133 - protein, 39 aa, Artificial Sequence
  Non-cyclic GFR-binding peptide
  MOD_RES (2)..(4)..(38)..(39): Xaa is C or S
  MOD_RES (16)..(17)..(18)..(19)..(20): Xaa is A or G
  MOD_RES (21)..(22)..(23)..(24): Xaa is A or G or absent
RXGXAEVVMDRYKKLXXXXXXXXXFYLISIANLRAPVXX

SEQ ID NO: 18134 - protein, 34 aa, Artificial Sequence
  Non-cyclic GFR-binding peptide
  MOD_RES (1)..(3): Xaa is C or S
XGXAEVVMDRYKKLVVNNAADFYLISIANLRAPV

SEQ ID NO: 18135 - protein, 34 aa, Artificial Sequence
  Non-cyclic GFR-binding peptide
  MOD_RES (31)..(32): Xaa is C or S
RVVMNEYQKYIVNSSDDIYLVSIPSLKTPAXXPK

SEQ ID NO: 18136 - protein, 30 aa, Artificial Sequence
  Non-cyclic GFR-binding peptide
RVVMNEYQKYIVNSSDDIYLVSIPSLQTPA

SEQ ID NO: 18137 - protein, 40 aa, Artificial Sequence
  Non-cyclic GFR-binding peptide
  MOD_RES (2)..(34)..(35): Xaa is C or S
GXARVVMNEYKFKIVNSSDDLYLVSIPELQTPAXXPKPVT

SEQ ID NO: 18138 - protein, 42 aa, Artificial Sequence
  Non-cyclic GFR-binding peptide
  MOD_RES (2)..(4)..(37)..(38): Xaa is C or S
  MOD_RES (15)..(16)..(17)..(18)..(19): Xaa is A or G
  MOD_RES (20)..(21)..(22)..(23): Xaa is A or G or absent
SXKXSRVIMEYQKYXXXXXXXXXIYLISIPSLAQPVXXPAAS

SEQ ID NO: 18139 - protein, 34 aa, Artificial Sequence
  Non-cyclic GFR-binding peptide
  MOD_RES (32)..(32): Xaa is C or S
SRVVMNEYKFKIVNSSDDLYLVSIPELKTPAXTP

SEQ ID NO: 18140 - protein, 38 aa, Artificial Sequence
  Non-cyclic GFR-binding peptide
  MOD_RES (2)..(34): Xaa is C or S
GXSRVVMNEYQKYIVNSSDDIYLVSIPSLKTPAXTPKT

SEQ ID NO: 18141 - protein, 38 aa, Artificial Sequence
  Non-cyclic GFR-binding peptide
  MOD_RES (2)..(35)..(36): Xaa is C or S
  MOD_RES (13)..(14)..(15)..(16)..(17): Xaa is A or G
  MOD_RES (18)..(19)..(20)..(21): Xaa is A or G or absent
KXSKVVMEYQKYXXXXXXXXXIYLISIPSLDQPVXXPS

SEQ ID NO: 18142 - protein, 36 aa, Artificial Sequence
  Non-cyclic GFR-binding peptide
  MOD_RES (2)..(36): Xaa is C or S
  MOD_RES (14)..(15)..(16)..(17)..(18): Xaa is A or G
  MOD_RES (19)..(20)..(21)..(22): Xaa is A or G or absent
GXGEVVMEEYKFKXXXXXXXXXLYLMSIPELETPVX

SEQ ID NO: 18143 - protein, 40 aa, Artificial Sequence
  Non-cyclic GFR-binding peptide
  MOD_RES (2)..(4)..(35)..(36): Xaa is C or S
SXKXSKVVMEYKFKVKPTRGVLYLISIPELDQPVXXPSAS

SEQ ID NO: 18144 - protein, 37 aa, Artificial Sequence
  Non-cyclic GFR-binding peptide
  MOD_RES (31)..(32): Xaa is C or S
SKVIMEYQKYIKPTKGIIYLISIPSLDQSVXXPSASA

SEQ ID NO: 18145 - protein, 37 aa, Artificial Sequence
  Non-cyclic GFR-binding peptide
  MOD_RES (2)..(34)..(35): Xaa is C or S
GXGEVVMEEYKFKVVKDYEDLYLMSIPELETPVXXAK

SEQ ID NO: 18146 - protein, 34 aa, Artificial Sequence
  Non-cyclic GFR-binding peptide
  MOD_RES (1)..(34): Xaa is C or S
  MOD_RES (12)..(13)..(14)..(15)..(16): Xaa is A or G
  MOD_RES (17)..(18)..(19)..(20): Xaa is A or G or absent
XSRVIMEYQKYXXXXXXXXXIYLISIPSLAQPVX

SEQ ID NO: 18147 - protein, 40 aa, Artificial Sequence
  Non-cyclic GFR-binding peptide
  MOD_RES (2)..(3)..(38)..(40): Xaa is C or S
  MOD_RES (17)..(18)..(19)..(20)..(21): Xaa is A or G
  MOD_RES (22)..(23)..(24)..(25): Xaa is A or G or absent
AXXVPTKLSPISVLYIXXXXXXXXXYKQYEEGMSVAEXGX

SEQ ID NO: 18148 - protein, 36 aa, Artificial Sequence
  Non-cyclic GFR-binding peptide
  MOD_RES (1)..(35): Xaa is C or S
  MOD_RES (15)..(16)..(17)..(18)..(19): Xaa is A or G
  MOD_RES (20)..(21)..(22)..(23): Xaa is A or G or absent
XVPTKLSPISILYIXXXXXXXXXYKQYEGMAVSEXG

SEQ ID NO: 18149 - protein, 35 aa, Artificial Sequence
  Non-cyclic GFR-binding peptide
  MOD_RES (2)..(3)..(35): Xaa is C or S
AXXVPTELSPISMLYIDENEKVVYKQYEDMVVEGX

SEQ ID NO: 18150 - protein, 40 aa, Artificial Sequence
  Non-cyclic GFR-binding peptide
  MOD_RES (4)..(5)..(37)..(39): Xaa is C or S
PKAXXVPTELEPISMLYLDEYDKVVKFKYEEMVVEGXGXR

SEQ ID NO: 18151 - protein, 41 aa, Artificial Sequence
  Non-cyclic GFR-binding peptide
  MOD_RES (2)..(3)..(38)..(40): Xaa is C or S
  MOD_RES (17)..(18)..(19)..(20)..(21): Xaa is A or G
  MOD_RES (22)..(23)..(24)..(25): Xaa is A or G or absent
AXXVPTKLSPISVLYIXXXXXXXXXYKQYEEGMSVAEXGXR

SEQ ID NO: 18152 - protein, 32 aa, Artificial Sequence
  Non-cyclic GFR-binding peptide
  MOD_RES (1)..(2): Xaa is C or S
XXAPTKLSPISVLYIDSSNNVIYKQYENMVVK

SEQ ID NO: 18153 - protein, 40 aa, Artificial Sequence
  Non-cyclic GFR-binding peptide
  MOD_RES (1)..(2)..(37)..(39): Xaa is C or S
  MOD_RES (16)..(17)..(18)..(19)..(20): Xaa is A or G
  MOD_RES (21)..(22)..(23)..(24): Xaa is A or G or absent
XXVPTKLSPISVLYIXXXXXXXXXYKQYEEGMSVAEXGXR

SEQ ID NO: 18154 - protein, 33 aa, Artificial Sequence
  Non-cyclic GFR-binding peptide
  MOD_RES (2)..(3): Xaa is C or S
PXXVPQDLEPISILYLVGRTPKVKFKYEMVVKS

SEQ ID NO: 18155 - protein, 40 aa, Artificial Sequence
  Non-cyclic GFR-binding peptide
  MOD_RES (4)..(5)..(38)..(40): Xaa is C or S
  MOD_RES (19)..(20)..(21)..(22)..(23): Xaa is A or G
  MOD_RES (24)..(25)..(26)..(27): Xaa is A or G or absent
ASPXXVPQDLEPISILYLXXXXXXXXXKFKYEMVVKSXKX

SEQ ID NO: 18156 - protein, 33 aa, Artificial Sequence
  Non-cyclic GFR-binding peptide
  MOD_RES (33)..(33): Xaa is C or S
  MOD_RES (14)..(15)..(16)..(17)..(18): Xaa is A or G
  MOD_RES (19)..(20)..(21)..(22): Xaa is A or G or absent
VPQALSPISILYIXXXXXXXXXYKQYEMIVRSX

SEQ ID NO: 18157 - protein, 39 aa, Artificial Sequence
  Non-cyclic GFR-binding peptide
  MOD_RES (4)..(38): Xaa is C or S
  MOD_RES (18)..(19)..(20)..(21)..(22): Xaa is A or G
  MOD_RES (23)..(24)..(25)..(26): Xaa is A or G or absent
KPTXAPTKLSPISVLYIXXXXXXXXXYKQYENMVVRSXG

SEQ ID NO: 18158 - protein, 37 aa, Artificial Sequence
  Non-cyclic GFR-binding peptide
  MOD_RES (4)..(5)..(36): Xaa is C or S
ASPXXVSQDLEPISILYLIGKTPKIKFKYEMIVKSXK

SEQ ID NO: 18159 - protein, 40 aa, Artificial Sequence
  Non-cyclic GFR-binding peptide
  MOD_RES (4)..(5)..(37)..(39): Xaa is C or S
PKPXXAPTQLEPISVLYLDDSSNVIKFKYENMVVRAXGXH

SEQ ID NO: 18160 - protein, 36 aa, Artificial Sequence
  Non-cyclic GFR-binding peptide
  MOD_RES (3)..(4): Xaa is C or S
  MOD_RES (18)..(19)..(20)..(21)..(22): Xaa is A or G
  MOD_RES (23)..(24)..(25)..(26): Xaa is A or G or absent
KAXXAPTKLSPISVLYIXXXXXXXXXYKQYENMVVK

SEQ ID NO: 18161 - protein, 36 aa, Artificial Sequence
  Non-cyclic GFR-binding peptide
  MOD_RES (5)..(6): Xaa is C or S
IPKAXXVPTELSPISMLYIDEYDKVVYKQYEEMVVE

SEQ ID NO: 18162 - protein, 38 aa, Artificial Sequence
  Non-cyclic GFR-binding peptide
  MOD_RES (5)..(6): Xaa is C or S
  MOD_RES (20)..(21)..(22)..(23)..(24): Xaa is A or G
  MOD_RES (25)..(26)..(27)..(28): Xaa is A or G or absent
IPKAXXVPTELSPISMLYIXXXXXXXXXYKQYEEMVVE

SEQ ID NO: 18163 - protein, 34 aa, Artificial Sequence
  Non-cyclic GFR-binding peptide
  MOD_RES (1)..(2)..(34): Xaa is C or S
XXVPARLSPISILYKDAANNVVLKYHYDMVVEAX

SEQ ID NO: 18164 - protein, 35 aa, Artificial Sequence
  Non-cyclic GFR-binding peptide
  MOD_RES (1)..(35): Xaa is C or S
  MOD_RES (15)..(16)..(17)..(18)..(19): Xaa is A or G
  MOD_RES (20)..(21)..(22)..(23): Xaa is A or G or absent
XAPTQLEPISVLYLXXXXXXXXXKFKYENMVVRAX

SEQ ID NO: 18165 - protein, 35 aa, Artificial Sequence
  Non-cyclic GFR-binding peptide
  MOD_RES (2)..(3): Xaa is C or S
  MOD_RES (17)..(18)..(19)..(20)..(21): Xaa is A or G
  MOD_RES (22)..(23)..(24)..(25): Xaa is A or G or absent
SXXVPARLNAISILYFXXXXXXXXXLKKYRDMVVE

SEQ ID NO: 18166 - protein, 36 aa, Artificial Sequence
  Non-cyclic GFR-binding peptide
  MOD_RES (1)..(2)..(36): Xaa is C or S
  MOD_RES (16)..(17)..(18)..(19)..(20): Xaa is A or G
  MOD_RES (21)..(22)..(23)..(24): Xaa is A or G or absent
XXVPTKLSPISILYKXXXXXXXXXLKYHYGMAVSEX

SEQ ID NO: 18167 - protein, 35 aa, Artificial Sequence
  Non-cyclic GFR-binding peptide
  MOD_RES (1)..(33)..(35): Xaa is C or S
XVPTELEPISMLYLDEYDKVVKFKYEEMVVEGXGX

SEQ ID NO: 18168 - protein, 35 aa, Artificial Sequence
  Non-cyclic GFR-binding peptide
  MOD_RES (33)..(35): Xaa is C or S
  MOD_RES (14)..(15)..(16)..(17)..(18): Xaa is A or G
  MOD_RES (19)..(20)..(21)..(22): Xaa is A or G or absent
VPQDLEPISILYLXXXXXXXXXKFKYEMVVKSXKX

SEQ ID NO: 18169 - protein, 31 aa, Artificial Sequence
  Non-cyclic GFR-binding peptide
  MOD_RES (1)..(1): Xaa is C or S
XVPTKLNAISILYFDKGVVTYLKKYRGMAVS

SEQ ID NO: 18170 - protein, 40 aa, Artificial Sequence
  Non-cyclic GFR-binding peptide
  MOD_RES (5)..(6)..(40): Xaa is C or S
  MOD_RES (20)..(21)..(22)..(23)..(24): Xaa is A or G
  MOD_RES (25)..(26)..(27)..(28): Xaa is A or G or absent
ASKAXXVPTKLNAISILYFXXXXXXXXXLKKYRGMAVSEX

SEQ ID NO: 18171 - protein, 34 aa, Artificial Sequence
  Non-cyclic GFR-binding peptide
  MOD_RES (1)..(33): Xaa is C or S
XVPTELSPISMLYIDEYDKVVYKQYEEMVVEGXG

SEQ ID NO: 18172 - protein, 30 aa, Artificial Sequence
  Non-cyclic GFR-binding peptide
APTKLEPISVLYLDSSNNVIKFKYENMVVK

SEQ ID NO: 18173 - protein, 42 aa, Artificial Sequence
  Non-cyclic GFR-binding peptide
  MOD_RES (6)..(7)..(39)..(41): Xaa is C or S
AAPASXXVPARLEPISILYLDAANNVVKFKYEDMVVEAXGXR

SEQ ID NO: 18174 - protein, 37 aa, Artificial Sequence
  Non-cyclic GFR-binding peptide
  MOD_RES (3)..(4): Xaa is C or S
  MOD_RES (18)..(19)..(20)..(21)..(22): Xaa is A or G
  MOD_RES (23)..(24)..(25)..(26): Xaa is A or G or absent
KAXXVPTKLSPISILYIXXXXXXXXXYKQYEGMAVSE

SEQ ID NO: 18175 - protein, 36 aa, Artificial Sequence
  Non-cyclic GFR-binding peptide
  MOD_RES (5)..(6): Xaa is C or S
SASPXXVPQDLSPISILYIVGRTPKVYKQYEMVVKS

SEQ ID NO: 18176 - protein, 35 aa, Artificial Sequence
  Non-cyclic GFR-binding peptide
  MOD_RES (1)..(2): Xaa is C or S
  MOD_RES (16)..(17)..(18)..(19)..(20): Xaa is A or G
  MOD_RES (21)..(22)..(23)..(24): Xaa is A or G or absent
XXVPTELEPISMLYLXXXXXXXXXKFKYEDMVVEG

SEQ ID NO: 18177 - protein, 40 aa, Artificial Sequence
  Non-cyclic GFR-binding peptide
  MOD_RES (5)..(6): Xaa is C or S
  MOD_RES (20)..(21)..(22)..(23)..(24): Xaa is A or G
  MOD_RES (25)..(26)..(27)..(28): Xaa is A or G or absent
VGKAXXVPTKLEPISVLYLXXXXXXXXXKFKYEEGMSVAE

SEQ ID NO: 18178 - protein, 38 aa, Artificial Sequence
  Non-cyclic GFR-binding peptide
  MOD_RES (3)..(35)..(37): Xaa is C or S
PTXAPTKLSPISVLYIDDSSNVIYKQYENMVVRSXGXH

SEQ ID NO: 18179 - protein, 37 aa, Artificial Sequence
  Non-cyclic GFR-binding peptide
  MOD_RES (6)..(7): Xaa is C or S
ASAAPXXVPQALSPISILYIVGRKPKVYKQYEMIVRS

SEQ ID NO: 18180 - protein, 38 aa, Artificial Sequence
  Non-cyclic GFR-binding peptide
  MOD_RES (1)..(35)..(37): Xaa is C or S
  MOD_RES (15)..(16)..(17)..(18)..(19): Xaa is A or G
  MOD_RES (20)..(21)..(22)..(23): Xaa is A or G or absent
XAPTQLSPISVLYIXXXXXXXXXYKQYENMVVRAXGXH

SEQ ID NO: 18181 - protein, 41 aa, Artificial Sequence
  Non-cyclic GFR-binding peptide
  MOD_RES (6)..(7)..(39)..(41): Xaa is C or S
YVPKPXXAPTKLSPISVLYIDDSSNVIYKQYENMVVRSXGX

SEQ ID NO: 18182 - protein, 32 aa, Artificial Sequence
  Non-cyclic GFR-binding peptide
  MOD_RES (1)..(32): Xaa is C or S
XVPQDLSPISILYIVGRTPKVYKQYEMVVKSX

SEQ ID NO: 18183 - protein, 40 aa, Artificial Sequence
  Non-cyclic GFR-binding peptide
  MOD_RES (5)..(6)..(38)..(40): Xaa is C or S
VPKPXXAPTKLEPISVLYLDDSSNVIKFKYENMVVRSXGX

SEQ ID NO: 18184 - protein, 37 aa, Artificial Sequence
  Non-cyclic GFR-binding peptide
  MOD_RES (4)..(5)..(37): Xaa is C or S
SKAXXVPTKLNAISILYFDKGVVTYLKKYRGMAVSEX

SEQ ID NO: 18185 - protein, 43 aa, Artificial Sequence
  Non-cyclic GFR-binding peptide
  MOD_RES (5)..(6)..(40)..(42): Xaa is C or S
  MOD_RES (20)..(21)..(22)..(23)..(24): Xaa is A or G
  MOD_RES (25)..(26)..(27)..(28): Xaa is A or G or absent
VPKPXXAPTQLEPISVLYLXXXXXXXXXKFKYENMVVRAXGXH

SEQ ID NO: 18186 - protein, 42 aa, Artificial Sequence
  Non-cyclic GFR-binding peptide
  MOD_RES (6)..(7)..(39)..(41): Xaa is C or S
AAPASXXVPARLSPISILYKDAANNVVLKYHYDMVVEAXGXR

SEQ ID NO: 18187 - protein, 37 aa, Artificial Sequence
  Non-cyclic GFR-binding peptide
  MOD_RES (2)..(3)..(36): Xaa is C or S
  MOD_RES (17)..(18)..(19)..(20)..(21): Xaa is A or G
  MOD_RES (22)..(23)..(24)..(25): Xaa is A or G or absent
PXXVPQDLEPISILYLXXXXXXXXXKFKYEMVVKSXK

SEQ ID NO: 18188 - protein, 41 aa, Artificial Sequence
  Non-cyclic GFR-binding peptide
  MOD_RES (6)..(7)..(39)..(41): Xaa is C or S
KIPKAXXVPTELSPISMLYIDENEKVVYKQYEDMVVEGXGX

SEQ ID NO: 18189 - protein, 37 aa, Artificial Sequence
  Non-cyclic GFR-binding peptide
  MOD_RES (3)..(4)..(36): Xaa is C or S
ASXXVPARLEPISILYLDAANNVVKFKYEDMVVEAXG

SEQ ID NO: 18190 - protein, 36 aa, Artificial Sequence
  Non-cyclic GFR-binding peptide
  MOD_RES (1)..(35): Xaa is C or S
  MOD_RES (15)..(16)..(17)..(18)..(19): Xaa is A or G
  MOD_RES (20)..(21)..(22)..(23): Xaa is A or G or absent
XAPTKLSPISVLYIXXXXXXXXXYKQYENMVVRSXG

SEQ ID NO: 18191 - protein, 42 aa, Artificial Sequence
  Non-cyclic GFR-binding peptide
  MOD_RES (6)..(7)..(41): Xaa is C or S
  MOD_RES (21)..(22)..(23)..(24)..(25): Xaa is A or G
  MOD_RES (26)..(27)..(28)..(29): Xaa is A or G or absent
AVPKAXXAPTKLSPISVLYIXXXXXXXXXYKQYENMVVKAXG

SEQ ID NO: 18192 - protein, 36 aa, Artificial Sequence
  Non-cyclic GFR-binding peptide
  MOD_RES (6)..(6): Xaa is C or S
VTKPTXAPTKLSPISVLYIDDSSNVIYKQYENMVVR

SEQ ID NO: 18193 - protein, 37 aa, Artificial Sequence
  Non-cyclic GFR-binding peptide
  MOD_RES (4)..(5)..(37): Xaa is C or S
PKAXXVPTELEPISMLYLDENEKVVKFKYEDMVVEGX

SEQ ID NO: 18194 - protein, 36 aa, Artificial Sequence
  Non-cyclic GFR-binding peptide
  MOD_RES (1)..(34)..(36): Xaa is C or S
  MOD_RES (15)..(16)..(17)..(18)..(19): Xaa is A or G
  MOD_RES (20)..(21)..(22)..(23): Xaa is A or G or absent
XVPQDLEPISILYLXXXXXXXXXKFKYEMVVKSXKX

SEQ ID NO: 18195 - protein, 36 aa, Artificial Sequence
  Non-cyclic GFR-binding peptide
  MOD_RES (2)..(3): Xaa is C or S
  MOD_RES (17)..(18)..(19)..(20)..(21): Xaa is A or G
  MOD_RES (22)..(23)..(24)..(25): Xaa is A or G or absent
PXXAPTKLEPISVLYLXXXXXXXXXKFKYENMVVRS

SEQ ID NO: 18196 - protein, 35 aa, Artificial Sequence
  Non-cyclic GFR-binding peptide
  MOD_RES (3)..(4)..(35): Xaa is C or S
SPXXVPQDLEPISILYLVGRTPKVKFKYEMVVKSX

SEQ ID NO: 18197 - protein, 36 aa, Artificial Sequence
  Non-cyclic GFR-binding peptide
  MOD_RES (1)..(2)..(36): Xaa is C or S
  MOD_RES (16)..(17)..(18)..(19)..(20): Xaa is A or G
  MOD_RES (21)..(22)..(23)..(24): Xaa is A or G or absent
XXAPTQLEPISVLYLXXXXXXXXXKFKYENMVVRAX

SEQ ID NO: 18198 - protein, 41 aa, Artificial Sequence
  Non-cyclic GFR-binding peptide
  MOD_RES (5)..(6)..(38)..(40): Xaa is C or S
VPKAXXAPTKLEPISVLYLDSSNNVIKFKYENMVVKAXGXH

SEQ ID NO: 18199 - protein, 39 aa, Artificial Sequence
  Non-cyclic GFR-binding peptide
  MOD_RES (6)..(7): Xaa is C or S
  MOD_RES (21)..(22)..(23)..(24)..(25): Xaa is A or G
  MOD_RES (26)..(27)..(28)..(29): Xaa is A or G or absent
AAPASXXVPARLEPISILYLXXXXXXXXXKFKYEDMVVE

SEQ ID NO: 18200 - protein, 33 aa, Artificial Sequence
  Non-cyclic GFR-binding peptide
  MOD_RES (1)..(33): Xaa is C or S
XAPTKLEPISVLYLDDSSNVIKFKYENMVVRSX

SEQ ID NO: 18201 - protein, 36 aa, Artificial Sequence
  Non-cyclic GFR-binding peptide
  MOD_RES (1)..(2)..(33)..(35): Xaa is C or S
XXVSQDLEPISILYLIGKTPKIKFKYEMIVKSXKXS

SEQ ID NO: 18202 - protein, 33 aa, Artificial Sequence
  Non-cyclic GFR-binding peptide
  MOD_RES (32)..(32): Xaa is C or S
VPTKLSPISILYIDKGVVTYYKQYEGMAVSEXG

SEQ ID NO: 18203 - protein, 38 aa, Artificial Sequence
  Non-cyclic GFR-binding peptide
  MOD_RES (6)..(7): Xaa is C or S
KIPKAXXVPTELEPISMLYLDENEKVVKFKYEDMVVEG

SEQ ID NO: 18204 - protein, 38 aa, Artificial Sequence
  Non-cyclic GFR-binding peptide
  MOD_RES (4)..(5): Xaa is C or S
  MOD_RES (19)..(20)..(21)..(22)..(23): Xaa is A or G
  MOD_RES (24)..(25)..(26)..(27): Xaa is A or G or absent
PKAXXAPTKLEPISVLYLXXXXXXXXXKFKYENMVVKA

SEQ ID NO: 18205 - protein, 38 aa, Artificial Sequence
  Non-cyclic GFR-binding peptide
  MOD_RES (3)..(4)..(36)..(38): Xaa is C or S
KAXXVPTELEPISMLYLDENEKVVKFKYEDMVVEGXGX

SEQ ID NO: 18206 - protein, 39 aa, Artificial Sequence
  Non-cyclic GFR-binding peptide
  MOD_RES (3)..(4)..(36)..(38): Xaa is C or S
KPXXAPTKLSPISVLYIDDSSNVIYKQYENMVVRSXGXH

SEQ ID NO: 18207 - protein, 41 aa, Artificial Sequence
  Non-cyclic GFR-binding peptide
  MOD_RES (6)..(7)..(39)..(41): Xaa is C or S
KASKAXXVPTKLSPISILYKDKGVVTYLKYHYGMAVSEXGX

SEQ ID NO: 18208 - protein, 44 aa, Artificial Sequence
  Non-cyclic GFR-binding peptide
  MOD_RES (6)..(7)..(42)..(44): Xaa is C or S
  MOD_RES (21)..(22)..(23)..(24)..(25): Xaa is A or G
  MOD_RES (26)..(27)..(28)..(29): Xaa is A or G or absent
KVGKAXXVPTKLEPISVLYLXXXXXXXXXKFKYEEGMSVAEXGX

SEQ ID NO: 18209 - protein, 35 aa, Artificial Sequence
  Non-cyclic GFR-binding peptide
  MOD_RES (1)..(33)..(35): Xaa is C or S
XAPTKLEPISVLYLDSSNNVIKFKYENMVVKAXGX

SEQ ID NO: 18210 - protein, 36 aa, Artificial Sequence
  Non-cyclic GFR-binding peptide
  MOD_RES (3)..(4): Xaa is C or S
  MOD_RES (18)..(19)..(20)..(21)..(22): Xaa is A or G
  MOD_RES (23)..(24)..(25)..(26): Xaa is A or G or absent
KAXXVPTELEPISMLYLXXXXXXXXXKFKYEEMVVE

SEQ ID NO: 18211 - protein, 36 aa, Artificial Sequence
  Non-cyclic GFR-binding peptide
  MOD_RES (3)..(4): Xaa is C or S
  MOD_RES (18)..(19)..(20)..(21)..(22): Xaa is A or G
  MOD_RES (23)..(24)..(25)..(26): Xaa is A or G or absent
APXXVPQALSPISILYIXXXXXXXXXYKQYEMIVRS

SEQ ID NO: 18212 - protein, 39 aa, Artificial Sequence
  Non-cyclic GFR-binding peptide
  MOD_RES (4)..(5)..(39): Xaa is C or S
  MOD_RES (19)..(20)..(21)..(22)..(23): Xaa is A or G
  MOD_RES (24)..(25)..(26)..(27): Xaa is A or G or absent
PKPXXAPTQLSPISVLYIXXXXXXXXXYKQYENMVVRAX

SEQ ID NO: 18213 - protein, 34 aa, Artificial Sequence
  Non-cyclic GFR-binding peptide
  MOD_RES (32)..(34): Xaa is C or S
VPTKLSPISILYIDKGVVTYYKQYEGMAVSEXGX

SEQ ID NO: 18214 - protein, 35 aa, Artificial Sequence
  Non-cyclic GFR-binding peptide
  MOD_RES (1)..(2)..(35): Xaa is C or S
  MOD_RES (16)..(17)..(18)..(19)..(20): Xaa is A or G
  MOD_RES (21)..(22)..(23)..(24): Xaa is A or G or absent
XXVPQDLSPISILYIXXXXXXXXXYKQYEMVVKSX

SEQ ID NO: 18215 - protein, 36 aa, Artificial Sequence
  Non-cyclic GFR-binding peptide
  MOD_RES (2)..(3)..(35): Xaa is C or S
AXXVPTELSPISMLYIDENEKVVYKQYEDMVVEGXG

SEQ ID NO: 18216 - protein, 38 aa, Artificial Sequence
  Non-cyclic GFR-binding peptide
  MOD_RES (4)..(5)..(38): Xaa is C or S
  MOD_RES (19)..(20)..(21)..(22)..(23): Xaa is A or G
  MOD_RES (24)..(25)..(26)..(27): Xaa is A or G or absent
AAPXXVPQALSPISILYIXXXXXXXXXYKQYEMIVRSX

SEQ ID NO: 18217 - protein, 39 aa, Artificial Sequence
  Non-cyclic GFR-binding peptide
  MOD_RES (4)..(5)..(38): Xaa is C or S
  MOD_RES (19)..(20)..(21)..(22)..(23): Xaa is A or G
  MOD_RES (24)..(25)..(26)..(27): Xaa is A or G or absent
AAPXXVPQALSPISILYIXXXXXXXXXYKQYEMIVRSXK

SEQ ID NO: 18218 - protein, 31 aa, Artificial Sequence
  Non-cyclic GFR-binding peptide
APTKLSPISVLYIDDSSNVIYKQYENMVVRS

SEQ ID NO: 18219 - protein, 42 aa, Artificial Sequence
  Non-cyclic GFR-binding peptide
  MOD_RES (5)..(6)..(40)..(42): Xaa is C or S
  MOD_RES (20)..(21)..(22)..(23)..(24): Xaa is A or G
  MOD_RES (25)..(26)..(27)..(28): Xaa is A or G or absent
APASXXVPARLEPISILYLXXXXXXXXXKFKYEDMVVEAXGX

SEQ ID NO: 18220 - protein, 35 aa, Artificial Sequence
  Non-cyclic GFR-binding peptide
  MOD_RES (1)..(35): Xaa is C or S
  MOD_RES (15)..(16)..(17)..(18)..(19): Xaa is A or G
  MOD_RES (20)..(21)..(22)..(23): Xaa is A or G or absent
XVPTKLSPISILYIXXXXXXXXXYKQYEGMAVSEX

SEQ ID NO: 18221 - protein, 40 aa, Artificial Sequence
  Non-cyclic GFR-binding peptide
  MOD_RES (5)..(6)..(38)..(40): Xaa is C or S
IPKAXXVPTELEPISMLYLDEYDKVVKFKYEEMVVEGXGX

SEQ ID NO: 18222 - protein, 38 aa, Artificial Sequence
  Non-cyclic GFR-binding peptide
  MOD_RES (1)..(2)..(35)..(37): Xaa is C or S
  MOD_RES (16)..(17)..(18)..(19)..(20): Xaa is A or G
  MOD_RES (21)..(22)..(23)..(24): Xaa is A or G or absent
XXVSQDLEPISILYLXXXXXXXXXKFKYEMIVKSXKXS

SEQ ID NO: 18223 - protein, 34 aa, Artificial Sequence
  Non-cyclic GFR-binding peptide
  MOD_RES (3)..(4): Xaa is C or S
KAXXVPTELSPISMLYIDENEKVVYKQYEDMVVE

SEQ ID NO: 18224 - protein, 37 aa, Artificial Sequence
  Non-cyclic GFR-binding peptide
  MOD_RES (3)..(4)..(36): Xaa is C or S
ASXXVPARLNAISILYFDAANNVVLKKYRDMVVEAXG

SEQ ID NO: 18225 - protein, 37 aa, Artificial Sequence
  Non-cyclic GFR-binding peptide
  MOD_RES (1)..(2)..(34)..(36): Xaa is C or S
XXVPARLSPISILYKDAANNVVLKYHYDMVVEAXGXR

SEQ ID NO: 18226 - protein, 38 aa, Artificial Sequence
  Non-cyclic GFR-binding peptide
  MOD_RES (4)..(5)..(37): Xaa is C or S
PASXXVPARLNAISILYFDAANNVVLKKYRDMVVEAXG

SEQ ID NO: 18227 - protein, 40 aa, Artificial Sequence
  Non-cyclic GFR-binding peptide
  MOD_RES (5)..(39): Xaa is C or S
  MOD_RES (19)..(20)..(21)..(22)..(23): Xaa is A or G
  MOD_RES (24)..(25)..(26)..(27): Xaa is A or G or absent
TKPTXAPTKLSPISVLYIXXXXXXXXXYKQYENMVVRSXG

SEQ ID NO: 18228 - protein, 41 aa, Artificial Sequence
  Non-cyclic GFR-binding peptide
  MOD_RES (5)..(6)..(38)..(40): Xaa is C or S
IPKAXXVPTELEPISMLYLDEYDKVVKFKYEEMVVEGXGXR

SEQ ID NO: 18229 - protein, 41 aa, Artificial Sequence
  Non-cyclic GFR-binding peptide
  MOD_RES (5)..(6)..(39)..(41): Xaa is C or S
  MOD_RES (20)..(21)..(22)..(23)..(24): Xaa is A or G
  MOD_RES (25)..(26)..(27)..(28): Xaa is A or G or absent
SAAPXXVPQALEPISILYLXXXXXXXXXKFKYEMIVRSXKX

SEQ ID NO: 18230 - protein, 37 aa, Artificial Sequence
  Non-cyclic GFR-binding peptide
  MOD_RES (3)..(4): Xaa is C or S
  MOD_RES (18)..(19)..(20)..(21)..(22): Xaa is A or G
  MOD_RES (23)..(24)..(25)..(26): Xaa is A or G or absent
KPXXAPTKLSPISVLYIXXXXXXXXXYKQYENMVVRS

SEQ ID NO: 18231 - protein, 42 aa, Artificial Sequence
  Non-cyclic GFR-binding peptide
  MOD_RES (6)..(7)..(39)..(41): Xaa is C or S
KASKAXXVPTKLSPISILYIDKGVVTYYKQYEGMAVSEXGXR

SEQ ID NO: 18232 - protein, 38 aa, Artificial Sequence
  Non-cyclic GFR-binding peptide
  MOD_RES (3)..(4)..(36)..(38): Xaa is C or S
KPXXAPTKLSPISVLYIDDSSNVIYKQYENMVVRSXGX

SEQ ID NO: 18233 - protein, 35 aa, Artificial Sequence
  Non-cyclic GFR-binding peptide
  MOD_RES (1)..(34): Xaa is C or S
  MOD_RES (15)..(16)..(17)..(18)..(19): Xaa is A or G
  MOD_RES (20)..(21)..(22)..(23): Xaa is A or G or absent
XVPQALEPISILYLXXXXXXXXXKFKYEMIVRSXK

SEQ ID NO: 18234 - protein, 40 aa, Artificial Sequence
  Non-cyclic GFR-binding peptide
  MOD_RES (4)..(5)..(39): Xaa is C or S
  MOD_RES (19)..(20)..(21)..(22)..(23): Xaa is A or G
  MOD_RES (24)..(25)..(26)..(27): Xaa is A or G or absent
PASXXVPARLEPISILYLXXXXXXXXXKFKYEDMVVEAXG

SEQ ID NO: 18235 - protein, 33 aa, Artificial Sequence
  Non-cyclic GFR-binding peptide
  MOD_RES (2)..(3): Xaa is C or S
AXXVPTKLNAISILYFDKGVVTYLKKYRGMAVS

SEQ ID NO: 18236 - protein, 32 aa, Artificial Sequence
  Non-cyclic GFR-binding peptide
  MOD_RES (14)..(15)..(16)..(17)..(18): Xaa is A or G
  MOD_RES (19)..(20)..(21)..(22): Xaa is A or G or absent
VPTELSPISMLYIXXXXXXXXXYKQYEEMVVE

SEQ ID NO: 18237 - protein, 43 aa, Artificial Sequence
  Non-cyclic GFR-binding peptide
  MOD_RES (6)..(7)..(41)..(43): Xaa is C or S
  MOD_RES (21)..(22)..(23)..(24)..(25): Xaa is A or G
  MOD_RES (26)..(27)..(28)..(29): Xaa is A or G or absent
YVPKPXXAPTKLEPISVLYLXXXXXXXXXKFKYENMVVRSXGX

SEQ ID NO: 18238 - protein, 38 aa, Artificial Sequence
  Non-cyclic GFR-binding peptide
  MOD_RES (3)..(4)..(38): Xaa is C or S
  MOD_RES (18)..(19)..(20)..(21)..(22): Xaa is A or G
  MOD_RES (23)..(24)..(25)..(26): Xaa is A or G or absent
ASXXVPARLSPISILYKXXXXXXXXXLKYHYDMVVEAX

SEQ ID NO: 18239 - protein, 37 aa, Artificial Sequence
  Non-cyclic GFR-binding peptide
  MOD_RES (4)..(5): Xaa is C or S
  MOD_RES (19)..(20)..(21)..(22)..(23): Xaa is A or G
  MOD_RES (24)..(25)..(26)..(27): Xaa is A or G or absent
PASXXVPARLEPISILYLXXXXXXXXXKFKYEDMVVE

SEQ ID NO: 18240 - protein, 36 aa, Artificial Sequence
  Non-cyclic GFR-binding peptide
  MOD_RES (1)..(35): Xaa is C or S
  MOD_RES (15)..(16)..(17)..(18)..(19): Xaa is A or G
  MOD_RES (20)..(21)..(22)..(23): Xaa is A or G or absent
XAPTKLEPISVLYLXXXXXXXXXKFKYENMVVKAXG

SEQ ID NO: 18241 - protein, 35 aa, Artificial Sequence
  Non-cyclic GFR-binding peptide
  MOD_RES (1)..(2)..(34): Xaa is C or S
XXVPTKLSPISILYKDKGVVTYLKYHYGMAVSEXG

SEQ ID NO: 18242 - protein, 37 aa, Artificial Sequence
  Non-cyclic GFR-binding peptide
  MOD_RES (2)..(36): Xaa is C or S
  MOD_RES (16)..(17)..(18)..(19)..(20): Xaa is A or G
  MOD_RES (21)..(22)..(23)..(24): Xaa is A or G or absent
TXAPTKLEPISVLYLXXXXXXXXXKFKYENMVVRSXG

SEQ ID NO: 18243 - protein, 41 aa, Artificial Sequence
  Non-cyclic GFR-binding peptide
  MOD_RES (5)..(6)..(38)..(40): Xaa is C or S
VPKPXXAPTQLSPISVLYIDDSSNVIYKQYENMVVRAXGXH

SEQ ID NO: 18244 - protein, 41 aa, Artificial Sequence
  Non-cyclic GFR-binding peptide
  MOD_RES (5)..(6)..(40): Xaa is C or S
  MOD_RES (20)..(21)..(22)..(23)..(24): Xaa is A or G
  MOD_RES (25)..(26)..(27)..(28): Xaa is A or G or absent
VPKAXXAPTKLSPISVLYIXXXXXXXXXYKQYENMVVKAXG

SEQ ID NO: 18245 - protein, 36 aa, Artificial Sequence
  Non-cyclic GFR-binding peptide
  MOD_RES (3)..(4): Xaa is C or S
  MOD_RES (18)..(19)..(20)..(21)..(22): Xaa is A or G
  MOD_RES (23)..(24)..(25)..(26): Xaa is A or G or absent
KPXXAPTQLSPISVLYIXXXXXXXXXYKQYENMVVR

SEQ ID NO: 18246 - protein, 35 aa, Artificial Sequence
  Non-cyclic GFR-binding peptide
  MOD_RES (2)..(3): Xaa is C or S
  MOD_RES (17)..(18)..(19)..(20)..(21): Xaa is A or G
  MOD_RES (22)..(23)..(24)..(25): Xaa is A or G or absent
AXXAPTKLSPISVLYIXXXXXXXXXYKQYENMVVK

SEQ ID NO: 18247 - protein, 37 aa, Artificial Sequence
  Non-cyclic GFR-binding peptide
  MOD_RES (3)..(35)..(37): Xaa is C or S
PTXAPTKLEPISVLYLDDSSNVIKFKYENMVVRSXGX

SEQ ID NO: 18248 - protein, 33 aa, Artificial Sequence
  Non-cyclic GFR-binding peptide
  MOD_RES (14)..(15)..(16)..(17)..(18): Xaa is A or G
  MOD_RES (19)..(20)..(21)..(22): Xaa is A or G or absent
VPTKLSPISILYIXXXXXXXXXYKQYEGMAVSE

SEQ ID NO: 18249 - protein, 40 aa, Artificial Sequence
  Non-cyclic GFR-binding peptide
  MOD_RES (4)..(5)..(38)..(40): Xaa is C or S
  MOD_RES (19)..(20)..(21)..(22)..(23): Xaa is A or G
  MOD_RES (24)..(25)..(26)..(27): Xaa is A or G or absent
AAPXXVPQALSPISILYIXXXXXXXXXYKQYEMIVRSXKX

SEQ ID NO: 18250 - protein, 41 aa, Artificial Sequence
  Non-cyclic GFR-binding peptide
  MOD_RES (4)..(5)..(39)..(41): Xaa is C or S
  MOD_RES (19)..(20)..(21)..(22)..(23): Xaa is A or G
  MOD_RES (24)..(25)..(26)..(27): Xaa is A or G or absent
SKAXXVPTKLNAISILYFXXXXXXXXXLKKYRGMAVSEXGX

SEQ ID NO: 18251 - protein, 39 aa, Artificial Sequence
  Non-cyclic GFR-binding peptide
  MOD_RES (3)..(4)..(37)..(39): Xaa is C or S
KAXXVPTKLSPISVLYIDDMGVPTYKQYEEGMSVAEXGX

SEQ ID NO: 18252 - protein, 40 aa, Artificial Sequence
  Non-cyclic GFR-binding peptide
  MOD_RES (5)..(6)..(40): Xaa is C or S
  MOD_RES (20)..(21)..(22)..(23)..(24): Xaa is A or G
  MOD_RES (25)..(26)..(27)..(28): Xaa is A or G or absent
IPKAXXVPTELEPISMLYLXXXXXXXXXKFKYEDMVVEGX

SEQ ID NO: 18253 - protein, 39 aa, Artificial Sequence
  Non-cyclic GFR-binding peptide
  MOD_RES (6)..(7): Xaa is C or S
  MOD_RES (21)..(22)..(23)..(24)..(25): Xaa is A or G
  MOD_RES (26)..(27)..(28)..(29): Xaa is A or G or absent
TVPKPXXAPTQLEPISVLYLXXXXXXXXXKFKYENMVVR

SEQ ID NO: 18254 - protein, 42 aa, Artificial Sequence
  Non-cyclic GFR-binding peptide
  MOD_RES (5)..(6)..(40)..(42): Xaa is C or S
  MOD_RES (20)..(21)..(22)..(23)..(24): Xaa is A or G
  MOD_RES (25)..(26)..(27)..(28): Xaa is A or G or absent
ASKAXXVPTKLNAISILYFXXXXXXXXXLKKYRGMAVSEXGX

SEQ ID NO: 18255 - protein, 42 aa, Artificial Sequence
  Non-cyclic GFR-binding peptide
  MOD_RES (6)..(7)..(41): Xaa is C or S
  MOD_RES (21)..(22)..(23)..(24)..(25): Xaa is A or G
  MOD_RES (26)..(27)..(28)..(29): Xaa is A or G or absent
KIPKAXXVPTELEPISMLYLXXXXXXXXXKFKYEDMVVEGXG

SEQ ID NO: 18256 - protein, 37 aa, Artificial Sequence
  Non-cyclic GFR-binding peptide
  MOD_RES (1)..(35)..(37): Xaa is C or S
  MOD_RES (15)..(16)..(17)..(18)..(19): Xaa is A or G
  MOD_RES (20)..(21)..(22)..(23): Xaa is A or G or absent
XVPTKLNAISILYFXXXXXXXXXLKKYRGMAVSEXGX

SEQ ID NO: 18257 - protein, 40 aa, Artificial Sequence
  Non-cyclic GFR-binding peptide
  MOD_RES (3)..(4)..(38)..(40): Xaa is C or S
  MOD_RES (18)..(19)..(20)..(21)..(22): Xaa is A or G
  MOD_RES (23)..(24)..(25)..(26): Xaa is A or G or absent
ASXXVPARLNAISILYFXXXXXXXXXLKKYRDMVVEAXGX

SEQ ID NO: 18258 - protein, 35 aa, Artificial Sequence
  Non-cyclic GFR-binding peptide
  MOD_RES (34)..(34): Xaa is C or S
  MOD_RES (14)..(15)..(16)..(17)..(18): Xaa is A or G
  MOD_RES (19)..(20)..(21)..(22): Xaa is A or G or absent
VPTELSPISMLYIXXXXXXXXXYKQYEEMVVEGXG

SEQ ID NO: 18259 - protein, 35 aa, Artificial Sequence
  Non-cyclic GFR-binding peptide
  MOD_RES (2)..(34): Xaa is C or S
TXAPTKLSPISVLYIDDSSNVIYKQYENMVVRSXG

SEQ ID NO: 18260 - protein, 38 aa, Artificial Sequence
  Non-cyclic GFR-binding peptide
  MOD_RES (2)..(3)..(37): Xaa is C or S
  MOD_RES (17)..(18)..(19)..(20)..(21): Xaa is A or G
  MOD_RES (22)..(23)..(24)..(25): Xaa is A or G or absent
AXXVPTKLSPISILYKXXXXXXXXXLKYHYGMAVSEXG

SEQ ID NO: 18261 - protein, 35 aa, Artificial Sequence
  Non-cyclic GFR-binding peptide
  MOD_RES (1)..(35): Xaa is C or S
  MOD_RES (15)..(16)..(17)..(18)..(19): Xaa is A or G
  MOD_RES (20)..(21)..(22)..(23): Xaa is A or G or absent
XVPTKLSPISILYKXXXXXXXXXLKYHYGMAVSEX

SEQ ID NO: 18262 - protein, 39 aa, Artificial Sequence
  Non-cyclic GFR-binding peptide
  MOD_RES (2)..(3)..(37)..(39): Xaa is C or S
  MOD_RES (17)..(18)..(19)..(20)..(21): Xaa is A or G
  MOD_RES (22)..(23)..(24)..(25): Xaa is A or G or absent
AXXVPTELEPISMLYLXXXXXXXXXKFKYEDMVVEGXGX

SEQ ID NO: 18263 - protein, 40 aa, Artificial Sequence
  Non-cyclic GFR-binding peptide
  MOD_RES (4)..(5)..(38)..(40): Xaa is C or S
  MOD_RES (19)..(20)..(21)..(22)..(23): Xaa is A or G
  MOD_RES (24)..(25)..(26)..(27): Xaa is A or G or absent
ASPXXVSQDLSPISILYIXXXXXXXXXYKQYEMIVKSXKX

SEQ ID NO: 18264 - protein, 33 aa, Artificial Sequence
  Non-cyclic GFR-binding peptide
  MOD_RES (32)..(32): Xaa is C or S
VPTELEPISMLYLDENEKVVKFKYEDMVVEGXG

SEQ ID NO: 18265 - protein, 38 aa, Artificial Sequence
  Non-cyclic GFR-binding peptide
  MOD_RES (3)..(4)..(37): Xaa is C or S
  MOD_RES (18)..(19)..(20)..(21)..(22): Xaa is A or G
  MOD_RES (23)..(24)..(25)..(26): Xaa is A or G or absent
SPXXVSQDLSPISILYIXXXXXXXXXYKQYEMIVKSXK

SEQ ID NO: 18266 - protein, 37 aa, Artificial Sequence
  Non-cyclic GFR-binding peptide
  MOD_RES (6)..(7): Xaa is C or S
ASASPXXVPQDLSPISILYIVGRTPKVYKQYEMVVKS

SEQ ID NO: 18267 - protein, 39 aa, Artificial Sequence
  Non-cyclic GFR-binding peptide
  MOD_RES (1)..(2)..(36)..(38): Xaa is C or S
  MOD_RES (16)..(17)..(18)..(19)..(20): Xaa is A or G
  MOD_RES (21)..(22)..(23)..(24): Xaa is A or G or absent
XXVPARLSPISILYKXXXXXXXXXLKYHYDMVVEAXGXR

SEQ ID NO: 18268 - protein, 32 aa, Artificial Sequence
  Non-cyclic GFR-binding peptide
  MOD_RES (1)..(2): Xaa is C or S
XXAPTKLSPISVLYIDDSSNVIYKQYENMVVR

SEQ ID NO: 18269 - protein, 30 aa, Artificial Sequence
  Non-cyclic GFR-binding peptide
APTKLEPISVLYLDDSSNVIKFKYENMVVR

SEQ ID NO: 18270 - protein, 43 aa, Artificial Sequence
  Non-cyclic GFR-binding peptide
  MOD_RES (6)..(7)..(41)..(43): Xaa is C or S
  MOD_RES (21)..(22)..(23)..(24)..(25): Xaa is A or G
  MOD_RES (26)..(27)..(28)..(29): Xaa is A or G or absent
YVPKPXXAPTKLSPISVLYIXXXXXXXXXYKQYENMVVRSXGX

SEQ ID NO: 18271 - protein, 38 aa, Artificial Sequence
  Non-cyclic GFR-binding peptide
  MOD_RES (1)..(2)..(35)..(37): Xaa is C or S
  MOD_RES (16)..(17)..(18)..(19)..(20): Xaa is A or G
  MOD_RES (21)..(22)..(23)..(24): Xaa is A or G or absent
XXVSQDLSPISILYIXXXXXXXXXYKQYEMIVKSXKXS

SEQ ID NO: 18272 - protein, 39 aa, Artificial Sequence
  Non-cyclic GFR-binding peptide
  MOD_RES (4)..(5)..(37)..(39): Xaa is C or S
SKAXXVPTKLSPISILYIDKGVVTYYKQYEGMAVSEXGX

SEQ ID NO: 18273 - protein, 40 aa, Artificial Sequence
  Non-cyclic GFR-binding peptide
  MOD_RES (5)..(6): Xaa is C or S
  MOD_RES (20)..(21)..(22)..(23)..(24): Xaa is A or G
  MOD_RES (25)..(26)..(27)..(28): Xaa is A or G or absent
VGKAXXVPTKLSPISVLYIXXXXXXXXXYKQYEEGMSVAE

SEQ ID NO: 18274 - protein, 37 aa, Artificial Sequence
  Non-cyclic GFR-binding peptide
  MOD_RES (1)..(2)..(36): Xaa is C or S
  MOD_RES (16)..(17)..(18)..(19)..(20): Xaa is A or G
  MOD_RES (21)..(22)..(23)..(24): Xaa is A or G or absent
XXVPARLNAISILYFXXXXXXXXXLKKYRDMVVEAXG

SEQ ID NO: 18275 - protein, 39 aa, Artificial Sequence
  Non-cyclic GFR-binding peptide
  MOD_RES (4)..(5)..(39): Xaa is C or S
  MOD_RES (19)..(20)..(21)..(22)..(23): Xaa is A or G
  MOD_RES (24)..(25)..(26)..(27): Xaa is A or G or absent
PKAXXAPTKLSPISVLYIXXXXXXXXXYKQYENMVVKAX

SEQ ID NO: 18276 - protein, 35 aa, Artificial Sequence
  Non-cyclic GFR-binding peptide
  MOD_RES (1)..(33)..(35): Xaa is C or S
XAPTQLEPISVLYLDDSSNVIKFKYENMVVRAXGX

SEQ ID NO: 18277 - protein, 38 aa, Artificial Sequence
  Non-cyclic GFR-binding peptide
  MOD_RES (3)..(4)..(37): Xaa is C or S
  MOD_RES (18)..(19)..(20)..(21)..(22): Xaa is A or G
  MOD_RES (23)..(24)..(25)..(26): Xaa is A or G or absent
APXXVPQALEPISILYLXXXXXXXXXKFKYEMIVRSXK

SEQ ID NO: 18278 - protein, 34 aa, Artificial Sequence
  Non-cyclic GFR-binding peptide
  MOD_RES (3)..(4): Xaa is C or S
KAXXVPTKLSPISILYIDKGVVTYYKQYEGMAVS

SEQ ID NO: 18279 - protein, 39 aa, Artificial Sequence
  Non-cyclic GFR-binding peptide
  MOD_RES (1)..(2)..(36)..(38): Xaa is C or S
  MOD_RES (16)..(17)..(18)..(19)..(20): Xaa is A or G
  MOD_RES (21)..(22)..(23)..(24): Xaa is A or G or absent
XXAPTQLEPISVLYLXXXXXXXXXKFKYENMVVRAXGXH

SEQ ID NO: 18280 - protein, 35 aa, Artificial Sequence
  Non-cyclic GFR-binding peptide
  MOD_RES (1)..(2)..(35): Xaa is C or S
XXVPTKLEPISVLYLDDMGVPTKFKYEEGMSVAEX

SEQ ID NO: 18281 - protein, 30 aa, Artificial Sequence; identical to SEQ ID NO: 885
  Non-cyclic GFR-binding peptide

SEQ ID NO: 18282 - protein, 41 aa, Artificial Sequence
  Non-cyclic GFR-binding peptide
  MOD_RES (5)..(6)..(39)..(41): Xaa is C or S
  MOD_RES (20)..(21)..(22)..(23)..(24): Xaa is A or G
  MOD_RES (25)..(26)..(27)..(28): Xaa is A or G or absent
SASPXXVSQDLEPISILYLXXXXXXXXXKFKYEMIVKSXKX

SEQ ID NO: 18283 - protein, 32 aa, Artificial Sequence
  Non-cyclic GFR-binding peptide
  MOD_RES (14)..(15)..(16)..(17)..(18): Xaa is A or G
  MOD_RES (19)..(20)..(21)..(22): Xaa is A or G or absent
VPQALSPISILYIXXXXXXXXXYKQYEMIVRS

SEQ ID NO: 18284 - protein, 39 aa, Artificial Sequence
  Non-cyclic GFR-binding peptide
  MOD_RES (3)..(4)..(38): Xaa is C or S
  MOD_RES (18)..(19)..(20)..(21)..(22): Xaa is A or G
  MOD_RES (23)..(24)..(25)..(26): Xaa is A or G or absent
KPXXAPTQLSPISVLYIXXXXXXXXXYKQYENMVVRAXG

SEQ ID NO: 18285 - protein, 40 aa, Artificial Sequence
  Non-cyclic GFR-binding peptide
  MOD_RES (6)..(40): Xaa is C or S
  MOD_RES (20)..(21)..(22)..(23)..(24): Xaa is A or G
  MOD_RES (25)..(26)..(27)..(28): Xaa is A or G or absent
VTKPTXAPTKLSPISVLYIXXXXXXXXXYKQYENMVVRSX

SEQ ID NO: 18286 - protein, 36 aa, Artificial Sequence
  Non-cyclic GFR-binding peptide
  MOD_RES (3)..(3): Xaa is C or S
  MOD_RES (17)..(18)..(19)..(20)..(21): Xaa is A or G
  MOD_RES (22)..(23)..(24)..(25): Xaa is A or G or absent
PTXAPTKLSPISVLYIXXXXXXXXXYKQYENMVVRS

SEQ ID NO: 18287 - protein, 33 aa, Artificial Sequence
  Non-cyclic GFR-binding peptide
  MOD_RES (33)..(33): Xaa is C or S
  MOD_RES (14)..(15)..(16)..(17)..(18): Xaa is A or G
  MOD_RES (19)..(20)..(21)..(22): Xaa is A or G or absent
VPQALEPISILYLXXXXXXXXXKFKYEMIVRSX

SEQ ID NO: 18288 - protein, 38 aa, Artificial Sequence
  Non-cyclic GFR-binding peptide
  MOD_RES (3)..(4)..(36)..(38): Xaa is C or S
ASXXVPARLSPISILYKDAANNVVLKYHYDMVVEAXGX

SEQ ID NO: 18289 - protein, 40 aa, Artificial Sequence
  Non-cyclic GFR-binding peptide
  MOD_RES (2)..(3)..(37)..(39): Xaa is C or S
  MOD_RES (17)..(18)..(19)..(20)..(21): Xaa is A or G
  MOD_RES (22)..(23)..(24)..(25): Xaa is A or G or absent
PXXAPTKLSPISVLYIXXXXXXXXXYKQYENMVVRSXGXH

SEQ ID NO: 18290 - protein, 37 aa, Artificial Sequence
  Non-cyclic GFR-binding peptide
  MOD_RES (1)..(2)..(34)..(36): Xaa is C or S
XXVPARLEPISILYLDAANNVVKFKYEDMVVEAXGXR

SEQ ID NO: 18291 - protein, 41 aa, Artificial Sequence
  Non-cyclic GFR-binding peptide
  MOD_RES (6)..(7)..(41): Xaa is C or S
  MOD_RES (21)..(22)..(23)..(24)..(25): Xaa is A or G
  MOD_RES (26)..(27)..(28)..(29): Xaa is A or G or absent
KIPKAXXVPTELEPISMLYLXXXXXXXXXKFKYEDMVVEGX

SEQ ID NO: 18292 - protein, 35 aa, Artificial Sequence
  Non-cyclic GFR-binding peptide
  MOD_RES (1)..(2)..(33)..(35): Xaa is C or S
XXVSQDLEPISILYLIGKTPKIKFKYEMIVKSXKX

SEQ ID NO: 18293 - protein, 38 aa, Artificial Sequence
  Non-cyclic GFR-binding peptide
  MOD_RES (3)..(4)..(36)..(38): Xaa is C or S
KPXXAPTKLEPISVLYLDDSSNVIKFKYENMVVRSXGX

SEQ ID NO: 18294 - protein, 36 aa, Artificial Sequence
  Non-cyclic GFR-binding peptide
  MOD_RES (1)..(2)..(35): Xaa is C or S
  MOD_RES (16)..(17)..(18)..(19)..(20): Xaa is A or G
  MOD_RES (21)..(22)..(23)..(24): Xaa is A or G or absent
XXVPQALSPISILYIXXXXXXXXXYKQYEMIVRSXK

SEQ ID NO: 18295 - protein, 43 aa, Artificial Sequence
  Non-cyclic GFR-binding peptide
  MOD_RES (6)..(7)..(40)..(42): Xaa is C or S
  MOD_RES (21)..(22)..(23)..(24)..(25): Xaa is A or G
  MOD_RES (26)..(27)..(28)..(29): Xaa is A or G or absent
ASAAPXXVPQALEPISILYLXXXXXXXXXKFKYEMIVRSXKXS

SEQ ID NO: 18296 - protein, 41 aa, Artificial Sequence
  Non-cyclic GFR-binding peptide
  MOD_RES (5)..(6)..(40): Xaa is C or S
  MOD_RES (20)..(21)..(22)..(23)..(24): Xaa is A or G
  MOD_RES (25)..(26)..(27)..(28): Xaa is A or G or absent
APASXXVPARLEPISILYLXXXXXXXXXKFKYEDMVVEAXG

SEQ ID NO: 18297 - protein, 36 aa, Artificial Sequence
  Non-cyclic GFR-binding peptide
  MOD_RES (3)..(4): Xaa is C or S
  MOD_RES (18)..(19)..(20)..(21)..(22): Xaa is A or G
  MOD_RES (23)..(24)..(25)..(26): Xaa is A or G or absent
KPXXAPTKLSPISVLYIXXXXXXXXXYKQYENMVVR

SEQ ID NO: 18298 - protein, 35 aa, Artificial Sequence
  Non-cyclic GFR-binding peptide
  MOD_RES (33)..(35): Xaa is C or S
  MOD_RES (14)..(15)..(16)..(17)..(18): Xaa is A or G
  MOD_RES (19)..(20)..(21)..(22): Xaa is A or G or absent
VSQDLSPISILYIXXXXXXXXXYKQYEMIVKSXKX

SEQ ID NO: 18299 - protein, 36 aa, Artificial Sequence
  Non-cyclic GFR-binding peptide
  MOD_RES (4)..(5)..(36): Xaa is C or S
ASPXXVPQDLEPISILYLVGRTPKVKFKYEMVVKSX

SEQ ID NO: 18300 - protein, 35 aa, Artificial Sequence
  Non-cyclic GFR-binding peptide
  MOD_RES (4)..(5): Xaa is C or S
PKAXXAPTKLEPISVLYLDSSNNVIKFKYENMVVK

SEQ ID NO: 18301 - protein, 40 aa, Artificial Sequence
  Non-cyclic GFR-binding peptide
  MOD_RES (2)..(3)..(37)..(39): Xaa is C or S
  MOD_RES (17)..(18)..(19)..(20)..(21): Xaa is A or G
  MOD_RES (22)..(23)..(24)..(25): Xaa is A or G or absent
PXXAPTQLEPISVLYLXXXXXXXXXKFKYENMVVRAXGXH

SEQ ID NO: 18302 - protein, 36 aa, Artificial Sequence
  Non-cyclic GFR-binding peptide
  MOD_RES (1)..(33)..(35): Xaa is C or S
XVPARLSPISILYKDAANNVVLKYHYDMVVEAXGXR

SEQ ID NO: 18303 - protein, 36 aa, Artificial Sequence
  Non-cyclic GFR-binding peptide
  MOD_RES (5)..(6): Xaa is C or S
SAAPXXVPQALSPISILYIVGRKPKVYKQYEMIVRS

SEQ ID NO: 18304 - protein, 40 aa, Artificial Sequence
  Non-cyclic GFR-binding peptide
  MOD_RES (5)..(6)..(38)..(40): Xaa is C or S
IPKAXXVPTELSPISMLYIDEYDKVVYKQYEEMVVEGXGX

SEQ ID NO: 18305 - protein, 42 aa, Artificial Sequence
  Non-cyclic GFR-binding peptide
  MOD_RES (7)..(41): Xaa is C or S
  MOD_RES (21)..(22)..(23)..(24)..(25): Xaa is A or G
  MOD_RES (26)..(27)..(28)..(29): Xaa is A or G or absent
HVTKPTXAPTKLSPISVLYIXXXXXXXXXYKQYENMVVRSXG

SEQ ID NO: 18306 - protein, 40 aa, Artificial Sequence
  Non-cyclic GFR-binding peptide
  MOD_RES (6)..(40): Xaa is C or S
  MOD_RES (20)..(21)..(22)..(23)..(24): Xaa is A or G
  MOD_RES (25)..(26)..(27)..(28): Xaa is A or G or absent
VTKPTXAPTKLEPISVLYLXXXXXXXXXKFKYENMVVRSX

SEQ ID NO: 18307 - protein, 43 aa, Artificial Sequence
  Non-cyclic GFR-binding peptide
  MOD_RES (5)..(6)..(41)..(43): Xaa is C or S
  MOD_RES (20)..(21)..(22)..(23)..(24): Xaa is A or G
  MOD_RES (25)..(26)..(27)..(28): Xaa is A or G or absent
VGKAXXVPTKLEPISVLYLXXXXXXXXXKFKYEEGMSVAEXGX

SEQ ID NO: 18308 - protein, 36 aa, Artificial Sequence
  Non-cyclic GFR-binding peptide
  MOD_RES (33)..(35): Xaa is C or S
  MOD_RES (14)..(15)..(16)..(17)..(18): Xaa is A or G
  MOD_RES (19)..(20)..(21)..(22): Xaa is A or G or absent
VSQDLEPISILYLXXXXXXXXXKFKYEMIVKSXKXS

SEQ ID NO: 18309 - protein, 37 aa, Artificial Sequence
  Non-cyclic GFR-binding peptide
  MOD_RES (3)..(35)..(37): Xaa is C or S
PTXAPTKLSPISVLYIDDSSNVIYKQYENMVVRSXGX

SEQ ID NO: 18310 - protein, 37 aa, Artificial Sequence
  Non-cyclic GFR-binding peptide
  MOD_RES (4)..(36): Xaa is C or S
KPTXAPTKLEPISVLYLDDSSNVIKFKYENMVVRSXG

SEQ ID NO: 18311 - protein, 34 aa, Artificial Sequence
  Non-cyclic GFR-binding peptide
  MOD_RES (1)..(2): Xaa is C or S
  MOD_RES (16)..(17)..(18)..(19)..(20): Xaa is A or G
  MOD_RES (21)..(22)..(23)..(24): Xaa is A or G or absent
XXVPTELSPISMLYIXXXXXXXXXYKQYEEMVVE

SEQ ID NO: 18312 - protein, 36 aa, Artificial Sequence
  Non-cyclic GFR-binding peptide
  MOD_RES (1)..(33)..(35): Xaa is C or S
XVPTELSPISMLYIDENEKVVYKQYEDMVVEGXGXR

SEQ ID NO: 18313 - protein, 36 aa, Artificial Sequence
  Non-cyclic GFR-binding peptide
  MOD_RES (2)..(3): Xaa is C or S
  MOD_RES (17)..(18)..(19)..(20)..(21): Xaa is A or G
  MOD_RES (22)..(23)..(24)..(25): Xaa is A or G or absent
PXXAPTQLEPISVLYLXXXXXXXXXKFKYENMVVRA

SEQ ID NO: 18314 - protein, 39 aa, Artificial Sequence
  Non-cyclic GFR-binding peptide
  MOD_RES (3)..(4)..(36)..(38): Xaa is C or S
KAXXVPTKLSPISILYIDKGVVTYYKQYEGMAVSEXGXR

SEQ ID NO: 18315 - protein, 35 aa, Artificial Sequence
  Non-cyclic GFR-binding peptide
  MOD_RES (2)..(3)..(35): Xaa is C or S
PXXAPTKLSPISVLYIDDSSNVIYKQYENMVVRSX

SEQ ID NO: 18316 - protein, 40 aa, Artificial Sequence
  Non-cyclic GFR-binding peptide
  MOD_RES (2)..(3)..(37)..(39): Xaa is C or S
  MOD_RES (17)..(18)..(19)..(20)..(21): Xaa is A or G
  MOD_RES (22)..(23)..(24)..(25): Xaa is A or G or absent
AXXVPTKLSPISILYKXXXXXXXXXLKYHYGMAVSEXGXR

SEQ ID NO: 18317 - protein, 39 aa, Artificial Sequence
  Non-cyclic GFR-binding peptide
  MOD_RES (1)..(2)..(36)..(38): Xaa is C or S
  MOD_RES (16)..(17)..(18)..(19)..(20): Xaa is A or G
  MOD_RES (21)..(22)..(23)..(24): Xaa is A or G or absent
XXAPTKLSPISVLYIXXXXXXXXXYKQYENMVVRSXGXH

SEQ ID NO: 18318 - protein, 39 aa, Artificial Sequence
  Non-cyclic GFR-binding peptide
  MOD_RES (3)..(4)..(36)..(38): Xaa is C or S
ASXXVPARLSPISILYKDAANNVVLKYHYDMVVEAXGXR

SEQ ID NO: 18319 - protein, 37 aa, Artificial Sequence
  Non-cyclic GFR-binding peptide
  MOD_RES (1)..(35)..(37): Xaa is C or S
  MOD_RES (15)..(16)..(17)..(18)..(19): Xaa is A or G
  MOD_RES (20)..(21)..(22)..(23): Xaa is A or G or absent
XVPARLNAISILYFXXXXXXXXXLKKYRDMVVEAXGX

SEQ ID NO: 18320 - protein, 41 aa, Artificial Sequence
  Non-cyclic GFR-binding peptide
  MOD_RES (6)..(7)..(41): Xaa is C or S
  MOD_RES (21)..(22)..(23)..(24)..(25): Xaa is A or G
  MOD_RES (26)..(27)..(28)..(29): Xaa is A or G or absent
SIPKAXXVPTELSPISMLYIXXXXXXXXXYKQYEEMVVEGX

SEQ ID NO: 18321 - protein, 30 aa, Artificial Sequence; identical to SEQ ID NO: 888
  Non-cyclic GFR-binding peptide

SEQ ID NO: 18322 - protein, 37 aa, Artificial Sequence
  Non-cyclic GFR-binding peptide
  MOD_RES (3)..(37): Xaa is C or S
  MOD_RES (17)..(18)..(19)..(20)..(21): Xaa is A or G
  MOD_RES (22)..(23)..(24)..(25): Xaa is A or G or absent
PTXAPTKLSPISVLYIXXXXXXXXXYKQYENMVVRSX

SEQ ID NO: 18323 - protein, 36 aa, Artificial Sequence
  Non-cyclic GFR-binding peptide
  MOD_RES (1)..(33)..(35): Xaa is C or S
XVPTKLSPISILYIDKGVVTYYKQYEGMAVSEXGXR

SEQ ID NO: 18324 - protein, 40 aa, Artificial Sequence
  Non-cyclic GFR-binding peptide
  MOD_RES (6)..(7)..(40): Xaa is C or S
  MOD_RES (21)..(22)..(23)..(24)..(25): Xaa is A or G
  MOD_RES (26)..(27)..(28)..(29): Xaa is A or G or absent
ASASPXXVPQDLEPISILYLXXXXXXXXXKFKYEMVVKSX

SEQ ID NO: 18325 - protein, 32 aa, Artificial Sequence
  Non-cyclic GFR-binding peptide
  MOD_RES (14)..(15)..(16)..(17)..(18): Xaa is A or G
  MOD_RES (19)..(20)..(21)..(22): Xaa is A or G or absent
APTQLEPISVLYLXXXXXXXXXKFKYENMVVR

SEQ ID NO: 18326 - protein, 37 aa, Artificial Sequence
  Non-cyclic GFR-binding peptide
  MOD_RES (3)..(4): Xaa is C or S
  MOD_RES (18)..(19)..(20)..(21)..(22): Xaa is A or G
  MOD_RES (23)..(24)..(25)..(26): Xaa is A or G or absent
ASXXVPARLNAISILYFXXXXXXXXXLKKYRDMVVEA

SEQ ID NO: 18327 - protein, 35 aa, Artificial Sequence
  Non-cyclic GFR-binding peptide
  MOD_RES (1)..(35): Xaa is C or S
  MOD_RES (15)..(16)..(17)..(18)..(19): Xaa is A or G
  MOD_RES (20)..(21)..(22)..(23): Xaa is A or G or absent
XVPARLNAISILYFXXXXXXXXXLKKYRDMVVEAX

SEQ ID NO: 18328 - protein, 39 aa, Artificial Sequence
  Non-cyclic GFR-binding peptide
  MOD_RES (2)..(3)..(37)..(39): Xaa is C or S
  MOD_RES (17)..(18)..(19)..(20)..(21): Xaa is A or G
  MOD_RES (22)..(23)..(24)..(25): Xaa is A or G or absent
SXXVPARLNAISILYFXXXXXXXXXLKKYRDMVVEAXGX

SEQ ID NO: 18329 - protein, 42 aa, Artificial Sequence
  Non-cyclic GFR-binding peptide
  MOD_RES (6)..(7)..(41): Xaa is C or S
  MOD_RES (21)..(22)..(23)..(24)..(25): Xaa is A or G
  MOD_RES (26)..(27)..(28)..(29): Xaa is A or G or absent
AAPASXXVPARLEPISILYLXXXXXXXXXKFKYEDMVVEAXG

SEQ ID NO: 18330 - protein, 39 aa, Artificial Sequence
  Non-cyclic GFR-binding peptide
  MOD_RES (3)..(4)..(38): Xaa is C or S
  MOD_RES (18)..(19)..(20)..(21)..(22): Xaa is A or G
  MOD_RES (23)..(24)..(25)..(26): Xaa is A or G or absent
KAXXAPTKLSPISVLYIXXXXXXXXXYKQYENMVVKAXG

SEQ ID NO: 18331 - protein, 38 aa, Artificial Sequence
  Non-cyclic GFR-binding peptide
  MOD_RES (4)..(5)..(36)..(38): Xaa is C or S
AAPXXVPQALSPISILYIVGRKPKVYKQYEMIVRSXKX

SEQ ID NO: 18332 - protein, 37 aa, Artificial Sequence
  Non-cyclic GFR-binding peptide
  MOD_RES (2)..(3)..(37): Xaa is C or S
  MOD_RES (17)..(18)..(19)..(20)..(21): Xaa is A or G
  MOD_RES (22)..(23)..(24)..(25): Xaa is A or G or absent
AXXVPTELEPISMLYLXXXXXXXXXKFKYEEMVVEGX

SEQ ID NO: 18333 - protein, 41 aa, Artificial Sequence
  Non-cyclic GFR-binding peptide
  MOD_RES (5)..(6)..(38)..(40): Xaa is C or S
APASXXVPARLSPISILYKDAANNVVLKYHYDMVVEAXGXR

SEQ ID NO: 18334 - protein, 41 aa, Artificial Sequence
  Non-cyclic GFR-binding peptide
  MOD_RES (3)..(4)..(38)..(40): Xaa is C or S
  MOD_RES (18)..(19)..(20)..(21)..(22): Xaa is A or G
  MOD_RES (23)..(24)..(25)..(26): Xaa is A or G or absent
KAXXVPTELEPISMLYLXXXXXXXXXKFKYEEMVVEGXGXR

SEQ ID NO: 18335 - protein, 38 aa, Artificial Sequence
  Non-cyclic GFR-binding peptide
  MOD_RES (4)..(5)..(37): Xaa is C or S
SKAXXVPTKLSPISILYKDKGVVTYLKYHYGMAVSEXG

SEQ ID NO: 18336 - protein, 38 aa, Artificial Sequence
  Non-cyclic GFR-binding peptide
  MOD_RES (6)..(7): Xaa is C or S
KASKAXXVPTKLSPISILYKDKGVVTYLKYHYGMAVSE

SEQ ID NO: 18337 - protein, 36 aa, Artificial Sequence
  Non-cyclic GFR-binding peptide
  MOD_RES (1)..(35): Xaa is C or S
  MOD_RES (15)..(16)..(17)..(18)..(19): Xaa is A or G
  MOD_RES (20)..(21)..(22)..(23): Xaa is A or G or absent
XVPTELSPISMLYIXXXXXXXXXYKQYEDMVVEGXG

SEQ ID NO: 18338 - protein, 37 aa, Artificial Sequence
  Non-cyclic GFR-binding peptide
  MOD_RES (1)..(2)..(34)..(36): Xaa is C or S
XXVPTELSPISMLYIDENEKVVYKQYEDMVVEGXGXR

SEQ ID NO: 18339 - protein, 37 aa, Artificial Sequence
  Non-cyclic GFR-binding peptide
  MOD_RES (2)..(3)..(34)..(36): Xaa is C or S
PXXVSQDLSPISILYIIGKTPKIYKQYEMIVKSXKXS

SEQ ID NO: 18340 - protein, 35 aa, Artificial Sequence
  Non-cyclic GFR-binding peptide
  MOD_RES (1)..(2)..(35): Xaa is C or S
  MOD_RES (16)..(17)..(18)..(19)..(20): Xaa is A or G
  MOD_RES (21)..(22)..(23)..(24): Xaa is A or G or absent
XXVPQDLEPISILYLXXXXXXXXXKFKYEMVVKSX

SEQ ID NO: 18341 - protein, 38 aa, Artificial Sequence
  Non-cyclic GFR-binding peptide
  MOD_RES (3)..(4)..(38): Xaa is C or S
  MOD_RES (18)..(19)..(20)..(21)..(22): Xaa is A or G
  MOD_RES (23)..(24)..(25)..(26): Xaa is A or G or absent
KAXXVPTELSPISMLYIXXXXXXXXXYKQYEDMVVEGX

SEQ ID NO: 18342 - protein, 35 aa, Artificial Sequence
  Non-cyclic GFR-binding peptide
  MOD_RES (3)..(4): Xaa is C or S
ASXXVPARLEPISILYLDAANNVVKFKYEDMVVEA

SEQ ID NO: 18343 - protein, 37 aa, Artificial Sequence
  Non-cyclic GFR-binding peptide
  MOD_RES (4)..(5): Xaa is C or S
  MOD_RES (19)..(20)..(21)..(22)..(23): Xaa is A or G
  MOD_RES (24)..(25)..(26)..(27): Xaa is A or G or absent
ASPXXVSQDLEPISILYLXXXXXXXXXKFKYEMIVKS

SEQ ID NO: 18344 - protein, 39 aa, Artificial Sequence
  Non-cyclic GFR-binding peptide
  MOD_RES (5)..(6): Xaa is C or S
  MOD_RES (20)..(21)..(22)..(23)..(24): Xaa is A or G
  MOD_RES (25)..(26)..(27)..(28): Xaa is A or G or absent
ASKAXXVPTKLSPISILYKXXXXXXXXXLKYHYGMAVSE

SEQ ID NO: 18345 - protein, 39 aa, Artificial Sequence
  Non-cyclic GFR-binding peptide
  MOD_RES (5)..(6)..(38): Xaa is C or S
VPKPXXAPTKLSPISVLYIDDSSNVIYKQYENMVVRSXG

SEQ ID NO: 18346 - protein, 35 aa, Artificial Sequence
  Non-cyclic GFR-binding peptide
  MOD_RES (2)..(3): Xaa is C or S
  MOD_RES (17)..(18)..(19)..(20)..(21): Xaa is A or G
  MOD_RES (22)..(23)..(24)..(25): Xaa is A or G or absent
PXXAPTKLSPISVLYIXXXXXXXXXYKQYENMVVR

SEQ ID NO: 18347 - protein, 36 aa, Artificial Sequence
  Non-cyclic GFR-binding peptide
  MOD_RES (2)..(3)..(35): Xaa is C or S
AXXVPTKLSPISILYKDKGVVTYLKYHYGMAVSEXG

SEQ ID NO: 18348 - protein, 37 aa, Artificial Sequence
  Non-cyclic GFR-binding peptide
  MOD_RES (2)..(3)..(34)..(36): Xaa is C or S
PXXVSQDLEPISILYLIGKTPKIKFKYEMIVKSXKXS

SEQ ID NO: 18349 - protein, 36 aa, Artificial Sequence
  Non-cyclic GFR-binding peptide
  MOD_RES (5)..(5): Xaa is C or S
TKPTXAPTKLSPISVLYIDDSSNVIYKQYENMVVRS

SEQ ID NO: 18350 - protein, 41 aa, Artificial Sequence
  Non-cyclic GFR-binding peptide
  MOD_RES (5)..(6)..(38)..(40): Xaa is C or S
APASXXVPARLEPISILYLDAANNVVKFKYEDMVVEAXGXR

SEQ ID NO: 18351 - protein, 38 aa, Artificial Sequence
  Non-cyclic GFR-binding peptide
  MOD_RES (2)..(3)..(36)..(38): Xaa is C or S
AXXVPTKLEPISVLYLDDMGVPTKFKYEEGMSVAEXGX

SEQ ID NO: 18352 - protein, 36 aa, Artificial Sequence
  Non-cyclic GFR-binding peptide
  MOD_RES (1)..(2)..(35): Xaa is C or S
  MOD_RES (16)..(17)..(18)..(19)..(20): Xaa is A or G
  MOD_RES (21)..(22)..(23)..(24): Xaa is A or G or absent
XXVPQALEPISILYLXXXXXXXXXKFKYEMIVRSXK

SEQ ID NO: 18353 - protein, 40 aa, Artificial Sequence
  Non-cyclic GFR-binding peptide
  MOD_RES (4)..(5)..(37)..(39): Xaa is C or S
PASXXVPARLSPISILYKDAANNVVLKYHYDMVVEAXGXR

SEQ ID NO: 18354 - protein, 34 aa, Artificial Sequence
  Non-cyclic GFR-binding peptide
  MOD_RES (2)..(3): Xaa is C or S
PXXAPTQLSPISVLYIDDSSNVIYKQYENMVVRA

SEQ ID NO: 18355 - protein, 33 aa, Artificial Sequence
  Non-cyclic GFR-binding peptide
  MOD_RES (1)..(1): Xaa is C or S
  MOD_RES (15)..(16)..(17)..(18)..(19): Xaa is A or G
  MOD_RES (20)..(21)..(22)..(23): Xaa is A or G or absent
XVPARLNAISILYFXXXXXXXXXLKKYRDMVVE

SEQ ID NO: 18356 - protein, 41 aa, Artificial Sequence
  Non-cyclic GFR-binding peptide
  MOD_RES (5)..(6)..(40): Xaa is C or S
  MOD_RES (20)..(21)..(22)..(23)..(24): Xaa is A or G
  MOD_RES (25)..(26)..(27)..(28): Xaa is A or G or absent
IPKAXXVPTELSPISMLYIXXXXXXXXXYKQYEDMVVEGXG

SEQ ID NO: 18357 - protein, 41 aa, Artificial Sequence
  Non-cyclic GFR-binding peptide
  MOD_RES (4)..(5)..(38)..(40): Xaa is C or S
GKAXXVPTKLSPISVLYIDDMGVPTYKQYEEGMSVAEXGXR

SEQ ID NO: 18358 - protein, 35 aa, Artificial Sequence
  Non-cyclic GFR-binding peptide
  MOD_RES (2)..(3): Xaa is C or S
  MOD_RES (17)..(18)..(19)..(20)..(21): Xaa is A or G
  MOD_RES (22)..(23)..(24)..(25): Xaa is A or G or absent
PXXVPQALEPISILYLXXXXXXXXXKFKYEMIVRS

SEQ ID NO: 18359 - protein, 36 aa, Artificial Sequence
  Non-cyclic GFR-binding peptide
  MOD_RES (1)..(33)..(35): Xaa is C or S
XVPARLEPISILYLDAANNVVKFKYEDMVVEAXGXR

SEQ ID NO: 18360 - protein, 30 aa, Artificial Sequence
  Non-cyclic GFR-binding peptide
VPTKLSPISILYKDKGVVTYLKYHYGMAVS

SEQ ID NO: 18361 - protein, 34 aa, Artificial Sequence
  Non-cyclic GFR-binding peptide
  MOD_RES (34)..(34): Xaa is C or S
  MOD_RES (14)..(15)..(16)..(17)..(18): Xaa is A or G
  MOD_RES (19)..(20)..(21)..(22): Xaa is A or G or absent
VPTKLSPISILYIXXXXXXXXXYKQYEGMAVSEX

SEQ ID NO: 18362 - protein, 42 aa, Artificial Sequence
  Non-cyclic GFR-binding peptide
  MOD_RES (5)..(6)..(39)..(41): Xaa is C or S
VGKAXXVPTKLSPISVLYIDDMGVPTYKQYEEGMSVAEXGXR

SEQ ID NO: 18363 - protein, 37 aa, Artificial Sequence
  Non-cyclic GFR-binding peptide
  MOD_RES (2)..(3)..(37): Xaa is C or S
  MOD_RES (17)..(18)..(19)..(20)..(21): Xaa is A or G
  MOD_RES (22)..(23)..(24)..(25): Xaa is A or G or absent
AXXVPTKLNAISILYFXXXXXXXXXLKKYRGMAVSEX

SEQ ID NO: 18364 - protein, 33 aa, Artificial Sequence
  Non-cyclic GFR-binding peptide
  MOD_RES (1)..(2): Xaa is C or S
XXVPARLSPISILYKDAANNVVLKYHYDMVVEA

SEQ ID NO: 18365 - protein, 40 aa, Artificial Sequence
  Non-cyclic GFR-binding peptide
  MOD_RES (5)..(6)..(38)..(40): Xaa is C or S
ASKAXXVPTKLSPISILYIDKGVVTYYKQYEGMAVSEXGX

SEQ ID NO: 18366 - protein, 31 aa, Artificial Sequence
  Non-cyclic GFR-binding peptide
APTQLEPISVLYLDDSSNVIKFKYENMVVRA

SEQ ID NO: 18367 - protein, 37 aa, Artificial Sequence
  Non-cyclic GFR-binding peptide
  MOD_RES (3)..(4): Xaa is C or S
  MOD_RES (18)..(19)..(20)..(21)..(22): Xaa is A or G
  MOD_RES (23)..(24)..(25)..(26): Xaa is A or G or absent
KAXXVPTKLNAISILYFXXXXXXXXXLKKYRGMAVSE

SEQ ID NO: 18368 - protein, 37 aa, Artificial Sequence
  Non-cyclic GFR-binding peptide
  MOD_RES (2)..(34)..(36): Xaa is C or S
TXAPTKLSPISVLYIDDSSNVIYKQYENMVVRSXGXH

SEQ ID NO: 18369 - protein, 37 aa, Artificial Sequence
  Non-cyclic GFR-binding peptide
  MOD_RES (1)..(35)..(37): Xaa is C or S
  MOD_RES (15)..(16)..(17)..(18)..(19): Xaa is A or G
  MOD_RES (20)..(21)..(22)..(23): Xaa is A or G or absent
XAPTKLSPISVLYIXXXXXXXXXYKQYENMVVKAXGX

SEQ ID NO: 18370 - protein, 34 aa, Artificial Sequence
  Non-cyclic GFR-binding peptide
  MOD_RES (3)..(4): Xaa is C or S
KPXXAPTKLEPISVLYLDDSSNVIKFKYENMVVR

SEQ ID NO: 18371 - protein, 38 aa, Artificial Sequence
  Non-cyclic GFR-binding peptide
  MOD_RES (1)..(35)..(37): Xaa is C or S
  MOD_RES (15)..(16)..(17)..(18)..(19): Xaa is A or G
  MOD_RES (20)..(21)..(22)..(23): Xaa is A or G or absent
XAPTKLEPISVLYLXXXXXXXXXKFKYENMVVKAXGXH

SEQ ID NO: 18372 - protein, 33 aa, Artificial Sequence
  Non-cyclic GFR-binding peptide
  MOD_RES (1)..(33): Xaa is C or S
XAPTQLEPISVLYLDDSSNVIKFKYENMVVRAX

SEQ ID NO: 18373 - protein, 31 aa, Artificial Sequence
  Non-cyclic GFR-binding peptide
VPTKLNAISILYFDKGVVTYLKKYRGMAVSE

SEQ ID NO: 18374 - protein, 37 aa, Artificial Sequence
  Non-cyclic GFR-binding peptide
  MOD_RES (5)..(6): Xaa is C or S
IPKAXXVPTELSPISMLYIDENEKVVYKQYEDMVVEG

SEQ ID NO: 18375 - protein, 37 aa, Artificial Sequence
  Non-cyclic GFR-binding peptide
  MOD_RES (4)..(5)..(37): Xaa is C or S
PKPXXAPTKLEPISVLYLDDSSNVIKFKYENMVVRSX

SEQ ID NO: 18376 - protein, 39 aa, Artificial Sequence
  Non-cyclic GFR-binding peptide
  MOD_RES (4)..(5)..(39): Xaa is C or S
  MOD_RES (19)..(20)..(21)..(22)..(23): Xaa is A or G
  MOD_RES (24)..(25)..(26)..(27): Xaa is A or G or absent
PKAXXAPTKLEPISVLYLXXXXXXXXXKFKYENMVVKAX

SEQ ID NO: 18377 - protein, 39 aa, Artificial Sequence
  Non-cyclic GFR-binding peptide
  MOD_RES (3)..(4)..(38): Xaa is C or S
  MOD_RES (18)..(19)..(20)..(21)..(22): Xaa is A or G
  MOD_RES (23)..(24)..(25)..(26): Xaa is A or G or absent
KAXXVPTELEPISMLYLXXXXXXXXXKFKYEDMVVEGXG

SEQ ID NO: 18378 - protein, 35 aa, Artificial Sequence
  Non-cyclic GFR-binding peptide
  MOD_RES (4)..(5): Xaa is C or S
PKAXXVPTELEPISMLYLDEYDKVVKFKYEEMVVE

SEQ ID NO: 18379 - protein, 39 aa, Artificial Sequence
  Non-cyclic GFR-binding peptide
  MOD_RES (7)..(7): Xaa is C or S
  MOD_RES (21)..(22)..(23)..(24)..(25): Xaa is A or G
  MOD_RES (26)..(27)..(28)..(29): Xaa is A or G or absent
HVTKPTXAPTKLSPISVLYIXXXXXXXXXYKQYENMVVR

SEQ ID NO: 18380 - protein, 38 aa, Artificial Sequence
  Non-cyclic GFR-binding peptide
  MOD_RES (3)..(4)..(38): Xaa is C or S
  MOD_RES (18)..(19)..(20)..(21)..(22): Xaa is A or G
  MOD_RES (23)..(24)..(25)..(26): Xaa is A or G or absent
KAXXVPTELEPISMLYLXXXXXXXXXKFKYEDMVVEGX

SEQ ID NO: 18381 - protein, 41 aa, Artificial Sequence
  Non-cyclic GFR-binding peptide
  MOD_RES (4)..(5)..(39)..(41): Xaa is C or S
  MOD_RES (19)..(20)..(21)..(22)..(23): Xaa is A or G
  MOD_RES (24)..(25)..(26)..(27): Xaa is A or G or absent
PASXXVPARLEPISILYLXXXXXXXXXKFKYEDMVVEAXGX

SEQ ID NO: 18382 - protein, 36 aa, Artificial Sequence
  Non-cyclic GFR-binding peptide
  MOD_RES (1)..(2)..(36): Xaa is C or S
  MOD_RES (16)..(17)..(18)..(19)..(20): Xaa is A or G
  MOD_RES (21)..(22)..(23)..(24): Xaa is A or G or absent
XXAPTQLSPISVLYIXXXXXXXXXYKQYENMVVRAX

SEQ ID NO: 18383 - protein, 37 aa, Artificial Sequence
  Non-cyclic GFR-binding peptide
  MOD_RES (1)..(2)..(36): Xaa is C or S
  MOD_RES (16)..(17)..(18)..(19)..(20): Xaa is A or G
  MOD_RES (21)..(22)..(23)..(24): Xaa is A or G or absent
XXVPTELEPISMLYLXXXXXXXXXKFKYEEMVVEGXG

SEQ ID NO: 18384 - protein, 42 aa, Artificial Sequence
  Non-cyclic GFR-binding peptide
  MOD_RES (4)..(5)..(39)..(41): Xaa is C or S
  MOD_RES (19)..(20)..(21)..(22)..(23): Xaa is A or G
  MOD_RES (24)..(25)..(26)..(27): Xaa is A or G or absent
PKPXXAPTKLSPISVLYIXXXXXXXXXYKQYENMVVRSXGXH

SEQ ID NO: 18385 - protein, 39 aa, Artificial Sequence
  Non-cyclic GFR-binding peptide
  MOD_RES (6)..(7): Xaa is C or S
  MOD_RES (21)..(22)..(23)..(24)..(25): Xaa is A or G
  MOD_RES (26)..(27)..(28)..(29): Xaa is A or G or absent
AAPASXXVPARLNAISILYFXXXXXXXXXLKKYRDMVVE

SEQ ID NO: 18386 - protein, 42 aa, Artificial Sequence
  Non-cyclic GFR-binding peptide
  MOD_RES (5)..(6)..(40)..(42): Xaa is C or S
  MOD_RES (20)..(21)..(22)..(23)..(24): Xaa is A or G
  MOD_RES (25)..(26)..(27)..(28): Xaa is A or G or absent
VPKPXXAPTQLEPISVLYLXXXXXXXXXKFKYENMVVRAXGX

SEQ ID NO: 18387 - protein, 35 aa, Artificial Sequence
  Non-cyclic GFR-binding peptide
  MOD_RES (32)..(34): Xaa is C or S
VPARLEPISILYLDAANNVVKFKYEDMVVEAXGXR

SEQ ID NO: 18388 - protein, 40 aa, Artificial Sequence
  Non-cyclic GFR-binding peptide
  MOD_RES (5)..(6)..(38)..(40): Xaa is C or S
APASXXVPARLSPISILYKDAANNVVLKYHYDMVVEAXGX

SEQ ID NO: 18389 - protein, 37 aa, Artificial Sequence
  Non-cyclic GFR-binding peptide
  MOD_RES (34)..(36): Xaa is C or S
  MOD_RES (14)..(15)..(16)..(17)..(18): Xaa is A or G
  MOD_RES (19)..(20)..(21)..(22): Xaa is A or G or absent
APTKLEPISVLYLXXXXXXXXXKFKYENMVVKAXGXH

SEQ ID NO: 18390 - protein, 37 aa, Artificial Sequence
  Non-cyclic GFR-binding peptide
  MOD_RES (2)..(3)..(37): Xaa is C or S
  MOD_RES (17)..(18)..(19)..(20)..(21): Xaa is A or G
  MOD_RES (22)..(23)..(24)..(25): Xaa is A or G or absent
AXXVPTELSPISMLYIXXXXXXXXXYKQYEEMVVEGX

SEQ ID NO: 18391 - protein, 37 aa, Artificial Sequence
  Non-cyclic GFR-binding peptide
  MOD_RES (4)..(5): Xaa is C or S
  MOD_RES (19)..(20)..(21)..(22)..(23): Xaa is A or G
  MOD_RES (24)..(25)..(26)..(27): Xaa is A or G or absent
PKPXXAPTKLEPISVLYLXXXXXXXXXKFKYENMVVR

SEQ ID NO: 18392 - protein, 35 aa, Artificial Sequence
  Non-cyclic GFR-binding peptide
  MOD_RES (3)..(4): Xaa is C or S
KPXXAPTKLEPISVLYLDDSSNVIKFKYENMVVRS

SEQ ID NO: 18393 - protein, 40 aa, Artificial Sequence
  Non-cyclic GFR-binding peptide
  MOD_RES (3)..(4)..(39): Xaa is C or S
  MOD_RES (18)..(19)..(20)..(21)..(22): Xaa is A or G
  MOD_RES (23)..(24)..(25)..(26): Xaa is A or G or absent
KAXXVPTKLEPISVLYLXXXXXXXXXKFKYEEGMSVAEXG

SEQ ID NO: 18394 - protein, 38 aa, Artificial Sequence
  Non-cyclic GFR-binding peptide
  MOD_RES (4)..(5)..(37): Xaa is C or S
PASXXVPARLEPISILYLDAANNVVKFKYEDMVVEAXG

SEQ ID NO: 18395 - protein, 32 aa, Artificial Sequence
  Non-cyclic GFR-binding peptide
  MOD_RES (1)..(2): Xaa is C or S
XXVPQALEPISILYLVGRKPKVKFKYEMIVRS

SEQ ID NO: 18396 - protein, 34 aa, Artificial Sequence
  Non-cyclic GFR-binding peptide
  MOD_RES (1)..(34): Xaa is C or S
  MOD_RES (15)..(16)..(17)..(18)..(19): Xaa is A or G
  MOD_RES (20)..(21)..(22)..(23): Xaa is A or G or absent
XVPQDLEPISILYLXXXXXXXXXKFKYEMVVKSX

SEQ ID NO: 18397 - protein, 38 aa, Artificial Sequence
  Non-cyclic GFR-binding peptide
  MOD_RES (2)..(3)..(35)..(37): Xaa is C or S
AXXVPTKLSPISILYKDKGVVTYLKYHYGMAVSEXGXR

SEQ ID NO: 18398 - protein, 41 aa, Artificial Sequence
  Non-cyclic GFR-binding peptide
  MOD_RES (2)..(3)..(38)..(40): Xaa is C or S
  MOD_RES (17)..(18)..(19)..(20)..(21): Xaa is A or G
  MOD_RES (22)..(23)..(24)..(25): Xaa is A or G or absent
AXXVPTKLEPISVLYLXXXXXXXXXKFKYEEGMSVAEXGXR

SEQ ID NO: 18399 - protein, 43 aa, Artificial Sequence
  Non-cyclic GFR-binding peptide
  MOD_RES (5)..(6)..(40)..(42): Xaa is C or S
  MOD_RES (20)..(21)..(22)..(23)..(24): Xaa is A or G
  MOD_RES (25)..(26)..(27)..(28): Xaa is A or G or absent
APASXXVPARLNAISILYFXXXXXXXXXLKKYRDMVVEAXGXR

SEQ ID NO: 18400 - protein, 41 aa, Artificial Sequence
  Non-cyclic GFR-binding peptide
  MOD_RES (4)..(5)..(38)..(40): Xaa is C or S
GKAXXVPTKLEPISVLYLDDMGVPTKFKYEEGMSVAEXGXR

SEQ ID NO: 18401 - protein, 43 aa, Artificial Sequence
  Non-cyclic GFR-binding peptide
  MOD_RES (6)..(7)..(41)..(43): Xaa is C or S
  MOD_RES (21)..(22)..(23)..(24)..(25): Xaa is A or G
  MOD_RES (26)..(27)..(28)..(29): Xaa is A or G or absent
KIPKAXXVPTELEPISMLYLXXXXXXXXXKFKYEDMVVEGXGX

SEQ ID NO: 18402 - protein, 42 aa, Artificial Sequence
  Non-cyclic GFR-binding peptide
  MOD_RES (4)..(5)..(40)..(42): Xaa is C or S
  MOD_RES (19)..(20)..(21)..(22)..(23): Xaa is A or G
  MOD_RES (24)..(25)..(26)..(27): Xaa is A or G or absent
GKAXXVPTKLEPISVLYLXXXXXXXXXKFKYEEGMSVAEXGX

SEQ ID NO: 18403 - protein, 37 aa, Artificial Sequence
  Non-cyclic GFR-binding peptide
  MOD_RES (1)..(2)..(35)..(37): Xaa is C or S
  MOD_RES (16)..(17)..(18)..(19)..(20): Xaa is A or G
  MOD_RES (21)..(22)..(23)..(24): Xaa is A or G or absent
XXVPQDLEPISILYLXXXXXXXXXKFKYEMVVKSXKX

SEQ ID NO: 18404 - protein, 35 aa, Artificial Sequence
  Non-cyclic GFR-binding peptide
  MOD_RES (34)..(34): Xaa is C or S
  MOD_RES (14)..(15)..(16)..(17)..(18): Xaa is A or G
  MOD_RES (19)..(20)..(21)..(22): Xaa is A or G or absent
APTQLEPISVLYLXXXXXXXXXKFKYENMVVRAXG

SEQ ID NO: 18405 - protein, 35 aa, Artificial Sequence
  Non-cyclic GFR-binding peptide
  MOD_RES (3)..(4)..(35): Xaa is C or S
SPXXVPQDLSPISILYIVGRTPKVYKQYEMVVKSX

SEQ ID NO: 18406 - protein, 40 aa, Artificial Sequence
  Non-cyclic GFR-binding peptide
  MOD_RES (3)..(4)..(38)..(40): Xaa is C or S
  MOD_RES (18)..(19)..(20)..(21)..(22): Xaa is A or G
  MOD_RES (23)..(24)..(25)..(26): Xaa is A or G or absent
KAXXVPTELEPISMLYLXXXXXXXXXKFKYEEMVVEGXGX

SEQ ID NO: 18407 - protein, 43 aa, Artificial Sequence
  Non-cyclic GFR-binding peptide
  MOD_RES (5)..(6)..(40)..(42): Xaa is C or S
  MOD_RES (20)..(21)..(22)..(23)..(24): Xaa is A or G
  MOD_RES (25)..(26)..(27)..(28): Xaa is A or G or absent
APASXXVPARLEPISILYLXXXXXXXXXKFKYEDMVVEAXGXR

SEQ ID NO: 18408 - protein, 34 aa, Artificial Sequence
  Non-cyclic GFR-binding peptide
  MOD_RES (2)..(3): Xaa is C or S
AXXVPTKLSPISILYIDKGVVTYYKQYEGMAVSE

SEQ ID NO: 18409 - protein, 33 aa, Artificial Sequence
  Non-cyclic GFR-binding peptide
  MOD_RES (1)..(32): Xaa is C or S
XVPQALSPISILYIVGRKPKVYKQYEMIVRSXK

SEQ ID NO: 18410 - protein, 37 aa, Artificial Sequence
  Non-cyclic GFR-binding peptide
  MOD_RES (5)..(6)..(37): Xaa is C or S
SAAPXXVPQALEPISILYLVGRKPKVKFKYEMIVRSX

SEQ ID NO: 18411 - protein, 34 aa, Artificial Sequence
  Non-cyclic GFR-binding peptide
  MOD_RES (32)..(34): Xaa is C or S
APTQLEPISVLYLDDSSNVIKFKYENMVVRAXGX

SEQ ID NO: 18412 - protein, 43 aa, Artificial Sequence
  Non-cyclic GFR-binding peptide
  MOD_RES (6)..(7)..(41)..(43): Xaa is C or S
  MOD_RES (21)..(22)..(23)..(24)..(25): Xaa is A or G
  MOD_RES (26)..(27)..(28)..(29): Xaa is A or G or absent
AAPASXXVPARLEPISILYLXXXXXXXXXKFKYEDMVVEAXGX

SEQ ID NO: 18413 - protein, 39 aa, Artificial Sequence
  Non-cyclic GFR-binding peptide
  MOD_RES (6)..(7): Xaa is C or S
  MOD_RES (21)..(22)..(23)..(24)..(25): Xaa is A or G
  MOD_RES (26)..(27)..(28)..(29): Xaa is A or G or absent
ASASPXXVPQDLEPISILYLXXXXXXXXXKFKYEMVVKS

SEQ ID NO: 18414 - protein, 40 aa, Artificial Sequence
  Non-cyclic GFR-binding peptide
  MOD_RES (6)..(7)..(38)..(40): Xaa is C or S
ASASPXXVPQDLEPISILYLVGRTPKVKFKYEMVVKSXKX

SEQ ID NO: 18415 - protein, 37 aa, Artificial Sequence
  Non-cyclic GFR-binding peptide
  MOD_RES (4)..(5): Xaa is C or S
  MOD_RES (19)..(20)..(21)..(22)..(23): Xaa is A or G
  MOD_RES (24)..(25)..(26)..(27): Xaa is A or G or absent
AAPXXVPQALSPISILYIXXXXXXXXXYKQYEMIVRS

SEQ ID NO: 18416 - protein, 35 aa, Artificial Sequence
  Non-cyclic GFR-binding peptide
  MOD_RES (1)..(33)..(35): Xaa is C or S
XVPTKLNAISILYFDKGVVTYLKKYRGMAVSEXGX

SEQ ID NO: 18417 - protein, 30 aa, Artificial Sequence
  Non-cyclic GFR-binding peptide
VPARLSPISILYKDAANNVVLKYHYDMVVE

SEQ ID NO: 18418 - protein, 35 aa, Artificial Sequence
  Non-cyclic GFR-binding peptide
  MOD_RES (2)..(3): Xaa is C or S
AXXVPTKLEPISVLYLDDMGVPTKFKYEEGMSVAE

SEQ ID NO: 18419 - protein, 36 aa, Artificial Sequence
  Non-cyclic GFR-binding peptide
  MOD_RES (5)..(6): Xaa is C or S
IPKAXXVPTELEPISMLYLDENEKVVKFKYEDMVVE

SEQ ID NO: 18420 - protein, 35 aa, Artificial Sequence
  Non-cyclic GFR-binding peptide
  MOD_RES (34)..(34): Xaa is C or S
  MOD_RES (14)..(15)..(16)..(17)..(18): Xaa is A or G
  MOD_RES (19)..(20)..(21)..(22): Xaa is A or G or absent
VPARLSPISILYKXXXXXXXXXLKYHYDMVVEAXG

SEQ ID NO: 18421 - protein, 38 aa, Artificial Sequence
  Non-cyclic GFR-binding peptide
  MOD_RES (2)..(36)..(38): Xaa is C or S
  MOD_RES (16)..(17)..(18)..(19)..(20): Xaa is A or G
  MOD_RES (21)..(22)..(23)..(24): Xaa is A or G or absent
TXAPTKLEPISVLYLXXXXXXXXXKFKYENMVVRSXGX

SEQ ID NO: 18422 - protein, 36 aa, Artificial Sequence
  Non-cyclic GFR-binding peptide
  MOD_RES (1)..(2)..(34)..(36): Xaa is C or S
XXVPTELEPISMLYLDENEKVVKFKYEDMVVEGXGX

SEQ ID NO: 18423 - protein, 40 aa, Artificial Sequence
  Non-cyclic GFR-binding peptide
  MOD_RES (3)..(4)..(38)..(40): Xaa is C or S
  MOD_RES (18)..(19)..(20)..(21)..(22): Xaa is A or G
  MOD_RES (23)..(24)..(25)..(26): Xaa is A or G or absent
KAXXVPTELEPISMLYLXXXXXXXXXKFKYEDMVVEGXGX

SEQ ID NO: 18424 - protein, 34 aa, Artificial Sequence
  Non-cyclic GFR-binding peptide
  MOD_RES (3)..(4): Xaa is C or S
KAXXVPTELSPISMLYIDEYDKVVYKQYEEMVVE

SEQ ID NO: 18425 - protein, 33 aa, Artificial Sequence
  Non-cyclic GFR-binding peptide
  MOD_RES (31)..(33): Xaa is C or S
VPQALEPISILYLVGRKPKVKFKYEMIVRSXKX

SEQ ID NO: 18426 - protein, 37 aa, Artificial Sequence
  Non-cyclic GFR-binding peptide
  MOD_RES (5)..(6)..(37): Xaa is C or S
SAAPXXVPQALSPISILYIVGRKPKVYKQYEMIVRSX

SEQ ID NO: 18427 - protein, 33 aa, Artificial Sequence
  Non-cyclic GFR-binding peptide
  MOD_RES (1)..(33): Xaa is C or S
XVPTELEPISMLYLDENEKVVKFKYEDMVVEGX

SEQ ID NO: 18428 - protein, 35 aa, Artificial Sequence
  Non-cyclic GFR-binding peptide
  MOD_RES (4)..(5): Xaa is C or S
PKPXXAPTQLEPISVLYLDDSSNVIKFKYENMVVR

SEQ ID NO: 18429 - protein, 43 aa, Artificial Sequence
  Non-cyclic GFR-binding peptide
  MOD_RES (6)..(7)..(41)..(43): Xaa is C or S
  MOD_RES (21)..(22)..(23)..(24)..(25): Xaa is A or G
  MOD_RES (26)..(27)..(28)..(29): Xaa is A or G or absent
KASKAXXVPTKLSPISILYKXXXXXXXXXLKYHYGMAVSEXGX

SEQ ID NO: 18430 - protein, 44 aa, Artificial Sequence
  Non-cyclic GFR-binding peptide
  MOD_RES (5)..(6)..(41)..(43): Xaa is C or S
  MOD_RES (20)..(21)..(22)..(23)..(24): Xaa is A or G
  MOD_RES (25)..(26)..(27)..(28): Xaa is A or G or absent
VGKAXXVPTKLEPISVLYLXXXXXXXXXKFKYEEGMSVAEXGXR

SEQ ID NO: 18431 - protein, 43 aa, Artificial Sequence
  Non-cyclic GFR-binding peptide
  MOD_RES (5)..(6)..(40)..(42): Xaa is C or S
  MOD_RES (20)..(21)..(22)..(23)..(24): Xaa is A or G
  MOD_RES (25)..(26)..(27)..(28): Xaa is A or G or absent
IPKAXXVPTELSPISMLYIXXXXXXXXXYKQYEDMVVEGXGXR

SEQ ID NO: 18432 - protein, 42 aa, Artificial Sequence
  Non-cyclic GFR-binding peptide
  MOD_RES (4)..(5)..(39)..(41): Xaa is C or S
  MOD_RES (19)..(20)..(21)..(22)..(23): Xaa is A or G
  MOD_RES (24)..(25)..(26)..(27): Xaa is A or G or absent
PKPXXAPTQLSPISVLYIXXXXXXXXXYKQYENMVVRAXGXH

SEQ ID NO: 18433 - protein, 37 aa, Artificial Sequence
  Non-cyclic GFR-binding peptide
  MOD_RES (3)..(4)..(37): Xaa is C or S
  MOD_RES (18)..(19)..(20)..(21)..(22): Xaa is A or G
  MOD_RES (23)..(24)..(25)..(26): Xaa is A or G or absent
SPXXVSQDLSPISILYIXXXXXXXXXYKQYEMIVKSX

SEQ ID NO: 18434 - protein, 34 aa, Artificial Sequence
  Non-cyclic GFR-binding peptide
  MOD_RES (1)..(2): Xaa is C or S
  MOD_RES (16)..(17)..(18)..(19)..(20): Xaa is A or G
  MOD_RES (21)..(22)..(23)..(24): Xaa is A or G or absent
XXVPQALSPISILYIXXXXXXXXXYKQYEMIVRS

SEQ ID NO: 18435 - protein, 37 aa, Artificial Sequence
  Non-cyclic GFR-binding peptide
  MOD_RES (3)..(4): Xaa is C or S
  MOD_RES (18)..(19)..(20)..(21)..(22): Xaa is A or G
  MOD_RES (23)..(24)..(25)..(26): Xaa is A or G or absent
KPXXAPTQLSPISVLYIXXXXXXXXXYKQYENMVVRA

SEQ ID NO: 18436 - protein, 38 aa, Artificial Sequence
  Non-cyclic GFR-binding peptide
  MOD_RES (6)..(7)..(38): Xaa is C or S
ASASPXXVSQDLSPISILYIIGKTPKIYKQYEMIVKSX

SEQ ID NO: 18437 - protein, 34 aa, Artificial Sequence
  Non-cyclic GFR-binding peptide
  MOD_RES (1)..(2)..(33): Xaa is C or S
XXVPQALSPISILYIVGRKPKVYKQYEMIVRSXK

SEQ ID NO: 18438 - protein, 41 aa, Artificial Sequence
  Non-cyclic GFR-binding peptide
  MOD_RES (6)..(7)..(41): Xaa is C or S
  MOD_RES (21)..(22)..(23)..(24)..(25): Xaa is A or G
  MOD_RES (26)..(27)..(28)..(29): Xaa is A or G or absent
YVPKPXXAPTKLEPISVLYLXXXXXXXXXKFKYENMVVRSX

SEQ ID NO: 18439 - protein, 43 aa, Artificial Sequence
  Non-cyclic GFR-binding peptide
  MOD_RES (5)..(6)..(40)..(42): Xaa is C or S
  MOD_RES (20)..(21)..(22)..(23)..(24): Xaa is A or G
  MOD_RES (25)..(26)..(27)..(28): Xaa is A or G or absent
VPKPXXAPTKLSPISVLYIXXXXXXXXXYKQYENMVVRSXGXH

SEQ ID NO: 18440 - protein, 37 aa, Artificial Sequence
  Non-cyclic GFR-binding peptide
  MOD_RES (4)..(5): Xaa is C or S
  MOD_RES (19)..(20)..(21)..(22)..(23): Xaa is A or G
  MOD_RES (24)..(25)..(26)..(27): Xaa is A or G or absent
PKAXXVPTELEPISMLYLXXXXXXXXXKFKYEDMVVE

SEQ ID NO: 18441 - protein, 34 aa, Artificial Sequence
  Non-cyclic GFR-binding peptide
  MOD_RES (1)..(1): Xaa is C or S
  MOD_RES (15)..(16)..(17)..(18)..(19): Xaa is A or G
  MOD_RES (20)..(21)..(22)..(23): Xaa is A or G or absent
XAPTKLEPISVLYLXXXXXXXXXKFKYENMVVRS

SEQ ID NO: 18442 - protein, 39 aa, Artificial Sequence
  Non-cyclic GFR-binding peptide
  MOD_RES (3)..(4)..(36)..(38): Xaa is C or S
KPXXAPTQLEPISVLYLDDSSNVIKFKYENMVVRAXGXH

SEQ ID NO: 18443 - protein, 35 aa, Artificial Sequence
  Non-cyclic GFR-binding peptide
  MOD_RES (1)..(2)..(34): Xaa is C or S
XXVPTELEPISMLYLDEYDKVVKFKYEEMVVEGXG

SEQ ID NO: 18444 - protein, 38 aa, Artificial Sequence
  Non-cyclic GFR-binding peptide
  MOD_RES (4)..(5)..(36)..(38): Xaa is C or S
ASPXXVSQDLEPISILYLIGKTPKIKFKYEMIVKSXKX

SEQ ID NO: 18445 - protein, 33 aa, Artificial Sequence
  Non-cyclic GFR-binding peptide
  MOD_RES (14)..(15)..(16)..(17)..(18): Xaa is A or G
  MOD_RES (19)..(20)..(21)..(22): Xaa is A or G or absent
VPTKLNAISILYFXXXXXXXXXLKKYRGMAVSE

SEQ ID NO: 18446 - protein, 34 aa, Artificial Sequence
  Non-cyclic GFR-binding peptide
  MOD_RES (3)..(4): Xaa is C or S
ASXXVPARLEPISILYLDAANNVVKFKYEDMVVE

SEQ ID NO: 18447 - protein, 34 aa, Artificial Sequence
  Non-cyclic GFR-binding peptide
  MOD_RES (34)..(34): Xaa is C or S
  MOD_RES (14)..(15)..(16)..(17)..(18): Xaa is A or G
  MOD_RES (19)..(20)..(21)..(22): Xaa is A or G or absent
APTKLSPISVLYIXXXXXXXXXYKQYENMVVRSX

SEQ ID NO: 18448 - protein, 41 aa, Artificial Sequence
  Non-cyclic GFR-binding peptide
  MOD_RES (6)..(7)..(41): Xaa is C or S
  MOD_RES (21)..(22)..(23)..(24)..(25): Xaa is A or G
  MOD_RES (26)..(27)..(28)..(29): Xaa is A or G or absent
YVPKPXXAPTKLSPISVLYIXXXXXXXXXYKQYENMVVRSX

SEQ ID NO: 18449 - protein, 37 aa, Artificial Sequence
  Non-cyclic GFR-binding peptide
  MOD_RES (34)..(36): Xaa is C or S
  MOD_RES (14)..(15)..(16)..(17)..(18): Xaa is A or G
  MOD_RES (19)..(20)..(21)..(22): Xaa is A or G or absent
VPARLSPISILYKXXXXXXXXXLKYHYDMVVEAXGXR

SEQ ID NO: 18450 - protein, 34 aa, Artificial Sequence
  Non-cyclic GFR-binding peptide
  MOD_RES (1)..(33): Xaa is C or S
XAPTKLSPISVLYIDSSNNVIYKQYENMVVKAXG

SEQ ID NO: 18451 - protein, 36 aa, Artificial Sequence
  Non-cyclic GFR-binding peptide
  MOD_RES (2)..(3)..(35): Xaa is C or S
PXXAPTKLSPISVLYIDDSSNVIYKQYENMVVRSXG

SEQ ID NO: 18452 - protein, 36 aa, Artificial Sequence
  Non-cyclic GFR-binding peptide
  MOD_RES (1)..(2)..(34)..(36): Xaa is C or S
XXVPARLEPISILYLDAANNVVKFKYEDMVVEAXGX

SEQ ID NO: 18453 - protein, 40 aa, Artificial Sequence
  Non-cyclic GFR-binding peptide
  MOD_RES (6)..(7)..(38)..(40): Xaa is C or S
ASASPXXVSQDLSPISILYIIGKTPKIYKQYEMIVKSXKX

SEQ ID NO: 18454 - protein, 40 aa, Artificial Sequence
  Non-cyclic GFR-binding peptide
  MOD_RES (6)..(7)..(39): Xaa is C or S
KIPKAXXVPTELEPISMLYLDENEKVVKFKYEDMVVEGXG

SEQ ID NO: 18455 - protein, 32 aa, Artificial Sequence
  Non-cyclic GFR-binding peptide
  MOD_RES (1)..(2): Xaa is C or S
XXAPTKLEPISVLYLDDSSNVIKFKYENMVVR

SEQ ID NO: 18456 - protein, 40 aa, Artificial Sequence
  Non-cyclic GFR-binding peptide
  MOD_RES (4)..(5)..(37)..(39): Xaa is C or S
PKAXXVPTELSPISMLYIDEYDKVVYKQYEEMVVEGXGXR

SEQ ID NO: 18457 - protein, 35 aa, Artificial Sequence
  Non-cyclic GFR-binding peptide
  MOD_RES (2)..(3): Xaa is C or S
  MOD_RES (17)..(18)..(19)..(20)..(21): Xaa is A or G
  MOD_RES (22)..(23)..(24)..(25): Xaa is A or G or absent
SXXVPARLEPISILYLXXXXXXXXXKFKYEDMVVE

SEQ ID NO: 18458 - protein, 37 aa, Artificial Sequence
  Non-cyclic GFR-binding peptide
  MOD_RES (2)..(3)..(36): Xaa is C or S
  MOD_RES (17)..(18)..(19)..(20)..(21): Xaa is A or G
  MOD_RES (22)..(23)..(24)..(25): Xaa is A or G or absent
PXXVPQDLSPISILYIXXXXXXXXXYKQYEMVVKSXK

SEQ ID NO: 18459 - protein, 36 aa, Artificial Sequence
  Non-cyclic GFR-binding peptide
  MOD_RES (5)..(6): Xaa is C or S
IPKAXXVPTELSPISMLYIDENEKVVYKQYEDMVVE

SEQ ID NO: 18460 - protein, 33 aa, Artificial Sequence
  Non-cyclic GFR-binding peptide
  MOD_RES (1)..(2): Xaa is C or S
XXVPTELEPISMLYLDENEKVVKFKYEDMVVEG

SEQ ID NO: 18461 - protein, 39 aa, Artificial Sequence
  Non-cyclic GFR-binding peptide
  MOD_RES (4)..(5)..(39): Xaa is C or S
  MOD_RES (19)..(20)..(21)..(22)..(23): Xaa is A or G
  MOD_RES (24)..(25)..(26)..(27): Xaa is A or G or absent
PASXXVPARLNAISILYFXXXXXXXXXLKKYRDMVVEAX

SEQ ID NO: 18462 - protein, 40 aa, Artificial Sequence
  Non-cyclic GFR-binding peptide
  MOD_RES (4)..(5)..(39): Xaa is C or S
  MOD_RES (19)..(20)..(21)..(22)..(23): Xaa is A or G
  MOD_RES (24)..(25)..(26)..(27): Xaa is A or G or absent
PKPXXAPTKLEPISVLYLXXXXXXXXXKFKYENMVVRSXG

SEQ ID NO: 18463 - protein, 42 aa, Artificial Sequence
  Non-cyclic GFR-binding peptide
  MOD_RES (6)..(7)..(40)..(42): Xaa is C or S
KVGKAXXVPTKLEPISVLYLDDMGVPTKFKYEEGMSVAEXGX

SEQ ID NO: 18464 - protein, 38 aa, Artificial Sequence
  Non-cyclic GFR-binding peptide
  MOD_RES (4)..(5)..(38): Xaa is C or S
  MOD_RES (19)..(20)..(21)..(22)..(23): Xaa is A or G
  MOD_RES (24)..(25)..(26)..(27): Xaa is A or G or absent
ASPXXVPQDLSPISILYIXXXXXXXXXYKQYEMVVKSX

SEQ ID NO: 18465 - protein, 38 aa, Artificial Sequence
  Non-cyclic GFR-binding peptide
  MOD_RES (5)..(6): Xaa is C or S
  MOD_RES (20)..(21)..(22)..(23)..(24): Xaa is A or G
  MOD_RES (25)..(26)..(27)..(28): Xaa is A or G or absent
ASKAXXVPTKLSPISILYIXXXXXXXXXYKQYEGMAVS

SEQ ID NO: 18466 - protein, 34 aa, Artificial Sequence
  Non-cyclic GFR-binding peptide
  MOD_RES (2)..(3)..(34): Xaa is C or S
PXXVSQDLEPISILYLIGKTPKIKFKYEMIVKSX

SEQ ID NO: 18467 - protein, 35 aa, Artificial Sequence
  Non-cyclic GFR-binding peptide
  MOD_RES (2)..(3)..(35): Xaa is C or S
PXXAPTQLSPISVLYIDDSSNVIYKQYENMVVRAX

SEQ ID NO: 18468 - protein, 38 aa, Artificial Sequence
  Non-cyclic GFR-binding peptide
  MOD_RES (2)..(3)..(37): Xaa is C or S
  MOD_RES (17)..(18)..(19)..(20)..(21): Xaa is A or G
  MOD_RES (22)..(23)..(24)..(25): Xaa is A or G or absent
AXXVPTELSPISMLYIXXXXXXXXXYKQYEEMVVEGXG

SEQ ID NO: 18469 - protein, 40 aa, Artificial Sequence
  Non-cyclic GFR-binding peptide
  MOD_RES (4)..(5)..(37)..(39): Xaa is C or S
PKPXXAPTKLSPISVLYIDDSSNVIYKQYENMVVRSXGXH

SEQ ID NO: 18470 - protein, 35 aa, Artificial Sequence
  Non-cyclic GFR-binding peptide
  MOD_RES (2)..(3)..(35): Xaa is C or S
AXXVPTELEPISMLYLDEYDKVVKFKYEEMVVEGX

SEQ ID NO: 18471 - protein, 40 aa, Artificial Sequence
  Non-cyclic GFR-binding peptide
  MOD_RES (7)..(7): Xaa is C or S
  MOD_RES (21)..(22)..(23)..(24)..(25): Xaa is A or G
  MOD_RES (26)..(27)..(28)..(29): Xaa is A or G or absent
HVTKPTXAPTKLSPISVLYIXXXXXXXXXYKQYENMVVRS

SEQ ID NO: 18472 - protein, 34 aa, Artificial Sequence
  Non-cyclic GFR-binding peptide
  MOD_RES (1)..(33): Xaa is C or S
XVPTKLSPISILYKDKGVVTYLKYHYGMAVSEXG

SEQ ID NO: 18473 - protein, 38 aa, Artificial Sequence
  Non-cyclic GFR-binding peptide
  MOD_RES (3)..(4)..(37): Xaa is C or S
  MOD_RES (18)..(19)..(20)..(21)..(22): Xaa is A or G
  MOD_RES (23)..(24)..(25)..(26): Xaa is A or G or absent
SPXXVSQDLEPISILYLXXXXXXXXXKFKYEMIVKSXK

SEQ ID NO: 18474 - protein, 43 aa, Artificial Sequence
  Non-cyclic GFR-binding peptide
  MOD_RES (6)..(7)..(41)..(43): Xaa is C or S
  MOD_RES (21)..(22)..(23)..(24)..(25): Xaa is A or G
  MOD_RES (26)..(27)..(28)..(29): Xaa is A or G or absent
TVPKPXXAPTQLSPISVLYIXXXXXXXXXYKQYENMVVRAXGX

SEQ ID NO: 18475 - protein, 35 aa, Artificial Sequence
  Non-cyclic GFR-binding peptide
  MOD_RES (1)..(2): Xaa is C or S
  MOD_RES (16)..(17)..(18)..(19)..(20): Xaa is A or G
  MOD_RES (21)..(22)..(23)..(24): Xaa is A or G or absent
XXVPTKLSPISILYIXXXXXXXXXYKQYEGMAVSE

SEQ ID NO: 18476 - protein, 34 aa, Artificial Sequence
  Non-cyclic GFR-binding peptide
  MOD_RES (14)..(15)..(16)..(17)..(18): Xaa is A or G
  MOD_RES (19)..(20)..(21)..(22): Xaa is A or G or absent
VPTKLSPISVLYIXXXXXXXXXYKQYEEGMSVAE

SEQ ID NO: 18477 - protein, 33 aa, Artificial Sequence
  Non-cyclic GFR-binding peptide
  MOD_RES (1)..(1): Xaa is C or S
  MOD_RES (15)..(16)..(17)..(18)..(19): Xaa is A or G
  MOD_RES (20)..(21)..(22)..(23): Xaa is A or G or absent
XVPQALEPISILYLXXXXXXXXXKFKYEMIVRS

SEQ ID NO: 18478 - protein, 37 aa, Artificial Sequence
  Non-cyclic GFR-binding peptide
  MOD_RES (4)..(5)..(37): Xaa is C or S
PKPXXAPTQLEPISVLYLDDSSNVIKFKYENMVVRAX

SEQ ID NO: 18479 - protein, 39 aa, Artificial Sequence
  Non-cyclic GFR-binding peptide
  MOD_RES (6)..(7): Xaa is C or S
  MOD_RES (21)..(22)..(23)..(24)..(25): Xaa is A or G
  MOD_RES (26)..(27)..(28)..(29): Xaa is A or G or absent
KIPKAXXVPTELEPISMLYLXXXXXXXXXKFKYEDMVVE

SEQ ID NO: 18480 - protein, 37 aa, Artificial Sequence
  Non-cyclic GFR-binding peptide
  MOD_RES (1)..(2)..(36): Xaa is C or S
  MOD_RES (16)..(17)..(18)..(19)..(20): Xaa is A or G
  MOD_RES (21)..(22)..(23)..(24): Xaa is A or G or absent
XXAPTQLSPISVLYIXXXXXXXXXYKQYENMVVRAXG

SEQ ID NO: 18481 - protein, 36 aa, Artificial Sequence
  Non-cyclic GFR-binding peptide
  MOD_RES (4)..(5)..(36): Xaa is C or S
AAPXXVPQALSPISILYIVGRKPKVYKQYEMIVRSX

SEQ ID NO: 18482 - protein, 41 aa, Artificial Sequence
  Non-cyclic GFR-binding peptide
  MOD_RES (5)..(6)..(38)..(40): Xaa is C or S
ASKAXXVPTKLSPISILYKDKGVVTYLKYHYGMAVSEXGXR

SEQ ID NO: 18483 - protein, 40 aa, Artificial Sequence
  Non-cyclic GFR-binding peptide
  MOD_RES (5)..(6)..(38)..(40): Xaa is C or S
VPKPXXAPTKLSPISVLYIDDSSNVIYKQYENMVVRSXGX

SEQ ID NO: 18484 - protein, 37 aa, Artificial Sequence
  Non-cyclic GFR-binding peptide
  MOD_RES (2)..(3)..(36): Xaa is C or S
AXXVPTKLSPISVLYIDDMGVPTYKQYEEGMSVAEXG

SEQ ID NO: 18485 - protein, 37 aa, Artificial Sequence
  Non-cyclic GFR-binding peptide
  MOD_RES (5)..(6): Xaa is C or S
VPKPXXAPTQLSPISVLYIDDSSNVIYKQYENMVVRA

SEQ ID NO: 18486 - protein, 35 aa, Artificial Sequence
  Non-cyclic GFR-binding peptide
  MOD_RES (2)..(3)..(35): Xaa is C or S
PXXAPTQLEPISVLYLDDSSNVIKFKYENMVVRAX

SEQ ID NO: 18487 - protein, 41 aa, Artificial Sequence
  Non-cyclic GFR-binding peptide
  MOD_RES (5)..(6)..(38)..(40): Xaa is C or S
VPKAXXAPTKLSPISVLYIDSSNNVIYKQYENMVVKAXGXH

SEQ ID NO: 18488 - protein, 41 aa, Artificial Sequence
  Non-cyclic GFR-binding peptide
  MOD_RES (5)..(6)..(39)..(41): Xaa is C or S
  MOD_RES (20)..(21)..(22)..(23)..(24): Xaa is A or G
  MOD_RES (25)..(26)..(27)..(28): Xaa is A or G or absent
SASPXXVPQDLSPISILYIXXXXXXXXXYKQYEMVVKSXKX

SEQ ID NO: 18489 - protein, 31 aa, Artificial Sequence
  Non-cyclic GFR-binding peptide
  MOD_RES (1)..(1): Xaa is C or S
XAPTQLEPISVLYLDDSSNVIKFKYENMVVR

SEQ ID NO: 18490 - protein, 39 aa, Artificial Sequence
  Non-cyclic GFR-binding peptide
  MOD_RES (2)..(3)..(38): Xaa is C or S
  MOD_RES (17)..(18)..(19)..(20)..(21): Xaa is A or G
  MOD_RES (22)..(23)..(24)..(25): Xaa is A or G or absent
AXXVPTKLSPISVLYIXXXXXXXXXYKQYEEGMSVAEXG

SEQ ID NO: 18491 - protein, 35 aa, Artificial Sequence
  Non-cyclic GFR-binding peptide
  MOD_RES (2)..(3): Xaa is C or S
  MOD_RES (17)..(18)..(19)..(20)..(21): Xaa is A or G
  MOD_RES (22)..(23)..(24)..(25): Xaa is A or G or absent
PXXVSQDLSPISILYIXXXXXXXXXYKQYEMIVKS

SEQ ID NO: 18492 - protein, 37 aa, Artificial Sequence
  Non-cyclic GFR-binding peptide
  MOD_RES (6)..(7): Xaa is C or S
TVPKPXXAPTQLEPISVLYLDDSSNVIKFKYENMVVR

SEQ ID NO: 18493 - protein, 39 aa, Artificial Sequence
  Non-cyclic GFR-binding peptide
  MOD_RES (6)..(7)..(39): Xaa is C or S
KASKAXXVPTKLNAISILYFDKGVVTYLKKYRGMAVSEX

SEQ ID NO: 18494 - protein, 42 aa, Artificial Sequence
  Non-cyclic GFR-binding peptide
  MOD_RES (4)..(5)..(39)..(41): Xaa is C or S
  MOD_RES (19)..(20)..(21)..(22)..(23): Xaa is A or G
  MOD_RES (24)..(25)..(26)..(27): Xaa is A or G or absent
PASXXVPARLNAISILYFXXXXXXXXXLKKYRDMVVEAXGXR

SEQ ID NO: 18495 - protein, 40 aa, Artificial Sequence
  Non-cyclic GFR-binding peptide
  MOD_RES (6)..(7): Xaa is C or S
  MOD_RES (21)..(22)..(23)..(24)..(25): Xaa is A or G
  MOD_RES (26)..(27)..(28)..(29): Xaa is A or G or absent
AVPKAXXAPTKLSPISVLYIXXXXXXXXXYKQYENMVVKA

SEQ ID NO: 18496 - protein, 36 aa, Artificial Sequence
  Non-cyclic GFR-binding peptide
  MOD_RES (2)..(3)..(36): Xaa is C or S
  MOD_RES (17)..(18)..(19)..(20)..(21): Xaa is A or G
  MOD_RES (22)..(23)..(24)..(25): Xaa is A or G or absent
PXXVSQDLSPISILYIXXXXXXXXXYKQYEMIVKSX

SEQ ID NO: 18497 - protein, 33 aa, Artificial Sequence
  Non-cyclic GFR-binding peptide
  MOD_RES (1)..(2): Xaa is C or S
XXAPTKLEPISVLYLDDSSNVIKFKYENMVVRS

SEQ ID NO: 18498 - protein, 39 aa, Artificial Sequence
  Non-cyclic GFR-binding peptide
  MOD_RES (5)..(6)..(37)..(39): Xaa is C or S
SASPXXVPQDLEPISILYLVGRTPKVKFKYEMVVKSXKX

SEQ ID NO: 18499 - protein, 40 aa, Artificial Sequence
  Non-cyclic GFR-binding peptide
  MOD_RES (6)..(7)..(40): Xaa is C or S
  MOD_RES (21)..(22)..(23)..(24)..(25): Xaa is A or G
  MOD_RES (26)..(27)..(28)..(29): Xaa is A or G or absent
ASAAPXXVPQALSPISILYIXXXXXXXXXYKQYEMIVRSX

SEQ ID NO: 18500 - protein, 37 aa, Artificial Sequence
  Non-cyclic GFR-binding peptide
  MOD_RES (5)..(6): Xaa is C or S
IPKAXXVPTELSPISMLYIDEYDKVVYKQYEEMVVEG

SEQ ID NO: 18501 - protein, 37 aa, Artificial Sequence
  Non-cyclic GFR-binding peptide
  MOD_RES (6)..(7): Xaa is C or S
ASASPXXVPQDLEPISILYLVGRTPKVKFKYEMVVKS

SEQ ID NO: 18502 - protein, 33 aa, Artificial Sequence
  Non-cyclic GFR-binding peptide
  MOD_RES (1)..(33): Xaa is C or S
XVPARLSPISILYKDAANNVVLKYHYDMVVEAX

SEQ ID NO: 18503 - protein, 36 aa, Artificial Sequence
  Non-cyclic GFR-binding peptide
  MOD_RES (3)..(4): Xaa is C or S
  MOD_RES (18)..(19)..(20)..(21)..(22): Xaa is A or G
  MOD_RES (23)..(24)..(25)..(26): Xaa is A or G or absent
KAXXVPTELSPISMLYIXXXXXXXXXYKQYEDMVVE

SEQ ID NO: 18504 - protein, 34 aa, Artificial Sequence
  Non-cyclic GFR-binding peptide
  MOD_RES (34)..(34): Xaa is C or S
  MOD_RES (14)..(15)..(16)..(17)..(18): Xaa is A or G
  MOD_RES (19)..(20)..(21)..(22): Xaa is A or G or absent
APTQLEPISVLYLXXXXXXXXXKFKYENMVVRAX

SEQ ID NO: 18505 - protein, 38 aa, Artificial Sequence
  Non-cyclic GFR-binding peptide
  MOD_RES (3)..(35)..(37): Xaa is C or S
PTXAPTKLEPISVLYLDDSSNVIKFKYENMVVRSXGXH

SEQ ID NO: 18506 - protein, 43 aa, Artificial Sequence
  Non-cyclic GFR-binding peptide
  MOD_RES (5)..(6)..(40)..(42): Xaa is C or S
  MOD_RES (20)..(21)..(22)..(23)..(24): Xaa is A or G
  MOD_RES (25)..(26)..(27)..(28): Xaa is A or G or absent
IPKAXXVPTELSPISMLYIXXXXXXXXXYKQYEEMVVEGXGXR

SEQ ID NO: 18507 - protein, 37 aa, Artificial Sequence
  Non-cyclic GFR-binding peptide
  MOD_RES (1)..(35)..(37): Xaa is C or S
  MOD_RES (15)..(16)..(17)..(18)..(19): Xaa is A or G
  MOD_RES (20)..(21)..(22)..(23): Xaa is A or G or absent
XAPTQLEPISVLYLXXXXXXXXXKFKYENMVVRAXGX

SEQ ID NO: 18508 - protein, 37 aa, Artificial Sequence
  Non-cyclic GFR-binding peptide
  MOD_RES (2)..(3)..(37): Xaa is C or S
  MOD_RES (17)..(18)..(19)..(20)..(21): Xaa is A or G
  MOD_RES (22)..(23)..(24)..(25): Xaa is A or G or absent
AXXVPTELSPISMLYIXXXXXXXXXYKQYEDMVVEGX

SEQ ID NO: 18509 - protein, 37 aa, Artificial Sequence
  Non-cyclic GFR-binding peptide
  MOD_RES (3)..(4)..(35)..(37): Xaa is C or S
APXXVPQALEPISILYLVGRKPKVKFKYEMIVRSXKX

SEQ ID NO: 18510 - protein, 40 aa, Artificial Sequence
  Non-cyclic GFR-binding peptide
  MOD_RES (6)..(7): Xaa is C or S
  MOD_RES (21)..(22)..(23)..(24)..(25): Xaa is A or G
  MOD_RES (26)..(27)..(28)..(29): Xaa is A or G or absent
KASKAXXVPTKLSPISILYKXXXXXXXXXLKYHYGMAVSE

SEQ ID NO: 18511 - protein, 35 aa, Artificial Sequence
  Non-cyclic GFR-binding peptide
  MOD_RES (3)..(4): Xaa is C or S
KAXXVPTELSPISMLYIDEYDKVVYKQYEEMVVEG

SEQ ID NO: 18512 - protein, 40 aa, Artificial Sequence
  Non-cyclic GFR-binding peptide
  MOD_RES (4)..(5)..(39): Xaa is C or S
  MOD_RES (19)..(20)..(21)..(22)..(23): Xaa is A or G
  MOD_RES (24)..(25)..(26)..(27): Xaa is A or G or absent
SKAXXVPTKLSPISILYIXXXXXXXXXYKQYEGMAVSEXG

SEQ ID NO: 18513 - protein, 35 aa, Artificial Sequence
  Non-cyclic GFR-binding peptide
  MOD_RES (3)..(4): Xaa is C or S
KAXXVPTELEPISMLYLDENEKVVKFKYEDMVVEG

SEQ ID NO: 18514 - protein, 39 aa, Artificial Sequence
  Non-cyclic GFR-binding peptide
  MOD_RES (6)..(7): Xaa is C or S
  MOD_RES (21)..(22)..(23)..(24)..(25): Xaa is A or G
  MOD_RES (26)..(27)..(28)..(29): Xaa is A or G or absent
ASASPXXVSQDLSPISILYIXXXXXXXXXYKQYEMIVKS

SEQ ID NO: 18515 - protein, 35 aa, Artificial Sequence
  Non-cyclic GFR-binding peptide
  MOD_RES (2)..(3): Xaa is C or S
  MOD_RES (17)..(18)..(19)..(20)..(21): Xaa is A or G
  MOD_RES (22)..(23)..(24)..(25): Xaa is A or G or absent
AXXVPTELSPISMLYIXXXXXXXXXYKQYEDMVVE

SEQ ID NO: 18516 - protein, 37 aa, Artificial Sequence
  Non-cyclic GFR-binding peptide
  MOD_RES (1)..(35)..(37): Xaa is C or S
  MOD_RES (15)..(16)..(17)..(18)..(19): Xaa is A or G
  MOD_RES (20)..(21)..(22)..(23): Xaa is A or G or absent
XAPTQLSPISVLYIXXXXXXXXXYKQYENMVVRAXGX

SEQ ID NO: 18517 - protein, 36 aa, Artificial Sequence
  Non-cyclic GFR-binding peptide
  MOD_RES (1)..(35): Xaa is C or S
  MOD_RES (15)..(16)..(17)..(18)..(19): Xaa is A or G
  MOD_RES (20)..(21)..(22)..(23): Xaa is A or G or absent
XVPARLSPISILYKXXXXXXXXXLKYHYDMVVEAXG

SEQ ID NO: 18518 - protein, 41 aa, Artificial Sequence
  Non-cyclic GFR-binding peptide
  MOD_RES (6)..(7)..(39)..(41): Xaa is C or S
AAPASXXVPARLSPISILYKDAANNVVLKYHYDMVVEAXGX

SEQ ID NO: 18519 - protein, 39 aa, Artificial Sequence
  Non-cyclic GFR-binding peptide
  MOD_RES (4)..(5)..(36)..(38): Xaa is C or S
ASPXXVSQDLEPISILYLIGKTPKIKFKYEMIVKSXKXS

SEQ ID NO: 18520 - protein, 42 aa, Artificial Sequence
  Non-cyclic GFR-binding peptide
  MOD_RES (4)..(5)..(39)..(41): Xaa is C or S
  MOD_RES (19)..(20)..(21)..(22)..(23): Xaa is A or G
  MOD_RES (24)..(25)..(26)..(27): Xaa is A or G or absent
PKPXXAPTQLEPISVLYLXXXXXXXXXKFKYENMVVRAXGXH

SEQ ID NO: 18521 - protein, 38 aa, Artificial Sequence
  Non-cyclic GFR-binding peptide
  MOD_RES (5)..(6): Xaa is C or S
  MOD_RES (20)..(21)..(22)..(23)..(24): Xaa is A or G
  MOD_RES (25)..(26)..(27)..(28): Xaa is A or G or absent
SASPXXVSQDLEPISILYLXXXXXXXXXKFKYEMIVKS

SEQ ID NO: 18522 - protein, 34 aa, Artificial Sequence
  Non-cyclic GFR-binding peptide
  MOD_RES (2)..(34): Xaa is C or S
TXAPTKLEPISVLYLDDSSNVIKFKYENMVVRSX

SEQ ID NO: 18523 - protein, 39 aa, Artificial Sequence
  Non-cyclic GFR-binding peptide
  MOD_RES (3)..(4)..(38): Xaa is C or S
  MOD_RES (18)..(19)..(20)..(21)..(22): Xaa is A or G
  MOD_RES (23)..(24)..(25)..(26): Xaa is A or G or absent
KAXXVPTELEPISMLYLXXXXXXXXXKFKYEEMVVEGXG

SEQ ID NO: 18524 - protein, 35 aa, Artificial Sequence
  Non-cyclic GFR-binding peptide
  MOD_RES (3)..(4): Xaa is C or S
KAXXVPTELEPISMLYLDEYDKVVKFKYEEMVVEG

SEQ ID NO: 18525 - protein, 38 aa, Artificial Sequence
  Non-cyclic GFR-binding peptide
  MOD_RES (5)..(6)..(38): Xaa is C or S
APASXXVPARLSPISILYKDAANNVVLKYHYDMVVEAX

SEQ ID NO: 18526 - protein, 39 aa, Artificial Sequence
  Non-cyclic GFR-binding peptide
  MOD_RES (6)..(7)..(38): Xaa is C or S
ASAAPXXVPQALSPISILYIVGRKPKVYKQYEMIVRSXK

SEQ ID NO: 18527 - protein, 35 aa, Artificial Sequence
  Non-cyclic GFR-binding peptide
  MOD_RES (3)..(4): Xaa is C or S
KAXXVPTELSPISMLYIDENEKVVYKQYEDMVVEG

SEQ ID NO: 18528 - protein, 39 aa, Artificial Sequence
  Non-cyclic GFR-binding peptide
  MOD_RES (5)..(6)..(38): Xaa is C or S
APASXXVPARLEPISILYLDAANNVVKFKYEDMVVEAXG

SEQ ID NO: 18529 - protein, 37 aa, Artificial Sequence
  Non-cyclic GFR-binding peptide
  MOD_RES (2)..(3)..(37): Xaa is C or S
  MOD_RES (17)..(18)..(19)..(20)..(21): Xaa is A or G
  MOD_RES (22)..(23)..(24)..(25): Xaa is A or G or absent
PXXAPTKLSPISVLYIXXXXXXXXXYKQYENMVVRSX

SEQ ID NO: 18530 - protein, 40 aa, Artificial Sequence
  Non-cyclic GFR-binding peptide
  MOD_RES (4)..(5)..(37)..(39): Xaa is C or S
SKAXXVPTKLSPISILYKDKGVVTYLKYHYGMAVSEXGXR

SEQ ID NO: 18531 - protein, 39 aa, Artificial Sequence
  Non-cyclic GFR-binding peptide
  MOD_RES (5)..(6): Xaa is C or S
  MOD_RES (20)..(21)..(22)..(23)..(24): Xaa is A or G
  MOD_RES (25)..(26)..(27)..(28): Xaa is A or G or absent
APASXXVPARLNAISILYFXXXXXXXXXLKKYRDMVVEA

SEQ ID NO: 18532 - protein, 37 aa, Artificial Sequence
  Non-cyclic GFR-binding peptide
  MOD_RES (34)..(36): Xaa is C or S
  MOD_RES (14)..(15)..(16)..(17)..(18): Xaa is A or G
  MOD_RES (19)..(20)..(21)..(22): Xaa is A or G or absent
APTKLSPISVLYIXXXXXXXXXYKQYENMVVKAXGXH

SEQ ID NO: 18533 - protein, 37 aa, Artificial Sequence
  Non-cyclic GFR-binding peptide
  MOD_RES (3)..(4)..(36): Xaa is C or S
KAXXVPTELSPISMLYIDEYDKVVYKQYEEMVVEGXG

SEQ ID NO: 18534 - protein, 35 aa, Artificial Sequence
  Non-cyclic GFR-binding peptide
  MOD_RES (1)..(33)..(35): Xaa is C or S
XVPTELSPISMLYIDEYDKVVYKQYEEMVVEGXGX

SEQ ID NO: 18535 - protein, 35 aa, Artificial Sequence
  Non-cyclic GFR-binding peptide
  MOD_RES (4)..(5): Xaa is C or S
PKPXXAPTQLSPISVLYIDDSSNVIYKQYENMVVR

SEQ ID NO: 18536 - protein, 36 aa, Artificial Sequence
  Non-cyclic GFR-binding peptide
  MOD_RES (1)..(2)..(34)..(36): Xaa is C or S
XXVPARLNAISILYFDAANNVVLKKYRDMVVEAXGX

SEQ ID NO: 18537 - protein, 36 aa, Artificial Sequence
  Non-cyclic GFR-binding peptide
  MOD_RES (1)..(2)..(33)..(35): Xaa is C or S
XXVSQDLSPISILYIIGKTPKIYKQYEMIVKSXKXS

SEQ ID NO: 18538 - protein, 39 aa, Artificial Sequence
  Non-cyclic GFR-binding peptide
  MOD_RES (5)..(39): Xaa is C or S
  MOD_RES (19)..(20)..(21)..(22)..(23): Xaa is A or G
  MOD_RES (24)..(25)..(26)..(27): Xaa is A or G or absent
TKPTXAPTKLSPISVLYIXXXXXXXXXYKQYENMVVRSX

SEQ ID NO: 18539 - protein, 36 aa, Artificial Sequence
  Non-cyclic GFR-binding peptide
  MOD_RES (1)..(2)..(34)..(36): Xaa is C or S
XXAPTKLSPISVLYIDDSSNVIYKQYENMVVRSXGX

SEQ ID NO: 18540 - protein, 37 aa, Artificial Sequence
  Non-cyclic GFR-binding peptide
  MOD_RES (2)..(3)..(34)..(36): Xaa is C or S
PXXVPQDLSPISILYIVGRTPKVYKQYEMVVKSXKXS

SEQ ID NO: 18541 - protein, 39 aa, Artificial Sequence
  Non-cyclic GFR-binding peptide
  MOD_RES (2)..(3)..(37)..(39): Xaa is C or S
  MOD_RES (17)..(18)..(19)..(20)..(21): Xaa is A or G
  MOD_RES (22)..(23)..(24)..(25): Xaa is A or G or absent
AXXVPTKLSPISILYIXXXXXXXXXYKQYEGMAVSEXGX

SEQ ID NO: 18542 - protein, 44 aa, Artificial Sequence
  Non-cyclic GFR-binding peptide
  MOD_RES (6)..(7)..(41)..(43): Xaa is C or S
  MOD_RES (21)..(22)..(23)..(24)..(25): Xaa is A or G
  MOD_RES (26)..(27)..(28)..(29): Xaa is A or G or absent
KIPKAXXVPTELSPISMLYIXXXXXXXXXYKQYEDMVVEGXGXR

SEQ ID NO: 18543 - protein, 37 aa, Artificial Sequence
  Non-cyclic GFR-binding peptide
  MOD_RES (5)..(5): Xaa is C or S
  MOD_RES (19)..(20)..(21)..(22)..(23): Xaa is A or G
  MOD_RES (24)..(25)..(26)..(27): Xaa is A or G or absent
TKPTXAPTKLSPISVLYIXXXXXXXXXYKQYENMVVR

SEQ ID NO: 18544 - protein, 34 aa, Artificial Sequence
  Non-cyclic GFR-binding peptide
  MOD_RES (33)..(33): Xaa is C or S
  MOD_RES (14)..(15)..(16)..(17)..(18): Xaa is A or G
  MOD_RES (19)..(20)..(21)..(22): Xaa is A or G or absent
VPQDLSPISILYIXXXXXXXXXYKQYEMVVKSXK

SEQ ID NO: 18545 - protein, 37 aa, Artificial Sequence
  Non-cyclic GFR-binding peptide
  MOD_RES (2)..(3)..(35)..(37): Xaa is C or S
AXXVPTELSPISMLYIDENEKVVYKQYEDMVVEGXGX

SEQ ID NO: 18546 - protein, 42 aa, Artificial Sequence
  Non-cyclic GFR-binding peptide
  MOD_RES (6)..(7)..(42): Xaa is C or S
  MOD_RES (21)..(22)..(23)..(24)..(25): Xaa is A or G
  MOD_RES (26)..(27)..(28)..(29): Xaa is A or G or absent
KVGKAXXVPTKLSPISVLYIXXXXXXXXXYKQYEEGMSVAEX

SEQ ID NO: 18547 - protein, 39 aa, Artificial Sequence
  Non-cyclic GFR-binding peptide
  MOD_RES (3)..(4)..(37)..(39): Xaa is C or S
  MOD_RES (18)..(19)..(20)..(21)..(22): Xaa is A or G
  MOD_RES (23)..(24)..(25)..(26): Xaa is A or G or absent
SPXXVPQDLEPISILYLXXXXXXXXXKFKYEMVVKSXKX

SEQ ID NO: 18548 - protein, 39 aa, Artificial Sequence
  Non-cyclic GFR-binding peptide
  MOD_RES (1)..(2)..(37)..(39): Xaa is C or S
  MOD_RES (16)..(17)..(18)..(19)..(20): Xaa is A or G
  MOD_RES (21)..(22)..(23)..(24): Xaa is A or G or absent
XXVPTKLSPISVLYIXXXXXXXXXYKQYEEGMSVAEXGX

SEQ ID NO: 18549 - protein, 43 aa, Artificial Sequence
  Non-cyclic GFR-binding peptide
  MOD_RES (6)..(7)..(40)..(42): Xaa is C or S
  MOD_RES (21)..(22)..(23)..(24)..(25): Xaa is A or G
  MOD_RES (26)..(27)..(28)..(29): Xaa is A or G or absent
ASAAPXXVPQALSPISILYIXXXXXXXXXYKQYEMIVRSXKXS

SEQ ID NO: 18550 - protein, 37 aa, Artificial Sequence
  Non-cyclic GFR-binding peptide
  MOD_RES (4)..(5)..(37): Xaa is C or S
PASXXVPARLSPISILYKDAANNVVLKYHYDMVVEAX

SEQ ID NO: 18551 - protein, 41 aa, Artificial Sequence
  Non-cyclic GFR-binding peptide
  MOD_RES (4)..(5)..(38)..(40): Xaa is C or S
  MOD_RES (19)..(20)..(21)..(22)..(23): Xaa is A or G
  MOD_RES (24)..(25)..(26)..(27): Xaa is A or G or absent
ASPXXVPQDLSPISILYIXXXXXXXXXYKQYEMVVKSXKXS

SEQ ID NO: 18552 - protein, 33 aa, Artificial Sequence
  Non-cyclic GFR-binding peptide
  MOD_RES (1)..(2): Xaa is C or S
XXVPTELSPISMLYIDENEKVVYKQYEDMVVEG

SEQ ID NO: 18553 - protein, 38 aa, Artificial Sequence
  Non-cyclic GFR-binding peptide
  MOD_RES (4)..(36)..(38): Xaa is C or S
KPTXAPTKLEPISVLYLDDSSNVIKFKYENMVVRSXGX

SEQ ID NO: 18554 - protein, 34 aa, Artificial Sequence
  Non-cyclic GFR-binding peptide
  MOD_RES (2)..(3)..(34): Xaa is C or S
PXXVPQDLSPISILYIVGRTPKVYKQYEMVVKSX

SEQ ID NO: 18555 - protein, 33 aa, Artificial Sequence
  Non-cyclic GFR-binding peptide
  MOD_RES (32)..(32): Xaa is C or S
APTKLEPISVLYLDSSNNVIKFKYENMVVKAXG

SEQ ID NO: 18556 - protein, 39 aa, Artificial Sequence
  Non-cyclic GFR-binding peptide
  MOD_RES (5)..(6): Xaa is C or S
  MOD_RES (20)..(21)..(22)..(23)..(24): Xaa is A or G
  MOD_RES (25)..(26)..(27)..(28): Xaa is A or G or absent
IPKAXXVPTELSPISMLYIXXXXXXXXXYKQYEEMVVEG

SEQ ID NO: 18557 - protein, 36 aa, Artificial Sequence
  Non-cyclic GFR-binding peptide
  MOD_RES (1)..(34)..(36): Xaa is C or S
  MOD_RES (15)..(16)..(17)..(18)..(19): Xaa is A or G
  MOD_RES (20)..(21)..(22)..(23): Xaa is A or G or absent
XVSQDLSPISILYIXXXXXXXXXYKQYEMIVKSXKX

SEQ ID NO: 18558 - protein, 39 aa, Artificial Sequence
  Non-cyclic GFR-binding peptide
  MOD_RES (2)..(3)..(37)..(39): Xaa is C or S
  MOD_RES (17)..(18)..(19)..(20)..(21): Xaa is A or G
  MOD_RES (22)..(23)..(24)..(25): Xaa is A or G or absent
PXXAPTQLSPISVLYIXXXXXXXXXYKQYENMVVRAXGX

SEQ ID NO: 18559 - protein, 36 aa, Artificial Sequence
  Non-cyclic GFR-binding peptide
  MOD_RES (2)..(3): Xaa is C or S
  MOD_RES (17)..(18)..(19)..(20)..(21): Xaa is A or G
  MOD_RES (22)..(23)..(24)..(25): Xaa is A or G or absent
SXXVPARLNAISILYFXXXXXXXXXLKKYRDMVVEA

SEQ ID NO: 18560 - protein, 42 aa, Artificial Sequence
  Non-cyclic GFR-binding peptide
  MOD_RES (4)..(5)..(40)..(42): Xaa is C or S
  MOD_RES (19)..(20)..(21)..(22)..(23): Xaa is A or G
  MOD_RES (24)..(25)..(26)..(27): Xaa is A or G or absent
GKAXXVPTKLSPISVLYIXXXXXXXXXYKQYEEGMSVAEXGX

SEQ ID NO: 18561 - protein, 37 aa, Artificial Sequence
  Non-cyclic GFR-binding peptide
  MOD_RES (1)..(2)..(35)..(37): Xaa is C or S
  MOD_RES (16)..(17)..(18)..(19)..(20): Xaa is A or G
  MOD_RES (21)..(22)..(23)..(24): Xaa is A or G or absent
XXVPQALEPISILYLXXXXXXXXXKFKYEMIVRSXKX

SEQ ID NO: 18562 - protein, 37 aa, Artificial Sequence
  Non-cyclic GFR-binding peptide
  MOD_RES (5)..(6): Xaa is C or S
VPKPXXAPTKLSPISVLYIDDSSNVIYKQYENMVVRS

SEQ ID NO: 18563 - protein, 37 aa, Artificial Sequence
  Non-cyclic GFR-binding peptide
  MOD_RES (5)..(6): Xaa is C or S
VPKPXXAPTQLEPISVLYLDDSSNVIKFKYENMVVRA

SEQ ID NO: 18564 - protein, 33 aa, Artificial Sequence
  Non-cyclic GFR-binding peptide
  MOD_RES (1)..(2)..(33): Xaa is C or S
XXVSQDLSPISILYIIGKTPKIYKQYEMIVKSX

SEQ ID NO: 18565 - protein, 32 aa, Artificial Sequence
  Non-cyclic GFR-binding peptide
  MOD_RES (31)..(31): Xaa is C or S
VPQALSPISILYIVGRKPKVYKQYEMIVRSXK

SEQ ID NO: 18566 - protein, 31 aa, Artificial Sequence
  Non-cyclic GFR-binding peptide
  MOD_RES (1)..(1): Xaa is C or S
XAPTQLSPISVLYIDDSSNVIYKQYENMVVR

SEQ ID NO: 18567 - protein, 40 aa, Artificial Sequence
  Non-cyclic GFR-binding peptide
  MOD_RES (6)..(7)..(39): Xaa is C or S
TVPKPXXAPTQLSPISVLYIDDSSNVIYKQYENMVVRAXG

SEQ ID NO: 18568 - protein, 36 aa, Artificial Sequence
  Non-cyclic GFR-binding peptide
  MOD_RES (3)..(4): Xaa is C or S
KAXXVPTKLEPISVLYLDDMGVPTKFKYEEGMSVAE

SEQ ID NO: 18569 - protein, 35 aa, Artificial Sequence
  Non-cyclic GFR-binding peptide
  MOD_RES (2)..(3): Xaa is C or S
  MOD_RES (17)..(18)..(19)..(20)..(21): Xaa is A or G
  MOD_RES (22)..(23)..(24)..(25): Xaa is A or G or absent
SXXVPARLSPISILYKXXXXXXXXXLKYHYDMVVE

SEQ ID NO: 18570 - protein, 37 aa, Artificial Sequence
  Non-cyclic GFR-binding peptide
  MOD_RES (3)..(4)..(36): Xaa is C or S
KAXXVPTKLNAISILYFDKGVVTYLKKYRGMAVSEXG

SEQ ID NO: 18571 - protein, 41 aa, Artificial Sequence
  Non-cyclic GFR-binding peptide
  MOD_RES (5)..(6)..(38)..(40): Xaa is C or S
VPKPXXAPTQLEPISVLYLDDSSNVIKFKYENMVVRAXGXH

SEQ ID NO: 18572 - protein, 42 aa, Artificial Sequence
  Non-cyclic GFR-binding peptide
  MOD_RES (6)..(7)..(39)..(41): Xaa is C or S
TVPKPXXAPTQLSPISVLYIDDSSNVIYKQYENMVVRAXGXH

SEQ ID NO: 18573 - protein, 41 aa, Artificial Sequence
  Non-cyclic GFR-binding peptide
  MOD_RES (6)..(40): Xaa is C or S
  MOD_RES (20)..(21)..(22)..(23)..(24): Xaa is A or G
  MOD_RES (25)..(26)..(27)..(28): Xaa is A or G or absent
VTKPTXAPTKLEPISVLYLXXXXXXXXXKFKYENMVVRSXG

SEQ ID NO: 18574 - protein, 41 aa, Artificial Sequence
  Non-cyclic GFR-binding peptide
  MOD_RES (3)..(4)..(38)..(40): Xaa is C or S
  MOD_RES (18)..(19)..(20)..(21)..(22): Xaa is A or G
  MOD_RES (23)..(24)..(25)..(26): Xaa is A or G or absent
KAXXVPTELEPISMLYLXXXXXXXXXKFKYEDMVVEGXGXR

SEQ ID NO: 18575 - protein, 38 aa, Artificial Sequence
  Non-cyclic GFR-binding peptide
  MOD_RES (4)..(5)..(38): Xaa is C or S
  MOD_RES (19)..(20)..(21)..(22)..(23): Xaa is A or G
  MOD_RES (24)..(25)..(26)..(27): Xaa is A or G or absent
AAPXXVPQALEPISILYLXXXXXXXXXKFKYEMIVRSX

SEQ ID NO: 18576 - protein, 33 aa, Artificial Sequence
  Non-cyclic GFR-binding peptide
  MOD_RES (1)..(1): Xaa is C or S
  MOD_RES (15)..(16)..(17)..(18)..(19): Xaa is A or G
  MOD_RES (20)..(21)..(22)..(23): Xaa is A or G or absent
XVPTELEPISMLYLXXXXXXXXXKFKYEEMVVE

SEQ ID NO: 18577 - protein, 40 aa, Artificial Sequence
  Non-cyclic GFR-binding peptide
  MOD_RES (2)..(3)..(37)..(39): Xaa is C or S
  MOD_RES (17)..(18)..(19)..(20)..(21): Xaa is A or G
  MOD_RES (22)..(23)..(24)..(25): Xaa is A or G or absent
AXXVPTKLSPISILYIXXXXXXXXXYKQYEGMAVSEXGXR

SEQ ID NO: 18578 - protein, 40 aa, Artificial Sequence
  Non-cyclic GFR-binding peptide
  MOD_RES (5)..(6)..(38)..(40): Xaa is C or S
VPKPXXAPTQLSPISVLYIDDSSNVIYKQYENMVVRAXGX

SEQ ID NO: 18579 - protein, 37 aa, Artificial Sequence
  Non-cyclic GFR-binding peptide
  MOD_RES (2)..(3)..(35)..(37): Xaa is C or S
AXXVPTKLSPISILYIDKGVVTYYKQYEGMAVSEXGX

SEQ ID NO: 18580 - protein, 39 aa, Artificial Sequence
  Non-cyclic GFR-binding peptide
  MOD_RES (1)..(2)..(36)..(38): Xaa is C or S
  MOD_RES (16)..(17)..(18)..(19)..(20): Xaa is A or G
  MOD_RES (21)..(22)..(23)..(24): Xaa is A or G or absent
XXVPTKLSPISILYIXXXXXXXXXYKQYEGMAVSEXGXR

SEQ ID NO: 18581 - protein, 36 aa, Artificial Sequence
  Non-cyclic GFR-binding peptide
  MOD_RES (4)..(5): Xaa is C or S
PKAXXAPTKLEPISVLYLDSSNNVIKFKYENMVVKA

SEQ ID NO: 18582 - protein, 34 aa, Artificial Sequence
  Non-cyclic GFR-binding peptide
  MOD_RES (33)..(33): Xaa is C or S
  MOD_RES (14)..(15)..(16)..(17)..(18): Xaa is A or G
  MOD_RES (19)..(20)..(21)..(22): Xaa is A or G or absent
VPQALEPISILYLXXXXXXXXXKFKYEMIVRSXK

SEQ ID NO: 18583 - protein, 32 aa, Artificial Sequence
  Non-cyclic GFR-binding peptide
  MOD_RES (1)..(2): Xaa is C or S
XXAPTKLEPISVLYLDSSNNVIKFKYENMVVK

SEQ ID NO: 18584 - protein, 39 aa, Artificial Sequence
  Non-cyclic GFR-binding peptide
  MOD_RES (7)..(39): Xaa is C or S
HVTKPTXAPTKLSPISVLYIDDSSNVIYKQYENMVVRSX

SEQ ID NO: 18585 - protein, 39 aa, Artificial Sequence
  Non-cyclic GFR-binding peptide
  MOD_RES (5)..(6): Xaa is C or S
  MOD_RES (20)..(21)..(22)..(23)..(24): Xaa is A or G
  MOD_RES (25)..(26)..(27)..(28): Xaa is A or G or absent
VPKPXXAPTKLSPISVLYIXXXXXXXXXYKQYENMVVRS

SEQ ID NO: 18586 - protein, 36 aa, Artificial Sequence
  Non-cyclic GFR-binding peptide
  MOD_RES (5)..(6): Xaa is C or S
SASPXXVPQDLEPISILYLVGRTPKVKFKYEMVVKS

SEQ ID NO: 18587 - protein, 35 aa, Artificial Sequence
  Non-cyclic GFR-binding peptide
  MOD_RES (1)..(2)..(33)..(35): Xaa is C or S
XXVPQALEPISILYLVGRKPKVKFKYEMIVRSXKX

SEQ ID NO: 18588 - protein, 36 aa, Artificial Sequence
  Non-cyclic GFR-binding peptide
  MOD_RES (1)..(2)..(36): Xaa is C or S
  MOD_RES (16)..(17)..(18)..(19)..(20): Xaa is A or G
  MOD_RES (21)..(22)..(23)..(24): Xaa is A or G or absent
XXVPARLNAISILYFXXXXXXXXXLKKYRDMVVEAX

SEQ ID NO: 18589 - protein, 37 aa, Artificial Sequence
  Non-cyclic GFR-binding peptide
  MOD_RES (4)..(5): Xaa is C or S
  MOD_RES (19)..(20)..(21)..(22)..(23): Xaa is A or G
  MOD_RES (24)..(25)..(26)..(27): Xaa is A or G or absent
PKPXXAPTQLEPISVLYLXXXXXXXXXKFKYENMVVR

SEQ ID NO: 18590 - protein, 37 aa, Artificial Sequence
  Non-cyclic GFR-binding peptide
  MOD_RES (6)..(7): Xaa is C or S
ASAAPXXVPQALEPISILYLVGRKPKVKFKYEMIVRS

SEQ ID NO: 18591 - protein, 38 aa, Artificial Sequence
  Non-cyclic GFR-binding peptide
  MOD_RES (2)..(36)..(38): Xaa is C or S
  MOD_RES (16)..(17)..(18)..(19)..(20): Xaa is A or G
  MOD_RES (21)..(22)..(23)..(24): Xaa is A or G or absent
TXAPTKLSPISVLYIXXXXXXXXXYKQYENMVVRSXGX

SEQ ID NO: 18592 - protein, 39 aa, Artificial Sequence
  Non-cyclic GFR-binding peptide
  MOD_RES (6)..(38): Xaa is C or S
VTKPTXAPTKLEPISVLYLDDSSNVIKFKYENMVVRSXG

SEQ ID NO: 18593 - protein, 36 aa, Artificial Sequence
  Non-cyclic GFR-binding peptide
  MOD_RES (2)..(3)..(36): Xaa is C or S
  MOD_RES (17)..(18)..(19)..(20)..(21): Xaa is A or G
  MOD_RES (22)..(23)..(24)..(25): Xaa is A or G or absent
PXXVSQDLEPISILYLXXXXXXXXXKFKYEMIVKSX

SEQ ID NO: 18594 - protein, 33 aa, Artificial Sequence
  Non-cyclic GFR-binding peptide
  MOD_RES (31)..(33): Xaa is C or S
VPQALSPISILYIVGRKPKVYKQYEMIVRSXKX

SEQ ID NO: 18595 - protein, 36 aa, Artificial Sequence
  Non-cyclic GFR-binding peptide
  MOD_RES (1)..(33)..(35): Xaa is C or S
XAPTQLSPISVLYIDDSSNVIYKQYENMVVRAXGXH

SEQ ID NO: 18596 - protein, 35 aa, Artificial Sequence
  Non-cyclic GFR-binding peptide
  MOD_RES (34)..(34): Xaa is C or S
  MOD_RES (14)..(15)..(16)..(17)..(18): Xaa is A or G
  MOD_RES (19)..(20)..(21)..(22): Xaa is A or G or absent
VPARLEPISILYLXXXXXXXXXKFKYEDMVVEAXG

SEQ ID NO: 18597 - protein, 37 aa, Artificial Sequence
  Non-cyclic GFR-binding peptide
  MOD_RES (2)..(3)..(35)..(37): Xaa is C or S
SXXVPARLSPISILYKDAANNVVLKYHYDMVVEAXGX

SEQ ID NO: 18598 - protein, 32 aa, Artificial Sequence
  Non-cyclic GFR-binding peptide
  MOD_RES (1)..(1): Xaa is C or S
XVPTELSPISMLYIDENEKVVYKQYEDMVVEG

SEQ ID NO: 18599 - protein, 42 aa, Artificial Sequence
  Non-cyclic GFR-binding peptide
  MOD_RES (5)..(6)..(39)..(41): Xaa is C or S
VGKAXXVPTKLEPISVLYLDDMGVPTKFKYEEGMSVAEXGXR

SEQ ID NO: 18600 - protein, 35 aa, Artificial Sequence
  Non-cyclic GFR-binding peptide
  MOD_RES (32)..(34): Xaa is C or S
VPTKLSPISILYKDKGVVTYLKYHYGMAVSEXGXR

SEQ ID NO: 18601 - protein, 38 aa, Artificial Sequence
  Non-cyclic GFR-binding peptide
  MOD_RES (2)..(3)..(35)..(37): Xaa is C or S
AXXVPTELEPISMLYLDENEKVVKFKYEDMVVEGXGXR

SEQ ID NO: 18602 - protein, 35 aa, Artificial Sequence
  Non-cyclic GFR-binding peptide
  MOD_RES (32)..(34): Xaa is C or S
VPARLSPISILYKDAANNVVLKYHYDMVVEAXGXR

SEQ ID NO: 18603 - protein, 34 aa, Artificial Sequence
  Non-cyclic GFR-binding peptide
  MOD_RES (2)..(3)..(34): Xaa is C or S
PXXVPQALEPISILYLVGRKPKVKFKYEMIVRSX

SEQ ID NO: 18604 - protein, 38 aa, Artificial Sequence
  Non-cyclic GFR-binding peptide
  MOD_RES (3)..(4)..(35)..(37): Xaa is C or S
APXXVPQALSPISILYIVGRKPKVYKQYEMIVRSXKXS

SEQ ID NO: 18605 - protein, 32 aa, Artificial Sequence
  Non-cyclic GFR-binding peptide
  MOD_RES (1)..(1): Xaa is C or S
XAPTKLSPISVLYIDDSSNVIYKQYENMVVRS

SEQ ID NO: 18606 - protein, 33 aa, Artificial Sequence
  Non-cyclic GFR-binding peptide
  MOD_RES (1)..(1): Xaa is C or S
  MOD_RES (15)..(16)..(17)..(18)..(19): Xaa is A or G
  MOD_RES (20)..(21)..(22)..(23): Xaa is A or G or absent
XVSQDLEPISILYLXXXXXXXXXKFKYEMIVKS

SEQ ID NO: 18607 - protein, 39 aa, Artificial Sequence
  Non-cyclic GFR-binding peptide
  MOD_RES (6)..(7): Xaa is C or S
KVGKAXXVPTKLEPISVLYLDDMGVPTKFKYEEGMSVAE

SEQ ID NO: 18608 - protein, 37 aa, Artificial Sequence
  Non-cyclic GFR-binding peptide
  MOD_RES (1)..(2)..(36): Xaa is C or S
  MOD_RES (16)..(17)..(18)..(19)..(20): Xaa is A or G
  MOD_RES (21)..(22)..(23)..(24): Xaa is A or G or absent
XXVPTELEPISMLYLXXXXXXXXXKFKYEDMVVEGXG

SEQ ID NO: 18609 - protein, 38 aa, Artificial Sequence
  Non-cyclic GFR-binding peptide
  MOD_RES (4)..(5): Xaa is C or S
  MOD_RES (19)..(20)..(21)..(22)..(23): Xaa is A or G
  MOD_RES (24)..(25)..(26)..(27): Xaa is A or G or absent
PKAXXVPTELEPISMLYLXXXXXXXXXKFKYEEMVVEG

SEQ ID NO: 18610 - protein, 36 aa, Artificial Sequence
  Non-cyclic GFR-binding peptide
  MOD_RES (1)..(2)..(35): Xaa is C or S
  MOD_RES (16)..(17)..(18)..(19)..(20): Xaa is A or G
  MOD_RES (21)..(22)..(23)..(24): Xaa is A or G or absent
XXVSQDLSPISILYIXXXXXXXXXYKQYEMIVKSXK

SEQ ID NO: 18611 - protein, 33 aa, Artificial Sequence
  Non-cyclic GFR-binding peptide
  MOD_RES (1)..(2): Xaa is C or S
XXVPTELSPISMLYIDEYDKVVYKQYEEMVVEG

SEQ ID NO: 18612 - protein, 37 aa, Artificial Sequence
  Non-cyclic GFR-binding peptide
  MOD_RES (4)..(5)..(37): Xaa is C or S
SKAXXVPTKLSPISILYIDKGVVTYYKQYEGMAVSEX

SEQ ID NO: 18613 - protein, 39 aa, Artificial Sequence
  Non-cyclic GFR-binding peptide
  MOD_RES (4)..(5)..(39): Xaa is C or S
  MOD_RES (19)..(20)..(21)..(22)..(23): Xaa is A or G
  MOD_RES (24)..(25)..(26)..(27): Xaa is A or G or absent
SKAXXVPTKLSPISILYIXXXXXXXXXYKQYEGMAVSEX

SEQ ID NO: 18614 - protein, 37 aa, Artificial Sequence
  Non-cyclic GFR-binding peptide
  MOD_RES (3)..(37): Xaa is C or S
  MOD_RES (17)..(18)..(19)..(20)..(21): Xaa is A or G
  MOD_RES (22)..(23)..(24)..(25): Xaa is A or G or absent
PTXAPTKLEPISVLYLXXXXXXXXXKFKYENMVVRSX

SEQ ID NO: 18615 - protein, 35 aa, Artificial Sequence
  Non-cyclic GFR-binding peptide
  MOD_RES (3)..(4): Xaa is C or S
ASXXVPARLNAISILYFDAANNVVLKKYRDMVVEA

SEQ ID NO: 18616 - protein, 37 aa, Artificial Sequence
  Non-cyclic GFR-binding peptide
  MOD_RES (1)..(2)..(34)..(36): Xaa is C or S
XXVPTKLSPISILYIDKGVVTYYKQYEGMAVSEXGXR

SEQ ID NO: 18617 - protein, 33 aa, Artificial Sequence
  Non-cyclic GFR-binding peptide
  MOD_RES (1)..(2): Xaa is C or S
XXVPTELEPISMLYLDEYDKVVKFKYEEMVVEG

SEQ ID NO: 18618 - protein, 36 aa, Artificial Sequence
  Non-cyclic GFR-binding peptide
  MOD_RES (2)..(3)..(35): Xaa is C or S
PXXAPTQLSPISVLYIDDSSNVIYKQYENMVVRAXG

SEQ ID NO: 18619 - protein, 37 aa, Artificial Sequence
  Non-cyclic GFR-binding peptide
  MOD_RES (2)..(3)..(36): Xaa is C or S
  MOD_RES (17)..(18)..(19)..(20)..(21): Xaa is A or G
  MOD_RES (22)..(23)..(24)..(25): Xaa is A or G or absent
PXXVSQDLSPISILYIXXXXXXXXXYKQYEMIVKSXK

SEQ ID NO: 18620 - protein, 34 aa, Artificial Sequence
  Non-cyclic GFR-binding peptide
  MOD_RES (1)..(1): Xaa is C or S
  MOD_RES (15)..(16)..(17)..(18)..(19): Xaa is A or G
  MOD_RES (20)..(21)..(22)..(23): Xaa is A or G or absent
XVPTELEPISMLYLXXXXXXXXXKFKYEEMVVEG

SEQ ID NO: 18621 - protein, 42 aa, Artificial Sequence
  Non-cyclic GFR-binding peptide
  MOD_RES (6)..(7)..(39)..(41): Xaa is C or S
TVPKPXXAPTQLEPISVLYLDDSSNVIKFKYENMVVRAXGXH

SEQ ID NO: 18622 - protein, 35 aa, Artificial Sequence
  Non-cyclic GFR-binding peptide
  MOD_RES (1)..(34): Xaa is C or S
  MOD_RES (15)..(16)..(17)..(18)..(19): Xaa is A or G
  MOD_RES (20)..(21)..(22)..(23): Xaa is A or G or absent
XVSQDLSPISILYIXXXXXXXXXYKQYEMIVKSXK

SEQ ID NO: 18623 - protein, 42 aa, Artificial Sequence
  Non-cyclic GFR-binding peptide
  MOD_RES (6)..(7)..(39)..(41): Xaa is C or S
AVPKAXXAPTKLEPISVLYLDSSNNVIKFKYENMVVKAXGXH

SEQ ID NO: 18624 - protein, 38 aa, Artificial Sequence
  Non-cyclic GFR-binding peptide
  MOD_RES (3)..(4)..(37): Xaa is C or S
KAXXVPTKLSPISVLYIDDMGVPTYKQYEEGMSVAEXG

SEQ ID NO: 18625 - protein, 34 aa, Artificial Sequence
  Non-cyclic GFR-binding peptide
  MOD_RES (33)..(33): Xaa is C or S
  MOD_RES (14)..(15)..(16)..(17)..(18): Xaa is A or G
  MOD_RES (19)..(20)..(21)..(22): Xaa is A or G or absent
VSQDLSPISILYIXXXXXXXXXYKQYEMIVKSXK

SEQ ID NO: 18626 - protein, 39 aa, Artificial Sequence
  Non-cyclic GFR-binding peptide
  MOD_RES (6)..(7): Xaa is C or S
  MOD_RES (21)..(22)..(23)..(24)..(25): Xaa is A or G
  MOD_RES (26)..(27)..(28)..(29): Xaa is A or G or absent
AVPKAXXAPTKLEPISVLYLXXXXXXXXXKFKYENMVVK

SEQ ID NO: 18627 - protein, 35 aa, Artificial Sequence
  Non-cyclic GFR-binding peptide
  MOD_RES (32)..(34): Xaa is C or S
APTQLSPISVLYIDDSSNVIYKQYENMVVRAXGXH

SEQ ID NO: 18628 - protein, 43 aa, Artificial Sequence
  Non-cyclic GFR-binding peptide
  MOD_RES (5)..(6)..(40)..(42): Xaa is C or S
  MOD_RES (20)..(21)..(22)..(23)..(24): Xaa is A or G
  MOD_RES (25)..(26)..(27)..(28): Xaa is A or G or absent
APASXXVPARLSPISILYKXXXXXXXXXLKYHYDMVVEAXGXR

SEQ ID NO: 18629 - protein, 34 aa, Artificial Sequence
  Non-cyclic GFR-binding peptide
  MOD_RES (1)..(2)..(34): Xaa is C or S
XXAPTKLEPISVLYLDDSSNVIKFKYENMVVRSX

SEQ ID NO: 18630 - protein, 40 aa, Artificial Sequence
  Non-cyclic GFR-binding peptide
  MOD_RES (4)..(5)..(37)..(39): Xaa is C or S
PASXXVPARLEPISILYLDAANNVVKFKYEDMVVEAXGXR

SEQ ID NO: 18631 - protein, 40 aa, Artificial Sequence
  Non-cyclic GFR-binding peptide
  MOD_RES (6)..(7)..(39): Xaa is C or S
SIPKAXXVPTELSPISMLYIDEYDKVVYKQYEEMVVEGXG

SEQ ID NO: 18632 - protein, 38 aa, Artificial Sequence
  Non-cyclic GFR-binding peptide
  MOD_RES (2)..(3)..(35)..(37): Xaa is C or S
AXXVPTELSPISMLYIDENEKVVYKQYEDMVVEGXGXR

SEQ ID NO: 18633 - protein, 40 aa, Artificial Sequence
  Non-cyclic GFR-binding peptide
  MOD_RES (6)..(7)..(40): Xaa is C or S
KVGKAXXVPTKLEPISVLYLDDMGVPTKFKYEEGMSVAEX

SEQ ID NO: 18634 - protein, 39 aa, Artificial Sequence
  Non-cyclic GFR-binding peptide
  MOD_RES (3)..(4)..(36)..(38): Xaa is C or S
KAXXVPTKLSPISILYKDKGVVTYLKYHYGMAVSEXGXR

SEQ ID NO: 18635 - protein, 38 aa, Artificial Sequence
  Non-cyclic GFR-binding peptide
  MOD_RES (1)..(2)..(37): Xaa is C or S
  MOD_RES (16)..(17)..(18)..(19)..(20): Xaa is A or G
  MOD_RES (21)..(22)..(23)..(24): Xaa is A or G or absent
XXVPTKLEPISVLYLXXXXXXXXXKFKYEEGMSVAEXG

SEQ ID NO: 18636 - protein, 38 aa, Artificial Sequence
  Non-cyclic GFR-binding peptide
  MOD_RES (3)..(4)..(37): Xaa is C or S
  MOD_RES (18)..(19)..(20)..(21)..(22): Xaa is A or G
  MOD_RES (23)..(24)..(25)..(26): Xaa is A or G or absent
SPXXVPQDLEPISILYLXXXXXXXXXKFKYEMVVKSXK

SEQ ID NO: 18637 - protein, 32 aa, Artificial Sequence
  Non-cyclic GFR-binding peptide
  MOD_RES (1)..(1): Xaa is C or S
XAPTKLEPISVLYLDDSSNVIKFKYENMVVRS

SEQ ID NO: 18638 - protein, 38 aa, Artificial Sequence
  Non-cyclic GFR-binding peptide
  MOD_RES (6)..(7): Xaa is C or S
AVPKAXXAPTKLSPISVLYIDSSNNVIYKQYENMVVKA

SEQ ID NO: 18639 - protein, 36 aa, Artificial Sequence
  Non-cyclic GFR-binding peptide
  MOD_RES (2)..(3)..(35): Xaa is C or S
AXXVPTELEPISMLYLDEYDKVVKFKYEEMVVEGXG

SEQ ID NO: 18640 - protein, 37 aa, Artificial Sequence
  Non-cyclic GFR-binding peptide
  MOD_RES (1)..(2)..(36): Xaa is C or S
  MOD_RES (16)..(17)..(18)..(19)..(20): Xaa is A or G
  MOD_RES (21)..(22)..(23)..(24): Xaa is A or G or absent
XXAPTKLSPISVLYIXXXXXXXXXYKQYENMVVKAXG

SEQ ID NO: 18641 - protein, 37 aa, Artificial Sequence
  Non-cyclic GFR-binding peptide
  MOD_RES (4)..(5): Xaa is C or S
  MOD_RES (19)..(20)..(21)..(22)..(23): Xaa is A or G
  MOD_RES (24)..(25)..(26)..(27): Xaa is A or G or absent
PASXXVPARLSPISILYKXXXXXXXXXLKYHYDMVVE

SEQ ID NO: 18642 - protein, 40 aa, Artificial Sequence
  Non-cyclic GFR-binding peptide
  MOD_RES (4)..(5)..(39): Xaa is C or S
  MOD_RES (19)..(20)..(21)..(22)..(23): Xaa is A or G
  MOD_RES (24)..(25)..(26)..(27): Xaa is A or G or absent
PKAXXVPTELSPISMLYIXXXXXXXXXYKQYEEMVVEGXG

SEQ ID NO: 18643 - protein, 38 aa, Artificial Sequence
  Non-cyclic GFR-binding peptide
  MOD_RES (4)..(5)..(38): Xaa is C or S
  MOD_RES (19)..(20)..(21)..(22)..(23): Xaa is A or G
  MOD_RES (24)..(25)..(26)..(27): Xaa is A or G or absent
ASPXXVPQDLEPISILYLXXXXXXXXXKFKYEMVVKSX

SEQ ID NO: 18644 - protein, 40 aa, Artificial Sequence
  Non-cyclic GFR-binding peptide
  MOD_RES (6)..(7)..(38)..(40): Xaa is C or S
ASASPXXVPQDLSPISILYIVGRTPKVYKQYEMVVKSXKX

SEQ ID NO: 18645 - protein, 34 aa, Artificial Sequence
  Non-cyclic GFR-binding peptide
  MOD_RES (14)..(15)..(16)..(17)..(18): Xaa is A or G
  MOD_RES (19)..(20)..(21)..(22): Xaa is A or G or absent
VPTKLEPISVLYLXXXXXXXXXKFKYEEGMSVAE

SEQ ID NO: 18646 - protein, 37 aa, Artificial Sequence
  Non-cyclic GFR-binding peptide
  MOD_RES (4)..(5)..(37): Xaa is C or S
PKAXXVPTELEPISMLYLDEYDKVVKFKYEEMVVEGX

SEQ ID NO: 18647 - protein, 36 aa, Artificial Sequence
  Non-cyclic GFR-binding peptide
  MOD_RES (5)..(6): Xaa is C or S
VPKPXXAPTKLEPISVLYLDDSSNVIKFKYENMVVR

SEQ ID NO: 18648 - protein, 36 aa, Artificial Sequence
  Non-cyclic GFR-binding peptide
  MOD_RES (1)..(2)..(33)..(35): Xaa is C or S
XXVPQDLSPISILYIVGRTPKVYKQYEMVVKSXKXS

SEQ ID NO: 18649 - protein, 43 aa, Artificial Sequence
  Non-cyclic GFR-binding peptide
  MOD_RES (6)..(7)..(41)..(43): Xaa is C or S
  MOD_RES (21)..(22)..(23)..(24)..(25): Xaa is A or G
  MOD_RES (26)..(27)..(28)..(29): Xaa is A or G or absent
SIPKAXXVPTELEPISMLYLXXXXXXXXXKFKYEEMVVEGXGX

SEQ ID NO: 18650 - protein, 35 aa, Artificial Sequence
  Non-cyclic GFR-binding peptide
  MOD_RES (34)..(34): Xaa is C or S
  MOD_RES (14)..(15)..(16)..(17)..(18): Xaa is A or G
  MOD_RES (19)..(20)..(21)..(22): Xaa is A or G or absent
APTKLSPISVLYIXXXXXXXXXYKQYENMVVRSXG

SEQ ID NO: 18651 - protein, 38 aa, Artificial Sequence
  Non-cyclic GFR-binding peptide
  MOD_RES (2)..(3)..(35)..(37): Xaa is C or S
AXXVPTKLSPISILYIDKGVVTYYKQYEGMAVSEXGXR

SEQ ID NO: 18652 - protein, 35 aa, Artificial Sequence
  Non-cyclic GFR-binding peptide
  MOD_RES (1)..(2)..(33)..(35): Xaa is C or S
XXVPQALSPISILYIVGRKPKVYKQYEMIVRSXKX

SEQ ID NO: 18653 - protein, 34 aa, Artificial Sequence
  Non-cyclic GFR-binding peptide
  MOD_RES (1)..(32)..(34): Xaa is C or S
XVPQALSPISILYIVGRKPKVYKQYEMIVRSXKX

SEQ ID NO: 18654 - protein, 45 aa, Artificial Sequence
  Non-cyclic GFR-binding peptide
  MOD_RES (6)..(7)..(42)..(44): Xaa is C or S
  MOD_RES (21)..(22)..(23)..(24)..(25): Xaa is A or G
  MOD_RES (26)..(27)..(28)..(29): Xaa is A or G or absent
KVGKAXXVPTKLSPISVLYIXXXXXXXXXYKQYEEGMSVAEXGXR

SEQ ID NO: 18655 - protein, 40 aa, Artificial Sequence
  Non-cyclic GFR-binding peptide
  MOD_RES (5)..(6)..(39): Xaa is C or S
VGKAXXVPTKLSPISVLYIDDMGVPTYKQYEEGMSVAEXG

SEQ ID NO: 18656 - protein, 34 aa, Artificial Sequence
  Non-cyclic GFR-binding peptide
  MOD_RES (2)..(3)..(34): Xaa is C or S
PXXVSQDLSPISILYIIGKTPKIYKQYEMIVKSX

SEQ ID NO: 18657 - protein, 37 aa, Artificial Sequence
  Non-cyclic GFR-binding peptide
  MOD_RES (4)..(5): Xaa is C or S
  MOD_RES (19)..(20)..(21)..(22)..(23): Xaa is A or G
  MOD_RES (24)..(25)..(26)..(27): Xaa is A or G or absent
PKAXXAPTKLEPISVLYLXXXXXXXXXKFKYENMVVK

SEQ ID NO: 18658 - protein, 38 aa, Artificial Sequence
  Non-cyclic GFR-binding peptide
  MOD_RES (4)..(5)..(37): Xaa is C or S
PKAXXVPTELSPISMLYIDEYDKVVYKQYEEMVVEGXG

SEQ ID NO: 18659 - protein, 40 aa, Artificial Sequence
  Non-cyclic GFR-binding peptide
  MOD_RES (6)..(7): Xaa is C or S
  MOD_RES (21)..(22)..(23)..(24)..(25): Xaa is A or G
  MOD_RES (26)..(27)..(28)..(29): Xaa is A or G or absent
AAPASXXVPARLNAISILYFXXXXXXXXXLKKYRDMVVEA

SEQ ID NO: 18660 - protein, 38 aa, Artificial Sequence
  Non-cyclic GFR-binding peptide
  MOD_RES (4)..(5)..(36)..(38): Xaa is C or S
ASPXXVPQDLEPISILYLVGRTPKVKFKYEMVVKSXKX

SEQ ID NO: 18661 - protein, 37 aa, Artificial Sequence
  Non-cyclic GFR-binding peptide
  MOD_RES (34)..(36): Xaa is C or S
  MOD_RES (14)..(15)..(16)..(17)..(18): Xaa is A or G
  MOD_RES (19)..(20)..(21)..(22): Xaa is A or G or absent
APTQLSPISVLYIXXXXXXXXXYKQYENMVVRAXGXH

SEQ ID NO: 18662 - protein, 33 aa, Artificial Sequence
  Non-cyclic GFR-binding peptide
  MOD_RES (32)..(32): Xaa is C or S
APTKLEPISVLYLDDSSNVIKFKYENMVVRSXG

SEQ ID NO: 18663 - protein, 40 aa, Artificial Sequence
  Non-cyclic GFR-binding peptide
  MOD_RES (4)..(5)..(39): Xaa is C or S
  MOD_RES (19)..(20)..(21)..(22)..(23): Xaa is A or G
  MOD_RES (24)..(25)..(26)..(27): Xaa is A or G or absent
PASXXVPARLSPISILYKXXXXXXXXXLKYHYDMVVEAXG

SEQ ID NO: 18664 - protein, 37 aa, Artificial Sequence
  Non-cyclic GFR-binding peptide
  MOD_RES (1)..(2)..(35)..(37): Xaa is C or S
XXVPTKLSPISVLYIDDMGVPTYKQYEEGMSVAEXGX

SEQ ID NO: 18665 - protein, 37 aa, Artificial Sequence
  Non-cyclic GFR-binding peptide
  MOD_RES (1)..(2)..(35)..(37): Xaa is C or S
XXVPTKLEPISVLYLDDMGVPTKFKYEEGMSVAEXGX

SEQ ID NO: 18666 - protein, 38 aa, Artificial Sequence
  Non-cyclic GFR-binding peptide
  MOD_RES (2)..(3)..(37): Xaa is C or S
  MOD_RES (17)..(18)..(19)..(20)..(21): Xaa is A or G
  MOD_RES (22)..(23)..(24)..(25): Xaa is A or G or absent
AXXAPTKLSPISVLYIXXXXXXXXXYKQYENMVVKAXG

SEQ ID NO: 18667 - protein, 35 aa, Artificial Sequence
  Non-cyclic GFR-binding peptide
  MOD_RES (1)..(2)..(34): Xaa is C or S
XXVPTELSPISMLYIDENEKVVYKQYEDMVVEGXG

SEQ ID NO: 18668 - protein, 38 aa, Artificial Sequence
  Non-cyclic GFR-binding peptide
  MOD_RES (2)..(3)..(37): Xaa is C or S
  MOD_RES (17)..(18)..(19)..(20)..(21): Xaa is A or G
  MOD_RES (22)..(23)..(24)..(25): Xaa is A or G or absent
AXXVPTELEPISMLYLXXXXXXXXXKFKYEDMVVEGXG

SEQ ID NO: 18669 - protein, 38 aa, Artificial Sequence
  Non-cyclic GFR-binding peptide
  MOD_RES (5)..(6): Xaa is C or S
  MOD_RES (20)..(21)..(22)..(23)..(24): Xaa is A or G
  MOD_RES (25)..(26)..(27)..(28): Xaa is A or G or absent
SASPXXVPQDLSPISILYIXXXXXXXXXYKQYEMVVKS

SEQ ID NO: 18670 - protein, 39 aa, Artificial Sequence
  Non-cyclic GFR-binding peptide
  MOD_RES (6)..(7): Xaa is C or S
  MOD_RES (21)..(22)..(23)..(24)..(25): Xaa is A or G
  MOD_RES (26)..(27)..(28)..(29): Xaa is A or G or absent
SIPKAXXVPTELSPISMLYIXXXXXXXXXYKQYEEMVVE

SEQ ID NO: 18671 - protein, 36 aa, Artificial Sequence
  Non-cyclic GFR-binding peptide
  MOD_RES (33)..(35): Xaa is C or S
  MOD_RES (14)..(15)..(16)..(17)..(18): Xaa is A or G
  MOD_RES (19)..(20)..(21)..(22): Xaa is A or G or absent
VSQDLSPISILYIXXXXXXXXXYKQYEMIVKSXKXS

SEQ ID NO: 18672 - protein, 32 aa, Artificial Sequence
  Non-cyclic GFR-binding peptide
  MOD_RES (1)..(1): Xaa is C or S
XAPTQLEPISVLYLDDSSNVIKFKYENMVVRA

SEQ ID NO: 18673 - protein, 37 aa, Artificial Sequence
  Non-cyclic GFR-binding peptide
  MOD_RES (4)..(5)..(36): Xaa is C or S
ASPXXVPQDLEPISILYLVGRTPKVKFKYEMVVKSXK

SEQ ID NO: 18674 - protein, 34 aa, Artificial Sequence
  Non-cyclic GFR-binding peptide
  MOD_RES (1)..(2)..(34): Xaa is C or S
XXVPTKLSPISILYKDKGVVTYLKYHYGMAVSEX

SEQ ID NO: 18675 - protein, 40 aa, Artificial Sequence
  Non-cyclic GFR-binding peptide
  MOD_RES (5)..(6)..(37)..(39): Xaa is C or S
SAAPXXVPQALSPISILYIVGRKPKVYKQYEMIVRSXKXS

SEQ ID NO: 18676 - protein, 39 aa, Artificial Sequence
  Non-cyclic GFR-binding peptide
  MOD_RES (5)..(6)..(37)..(39): Xaa is C or S
SASPXXVSQDLSPISILYIIGKTPKIYKQYEMIVKSXKX

SEQ ID NO: 18677 - protein, 34 aa, Artificial Sequence
  Non-cyclic GFR-binding peptide
  MOD_RES (1)..(33): Xaa is C or S
XVPARLNAISILYFDAANNVVLKKYRDMVVEAXG

SEQ ID NO: 18678 - protein, 38 aa, Artificial Sequence
  Non-cyclic GFR-binding peptide
  MOD_RES (5)..(6)..(38): Xaa is C or S
IPKAXXVPTELSPISMLYIDEYDKVVYKQYEEMVVEGX

SEQ ID NO: 18679 - protein, 34 aa, Artificial Sequence
  Non-cyclic GFR-binding peptide
  MOD_RES (32)..(34): Xaa is C or S
VPTELEPISMLYLDEYDKVVKFKYEEMVVEGXGX

SEQ ID NO: 18680 - protein, 33 aa, Artificial Sequence
  Non-cyclic GFR-binding peptide
  MOD_RES (1)..(33): Xaa is C or S
XAPTKLSPISVLYIDDSSNVIYKQYENMVVRSX

SEQ ID NO: 18681 - protein, 34 aa, Artificial Sequence
  Non-cyclic GFR-binding peptide
  MOD_RES (32)..(34): Xaa is C or S
VPARLSPISILYKDAANNVVLKYHYDMVVEAXGX

SEQ ID NO: 18682 - protein, 35 aa, Artificial Sequence
  Non-cyclic GFR-binding peptide
  MOD_RES (2)..(3)..(34): Xaa is C or S
PXXVPQALSPISILYIVGRKPKVYKQYEMIVRSXK

SEQ ID NO: 18683 - protein, 39 aa, Artificial Sequence
  Non-cyclic GFR-binding peptide
  MOD_RES (4)..(5)..(37)..(39): Xaa is C or S
PKPXXAPTKLSPISVLYIDDSSNVIYKQYENMVVRSXGX

SEQ ID NO: 18684 - protein, 32 aa, Artificial Sequence
  Non-cyclic GFR-binding peptide
  MOD_RES (1)..(2): Xaa is C or S
XXVPTELEPISMLYLDEYDKVVKFKYEEMVVE

SEQ ID NO: 18685 - protein, 39 aa, Artificial Sequence
  Non-cyclic GFR-binding peptide
  MOD_RES (4)..(5)..(38): Xaa is C or S
  MOD_RES (19)..(20)..(21)..(22)..(23): Xaa is A or G
  MOD_RES (24)..(25)..(26)..(27): Xaa is A or G or absent
AAPXXVPQALEPISILYLXXXXXXXXXKFKYEMIVRSXK

SEQ ID NO: 18686 - protein, 38 aa, Artificial Sequence
  Non-cyclic GFR-binding peptide
  MOD_RES (3)..(4)..(36)..(38): Xaa is C or S
KPXXAPTQLSPISVLYIDDSSNVIYKQYENMVVRAXGX

SEQ ID NO: 18687 - protein, 40 aa, Artificial Sequence
  Non-cyclic GFR-binding peptide
  MOD_RES (6)..(7)..(40): Xaa is C or S
  MOD_RES (21)..(22)..(23)..(24)..(25): Xaa is A or G
  MOD_RES (26)..(27)..(28)..(29): Xaa is A or G or absent
ASASPXXVPQDLSPISILYIXXXXXXXXXYKQYEMVVKSX

SEQ ID NO: 18688 - protein, 36 aa, Artificial Sequence
  Non-cyclic GFR-binding peptide
  MOD_RES (33)..(35): Xaa is C or S
  MOD_RES (14)..(15)..(16)..(17)..(18): Xaa is A or G
  MOD_RES (19)..(20)..(21)..(22): Xaa is A or G or absent
VPQDLSPISILYIXXXXXXXXXYKQYEMVVKSXKXS

SEQ ID NO: 18689 - protein, 38 aa, Artificial Sequence
  Non-cyclic GFR-binding peptide
  MOD_RES (3)..(4)..(38): Xaa is C or S
  MOD_RES (18)..(19)..(20)..(21)..(22): Xaa is A or G
  MOD_RES (23)..(24)..(25)..(26): Xaa is A or G or absent
KAXXVPTELSPISMLYIXXXXXXXXXYKQYEEMVVEGX

SEQ ID NO: 18690 - protein, 38 aa, Artificial Sequence
  Non-cyclic GFR-binding peptide
  MOD_RES (2)..(3)..(36)..(38): Xaa is C or S
  MOD_RES (17)..(18)..(19)..(20)..(21): Xaa is A or G
  MOD_RES (22)..(23)..(24)..(25): Xaa is A or G or absent
PXXVSQDLEPISILYLXXXXXXXXXKFKYEMIVKSXKX

SEQ ID NO: 18691 - protein, 34 aa, Artificial Sequence
  Non-cyclic GFR-binding peptide
  MOD_RES (31)..(33): Xaa is C or S
VPQALEPISILYLVGRKPKVKFKYEMIVRSXKXS

SEQ ID NO: 18692 - protein, 32 aa, Artificial Sequence
  Non-cyclic GFR-binding peptide
  MOD_RES (1)..(1): Xaa is C or S
XVPTKLNAISILYFDKGVVTYLKKYRGMAVSE

SEQ ID NO: 18693 - protein, 36 aa, Artificial Sequence
  Non-cyclic GFR-binding peptide
  MOD_RES (1)..(2)..(36): Xaa is C or S
  MOD_RES (16)..(17)..(18)..(19)..(20): Xaa is A or G
  MOD_RES (21)..(22)..(23)..(24): Xaa is A or G or absent
XXAPTKLSPISVLYIXXXXXXXXXYKQYENMVVRSX

SEQ ID NO: 18694 - protein, 37 aa, Artificial Sequence
  Non-cyclic GFR-binding peptide
  MOD_RES (6)..(7): Xaa is C or S
SIPKAXXVPTELSPISMLYIDEYDKVVYKQYEEMVVE

SEQ ID NO: 18695 - protein, 39 aa, Artificial Sequence
  Non-cyclic GFR-binding peptide
  MOD_RES (6)..(7): Xaa is C or S
KVGKAXXVPTKLSPISVLYIDDMGVPTYKQYEEGMSVAE

SEQ ID NO: 18696 - protein, 32 aa, Artificial Sequence
  Non-cyclic GFR-binding peptide
  MOD_RES (1)..(1): Xaa is C or S
XVPTELSPISMLYIDEYDKVVYKQYEEMVVEG

SEQ ID NO: 18697 - protein, 34 aa, Artificial Sequence
  Non-cyclic GFR-binding peptide
  MOD_RES (1)..(34): Xaa is C or S
XVPTKLEPISVLYLDDMGVPTKFKYEEGMSVAEX

SEQ ID NO: 18698 - protein, 40 aa, Artificial Sequence
  Non-cyclic GFR-binding peptide
  MOD_RES (3)..(4)..(37)..(39): Xaa is C or S
  MOD_RES (18)..(19)..(20)..(21)..(22): Xaa is A or G
  MOD_RES (23)..(24)..(25)..(26): Xaa is A or G or absent
SPXXVPQDLEPISILYLXXXXXXXXXKFKYEMVVKSXKXS

SEQ ID NO: 18699 - protein, 35 aa, Artificial Sequence
  Non-cyclic GFR-binding peptide
  MOD_RES (2)..(3)..(35): Xaa is C or S
AXXVPTELSPISMLYIDEYDKVVYKQYEEMVVEGX

SEQ ID NO: 18700 - protein, 43 aa, Artificial Sequence
  Non-cyclic GFR-binding peptide
  MOD_RES (6)..(7)..(42): Xaa is C or S
  MOD_RES (21)..(22)..(23)..(24)..(25): Xaa is A or G
  MOD_RES (26)..(27)..(28)..(29): Xaa is A or G or absent
KVGKAXXVPTKLSPISVLYIXXXXXXXXXYKQYEEGMSVAEXG

SEQ ID NO: 18701 - protein, 35 aa, Artificial Sequence
  Non-cyclic GFR-binding peptide
  MOD_RES (2)..(3): Xaa is C or S
  MOD_RES (17)..(18)..(19)..(20)..(21): Xaa is A or G
  MOD_RES (22)..(23)..(24)..(25): Xaa is A or G or absent
PXXAPTQLSPISVLYIXXXXXXXXXYKQYENMVVR

SEQ ID NO: 18702 - protein, 36 aa, Artificial Sequence
  Non-cyclic GFR-binding peptide
  MOD_RES (3)..(4)..(35): Xaa is C or S
APXXVPQALSPISILYIVGRKPKVYKQYEMIVRSXK

SEQ ID NO: 18703 - protein, 40 aa, Artificial Sequence
  Non-cyclic GFR-binding peptide
  MOD_RES (3)..(4)..(38)..(40): Xaa is C or S
  MOD_RES (18)..(19)..(20)..(21)..(22): Xaa is A or G
  MOD_RES (23)..(24)..(25)..(26): Xaa is A or G or absent
KAXXVPTELSPISMLYIXXXXXXXXXYKQYEEMVVEGXGX

SEQ ID NO: 18704 - protein, 39 aa, Artificial Sequence
  Non-cyclic GFR-binding peptide
  MOD_RES (3)..(4)..(38): Xaa is C or S
  MOD_RES (18)..(19)..(20)..(21)..(22): Xaa is A or G
  MOD_RES (23)..(24)..(25)..(26): Xaa is A or G or absent
ASXXVPARLSPISILYKXXXXXXXXXLKYHYDMVVEAXG

SEQ ID NO: 18705 - protein, 39 aa, Artificial Sequence
  Non-cyclic GFR-binding peptide
  MOD_RES (4)..(5)..(38): Xaa is C or S
  MOD_RES (19)..(20)..(21)..(22)..(23): Xaa is A or G
  MOD_RES (24)..(25)..(26)..(27): Xaa is A or G or absent
ASPXXVSQDLEPISILYLXXXXXXXXXKFKYEMIVKSXK

SEQ ID NO: 18706 - protein, 36 aa, Artificial Sequence
  Non-cyclic GFR-binding peptide
  MOD_RES (1)..(33)..(35): Xaa is C or S
XVPTKLSPISILYKDKGVVTYLKYHYGMAVSEXGXR

SEQ ID NO: 18707 - protein, 41 aa, Artificial Sequence
  Non-cyclic GFR-binding peptide
  MOD_RES (5)..(6)..(40): Xaa is C or S
  MOD_RES (20)..(21)..(22)..(23)..(24): Xaa is A or G
  MOD_RES (25)..(26)..(27)..(28): Xaa is A or G or absent
APASXXVPARLSPISILYKXXXXXXXXXLKYHYDMVVEAXG

SEQ ID NO: 18708 - protein, 38 aa, Artificial Sequence
  Non-cyclic GFR-binding peptide
  MOD_RES (2)..(3)..(38): Xaa is C or S
  MOD_RES (17)..(18)..(19)..(20)..(21): Xaa is A or G
  MOD_RES (22)..(23)..(24)..(25): Xaa is A or G or absent
AXXVPTKLSPISVLYIXXXXXXXXXYKQYEEGMSVAEX

SEQ ID NO: 18709 - protein, 37 aa, Artificial Sequence
  Non-cyclic GFR-binding peptide
  MOD_RES (3)..(4): Xaa is C or S
  MOD_RES (18)..(19)..(20)..(21)..(22): Xaa is A or G
  MOD_RES (23)..(24)..(25)..(26): Xaa is A or G or absent
KAXXAPTKLSPISVLYIXXXXXXXXXYKQYENMVVKA

SEQ ID NO: 18710 - protein, 42 aa, Artificial Sequence
  Non-cyclic GFR-binding peptide
  MOD_RES (6)..(7)..(40)..(42): Xaa is C or S
KVGKAXXVPTKLSPISVLYIDDMGVPTYKQYEEGMSVAEXGX

SEQ ID NO: 18711 - protein, 38 aa, Artificial Sequence
  Non-cyclic GFR-binding peptide
  MOD_RES (5)..(6)..(38): Xaa is C or S
IPKAXXVPTELSPISMLYIDENEKVVYKQYEDMVVEGX

SEQ ID NO: 18712 - protein, 42 aa, Artificial Sequence
  Non-cyclic GFR-binding peptide
  MOD_RES (3)..(4)..(39)..(41): Xaa is C or S
  MOD_RES (18)..(19)..(20)..(21)..(22): Xaa is A or G
  MOD_RES (23)..(24)..(25)..(26): Xaa is A or G or absent
KAXXVPTKLEPISVLYLXXXXXXXXXKFKYEEGMSVAEXGXR

SEQ ID NO: 18713 - protein, 37 aa, Artificial Sequence
  Non-cyclic GFR-binding peptide
  MOD_RES (6)..(7): Xaa is C or S
AVPKAXXAPTKLSPISVLYIDSSNNVIYKQYENMVVK

SEQ ID NO: 18714 - protein, 39 aa, Artificial Sequence
  Non-cyclic GFR-binding peptide
  MOD_RES (5)..(6)..(37)..(39): Xaa is C or S
SASPXXVPQDLSPISILYIVGRTPKVYKQYEMVVKSXKX

SEQ ID NO: 18715 - protein, 39 aa, Artificial Sequence
  Non-cyclic GFR-binding peptide
  MOD_RES (1)..(2)..(36)..(38): Xaa is C or S
  MOD_RES (16)..(17)..(18)..(19)..(20): Xaa is A or G
  MOD_RES (21)..(22)..(23)..(24): Xaa is A or G or absent
XXVPARLEPISILYLXXXXXXXXXKFKYEDMVVEAXGXR

SEQ ID NO: 18716 - protein, 36 aa, Artificial Sequence
  Non-cyclic GFR-binding peptide
  MOD_RES (3)..(4): Xaa is C or S
  MOD_RES (18)..(19)..(20)..(21)..(22): Xaa is A or G
  MOD_RES (23)..(24)..(25)..(26): Xaa is A or G or absent
KAXXVPTKLSPISILYIXXXXXXXXXYKQYEGMAVS

SEQ ID NO: 18717 - protein, 37 aa, Artificial Sequence
  Non-cyclic GFR-binding peptide
  MOD_RES (3)..(4)..(35)..(37): Xaa is C or S
APXXVPQALSPISILYIVGRKPKVYKQYEMIVRSXKX

SEQ ID NO: 18718 - protein, 32 aa, Artificial Sequence
  Non-cyclic GFR-binding peptide
  MOD_RES (31)..(31): Xaa is C or S
VPQALEPISILYLVGRKPKVKFKYEMIVRSXK

SEQ ID NO: 18719 - protein, 35 aa, Artificial Sequence
  Non-cyclic GFR-binding peptide
  MOD_RES (4)..(5): Xaa is C or S
PKAXXAPTKLSPISVLYIDSSNNVIYKQYENMVVK

SEQ ID NO: 18720 - protein, 37 aa, Artificial Sequence
  Non-cyclic GFR-binding peptide
  MOD_RES (1)..(2)..(37): Xaa is C or S
  MOD_RES (16)..(17)..(18)..(19)..(20): Xaa is A or G
  MOD_RES (21)..(22)..(23)..(24): Xaa is A or G or absent
XXVPTKLEPISVLYLXXXXXXXXXKFKYEEGMSVAEX

SEQ ID NO: 18721 - protein, 41 aa, Artificial Sequence
  Non-cyclic GFR-binding peptide
  MOD_RES (5)..(6)..(40): Xaa is C or S
  MOD_RES (20)..(21)..(22)..(23)..(24): Xaa is A or G
  MOD_RES (25)..(26)..(27)..(28): Xaa is A or G or absent
VPKPXXAPTQLSPISVLYIXXXXXXXXXYKQYENMVVRAXG

SEQ ID NO: 18722 - protein, 42 aa, Artificial Sequence
  Non-cyclic GFR-binding peptide
  MOD_RES (6)..(7)..(39)..(41): Xaa is C or S
AVPKAXXAPTKLSPISVLYIDSSNNVIYKQYENMVVKAXGXH

SEQ ID NO: 18723 - protein, 32 aa, Artificial Sequence
  Non-cyclic GFR-binding peptide
  MOD_RES (14)..(15)..(16)..(17)..(18): Xaa is A or G
  MOD_RES (19)..(20)..(21)..(22): Xaa is A or G or absent
VPQDLEPISILYLXXXXXXXXXKFKYEMVVKS

SEQ ID NO: 18724 - protein, 36 aa, Artificial Sequence
  Non-cyclic GFR-binding peptide
  MOD_RES (2)..(3)..(35): Xaa is C or S
SXXVPARLSPISILYKDAANNVVLKYHYDMVVEAXG

SEQ ID NO: 18725 - protein, 33 aa, Artificial Sequence
  Non-cyclic GFR-binding peptide
  MOD_RES (1)..(33): Xaa is C or S
XVPTKLSPISILYKDKGVVTYLKYHYGMAVSEX

SEQ ID NO: 18726 - protein, 38 aa, Artificial Sequence
  Non-cyclic GFR-binding peptide
  MOD_RES (1)..(35)..(37): Xaa is C or S
  MOD_RES (15)..(16)..(17)..(18)..(19): Xaa is A or G
  MOD_RES (20)..(21)..(22)..(23): Xaa is A or G or absent
XAPTQLEPISVLYLXXXXXXXXXKFKYENMVVRAXGXH

SEQ ID NO: 18727 - protein, 39 aa, Artificial Sequence
  Non-cyclic GFR-binding peptide
  MOD_RES (4)..(5)..(38): Xaa is C or S
GKAXXVPTKLEPISVLYLDDMGVPTKFKYEEGMSVAEXG

SEQ ID NO: 18728 - protein, 34 aa, Artificial Sequence
  Non-cyclic GFR-binding peptide
  MOD_RES (2)..(3)..(34): Xaa is C or S
PXXVPQALSPISILYIVGRKPKVYKQYEMIVRSX

SEQ ID NO: 18729 - protein, 42 aa, Artificial Sequence
  Non-cyclic GFR-binding peptide
  MOD_RES (6)..(7)..(41): Xaa is C or S
  MOD_RES (21)..(22)..(23)..(24)..(25): Xaa is A or G
  MOD_RES (26)..(27)..(28)..(29): Xaa is A or G or absent
YVPKPXXAPTKLSPISVLYIXXXXXXXXXYKQYENMVVRSXG

SEQ ID NO: 18730 - protein, 35 aa, Artificial Sequence
  Non-cyclic GFR-binding peptide
  MOD_RES (4)..(5): Xaa is C or S
PASXXVPARLEPISILYLDAANNVVKFKYEDMVVE

SEQ ID NO: 18731 - protein, 37 aa, Artificial Sequence
  Non-cyclic GFR-binding peptide
  MOD_RES (1)..(2)..(36): Xaa is C or S
  MOD_RES (16)..(17)..(18)..(19)..(20): Xaa is A or G
  MOD_RES (21)..(22)..(23)..(24): Xaa is A or G or absent
XXVPTKLSPISILYKXXXXXXXXXLKYHYGMAVSEXG

SEQ ID NO: 18732 - protein, 38 aa, Artificial Sequence
  Non-cyclic GFR-binding peptide
  MOD_RES (7)..(7): Xaa is C or S
HVTKPTXAPTKLEPISVLYLDDSSNVIKFKYENMVVRS

SEQ ID NO: 18733 - protein, 37 aa, Artificial Sequence
  Non-cyclic GFR-binding peptide
  MOD_RES (5)..(5): Xaa is C or S
  MOD_RES (19)..(20)..(21)..(22)..(23): Xaa is A or G
  MOD_RES (24)..(25)..(26)..(27): Xaa is A or G or absent
TKPTXAPTKLEPISVLYLXXXXXXXXXKFKYENMVVR

SEQ ID NO: 18734 - protein, 34 aa, Artificial Sequence
  Non-cyclic GFR-binding peptide
  MOD_RES (1)..(1): Xaa is C or S
  MOD_RES (15)..(16)..(17)..(18)..(19): Xaa is A or G
  MOD_RES (20)..(21)..(22)..(23): Xaa is A or G or absent
XVPARLSPISILYKXXXXXXXXXLKYHYDMVVEA

SEQ ID NO: 18735 - protein, 34 aa, Artificial Sequence
  Non-cyclic GFR-binding peptide
  MOD_RES (32)..(34): Xaa is C or S
VPTELSPISMLYIDEYDKVVYKQYEEMVVEGXGX

SEQ ID NO: 18736 - protein, 39 aa, Artificial Sequence
  Non-cyclic GFR-binding peptide
  MOD_RES (1)..(2)..(36)..(38): Xaa is C or S
  MOD_RES (16)..(17)..(18)..(19)..(20): Xaa is A or G
  MOD_RES (21)..(22)..(23)..(24): Xaa is A or G or absent
XXAPTKLEPISVLYLXXXXXXXXXKFKYENMVVRSXGXH

SEQ ID NO: 18737 - protein, 40 aa, Artificial Sequence
  Non-cyclic GFR-binding peptide
  MOD_RES (6)..(7): Xaa is C or S
  MOD_RES (21)..(22)..(23)..(24)..(25): Xaa is A or G
  MOD_RES (26)..(27)..(28)..(29): Xaa is A or G or absent
KASKAXXVPTKLNAISILYFXXXXXXXXXLKKYRGMAVSE

SEQ ID NO: 18738 - protein, 35 aa, Artificial Sequence
  Non-cyclic GFR-binding peptide
  MOD_RES (1)..(2)..(35): Xaa is C or S
  MOD_RES (16)..(17)..(18)..(19)..(20): Xaa is A or G
  MOD_RES (21)..(22)..(23)..(24): Xaa is A or G or absent
XXVPQALEPISILYLXXXXXXXXXKFKYEMIVRSX

SEQ ID NO: 18739 - protein, 34 aa, Artificial Sequence
  Non-cyclic GFR-binding peptide
  MOD_RES (4)..(4): Xaa is C or S
KPTXAPTKLEPISVLYLDDSSNVIKFKYENMVVR

SEQ ID NO: 18740 - protein, 38 aa, Artificial Sequence
  Non-cyclic GFR-binding peptide
  MOD_RES (5)..(6): Xaa is C or S
  MOD_RES (20)..(21)..(22)..(23)..(24): Xaa is A or G
  MOD_RES (25)..(26)..(27)..(28): Xaa is A or G or absent
VPKAXXAPTKLEPISVLYLXXXXXXXXXKFKYENMVVK

SEQ ID NO: 18741 - protein, 39 aa, Artificial Sequence
  Non-cyclic GFR-binding peptide
  MOD_RES (3)..(4)..(36)..(38): Xaa is C or S
KPXXAPTQLSPISVLYIDDSSNVIYKQYENMVVRAXGXH

SEQ ID NO: 18742 - protein, 37 aa, Artificial Sequence
  Non-cyclic GFR-binding peptide
  MOD_RES (3)..(4)..(36): Xaa is C or S
KPXXAPTKLSPISVLYIDDSSNVIYKQYENMVVRSXG

SEQ ID NO: 18743 - protein, 34 aa, Artificial Sequence
  Non-cyclic GFR-binding peptide
  MOD_RES (1)..(1): Xaa is C or S
  MOD_RES (15)..(16)..(17)..(18)..(19): Xaa is A or G
  MOD_RES (20)..(21)..(22)..(23): Xaa is A or G or absent
XVPTKLSPISILYIXXXXXXXXXYKQYEGMAVSE

SEQ ID NO: 18744 - protein, 39 aa, Artificial Sequence
  Non-cyclic GFR-binding peptide
  MOD_RES (5)..(6)..(39): Xaa is C or S
  MOD_RES (20)..(21)..(22)..(23)..(24): Xaa is A or G
  MOD_RES (25)..(26)..(27)..(28): Xaa is A or G or absent
SASPXXVSQDLSPISILYIXXXXXXXXXYKQYEMIVKSX

SEQ ID NO: 18745 - protein, 38 aa, Artificial Sequence
  Non-cyclic GFR-binding peptide
  MOD_RES (1)..(2)..(35)..(37): Xaa is C or S
  MOD_RES (16)..(17)..(18)..(19)..(20): Xaa is A or G
  MOD_RES (21)..(22)..(23)..(24): Xaa is A or G or absent
XXVPQALEPISILYLXXXXXXXXXKFKYEMIVRSXKXS

SEQ ID NO: 18746 - protein, 30 aa, Artificial Sequence
  Non-cyclic GFR-binding peptide
VPTKLNAISILYFDKGVVTYLKKYRGMAVS

SEQ ID NO: 18747 - protein, 33 aa, Artificial Sequence
  Non-cyclic GFR-binding peptide
  MOD_RES (1)..(2)..(33): Xaa is C or S
XXVSQDLEPISILYLIGKTPKIKFKYEMIVKSX

SEQ ID NO: 18748 - protein, 30 aa, Artificial Sequence; identical to SEQ ID NO: 951
  Non-cyclic GFR-binding peptide

SEQ ID NO: 18749 - protein, 39 aa, Artificial Sequence
  Non-cyclic GFR-binding peptide
  MOD_RES (5)..(6)..(39): Xaa is C or S
VGKAXXVPTKLSPISVLYIDDMGVPTYKQYEEGMSVAEX

SEQ ID NO: 18750 - protein, 37 aa, Artificial Sequence
  Non-cyclic GFR-binding peptide
  MOD_RES (3)..(4)..(35)..(37): Xaa is C or S
SPXXVSQDLEPISILYLIGKTPKIKFKYEMIVKSXKX

SEQ ID NO: 18751 - protein, 35 aa, Artificial Sequence
  Non-cyclic GFR-binding peptide
  MOD_RES (2)..(3): Xaa is C or S
  MOD_RES (17)..(18)..(19)..(20)..(21): Xaa is A or G
  MOD_RES (22)..(23)..(24)..(25): Xaa is A or G or absent
PXXVPQDLEPISILYLXXXXXXXXXKFKYEMVVKS

SEQ ID NO: 18752 - protein, 36 aa, Artificial Sequence
  Non-cyclic GFR-binding peptide
  MOD_RES (5)..(6): Xaa is C or S
VPKPXXAPTQLSPISVLYIDDSSNVIYKQYENMVVR

SEQ ID NO: 18753 - protein, 40 aa, Artificial Sequence
  Non-cyclic GFR-binding peptide
  MOD_RES (5)..(37)..(39): Xaa is C or S
TKPTXAPTKLEPISVLYLDDSSNVIKFKYENMVVRSXGXH

SEQ ID NO: 18754 - protein, 38 aa, Artificial Sequence
  Non-cyclic GFR-binding peptide
  MOD_RES (1)..(2)..(37): Xaa is C or S
  MOD_RES (16)..(17)..(18)..(19)..(20): Xaa is A or G
  MOD_RES (21)..(22)..(23)..(24): Xaa is A or G or absent
XXVPTKLSPISVLYIXXXXXXXXXYKQYEEGMSVAEXG

SEQ ID NO: 18755 - protein, 38 aa, Artificial Sequence
  Non-cyclic GFR-binding peptide
  MOD_RES (2)..(3)..(37): Xaa is C or S
  MOD_RES (17)..(18)..(19)..(20)..(21): Xaa is A or G
  MOD_RES (22)..(23)..(24)..(25): Xaa is A or G or absent
AXXVPTELEPISMLYLXXXXXXXXXKFKYEEMVVEGXG

SEQ ID NO: 18756 - protein, 38 aa, Artificial Sequence
  Non-cyclic GFR-binding peptide
  MOD_RES (5)..(6)..(37): Xaa is C or S
SASPXXVPQDLEPISILYLVGRTPKVKFKYEMVVKSXK

SEQ ID NO: 18757 - protein, 35 aa, Artificial Sequence
  Non-cyclic GFR-binding peptide
  MOD_RES (1)..(2): Xaa is C or S
  MOD_RES (16)..(17)..(18)..(19)..(20): Xaa is A or G
  MOD_RES (21)..(22)..(23)..(24): Xaa is A or G or absent
XXAPTKLEPISVLYLXXXXXXXXXKFKYENMVVKA

SEQ ID NO: 18758 - protein, 35 aa, Artificial Sequence
  Non-cyclic GFR-binding peptide
  MOD_RES (2)..(3)..(35): Xaa is C or S
AXXVPTELEPISMLYLDENEKVVKFKYEDMVVEGX

SEQ ID NO: 18759 - protein, 37 aa, Artificial Sequence
  Non-cyclic GFR-binding peptide
  MOD_RES (3)..(4)..(36): Xaa is C or S
KAXXAPTKLSPISVLYIDSSNNVIYKQYENMVVKAXG

SEQ ID NO: 18760 - protein, 35 aa, Artificial Sequence
  Non-cyclic GFR-binding peptide
  MOD_RES (1)..(2): Xaa is C or S
  MOD_RES (16)..(17)..(18)..(19)..(20): Xaa is A or G
  MOD_RES (21)..(22)..(23)..(24): Xaa is A or G or absent
XXVPTKLNAISILYFXXXXXXXXXLKKYRGMAVSE

SEQ ID NO: 18761 - protein, 38 aa, Artificial Sequence
  Non-cyclic GFR-binding peptide
  MOD_RES (4)..(5): Xaa is C or S
  MOD_RES (19)..(20)..(21)..(22)..(23): Xaa is A or G
  MOD_RES (24)..(25)..(26)..(27): Xaa is A or G or absent
PASXXVPARLEPISILYLXXXXXXXXXKFKYEDMVVEA

SEQ ID NO: 18762 - protein, 39 aa, Artificial Sequence
  Non-cyclic GFR-binding peptide
  MOD_RES (5)..(6): Xaa is C or S
  MOD_RES (20)..(21)..(22)..(23)..(24): Xaa is A or G
  MOD_RES (25)..(26)..(27)..(28): Xaa is A or G or absent
VPKAXXAPTKLSPISVLYIXXXXXXXXXYKQYENMVVKA

SEQ ID NO: 18763 - protein, 35 aa, Artificial Sequence
  Non-cyclic GFR-binding peptide
  MOD_RES (4)..(5): Xaa is C or S
PASXXVPARLNAISILYFDAANNVVLKKYRDMVVE

SEQ ID NO: 18764 - protein, 41 aa, Artificial Sequence
  Non-cyclic GFR-binding peptide
  MOD_RES (6)..(7)..(40): Xaa is C or S
  MOD_RES (21)..(22)..(23)..(24)..(25): Xaa is A or G
  MOD_RES (26)..(27)..(28)..(29): Xaa is A or G or absent
ASAAPXXVPQALSPISILYIXXXXXXXXXYKQYEMIVRSXK

SEQ ID NO: 18765 - protein, 34 aa, Artificial Sequence
  Non-cyclic GFR-binding peptide
  MOD_RES (3)..(4): Xaa is C or S
ASXXVPARLSPISILYKDAANNVVLKYHYDMVVE

SEQ ID NO: 18766 - protein, 39 aa, Artificial Sequence
  Non-cyclic GFR-binding peptide
  MOD_RES (6)..(7)..(39): Xaa is C or S
AAPASXXVPARLNAISILYFDAANNVVLKKYRDMVVEAX

SEQ ID NO: 18767 - protein, 36 aa, Artificial Sequence
  Non-cyclic GFR-binding peptide
  MOD_RES (33)..(35): Xaa is C or S
VPTKLEPISVLYLDDMGVPTKFKYEEGMSVAEXGXR

SEQ ID NO: 18768 - protein, 36 aa, Artificial Sequence
  Non-cyclic GFR-binding peptide
  MOD_RES (34)..(36): Xaa is C or S
  MOD_RES (14)..(15)..(16)..(17)..(18): Xaa is A or G
  MOD_RES (19)..(20)..(21)..(22): Xaa is A or G or absent
VPTELSPISMLYIXXXXXXXXXYKQYEDMVVEGXGX

SEQ ID NO: 18769 - protein, 40 aa, Artificial Sequence
  Non-cyclic GFR-binding peptide
  MOD_RES (4)..(5)..(39): Xaa is C or S
  MOD_RES (19)..(20)..(21)..(22)..(23): Xaa is A or G
  MOD_RES (24)..(25)..(26)..(27): Xaa is A or G or absent
SKAXXVPTKLSPISILYKXXXXXXXXXLKYHYGMAVSEXG

SEQ ID NO: 18770 - protein, 41 aa, Artificial Sequence
  Non-cyclic GFR-binding peptide
  MOD_RES (6)..(7)..(39)..(41): Xaa is C or S
KASKAXXVPTKLNAISILYFDKGVVTYLKKYRGMAVSEXGX

SEQ ID NO: 18771 - protein, 37 aa, Artificial Sequence
  Non-cyclic GFR-binding peptide
  MOD_RES (6)..(7): Xaa is C or S
KIPKAXXVPTELSPISMLYIDENEKVVYKQYEDMVVE

SEQ ID NO: 18772 - protein, 34 aa, Artificial Sequence
  Non-cyclic GFR-binding peptide
  MOD_RES (34)..(34): Xaa is C or S
  MOD_RES (14)..(15)..(16)..(17)..(18): Xaa is A or G
  MOD_RES (19)..(20)..(21)..(22): Xaa is A or G or absent
VPTELEPISMLYLXXXXXXXXXKFKYEEMVVEGX

SEQ ID NO: 18773 - protein, 37 aa, Artificial Sequence
  Non-cyclic GFR-binding peptide
  MOD_RES (6)..(7): Xaa is C or S
ASASPXXVSQDLEPISILYLIGKTPKIKFKYEMIVKS

SEQ ID NO: 18774 - protein, 39 aa, Artificial Sequence
  Non-cyclic GFR-binding peptide
  MOD_RES (5)..(6)..(38): Xaa is C or S
APASXXVPARLSPISILYKDAANNVVLKYHYDMVVEAXG

SEQ ID NO: 18775 - protein, 38 aa, Artificial Sequence
  Non-cyclic GFR-binding peptide
  MOD_RES (5)..(6): Xaa is C or S
  MOD_RES (20)..(21)..(22)..(23)..(24): Xaa is A or G
  MOD_RES (25)..(26)..(27)..(28): Xaa is A or G or absent
SAAPXXVPQALSPISILYIXXXXXXXXXYKQYEMIVRS

SEQ ID NO: 18776 - protein, 32 aa, Artificial Sequence
  Non-cyclic GFR-binding peptide
  MOD_RES (14)..(15)..(16)..(17)..(18): Xaa is A or G
  MOD_RES (19)..(20)..(21)..(22): Xaa is A or G or absent
VPTKLSPISILYIXXXXXXXXXYKQYEGMAVS

SEQ ID NO: 18777 - protein, 37 aa, Artificial Sequence
  Non-cyclic GFR-binding peptide
  MOD_RES (4)..(5): Xaa is C or S
  MOD_RES (19)..(20)..(21)..(22)..(23): Xaa is A or G
  MOD_RES (24)..(25)..(26)..(27): Xaa is A or G or absent
PKAXXVPTELSPISMLYIXXXXXXXXXYKQYEEMVVE

SEQ ID NO: 18778 - protein, 38 aa, Artificial Sequence
  Non-cyclic GFR-binding peptide
  MOD_RES (5)..(6): Xaa is C or S
  MOD_RES (20)..(21)..(22)..(23)..(24): Xaa is A or G
  MOD_RES (25)..(26)..(27)..(28): Xaa is A or G or absent
APASXXVPARLEPISILYLXXXXXXXXXKFKYEDMVVE

SEQ ID NO: 18779 - protein, 33 aa, Artificial Sequence
  Non-cyclic GFR-binding peptide
  MOD_RES (1)..(1): Xaa is C or S
XVPTKLEPISVLYLDDMGVPTKFKYEEGMSVAE

SEQ ID NO: 18780 - protein, 32 aa, Artificial Sequence
  Non-cyclic GFR-binding peptide
  MOD_RES (1)..(1): Xaa is C or S
XVPARLSPISILYKDAANNVVLKYHYDMVVEA

SEQ ID NO: 18781 - protein, 43 aa, Artificial Sequence
  Non-cyclic GFR-binding peptide
  MOD_RES (5)..(6)..(40)..(42): Xaa is C or S
  MOD_RES (20)..(21)..(22)..(23)..(24): Xaa is A or G
  MOD_RES (25)..(26)..(27)..(28): Xaa is A or G or absent
ASKAXXVPTKLSPISILYKXXXXXXXXXLKYHYGMAVSEXGXR

SEQ ID NO: 18782 - protein, 41 aa, Artificial Sequence
  Non-cyclic GFR-binding peptide
  MOD_RES (3)..(4)..(38)..(40): Xaa is C or S
  MOD_RES (18)..(19)..(20)..(21)..(22): Xaa is A or G
  MOD_RES (23)..(24)..(25)..(26): Xaa is A or G or absent
KPXXAPTQLSPISVLYIXXXXXXXXXYKQYENMVVRAXGXH

SEQ ID NO: 18783 - protein, 44 aa, Artificial Sequence
  Non-cyclic GFR-binding peptide
  MOD_RES (7)..(41)..(43): Xaa is C or S
  MOD_RES (21)..(22)..(23)..(24)..(25): Xaa is A or G
  MOD_RES (26)..(27)..(28)..(29): Xaa is A or G or absent
HVTKPTXAPTKLSPISVLYIXXXXXXXXXYKQYENMVVRSXGXH

SEQ ID NO: 18784 - protein, 42 aa, Artificial Sequence
  Non-cyclic GFR-binding peptide
  MOD_RES (6)..(7)..(39)..(41): Xaa is C or S
SIPKAXXVPTELEPISMLYLDEYDKVVKFKYEEMVVEGXGXR

SEQ ID NO: 18785 - protein, 42 aa, Artificial Sequence
  Non-cyclic GFR-binding peptide
  MOD_RES (4)..(5)..(39)..(41): Xaa is C or S
  MOD_RES (19)..(20)..(21)..(22)..(23): Xaa is A or G
  MOD_RES (24)..(25)..(26)..(27): Xaa is A or G or absent
PKAXXAPTKLSPISVLYIXXXXXXXXXYKQYENMVVKAXGXH

SEQ ID NO: 18786 - protein, 44 aa, Artificial Sequence
  Non-cyclic GFR-binding peptide
  MOD_RES (6)..(7)..(41)..(43): Xaa is C or S
  MOD_RES (21)..(22)..(23)..(24)..(25): Xaa is A or G
  MOD_RES (26)..(27)..(28)..(29): Xaa is A or G or absent
AVPKAXXAPTKLSPISVLYIXXXXXXXXXYKQYENMVVKAXGXH

SEQ ID NO: 18787 - protein, 38 aa, Artificial Sequence
  Non-cyclic GFR-binding peptide
  MOD_RES (4)..(5): Xaa is C or S
  MOD_RES (19)..(20)..(21)..(22)..(23): Xaa is A or G
  MOD_RES (24)..(25)..(26)..(27): Xaa is A or G or absent
SKAXXVPTKLSPISILYKXXXXXXXXXLKYHYGMAVSE

SEQ ID NO: 18788 - protein, 38 aa, Artificial Sequence
  Non-cyclic GFR-binding peptide
  MOD_RES (4)..(5): Xaa is C or S
  MOD_RES (19)..(20)..(21)..(22)..(23): Xaa is A or G
  MOD_RES (24)..(25)..(26)..(27): Xaa is A or G or absent
PASXXVPARLSPISILYKXXXXXXXXXLKYHYDMVVEA

SEQ ID NO: 18789 - protein, 40 aa, Artificial Sequence
  Non-cyclic GFR-binding peptide
  MOD_RES (6)..(7)..(38)..(40): Xaa is C or S
ASAAPXXVPQALSPISILYIVGRKPKVYKQYEMIVRSXKX

SEQ ID NO: 18790 - protein, 36 aa, Artificial Sequence
  Non-cyclic GFR-binding peptide
  MOD_RES (1)..(2)..(35): Xaa is C or S
XXVPTKLEPISVLYLDDMGVPTKFKYEEGMSVAEXG

SEQ ID NO: 18791 - protein, 34 aa, Artificial Sequence
  Non-cyclic GFR-binding peptide
  MOD_RES (34)..(34): Xaa is C or S
  MOD_RES (14)..(15)..(16)..(17)..(18): Xaa is A or G
  MOD_RES (19)..(20)..(21)..(22): Xaa is A or G or absent
VPTKLNAISILYFXXXXXXXXXLKKYRGMAVSEX

SEQ ID NO: 18792 - protein, 43 aa, Artificial Sequence
  Non-cyclic GFR-binding peptide
  MOD_RES (5)..(6)..(40)..(42): Xaa is C or S
  MOD_RES (20)..(21)..(22)..(23)..(24): Xaa is A or G
  MOD_RES (25)..(26)..(27)..(28): Xaa is A or G or absent
ASKAXXVPTKLSPISILYIXXXXXXXXXYKQYEGMAVSEXGXR

SEQ ID NO: 18793 - protein, 38 aa, Artificial Sequence
  Non-cyclic GFR-binding peptide
  MOD_RES (3)..(4)..(36)..(38): Xaa is C or S
KAXXVPTKLSPISILYKDKGVVTYLKYHYGMAVSEXGX

SEQ ID NO: 18794 - protein, 37 aa, Artificial Sequence
  Non-cyclic GFR-binding peptide
  MOD_RES (4)..(5)..(37): Xaa is C or S
PKAXXVPTELSPISMLYIDENEKVVYKQYEDMVVEGX

SEQ ID NO: 18795 - protein, 39 aa, Artificial Sequence
  Non-cyclic GFR-binding peptide
  MOD_RES (2)..(3)..(36)..(38): Xaa is C or S
  MOD_RES (17)..(18)..(19)..(20)..(21): Xaa is A or G
  MOD_RES (22)..(23)..(24)..(25): Xaa is A or G or absent
PXXVSQDLEPISILYLXXXXXXXXXKFKYEMIVKSXKXS

SEQ ID NO: 18796 - protein, 37 aa, Artificial Sequence
  Non-cyclic GFR-binding peptide
  MOD_RES (4)..(5)..(36): Xaa is C or S
AAPXXVPQALEPISILYLVGRKPKVKFKYEMIVRSXK

SEQ ID NO: 18797 - protein, 33 aa, Artificial Sequence
  Non-cyclic GFR-binding peptide
  MOD_RES (2)..(3): Xaa is C or S
PXXAPTKLSPISVLYIDDSSNVIYKQYENMVVR

SEQ ID NO: 18798 - protein, 34 aa, Artificial Sequence
  Non-cyclic GFR-binding peptide
  MOD_RES (1)..(33): Xaa is C or S
XVPTELEPISMLYLDEYDKVVKFKYEEMVVEGXG

SEQ ID NO: 18799 - protein, 38 aa, Artificial Sequence
  Non-cyclic GFR-binding peptide
  MOD_RES (5)..(6)..(38): Xaa is C or S
IPKAXXVPTELEPISMLYLDEYDKVVKFKYEEMVVEGX

SEQ ID NO: 18800 - protein, 38 aa, Artificial Sequence
  Non-cyclic GFR-binding peptide
  MOD_RES (2)..(3)..(36)..(38): Xaa is C or S
AXXVPTKLSPISVLYIDDMGVPTYKQYEEGMSVAEXGX

SEQ ID NO: 18801 - protein, 38 aa, Artificial Sequence
  Non-cyclic GFR-binding peptide
  MOD_RES (1)..(2)..(35)..(37): Xaa is C or S
  MOD_RES (16)..(17)..(18)..(19)..(20): Xaa is A or G
  MOD_RES (21)..(22)..(23)..(24): Xaa is A or G or absent
XXVPQALSPISILYIXXXXXXXXXYKQYEMIVRSXKXS

SEQ ID NO: 18802 - protein, 31 aa, Artificial Sequence
  Non-cyclic GFR-binding peptide
VPTELSPISMLYIDENEKVVYKQYEDMVVEG

SEQ ID NO: 18803 - protein, 40 aa, Artificial Sequence
  Non-cyclic GFR-binding peptide
  MOD_RES (4)..(5)..(39): Xaa is C or S
  MOD_RES (19)..(20)..(21)..(22)..(23): Xaa is A or G
  MOD_RES (24)..(25)..(26)..(27): Xaa is A or G or absent
PKPXXAPTQLSPISVLYIXXXXXXXXXYKQYENMVVRAXG

SEQ ID NO: 18804 - protein, 38 aa, Artificial Sequence
  Non-cyclic GFR-binding peptide
  MOD_RES (5)..(6): Xaa is C or S
  MOD_RES (20)..(21)..(22)..(23)..(24): Xaa is A or G
  MOD_RES (25)..(26)..(27)..(28): Xaa is A or G or absent
VPKPXXAPTKLSPISVLYIXXXXXXXXXYKQYENMVVR

SEQ ID NO: 18805 - protein, 35 aa, Artificial Sequence
  Non-cyclic GFR-binding peptide
  MOD_RES (4)..(4): Xaa is C or S
KPTXAPTKLEPISVLYLDDSSNVIKFKYENMVVRS

SEQ ID NO: 18806 - protein, 37 aa, Artificial Sequence
  Non-cyclic GFR-binding peptide
  MOD_RES (34)..(36): Xaa is C or S
  MOD_RES (14)..(15)..(16)..(17)..(18): Xaa is A or G
  MOD_RES (19)..(20)..(21)..(22): Xaa is A or G or absent
VPTKLSPISILYKXXXXXXXXXLKYHYGMAVSEXGXR

SEQ ID NO: 18807 - protein, 35 aa, Artificial Sequence
  Non-cyclic GFR-binding peptide
  MOD_RES (1)..(2): Xaa is C or S
  MOD_RES (16)..(17)..(18)..(19)..(20): Xaa is A or G
  MOD_RES (21)..(22)..(23)..(24): Xaa is A or G or absent
XXAPTKLEPISVLYLXXXXXXXXXKFKYENMVVRS

SEQ ID NO: 18808 - protein, 39 aa, Artificial Sequence
  Non-cyclic GFR-binding peptide
  MOD_RES (3)..(4)..(38): Xaa is C or S
  MOD_RES (18)..(19)..(20)..(21)..(22): Xaa is A or G
  MOD_RES (23)..(24)..(25)..(26): Xaa is A or G or absent
KPXXAPTKLSPISVLYIXXXXXXXXXYKQYENMVVRSXG

SEQ ID NO: 18809 - protein, 36 aa, Artificial Sequence
  Non-cyclic GFR-binding peptide
  MOD_RES (1)..(35): Xaa is C or S
  MOD_RES (15)..(16)..(17)..(18)..(19): Xaa is A or G
  MOD_RES (20)..(21)..(22)..(23): Xaa is A or G or absent
XAPTQLSPISVLYIXXXXXXXXXYKQYENMVVRAXG

SEQ ID NO: 18810 - protein, 38 aa, Artificial Sequence
  Non-cyclic GFR-binding peptide
  MOD_RES (5)..(6): Xaa is C or S
  MOD_RES (20)..(21)..(22)..(23)..(24): Xaa is A or G
  MOD_RES (25)..(26)..(27)..(28): Xaa is A or G or absent
VPKPXXAPTQLEPISVLYLXXXXXXXXXKFKYENMVVR

SEQ ID NO: 18811 - protein, 38 aa, Artificial Sequence
  Non-cyclic GFR-binding peptide
  MOD_RES (4)..(5): Xaa is C or S
  MOD_RES (19)..(20)..(21)..(22)..(23): Xaa is A or G
  MOD_RES (24)..(25)..(26)..(27): Xaa is A or G or absent
SKAXXVPTKLSPISILYIXXXXXXXXXYKQYEGMAVSE

SEQ ID NO: 18812 - protein, 35 aa, Artificial Sequence
  Non-cyclic GFR-binding peptide
  MOD_RES (32)..(34): Xaa is C or S
VPTELEPISMLYLDEYDKVVKFKYEEMVVEGXGXR

SEQ ID NO: 18813 - protein, 35 aa, Artificial Sequence
  Non-cyclic GFR-binding peptide
  MOD_RES (1)..(35): Xaa is C or S
  MOD_RES (15)..(16)..(17)..(18)..(19): Xaa is A or G
  MOD_RES (20)..(21)..(22)..(23): Xaa is A or G or absent
XAPTKLSPISVLYIXXXXXXXXXYKQYENMVVRSX

SEQ ID NO: 18814 - protein, 32 aa, Artificial Sequence
  Non-cyclic GFR-binding peptide
  MOD_RES (1)..(2): Xaa is C or S
XXVPQDLEPISILYLVGRTPKVKFKYEMVVKS

SEQ ID NO: 18815 - protein, 41 aa, Artificial Sequence
  Non-cyclic GFR-binding peptide
  MOD_RES (5)..(6)..(38)..(40): Xaa is C or S
ASKAXXVPTKLSPISILYIDKGVVTYYKQYEGMAVSEXGXR

SEQ ID NO: 18816 - protein, 35 aa, Artificial Sequence
  Non-cyclic GFR-binding peptide
  MOD_RES (2)..(3)..(35): Xaa is C or S
AXXVPTKLSPISILYKDKGVVTYLKYHYGMAVSEX

SEQ ID NO: 18817 - protein, 37 aa, Artificial Sequence
  Non-cyclic GFR-binding peptide
  MOD_RES (35)..(37): Xaa is C or S
  MOD_RES (14)..(15)..(16)..(17)..(18): Xaa is A or G
  MOD_RES (19)..(20)..(21)..(22): Xaa is A or G or absent
VPTKLSPISVLYIXXXXXXXXXYKQYEEGMSVAEXGX

SEQ ID NO: 18818 - protein, 37 aa, Artificial Sequence
  Non-cyclic GFR-binding peptide
  MOD_RES (1)..(34)..(36): Xaa is C or S
  MOD_RES (15)..(16)..(17)..(18)..(19): Xaa is A or G
  MOD_RES (20)..(21)..(22)..(23): Xaa is A or G or absent
XVSQDLEPISILYLXXXXXXXXXKFKYEMIVKSXKXS

SEQ ID NO: 18819 - protein, 40 aa, Artificial Sequence
  Non-cyclic GFR-binding peptide
  MOD_RES (5)..(6)..(38)..(40): Xaa is C or S
ASKAXXVPTKLNAISILYFDKGVVTYLKKYRGMAVSEXGX

SEQ ID NO: 18820 - protein, 38 aa, Artificial Sequence
  Non-cyclic GFR-binding peptide
  MOD_RES (4)..(5)..(37): Xaa is C or S
PKAXXVPTELSPISMLYIDENEKVVYKQYEDMVVEGXG

SEQ ID NO: 18821 - protein, 37 aa, Artificial Sequence
  Non-cyclic GFR-binding peptide
  MOD_RES (2)..(3)..(37): Xaa is C or S
  MOD_RES (17)..(18)..(19)..(20)..(21): Xaa is A or G
  MOD_RES (22)..(23)..(24)..(25): Xaa is A or G or absent
AXXVPTKLSPISILYIXXXXXXXXXYKQYEGMAVSEX

SEQ ID NO: 18822 - protein, 40 aa, Artificial Sequence
  Non-cyclic GFR-binding peptide
  MOD_RES (5)..(6)..(38)..(40): Xaa is C or S
VPKAXXAPTKLSPISVLYIDSSNNVIYKQYENMVVKAXGX

SEQ ID NO: 18823 - protein, 38 aa, Artificial Sequence
  Non-cyclic GFR-binding peptide
  MOD_RES (5)..(6)..(37): Xaa is C or S
SASPXXVSQDLEPISILYLIGKTPKIKFKYEMIVKSXK

SEQ ID NO: 18824 - protein, 37 aa, Artificial Sequence
  Non-cyclic GFR-binding peptide
  MOD_RES (1)..(35)..(37): Xaa is C or S
  MOD_RES (15)..(16)..(17)..(18)..(19): Xaa is A or G
  MOD_RES (20)..(21)..(22)..(23): Xaa is A or G or absent
XVPTKLSPISILYIXXXXXXXXXYKQYEGMAVSEXGX

SEQ ID NO: 18825 - protein, 43 aa, Artificial Sequence
  Non-cyclic GFR-binding peptide
  MOD_RES (5)..(6)..(40)..(42): Xaa is C or S
  MOD_RES (20)..(21)..(22)..(23)..(24): Xaa is A or G
  MOD_RES (25)..(26)..(27)..(28): Xaa is A or G or absent
IPKAXXVPTELEPISMLYLXXXXXXXXXKFKYEDMVVEGXGXR

SEQ ID NO: 18826 - protein, 32 aa, Artificial Sequence
  Non-cyclic GFR-binding peptide
  MOD_RES (32)..(32): Xaa is C or S
VPTKLNAISILYFDKGVVTYLKKYRGMAVSEX

SEQ ID NO: 18827 - protein, 40 aa, Artificial Sequence
  Non-cyclic GFR-binding peptide
  MOD_RES (4)..(5)..(39): Xaa is C or S
  MOD_RES (19)..(20)..(21)..(22)..(23): Xaa is A or G
  MOD_RES (24)..(25)..(26)..(27): Xaa is A or G or absent
SKAXXVPTKLNAISILYFXXXXXXXXXLKKYRGMAVSEXG

SEQ ID NO: 18828 - protein, 33 aa, Artificial Sequence
  Non-cyclic GFR-binding peptide
  MOD_RES (1)..(1): Xaa is C or S
  MOD_RES (15)..(16)..(17)..(18)..(19): Xaa is A or G
  MOD_RES (20)..(21)..(22)..(23): Xaa is A or G or absent
XVSQDLSPISILYIXXXXXXXXXYKQYEMIVKS

SEQ ID NO: 18829 - protein, 36 aa, Artificial Sequence
  Non-cyclic GFR-binding peptide
  MOD_RES (2)..(3)..(35): Xaa is C or S
SXXVPARLEPISILYLDAANNVVKFKYEDMVVEAXG

SEQ ID NO: 18830 - protein, 33 aa, Artificial Sequence
  Non-cyclic GFR-binding peptide
  MOD_RES (1)..(1): Xaa is C or S
  MOD_RES (15)..(16)..(17)..(18)..(19): Xaa is A or G
  MOD_RES (20)..(21)..(22)..(23): Xaa is A or G or absent
XVPARLSPISILYKXXXXXXXXXLKYHYDMVVE

SEQ ID NO: 18831 - protein, 32 aa, Artificial Sequence
  Non-cyclic GFR-binding peptide
  MOD_RES (14)..(15)..(16)..(17)..(18): Xaa is A or G
  MOD_RES (19)..(20)..(21)..(22): Xaa is A or G or absent
VPTELEPISMLYLXXXXXXXXXKFKYEDMVVE

SEQ ID NO: 18832 - protein, 36 aa, Artificial Sequence
  Non-cyclic GFR-binding peptide
  MOD_RES (3)..(35): Xaa is C or S
PTXAPTKLSPISVLYIDDSSNVIYKQYENMVVRSXG

SEQ ID NO: 18833 - protein, 34 aa, Artificial Sequence
  Non-cyclic GFR-binding peptide
  MOD_RES (2)..(3): Xaa is C or S
SXXVPARLNAISILYFDAANNVVLKKYRDMVVEA

SEQ ID NO: 18834 - protein, 32 aa, Artificial Sequence
  Non-cyclic GFR-binding peptide
  MOD_RES (32)..(32): Xaa is C or S
VPTKLSPISILYKDKGVVTYLKYHYGMAVSEX

SEQ ID NO: 18835 - protein, 39 aa, Artificial Sequence
  Non-cyclic GFR-binding peptide
  MOD_RES (4)..(5)..(37)..(39): Xaa is C or S
PASXXVPARLEPISILYLDAANNVVKFKYEDMVVEAXGX

SEQ ID NO: 18836 - protein, 33 aa, Artificial Sequence
  Non-cyclic GFR-binding peptide
  MOD_RES (14)..(15)..(16)..(17)..(18): Xaa is A or G
  MOD_RES (19)..(20)..(21)..(22): Xaa is A or G or absent
VPARLNAISILYFXXXXXXXXXLKKYRDMVVEA

SEQ ID NO: 18837 - protein, 36 aa, Artificial Sequence
  Non-cyclic GFR-binding peptide
  MOD_RES (1)..(2)..(35): Xaa is C or S
  MOD_RES (16)..(17)..(18)..(19)..(20): Xaa is A or G
  MOD_RES (21)..(22)..(23)..(24): Xaa is A or G or absent
XXVSQDLEPISILYLXXXXXXXXXKFKYEMIVKSXK

SEQ ID NO: 18838 - protein, 36 aa, Artificial Sequence
  Non-cyclic GFR-binding peptide
  MOD_RES (3)..(4)..(36): Xaa is C or S
KAXXAPTKLSPISVLYIDSSNNVIYKQYENMVVKAX

SEQ ID NO: 18839 - protein, 34 aa, Artificial Sequence
  Non-cyclic GFR-binding peptide
  MOD_RES (33)..(33): Xaa is C or S
  MOD_RES (14)..(15)..(16)..(17)..(18): Xaa is A or G
  MOD_RES (19)..(20)..(21)..(22): Xaa is A or G or absent
VPQDLEPISILYLXXXXXXXXXKFKYEMVVKSXK

SEQ ID NO: 18840 - protein, 31 aa, Artificial Sequence
  Non-cyclic GFR-binding peptide
  MOD_RES (1)..(1): Xaa is C or S
XVPQDLEPISILYLVGRTPKVKFKYEMVVKS

SEQ ID NO: 18841 - protein, 37 aa, Artificial Sequence
  Non-cyclic GFR-binding peptide
  MOD_RES (4)..(5)..(36): Xaa is C or S
ASPXXVPQDLSPISILYIVGRTPKVYKQYEMVVKSXK

SEQ ID NO: 18842 - protein, 36 aa, Artificial Sequence
  Non-cyclic GFR-binding peptide
  MOD_RES (34)..(36): Xaa is C or S
  MOD_RES (14)..(15)..(16)..(17)..(18): Xaa is A or G
  MOD_RES (19)..(20)..(21)..(22): Xaa is A or G or absent
VPTELEPISMLYLXXXXXXXXXKFKYEDMVVEGXGX

SEQ ID NO: 18843 - protein, 34 aa, Artificial Sequence
  Non-cyclic GFR-binding peptide
  MOD_RES (1)..(2)..(33): Xaa is C or S
XXVSQDLSPISILYIIGKTPKIYKQYEMIVKSXK

SEQ ID NO: 18844 - protein, 41 aa, Artificial Sequence
  Non-cyclic GFR-binding peptide
  MOD_RES (5)..(6)..(38)..(40): Xaa is C or S
VPKPXXAPTKLSPISVLYIDDSSNVIYKQYENMVVRSXGXH

SEQ ID NO: 18845 - protein, 42 aa, Artificial Sequence
  Non-cyclic GFR-binding peptide
  MOD_RES (5)..(6)..(40)..(42): Xaa is C or S
  MOD_RES (20)..(21)..(22)..(23)..(24): Xaa is A or G
  MOD_RES (25)..(26)..(27)..(28): Xaa is A or G or absent
VPKPXXAPTKLSPISVLYIXXXXXXXXXYKQYENMVVRSXGX

SEQ ID NO: 18846 - protein, 35 aa, Artificial Sequence
  Non-cyclic GFR-binding peptide
  MOD_RES (2)..(3)..(35): Xaa is C or S
AXXVPTKLNAISILYFDKGVVTYLKKYRGMAVSEX

SEQ ID NO: 18847 - protein, 40 aa, Artificial Sequence
  Non-cyclic GFR-binding peptide
  MOD_RES (6)..(38)..(40): Xaa is C or S
VTKPTXAPTKLEPISVLYLDDSSNVIKFKYENMVVRSXGX

SEQ ID NO: 18848 - protein, 36 aa, Artificial Sequence
  Non-cyclic GFR-binding peptide
  MOD_RES (3)..(4)..(36): Xaa is C or S
KPXXAPTQLSPISVLYIDDSSNVIYKQYENMVVRAX

SEQ ID NO: 18849 - protein, 37 aa, Artificial Sequence
  Non-cyclic GFR-binding peptide
  MOD_RES (3)..(4)..(37): Xaa is C or S
  MOD_RES (18)..(19)..(20)..(21)..(22): Xaa is A or G
  MOD_RES (23)..(24)..(25)..(26): Xaa is A or G or absent
APXXVPQALEPISILYLXXXXXXXXXKFKYEMIVRSX

SEQ ID NO: 18850 - protein, 35 aa, Artificial Sequence
  Non-cyclic GFR-binding peptide
  MOD_RES (32)..(34): Xaa is C or S
VPTELEPISMLYLDENEKVVKFKYEDMVVEGXGXR

SEQ ID NO: 18851 - protein, 40 aa, Artificial Sequence
  Non-cyclic GFR-binding peptide
  MOD_RES (4)..(5)..(37)..(39): Xaa is C or S
PKAXXAPTKLSPISVLYIDSSNNVIYKQYENMVVKAXGXH

SEQ ID NO: 18852 - protein, 34 aa, Artificial Sequence
  Non-cyclic GFR-binding peptide
  MOD_RES (1)..(2)..(33): Xaa is C or S
XXVPQDLSPISILYIVGRTPKVYKQYEMVVKSXK

SEQ ID NO: 18853 - protein, 36 aa, Artificial Sequence
  Non-cyclic GFR-binding peptide
  MOD_RES (34)..(36): Xaa is C or S
  MOD_RES (14)..(15)..(16)..(17)..(18): Xaa is A or G
  MOD_RES (19)..(20)..(21)..(22): Xaa is A or G or absent
VPTKLNAISILYFXXXXXXXXXLKKYRGMAVSEXGX

SEQ ID NO: 18854 - protein, 39 aa, Artificial Sequence
  Non-cyclic GFR-binding peptide
  MOD_RES (4)..(5)..(39): Xaa is C or S
  MOD_RES (19)..(20)..(21)..(22)..(23): Xaa is A or G
  MOD_RES (24)..(25)..(26)..(27): Xaa is A or G or absent
SKAXXVPTKLNAISILYFXXXXXXXXXLKKYRGMAVSEX

SEQ ID NO: 18855 - protein, 35 aa, Artificial Sequence
  Non-cyclic GFR-binding peptide
  MOD_RES (1)..(2)..(34): Xaa is C or S
XXVPTELEPISMLYLDENEKVVKFKYEDMVVEGXG

SEQ ID NO: 18856 - protein, 42 aa, Artificial Sequence
  Non-cyclic GFR-binding peptide
  MOD_RES (5)..(6)..(39)..(41): Xaa is C or S
  MOD_RES (20)..(21)..(22)..(23)..(24): Xaa is A or G
  MOD_RES (25)..(26)..(27)..(28): Xaa is A or G or absent
SASPXXVSQDLSPISILYIXXXXXXXXXYKQYEMIVKSXKXS

SEQ ID NO: 18857 - protein, 35 aa, Artificial Sequence
  Non-cyclic GFR-binding peptide
  MOD_RES (34)..(34): Xaa is C or S
  MOD_RES (14)..(15)..(16)..(17)..(18): Xaa is A or G
  MOD_RES (19)..(20)..(21)..(22): Xaa is A or G or absent
APTKLEPISVLYLXXXXXXXXXKFKYENMVVKAXG

SEQ ID NO: 18858 - protein, 35 aa, Artificial Sequence
  Non-cyclic GFR-binding peptide
  MOD_RES (2)..(3)..(34): Xaa is C or S
PXXVPQDLEPISILYLVGRTPKVKFKYEMVVKSXK

SEQ ID NO: 18859 - protein, 36 aa, Artificial Sequence
  Non-cyclic GFR-binding peptide
  MOD_RES (2)..(3)..(35): Xaa is C or S
AXXAPTKLEPISVLYLDSSNNVIKFKYENMVVKAXG

SEQ ID NO: 18860 - protein, 38 aa, Artificial Sequence
  Non-cyclic GFR-binding peptide
  MOD_RES (2)..(3)..(35)..(37): Xaa is C or S
SXXVPARLNAISILYFDAANNVVLKKYRDMVVEAXGXR

SEQ ID NO: 18861 - protein, 32 aa, Artificial Sequence
  Non-cyclic GFR-binding peptide
  MOD_RES (32)..(32): Xaa is C or S
APTKLEPISVLYLDDSSNVIKFKYENMVVRSX

SEQ ID NO: 18862 - protein, 41 aa, Artificial Sequence
  Non-cyclic GFR-binding peptide
  MOD_RES (7)..(41): Xaa is C or S
  MOD_RES (21)..(22)..(23)..(24)..(25): Xaa is A or G
  MOD_RES (26)..(27)..(28)..(29): Xaa is A or G or absent
HVTKPTXAPTKLEPISVLYLXXXXXXXXXKFKYENMVVRSX

SEQ ID NO: 18863 - protein, 35 aa, Artificial Sequence
  Non-cyclic GFR-binding peptide
  MOD_RES (2)..(3)..(35): Xaa is C or S
SXXVPARLNAISILYFDAANNVVLKKYRDMVVEAX

SEQ ID NO: 18864 - protein, 35 aa, Artificial Sequence
  Non-cyclic GFR-binding peptide
  MOD_RES (3)..(4): Xaa is C or S
KAXXVPTKLSPISILYKDKGVVTYLKYHYGMAVSE

SEQ ID NO: 18865 - protein, 34 aa, Artificial Sequence
  Non-cyclic GFR-binding peptide
  MOD_RES (3)..(4): Xaa is C or S
KAXXVPTKLNAISILYFDKGVVTYLKKYRGMAVS

SEQ ID NO: 18866 - protein, 38 aa, Artificial Sequence
  Non-cyclic GFR-binding peptide
  MOD_RES (4)..(5)..(37): Xaa is C or S
SKAXXVPTKLNAISILYFDKGVVTYLKKYRGMAVSEXG

SEQ ID NO: 18867 - protein, 39 aa, Artificial Sequence
  Non-cyclic GFR-binding peptide
  MOD_RES (6)..(7)..(39): Xaa is C or S
SIPKAXXVPTELEPISMLYLDEYDKVVKFKYEEMVVEGX

SEQ ID NO: 18868 - protein, 39 aa, Artificial Sequence
  Non-cyclic GFR-binding peptide
  MOD_RES (5)..(6)..(37)..(39): Xaa is C or S
SAAPXXVPQALSPISILYIVGRKPKVYKQYEMIVRSXKX

SEQ ID NO: 18869 - protein, 36 aa, Artificial Sequence
  Non-cyclic GFR-binding peptide
  MOD_RES (1)..(2)..(34)..(36): Xaa is C or S
XXAPTQLSPISVLYIDDSSNVIYKQYENMVVRAXGX

SEQ ID NO: 18870 - protein, 36 aa, Artificial Sequence
  Non-cyclic GFR-binding peptide
  MOD_RES (2)..(3): Xaa is C or S
  MOD_RES (17)..(18)..(19)..(20)..(21): Xaa is A or G
  MOD_RES (22)..(23)..(24)..(25): Xaa is A or G or absent
AXXAPTKLSPISVLYIXXXXXXXXXYKQYENMVVKA

SEQ ID NO: 18871 - protein, 38 aa, Artificial Sequence
  Non-cyclic GFR-binding peptide
  MOD_RES (1)..(2)..(36)..(38): Xaa is C or S
  MOD_RES (16)..(17)..(18)..(19)..(20): Xaa is A or G
  MOD_RES (21)..(22)..(23)..(24): Xaa is A or G or absent
XXVPARLNAISILYFXXXXXXXXXLKKYRDMVVEAXGX

SEQ ID NO: 18872 - protein, 38 aa, Artificial Sequence
  Non-cyclic GFR-binding peptide
  MOD_RES (5)..(6): Xaa is C or S
  MOD_RES (20)..(21)..(22)..(23)..(24): Xaa is A or G
  MOD_RES (25)..(26)..(27)..(28): Xaa is A or G or absent
SASPXXVPQDLEPISILYLXXXXXXXXXKFKYEMVVKS

SEQ ID NO: 18873 - protein, 37 aa, Artificial Sequence
  Non-cyclic GFR-binding peptide
  MOD_RES (6)..(7): Xaa is C or S
YVPKPXXAPTKLEPISVLYLDDSSNVIKFKYENMVVR

SEQ ID NO: 18874 - protein, 34 aa, Artificial Sequence
  Non-cyclic GFR-binding peptide
  MOD_RES (2)..(3): Xaa is C or S
AXXVPTELEPISMLYLDEYDKVVKFKYEEMVVEG

SEQ ID NO: 18875 - protein, 41 aa, Artificial Sequence
  Non-cyclic GFR-binding peptide
  MOD_RES (4)..(38)..(40): Xaa is C or S
  MOD_RES (18)..(19)..(20)..(21)..(22): Xaa is A or G
  MOD_RES (23)..(24)..(25)..(26): Xaa is A or G or absent
KPTXAPTKLSPISVLYIXXXXXXXXXYKQYENMVVRSXGXH

SEQ ID NO: 18876 - protein, 40 aa, Artificial Sequence
  Non-cyclic GFR-binding peptide
  MOD_RES (4)..(5)..(39): Xaa is C or S
  MOD_RES (19)..(20)..(21)..(22)..(23): Xaa is A or G
  MOD_RES (24)..(25)..(26)..(27): Xaa is A or G or absent
PKAXXAPTKLSPISVLYIXXXXXXXXXYKQYENMVVKAXG

SEQ ID NO: 18877 - protein, 38 aa, Artificial Sequence
  Non-cyclic GFR-binding peptide
  MOD_RES (3)..(4)..(38): Xaa is C or S
  MOD_RES (18)..(19)..(20)..(21)..(22): Xaa is A or G
  MOD_RES (23)..(24)..(25)..(26): Xaa is A or G or absent
ASXXVPARLEPISILYLXXXXXXXXXKFKYEDMVVEAX

SEQ ID NO: 18878 - protein, 35 aa, Artificial Sequence
  Non-cyclic GFR-binding peptide
  MOD_RES (1)..(33)..(35): Xaa is C or S
XAPTKLEPISVLYLDDSSNVIKFKYENMVVRSXGX

SEQ ID NO: 18879 - protein, 37 aa, Artificial Sequence
  Non-cyclic GFR-binding peptide
  MOD_RES (1)..(2)..(34)..(36): Xaa is C or S
XXVPTELEPISMLYLDENEKVVKFKYEDMVVEGXGXR

SEQ ID NO: 18880 - protein, 33 aa, Artificial Sequence
  Non-cyclic GFR-binding peptide
  MOD_RES (32)..(32): Xaa is C or S
VPTELEPISMLYLDEYDKVVKFKYEEMVVEGXG

SEQ ID NO: 18881 - protein, 38 aa, Artificial Sequence
  Non-cyclic GFR-binding peptide
  MOD_RES (3)..(37): Xaa is C or S
  MOD_RES (17)..(18)..(19)..(20)..(21): Xaa is A or G
  MOD_RES (22)..(23)..(24)..(25): Xaa is A or G or absent
PTXAPTKLSPISVLYIXXXXXXXXXYKQYENMVVRSXG

SEQ ID NO: 18882 - protein, 42 aa, Artificial Sequence
  Non-cyclic GFR-binding peptide
  MOD_RES (6)..(7)..(41): Xaa is C or S
  MOD_RES (21)..(22)..(23)..(24)..(25): Xaa is A or G
  MOD_RES (26)..(27)..(28)..(29): Xaa is A or G or absent
KASKAXXVPTKLSPISILYKXXXXXXXXXLKYHYGMAVSEXG

SEQ ID NO: 18883 - protein, 36 aa, Artificial Sequence
  Non-cyclic GFR-binding peptide
  MOD_RES (2)..(3)..(34)..(36): Xaa is C or S
PXXVPQDLSPISILYIVGRTPKVYKQYEMVVKSXKX

SEQ ID NO: 18884 - protein, 36 aa, Artificial Sequence
  Non-cyclic GFR-binding peptide
  MOD_RES (2)..(34)..(36): Xaa is C or S
TXAPTKLSPISVLYIDDSSNVIYKQYENMVVRSXGX

SEQ ID NO: 18885 - protein, 35 aa, Artificial Sequence
  Non-cyclic GFR-binding peptide
  MOD_RES (1)..(32)..(34): Xaa is C or S
XVPQDLSPISILYIVGRTPKVYKQYEMVVKSXKXS

SEQ ID NO: 18886 - protein, 36 aa, Artificial Sequence
  Non-cyclic GFR-binding peptide
  MOD_RES (1)..(2)..(36): Xaa is C or S
  MOD_RES (16)..(17)..(18)..(19)..(20): Xaa is A or G
  MOD_RES (21)..(22)..(23)..(24): Xaa is A or G or absent
XXAPTKLSPISVLYIXXXXXXXXXYKQYENMVVKAX

SEQ ID NO: 18887 - protein, 40 aa, Artificial Sequence
  Non-cyclic GFR-binding peptide
  MOD_RES (6)..(7): Xaa is C or S
  MOD_RES (21)..(22)..(23)..(24)..(25): Xaa is A or G
  MOD_RES (26)..(27)..(28)..(29): Xaa is A or G or absent
AAPASXXVPARLEPISILYLXXXXXXXXXKFKYEDMVVEA

SEQ ID NO: 18888 - protein, 37 aa, Artificial Sequence
  Non-cyclic GFR-binding peptide
  MOD_RES (3)..(4): Xaa is C or S
  MOD_RES (18)..(19)..(20)..(21)..(22): Xaa is A or G
  MOD_RES (23)..(24)..(25)..(26): Xaa is A or G or absent
KAXXVPTELSPISMLYIXXXXXXXXXYKQYEEMVVEG

SEQ ID NO: 18889 - protein, 34 aa, Artificial Sequence
  Non-cyclic GFR-binding peptide
  MOD_RES (2)..(3): Xaa is C or S
PXXAPTKLSPISVLYIDDSSNVIYKQYENMVVRS

SEQ ID NO: 18890 - protein, 39 aa, Artificial Sequence
  Non-cyclic GFR-binding peptide
  MOD_RES (3)..(4)..(38): Xaa is C or S
  MOD_RES (18)..(19)..(20)..(21)..(22): Xaa is A or G
  MOD_RES (23)..(24)..(25)..(26): Xaa is A or G or absent
ASXXVPARLNAISILYFXXXXXXXXXLKKYRDMVVEAXG

SEQ ID NO: 18891 - protein, 42 aa, Artificial Sequence
  Non-cyclic GFR-binding peptide
  MOD_RES (6)..(7)..(41): Xaa is C or S
  MOD_RES (21)..(22)..(23)..(24)..(25): Xaa is A or G
  MOD_RES (26)..(27)..(28)..(29): Xaa is A or G or absent
SIPKAXXVPTELSPISMLYIXXXXXXXXXYKQYEEMVVEGXG

SEQ ID NO: 18892 - protein, 42 aa, Artificial Sequence
  Non-cyclic GFR-binding peptide
  MOD_RES (5)..(6)..(40)..(42): Xaa is C or S
  MOD_RES (20)..(21)..(22)..(23)..(24): Xaa is A or G
  MOD_RES (25)..(26)..(27)..(28): Xaa is A or G or absent
VPKPXXAPTKLEPISVLYLXXXXXXXXXKFKYENMVVRSXGX

SEQ ID NO: 18893 - protein, 40 aa, Artificial Sequence
  Non-cyclic GFR-binding peptide
  MOD_RES (3)..(4)..(38)..(40): Xaa is C or S
  MOD_RES (18)..(19)..(20)..(21)..(22): Xaa is A or G
  MOD_RES (23)..(24)..(25)..(26): Xaa is A or G or absent
ASXXVPARLSPISILYKXXXXXXXXXLKYHYDMVVEAXGX

SEQ ID NO: 18894 - protein, 40 aa, Artificial Sequence
  Non-cyclic GFR-binding peptide
  MOD_RES (6)..(7)..(39): Xaa is C or S
AVPKAXXAPTKLEPISVLYLDSSNNVIKFKYENMVVKAXG

SEQ ID NO: 18895 - protein, 35 aa, Artificial Sequence
  Non-cyclic GFR-binding peptide
  MOD_RES (2)..(3)..(35): Xaa is C or S
SXXVPARLSPISILYKDAANNVVLKYHYDMVVEAX

SEQ ID NO: 18896 - protein, 39 aa, Artificial Sequence
  Non-cyclic GFR-binding peptide
  MOD_RES (4)..(5)..(37)..(39): Xaa is C or S
PASXXVPARLSPISILYKDAANNVVLKYHYDMVVEAXGX

SEQ ID NO: 18897 - protein, 42 aa, Artificial Sequence
  Non-cyclic GFR-binding peptide
  MOD_RES (5)..(6)..(40)..(42): Xaa is C or S
  MOD_RES (20)..(21)..(22)..(23)..(24): Xaa is A or G
  MOD_RES (25)..(26)..(27)..(28): Xaa is A or G or absent
IPKAXXVPTELEPISMLYLXXXXXXXXXKFKYEEMVVEGXGX

SEQ ID NO: 18898 - protein, 35 aa, Artificial Sequence
  Non-cyclic GFR-binding peptide
  MOD_RES (1)..(2): Xaa is C or S
  MOD_RES (16)..(17)..(18)..(19)..(20): Xaa is A or G
  MOD_RES (21)..(22)..(23)..(24): Xaa is A or G or absent
XXVPARLNAISILYFXXXXXXXXXLKKYRDMVVEA

SEQ ID NO: 18899 - protein, 38 aa, Artificial Sequence
  Non-cyclic GFR-binding peptide
  MOD_RES (1)..(35)..(37): Xaa is C or S
  MOD_RES (15)..(16)..(17)..(18)..(19): Xaa is A or G
  MOD_RES (20)..(21)..(22)..(23): Xaa is A or G or absent
XAPTKLSPISVLYIXXXXXXXXXYKQYENMVVRSXGXH

SEQ ID NO: 18900 - protein, 35 aa, Artificial Sequence
  Non-cyclic GFR-binding peptide
  MOD_RES (3)..(4): Xaa is C or S
KAXXVPTKLSPISILYIDKGVVTYYKQYEGMAVSE

SEQ ID NO: 18901 - protein, 36 aa, Artificial Sequence
  Non-cyclic GFR-binding peptide
  MOD_RES (1)..(36): Xaa is C or S
  MOD_RES (15)..(16)..(17)..(18)..(19): Xaa is A or G
  MOD_RES (20)..(21)..(22)..(23): Xaa is A or G or absent
XVPTKLEPISVLYLXXXXXXXXXKFKYEEGMSVAEX

SEQ ID NO: 18902 - protein, 34 aa, Artificial Sequence
  Non-cyclic GFR-binding peptide
  MOD_RES (34)..(34): Xaa is C or S
  MOD_RES (14)..(15)..(16)..(17)..(18): Xaa is A or G
  MOD_RES (19)..(20)..(21)..(22): Xaa is A or G or absent
VPTELSPISMLYIXXXXXXXXXYKQYEDMVVEGX

SEQ ID NO: 18903 - protein, 41 aa, Artificial Sequence
  Non-cyclic GFR-binding peptide
  MOD_RES (3)..(4)..(38)..(40): Xaa is C or S
  MOD_RES (18)..(19)..(20)..(21)..(22): Xaa is A or G
  MOD_RES (23)..(24)..(25)..(26): Xaa is A or G or absent
KAXXVPTELSPISMLYIXXXXXXXXXYKQYEDMVVEGXGXR

SEQ ID NO: 18904 - protein, 39 aa, Artificial Sequence
  Non-cyclic GFR-binding peptide
  MOD_RES (6)..(7)..(38): Xaa is C or S
ASASPXXVSQDLEPISILYLIGKTPKIKFKYEMIVKSXK

SEQ ID NO: 18905 - protein, 40 aa, Artificial Sequence
  Non-cyclic GFR-binding peptide
  MOD_RES (6)..(7)..(39): Xaa is C or S
KASKAXXVPTKLNAISILYFDKGVVTYLKKYRGMAVSEXG

SEQ ID NO: 18906 - protein, 34 aa, Artificial Sequence
  Non-cyclic GFR-binding peptide
  MOD_RES (3)..(4): Xaa is C or S
SPXXVSQDLEPISILYLIGKTPKIKFKYEMIVKS

SEQ ID NO: 18907 - protein, 44 aa, Artificial Sequence
  Non-cyclic GFR-binding peptide
  MOD_RES (6)..(7)..(42)..(44): Xaa is C or S
  MOD_RES (21)..(22)..(23)..(24)..(25): Xaa is A or G
  MOD_RES (26)..(27)..(28)..(29): Xaa is A or G or absent
KVGKAXXVPTKLSPISVLYIXXXXXXXXXYKQYEEGMSVAEXGX

SEQ ID NO: 18908 - protein, 33 aa, Artificial Sequence
  Non-cyclic GFR-binding peptide
  MOD_RES (1)..(1): Xaa is C or S
  MOD_RES (15)..(16)..(17)..(18)..(19): Xaa is A or G
  MOD_RES (20)..(21)..(22)..(23): Xaa is A or G or absent
XVPARLEPISILYLXXXXXXXXXKFKYEDMVVE

SEQ ID NO: 18909 - protein, 42 aa, Artificial Sequence
  Non-cyclic GFR-binding peptide
  MOD_RES (5)..(6)..(40)..(42): Xaa is C or S
  MOD_RES (20)..(21)..(22)..(23)..(24): Xaa is A or G
  MOD_RES (25)..(26)..(27)..(28): Xaa is A or G or absent
APASXXVPARLSPISILYKXXXXXXXXXLKYHYDMVVEAXGX

SEQ ID NO: 18910 - protein, 34 aa, Artificial Sequence
  Non-cyclic GFR-binding peptide
  MOD_RES (32)..(34): Xaa is C or S
APTQLSPISVLYIDDSSNVIYKQYENMVVRAXGX

SEQ ID NO: 18911 - protein, 40 aa, Artificial Sequence
  Non-cyclic GFR-binding peptide
  MOD_RES (7)..(39): Xaa is C or S
HVTKPTXAPTKLSPISVLYIDDSSNVIYKQYENMVVRSXG

SEQ ID NO: 18912 - protein, 41 aa, Artificial Sequence
  Non-cyclic GFR-binding peptide
  MOD_RES (6)..(7)..(41): Xaa is C or S
  MOD_RES (21)..(22)..(23)..(24)..(25): Xaa is A or G
  MOD_RES (26)..(27)..(28)..(29): Xaa is A or G or absent
SIPKAXXVPTELEPISMLYLXXXXXXXXXKFKYEEMVVEGX

SEQ ID NO: 18913 - protein, 38 aa, Artificial Sequence
  Non-cyclic GFR-binding peptide
  MOD_RES (6)..(7): Xaa is C or S
KASKAXXVPTKLSPISILYIDKGVVTYYKQYEGMAVSE

SEQ ID NO: 18914 - protein, 36 aa, Artificial Sequence
  Non-cyclic GFR-binding peptide
  MOD_RES (3)..(4): Xaa is C or S
KAXXVPTKLSPISVLYIDDMGVPTYKQYEEGMSVAE

SEQ ID NO: 18915 - protein, 41 aa, Artificial Sequence
  Non-cyclic GFR-binding peptide
  MOD_RES (6)..(7)..(41): Xaa is C or S
  MOD_RES (21)..(22)..(23)..(24)..(25): Xaa is A or G
  MOD_RES (26)..(27)..(28)..(29): Xaa is A or G or absent
TVPKPXXAPTQLEPISVLYLXXXXXXXXXKFKYENMVVRAX

SEQ ID NO: 18916 - protein, 39 aa, Artificial Sequence
  Non-cyclic GFR-binding peptide
  MOD_RES (2)..(3)..(36)..(38): Xaa is C or S
AXXVPTKLSPISVLYIDDMGVPTYKQYEEGMSVAEXGXR

SEQ ID NO: 18917 - protein, 40 aa, Artificial Sequence
  Non-cyclic GFR-binding peptide
  MOD_RES (2)..(3)..(38)..(40): Xaa is C or S
  MOD_RES (17)..(18)..(19)..(20)..(21): Xaa is A or G
  MOD_RES (22)..(23)..(24)..(25): Xaa is A or G or absent
AXXVPTKLEPISVLYLXXXXXXXXXKFKYEEGMSVAEXGX

SEQ ID NO: 18918 - protein, 35 aa, Artificial Sequence
  Non-cyclic GFR-binding peptide
  MOD_RES (1)..(2)..(34): Xaa is C or S
XXVPTKLSPISILYIDKGVVTYYKQYEGMAVSEXG

SEQ ID NO: 18919 - protein, 41 aa, Artificial Sequence
  Non-cyclic GFR-binding peptide
  MOD_RES (6)..(7)..(41): Xaa is C or S
  MOD_RES (21)..(22)..(23)..(24)..(25): Xaa is A or G
  MOD_RES (26)..(27)..(28)..(29): Xaa is A or G or absent
KIPKAXXVPTELSPISMLYIXXXXXXXXXYKQYEDMVVEGX

SEQ ID NO: 18920 - protein, 36 aa, Artificial Sequence
  Non-cyclic GFR-binding peptide
  MOD_RES (4)..(5): Xaa is C or S
SKAXXVPTKLNAISILYFDKGVVTYLKKYRGMAVSE

SEQ ID NO: 18921 - protein, 38 aa, Artificial Sequence
  Non-cyclic GFR-binding peptide
  MOD_RES (1)..(2)..(36)..(38): Xaa is C or S
  MOD_RES (16)..(17)..(18)..(19)..(20): Xaa is A or G
  MOD_RES (21)..(22)..(23)..(24): Xaa is A or G or absent
XXVPTELEPISMLYLXXXXXXXXXKFKYEDMVVEGXGX

SEQ ID NO: 18922 - protein, 40 aa, Artificial Sequence
  Non-cyclic GFR-binding peptide
  MOD_RES (6)..(38)..(40): Xaa is C or S
VTKPTXAPTKLSPISVLYIDDSSNVIYKQYENMVVRSXGX

SEQ ID NO: 18923 - protein, 37 aa, Artificial Sequence
  Non-cyclic GFR-binding peptide
  MOD_RES (3)..(4)..(35)..(37): Xaa is C or S
SPXXVPQDLEPISILYLVGRTPKVKFKYEMVVKSXKX

SEQ ID NO: 18924 - protein, 35 aa, Artificial Sequence
  Non-cyclic GFR-binding peptide
  MOD_RES (1)..(33)..(35): Xaa is C or S
XVPTKLSPISILYIDKGVVTYYKQYEGMAVSEXGX

SEQ ID NO: 18925 - protein, 34 aa, Artificial Sequence
  Non-cyclic GFR-binding peptide
  MOD_RES (34)..(34): Xaa is C or S
  MOD_RES (14)..(15)..(16)..(17)..(18): Xaa is A or G
  MOD_RES (19)..(20)..(21)..(22): Xaa is A or G or absent
VPARLNAISILYFXXXXXXXXXLKKYRDMVVEAX

SEQ ID NO: 18926 - protein, 34 aa, Artificial Sequence
  Non-cyclic GFR-binding peptide
  MOD_RES (1)..(1): Xaa is C or S
  MOD_RES (15)..(16)..(17)..(18)..(19): Xaa is A or G
  MOD_RES (20)..(21)..(22)..(23): Xaa is A or G or absent
XVPTKLNAISILYFXXXXXXXXXLKKYRGMAVSE

SEQ ID NO: 18927 - protein, 33 aa, Artificial Sequence
  Non-cyclic GFR-binding peptide
  MOD_RES (14)..(15)..(16)..(17)..(18): Xaa is A or G
  MOD_RES (19)..(20)..(21)..(22): Xaa is A or G or absent
APTKLEPISVLYLXXXXXXXXXKFKYENMVVRS

SEQ ID NO: 18928 - protein, 38 aa, Artificial Sequence
  Non-cyclic GFR-binding peptide
  MOD_RES (2)..(3)..(35)..(37): Xaa is C or S
SXXVPARLEPISILYLDAANNVVKFKYEDMVVEAXGXR

SEQ ID NO: 18929 - protein, 39 aa, Artificial Sequence
  Non-cyclic GFR-binding peptide
  MOD_RES (4)..(5)..(36)..(38): Xaa is C or S
ASPXXVPQDLSPISILYIVGRTPKVYKQYEMVVKSXKXS

SEQ ID NO: 18930 - protein, 35 aa, Artificial Sequence
  Non-cyclic GFR-binding peptide
  MOD_RES (34)..(34): Xaa is C or S
  MOD_RES (14)..(15)..(16)..(17)..(18): Xaa is A or G
  MOD_RES (19)..(20)..(21)..(22): Xaa is A or G or absent
VPTELEPISMLYLXXXXXXXXXKFKYEDMVVEGXG

SEQ ID NO: 18931 - protein, 38 aa, Artificial Sequence
  Non-cyclic GFR-binding peptide
  MOD_RES (1)..(2)..(36)..(38): Xaa is C or S
  MOD_RES (16)..(17)..(18)..(19)..(20): Xaa is A or G
  MOD_RES (21)..(22)..(23)..(24): Xaa is A or G or absent
XXVPTKLNAISILYFXXXXXXXXXLKKYRGMAVSEXGX

SEQ ID NO: 18932 - protein, 38 aa, Artificial Sequence
  Non-cyclic GFR-binding peptide
  MOD_RES (2)..(3)..(36)..(38): Xaa is C or S
  MOD_RES (17)..(18)..(19)..(20)..(21): Xaa is A or G
  MOD_RES (22)..(23)..(24)..(25): Xaa is A or G or absent
PXXVPQDLSPISILYIXXXXXXXXXYKQYEMVVKSXKX

SEQ ID NO: 18933 - protein, 37 aa, Artificial Sequence
  Non-cyclic GFR-binding peptide
  MOD_RES (1)..(34)..(36): Xaa is C or S
  MOD_RES (15)..(16)..(17)..(18)..(19): Xaa is A or G
  MOD_RES (20)..(21)..(22)..(23): Xaa is A or G or absent
XVSQDLSPISILYIXXXXXXXXXYKQYEMIVKSXKXS

SEQ ID NO: 18934 - protein, 36 aa, Artificial Sequence
  Non-cyclic GFR-binding peptide
  MOD_RES (5)..(6): Xaa is C or S
APASXXVPARLNAISILYFDAANNVVLKKYRDMVVE

SEQ ID NO: 18935 - protein, 35 aa, Artificial Sequence
  Non-cyclic GFR-binding peptide
  MOD_RES (1)..(2)..(33)..(35): Xaa is C or S
XXVSQDLSPISILYIIGKTPKIYKQYEMIVKSXKX

SEQ ID NO: 18936 - protein, 37 aa, Artificial Sequence
  Non-cyclic GFR-binding peptide
  MOD_RES (4)..(5): Xaa is C or S
  MOD_RES (19)..(20)..(21)..(22)..(23): Xaa is A or G
  MOD_RES (24)..(25)..(26)..(27): Xaa is A or G or absent
SKAXXVPTKLSPISILYKXXXXXXXXXLKYHYGMAVS

SEQ ID NO: 18937 - protein, 40 aa, Artificial Sequence
  Non-cyclic GFR-binding peptide
  MOD_RES (5)..(6)..(40): Xaa is C or S
  MOD_RES (20)..(21)..(22)..(23)..(24): Xaa is A or G
  MOD_RES (25)..(26)..(27)..(28): Xaa is A or G or absent
VPKPXXAPTKLSPISVLYIXXXXXXXXXYKQYENMVVRSX

SEQ ID NO: 18938 - protein, 33 aa, Artificial Sequence
  Non-cyclic GFR-binding peptide
  MOD_RES (2)..(3): Xaa is C or S
PXXAPTQLEPISVLYLDDSSNVIKFKYENMVVR

SEQ ID NO: 18939 - protein, 40 aa, Artificial Sequence
  Non-cyclic GFR-binding peptide
  MOD_RES (4)..(5)..(39): Xaa is C or S
  MOD_RES (19)..(20)..(21)..(22)..(23): Xaa is A or G
  MOD_RES (24)..(25)..(26)..(27): Xaa is A or G or absent
PKAXXVPTELSPISMLYIXXXXXXXXXYKQYEDMVVEGXG

SEQ ID NO: 18940 - protein, 37 aa, Artificial Sequence
  Non-cyclic GFR-binding peptide
  MOD_RES (4)..(5)..(37): Xaa is C or S
PKPXXAPTQLSPISVLYIDDSSNVIYKQYENMVVRAX

SEQ ID NO: 18941 - protein, 38 aa, Artificial Sequence
  Non-cyclic GFR-binding peptide
  MOD_RES (5)..(6): Xaa is C or S
VGKAXXVPTKLSPISVLYIDDMGVPTYKQYEEGMSVAE

SEQ ID NO: 18942 - protein, 37 aa, Artificial Sequence
  Non-cyclic GFR-binding peptide
  MOD_RES (1)..(35)..(37): Xaa is C or S
  MOD_RES (15)..(16)..(17)..(18)..(19): Xaa is A or G
  MOD_RES (20)..(21)..(22)..(23): Xaa is A or G or absent
XAPTKLEPISVLYLXXXXXXXXXKFKYENMVVRSXGX

SEQ ID NO: 18943 - protein, 35 aa, Artificial Sequence
  Non-cyclic GFR-binding peptide
  MOD_RES (33)..(35): Xaa is C or S
  MOD_RES (14)..(15)..(16)..(17)..(18): Xaa is A or G
  MOD_RES (19)..(20)..(21)..(22): Xaa is A or G or absent
VPQALSPISILYIXXXXXXXXXYKQYEMIVRSXKX

SEQ ID NO: 18944 - protein, 41 aa, Artificial Sequence
  Non-cyclic GFR-binding peptide
  MOD_RES (6)..(7)..(40): Xaa is C or S
  MOD_RES (21)..(22)..(23)..(24)..(25): Xaa is A or G
  MOD_RES (26)..(27)..(28)..(29): Xaa is A or G or absent
ASAAPXXVPQALEPISILYLXXXXXXXXXKFKYEMIVRSXK

SEQ ID NO: 18945 - protein, 31 aa, Artificial Sequence
  Non-cyclic GFR-binding peptide
  MOD_RES (31)..(31): Xaa is C or S
VPQALSPISILYIVGRKPKVYKQYEMIVRSX

SEQ ID NO: 18946 - protein, 34 aa, Artificial Sequence
  Non-cyclic GFR-binding peptide
  MOD_RES (1)..(1): Xaa is C or S
  MOD_RES (15)..(16)..(17)..(18)..(19): Xaa is A or G
  MOD_RES (20)..(21)..(22)..(23): Xaa is A or G or absent
XAPTKLEPISVLYLXXXXXXXXXKFKYENMVVKA

SEQ ID NO: 18947 - protein, 37 aa, Artificial Sequence
  Non-cyclic GFR-binding peptide
  MOD_RES (1)..(34)..(36): Xaa is C or S
XVPTKLSPISVLYIDDMGVPTYKQYEEGMSVAEXGXR

SEQ ID NO: 18948 - protein, 38 aa, Artificial Sequence
  Non-cyclic GFR-binding peptide
  MOD_RES (6)..(7): Xaa is C or S
KIPKAXXVPTELSPISMLYIDENEKVVYKQYEDMVVEG

SEQ ID NO: 18949 - protein, 41 aa, Artificial Sequence
  Non-cyclic GFR-binding peptide
  MOD_RES (5)..(6)..(40): Xaa is C or S
  MOD_RES (20)..(21)..(22)..(23)..(24): Xaa is A or G
  MOD_RES (25)..(26)..(27)..(28): Xaa is A or G or absent
VPKPXXAPTKLSPISVLYIXXXXXXXXXYKQYENMVVRSXG

SEQ ID NO: 18950 - protein, 32 aa, Artificial Sequence
  Non-cyclic GFR-binding peptide
  MOD_RES (1)..(2): Xaa is C or S
XXVPTELSPISMLYIDEYDKVVYKQYEEMVVE

SEQ ID NO: 18951 - protein, 37 aa, Artificial Sequence
  Non-cyclic GFR-binding peptide
  MOD_RES (5)..(6)..(37): Xaa is C or S
SASPXXVPQDLSPISILYIVGRTPKVYKQYEMVVKSX

SEQ ID NO: 18952 - protein, 32 aa, Artificial Sequence
  Non-cyclic GFR-binding peptide
  MOD_RES (32)..(32): Xaa is C or S
VPTELSPISMLYIDEYDKVVYKQYEEMVVEGX

SEQ ID NO: 18953 - protein, 33 aa, Artificial Sequence
  Non-cyclic GFR-binding peptide
  MOD_RES (1)..(33): Xaa is C or S
XVPTELEPISMLYLDEYDKVVKFKYEEMVVEGX

SEQ ID NO: 18954 - protein, 33 aa, Artificial Sequence
  Non-cyclic GFR-binding peptide
  MOD_RES (2)..(3): Xaa is C or S
AXXAPTKLEPISVLYLDSSNNVIKFKYENMVVK

SEQ ID NO: 18955 - protein, 34 aa, Artificial Sequence
  Non-cyclic GFR-binding peptide
  MOD_RES (1)..(2): Xaa is C or S
  MOD_RES (16)..(17)..(18)..(19)..(20): Xaa is A or G
  MOD_RES (21)..(22)..(23)..(24): Xaa is A or G or absent
XXVPTELSPISMLYIXXXXXXXXXYKQYEDMVVE

SEQ ID NO: 18956 - protein, 36 aa, Artificial Sequence
  Non-cyclic GFR-binding peptide
  MOD_RES (2)..(3): Xaa is C or S
  MOD_RES (17)..(18)..(19)..(20)..(21): Xaa is A or G
  MOD_RES (22)..(23)..(24)..(25): Xaa is A or G or absent
AXXVPTELEPISMLYLXXXXXXXXXKFKYEEMVVEG

SEQ ID NO: 18957 - protein, 42 aa, Artificial Sequence
  Non-cyclic GFR-binding peptide
  MOD_RES (4)..(5)..(39)..(41): Xaa is C or S
  MOD_RES (19)..(20)..(21)..(22)..(23): Xaa is A or G
  MOD_RES (24)..(25)..(26)..(27): Xaa is A or G or absent
PKPXXAPTKLEPISVLYLXXXXXXXXXKFKYENMVVRSXGXH

SEQ ID NO: 18958 - protein, 39 aa, Artificial Sequence
  Non-cyclic GFR-binding peptide
  MOD_RES (4)..(5)..(39): Xaa is C or S
  MOD_RES (19)..(20)..(21)..(22)..(23): Xaa is A or G
  MOD_RES (24)..(25)..(26)..(27): Xaa is A or G or absent
PASXXVPARLSPISILYKXXXXXXXXXLKYHYDMVVEAX

SEQ ID NO: 18959 - protein, 32 aa, Artificial Sequence
  Non-cyclic GFR-binding peptide
  MOD_RES (1)..(32): Xaa is C or S
XVPQALSPISILYIVGRKPKVYKQYEMIVRSX

SEQ ID NO: 18960 - protein, 41 aa, Artificial Sequence
  Non-cyclic GFR-binding peptide
  MOD_RES (5)..(6)..(38)..(40): Xaa is C or S
IPKAXXVPTELSPISMLYIDENEKVVYKQYEDMVVEGXGXR

SEQ ID NO: 18961 - protein, 38 aa, Artificial Sequence
  Non-cyclic GFR-binding peptide
  MOD_RES (6)..(6): Xaa is C or S
  MOD_RES (20)..(21)..(22)..(23)..(24): Xaa is A or G
  MOD_RES (25)..(26)..(27)..(28): Xaa is A or G or absent
VTKPTXAPTKLSPISVLYIXXXXXXXXXYKQYENMVVR

SEQ ID NO: 18962 - protein, 31 aa, Artificial Sequence
  Non-cyclic GFR-binding peptide
  MOD_RES (1)..(1): Xaa is C or S
XVPTELSPISMLYIDENEKVVYKQYEDMVVE

SEQ ID NO: 18963 - protein, 40 aa, Artificial Sequence
  Non-cyclic GFR-binding peptide
  MOD_RES (6)..(7)..(39): Xaa is C or S
AAPASXXVPARLNAISILYFDAANNVVLKKYRDMVVEAXG

SEQ ID NO: 18964 - protein, 32 aa, Artificial Sequence
  Non-cyclic GFR-binding peptide
  MOD_RES (1)..(2): Xaa is C or S
XXVPTELSPISMLYIDENEKVVYKQYEDMVVE

SEQ ID NO: 18965 - protein, 34 aa, Artificial Sequence
  Non-cyclic GFR-binding peptide
  MOD_RES (2)..(3): Xaa is C or S
AXXVPTKLSPISILYKDKGVVTYLKYHYGMAVSE

SEQ ID NO: 18966 - protein, 34 aa, Artificial Sequence
  Non-cyclic GFR-binding peptide
  MOD_RES (1)..(2): Xaa is C or S
XXVPTKLSPISVLYIDDMGVPTYKQYEEGMSVAE

SEQ ID NO: 18967 - protein, 35 aa, Artificial Sequence
  Non-cyclic GFR-binding peptide
  MOD_RES (1)..(2)..(34): Xaa is C or S
XXAPTQLEPISVLYLDDSSNVIKFKYENMVVRAXG

SEQ ID NO: 18968 - protein, 39 aa, Artificial Sequence
  Non-cyclic GFR-binding peptide
  MOD_RES (1)..(2)..(36)..(38): Xaa is C or S
  MOD_RES (16)..(17)..(18)..(19)..(20): Xaa is A or G
  MOD_RES (21)..(22)..(23)..(24): Xaa is A or G or absent
XXAPTQLSPISVLYIXXXXXXXXXYKQYENMVVRAXGXH

SEQ ID NO: 18969 - protein, 39 aa, Artificial Sequence
  Non-cyclic GFR-binding peptide
  MOD_RES (5)..(6)..(39): Xaa is C or S
  MOD_RES (20)..(21)..(22)..(23)..(24): Xaa is A or G
  MOD_RES (25)..(26)..(27)..(28): Xaa is A or G or absent
SASPXXVPQDLSPISILYIXXXXXXXXXYKQYEMVVKSX

SEQ ID NO: 18970 - protein, 37 aa, Artificial Sequence
  Non-cyclic GFR-binding peptide
  MOD_RES (4)..(5): Xaa is C or S
  MOD_RES (19)..(20)..(21)..(22)..(23): Xaa is A or G
  MOD_RES (24)..(25)..(26)..(27): Xaa is A or G or absent
PKAXXVPTELEPISMLYLXXXXXXXXXKFKYEEMVVE

SEQ ID NO: 18971 - protein, 36 aa, Artificial Sequence
  Non-cyclic GFR-binding peptide
  MOD_RES (3)..(4): Xaa is C or S
  MOD_RES (18)..(19)..(20)..(21)..(22): Xaa is A or G
  MOD_RES (23)..(24)..(25)..(26): Xaa is A or G or absent
KAXXVPTKLNAISILYFXXXXXXXXXLKKYRGMAVS

SEQ ID NO: 18972 - protein, 38 aa, Artificial Sequence
  Non-cyclic GFR-binding peptide
  MOD_RES (3)..(4)..(35)..(37): Xaa is C or S
SPXXVSQDLSPISILYIIGKTPKIYKQYEMIVKSXKXS

SEQ ID NO: 18973 - protein, 41 aa, Artificial Sequence
  Non-cyclic GFR-binding peptide
  MOD_RES (4)..(5)..(40): Xaa is C or S
  MOD_RES (19)..(20)..(21)..(22)..(23): Xaa is A or G
  MOD_RES (24)..(25)..(26)..(27): Xaa is A or G or absent
GKAXXVPTKLEPISVLYLXXXXXXXXXKFKYEEGMSVAEXG

SEQ ID NO: 18974 - protein, 37 aa, Artificial Sequence
  Non-cyclic GFR-binding peptide
  MOD_RES (1)..(2)..(36): Xaa is C or S
  MOD_RES (16)..(17)..(18)..(19)..(20): Xaa is A or G
  MOD_RES (21)..(22)..(23)..(24): Xaa is A or G or absent
XXAPTKLSPISVLYIXXXXXXXXXYKQYENMVVRSXG

SEQ ID NO: 18975 - protein, 33 aa, Artificial Sequence
  Non-cyclic GFR-binding peptide
  MOD_RES (2)..(3): Xaa is C or S
AXXVPTKLSPISILYIDKGVVTYYKQYEGMAVS

SEQ ID NO: 18976 - protein, 36 aa, Artificial Sequence
  Non-cyclic GFR-binding peptide
  MOD_RES (1)..(2)..(36): Xaa is C or S
  MOD_RES (16)..(17)..(18)..(19)..(20): Xaa is A or G
  MOD_RES (21)..(22)..(23)..(24): Xaa is A or G or absent
XXVPTELSPISMLYIXXXXXXXXXYKQYEEMVVEGX

SEQ ID NO: 18977 - protein, 38 aa, Artificial Sequence
  Non-cyclic GFR-binding peptide
  MOD_RES (4)..(5)..(38): Xaa is C or S
  MOD_RES (19)..(20)..(21)..(22)..(23): Xaa is A or G
  MOD_RES (24)..(25)..(26)..(27): Xaa is A or G or absent
ASPXXVSQDLSPISILYIXXXXXXXXXYKQYEMIVKSX

SEQ ID NO: 18978 - protein, 41 aa, Artificial Sequence
  Non-cyclic GFR-binding peptide
  MOD_RES (5)..(6)..(40): Xaa is C or S
  MOD_RES (20)..(21)..(22)..(23)..(24): Xaa is A or G
  MOD_RES (25)..(26)..(27)..(28): Xaa is A or G or absent
ASKAXXVPTKLSPISILYKXXXXXXXXXLKYHYGMAVSEXG

SEQ ID NO: 18979 - protein, 34 aa, Artificial Sequence
  Non-cyclic GFR-binding peptide
  MOD_RES (1)..(32)..(34): Xaa is C or S
XVPQALEPISILYLVGRKPKVKFKYEMIVRSXKX

SEQ ID NO: 18980 - protein, 36 aa, Artificial Sequence
  Non-cyclic GFR-binding peptide
  MOD_RES (5)..(5): Xaa is C or S
TKPTXAPTKLEPISVLYLDDSSNVIKFKYENMVVRS

SEQ ID NO: 18981 - protein, 34 aa, Artificial Sequence
  Non-cyclic GFR-binding peptide
  MOD_RES (2)..(3): Xaa is C or S
PXXAPTQLEPISVLYLDDSSNVIKFKYENMVVRA

SEQ ID NO: 18982 - protein, 38 aa, Artificial Sequence
  Non-cyclic GFR-binding peptide
  MOD_RES (1)..(2)..(36)..(38): Xaa is C or S
  MOD_RES (16)..(17)..(18)..(19)..(20): Xaa is A or G
  MOD_RES (21)..(22)..(23)..(24): Xaa is A or G or absent
XXAPTKLEPISVLYLXXXXXXXXXKFKYENMVVKAXGX

SEQ ID NO: 18983 - protein, 38 aa, Artificial Sequence
  Non-cyclic GFR-binding peptide
  MOD_RES (1)..(36)..(38): Xaa is C or S
  MOD_RES (15)..(16)..(17)..(18)..(19): Xaa is A or G
  MOD_RES (20)..(21)..(22)..(23): Xaa is A or G or absent
XVPTKLSPISVLYIXXXXXXXXXYKQYEEGMSVAEXGX

SEQ ID NO: 18984 - protein, 33 aa, Artificial Sequence
  Non-cyclic GFR-binding peptide
  MOD_RES (32)..(32): Xaa is C or S
APTKLSPISVLYIDSSNNVIYKQYENMVVKAXG

SEQ ID NO: 18985 - protein, 40 aa, Artificial Sequence
  Non-cyclic GFR-binding peptide
  MOD_RES (5)..(6)..(39): Xaa is C or S
  MOD_RES (20)..(21)..(22)..(23)..(24): Xaa is A or G
  MOD_RES (25)..(26)..(27)..(28): Xaa is A or G or absent
SAAPXXVPQALSPISILYIXXXXXXXXXYKQYEMIVRSXK

SEQ ID NO: 18986 - protein, 40 aa, Artificial Sequence
  Non-cyclic GFR-binding peptide
  MOD_RES (2)..(3)..(37)..(39): Xaa is C or S
  MOD_RES (17)..(18)..(19)..(20)..(21): Xaa is A or G
  MOD_RES (22)..(23)..(24)..(25): Xaa is A or G or absent
PXXAPTQLSPISVLYIXXXXXXXXXYKQYENMVVRAXGXH

SEQ ID NO: 18987 - protein, 38 aa, Artificial Sequence
  Non-cyclic GFR-binding peptide
  MOD_RES (4)..(5): Xaa is C or S
  MOD_RES (19)..(20)..(21)..(22)..(23): Xaa is A or G
  MOD_RES (24)..(25)..(26)..(27): Xaa is A or G or absent
PKAXXVPTELEPISMLYLXXXXXXXXXKFKYEDMVVEG

SEQ ID NO: 18988 - protein, 41 aa, Artificial Sequence
  Non-cyclic GFR-binding peptide
  MOD_RES (4)..(5)..(39)..(41): Xaa is C or S
  MOD_RES (19)..(20)..(21)..(22)..(23): Xaa is A or G
  MOD_RES (24)..(25)..(26)..(27): Xaa is A or G or absent
PASXXVPARLNAISILYFXXXXXXXXXLKKYRDMVVEAXGX

SEQ ID NO: 18989 - protein, 35 aa, Artificial Sequence
  Non-cyclic GFR-binding peptide
  MOD_RES (3)..(4)..(35): Xaa is C or S
APXXVPQALEPISILYLVGRKPKVKFKYEMIVRSX

SEQ ID NO: 18990 - protein, 34 aa, Artificial Sequence
  Non-cyclic GFR-binding peptide
  MOD_RES (2)..(3): Xaa is C or S
SXXVPARLSPISILYKDAANNVVLKYHYDMVVEA

SEQ ID NO: 18991 - protein, 36 aa, Artificial Sequence
  Non-cyclic GFR-binding peptide
  MOD_RES (3)..(4): Xaa is C or S
  MOD_RES (18)..(19)..(20)..(21)..(22): Xaa is A or G
  MOD_RES (23)..(24)..(25)..(26): Xaa is A or G or absent
ASXXVPARLSPISILYKXXXXXXXXXLKYHYDMVVE

SEQ ID NO: 18992 - protein, 32 aa, Artificial Sequence
  Non-cyclic GFR-binding peptide
  MOD_RES (31)..(31): Xaa is C or S
VSQDLSPISILYIIGKTPKIYKQYEMIVKSXK

SEQ ID NO: 18993 - protein, 40 aa, Artificial Sequence
  Non-cyclic GFR-binding peptide
  MOD_RES (3)..(4)..(37)..(39): Xaa is C or S
  MOD_RES (18)..(19)..(20)..(21)..(22): Xaa is A or G
  MOD_RES (23)..(24)..(25)..(26): Xaa is A or G or absent
SPXXVPQDLSPISILYIXXXXXXXXXYKQYEMVVKSXKXS

SEQ ID NO: 18994 - protein, 36 aa, Artificial Sequence
  Non-cyclic GFR-binding peptide
  MOD_RES (2)..(3)..(34)..(36): Xaa is C or S
PXXVSQDLSPISILYIIGKTPKIYKQYEMIVKSXKX

SEQ ID NO: 18995 - protein, 37 aa, Artificial Sequence
  Non-cyclic GFR-binding peptide
  MOD_RES (4)..(5): Xaa is C or S
  MOD_RES (19)..(20)..(21)..(22)..(23): Xaa is A or G
  MOD_RES (24)..(25)..(26)..(27): Xaa is A or G or absent
PKAXXAPTKLSPISVLYIXXXXXXXXXYKQYENMVVK

SEQ ID NO: 18996 - protein, 38 aa, Artificial Sequence
  Non-cyclic GFR-binding peptide
  MOD_RES (2)..(3)..(35)..(37): Xaa is C or S
PXXAPTKLSPISVLYIDDSSNVIYKQYENMVVRSXGXH

SEQ ID NO: 18997 - protein, 38 aa, Artificial Sequence
  Non-cyclic GFR-binding peptide
  MOD_RES (6)..(7)..(38): Xaa is C or S
ASAAPXXVPQALSPISILYIVGRKPKVYKQYEMIVRSX

SEQ ID NO: 18998 - protein, 36 aa, Artificial Sequence
  Non-cyclic GFR-binding peptide
  MOD_RES (5)..(6): Xaa is C or S
VPKPXXAPTKLSPISVLYIDDSSNVIYKQYENMVVR

SEQ ID NO: 18999 - protein, 38 aa, Artificial Sequence
  Non-cyclic GFR-binding peptide
  MOD_RES (6)..(7): Xaa is C or S
YVPKPXXAPTKLEPISVLYLDDSSNVIKFKYENMVVRS

SEQ ID NO: 19000 - protein, 34 aa, Artificial Sequence
  Non-cyclic GFR-binding peptide
  MOD_RES (1)..(2)..(34): Xaa is C or S
XXVPTELEPISMLYLDEYDKVVKFKYEEMVVEGX

SEQ ID NO: 19001 - protein, 34 aa, Artificial Sequence
  Non-cyclic GFR-binding peptide
  MOD_RES (34)..(34): Xaa is C or S
  MOD_RES (14)..(15)..(16)..(17)..(18): Xaa is A or G
  MOD_RES (19)..(20)..(21)..(22): Xaa is A or G or absent
APTKLEPISVLYLXXXXXXXXXKFKYENMVVKAX

SEQ ID NO: 19002 - protein, 34 aa, Artificial Sequence
  Non-cyclic GFR-binding peptide
  MOD_RES (1)..(2): Xaa is C or S
  MOD_RES (16)..(17)..(18)..(19)..(20): Xaa is A or G
  MOD_RES (21)..(22)..(23)..(24): Xaa is A or G or absent
XXVSQDLSPISILYIXXXXXXXXXYKQYEMIVKS

SEQ ID NO: 19003 - protein, 37 aa, Artificial Sequence
  Non-cyclic GFR-binding peptide
  MOD_RES (5)..(6)..(37): Xaa is C or S
SASPXXVSQDLSPISILYIIGKTPKIYKQYEMIVKSX

SEQ ID NO: 19004 - protein, 39 aa, Artificial Sequence
  Non-cyclic GFR-binding peptide
  MOD_RES (4)..(5)..(37)..(39): Xaa is C or S
PKAXXAPTKLEPISVLYLDSSNNVIKFKYENMVVKAXGX

SEQ ID NO: 19005 - protein, 39 aa, Artificial Sequence
  Non-cyclic GFR-binding peptide
  MOD_RES (1)..(2)..(37)..(39): Xaa is C or S
  MOD_RES (16)..(17)..(18)..(19)..(20): Xaa is A or G
  MOD_RES (21)..(22)..(23)..(24): Xaa is A or G or absent
XXVPTKLEPISVLYLXXXXXXXXXKFKYEEGMSVAEXGX

SEQ ID NO: 19006 - protein, 37 aa, Artificial Sequence
  Non-cyclic GFR-binding peptide
  MOD_RES (2)..(3)..(35)..(37): Xaa is C or S
SXXVPARLEPISILYLDAANNVVKFKYEDMVVEAXGX

SEQ ID NO: 19007 - protein, 32 aa, Artificial Sequence
  Non-cyclic GFR-binding peptide
  MOD_RES (1)..(2): Xaa is C or S
XXVSQDLEPISILYLIGKTPKIKFKYEMIVKS

SEQ ID NO: 19008 - protein, 37 aa, Artificial Sequence
  Non-cyclic GFR-binding peptide
  MOD_RES (6)..(7): Xaa is C or S
KASKAXXVPTKLNAISILYFDKGVVTYLKKYRGMAVS

SEQ ID NO: 19009 - protein, 41 aa, Artificial Sequence
  Non-cyclic GFR-binding peptide
  MOD_RES (4)..(5)..(39)..(41): Xaa is C or S
  MOD_RES (19)..(20)..(21)..(22)..(23): Xaa is A or G
  MOD_RES (24)..(25)..(26)..(27): Xaa is A or G or absent
PKPXXAPTKLEPISVLYLXXXXXXXXXKFKYENMVVRSXGX

SEQ ID NO: 19010 - protein, 37 aa, Artificial Sequence
  Non-cyclic GFR-binding peptide
  MOD_RES (2)..(3)..(35)..(37): Xaa is C or S
PXXAPTKLSPISVLYIDDSSNVIYKQYENMVVRSXGX

SEQ ID NO: 19011 - protein, 31 aa, Artificial Sequence
  Non-cyclic GFR-binding peptide
VPARLNAISILYFDAANNVVLKKYRDMVVEA

SEQ ID NO: 19012 - protein, 38 aa, Artificial Sequence
  Non-cyclic GFR-binding peptide
  MOD_RES (2)..(3)..(35)..(37): Xaa is C or S
PXXAPTKLEPISVLYLDDSSNVIKFKYENMVVRSXGXH

SEQ ID NO: 19013 - protein, 33 aa, Artificial Sequence
  Non-cyclic GFR-binding peptide
  MOD_RES (33)..(33): Xaa is C or S
VPTKLEPISVLYLDDMGVPTKFKYEEGMSVAEX

SEQ ID NO: 19014 - protein, 38 aa, Artificial Sequence
  Non-cyclic GFR-binding peptide
  MOD_RES (3)..(4)..(38): Xaa is C or S
  MOD_RES (18)..(19)..(20)..(21)..(22): Xaa is A or G
  MOD_RES (23)..(24)..(25)..(26): Xaa is A or G or absent
KAXXVPTELEPISMLYLXXXXXXXXXKFKYEEMVVEGX

SEQ ID NO: 19015 - protein, 35 aa, Artificial Sequence
  Non-cyclic GFR-binding peptide
  MOD_RES (2)..(3): Xaa is C or S
  MOD_RES (17)..(18)..(19)..(20)..(21): Xaa is A or G
  MOD_RES (22)..(23)..(24)..(25): Xaa is A or G or absent
AXXVPTKLNAISILYFXXXXXXXXXLKKYRGMAVS

SEQ ID NO: 19016 - protein, 39 aa, Artificial Sequence
  Non-cyclic GFR-binding peptide
  MOD_RES (3)..(37)..(39): Xaa is C or S
  MOD_RES (17)..(18)..(19)..(20)..(21): Xaa is A or G
  MOD_RES (22)..(23)..(24)..(25): Xaa is A or G or absent
PTXAPTKLSPISVLYIXXXXXXXXXYKQYENMVVRSXGX

SEQ ID NO: 19017 - protein, 35 aa, Artificial Sequence
  Non-cyclic GFR-binding peptide
  MOD_RES (2)..(3)..(35): Xaa is C or S
SXXVPARLEPISILYLDAANNVVKFKYEDMVVEAX

SEQ ID NO: 19018 - protein, 37 aa, Artificial Sequence
  Non-cyclic GFR-binding peptide
  MOD_RES (5)..(6): Xaa is C or S
APASXXVPARLNAISILYFDAANNVVLKKYRDMVVEA

SEQ ID NO: 19019 - protein, 41 aa, Artificial Sequence
  Non-cyclic GFR-binding peptide
  MOD_RES (4)..(5)..(39)..(41): Xaa is C or S
  MOD_RES (19)..(20)..(21)..(22)..(23): Xaa is A or G
  MOD_RES (24)..(25)..(26)..(27): Xaa is A or G or absent
PKPXXAPTKLSPISVLYIXXXXXXXXXYKQYENMVVRSXGX

SEQ ID NO: 19020 - protein, 35 aa, Artificial Sequence
  Non-cyclic GFR-binding peptide
  MOD_RES (1)..(1): Xaa is C or S
  MOD_RES (15)..(16)..(17)..(18)..(19): Xaa is A or G
  MOD_RES (20)..(21)..(22)..(23): Xaa is A or G or absent
XVPTKLSPISVLYIXXXXXXXXXYKQYEEGMSVAE

SEQ ID NO: 19021 - protein, 33 aa, Artificial Sequence
  Non-cyclic GFR-binding peptide
  MOD_RES (1)..(2)..(33): Xaa is C or S
XXVPQALSPISILYIVGRKPKVYKQYEMIVRSX

SEQ ID NO: 19022 - protein, 32 aa, Artificial Sequence
  Non-cyclic GFR-binding peptide
  MOD_RES (14)..(15)..(16)..(17)..(18): Xaa is A or G
  MOD_RES (19)..(20)..(21)..(22): Xaa is A or G or absent
VSQDLSPISILYIXXXXXXXXXYKQYEMIVKS

SEQ ID NO: 19023 - protein, 39 aa, Artificial Sequence
  Non-cyclic GFR-binding peptide
  MOD_RES (5)..(6): Xaa is C or S
  MOD_RES (20)..(21)..(22)..(23)..(24): Xaa is A or G
  MOD_RES (25)..(26)..(27)..(28): Xaa is A or G or absent
VPKAXXAPTKLEPISVLYLXXXXXXXXXKFKYENMVVKA

SEQ ID NO: 19024 - protein, 38 aa, Artificial Sequence
  Non-cyclic GFR-binding peptide
  MOD_RES (1)..(35)..(37): Xaa is C or S
  MOD_RES (15)..(16)..(17)..(18)..(19): Xaa is A or G
  MOD_RES (20)..(21)..(22)..(23): Xaa is A or G or absent
XVPTELSPISMLYIXXXXXXXXXYKQYEDMVVEGXGXR

SEQ ID NO: 19025 - protein, 37 aa, Artificial Sequence
  Non-cyclic GFR-binding peptide
  MOD_RES (2)..(3)..(35)..(37): Xaa is C or S
PXXAPTQLSPISVLYIDDSSNVIYKQYENMVVRAXGX

SEQ ID NO: 19026 - protein, 39 aa, Artificial Sequence
  Non-cyclic GFR-binding peptide
  MOD_RES (4)..(5)..(39): Xaa is C or S
  MOD_RES (19)..(20)..(21)..(22)..(23): Xaa is A or G
  MOD_RES (24)..(25)..(26)..(27): Xaa is A or G or absent
PKPXXAPTQLEPISVLYLXXXXXXXXXKFKYENMVVRAX

SEQ ID NO: 19027 - protein, 33 aa, Artificial Sequence
  Non-cyclic GFR-binding peptide
  MOD_RES (2)..(3): Xaa is C or S
PXXVPQALEPISILYLVGRKPKVKFKYEMIVRS

SEQ ID NO: 19028 - protein, 36 aa, Artificial Sequence
  Non-cyclic GFR-binding peptide
  MOD_RES (1)..(2)..(33)..(35): Xaa is C or S
XXVPQDLEPISILYLVGRTPKVKFKYEMVVKSXKXS

SEQ ID NO: 19029 - protein, 32 aa, Artificial Sequence
  Non-cyclic GFR-binding peptide
  MOD_RES (14)..(15)..(16)..(17)..(18): Xaa is A or G
  MOD_RES (19)..(20)..(21)..(22): Xaa is A or G or absent
VPARLSPISILYKXXXXXXXXXLKYHYDMVVE

SEQ ID NO: 19030 - protein, 40 aa, Artificial Sequence
  Non-cyclic GFR-binding peptide
  MOD_RES (6)..(7): Xaa is C or S
  MOD_RES (21)..(22)..(23)..(24)..(25): Xaa is A or G
  MOD_RES (26)..(27)..(28)..(29): Xaa is A or G or absent
AAPASXXVPARLSPISILYKXXXXXXXXXLKYHYDMVVEA

SEQ ID NO: 19031 - protein, 37 aa, Artificial Sequence
  Non-cyclic GFR-binding peptide
  MOD_RES (3)..(4)..(37): Xaa is C or S
  MOD_RES (18)..(19)..(20)..(21)..(22): Xaa is A or G
  MOD_RES (23)..(24)..(25)..(26): Xaa is A or G or absent
SPXXVSQDLEPISILYLXXXXXXXXXKFKYEMIVKSX

SEQ ID NO: 19032 - protein, 35 aa, Artificial Sequence
  Non-cyclic GFR-binding peptide
  MOD_RES (1)..(32)..(34): Xaa is C or S
XVPQALEPISILYLVGRKPKVKFKYEMIVRSXKXS

SEQ ID NO: 19033 - protein, 39 aa, Artificial Sequence
  Non-cyclic GFR-binding peptide
  MOD_RES (4)..(5)..(38): Xaa is C or S
  MOD_RES (19)..(20)..(21)..(22)..(23): Xaa is A or G
  MOD_RES (24)..(25)..(26)..(27): Xaa is A or G or absent
ASPXXVSQDLSPISILYIXXXXXXXXXYKQYEMIVKSXK

SEQ ID NO: 19034 - protein, 31 aa, Artificial Sequence
  Non-cyclic GFR-binding peptide
APTKLSPISVLYIDSSNNVIYKQYENMVVKA

SEQ ID NO: 19035 - protein, 33 aa, Artificial Sequence
  Non-cyclic GFR-binding peptide
  MOD_RES (1)..(1): Xaa is C or S
  MOD_RES (15)..(16)..(17)..(18)..(19): Xaa is A or G
  MOD_RES (20)..(21)..(22)..(23): Xaa is A or G or absent
XVPTELEPISMLYLXXXXXXXXXKFKYEDMVVE

SEQ ID NO: 19036 - protein, 37 aa, Artificial Sequence
  Non-cyclic GFR-binding peptide
  MOD_RES (2)..(3)..(35)..(37): Xaa is C or S
AXXAPTKLEPISVLYLDSSNNVIKFKYENMVVKAXGX

SEQ ID NO: 19037 - protein, 41 aa, Artificial Sequence
  Non-cyclic GFR-binding peptide
  MOD_RES (6)..(7)..(38)..(40): Xaa is C or S
ASAAPXXVPQALEPISILYLVGRKPKVKFKYEMIVRSXKXS

SEQ ID NO: 19038 - protein, 41 aa, Artificial Sequence
  Non-cyclic GFR-binding peptide
  MOD_RES (5)..(6)..(39)..(41): Xaa is C or S
  MOD_RES (20)..(21)..(22)..(23)..(24): Xaa is A or G
  MOD_RES (25)..(26)..(27)..(28): Xaa is A or G or absent
SAAPXXVPQALSPISILYIXXXXXXXXXYKQYEMIVRSXKX

SEQ ID NO: 19039 - protein, 42 aa, Artificial Sequence
  Non-cyclic GFR-binding peptide
  MOD_RES (4)..(5)..(39)..(41): Xaa is C or S
  MOD_RES (19)..(20)..(21)..(22)..(23): Xaa is A or G
  MOD_RES (24)..(25)..(26)..(27): Xaa is A or G or absent
PKAXXVPTELSPISMLYIXXXXXXXXXYKQYEEMVVEGXGXR

SEQ ID NO: 19040 - protein, 34 aa, Artificial Sequence
  Non-cyclic GFR-binding peptide
  MOD_RES (34)..(34): Xaa is C or S
  MOD_RES (14)..(15)..(16)..(17)..(18): Xaa is A or G
  MOD_RES (19)..(20)..(21)..(22): Xaa is A or G or absent
VPTKLSPISILYKXXXXXXXXXLKYHYGMAVSEX

SEQ ID NO: 19041 - protein, 38 aa, Artificial Sequence
  Non-cyclic GFR-binding peptide
  MOD_RES (4)..(5)..(37): Xaa is C or S
PASXXVPARLSPISILYKDAANNVVLKYHYDMVVEAXG

SEQ ID NO: 19042 - protein, 36 aa, Artificial Sequence
  Non-cyclic GFR-binding peptide
  MOD_RES (35)..(35): Xaa is C or S
  MOD_RES (14)..(15)..(16)..(17)..(18): Xaa is A or G
  MOD_RES (19)..(20)..(21)..(22): Xaa is A or G or absent
VPTKLEPISVLYLXXXXXXXXXKFKYEEGMSVAEXG

SEQ ID NO: 19043 - protein, 35 aa, Artificial Sequence
  Non-cyclic GFR-binding peptide
  MOD_RES (35)..(35): Xaa is C or S
  MOD_RES (14)..(15)..(16)..(17)..(18): Xaa is A or G
  MOD_RES (19)..(20)..(21)..(22): Xaa is A or G or absent
VPTKLSPISVLYIXXXXXXXXXYKQYEEGMSVAEX

SEQ ID NO: 19044 - protein, 39 aa, Artificial Sequence
  Non-cyclic GFR-binding peptide
  MOD_RES (3)..(4)..(36)..(38): Xaa is C or S
KPXXAPTKLEPISVLYLDDSSNVIKFKYENMVVRSXGXH

SEQ ID NO: 19045 - protein, 39 aa, Artificial Sequence
  Non-cyclic GFR-binding peptide
  MOD_RES (3)..(4)..(38): Xaa is C or S
  MOD_RES (18)..(19)..(20)..(21)..(22): Xaa is A or G
  MOD_RES (23)..(24)..(25)..(26): Xaa is A or G or absent
KAXXVPTKLSPISILYKXXXXXXXXXLKYHYGMAVSEXG

SEQ ID NO: 19046 - protein, 35 aa, Artificial Sequence
  Non-cyclic GFR-binding peptide
  MOD_RES (1)..(34): Xaa is C or S
  MOD_RES (15)..(16)..(17)..(18)..(19): Xaa is A or G
  MOD_RES (20)..(21)..(22)..(23): Xaa is A or G or absent
XVPQDLEPISILYLXXXXXXXXXKFKYEMVVKSXK

SEQ ID NO: 19047 - protein, 36 aa, Artificial Sequence
  Non-cyclic GFR-binding peptide
  MOD_RES (4)..(5)..(36): Xaa is C or S
ASPXXVSQDLEPISILYLIGKTPKIKFKYEMIVKSX

SEQ ID NO: 19048 - protein, 41 aa, Artificial Sequence
  Non-cyclic GFR-binding peptide
  MOD_RES (5)..(6)..(41): Xaa is C or S
  MOD_RES (20)..(21)..(22)..(23)..(24): Xaa is A or G
  MOD_RES (25)..(26)..(27)..(28): Xaa is A or G or absent
VGKAXXVPTKLSPISVLYIXXXXXXXXXYKQYEEGMSVAEX

SEQ ID NO: 19049 - protein, 41 aa, Artificial Sequence
  Non-cyclic GFR-binding peptide
  MOD_RES (6)..(7)..(39)..(41): Xaa is C or S
AVPKAXXAPTKLEPISVLYLDSSNNVIKFKYENMVVKAXGX

SEQ ID NO: 19050 - protein, 37 aa, Artificial Sequence
  Non-cyclic GFR-binding peptide
  MOD_RES (6)..(7): Xaa is C or S
SIPKAXXVPTELEPISMLYLDEYDKVVKFKYEEMVVE

SEQ ID NO: 19051 - protein, 40 aa, Artificial Sequence
  Non-cyclic GFR-binding peptide
  MOD_RES (5)..(6)..(38)..(40): Xaa is C or S
APASXXVPARLEPISILYLDAANNVVKFKYEDMVVEAXGX

SEQ ID NO: 19052 - protein, 39 aa, Artificial Sequence
  Non-cyclic GFR-binding peptide
  MOD_RES (5)..(6)..(38): Xaa is C or S
VPKPXXAPTKLEPISVLYLDDSSNVIKFKYENMVVRSXG

SEQ ID NO: 19053 - protein, 40 aa, Artificial Sequence
  Non-cyclic GFR-binding peptide
  MOD_RES (4)..(5)..(37)..(39): Xaa is C or S
PKPXXAPTQLSPISVLYIDDSSNVIYKQYENMVVRAXGXH

SEQ ID NO: 19054 - protein, 37 aa, Artificial Sequence
  Non-cyclic GFR-binding peptide
  MOD_RES (2)..(3)..(37): Xaa is C or S
  MOD_RES (17)..(18)..(19)..(20)..(21): Xaa is A or G
  MOD_RES (22)..(23)..(24)..(25): Xaa is A or G or absent
SXXVPARLEPISILYLXXXXXXXXXKFKYEDMVVEAX

SEQ ID NO: 19055 - protein, 35 aa, Artificial Sequence
  Non-cyclic GFR-binding peptide
  MOD_RES (1)..(2)..(34): Xaa is C or S
XXVPARLSPISILYKDAANNVVLKYHYDMVVEAXG

SEQ ID NO: 19056 - protein, 35 aa, Artificial Sequence
  Non-cyclic GFR-binding peptide
  MOD_RES (4)..(5): Xaa is C or S
PASXXVPARLSPISILYKDAANNVVLKYHYDMVVE

SEQ ID NO: 19057 - protein, 37 aa, Artificial Sequence
  Non-cyclic GFR-binding peptide
  MOD_RES (5)..(37): Xaa is C or S
TKPTXAPTKLEPISVLYLDDSSNVIKFKYENMVVRSX

SEQ ID NO: 19058 - protein, 38 aa, Artificial Sequence
  Non-cyclic GFR-binding peptide
  MOD_RES (3)..(4)..(36)..(38): Xaa is C or S
KAXXVPTKLSPISILYIDKGVVTYYKQYEGMAVSEXGX

SEQ ID NO: 19059 - protein, 43 aa, Artificial Sequence
  Non-cyclic GFR-binding peptide
  MOD_RES (5)..(6)..(40)..(42): Xaa is C or S
  MOD_RES (20)..(21)..(22)..(23)..(24): Xaa is A or G
  MOD_RES (25)..(26)..(27)..(28): Xaa is A or G or absent
VPKAXXAPTKLEPISVLYLXXXXXXXXXKFKYENMVVKAXGXH

SEQ ID NO: 19060 - protein, 37 aa, Artificial Sequence
  Non-cyclic GFR-binding peptide
  MOD_RES (2)..(3)..(35)..(37): Xaa is C or S
AXXVPTKLSPISILYKDKGVVTYLKYHYGMAVSEXGX

SEQ ID NO: 19061 - protein, 36 aa, Artificial Sequence
  Non-cyclic GFR-binding peptide
  MOD_RES (34)..(36): Xaa is C or S
  MOD_RES (14)..(15)..(16)..(17)..(18): Xaa is A or G
  MOD_RES (19)..(20)..(21)..(22): Xaa is A or G or absent
APTKLSPISVLYIXXXXXXXXXYKQYENMVVKAXGX

SEQ ID NO: 19062 - protein, 35 aa, Artificial Sequence
  Non-cyclic GFR-binding peptide
  MOD_RES (5)..(5): Xaa is C or S
TKPTXAPTKLSPISVLYIDDSSNVIYKQYENMVVR

SEQ ID NO: 19063 - protein, 37 aa, Artificial Sequence
  Non-cyclic GFR-binding peptide
  MOD_RES (3)..(4): Xaa is C or S
  MOD_RES (18)..(19)..(20)..(21)..(22): Xaa is A or G
  MOD_RES (23)..(24)..(25)..(26): Xaa is A or G or absent
ASXXVPARLSPISILYKXXXXXXXXXLKYHYDMVVEA

SEQ ID NO: 19064 - protein, 34 aa, Artificial Sequence
  Non-cyclic GFR-binding peptide
  MOD_RES (2)..(2): Xaa is C or S
  MOD_RES (16)..(17)..(18)..(19)..(20): Xaa is A or G
  MOD_RES (21)..(22)..(23)..(24): Xaa is A or G or absent
TXAPTKLEPISVLYLXXXXXXXXXKFKYENMVVR

SEQ ID NO: 19065 - protein, 38 aa, Artificial Sequence
  Non-cyclic GFR-binding peptide
  MOD_RES (5)..(6): Xaa is C or S
  MOD_RES (20)..(21)..(22)..(23)..(24): Xaa is A or G
  MOD_RES (25)..(26)..(27)..(28): Xaa is A or G or absent
IPKAXXVPTELEPISMLYLXXXXXXXXXKFKYEEMVVE

SEQ ID NO: 19066 - protein, 39 aa, Artificial Sequence
  Non-cyclic GFR-binding peptide
  MOD_RES (5)..(6): Xaa is C or S
  MOD_RES (20)..(21)..(22)..(23)..(24): Xaa is A or G
  MOD_RES (25)..(26)..(27)..(28): Xaa is A or G or absent
IPKAXXVPTELSPISMLYIXXXXXXXXXYKQYEDMVVEG

SEQ ID NO: 19067 - protein, 40 aa, Artificial Sequence
  Non-cyclic GFR-binding peptide
  MOD_RES (5)..(6)..(40): Xaa is C or S
  MOD_RES (20)..(21)..(22)..(23)..(24): Xaa is A or G
  MOD_RES (25)..(26)..(27)..(28): Xaa is A or G or absent
IPKAXXVPTELEPISMLYLXXXXXXXXXKFKYEEMVVEGX

SEQ ID NO: 19068 - protein, 40 aa, Artificial Sequence
  Non-cyclic GFR-binding peptide
  MOD_RES (5)..(6)..(38)..(40): Xaa is C or S
VPKAXXAPTKLEPISVLYLDSSNNVIKFKYENMVVKAXGX

SEQ ID NO: 19069 - protein, 36 aa, Artificial Sequence
  Non-cyclic GFR-binding peptide
  MOD_RES (5)..(6): Xaa is C or S
SASPXXVSQDLSPISILYIIGKTPKIYKQYEMIVKS

SEQ ID NO: 19070 - protein, 40 aa, Artificial Sequence
  Non-cyclic GFR-binding peptide
  MOD_RES (5)..(39): Xaa is C or S
  MOD_RES (19)..(20)..(21)..(22)..(23): Xaa is A or G
  MOD_RES (24)..(25)..(26)..(27): Xaa is A or G or absent
TKPTXAPTKLEPISVLYLXXXXXXXXXKFKYENMVVRSXG

SEQ ID NO: 19071 - protein, 40 aa, Artificial Sequence
  Non-cyclic GFR-binding peptide
  MOD_RES (2)..(3)..(37)..(39): Xaa is C or S
  MOD_RES (17)..(18)..(19)..(20)..(21): Xaa is A or G
  MOD_RES (22)..(23)..(24)..(25): Xaa is A or G or absent
PXXAPTKLEPISVLYLXXXXXXXXXKFKYENMVVRSXGXH

SEQ ID NO: 19072 - protein, 37 aa, Artificial Sequence
  Non-cyclic GFR-binding peptide
  MOD_RES (4)..(5): Xaa is C or S
  MOD_RES (19)..(20)..(21)..(22)..(23): Xaa is A or G
  MOD_RES (24)..(25)..(26)..(27): Xaa is A or G or absent
ASPXXVSQDLSPISILYIXXXXXXXXXYKQYEMIVKS

SEQ ID NO: 19073 - protein, 42 aa, Artificial Sequence
  Non-cyclic GFR-binding peptide
  MOD_RES (6)..(7)..(39)..(41): Xaa is C or S
KASKAXXVPTKLSPISILYKDKGVVTYLKYHYGMAVSEXGXR

SEQ ID NO: 19074 - protein, 41 aa, Artificial Sequence
  Non-cyclic GFR-binding peptide
  MOD_RES (6)..(7)..(40): Xaa is C or S
KVGKAXXVPTKLSPISVLYIDDMGVPTYKQYEEGMSVAEXG

SEQ ID NO: 19075 - protein, 32 aa, Artificial Sequence
  Non-cyclic GFR-binding peptide
  MOD_RES (32)..(32): Xaa is C or S
VPARLSPISILYKDAANNVVLKYHYDMVVEAX

SEQ ID NO: 19076 - protein, 39 aa, Artificial Sequence
  Non-cyclic GFR-binding peptide
  MOD_RES (2)..(3)..(37)..(39): Xaa is C or S
  MOD_RES (17)..(18)..(19)..(20)..(21): Xaa is A or G
  MOD_RES (22)..(23)..(24)..(25): Xaa is A or G or absent
PXXAPTQLEPISVLYLXXXXXXXXXKFKYENMVVRAXGX

SEQ ID NO: 19077 - protein, 38 aa, Artificial Sequence
  Non-cyclic GFR-binding peptide
  MOD_RES (1)..(2)..(36)..(38): Xaa is C or S
  MOD_RES (16)..(17)..(18)..(19)..(20): Xaa is A or G
  MOD_RES (21)..(22)..(23)..(24): Xaa is A or G or absent
XXVPTKLSPISILYKXXXXXXXXXLKYHYGMAVSEXGX

SEQ ID NO: 19078 - protein, 39 aa, Artificial Sequence
  Non-cyclic GFR-binding peptide
  MOD_RES (6)..(7)..(38): Xaa is C or S
ASASPXXVPQDLSPISILYIVGRTPKVYKQYEMVVKSXK

SEQ ID NO: 19079 - protein, 38 aa, Artificial Sequence
  Non-cyclic GFR-binding peptide
  MOD_RES (2)..(3)..(37): Xaa is C or S
  MOD_RES (17)..(18)..(19)..(20)..(21): Xaa is A or G
  MOD_RES (22)..(23)..(24)..(25): Xaa is A or G or absent
PXXAPTKLSPISVLYIXXXXXXXXXYKQYENMVVRSXG

SEQ ID NO: 19080 - protein, 40 aa, Artificial Sequence
  Non-cyclic GFR-binding peptide
  MOD_RES (4)..(38)..(40): Xaa is C or S
  MOD_RES (18)..(19)..(20)..(21)..(22): Xaa is A or G
  MOD_RES (23)..(24)..(25)..(26): Xaa is A or G or absent
KPTXAPTKLSPISVLYIXXXXXXXXXYKQYENMVVRSXGX

SEQ ID NO: 19081 - protein, 38 aa, Artificial Sequence
  Non-cyclic GFR-binding peptide
  MOD_RES (35)..(37): Xaa is C or S
  MOD_RES (14)..(15)..(16)..(17)..(18): Xaa is A or G
  MOD_RES (19)..(20)..(21)..(22): Xaa is A or G or absent
VPTKLEPISVLYLXXXXXXXXXKFKYEEGMSVAEXGXR

SEQ ID NO: 19082 - protein, 38 aa, Artificial Sequence
  Non-cyclic GFR-binding peptide
  MOD_RES (5)..(6): Xaa is C or S
  MOD_RES (20)..(21)..(22)..(23)..(24): Xaa is A or G
  MOD_RES (25)..(26)..(27)..(28): Xaa is A or G or absent
ASKAXXVPTKLNAISILYFXXXXXXXXXLKKYRGMAVS

SEQ ID NO: 19083 - protein, 39 aa, Artificial Sequence
  Non-cyclic GFR-binding peptide
  MOD_RES (6)..(7)..(38): Xaa is C or S
ASASPXXVPQDLEPISILYLVGRTPKVKFKYEMVVKSXK

SEQ ID NO: 19084 - protein, 40 aa, Artificial Sequence
  Non-cyclic GFR-binding peptide
  MOD_RES (6)..(7)..(39): Xaa is C or S
KIPKAXXVPTELSPISMLYIDENEKVVYKQYEDMVVEGXG

SEQ ID NO: 19085 - protein, 38 aa, Artificial Sequence
  Non-cyclic GFR-binding peptide
  MOD_RES (6)..(7)..(38): Xaa is C or S
ASASPXXVPQDLSPISILYIVGRTPKVYKQYEMVVKSX

SEQ ID NO: 19086 - protein, 38 aa, Artificial Sequence
  Non-cyclic GFR-binding peptide
  MOD_RES (3)..(4)..(38): Xaa is C or S
  MOD_RES (18)..(19)..(20)..(21)..(22): Xaa is A or G
  MOD_RES (23)..(24)..(25)..(26): Xaa is A or G or absent
KAXXVPTKLNAISILYFXXXXXXXXXLKKYRGMAVSEX

SEQ ID NO: 19087 - protein, 34 aa, Artificial Sequence
  Non-cyclic GFR-binding peptide
  MOD_RES (3)..(4): Xaa is C or S
KAXXVPTKLSPISILYKDKGVVTYLKYHYGMAVS

SEQ ID NO: 19088 - protein, 40 aa, Artificial Sequence
  Non-cyclic GFR-binding peptide
  MOD_RES (5)..(37)..(39): Xaa is C or S
TKPTXAPTKLSPISVLYIDDSSNVIYKQYENMVVRSXGXH

SEQ ID NO: 19089 - protein, 36 aa, Artificial Sequence
  Non-cyclic GFR-binding peptide
  MOD_RES (1)..(35): Xaa is C or S
  MOD_RES (15)..(16)..(17)..(18)..(19): Xaa is A or G
  MOD_RES (20)..(21)..(22)..(23): Xaa is A or G or absent
XAPTKLEPISVLYLXXXXXXXXXKFKYENMVVRSXG

SEQ ID NO: 19090 - protein, 35 aa, Artificial Sequence
  Non-cyclic GFR-binding peptide
  MOD_RES (1)..(2): Xaa is C or S
  MOD_RES (16)..(17)..(18)..(19)..(20): Xaa is A or G
  MOD_RES (21)..(22)..(23)..(24): Xaa is A or G or absent
XXVPARLSPISILYKXXXXXXXXXLKYHYDMVVEA

SEQ ID NO: 19091 - protein, 31 aa, Artificial Sequence
  Non-cyclic GFR-binding peptide
VPTKLSPISILYKDKGVVTYLKYHYGMAVSE

SEQ ID NO: 19092 - protein, 34 aa, Artificial Sequence
  Non-cyclic GFR-binding peptide
  MOD_RES (31)..(33): Xaa is C or S
VPQALSPISILYIVGRKPKVYKQYEMIVRSXKXS

SEQ ID NO: 19093 - protein, 38 aa, Artificial Sequence
  Non-cyclic GFR-binding peptide
  MOD_RES (4)..(5): Xaa is C or S
  MOD_RES (19)..(20)..(21)..(22)..(23): Xaa is A or G
  MOD_RES (24)..(25)..(26)..(27): Xaa is A or G or absent
PKPXXAPTQLEPISVLYLXXXXXXXXXKFKYENMVVRA

SEQ ID NO: 19094 - protein, 44 aa, Artificial Sequence
  Non-cyclic GFR-binding peptide
  MOD_RES (6)..(7)..(41)..(43): Xaa is C or S
  MOD_RES (21)..(22)..(23)..(24)..(25): Xaa is A or G
  MOD_RES (26)..(27)..(28)..(29): Xaa is A or G or absent
SIPKAXXVPTELSPISMLYIXXXXXXXXXYKQYEEMVVEGXGXR

SEQ ID NO: 19095 - protein, 38 aa, Artificial Sequence
  Non-cyclic GFR-binding peptide
  MOD_RES (4)..(5)..(37): Xaa is C or S
PKPXXAPTQLSPISVLYIDDSSNVIYKQYENMVVRAXG

SEQ ID NO: 19096 - protein, 36 aa, Artificial Sequence
  Non-cyclic GFR-binding peptide
  MOD_RES (1)..(2)..(34)..(36): Xaa is C or S
XXVPARLSPISILYKDAANNVVLKYHYDMVVEAXGX

SEQ ID NO: 19097 - protein, 43 aa, Artificial Sequence
  Non-cyclic GFR-binding peptide
  MOD_RES (6)..(7)..(41)..(43): Xaa is C or S
  MOD_RES (21)..(22)..(23)..(24)..(25): Xaa is A or G
  MOD_RES (26)..(27)..(28)..(29): Xaa is A or G or absent
KASKAXXVPTKLSPISILYIXXXXXXXXXYKQYEGMAVSEXGX

SEQ ID NO: 19098 - protein, 38 aa, Artificial Sequence
  Non-cyclic GFR-binding peptide
  MOD_RES (2)..(3)..(35)..(37): Xaa is C or S
SXXVPARLSPISILYKDAANNVVLKYHYDMVVEAXGXR

SEQ ID NO: 19099 - protein, 42 aa, Artificial Sequence
  Non-cyclic GFR-binding peptide
  MOD_RES (4)..(5)..(39)..(41): Xaa is C or S
  MOD_RES (19)..(20)..(21)..(22)..(23): Xaa is A or G
  MOD_RES (24)..(25)..(26)..(27): Xaa is A or G or absent
PASXXVPARLEPISILYLXXXXXXXXXKFKYEDMVVEAXGXR

SEQ ID NO: 19100 - protein, 31 aa, Artificial Sequence
  Non-cyclic GFR-binding peptide
  MOD_RES (31)..(31): Xaa is C or S
VPQDLEPISILYLVGRTPKVKFKYEMVVKSX

SEQ ID NO: 19101 - protein, 34 aa, Artificial Sequence
  Non-cyclic GFR-binding peptide
  MOD_RES (33)..(33): Xaa is C or S
VPTKLSPISVLYIDDMGVPTYKQYEEGMSVAEXG

SEQ ID NO: 19102 - protein, 35 aa, Artificial Sequence
  Non-cyclic GFR-binding peptide
  MOD_RES (1)..(2)..(34): Xaa is C or S
XXVPTELSPISMLYIDEYDKVVYKQYEEMVVEGXG

SEQ ID NO: 19103 - protein, 38 aa, Artificial Sequence
  Non-cyclic GFR-binding peptide
  MOD_RES (4)..(5): Xaa is C or S
  MOD_RES (19)..(20)..(21)..(22)..(23): Xaa is A or G
  MOD_RES (24)..(25)..(26)..(27): Xaa is A or G or absent
PKAXXVPTELSPISMLYIXXXXXXXXXYKQYEDMVVEG

SEQ ID NO: 19104 - protein, 37 aa, Artificial Sequence
  Non-cyclic GFR-binding peptide
  MOD_RES (1)..(35)..(37): Xaa is C or S
  MOD_RES (15)..(16)..(17)..(18)..(19): Xaa is A or G
  MOD_RES (20)..(21)..(22)..(23): Xaa is A or G or absent
XVPARLEPISILYLXXXXXXXXXKFKYEDMVVEAXGX

SEQ ID NO: 19105 - protein, 33 aa, Artificial Sequence
  Non-cyclic GFR-binding peptide
  MOD_RES (1)..(32): Xaa is C or S
XVSQDLSPISILYIIGKTPKIYKQYEMIVKSXK

SEQ ID NO: 19106 - protein, 38 aa, Artificial Sequence
  Non-cyclic GFR-binding peptide
  MOD_RES (3)..(4)..(38): Xaa is C or S
  MOD_RES (18)..(19)..(20)..(21)..(22): Xaa is A or G
  MOD_RES (23)..(24)..(25)..(26): Xaa is A or G or absent
KPXXAPTKLSPISVLYIXXXXXXXXXYKQYENMVVRSX

SEQ ID NO: 19107 - protein, 40 aa, Artificial Sequence
  Non-cyclic GFR-binding peptide
  MOD_RES (2)..(3)..(37)..(39): Xaa is C or S
  MOD_RES (17)..(18)..(19)..(20)..(21): Xaa is A or G
  MOD_RES (22)..(23)..(24)..(25): Xaa is A or G or absent
AXXVPTELEPISMLYLXXXXXXXXXKFKYEDMVVEGXGXR

SEQ ID NO: 19108 - protein, 40 aa, Artificial Sequence
  Non-cyclic GFR-binding peptide
  MOD_RES (1)..(2)..(37)..(39): Xaa is C or S
  MOD_RES (16)..(17)..(18)..(19)..(20): Xaa is A or G
  MOD_RES (21)..(22)..(23)..(24): Xaa is A or G or absent
XXVPTKLEPISVLYLXXXXXXXXXKFKYEEGMSVAEXGXR

SEQ ID NO: 19109 - protein, 36 aa, Artificial Sequence
  Non-cyclic GFR-binding peptide
  MOD_RES (4)..(5): Xaa is C or S
PKAXXVPTELSPISMLYIDEYDKVVYKQYEEMVVEG

SEQ ID NO: 19110 - protein, 36 aa, Artificial Sequence
  Non-cyclic GFR-binding peptide
  MOD_RES (5)..(6): Xaa is C or S
APASXXVPARLSPISILYKDAANNVVLKYHYDMVVE

SEQ ID NO: 19111 - protein, 38 aa, Artificial Sequence
  Non-cyclic GFR-binding peptide
  MOD_RES (3)..(4)..(38): Xaa is C or S
  MOD_RES (18)..(19)..(20)..(21)..(22): Xaa is A or G
  MOD_RES (23)..(24)..(25)..(26): Xaa is A or G or absent
KAXXAPTKLEPISVLYLXXXXXXXXXKFKYENMVVKAX

SEQ ID NO: 19112 - protein, 37 aa, Artificial Sequence
  Non-cyclic GFR-binding peptide
  MOD_RES (4)..(5): Xaa is C or S
  MOD_RES (19)..(20)..(21)..(22)..(23): Xaa is A or G
  MOD_RES (24)..(25)..(26)..(27): Xaa is A or G or absent
PKPXXAPTQLSPISVLYIXXXXXXXXXYKQYENMVVR

SEQ ID NO: 19113 - protein, 34 aa, Artificial Sequence
  Non-cyclic GFR-binding peptide
  MOD_RES (1)..(33): Xaa is C or S
XVPARLEPISILYLDAANNVVKFKYEDMVVEAXG

SEQ ID NO: 19114 - protein, 35 aa, Artificial Sequence
  Non-cyclic GFR-binding peptide
  MOD_RES (32)..(34): Xaa is C or S
APTKLEPISVLYLDDSSNVIKFKYENMVVRSXGXH

SEQ ID NO: 19115 - protein, 33 aa, Artificial Sequence
  Non-cyclic GFR-binding peptide
  MOD_RES (32)..(32): Xaa is C or S
VPTKLSPISILYKDKGVVTYLKYHYGMAVSEXG

SEQ ID NO: 19116 - protein, 36 aa, Artificial Sequence
  Non-cyclic GFR-binding peptide
  MOD_RES (4)..(5): Xaa is C or S
PKAXXVPTELEPISMLYLDENEKVVKFKYEDMVVEG

SEQ ID NO: 19117 - protein, 37 aa, Artificial Sequence
  Non-cyclic GFR-binding peptide
  MOD_RES (3)..(4): Xaa is C or S
  MOD_RES (18)..(19)..(20)..(21)..(22): Xaa is A or G
  MOD_RES (23)..(24)..(25)..(26): Xaa is A or G or absent
KAXXVPTELEPISMLYLXXXXXXXXXKFKYEDMVVEG

SEQ ID NO: 19118 - protein, 40 aa, Artificial Sequence
  Non-cyclic GFR-binding peptide
  MOD_RES (4)..(38)..(40): Xaa is C or S
  MOD_RES (18)..(19)..(20)..(21)..(22): Xaa is A or G
  MOD_RES (23)..(24)..(25)..(26): Xaa is A or G or absent
KPTXAPTKLEPISVLYLXXXXXXXXXKFKYENMVVRSXGX

SEQ ID NO: 19119 - protein, 33 aa, Artificial Sequence
  Non-cyclic GFR-binding peptide
  MOD_RES (1)..(1): Xaa is C or S
  MOD_RES (15)..(16)..(17)..(18)..(19): Xaa is A or G
  MOD_RES (20)..(21)..(22)..(23): Xaa is A or G or absent
XVPTKLSPISILYKXXXXXXXXXLKYHYGMAVS

SEQ ID NO: 19120 - protein, 36 aa, Artificial Sequence
  Non-cyclic GFR-binding peptide
  MOD_RES (33)..(35): Xaa is C or S
  MOD_RES (14)..(15)..(16)..(17)..(18): Xaa is A or G
  MOD_RES (19)..(20)..(21)..(22): Xaa is A or G or absent
VPQALEPISILYLXXXXXXXXXKFKYEMIVRSXKXS

SEQ ID NO: 19121 - protein, 36 aa, Artificial Sequence
  Non-cyclic GFR-binding peptide
  MOD_RES (3)..(4): Xaa is C or S
  MOD_RES (18)..(19)..(20)..(21)..(22): Xaa is A or G
  MOD_RES (23)..(24)..(25)..(26): Xaa is A or G or absent
SPXXVSQDLEPISILYLXXXXXXXXXKFKYEMIVKS

SEQ ID NO: 19122 - protein, 39 aa, Artificial Sequence
  Non-cyclic GFR-binding peptide
  MOD_RES (3)..(4)..(39): Xaa is C or S
  MOD_RES (18)..(19)..(20)..(21)..(22): Xaa is A or G
  MOD_RES (23)..(24)..(25)..(26): Xaa is A or G or absent
KAXXVPTKLEPISVLYLXXXXXXXXXKFKYEEGMSVAEX

SEQ ID NO: 19123 - protein, 35 aa, Artificial Sequence
  Non-cyclic GFR-binding peptide
  MOD_RES (34)..(34): Xaa is C or S
  MOD_RES (14)..(15)..(16)..(17)..(18): Xaa is A or G
  MOD_RES (19)..(20)..(21)..(22): Xaa is A or G or absent
VPTKLSPISILYIXXXXXXXXXYKQYEGMAVSEXG

SEQ ID NO: 19124 - protein, 42 aa, Artificial Sequence
  Non-cyclic GFR-binding peptide
  MOD_RES (6)..(7)..(40)..(42): Xaa is C or S
  MOD_RES (21)..(22)..(23)..(24)..(25): Xaa is A or G
  MOD_RES (26)..(27)..(28)..(29): Xaa is A or G or absent
ASASPXXVSQDLEPISILYLXXXXXXXXXKFKYEMIVKSXKX

SEQ ID NO: 19125 - protein, 30 aa, Artificial Sequence
  Non-cyclic GFR-binding peptide
VPTELSPISMLYIDEYDKVVYKQYEEMVVE

SEQ ID NO: 19126 - protein, 37 aa, Artificial Sequence
  Non-cyclic GFR-binding peptide
  MOD_RES (3)..(4)..(36): Xaa is C or S
KPXXAPTQLSPISVLYIDDSSNVIYKQYENMVVRAXG

SEQ ID NO: 19127 - protein, 39 aa, Artificial Sequence
  Non-cyclic GFR-binding peptide
  MOD_RES (4)..(5)..(36)..(38): Xaa is C or S
AAPXXVPQALEPISILYLVGRKPKVKFKYEMIVRSXKXS

SEQ ID NO: 19128 - protein, 35 aa, Artificial Sequence
  Non-cyclic GFR-binding peptide
  MOD_RES (2)..(3)..(35): Xaa is C or S
PXXAPTKLEPISVLYLDDSSNVIKFKYENMVVRSX

SEQ ID NO: 19129 - protein, 37 aa, Artificial Sequence
  Non-cyclic GFR-binding peptide
  MOD_RES (2)..(3): Xaa is C or S
  MOD_RES (17)..(18)..(19)..(20)..(21): Xaa is A or G
  MOD_RES (22)..(23)..(24)..(25): Xaa is A or G or absent
AXXVPTKLEPISVLYLXXXXXXXXXKFKYEEGMSVAE

SEQ ID NO: 19130 - protein, 40 aa, Artificial Sequence
  Non-cyclic GFR-binding peptide
  MOD_RES (3)..(37)..(39): Xaa is C or S
  MOD_RES (17)..(18)..(19)..(20)..(21): Xaa is A or G
  MOD_RES (22)..(23)..(24)..(25): Xaa is A or G or absent
PTXAPTKLSPISVLYIXXXXXXXXXYKQYENMVVRSXGXH

SEQ ID NO: 19131 - protein, 38 aa, Artificial Sequence
  Non-cyclic GFR-binding peptide
  MOD_RES (3)..(4)..(37): Xaa is C or S
  MOD_RES (18)..(19)..(20)..(21)..(22): Xaa is A or G
  MOD_RES (23)..(24)..(25)..(26): Xaa is A or G or absent
APXXVPQALSPISILYIXXXXXXXXXYKQYEMIVRSXK

SEQ ID NO: 19132 - protein, 36 aa, Artificial Sequence
  Non-cyclic GFR-binding peptide
  MOD_RES (1)..(35): Xaa is C or S
  MOD_RES (15)..(16)..(17)..(18)..(19): Xaa is A or G
  MOD_RES (20)..(21)..(22)..(23): Xaa is A or G or absent
XVPARLEPISILYLXXXXXXXXXKFKYEDMVVEAXG

SEQ ID NO: 19133 - protein, 38 aa, Artificial Sequence
  Non-cyclic GFR-binding peptide
  MOD_RES (1)..(2)..(35)..(37): Xaa is C or S
XXVPTKLEPISVLYLDDMGVPTKFKYEEGMSVAEXGXR

SEQ ID NO: 19134 - protein, 35 aa, Artificial Sequence
  Non-cyclic GFR-binding peptide
  MOD_RES (32)..(34): Xaa is C or S
VPTELSPISMLYIDENEKVVYKQYEDMVVEGXGXR

SEQ ID NO: 19135 - protein, 44 aa, Artificial Sequence
  Non-cyclic GFR-binding peptide
  MOD_RES (7)..(41)..(43): Xaa is C or S
  MOD_RES (21)..(22)..(23)..(24)..(25): Xaa is A or G
  MOD_RES (26)..(27)..(28)..(29): Xaa is A or G or absent
HVTKPTXAPTKLEPISVLYLXXXXXXXXXKFKYENMVVRSXGXH

SEQ ID NO: 19136 - protein, 32 aa, Artificial Sequence
  Non-cyclic GFR-binding peptide
  MOD_RES (14)..(15)..(16)..(17)..(18): Xaa is A or G
  MOD_RES (19)..(20)..(21)..(22): Xaa is A or G or absent
VPTKLSPISILYKXXXXXXXXXLKYHYGMAVS

SEQ ID NO: 19137 - protein, 32 aa, Artificial Sequence
  Non-cyclic GFR-binding peptide
  MOD_RES (32)..(32): Xaa is C or S
VPARLNAISILYFDAANNVVLKKYRDMVVEAX

SEQ ID NO: 19138 - protein, 40 aa, Artificial Sequence
  Non-cyclic GFR-binding peptide
  MOD_RES (3)..(4)..(37)..(39): Xaa is C or S
  MOD_RES (18)..(19)..(20)..(21)..(22): Xaa is A or G
  MOD_RES (23)..(24)..(25)..(26): Xaa is A or G or absent
APXXVPQALEPISILYLXXXXXXXXXKFKYEMIVRSXKXS

SEQ ID NO: 19139 - protein, 37 aa, Artificial Sequence
  Non-cyclic GFR-binding peptide
  MOD_RES (5)..(6): Xaa is C or S
VPKAXXAPTKLEPISVLYLDSSNNVIKFKYENMVVKA

SEQ ID NO: 19140 - protein, 36 aa, Artificial Sequence
  Non-cyclic GFR-binding peptide
  MOD_RES (5)..(6): Xaa is C or S
ASKAXXVPTKLSPISILYIDKGVVTYYKQYEGMAVS

SEQ ID NO: 19141 - protein, 35 aa, Artificial Sequence
  Non-cyclic GFR-binding peptide
  MOD_RES (1)..(35): Xaa is C or S
  MOD_RES (15)..(16)..(17)..(18)..(19): Xaa is A or G
  MOD_RES (20)..(21)..(22)..(23): Xaa is A or G or absent
XVPTELSPISMLYIXXXXXXXXXYKQYEDMVVEGX

SEQ ID NO: 19142 - protein, 34 aa, Artificial Sequence
  Non-cyclic GFR-binding peptide
  MOD_RES (1)..(2): Xaa is C or S
  MOD_RES (16)..(17)..(18)..(19)..(20): Xaa is A or G
  MOD_RES (21)..(22)..(23)..(24): Xaa is A or G or absent
XXVPQDLEPISILYLXXXXXXXXXKFKYEMVVKS

SEQ ID NO: 19143 - protein, 40 aa, Artificial Sequence
  Non-cyclic GFR-binding peptide
  MOD_RES (5)..(6)..(40): Xaa is C or S
  MOD_RES (20)..(21)..(22)..(23)..(24): Xaa is A or G
  MOD_RES (25)..(26)..(27)..(28): Xaa is A or G or absent
ASKAXXVPTKLSPISILYIXXXXXXXXXYKQYEGMAVSEX

SEQ ID NO: 19144 - protein, 39 aa, Artificial Sequence
  Non-cyclic GFR-binding peptide
  MOD_RES (1)..(2)..(36)..(38): Xaa is C or S
  MOD_RES (16)..(17)..(18)..(19)..(20): Xaa is A or G
  MOD_RES (21)..(22)..(23)..(24): Xaa is A or G or absent
XXVPTKLSPISILYKXXXXXXXXXLKYHYGMAVSEXGXR

SEQ ID NO: 19145 - protein, 38 aa, Artificial Sequence
  Non-cyclic GFR-binding peptide
  MOD_RES (1)..(2)..(36)..(38): Xaa is C or S
  MOD_RES (16)..(17)..(18)..(19)..(20): Xaa is A or G
  MOD_RES (21)..(22)..(23)..(24): Xaa is A or G or absent
XXVPTELSPISMLYIXXXXXXXXXYKQYEDMVVEGXGX

SEQ ID NO: 19146 - protein, 32 aa, Artificial Sequence
  Non-cyclic GFR-binding peptide
  MOD_RES (14)..(15)..(16)..(17)..(18): Xaa is A or G
  MOD_RES (19)..(20)..(21)..(22): Xaa is A or G or absent
APTKLSPISVLYIXXXXXXXXXYKQYENMVVK

SEQ ID NO: 19147 - protein, 36 aa, Artificial Sequence
  Non-cyclic GFR-binding peptide
  MOD_RES (1)..(33)..(35): Xaa is C or S
XVPARLNAISILYFDAANNVVLKKYRDMVVEAXGXR

SEQ ID NO: 19148 - protein, 33 aa, Artificial Sequence
  Non-cyclic GFR-binding peptide
  MOD_RES (1)..(1): Xaa is C or S
  MOD_RES (15)..(16)..(17)..(18)..(19): Xaa is A or G
  MOD_RES (20)..(21)..(22)..(23): Xaa is A or G or absent
XAPTKLSPISVLYIXXXXXXXXXYKQYENMVVK

SEQ ID NO: 19149 - protein, 35 aa, Artificial Sequence
  Non-cyclic GFR-binding peptide
  MOD_RES (1)..(33)..(35): Xaa is C or S
XAPTKLSPISVLYIDSSNNVIYKQYENMVVKAXGX

SEQ ID NO: 19150 - protein, 32 aa, Artificial Sequence
  Non-cyclic GFR-binding peptide
  MOD_RES (14)..(15)..(16)..(17)..(18): Xaa is A or G
  MOD_RES (19)..(20)..(21)..(22): Xaa is A or G or absent
APTKLSPISVLYIXXXXXXXXXYKQYENMVVR

SEQ ID NO: 19151 - protein, 33 aa, Artificial Sequence
  Non-cyclic GFR-binding peptide
  MOD_RES (1)..(1): Xaa is C or S
  MOD_RES (15)..(16)..(17)..(18)..(19): Xaa is A or G
  MOD_RES (20)..(21)..(22)..(23): Xaa is A or G or absent
XAPTKLSPISVLYIXXXXXXXXXYKQYENMVVR

SEQ ID NO: 19152 - protein, 39 aa, Artificial Sequence
  Non-cyclic GFR-binding peptide
  MOD_RES (4)..(5): Xaa is C or S
  MOD_RES (19)..(20)..(21)..(22)..(23): Xaa is A or G
  MOD_RES (24)..(25)..(26)..(27): Xaa is A or G or absent
GKAXXVPTKLSPISVLYIXXXXXXXXXYKQYEEGMSVAE

SEQ ID NO: 19153 - protein, 36 aa, Artificial Sequence
  Non-cyclic GFR-binding peptide
  MOD_RES (2)..(36): Xaa is C or S
  MOD_RES (16)..(17)..(18)..(19)..(20): Xaa is A or G
  MOD_RES (21)..(22)..(23)..(24): Xaa is A or G or absent
TXAPTKLEPISVLYLXXXXXXXXXKFKYENMVVRSX

SEQ ID NO: 19154 - protein, 33 aa, Artificial Sequence
  Non-cyclic GFR-binding peptide
  MOD_RES (14)..(15)..(16)..(17)..(18): Xaa is A or G
  MOD_RES (19)..(20)..(21)..(22): Xaa is A or G or absent
APTKLEPISVLYLXXXXXXXXXKFKYENMVVKA

SEQ ID NO: 19155 - protein, 39 aa, Artificial Sequence
  Non-cyclic GFR-binding peptide
  MOD_RES (5)..(6): Xaa is C or S
  MOD_RES (20)..(21)..(22)..(23)..(24): Xaa is A or G
  MOD_RES (25)..(26)..(27)..(28): Xaa is A or G or absent
ASKAXXVPTKLNAISILYFXXXXXXXXXLKKYRGMAVSE

SEQ ID NO: 19156 - protein, 39 aa, Artificial Sequence
  Non-cyclic GFR-binding peptide
  MOD_RES (5)..(6)..(38): Xaa is C or S
VPKAXXAPTKLSPISVLYIDSSNNVIYKQYENMVVKAXG

SEQ ID NO: 19157 - protein, 32 aa, Artificial Sequence
  Non-cyclic GFR-binding peptide
  MOD_RES (1)..(1): Xaa is C or S
XAPTKLEPISVLYLDSSNNVIKFKYENMVVKA

SEQ ID NO: 19158 - protein, 39 aa, Artificial Sequence
  Non-cyclic GFR-binding peptide
  MOD_RES (4)..(38): Xaa is C or S
  MOD_RES (18)..(19)..(20)..(21)..(22): Xaa is A or G
  MOD_RES (23)..(24)..(25)..(26): Xaa is A or G or absent
KPTXAPTKLEPISVLYLXXXXXXXXXKFKYENMVVRSXG

SEQ ID NO: 19159 - protein, 39 aa, Artificial Sequence
  Non-cyclic GFR-binding peptide
  MOD_RES (4)..(5): Xaa is C or S
  MOD_RES (19)..(20)..(21)..(22)..(23): Xaa is A or G
  MOD_RES (24)..(25)..(26)..(27): Xaa is A or G or absent
GKAXXVPTKLEPISVLYLXXXXXXXXXKFKYEEGMSVAE

SEQ ID NO: 19160 - protein, 37 aa, Artificial Sequence
  Non-cyclic GFR-binding peptide
  MOD_RES (7)..(7): Xaa is C or S
HVTKPTXAPTKLEPISVLYLDDSSNVIKFKYENMVVR

SEQ ID NO: 19161 - protein, 40 aa, Artificial Sequence
  Non-cyclic GFR-binding peptide
  MOD_RES (3)..(4)..(39): Xaa is C or S
  MOD_RES (18)..(19)..(20)..(21)..(22): Xaa is A or G
  MOD_RES (23)..(24)..(25)..(26): Xaa is A or G or absent
KAXXVPTKLSPISVLYIXXXXXXXXXYKQYEEGMSVAEXG

SEQ ID NO: 19162 - protein, 32 aa, Artificial Sequence
  Non-cyclic GFR-binding peptide
  MOD_RES (1)..(2): Xaa is C or S
XXVPQALSPISILYIVGRKPKVYKQYEMIVRS

SEQ ID NO: 19163 - protein, 35 aa, Artificial Sequence
  Non-cyclic GFR-binding peptide
  MOD_RES (3)..(4): Xaa is C or S
KAXXAPTKLSPISVLYIDSSNNVIYKQYENMVVKA

SEQ ID NO: 19164 - protein, 40 aa, Artificial Sequence
  Non-cyclic GFR-binding peptide
  MOD_RES (6)..(7)..(39): Xaa is C or S
AAPASXXVPARLEPISILYLDAANNVVKFKYEDMVVEAXG

SEQ ID NO: 19165 - protein, 35 aa, Artificial Sequence
  Non-cyclic GFR-binding peptide
  MOD_RES (2)..(3): Xaa is C or S
  MOD_RES (17)..(18)..(19)..(20)..(21): Xaa is A or G
  MOD_RES (22)..(23)..(24)..(25): Xaa is A or G or absent
AXXAPTKLEPISVLYLXXXXXXXXXKFKYENMVVK

SEQ ID NO: 19166 - protein, 40 aa, Artificial Sequence
  Non-cyclic GFR-binding peptide
  MOD_RES (5)..(6)..(37)..(39): Xaa is C or S
SAAPXXVPQALEPISILYLVGRKPKVKFKYEMIVRSXKXS

SEQ ID NO: 19167 - protein, 39 aa, Artificial Sequence
  Non-cyclic GFR-binding peptide
  MOD_RES (4)..(5)..(39): Xaa is C or S
  MOD_RES (19)..(20)..(21)..(22)..(23): Xaa is A or G
  MOD_RES (24)..(25)..(26)..(27): Xaa is A or G or absent
SKAXXVPTKLSPISILYKXXXXXXXXXLKYHYGMAVSEX

SEQ ID NO: 19168 - protein, 39 aa, Artificial Sequence
  Non-cyclic GFR-binding peptide
  MOD_RES (2)..(3)..(37)..(39): Xaa is C or S
  MOD_RES (17)..(18)..(19)..(20)..(21): Xaa is A or G
  MOD_RES (22)..(23)..(24)..(25): Xaa is A or G or absent
AXXVPTELSPISMLYIXXXXXXXXXYKQYEEMVVEGXGX

SEQ ID NO: 19169 - protein, 32 aa, Artificial Sequence
  Non-cyclic GFR-binding peptide
  MOD_RES (31)..(31): Xaa is C or S
VPQDLEPISILYLVGRTPKVKFKYEMVVKSXK

SEQ ID NO: 19170 - protein, 38 aa, Artificial Sequence
  Non-cyclic GFR-binding peptide
  MOD_RES (4)..(5): Xaa is C or S
  MOD_RES (19)..(20)..(21)..(22)..(23): Xaa is A or G
  MOD_RES (24)..(25)..(26)..(27): Xaa is A or G or absent
SKAXXVPTKLNAISILYFXXXXXXXXXLKKYRGMAVSE

SEQ ID NO: 19171 - protein, 39 aa, Artificial Sequence
  Non-cyclic GFR-binding peptide
  MOD_RES (1)..(2)..(36)..(38): Xaa is C or S
  MOD_RES (16)..(17)..(18)..(19)..(20): Xaa is A or G
  MOD_RES (21)..(22)..(23)..(24): Xaa is A or G or absent
XXVPTELEPISMLYLXXXXXXXXXKFKYEDMVVEGXGXR

SEQ ID NO: 19172 - protein, 36 aa, Artificial Sequence
  Non-cyclic GFR-binding peptide
  MOD_RES (5)..(6): Xaa is C or S
VPKAXXAPTKLEPISVLYLDSSNNVIKFKYENMVVK

SEQ ID NO: 19173 - protein, 36 aa, Artificial Sequence
  Non-cyclic GFR-binding peptide
  MOD_RES (3)..(4): Xaa is C or S
  MOD_RES (18)..(19)..(20)..(21)..(22): Xaa is A or G
  MOD_RES (23)..(24)..(25)..(26): Xaa is A or G or absent
KPXXAPTQLEPISVLYLXXXXXXXXXKFKYENMVVR

SEQ ID NO: 19174 - protein, 42 aa, Artificial Sequence
  Non-cyclic GFR-binding peptide
  MOD_RES (6)..(7)..(40)..(42): Xaa is C or S
  MOD_RES (21)..(22)..(23)..(24)..(25): Xaa is A or G
  MOD_RES (26)..(27)..(28)..(29): Xaa is A or G or absent
ASAAPXXVPQALEPISILYLXXXXXXXXXKFKYEMIVRSXKX

SEQ ID NO: 19175 - protein, 39 aa, Artificial Sequence
  Non-cyclic GFR-binding peptide
  MOD_RES (1)..(2)..(36)..(38): Xaa is C or S
  MOD_RES (16)..(17)..(18)..(19)..(20): Xaa is A or G
  MOD_RES (21)..(22)..(23)..(24): Xaa is A or G or absent
XXVPTELSPISMLYIXXXXXXXXXYKQYEEMVVEGXGXR

SEQ ID NO: 19176 - protein, 40 aa, Artificial Sequence
  Non-cyclic GFR-binding peptide
  MOD_RES (5)..(6)..(40): Xaa is C or S
  MOD_RES (20)..(21)..(22)..(23)..(24): Xaa is A or G
  MOD_RES (25)..(26)..(27)..(28): Xaa is A or G or absent
IPKAXXVPTELSPISMLYIXXXXXXXXXYKQYEDMVVEGX

SEQ ID NO: 19177 - protein, 38 aa, Artificial Sequence
  Non-cyclic GFR-binding peptide
  MOD_RES (4)..(5)..(37): Xaa is C or S
PKPXXAPTKLSPISVLYIDDSSNVIYKQYENMVVRSXG

SEQ ID NO: 19178 - protein, 40 aa, Artificial Sequence
  Non-cyclic GFR-binding peptide
  MOD_RES (4)..(5)..(40): Xaa is C or S
  MOD_RES (19)..(20)..(21)..(22)..(23): Xaa is A or G
  MOD_RES (24)..(25)..(26)..(27): Xaa is A or G or absent
GKAXXVPTKLSPISVLYIXXXXXXXXXYKQYEEGMSVAEX

SEQ ID NO: 19179 - protein, 36 aa, Artificial Sequence
  Non-cyclic GFR-binding peptide
  MOD_RES (4)..(5): Xaa is C or S
PKPXXAPTQLSPISVLYIDDSSNVIYKQYENMVVRA

SEQ ID NO: 19180 - protein, 42 aa, Artificial Sequence
  Non-cyclic GFR-binding peptide
  MOD_RES (5)..(6)..(40)..(42): Xaa is C or S
  MOD_RES (20)..(21)..(22)..(23)..(24): Xaa is A or G
  MOD_RES (25)..(26)..(27)..(28): Xaa is A or G or absent
ASKAXXVPTKLSPISILYIXXXXXXXXXYKQYEGMAVSEXGX

SEQ ID NO: 19181 - protein, 39 aa, Artificial Sequence
  Non-cyclic GFR-binding peptide
  MOD_RES (5)..(6): Xaa is C or S
  MOD_RES (20)..(21)..(22)..(23)..(24): Xaa is A or G
  MOD_RES (25)..(26)..(27)..(28): Xaa is A or G or absent
APASXXVPARLEPISILYLXXXXXXXXXKFKYEDMVVEA

SEQ ID NO: 19182 - protein, 33 aa, Artificial Sequence
  Non-cyclic GFR-binding peptide
  MOD_RES (1)..(32): Xaa is C or S
XVPQDLSPISILYIVGRTPKVYKQYEMVVKSXK

SEQ ID NO: 19183 - protein, 37 aa, Artificial Sequence
  Non-cyclic GFR-binding peptide
  MOD_RES (4)..(5)..(37): Xaa is C or S
PKAXXAPTKLSPISVLYIDSSNNVIYKQYENMVVKAX

SEQ ID NO: 19184 - protein, 34 aa, Artificial Sequence
  Non-cyclic GFR-binding peptide
  MOD_RES (1)..(2)..(33): Xaa is C or S
XXVPQDLEPISILYLVGRTPKVKFKYEMVVKSXK

SEQ ID NO: 19185 - protein, 36 aa, Artificial Sequence
  Non-cyclic GFR-binding peptide
  MOD_RES (33)..(35): Xaa is C or S
  MOD_RES (14)..(15)..(16)..(17)..(18): Xaa is A or G
  MOD_RES (19)..(20)..(21)..(22): Xaa is A or G or absent
VPQALSPISILYIXXXXXXXXXYKQYEMIVRSXKXS

SEQ ID NO: 19186 - protein, 41 aa, Artificial Sequence
  Non-cyclic GFR-binding peptide
  MOD_RES (6)..(38)..(40): Xaa is C or S
VTKPTXAPTKLEPISVLYLDDSSNVIKFKYENMVVRSXGXH

SEQ ID NO: 19187 - protein, 42 aa, Artificial Sequence
  Non-cyclic GFR-binding peptide
  MOD_RES (6)..(7)..(39)..(41): Xaa is C or S
KASKAXXVPTKLNAISILYFDKGVVTYLKKYRGMAVSEXGXR

SEQ ID NO: 19188 - protein, 38 aa, Artificial Sequence
  Non-cyclic GFR-binding peptide
  MOD_RES (5)..(6)..(37): Xaa is C or S
SASPXXVSQDLSPISILYIIGKTPKIYKQYEMIVKSXK

SEQ ID NO: 19189 - protein, 30 aa, Artificial Sequence; identical to SEQ ID NO: 889
  Non-cyclic GFR-binding peptide

SEQ ID NO: 19190 - protein, 36 aa, Artificial Sequence
  Non-cyclic GFR-binding peptide
  MOD_RES (34)..(36): Xaa is C or S
  MOD_RES (14)..(15)..(16)..(17)..(18): Xaa is A or G
  MOD_RES (19)..(20)..(21)..(22): Xaa is A or G or absent
VPARLSPISILYKXXXXXXXXXLKYHYDMVVEAXGX

SEQ ID NO: 19191 - protein, 39 aa, Artificial Sequence
  Non-cyclic GFR-binding peptide
  MOD_RES (6)..(7): Xaa is C or S
  MOD_RES (21)..(22)..(23)..(24)..(25): Xaa is A or G
  MOD_RES (26)..(27)..(28)..(29): Xaa is A or G or absent
KASKAXXVPTKLSPISILYIXXXXXXXXXYKQYEGMAVS

SEQ ID NO: 19192 - protein, 37 aa, Artificial Sequence
  Non-cyclic GFR-binding peptide
  MOD_RES (2)..(3)..(36): Xaa is C or S
  MOD_RES (17)..(18)..(19)..(20)..(21): Xaa is A or G
  MOD_RES (22)..(23)..(24)..(25): Xaa is A or G or absent
PXXVPQALSPISILYIXXXXXXXXXYKQYEMIVRSXK

SEQ ID NO: 19193 - protein, 39 aa, Artificial Sequence
  Non-cyclic GFR-binding peptide
  MOD_RES (3)..(4)..(37)..(39): Xaa is C or S
KAXXVPTKLEPISVLYLDDMGVPTKFKYEEGMSVAEXGX

SEQ ID NO: 19194 - protein, 39 aa, Artificial Sequence
  Non-cyclic GFR-binding peptide
  MOD_RES (5)..(6)..(38): Xaa is C or S
ASKAXXVPTKLNAISILYFDKGVVTYLKKYRGMAVSEXG

SEQ ID NO: 19195 - protein, 34 aa, Artificial Sequence
  Non-cyclic GFR-binding peptide
  MOD_RES (3)..(4): Xaa is C or S
SPXXVPQDLEPISILYLVGRTPKVKFKYEMVVKS

SEQ ID NO: 19196 - protein, 41 aa, Artificial Sequence
  Non-cyclic GFR-binding peptide
  MOD_RES (3)..(4)..(38)..(40): Xaa is C or S
  MOD_RES (18)..(19)..(20)..(21)..(22): Xaa is A or G
  MOD_RES (23)..(24)..(25)..(26): Xaa is A or G or absent
KAXXVPTKLNAISILYFXXXXXXXXXLKKYRGMAVSEXGXR

SEQ ID NO: 19197 - protein, 40 aa, Artificial Sequence
  Non-cyclic GFR-binding peptide
  MOD_RES (4)..(5)..(37)..(39): Xaa is C or S
PKAXXAPTKLEPISVLYLDSSNNVIKFKYENMVVKAXGXH

SEQ ID NO: 19198 - protein, 41 aa, Artificial Sequence
  Non-cyclic GFR-binding peptide
  MOD_RES (4)..(5)..(39)..(41): Xaa is C or S
  MOD_RES (19)..(20)..(21)..(22)..(23): Xaa is A or G
  MOD_RES (24)..(25)..(26)..(27): Xaa is A or G or absent
SKAXXVPTKLSPISILYKXXXXXXXXXLKYHYGMAVSEXGX

SEQ ID NO: 19199 - protein, 36 aa, Artificial Sequence
  Non-cyclic GFR-binding peptide
  MOD_RES (1)..(34)..(36): Xaa is C or S
XVPTKLEPISVLYLDDMGVPTKFKYEEGMSVAEXGX

SEQ ID NO: 19200 - protein, 40 aa, Artificial Sequence
  Non-cyclic GFR-binding peptide
  MOD_RES (3)..(4)..(38)..(40): Xaa is C or S
  MOD_RES (18)..(19)..(20)..(21)..(22): Xaa is A or G
  MOD_RES (23)..(24)..(25)..(26): Xaa is A or G or absent
KAXXVPTKLSPISILYIXXXXXXXXXYKQYEGMAVSEXGX

SEQ ID NO: 19201 - protein, 33 aa, Artificial Sequence
  Non-cyclic GFR-binding peptide
  MOD_RES (2)..(3): Xaa is C or S
PXXVPQDLSPISILYIVGRTPKVYKQYEMVVKS

SEQ ID NO: 19202 - protein, 36 aa, Artificial Sequence
  Non-cyclic GFR-binding peptide
  MOD_RES (5)..(6): Xaa is C or S
APASXXVPARLEPISILYLDAANNVVKFKYEDMVVE

SEQ ID NO: 19203 - protein, 39 aa, Artificial Sequence
  Non-cyclic GFR-binding peptide
  MOD_RES (2)..(3)..(37)..(39): Xaa is C or S
  MOD_RES (17)..(18)..(19)..(20)..(21): Xaa is A or G
  MOD_RES (22)..(23)..(24)..(25): Xaa is A or G or absent
AXXVPTELEPISMLYLXXXXXXXXXKFKYEEMVVEGXGX

SEQ ID NO: 19204 - protein, 41 aa, Artificial Sequence
  Non-cyclic GFR-binding peptide
  MOD_RES (5)..(6)..(38)..(40): Xaa is C or S
VPKPXXAPTKLEPISVLYLDDSSNVIKFKYENMVVRSXGXH

SEQ ID NO: 19205 - protein, 40 aa, Artificial Sequence
  Non-cyclic GFR-binding peptide
  MOD_RES (5)..(6)..(40): Xaa is C or S
  MOD_RES (20)..(21)..(22)..(23)..(24): Xaa is A or G
  MOD_RES (25)..(26)..(27)..(28): Xaa is A or G or absent
APASXXVPARLEPISILYLXXXXXXXXXKFKYEDMVVEAX

SEQ ID NO: 19206 - protein, 39 aa, Artificial Sequence
  Non-cyclic GFR-binding peptide
  MOD_RES (5)..(6)..(39): Xaa is C or S
  MOD_RES (20)..(21)..(22)..(23)..(24): Xaa is A or G
  MOD_RES (25)..(26)..(27)..(28): Xaa is A or G or absent
SASPXXVSQDLEPISILYLXXXXXXXXXKFKYEMIVKSX

SEQ ID NO: 19207 - protein, 37 aa, Artificial Sequence
  Non-cyclic GFR-binding peptide
  MOD_RES (34)..(36): Xaa is C or S
  MOD_RES (14)..(15)..(16)..(17)..(18): Xaa is A or G
  MOD_RES (19)..(20)..(21)..(22): Xaa is A or G or absent
APTKLSPISVLYIXXXXXXXXXYKQYENMVVRSXGXH

SEQ ID NO: 19208 - protein, 37 aa, Artificial Sequence
  Non-cyclic GFR-binding peptide
  MOD_RES (1)..(2)..(34)..(36): Xaa is C or S
XXAPTQLEPISVLYLDDSSNVIKFKYENMVVRAXGXH

SEQ ID NO: 19209 - protein, 36 aa, Artificial Sequence
  Non-cyclic GFR-binding peptide
  MOD_RES (1)..(35): Xaa is C or S
  MOD_RES (15)..(16)..(17)..(18)..(19): Xaa is A or G
  MOD_RES (20)..(21)..(22)..(23): Xaa is A or G or absent
XVPTKLNAISILYFXXXXXXXXXLKKYRGMAVSEXG

SEQ ID NO: 19210 - protein, 39 aa, Artificial Sequence
  Non-cyclic GFR-binding peptide
  MOD_RES (4)..(5)..(37)..(39): Xaa is C or S
SKAXXVPTKLNAISILYFDKGVVTYLKKYRGMAVSEXGX

SEQ ID NO: 19211 - protein, 33 aa, Artificial Sequence
  Non-cyclic GFR-binding peptide
  MOD_RES (2)..(3): Xaa is C or S
PXXVSQDLSPISILYIIGKTPKIYKQYEMIVKS

SEQ ID NO: 19212 - protein, 34 aa, Artificial Sequence
  Non-cyclic GFR-binding peptide
  MOD_RES (1)..(2): Xaa is C or S
  MOD_RES (16)..(17)..(18)..(19)..(20): Xaa is A or G
  MOD_RES (21)..(22)..(23)..(24): Xaa is A or G or absent
XXVPTKLSPISILYIXXXXXXXXXYKQYEGMAVS

SEQ ID NO: 19213 - protein, 37 aa, Artificial Sequence
  Non-cyclic GFR-binding peptide
  MOD_RES (3)..(4)..(36): Xaa is C or S
ASXXVPARLSPISILYKDAANNVVLKYHYDMVVEAXG

SEQ ID NO: 19214 - protein, 37 aa, Artificial Sequence
  Non-cyclic GFR-binding peptide
  MOD_RES (2)..(3)..(36): Xaa is C or S
  MOD_RES (17)..(18)..(19)..(20)..(21): Xaa is A or G
  MOD_RES (22)..(23)..(24)..(25): Xaa is A or G or absent
PXXVSQDLEPISILYLXXXXXXXXXKFKYEMIVKSXK

SEQ ID NO: 19215 - protein, 39 aa, Artificial Sequence
  Non-cyclic GFR-binding peptide
  MOD_RES (4)..(5)..(39): Xaa is C or S
  MOD_RES (19)..(20)..(21)..(22)..(23): Xaa is A or G
  MOD_RES (24)..(25)..(26)..(27): Xaa is A or G or absent
PKAXXVPTELSPISMLYIXXXXXXXXXYKQYEEMVVEGX

SEQ ID NO: 19216 - protein, 40 aa, Artificial Sequence
  Non-cyclic GFR-binding peptide
  MOD_RES (3)..(4)..(37)..(39): Xaa is C or S
KAXXVPTKLSPISVLYIDDMGVPTYKQYEEGMSVAEXGXR

SEQ ID NO: 19217 - protein, 36 aa, Artificial Sequence
  Non-cyclic GFR-binding peptide
  MOD_RES (2)..(3): Xaa is C or S
  MOD_RES (17)..(18)..(19)..(20)..(21): Xaa is A or G
  MOD_RES (22)..(23)..(24)..(25): Xaa is A or G or absent
AXXAPTKLEPISVLYLXXXXXXXXXKFKYENMVVKA

SEQ ID NO: 19218 - protein, 37 aa, Artificial Sequence
  Non-cyclic GFR-binding peptide
  MOD_RES (6)..(7): Xaa is C or S
KASKAXXVPTKLSPISILYKDKGVVTYLKYHYGMAVS

SEQ ID NO: 19219 - protein, 39 aa, Artificial Sequence
  Non-cyclic GFR-binding peptide
  MOD_RES (2)..(3)..(36)..(38): Xaa is C or S
  MOD_RES (17)..(18)..(19)..(20)..(21): Xaa is A or G
  MOD_RES (22)..(23)..(24)..(25): Xaa is A or G or absent
PXXVPQALSPISILYIXXXXXXXXXYKQYEMIVRSXKXS

SEQ ID NO: 19220 - protein, 36 aa, Artificial Sequence
  Non-cyclic GFR-binding peptide
  MOD_RES (1)..(34)..(36): Xaa is C or S
XVPTKLSPISVLYIDDMGVPTYKQYEEGMSVAEXGX

SEQ ID NO: 19221 - protein, 35 aa, Artificial Sequence
  Non-cyclic GFR-binding peptide
  MOD_RES (2)..(3): Xaa is C or S
  MOD_RES (17)..(18)..(19)..(20)..(21): Xaa is A or G
  MOD_RES (22)..(23)..(24)..(25): Xaa is A or G or absent
AXXVPTELEPISMLYLXXXXXXXXXKFKYEEMVVE

SEQ ID NO: 19222 - protein, 38 aa, Artificial Sequence
  Non-cyclic GFR-binding peptide
  MOD_RES (5)..(5): Xaa is C or S
  MOD_RES (19)..(20)..(21)..(22)..(23): Xaa is A or G
  MOD_RES (24)..(25)..(26)..(27): Xaa is A or G or absent
TKPTXAPTKLEPISVLYLXXXXXXXXXKFKYENMVVRS

SEQ ID NO: 19223 - protein, 39 aa, Artificial Sequence
  Non-cyclic GFR-binding peptide
  MOD_RES (2)..(36)..(38): Xaa is C or S
  MOD_RES (16)..(17)..(18)..(19)..(20): Xaa is A or G
  MOD_RES (21)..(22)..(23)..(24): Xaa is A or G or absent
TXAPTKLSPISVLYIXXXXXXXXXYKQYENMVVRSXGXH

SEQ ID NO: 19224 - protein, 37 aa, Artificial Sequence
  Non-cyclic GFR-binding peptide
  MOD_RES (34)..(36): Xaa is C or S
  MOD_RES (14)..(15)..(16)..(17)..(18): Xaa is A or G
  MOD_RES (19)..(20)..(21)..(22): Xaa is A or G or absent
VPTELEPISMLYLXXXXXXXXXKFKYEDMVVEGXGXR

SEQ ID NO: 19225 - protein, 32 aa, Artificial Sequence
  Non-cyclic GFR-binding peptide
  MOD_RES (1)..(32): Xaa is C or S
XVPQDLEPISILYLVGRTPKVKFKYEMVVKSX

SEQ ID NO: 19226 - protein, 38 aa, Artificial Sequence
  Non-cyclic GFR-binding peptide
  MOD_RES (6)..(7): Xaa is C or S
AAPASXXVPARLSPISILYKDAANNVVLKYHYDMVVEA

SEQ ID NO: 19227 - protein, 36 aa, Artificial Sequence
  Non-cyclic GFR-binding peptide
  MOD_RES (4)..(5): Xaa is C or S
PKPXXAPTKLEPISVLYLDDSSNVIKFKYENMVVRS

SEQ ID NO: 19228 - protein, 33 aa, Artificial Sequence
  Non-cyclic GFR-binding peptide
  MOD_RES (32)..(32): Xaa is C or S
VPARLSPISILYKDAANNVVLKYHYDMVVEAXG

SEQ ID NO: 19229 - protein, 38 aa, Artificial Sequence
  Non-cyclic GFR-binding peptide
  MOD_RES (3)..(4)..(35)..(37): Xaa is C or S
SPXXVPQDLEPISILYLVGRTPKVKFKYEMVVKSXKXS

SEQ ID NO: 19230 - protein, 38 aa, Artificial Sequence
  Non-cyclic GFR-binding peptide
  MOD_RES (2)..(3)..(37): Xaa is C or S
  MOD_RES (17)..(18)..(19)..(20)..(21): Xaa is A or G
  MOD_RES (22)..(23)..(24)..(25): Xaa is A or G or absent
SXXVPARLNAISILYFXXXXXXXXXLKKYRDMVVEAXG

SEQ ID NO: 19231 - protein, 39 aa, Artificial Sequence
  Non-cyclic GFR-binding peptide
  MOD_RES (5)..(37)..(39): Xaa is C or S
TKPTXAPTKLEPISVLYLDDSSNVIKFKYENMVVRSXGX

SEQ ID NO: 19232 - protein, 36 aa, Artificial Sequence
  Non-cyclic GFR-binding peptide
  MOD_RES (3)..(4): Xaa is C or S
  MOD_RES (18)..(19)..(20)..(21)..(22): Xaa is A or G
  MOD_RES (23)..(24)..(25)..(26): Xaa is A or G or absent
ASXXVPARLEPISILYLXXXXXXXXXKFKYEDMVVE

SEQ ID NO: 19233 - protein, 41 aa, Artificial Sequence
  Non-cyclic GFR-binding peptide
  MOD_RES (5)..(6)..(40): Xaa is C or S
  MOD_RES (20)..(21)..(22)..(23)..(24): Xaa is A or G
  MOD_RES (25)..(26)..(27)..(28): Xaa is A or G or absent
ASKAXXVPTKLNAISILYFXXXXXXXXXLKKYRGMAVSEXG

SEQ ID NO: 19234 - protein, 34 aa, Artificial Sequence
  Non-cyclic GFR-binding peptide
  MOD_RES (3)..(3): Xaa is C or S
PTXAPTKLSPISVLYIDDSSNVIYKQYENMVVRS

SEQ ID NO: 19235 - protein, 35 aa, Artificial Sequence
  Non-cyclic GFR-binding peptide
  MOD_RES (4)..(5): Xaa is C or S
PKAXXVPTELSPISMLYIDENEKVVYKQYEDMVVE

SEQ ID NO: 19236 - protein, 38 aa, Artificial Sequence
  Non-cyclic GFR-binding peptide
  MOD_RES (1)..(2)..(36)..(38): Xaa is C or S
  MOD_RES (16)..(17)..(18)..(19)..(20): Xaa is A or G
  MOD_RES (21)..(22)..(23)..(24): Xaa is A or G or absent
XXVPARLSPISILYKXXXXXXXXXLKYHYDMVVEAXGX

SEQ ID NO: 19237 - protein, 36 aa, Artificial Sequence
  Non-cyclic GFR-binding peptide
  MOD_RES (1)..(2)..(36): Xaa is C or S
  MOD_RES (16)..(17)..(18)..(19)..(20): Xaa is A or G
  MOD_RES (21)..(22)..(23)..(24): Xaa is A or G or absent
XXAPTKLEPISVLYLXXXXXXXXXKFKYENMVVRSX

SEQ ID NO: 19238 - protein, 44 aa, Artificial Sequence
  Non-cyclic GFR-binding peptide
  MOD_RES (6)..(7)..(41)..(43): Xaa is C or S
  MOD_RES (21)..(22)..(23)..(24)..(25): Xaa is A or G
  MOD_RES (26)..(27)..(28)..(29): Xaa is A or G or absent
TVPKPXXAPTQLSPISVLYIXXXXXXXXXYKQYENMVVRAXGXH

SEQ ID NO: 19239 - protein, 44 aa, Artificial Sequence
  Non-cyclic GFR-binding peptide
  MOD_RES (6)..(7)..(41)..(43): Xaa is C or S
  MOD_RES (21)..(22)..(23)..(24)..(25): Xaa is A or G
  MOD_RES (26)..(27)..(28)..(29): Xaa is A or G or absent
KASKAXXVPTKLSPISILYIXXXXXXXXXYKQYEGMAVSEXGXR

SEQ ID NO: 19240 - protein, 37 aa, Artificial Sequence
  Non-cyclic GFR-binding peptide
  MOD_RES (1)..(36): Xaa is C or S
  MOD_RES (15)..(16)..(17)..(18)..(19): Xaa is A or G
  MOD_RES (20)..(21)..(22)..(23): Xaa is A or G or absent
XVPTKLSPISVLYIXXXXXXXXXYKQYEEGMSVAEXG

SEQ ID NO: 19241 - protein, 40 aa, Artificial Sequence
  Non-cyclic GFR-binding peptide
  MOD_RES (2)..(3)..(37)..(39): Xaa is C or S
  MOD_RES (17)..(18)..(19)..(20)..(21): Xaa is A or G
  MOD_RES (22)..(23)..(24)..(25): Xaa is A or G or absent
AXXVPTELSPISMLYIXXXXXXXXXYKQYEEMVVEGXGXR

SEQ ID NO: 19242 - protein, 32 aa, Artificial Sequence
  Non-cyclic GFR-binding peptide
  MOD_RES (31)..(31): Xaa is C or S
VPQDLSPISILYIVGRTPKVYKQYEMVVKSXK

SEQ ID NO: 19243 - protein, 37 aa, Artificial Sequence
  Non-cyclic GFR-binding peptide
  MOD_RES (3)..(4)..(37): Xaa is C or S
KAXXVPTKLSPISVLYIDDMGVPTYKQYEEGMSVAEX

SEQ ID NO: 19244 - protein, 35 aa, Artificial Sequence
  Non-cyclic GFR-binding peptide
  MOD_RES (1)..(2)..(34): Xaa is C or S
XXAPTKLSPISVLYIDSSNNVIYKQYENMVVKAXG

SEQ ID NO: 19245 - protein, 43 aa, Artificial Sequence
  Non-cyclic GFR-binding peptide
  MOD_RES (4)..(5)..(40)..(42): Xaa is C or S
  MOD_RES (19)..(20)..(21)..(22)..(23): Xaa is A or G
  MOD_RES (24)..(25)..(26)..(27): Xaa is A or G or absent
GKAXXVPTKLSPISVLYIXXXXXXXXXYKQYEEGMSVAEXGXR

SEQ ID NO: 19246 - protein, 31 aa, Artificial Sequence
  Non-cyclic GFR-binding peptide
  MOD_RES (1)..(1): Xaa is C or S
XVPTKLSPISILYKDKGVVTYLKYHYGMAVS

SEQ ID NO: 19247 - protein, 37 aa, Artificial Sequence
  Non-cyclic GFR-binding peptide
  MOD_RES (2)..(3)..(37): Xaa is C or S
  MOD_RES (17)..(18)..(19)..(20)..(21): Xaa is A or G
  MOD_RES (22)..(23)..(24)..(25): Xaa is A or G or absent
PXXAPTKLEPISVLYLXXXXXXXXXKFKYENMVVRSX

SEQ ID NO: 19248 - protein, 35 aa, Artificial Sequence
  Non-cyclic GFR-binding peptide
  MOD_RES (34)..(34): Xaa is C or S
  MOD_RES (14)..(15)..(16)..(17)..(18): Xaa is A or G
  MOD_RES (19)..(20)..(21)..(22): Xaa is A or G or absent
VPARLNAISILYFXXXXXXXXXLKKYRDMVVEAXG

SEQ ID NO: 19249 - protein, 36 aa, Artificial Sequence
  Non-cyclic GFR-binding peptide
  MOD_RES (1)..(34)..(36): Xaa is C or S
  MOD_RES (15)..(16)..(17)..(18)..(19): Xaa is A or G
  MOD_RES (20)..(21)..(22)..(23): Xaa is A or G or absent
XVPQALEPISILYLXXXXXXXXXKFKYEMIVRSXKX

SEQ ID NO: 19250 - protein, 37 aa, Artificial Sequence
  Non-cyclic GFR-binding peptide
  MOD_RES (1)..(2)..(34)..(36): Xaa is C or S
XXAPTQLSPISVLYIDDSSNVIYKQYENMVVRAXGXH

SEQ ID NO: 19251 - protein, 35 aa, Artificial Sequence
  Non-cyclic GFR-binding peptide
  MOD_RES (1)..(33)..(35): Xaa is C or S
XVPTELEPISMLYLDENEKVVKFKYEDMVVEGXGX

SEQ ID NO: 19252 - protein, 44 aa, Artificial Sequence
  Non-cyclic GFR-binding peptide
  MOD_RES (6)..(7)..(41)..(43): Xaa is C or S
  MOD_RES (21)..(22)..(23)..(24)..(25): Xaa is A or G
  MOD_RES (26)..(27)..(28)..(29): Xaa is A or G or absent
AAPASXXVPARLSPISILYKXXXXXXXXXLKYHYDMVVEAXGXR

SEQ ID NO: 19253 - protein, 37 aa, Artificial Sequence
  Non-cyclic GFR-binding peptide
  MOD_RES (4)..(5)..(36): Xaa is C or S
AAPXXVPQALSPISILYIVGRKPKVYKQYEMIVRSXK

SEQ ID NO: 19254 - protein, 38 aa, Artificial Sequence
  Non-cyclic GFR-binding peptide
  MOD_RES (1)..(35)..(37): Xaa is C or S
  MOD_RES (15)..(16)..(17)..(18)..(19): Xaa is A or G
  MOD_RES (20)..(21)..(22)..(23): Xaa is A or G or absent
XVPARLSPISILYKXXXXXXXXXLKYHYDMVVEAXGXR

SEQ ID NO: 19255 - protein, 34 aa, Artificial Sequence
  Non-cyclic GFR-binding peptide
  MOD_RES (1)..(32)..(34): Xaa is C or S
XVPQDLEPISILYLVGRTPKVKFKYEMVVKSXKX

SEQ ID NO: 19256 - protein, 32 aa, Artificial Sequence
  Non-cyclic GFR-binding peptide
  MOD_RES (1)..(2): Xaa is C or S
XXVPTKLSPISILYKDKGVVTYLKYHYGMAVS

SEQ ID NO: 19257 - protein, 37 aa, Artificial Sequence
  Non-cyclic GFR-binding peptide
  MOD_RES (4)..(5)..(37): Xaa is C or S
PKAXXAPTKLEPISVLYLDSSNNVIKFKYENMVVKAX

SEQ ID NO: 19258 - protein, 34 aa, Artificial Sequence
  Non-cyclic GFR-binding peptide
  MOD_RES (1)..(33): Xaa is C or S
XAPTKLEPISVLYLDSSNNVIKFKYENMVVKAXG

SEQ ID NO: 19259 - protein, 34 aa, Artificial Sequence
  Non-cyclic GFR-binding peptide
  MOD_RES (1)..(2): Xaa is C or S
  MOD_RES (16)..(17)..(18)..(19)..(20): Xaa is A or G
  MOD_RES (21)..(22)..(23)..(24): Xaa is A or G or absent
XXAPTQLEPISVLYLXXXXXXXXXKFKYENMVVR

SEQ ID NO: 19260 - protein, 36 aa, Artificial Sequence
  Non-cyclic GFR-binding peptide
  MOD_RES (1)..(2)..(34)..(36): Xaa is C or S
XXVPTKLSPISILYKDKGVVTYLKYHYGMAVSEXGX

SEQ ID NO: 19261 - protein, 36 aa, Artificial Sequence
  Non-cyclic GFR-binding peptide
  MOD_RES (3)..(4)..(36): Xaa is C or S
KAXXAPTKLEPISVLYLDSSNNVIKFKYENMVVKAX

SEQ ID NO: 19262 - protein, 42 aa, Artificial Sequence
  Non-cyclic GFR-binding peptide
  MOD_RES (6)..(7)..(39)..(41): Xaa is C or S
SIPKAXXVPTELSPISMLYIDEYDKVVYKQYEEMVVEGXGXR

SEQ ID NO: 19263 - protein, 36 aa, Artificial Sequence
  Non-cyclic GFR-binding peptide
  MOD_RES (1)..(2)..(34)..(36): Xaa is C or S
XXAPTKLEPISVLYLDSSNNVIKFKYENMVVKAXGX

SEQ ID NO: 19264 - protein, 36 aa, Artificial Sequence
  Non-cyclic GFR-binding peptide
  MOD_RES (3)..(4): Xaa is C or S
  MOD_RES (18)..(19)..(20)..(21)..(22): Xaa is A or G
  MOD_RES (23)..(24)..(25)..(26): Xaa is A or G or absent
SPXXVPQDLSPISILYIXXXXXXXXXYKQYEMVVKS

SEQ ID NO: 19265 - protein, 41 aa, Artificial Sequence
  Non-cyclic GFR-binding peptide
  MOD_RES (6)..(7)..(39)..(41): Xaa is C or S
TVPKPXXAPTQLEPISVLYLDDSSNVIKFKYENMVVRAXGX

SEQ ID NO: 19266 - protein, 34 aa, Artificial Sequence
  Non-cyclic GFR-binding peptide
  MOD_RES (1)..(32)..(34): Xaa is C or S
XVSQDLEPISILYLIGKTPKIKFKYEMIVKSXKX

SEQ ID NO: 19267 - protein, 36 aa, Artificial Sequence
  Non-cyclic GFR-binding peptide
  MOD_RES (3)..(4)..(36): Xaa is C or S
KAXXVPTKLSPISILYIDKGVVTYYKQYEGMAVSEX

SEQ ID NO: 19268 - protein, 33 aa, Artificial Sequence
  Non-cyclic GFR-binding peptide
  MOD_RES (1)..(2): Xaa is C or S
XXAPTKLEPISVLYLDSSNNVIKFKYENMVVKA

SEQ ID NO: 19269 - protein, 41 aa, Artificial Sequence
  Non-cyclic GFR-binding peptide
  MOD_RES (6)..(7)..(41): Xaa is C or S
  MOD_RES (21)..(22)..(23)..(24)..(25): Xaa is A or G
  MOD_RES (26)..(27)..(28)..(29): Xaa is A or G or absent
AAPASXXVPARLEPISILYLXXXXXXXXXKFKYEDMVVEAX

SEQ ID NO: 19270 - protein, 38 aa, Artificial Sequence
  Non-cyclic GFR-binding peptide
  MOD_RES (1)..(2)..(36)..(38): Xaa is C or S
  MOD_RES (16)..(17)..(18)..(19)..(20): Xaa is A or G
  MOD_RES (21)..(22)..(23)..(24): Xaa is A or G or absent
XXAPTKLSPISVLYIXXXXXXXXXYKQYENMVVKAXGX

SEQ ID NO: 19271 - protein, 31 aa, Artificial Sequence
  Non-cyclic GFR-binding peptide
  MOD_RES (31)..(31): Xaa is C or S
VSQDLEPISILYLIGKTPKIKFKYEMIVKSX

SEQ ID NO: 19272 - protein, 33 aa, Artificial Sequence
  Non-cyclic GFR-binding peptide
  MOD_RES (31)..(33): Xaa is C or S
VPQDLEPISILYLVGRTPKVKFKYEMVVKSXKX

SEQ ID NO: 19273 - protein, 37 aa, Artificial Sequence
  Non-cyclic GFR-binding peptide
  MOD_RES (2)..(3)..(37): Xaa is C or S
  MOD_RES (17)..(18)..(19)..(20)..(21): Xaa is A or G
  MOD_RES (22)..(23)..(24)..(25): Xaa is A or G or absent
AXXVPTELEPISMLYLXXXXXXXXXKFKYEDMVVEGX

SEQ ID NO: 19274 - protein, 38 aa, Artificial Sequence
  Non-cyclic GFR-binding peptide
  MOD_RES (4)..(5)..(38): Xaa is C or S
  MOD_RES (19)..(20)..(21)..(22)..(23): Xaa is A or G
  MOD_RES (24)..(25)..(26)..(27): Xaa is A or G or absent
ASPXXVSQDLEPISILYLXXXXXXXXXKFKYEMIVKSX

SEQ ID NO: 19275 - protein, 36 aa, Artificial Sequence
  Non-cyclic GFR-binding peptide
  MOD_RES (1)..(35): Xaa is C or S
  MOD_RES (15)..(16)..(17)..(18)..(19): Xaa is A or G
  MOD_RES (20)..(21)..(22)..(23): Xaa is A or G or absent
XVPTELSPISMLYIXXXXXXXXXYKQYEEMVVEGXG

SEQ ID NO: 19276 - protein, 34 aa, Artificial Sequence
  Non-cyclic GFR-binding peptide
  MOD_RES (32)..(34): Xaa is C or S
VPTELSPISMLYIDENEKVVYKQYEDMVVEGXGX

SEQ ID NO: 19277 - protein, 38 aa, Artificial Sequence
  Non-cyclic GFR-binding peptide
  MOD_RES (5)..(6): Xaa is C or S
  MOD_RES (20)..(21)..(22)..(23)..(24): Xaa is A or G
  MOD_RES (25)..(26)..(27)..(28): Xaa is A or G or absent
APASXXVPARLSPISILYKXXXXXXXXXLKYHYDMVVE

SEQ ID NO: 19278 - protein, 44 aa, Artificial Sequence
  Non-cyclic GFR-binding peptide
  MOD_RES (6)..(7)..(41)..(43): Xaa is C or S
  MOD_RES (21)..(22)..(23)..(24)..(25): Xaa is A or G
  MOD_RES (26)..(27)..(28)..(29): Xaa is A or G or absent
KIPKAXXVPTELEPISMLYLXXXXXXXXXKFKYEDMVVEGXGXR

SEQ ID NO: 19279 - protein, 37 aa, Artificial Sequence
  Non-cyclic GFR-binding peptide
  MOD_RES (2)..(3)..(34)..(36): Xaa is C or S
PXXVPQDLEPISILYLVGRTPKVKFKYEMVVKSXKXS

SEQ ID NO: 19280 - protein, 36 aa, Artificial Sequence
  Non-cyclic GFR-binding peptide
  MOD_RES (4)..(5): Xaa is C or S
PASXXVPARLEPISILYLDAANNVVKFKYEDMVVEA

SEQ ID NO: 19281 - protein, 33 aa, Artificial Sequence
  Non-cyclic GFR-binding peptide
  MOD_RES (31)..(33): Xaa is C or S
VSQDLEPISILYLIGKTPKIKFKYEMIVKSXKX

SEQ ID NO: 19282 - protein, 40 aa, Artificial Sequence
  Non-cyclic GFR-binding peptide
  MOD_RES (4)..(5)..(37)..(39): Xaa is C or S
SKAXXVPTKLSPISILYIDKGVVTYYKQYEGMAVSEXGXR

SEQ ID NO: 19283 - protein, 33 aa, Artificial Sequence
  Non-cyclic GFR-binding peptide
  MOD_RES (2)..(2): Xaa is C or S
TXAPTKLEPISVLYLDDSSNVIKFKYENMVVRS

SEQ ID NO: 19284 - protein, 32 aa, Artificial Sequence
  Non-cyclic GFR-binding peptide
  MOD_RES (1)..(32): Xaa is C or S
XVSQDLEPISILYLIGKTPKIKFKYEMIVKSX

SEQ ID NO: 19285 - protein, 37 aa, Artificial Sequence
  Non-cyclic GFR-binding peptide
  MOD_RES (3)..(4): Xaa is C or S
  MOD_RES (18)..(19)..(20)..(21)..(22): Xaa is A or G
  MOD_RES (23)..(24)..(25)..(26): Xaa is A or G or absent
ASXXVPARLEPISILYLXXXXXXXXXKFKYEDMVVEA

SEQ ID NO: 19286 - protein, 37 aa, Artificial Sequence
  Non-cyclic GFR-binding peptide
  MOD_RES (3)..(4)..(36): Xaa is C or S
KAXXVPTELSPISMLYIDENEKVVYKQYEDMVVEGXG

SEQ ID NO: 19287 - protein, 33 aa, Artificial Sequence
  Non-cyclic GFR-binding peptide
  MOD_RES (1)..(32): Xaa is C or S
XVPQDLEPISILYLVGRTPKVKFKYEMVVKSXK

SEQ ID NO: 19288 - protein, 39 aa, Artificial Sequence
  Non-cyclic GFR-binding peptide
  MOD_RES (6)..(38): Xaa is C or S
VTKPTXAPTKLSPISVLYIDDSSNVIYKQYENMVVRSXG

SEQ ID NO: 19289 - protein, 30 aa, Artificial Sequence; identical to SEQ ID NO: 890
  Non-cyclic GFR-binding peptide

SEQ ID NO: 19290 - protein, 36 aa, Artificial Sequence
  Non-cyclic GFR-binding peptide
  MOD_RES (34)..(36): Xaa is C or S
  MOD_RES (14)..(15)..(16)..(17)..(18): Xaa is A or G
  MOD_RES (19)..(20)..(21)..(22): Xaa is A or G or absent
VPTKLSPISILYKXXXXXXXXXLKYHYGMAVSEXGX

SEQ ID NO: 19291 - protein, 39 aa, Artificial Sequence
  Non-cyclic GFR-binding peptide
  MOD_RES (6)..(7): Xaa is C or S
  MOD_RES (21)..(22)..(23)..(24)..(25): Xaa is A or G
  MOD_RES (26)..(27)..(28)..(29): Xaa is A or G or absent
AAPASXXVPARLSPISILYKXXXXXXXXXLKYHYDMVVE

SEQ ID NO: 19292 - protein, 38 aa, Artificial Sequence
  Non-cyclic GFR-binding peptide
  MOD_RES (1)..(35)..(37): Xaa is C or S
  MOD_RES (15)..(16)..(17)..(18)..(19): Xaa is A or G
  MOD_RES (20)..(21)..(22)..(23): Xaa is A or G or absent
XVPTKLNAISILYFXXXXXXXXXLKKYRGMAVSEXGXR

SEQ ID NO: 19293 - protein, 35 aa, Artificial Sequence
  Non-cyclic GFR-binding peptide
  MOD_RES (4)..(5): Xaa is C or S
PKPXXAPTKLSPISVLYIDDSSNVIYKQYENMVVR

SEQ ID NO: 19294 - protein, 39 aa, Artificial Sequence
  Non-cyclic GFR-binding peptide
  MOD_RES (5)..(6)..(39): Xaa is C or S
  MOD_RES (20)..(21)..(22)..(23)..(24): Xaa is A or G
  MOD_RES (25)..(26)..(27)..(28): Xaa is A or G or absent
SAAPXXVPQALEPISILYLXXXXXXXXXKFKYEMIVRSX

SEQ ID NO: 19295 - protein, 40 aa, Artificial Sequence
  Non-cyclic GFR-binding peptide
  MOD_RES (6)..(7): Xaa is C or S
  MOD_RES (21)..(22)..(23)..(24)..(25): Xaa is A or G
  MOD_RES (26)..(27)..(28)..(29): Xaa is A or G or absent
AVPKAXXAPTKLEPISVLYLXXXXXXXXXKFKYENMVVKA

SEQ ID NO: 19296 - protein, 41 aa, Artificial Sequence
  Non-cyclic GFR-binding peptide
  MOD_RES (4)..(38)..(40): Xaa is C or S
  MOD_RES (18)..(19)..(20)..(21)..(22): Xaa is A or G
  MOD_RES (23)..(24)..(25)..(26): Xaa is A or G or absent
KPTXAPTKLEPISVLYLXXXXXXXXXKFKYENMVVRSXGXH

SEQ ID NO: 19297 - protein, 37 aa, Artificial Sequence
  Non-cyclic GFR-binding peptide
  MOD_RES (3)..(4)..(35)..(37): Xaa is C or S
SPXXVSQDLSPISILYIIGKTPKIYKQYEMIVKSXKX

SEQ ID NO: 19298 - protein, 35 aa, Artificial Sequence
  Non-cyclic GFR-binding peptide
  MOD_RES (1)..(33)..(35): Xaa is C or S
XVPARLNAISILYFDAANNVVLKKYRDMVVEAXGX

SEQ ID NO: 19299 - protein, 34 aa, Artificial Sequence
  Non-cyclic GFR-binding peptide
  MOD_RES (1)..(2)..(34): Xaa is C or S
XXVPARLNAISILYFDAANNVVLKKYRDMVVEAX

SEQ ID NO: 19300 - protein, 39 aa, Artificial Sequence
  Non-cyclic GFR-binding peptide
  MOD_RES (2)..(3)..(37)..(39): Xaa is C or S
  MOD_RES (17)..(18)..(19)..(20)..(21): Xaa is A or G
  MOD_RES (22)..(23)..(24)..(25): Xaa is A or G or absent
AXXVPTKLNAISILYFXXXXXXXXXLKKYRGMAVSEXGX

SEQ ID NO: 19301 - protein, 33 aa, Artificial Sequence
  Non-cyclic GFR-binding peptide
  MOD_RES (14)..(15)..(16)..(17)..(18): Xaa is A or G
  MOD_RES (19)..(20)..(21)..(22): Xaa is A or G or absent
VPARLEPISILYLXXXXXXXXXKFKYEDMVVEA

SEQ ID NO: 19302 - protein, 38 aa, Artificial Sequence
  Non-cyclic GFR-binding peptide
  MOD_RES (7)..(7): Xaa is C or S
HVTKPTXAPTKLSPISVLYIDDSSNVIYKQYENMVVRS

SEQ ID NO: 19303 - protein, 37 aa, Artificial Sequence
  Non-cyclic GFR-binding peptide
  MOD_RES (2)..(3)..(37): Xaa is C or S
  MOD_RES (17)..(18)..(19)..(20)..(21): Xaa is A or G
  MOD_RES (22)..(23)..(24)..(25): Xaa is A or G or absent
AXXAPTKLSPISVLYIXXXXXXXXXYKQYENMVVKAX

SEQ ID NO: 19304 - protein, 33 aa, Artificial Sequence
  Non-cyclic GFR-binding peptide
  MOD_RES (1)..(2)..(33): Xaa is C or S
XXVPQDLSPISILYIVGRTPKVYKQYEMVVKSX

SEQ ID NO: 19305 - protein, 32 aa, Artificial Sequence
  Non-cyclic GFR-binding peptide
  MOD_RES (14)..(15)..(16)..(17)..(18): Xaa is A or G
  MOD_RES (19)..(20)..(21)..(22): Xaa is A or G or absent
VPARLNAISILYFXXXXXXXXXLKKYRDMVVE

SEQ ID NO: 19306 - protein, 39 aa, Artificial Sequence
  Non-cyclic GFR-binding peptide
  MOD_RES (5)..(6): Xaa is C or S
  MOD_RES (20)..(21)..(22)..(23)..(24): Xaa is A or G
  MOD_RES (25)..(26)..(27)..(28): Xaa is A or G or absent
ASKAXXVPTKLSPISILYIXXXXXXXXXYKQYEGMAVSE

SEQ ID NO: 19307 - protein, 43 aa, Artificial Sequence
  Non-cyclic GFR-binding peptide
  MOD_RES (6)..(7)..(40)..(42): Xaa is C or S
  MOD_RES (21)..(22)..(23)..(24)..(25): Xaa is A or G
  MOD_RES (26)..(27)..(28)..(29): Xaa is A or G or absent
ASASPXXVPQDLSPISILYIXXXXXXXXXYKQYEMVVKSXKXS

SEQ ID NO: 19308 - protein, 40 aa, Artificial Sequence
  Non-cyclic GFR-binding peptide
  MOD_RES (2)..(3)..(37)..(39): Xaa is C or S
  MOD_RES (17)..(18)..(19)..(20)..(21): Xaa is A or G
  MOD_RES (22)..(23)..(24)..(25): Xaa is A or G or absent
SXXVPARLEPISILYLXXXXXXXXXKFKYEDMVVEAXGXR

SEQ ID NO: 19309 - protein, 37 aa, Artificial Sequence
  Non-cyclic GFR-binding peptide
  MOD_RES (4)..(5): Xaa is C or S
  MOD_RES (19)..(20)..(21)..(22)..(23): Xaa is A or G
  MOD_RES (24)..(25)..(26)..(27): Xaa is A or G or absent
PKAXXVPTELSPISMLYIXXXXXXXXXYKQYEDMVVE

SEQ ID NO: 19310 - protein, 35 aa, Artificial Sequence
  Non-cyclic GFR-binding peptide
  MOD_RES (2)..(3)..(34): Xaa is C or S
PXXVSQDLSPISILYIIGKTPKIYKQYEMIVKSXK

SEQ ID NO: 19311 - protein, 33 aa, Artificial Sequence
  Non-cyclic GFR-binding peptide
  MOD_RES (14)..(15)..(16)..(17)..(18): Xaa is A or G
  MOD_RES (19)..(20)..(21)..(22): Xaa is A or G or absent
VPTELSPISMLYIXXXXXXXXXYKQYEDMVVEG

SEQ ID NO: 19312 - protein, 40 aa, Artificial Sequence
  Non-cyclic GFR-binding peptide
  MOD_RES (2)..(3)..(37)..(39): Xaa is C or S
  MOD_RES (17)..(18)..(19)..(20)..(21): Xaa is A or G
  MOD_RES (22)..(23)..(24)..(25): Xaa is A or G or absent
SXXVPARLNAISILYFXXXXXXXXXLKKYRDMVVEAXGXR

SEQ ID NO: 19313 - protein, 38 aa, Artificial Sequence
  Non-cyclic GFR-binding peptide
  MOD_RES (4)..(5)..(37): Xaa is C or S
PKAXXAPTKLEPISVLYLDSSNNVIKFKYENMVVKAXG

SEQ ID NO: 19314 - protein, 38 aa, Artificial Sequence
  Non-cyclic GFR-binding peptide
  MOD_RES (6)..(7): Xaa is C or S
YVPKPXXAPTKLSPISVLYIDDSSNVIYKQYENMVVRS

SEQ ID NO: 19315 - protein, 38 aa, Artificial Sequence
  Non-cyclic GFR-binding peptide
  MOD_RES (6)..(7): Xaa is C or S
KASKAXXVPTKLNAISILYFDKGVVTYLKKYRGMAVSE

SEQ ID NO: 19316 - protein, 41 aa, Artificial Sequence
  Non-cyclic GFR-binding peptide
  MOD_RES (6)..(7)..(39)..(41): Xaa is C or S
SIPKAXXVPTELSPISMLYIDEYDKVVYKQYEEMVVEGXGX

SEQ ID NO: 19317 - protein, 32 aa, Artificial Sequence
  Non-cyclic GFR-binding peptide
  MOD_RES (32)..(32): Xaa is C or S
APTQLSPISVLYIDDSSNVIYKQYENMVVRAX

SEQ ID NO: 19318 - protein, 39 aa, Artificial Sequence
  Non-cyclic GFR-binding peptide
  MOD_RES (6)..(7)..(39): Xaa is C or S
KIPKAXXVPTELEPISMLYLDENEKVVKFKYEDMVVEGX

SEQ ID NO: 19319 - protein, 42 aa, Artificial Sequence
  Non-cyclic GFR-binding peptide
  MOD_RES (6)..(7)..(39)..(41): Xaa is C or S
KIPKAXXVPTELSPISMLYIDENEKVVYKQYEDMVVEGXGXR

SEQ ID NO: 19320 - protein, 35 aa, Artificial Sequence
  Non-cyclic GFR-binding peptide
  MOD_RES (4)..(4): Xaa is C or S
KPTXAPTKLSPISVLYIDDSSNVIYKQYENMVVRS

SEQ ID NO: 19321 - protein, 38 aa, Artificial Sequence
  Non-cyclic GFR-binding peptide
  MOD_RES (5)..(6)..(37): Xaa is C or S
SASPXXVPQDLSPISILYIVGRTPKVYKQYEMVVKSXK

SEQ ID NO: 19322 - protein, 44 aa, Artificial Sequence
  Non-cyclic GFR-binding peptide
  MOD_RES (6)..(7)..(41)..(43): Xaa is C or S
  MOD_RES (21)..(22)..(23)..(24)..(25): Xaa is A or G
  MOD_RES (26)..(27)..(28)..(29): Xaa is A or G or absent
AVPKAXXAPTKLEPISVLYLXXXXXXXXXKFKYENMVVKAXGXH

SEQ ID NO: 19323 - protein, 37 aa, Artificial Sequence
  Non-cyclic GFR-binding peptide
  MOD_RES (4)..(5): Xaa is C or S
  MOD_RES (19)..(20)..(21)..(22)..(23): Xaa is A or G
  MOD_RES (24)..(25)..(26)..(27): Xaa is A or G or absent
ASPXXVPQDLEPISILYLXXXXXXXXXKFKYEMVVKS

SEQ ID NO: 19324 - protein, 35 aa, Artificial Sequence
  Non-cyclic GFR-binding peptide
  MOD_RES (4)..(5): Xaa is C or S
ASPXXVSQDLEPISILYLIGKTPKIKFKYEMIVKS

SEQ ID NO: 19325 - protein, 36 aa, Artificial Sequence
  Non-cyclic GFR-binding peptide
  MOD_RES (4)..(5): Xaa is C or S
SKAXXVPTKLSPISILYIDKGVVTYYKQYEGMAVSE

SEQ ID NO: 19326 - protein, 38 aa, Artificial Sequence
  Non-cyclic GFR-binding peptide
  MOD_RES (4)..(5)..(36)..(38): Xaa is C or S
ASPXXVPQDLSPISILYIVGRTPKVYKQYEMVVKSXKX

SEQ ID NO: 19327 - protein, 37 aa, Artificial Sequence
  Non-cyclic GFR-binding peptide
  MOD_RES (1)..(2)..(35)..(37): Xaa is C or S
  MOD_RES (16)..(17)..(18)..(19)..(20): Xaa is A or G
  MOD_RES (21)..(22)..(23)..(24): Xaa is A or G or absent
XXVSQDLEPISILYLXXXXXXXXXKFKYEMIVKSXKX

SEQ ID NO: 19328 - protein, 33 aa, Artificial Sequence
  Non-cyclic GFR-binding peptide
  MOD_RES (32)..(32): Xaa is C or S
VPTELSPISMLYIDEYDKVVYKQYEEMVVEGXG

SEQ ID NO: 19329 - protein, 33 aa, Artificial Sequence
  Non-cyclic GFR-binding peptide
  MOD_RES (2)..(3): Xaa is C or S
AXXVPTELEPISMLYLDENEKVVKFKYEDMVVE

SEQ ID NO: 19330 - protein, 34 aa, Artificial Sequence
  Non-cyclic GFR-binding peptide
  MOD_RES (3)..(4): Xaa is C or S
SPXXVPQDLSPISILYIVGRTPKVYKQYEMVVKS

SEQ ID NO: 19331 - protein, 34 aa, Artificial Sequence
  Non-cyclic GFR-binding peptide
  MOD_RES (1)..(1): Xaa is C or S
  MOD_RES (15)..(16)..(17)..(18)..(19): Xaa is A or G
  MOD_RES (20)..(21)..(22)..(23): Xaa is A or G or absent
XAPTKLSPISVLYIXXXXXXXXXYKQYENMVVRS

SEQ ID NO: 19332 - protein, 39 aa, Artificial Sequence
  Non-cyclic GFR-binding peptide
  MOD_RES (1)..(2)..(36)..(38): Xaa is C or S
  MOD_RES (16)..(17)..(18)..(19)..(20): Xaa is A or G
  MOD_RES (21)..(22)..(23)..(24): Xaa is A or G or absent
XXVPTELEPISMLYLXXXXXXXXXKFKYEEMVVEGXGXR

SEQ ID NO: 19333 - protein, 42 aa, Artificial Sequence
  Non-cyclic GFR-binding peptide
  MOD_RES (4)..(5)..(39)..(41): Xaa is C or S
  MOD_RES (19)..(20)..(21)..(22)..(23): Xaa is A or G
  MOD_RES (24)..(25)..(26)..(27): Xaa is A or G or absent
PKAXXVPTELEPISMLYLXXXXXXXXXKFKYEDMVVEGXGXR

SEQ ID NO: 19334 - protein, 41 aa, Artificial Sequence
  Non-cyclic GFR-binding peptide
  MOD_RES (6)..(7)..(38)..(40): Xaa is C or S
ASASPXXVPQDLSPISILYIVGRTPKVYKQYEMVVKSXKXS

SEQ ID NO: 19335 - protein, 32 aa, Artificial Sequence
  Non-cyclic GFR-binding peptide
  MOD_RES (14)..(15)..(16)..(17)..(18): Xaa is A or G
  MOD_RES (19)..(20)..(21)..(22): Xaa is A or G or absent
APTQLSPISVLYIXXXXXXXXXYKQYENMVVR

SEQ ID NO: 19336 - protein, 39 aa, Artificial Sequence
  Non-cyclic GFR-binding peptide
  MOD_RES (5)..(6)..(38): Xaa is C or S
VPKPXXAPTQLEPISVLYLDDSSNVIKFKYENMVVRAXG

SEQ ID NO: 19337 - protein, 38 aa, Artificial Sequence
  Non-cyclic GFR-binding peptide
  MOD_RES (3)..(4)..(38): Xaa is C or S
  MOD_RES (18)..(19)..(20)..(21)..(22): Xaa is A or G
  MOD_RES (23)..(24)..(25)..(26): Xaa is A or G or absent
KAXXVPTKLSPISILYKXXXXXXXXXLKYHYGMAVSEX

SEQ ID NO: 19338 - protein, 38 aa, Artificial Sequence
  Non-cyclic GFR-binding peptide
  MOD_RES (2)..(3)..(35)..(37): Xaa is C or S
PXXAPTQLSPISVLYIDDSSNVIYKQYENMVVRAXGXH

SEQ ID NO: 19339 - protein, 32 aa, Artificial Sequence
  Non-cyclic GFR-binding peptide
  MOD_RES (1)..(2): Xaa is C or S
XXAPTQLEPISVLYLDDSSNVIKFKYENMVVR

SEQ ID NO: 19340 - protein, 30 aa, Artificial Sequence; identical to SEQ ID NO: 952
  Non-cyclic GFR-binding peptide

SEQ ID NO: 19341 - protein, 39 aa, Artificial Sequence
  Non-cyclic GFR-binding peptide
  MOD_RES (4)..(5)..(36)..(38): Xaa is C or S
AAPXXVPQALSPISILYIVGRKPKVYKQYEMIVRSXKXS

SEQ ID NO: 19342 - protein, 39 aa, Artificial Sequence
  Non-cyclic GFR-binding peptide
  MOD_RES (5)..(6): Xaa is C or S
  MOD_RES (20)..(21)..(22)..(23)..(24): Xaa is A or G
  MOD_RES (25)..(26)..(27)..(28): Xaa is A or G or absent
VPKPXXAPTQLEPISVLYLXXXXXXXXXKFKYENMVVRA

SEQ ID NO: 19343 - protein, 40 aa, Artificial Sequence
  Non-cyclic GFR-binding peptide
  MOD_RES (6)..(7)..(40): Xaa is C or S
KVGKAXXVPTKLSPISVLYIDDMGVPTYKQYEEGMSVAEX

SEQ ID NO: 19344 - protein, 39 aa, Artificial Sequence
  Non-cyclic GFR-binding peptide
  MOD_RES (3)..(4)..(38): Xaa is C or S
  MOD_RES (18)..(19)..(20)..(21)..(22): Xaa is A or G
  MOD_RES (23)..(24)..(25)..(26): Xaa is A or G or absent
KAXXVPTELSPISMLYIXXXXXXXXXYKQYEDMVVEGXG

SEQ ID NO: 19345 - protein, 37 aa, Artificial Sequence
  Non-cyclic GFR-binding peptide
  MOD_RES (4)..(5)..(37): Xaa is C or S
SKAXXVPTKLSPISILYKDKGVVTYLKYHYGMAVSEX

SEQ ID NO: 19346 - protein, 38 aa, Artificial Sequence
  Non-cyclic GFR-binding peptide
  MOD_RES (5)..(6)..(37): Xaa is C or S
SAAPXXVPQALEPISILYLVGRKPKVKFKYEMIVRSXK

SEQ ID NO: 19347 - protein, 37 aa, Artificial Sequence
  Non-cyclic GFR-binding peptide
  MOD_RES (6)..(7): Xaa is C or S
YVPKPXXAPTKLSPISVLYIDDSSNVIYKQYENMVVR

SEQ ID NO: 19348 - protein, 39 aa, Artificial Sequence
  Non-cyclic GFR-binding peptide
  MOD_RES (5)..(6): Xaa is C or S
  MOD_RES (20)..(21)..(22)..(23)..(24): Xaa is A or G
  MOD_RES (25)..(26)..(27)..(28): Xaa is A or G or absent
IPKAXXVPTELEPISMLYLXXXXXXXXXKFKYEDMVVEG

SEQ ID NO: 19349 - protein, 38 aa, Artificial Sequence
  Non-cyclic GFR-binding peptide
  MOD_RES (4)..(5): Xaa is C or S
  MOD_RES (19)..(20)..(21)..(22)..(23): Xaa is A or G
  MOD_RES (24)..(25)..(26)..(27): Xaa is A or G or absent
PKPXXAPTQLSPISVLYIXXXXXXXXXYKQYENMVVRA

SEQ ID NO: 19350 - protein, 37 aa, Artificial Sequence
  Non-cyclic GFR-binding peptide
  MOD_RES (3)..(4): Xaa is C or S
  MOD_RES (18)..(19)..(20)..(21)..(22): Xaa is A or G
  MOD_RES (23)..(24)..(25)..(26): Xaa is A or G or absent
KPXXAPTQLEPISVLYLXXXXXXXXXKFKYENMVVRA

SEQ ID NO: 19351 - protein, 35 aa, Artificial Sequence
  Non-cyclic GFR-binding peptide
  MOD_RES (1)..(35): Xaa is C or S
  MOD_RES (15)..(16)..(17)..(18)..(19): Xaa is A or G
  MOD_RES (20)..(21)..(22)..(23): Xaa is A or G or absent
XVPTELEPISMLYLXXXXXXXXXKFKYEDMVVEGX

SEQ ID NO: 19352 - protein, 36 aa, Artificial Sequence
  Non-cyclic GFR-binding peptide
  MOD_RES (3)..(4)..(36): Xaa is C or S
KAXXVPTELEPISMLYLDEYDKVVKFKYEEMVVEGX

SEQ ID NO: 19353 - protein, 38 aa, Artificial Sequence
  Non-cyclic GFR-binding peptide
  MOD_RES (4)..(5)..(37): Xaa is C or S
PKPXXAPTKLEPISVLYLDDSSNVIKFKYENMVVRSXG

SEQ ID NO: 19354 - protein, 31 aa, Artificial Sequence
  Non-cyclic GFR-binding peptide
VPARLSPISILYKDAANNVVLKYHYDMVVEA

SEQ ID NO: 19355 - protein, 31 aa, Artificial Sequence
  Non-cyclic GFR-binding peptide
  MOD_RES (1)..(1): Xaa is C or S
XVPTELEPISMLYLDENEKVVKFKYEDMVVE

SEQ ID NO: 19356 - protein, 40 aa, Artificial Sequence
  Non-cyclic GFR-binding peptide
  MOD_RES (5)..(6)..(37)..(39): Xaa is C or S
SASPXXVPQDLSPISILYIVGRTPKVYKQYEMVVKSXKXS

SEQ ID NO: 19357 - protein, 37 aa, Artificial Sequence
  Non-cyclic GFR-binding peptide
  MOD_RES (5)..(6): Xaa is C or S
APASXXVPARLSPISILYKDAANNVVLKYHYDMVVEA

SEQ ID NO: 19358 - protein, 39 aa, Artificial Sequence
  Non-cyclic GFR-binding peptide
  MOD_RES (6)..(7): Xaa is C or S
  MOD_RES (21)..(22)..(23)..(24)..(25): Xaa is A or G
  MOD_RES (26)..(27)..(28)..(29): Xaa is A or G or absent
ASAAPXXVPQALSPISILYIXXXXXXXXXYKQYEMIVRS

SEQ ID NO: 19359 - protein, 31 aa, Artificial Sequence
  Non-cyclic GFR-binding peptide
VPTELEPISMLYLDENEKVVKFKYEDMVVEG

SEQ ID NO: 19360 - protein, 36 aa, Artificial Sequence
  Non-cyclic GFR-binding peptide
  MOD_RES (2)..(3)..(35): Xaa is C or S
AXXVPTKLNAISILYFDKGVVTYLKKYRGMAVSEXG

SEQ ID NO: 19361 - protein, 38 aa, Artificial Sequence
  Non-cyclic GFR-binding peptide
  MOD_RES (6)..(7): Xaa is C or S
TVPKPXXAPTQLEPISVLYLDDSSNVIKFKYENMVVRA

SEQ ID NO: 19362 - protein, 41 aa, Artificial Sequence
  Non-cyclic GFR-binding peptide
  MOD_RES (5)..(6)..(40): Xaa is C or S
  MOD_RES (20)..(21)..(22)..(23)..(24): Xaa is A or G
  MOD_RES (25)..(26)..(27)..(28): Xaa is A or G or absent
IPKAXXVPTELEPISMLYLXXXXXXXXXKFKYEDMVVEGXG

SEQ ID NO: 19363 - protein, 38 aa, Artificial Sequence
  Non-cyclic GFR-binding peptide
  MOD_RES (3)..(4)..(38): Xaa is C or S
  MOD_RES (18)..(19)..(20)..(21)..(22): Xaa is A or G
  MOD_RES (23)..(24)..(25)..(26): Xaa is A or G or absent
KAXXVPTKLSPISILYIXXXXXXXXXYKQYEGMAVSEX

SEQ ID NO: 19364 - protein, 38 aa, Artificial Sequence
  Non-cyclic GFR-binding peptide
  MOD_RES (3)..(4)..(36)..(38): Xaa is C or S
KAXXVPTKLNAISILYFDKGVVTYLKKYRGMAVSEXGX

SEQ ID NO: 19365 - protein, 37 aa, Artificial Sequence
  Non-cyclic GFR-binding peptide
  MOD_RES (2)..(3)..(35)..(37): Xaa is C or S
AXXAPTKLSPISVLYIDSSNNVIYKQYENMVVKAXGX

SEQ ID NO: 19366 - protein, 40 aa, Artificial Sequence
  Non-cyclic GFR-binding peptide
  MOD_RES (3)..(4)..(38)..(40): Xaa is C or S
  MOD_RES (18)..(19)..(20)..(21)..(22): Xaa is A or G
  MOD_RES (23)..(24)..(25)..(26): Xaa is A or G or absent
KPXXAPTKLEPISVLYLXXXXXXXXXKFKYENMVVRSXGX

SEQ ID NO: 19367 - protein, 40 aa, Artificial Sequence
  Non-cyclic GFR-binding peptide
  MOD_RES (5)..(6)..(38)..(40): Xaa is C or S
IPKAXXVPTELSPISMLYIDENEKVVYKQYEDMVVEGXGX

SEQ ID NO: 19368 - protein, 42 aa, Artificial Sequence
  Non-cyclic GFR-binding peptide
  MOD_RES (6)..(7)..(39)..(41): Xaa is C or S
AAPASXXVPARLNAISILYFDAANNVVLKKYRDMVVEAXGXR

SEQ ID NO: 19369 - protein, 31 aa, Artificial Sequence
  Non-cyclic GFR-binding peptide
  MOD_RES (1)..(1): Xaa is C or S
XAPTKLSPISVLYIDDSSNVIYKQYENMVVR

SEQ ID NO: 19370 - protein, 39 aa, Artificial Sequence
  Non-cyclic GFR-binding peptide
  MOD_RES (3)..(4)..(38): Xaa is C or S
  MOD_RES (18)..(19)..(20)..(21)..(22): Xaa is A or G
  MOD_RES (23)..(24)..(25)..(26): Xaa is A or G or absent
KAXXVPTKLSPISILYIXXXXXXXXXYKQYEGMAVSEXG

SEQ ID NO: 19371 - protein, 41 aa, Artificial Sequence
  Non-cyclic GFR-binding peptide
  MOD_RES (3)..(4)..(38)..(40): Xaa is C or S
  MOD_RES (18)..(19)..(20)..(21)..(22): Xaa is A or G
  MOD_RES (23)..(24)..(25)..(26): Xaa is A or G or absent
KPXXAPTQLEPISVLYLXXXXXXXXXKFKYENMVVRAXGXH

SEQ ID NO: 19372 - protein, 35 aa, Artificial Sequence
  Non-cyclic GFR-binding peptide
  MOD_RES (1)..(35): Xaa is C or S
  MOD_RES (15)..(16)..(17)..(18)..(19): Xaa is A or G
  MOD_RES (20)..(21)..(22)..(23): Xaa is A or G or absent
XVPARLSPISILYKXXXXXXXXXLKYHYDMVVEAX

SEQ ID NO: 19373 - protein, 33 aa, Artificial Sequence
  Non-cyclic GFR-binding peptide
  MOD_RES (1)..(1): Xaa is C or S
  MOD_RES (15)..(16)..(17)..(18)..(19): Xaa is A or G
  MOD_RES (20)..(21)..(22)..(23): Xaa is A or G or absent
XVPTELSPISMLYIXXXXXXXXXYKQYEEMVVE

SEQ ID NO: 19374 - protein, 35 aa, Artificial Sequence
  Non-cyclic GFR-binding peptide
  MOD_RES (35)..(35): Xaa is C or S
  MOD_RES (14)..(15)..(16)..(17)..(18): Xaa is A or G
  MOD_RES (19)..(20)..(21)..(22): Xaa is A or G or absent
VPTKLEPISVLYLXXXXXXXXXKFKYEEGMSVAEX

SEQ ID NO: 19375 - protein, 36 aa, Artificial Sequence
  Non-cyclic GFR-binding peptide
  MOD_RES (2)..(3)..(34)..(36): Xaa is C or S
PXXVPQDLEPISILYLVGRTPKVKFKYEMVVKSXKX

SEQ ID NO: 19376 - protein, 40 aa, Artificial Sequence
  Non-cyclic GFR-binding peptide
  MOD_RES (6)..(7)..(38)..(40): Xaa is C or S
ASAAPXXVPQALEPISILYLVGRKPKVKFKYEMIVRSXKX

SEQ ID NO: 19377 - protein, 41 aa, Artificial Sequence
  Non-cyclic GFR-binding peptide
  MOD_RES (3)..(4)..(39)..(41): Xaa is C or S
  MOD_RES (18)..(19)..(20)..(21)..(22): Xaa is A or G
  MOD_RES (23)..(24)..(25)..(26): Xaa is A or G or absent
KAXXVPTKLSPISVLYIXXXXXXXXXYKQYEEGMSVAEXGX

SEQ ID NO: 19378 - protein, 36 aa, Artificial Sequence
  Non-cyclic GFR-binding peptide
  MOD_RES (34)..(36): Xaa is C or S
  MOD_RES (14)..(15)..(16)..(17)..(18): Xaa is A or G
  MOD_RES (19)..(20)..(21)..(22): Xaa is A or G or absent
APTQLEPISVLYLXXXXXXXXXKFKYENMVVRAXGX

SEQ ID NO: 19379 - protein, 30 aa, Artificial Sequence
  Non-cyclic GFR-binding peptide
VPARLNAISILYFDAANNVVLKKYRDMVVE

SEQ ID NO: 19380 - protein, 41 aa, Artificial Sequence
  Non-cyclic GFR-binding peptide
  MOD_RES (6)..(7)..(40): Xaa is C or S
  MOD_RES (21)..(22)..(23)..(24)..(25): Xaa is A or G
  MOD_RES (26)..(27)..(28)..(29): Xaa is A or G or absent
ASASPXXVPQDLSPISILYIXXXXXXXXXYKQYEMVVKSXK

SEQ ID NO: 19381 - protein, 36 aa, Artificial Sequence
  Non-cyclic GFR-binding peptide
  MOD_RES (1)..(2)..(34)..(36): Xaa is C or S
XXVPTKLSPISILYIDKGVVTYYKQYEGMAVSEXGX

SEQ ID NO: 19382 - protein, 40 aa, Artificial Sequence
  Non-cyclic GFR-binding peptide
  MOD_RES (4)..(5)..(38)..(40): Xaa is C or S
GKAXXVPTKLEPISVLYLDDMGVPTKFKYEEGMSVAEXGX

SEQ ID NO: 19383 - protein, 38 aa, Artificial Sequence
  Non-cyclic GFR-binding peptide
  MOD_RES (3)..(4)..(36)..(38): Xaa is C or S
ASXXVPARLEPISILYLDAANNVVKFKYEDMVVEAXGX

SEQ ID NO: 19384 - protein, 37 aa, Artificial Sequence
  Non-cyclic GFR-binding peptide
  MOD_RES (1)..(2)..(36): Xaa is C or S
  MOD_RES (16)..(17)..(18)..(19)..(20): Xaa is A or G
  MOD_RES (21)..(22)..(23)..(24): Xaa is A or G or absent
XXVPARLEPISILYLXXXXXXXXXKFKYEDMVVEAXG

SEQ ID NO: 19385 - protein, 35 aa, Artificial Sequence
  Non-cyclic GFR-binding peptide
  MOD_RES (3)..(3): Xaa is C or S
  MOD_RES (17)..(18)..(19)..(20)..(21): Xaa is A or G
  MOD_RES (22)..(23)..(24)..(25): Xaa is A or G or absent
PTXAPTKLSPISVLYIXXXXXXXXXYKQYENMVVR

SEQ ID NO: 19386 - protein, 36 aa, Artificial Sequence
  Non-cyclic GFR-binding peptide
  MOD_RES (34)..(36): Xaa is C or S
  MOD_RES (14)..(15)..(16)..(17)..(18): Xaa is A or G
  MOD_RES (19)..(20)..(21)..(22): Xaa is A or G or absent
APTQLSPISVLYIXXXXXXXXXYKQYENMVVRAXGX

SEQ ID NO: 19387 - protein, 33 aa, Artificial Sequence
  Non-cyclic GFR-binding peptide
  MOD_RES (1)..(33): Xaa is C or S
XVPTELSPISMLYIDEYDKVVYKQYEEMVVEGX

SEQ ID NO: 19388 - protein, 34 aa, Artificial Sequence
  Non-cyclic GFR-binding peptide
  MOD_RES (31)..(33): Xaa is C or S
VPQDLSPISILYIVGRTPKVYKQYEMVVKSXKXS

SEQ ID NO: 19389 - protein, 39 aa, Artificial Sequence
  Non-cyclic GFR-binding peptide
  MOD_RES (5)..(6): Xaa is C or S
  MOD_RES (20)..(21)..(22)..(23)..(24): Xaa is A or G
  MOD_RES (25)..(26)..(27)..(28): Xaa is A or G or absent
APASXXVPARLSPISILYKXXXXXXXXXLKYHYDMVVEA

SEQ ID NO: 19390 - protein, 39 aa, Artificial Sequence
  Non-cyclic GFR-binding peptide
  MOD_RES (2)..(3)..(36)..(38): Xaa is C or S
  MOD_RES (17)..(18)..(19)..(20)..(21): Xaa is A or G
  MOD_RES (22)..(23)..(24)..(25): Xaa is A or G or absent
PXXVPQALEPISILYLXXXXXXXXXKFKYEMIVRSXKXS

SEQ ID NO: 19391 - protein, 34 aa, Artificial Sequence
  Non-cyclic GFR-binding peptide
  MOD_RES (2)..(3): Xaa is C or S
AXXVPTELSPISMLYIDEYDKVVYKQYEEMVVEG

SEQ ID NO: 19392 - protein, 42 aa, Artificial Sequence
  Non-cyclic GFR-binding peptide
  MOD_RES (5)..(6)..(41): Xaa is C or S
  MOD_RES (20)..(21)..(22)..(23)..(24): Xaa is A or G
  MOD_RES (25)..(26)..(27)..(28): Xaa is A or G or absent
VGKAXXVPTKLEPISVLYLXXXXXXXXXKFKYEEGMSVAEXG

SEQ ID NO: 19393 - protein, 35 aa, Artificial Sequence
  Non-cyclic GFR-binding peptide
  MOD_RES (2)..(3)..(34): Xaa is C or S
PXXVPQALEPISILYLVGRKPKVKFKYEMIVRSXK

SEQ ID NO: 19394 - protein, 40 aa, Artificial Sequence
  Non-cyclic GFR-binding peptide
  MOD_RES (4)..(5)..(39): Xaa is C or S
  MOD_RES (19)..(20)..(21)..(22)..(23): Xaa is A or G
  MOD_RES (24)..(25)..(26)..(27): Xaa is A or G or absent
PKPXXAPTKLSPISVLYIXXXXXXXXXYKQYENMVVRSXG

SEQ ID NO: 19395 - protein, 38 aa, Artificial Sequence
  Non-cyclic GFR-binding peptide
  MOD_RES (5)..(37): Xaa is C or S
TKPTXAPTKLEPISVLYLDDSSNVIKFKYENMVVRSXG

SEQ ID NO: 19396 - protein, 41 aa, Artificial Sequence
  Non-cyclic GFR-binding peptide
  MOD_RES (5)..(6)..(38)..(40): Xaa is C or S
ASKAXXVPTKLNAISILYFDKGVVTYLKKYRGMAVSEXGXR

SEQ ID NO: 19397 - protein, 35 aa, Artificial Sequence
  Non-cyclic GFR-binding peptide
  MOD_RES (34)..(34): Xaa is C or S
  MOD_RES (14)..(15)..(16)..(17)..(18): Xaa is A or G
  MOD_RES (19)..(20)..(21)..(22): Xaa is A or G or absent
VPTELEPISMLYLXXXXXXXXXKFKYEEMVVEGXG

SEQ ID NO: 19398 - protein, 31 aa, Artificial Sequence
  Non-cyclic GFR-binding peptide
  MOD_RES (1)..(1): Xaa is C or S
XVPQALSPISILYIVGRKPKVYKQYEMIVRS

SEQ ID NO: 19399 - protein, 37 aa, Artificial Sequence
  Non-cyclic GFR-binding peptide
  MOD_RES (1)..(34)..(36): Xaa is C or S
  MOD_RES (15)..(16)..(17)..(18)..(19): Xaa is A or G
  MOD_RES (20)..(21)..(22)..(23): Xaa is A or G or absent
XVPQALEPISILYLXXXXXXXXXKFKYEMIVRSXKXS

SEQ ID NO: 19400 - protein, 34 aa, Artificial Sequence
  Non-cyclic GFR-binding peptide
  MOD_RES (1)..(2)..(34): Xaa is C or S
XXVPTELSPISMLYIDENEKVVYKQYEDMVVEGX

SEQ ID NO: 19401 - protein, 40 aa, Artificial Sequence
  Non-cyclic GFR-binding peptide
  MOD_RES (5)..(6)..(40): Xaa is C or S
  MOD_RES (20)..(21)..(22)..(23)..(24): Xaa is A or G
  MOD_RES (25)..(26)..(27)..(28): Xaa is A or G or absent
VPKPXXAPTQLSPISVLYIXXXXXXXXXYKQYENMVVRAX

SEQ ID NO: 19402 - protein, 38 aa, Artificial Sequence
  Non-cyclic GFR-binding peptide
  MOD_RES (1)..(2)..(36)..(38): Xaa is C or S
  MOD_RES (16)..(17)..(18)..(19)..(20): Xaa is A or G
  MOD_RES (21)..(22)..(23)..(24): Xaa is A or G or absent
XXVPTKLSPISILYIXXXXXXXXXYKQYEGMAVSEXGX

SEQ ID NO: 19403 - protein, 34 aa, Artificial Sequence
  Non-cyclic GFR-binding peptide
  MOD_RES (2)..(3): Xaa is C or S
AXXVPTELSPISMLYIDENEKVVYKQYEDMVVEG

SEQ ID NO: 19404 - protein, 39 aa, Artificial Sequence
  Non-cyclic GFR-binding peptide
  MOD_RES (6)..(7): Xaa is C or S
  MOD_RES (21)..(22)..(23)..(24)..(25): Xaa is A or G
  MOD_RES (26)..(27)..(28)..(29): Xaa is A or G or absent
ASASPXXVSQDLEPISILYLXXXXXXXXXKFKYEMIVKS

SEQ ID NO: 19405 - protein, 37 aa, Artificial Sequence
  Non-cyclic GFR-binding peptide
  MOD_RES (6)..(7): Xaa is C or S
KASKAXXVPTKLSPISILYIDKGVVTYYKQYEGMAVS

SEQ ID NO: 19406 - protein, 34 aa, Artificial Sequence
  Non-cyclic GFR-binding peptide
  MOD_RES (3)..(4): Xaa is C or S
KAXXAPTKLEPISVLYLDSSNNVIKFKYENMVVK

SEQ ID NO: 19407 - protein, 38 aa, Artificial Sequence
  Non-cyclic GFR-binding peptide
  MOD_RES (3)..(4)..(35)..(37): Xaa is C or S
SPXXVSQDLEPISILYLIGKTPKIKFKYEMIVKSXKXS

SEQ ID NO: 19408 - protein, 39 aa, Artificial Sequence
  Non-cyclic GFR-binding peptide
  MOD_RES (6)..(6): Xaa is C or S
  MOD_RES (20)..(21)..(22)..(23)..(24): Xaa is A or G
  MOD_RES (25)..(26)..(27)..(28): Xaa is A or G or absent
VTKPTXAPTKLSPISVLYIXXXXXXXXXYKQYENMVVRS

SEQ ID NO: 19409 - protein, 35 aa, Artificial Sequence
  Non-cyclic GFR-binding peptide
  MOD_RES (1)..(34): Xaa is C or S
XVPTKLSPISVLYIDDMGVPTYKQYEEGMSVAEXG

SEQ ID NO: 19410 - protein, 34 aa, Artificial Sequence
  Non-cyclic GFR-binding peptide
  MOD_RES (1)..(1): Xaa is C or S
  MOD_RES (15)..(16)..(17)..(18)..(19): Xaa is A or G
  MOD_RES (20)..(21)..(22)..(23): Xaa is A or G or absent
XAPTKLSPISVLYIXXXXXXXXXYKQYENMVVKA

SEQ ID NO: 19411 - protein, 43 aa, Artificial Sequence
  Non-cyclic GFR-binding peptide
  MOD_RES (6)..(7)..(40)..(42): Xaa is C or S
KVGKAXXVPTKLEPISVLYLDDMGVPTKFKYEEGMSVAEXGXR

SEQ ID NO: 19412 - protein, 40 aa, Artificial Sequence
  Non-cyclic GFR-binding peptide
  MOD_RES (6)..(7)..(39): Xaa is C or S
YVPKPXXAPTKLSPISVLYIDDSSNVIYKQYENMVVRSXG

SEQ ID NO: 19413 - protein, 40 aa, Artificial Sequence
  Non-cyclic GFR-binding peptide
  MOD_RES (6)..(7)..(39): Xaa is C or S
KASKAXXVPTKLSPISILYIDKGVVTYYKQYEGMAVSEXG

SEQ ID NO: 19414 - protein, 36 aa, Artificial Sequence
  Non-cyclic GFR-binding peptide
  MOD_RES (2)..(3): Xaa is C or S
  MOD_RES (17)..(18)..(19)..(20)..(21): Xaa is A or G
  MOD_RES (22)..(23)..(24)..(25): Xaa is A or G or absent
AXXVPTELEPISMLYLXXXXXXXXXKFKYEDMVVEG

SEQ ID NO: 19415 - protein, 34 aa, Artificial Sequence
  Non-cyclic GFR-binding peptide
  MOD_RES (1)..(2)..(34): Xaa is C or S
XXVPTELSPISMLYIDEYDKVVYKQYEEMVVEGX

SEQ ID NO: 19416 - protein, 33 aa, Artificial Sequence
  Non-cyclic GFR-binding peptide
  MOD_RES (1)..(1): Xaa is C or S
  MOD_RES (15)..(16)..(17)..(18)..(19): Xaa is A or G
  MOD_RES (20)..(21)..(22)..(23): Xaa is A or G or absent
XVPQALSPISILYIXXXXXXXXXYKQYEMIVRS

SEQ ID NO: 19417 - protein, 38 aa, Artificial Sequence
  Non-cyclic GFR-binding peptide
  MOD_RES (5)..(6): Xaa is C or S
  MOD_RES (20)..(21)..(22)..(23)..(24): Xaa is A or G
  MOD_RES (25)..(26)..(27)..(28): Xaa is A or G or absent
SASPXXVSQDLSPISILYIXXXXXXXXXYKQYEMIVKS

SEQ ID NO: 19418 - protein, 35 aa, Artificial Sequence
  Non-cyclic GFR-binding peptide
  MOD_RES (32)..(34): Xaa is C or S
APTKLSPISVLYIDDSSNVIYKQYENMVVRSXGXH

SEQ ID NO: 19419 - protein, 42 aa, Artificial Sequence
  Non-cyclic GFR-binding peptide
  MOD_RES (6)..(7)..(41): Xaa is C or S
  MOD_RES (21)..(22)..(23)..(24)..(25): Xaa is A or G
  MOD_RES (26)..(27)..(28)..(29): Xaa is A or G or absent
AAPASXXVPARLNAISILYFXXXXXXXXXLKKYRDMVVEAXG

SEQ ID NO: 19420 - protein, 41 aa, Artificial Sequence
  Non-cyclic GFR-binding peptide
  MOD_RES (3)..(4)..(38)..(40): Xaa is C or S
  MOD_RES (18)..(19)..(20)..(21)..(22): Xaa is A or G
  MOD_RES (23)..(24)..(25)..(26): Xaa is A or G or absent
ASXXVPARLNAISILYFXXXXXXXXXLKKYRDMVVEAXGXR

SEQ ID NO: 19421 - protein, 44 aa, Artificial Sequence
  Non-cyclic GFR-binding peptide
  MOD_RES (6)..(7)..(41)..(43): Xaa is C or S
  MOD_RES (21)..(22)..(23)..(24)..(25): Xaa is A or G
  MOD_RES (26)..(27)..(28)..(29): Xaa is A or G or absent
KASKAXXVPTKLNAISILYFXXXXXXXXXLKKYRGMAVSEXGXR

SEQ ID NO: 19422 - protein, 40 aa, Artificial Sequence
  Non-cyclic GFR-binding peptide
  MOD_RES (3)..(4)..(37)..(39): Xaa is C or S
  MOD_RES (18)..(19)..(20)..(21)..(22): Xaa is A or G
  MOD_RES (23)..(24)..(25)..(26): Xaa is A or G or absent
APXXVPQALSPISILYIXXXXXXXXXYKQYEMIVRSXKXS

SEQ ID NO: 19423 - protein, 40 aa, Artificial Sequence
  Non-cyclic GFR-binding peptide
  MOD_RES (5)..(6)..(38)..(40): Xaa is C or S
ASKAXXVPTKLSPISILYKDKGVVTYLKYHYGMAVSEXGX

SEQ ID NO: 19424 - protein, 35 aa, Artificial Sequence
  Non-cyclic GFR-binding peptide
  MOD_RES (1)..(33)..(35): Xaa is C or S
XVPTELSPISMLYIDENEKVVYKQYEDMVVEGXGX

SEQ ID NO: 19425 - protein, 44 aa, Artificial Sequence
  Non-cyclic GFR-binding peptide
  MOD_RES (6)..(7)..(41)..(43): Xaa is C or S
  MOD_RES (21)..(22)..(23)..(24)..(25): Xaa is A or G
  MOD_RES (26)..(27)..(28)..(29): Xaa is A or G or absent
YVPKPXXAPTKLSPISVLYIXXXXXXXXXYKQYENMVVRSXGXH

SEQ ID NO: 19426 - protein, 41 aa, Artificial Sequence
  Non-cyclic GFR-binding peptide
  MOD_RES (3)..(4)..(38)..(40): Xaa is C or S
  MOD_RES (18)..(19)..(20)..(21)..(22): Xaa is A or G
  MOD_RES (23)..(24)..(25)..(26): Xaa is A or G or absent
ASXXVPARLEPISILYLXXXXXXXXXKFKYEDMVVEAXGXR

SEQ ID NO: 19427 - protein, 35 aa, Artificial Sequence
  Non-cyclic GFR-binding peptide
  MOD_RES (33)..(35): Xaa is C or S
  MOD_RES (14)..(15)..(16)..(17)..(18): Xaa is A or G
  MOD_RES (19)..(20)..(21)..(22): Xaa is A or G or absent
VSQDLEPISILYLXXXXXXXXXKFKYEMIVKSXKX

SEQ ID NO: 19428 - protein, 36 aa, Artificial Sequence
  Non-cyclic GFR-binding peptide
  MOD_RES (2)..(3)..(36): Xaa is C or S
  MOD_RES (17)..(18)..(19)..(20)..(21): Xaa is A or G
  MOD_RES (22)..(23)..(24)..(25): Xaa is A or G or absent
PXXVPQDLEPISILYLXXXXXXXXXKFKYEMVVKSX

SEQ ID NO: 19429 - protein, 39 aa, Artificial Sequence
  Non-cyclic GFR-binding peptide
  MOD_RES (4)..(5)..(39): Xaa is C or S
  MOD_RES (19)..(20)..(21)..(22)..(23): Xaa is A or G
  MOD_RES (24)..(25)..(26)..(27): Xaa is A or G or absent
PKAXXVPTELEPISMLYLXXXXXXXXXKFKYEEMVVEGX

SEQ ID NO: 19430 - protein, 41 aa, Artificial Sequence
  Non-cyclic GFR-binding peptide
  MOD_RES (6)..(7)..(39)..(41): Xaa is C or S
KASKAXXVPTKLSPISILYIDKGVVTYYKQYEGMAVSEXGX

SEQ ID NO: 19431 - protein, 41 aa, Artificial Sequence
  Non-cyclic GFR-binding peptide
  MOD_RES (6)..(40): Xaa is C or S
  MOD_RES (20)..(21)..(22)..(23)..(24): Xaa is A or G
  MOD_RES (25)..(26)..(27)..(28): Xaa is A or G or absent
VTKPTXAPTKLSPISVLYIXXXXXXXXXYKQYENMVVRSXG

SEQ ID NO: 19432 - protein, 39 aa, Artificial Sequence
  Non-cyclic GFR-binding peptide
  MOD_RES (3)..(4)..(37)..(39): Xaa is C or S
  MOD_RES (18)..(19)..(20)..(21)..(22): Xaa is A or G
  MOD_RES (23)..(24)..(25)..(26): Xaa is A or G or absent
APXXVPQALEPISILYLXXXXXXXXXKFKYEMIVRSXKX

SEQ ID NO: 19433 - protein, 38 aa, Artificial Sequence
  Non-cyclic GFR-binding peptide
  MOD_RES (2)..(3)..(36)..(38): Xaa is C or S
  MOD_RES (17)..(18)..(19)..(20)..(21): Xaa is A or G
  MOD_RES (22)..(23)..(24)..(25): Xaa is A or G or absent
PXXVPQALSPISILYIXXXXXXXXXYKQYEMIVRSXKX

SEQ ID NO: 19434 - protein, 35 aa, Artificial Sequence
  Non-cyclic GFR-binding peptide
  MOD_RES (4)..(5): Xaa is C or S
AAPXXVPQALEPISILYLVGRKPKVKFKYEMIVRS

SEQ ID NO: 19435 - protein, 38 aa, Artificial Sequence
  Non-cyclic GFR-binding peptide
  MOD_RES (4)..(5): Xaa is C or S
  MOD_RES (19)..(20)..(21)..(22)..(23): Xaa is A or G
  MOD_RES (24)..(25)..(26)..(27): Xaa is A or G or absent
PKAXXVPTELSPISMLYIXXXXXXXXXYKQYEEMVVEG

SEQ ID NO: 19436 - protein, 31 aa, Artificial Sequence
  Non-cyclic GFR-binding peptide
  MOD_RES (1)..(1): Xaa is C or S
XVSQDLEPISILYLIGKTPKIKFKYEMIVKS

SEQ ID NO: 19437 - protein, 32 aa, Artificial Sequence
  Non-cyclic GFR-binding peptide
  MOD_RES (14)..(15)..(16)..(17)..(18): Xaa is A or G
  MOD_RES (19)..(20)..(21)..(22): Xaa is A or G or absent
VPTELEPISMLYLXXXXXXXXXKFKYEEMVVE

SEQ ID NO: 19438 - protein, 34 aa, Artificial Sequence
  Non-cyclic GFR-binding peptide
  MOD_RES (4)..(4): Xaa is C or S
KPTXAPTKLSPISVLYIDDSSNVIYKQYENMVVR

SEQ ID NO: 19439 - protein, 36 aa, Artificial Sequence
  Non-cyclic GFR-binding peptide
  MOD_RES (3)..(4): Xaa is C or S
  MOD_RES (18)..(19)..(20)..(21)..(22): Xaa is A or G
  MOD_RES (23)..(24)..(25)..(26): Xaa is A or G or absent
SPXXVPQDLEPISILYLXXXXXXXXXKFKYEMVVKS

SEQ ID NO: 19440 - protein, 33 aa, Artificial Sequence
  Non-cyclic GFR-binding peptide
  MOD_RES (1)..(2): Xaa is C or S
XXVPARLEPISILYLDAANNVVKFKYEDMVVEA

SEQ ID NO: 19441 - protein, 37 aa, Artificial Sequence
  Non-cyclic GFR-binding peptide
  MOD_RES (5)..(6): Xaa is C or S
ASKAXXVPTKLSPISILYKDKGVVTYLKYHYGMAVSE

SEQ ID NO: 19442 - protein, 37 aa, Artificial Sequence
  Non-cyclic GFR-binding peptide
  MOD_RES (1)..(2)..(34)..(36): Xaa is C or S
XXAPTKLEPISVLYLDDSSNVIKFKYENMVVRSXGXH

SEQ ID NO: 19443 - protein, 35 aa, Artificial Sequence
  Non-cyclic GFR-binding peptide
  MOD_RES (1)..(2): Xaa is C or S
  MOD_RES (16)..(17)..(18)..(19)..(20): Xaa is A or G
  MOD_RES (21)..(22)..(23)..(24): Xaa is A or G or absent
XXAPTQLSPISVLYIXXXXXXXXXYKQYENMVVRA

SEQ ID NO: 19444 - protein, 38 aa, Artificial Sequence
  Non-cyclic GFR-binding peptide
  MOD_RES (6)..(7): Xaa is C or S
AAPASXXVPARLNAISILYFDAANNVVLKKYRDMVVEA

SEQ ID NO: 19445 - protein, 41 aa, Artificial Sequence
  Non-cyclic GFR-binding peptide
  MOD_RES (4)..(5)..(38)..(40): Xaa is C or S
  MOD_RES (19)..(20)..(21)..(22)..(23): Xaa is A or G
  MOD_RES (24)..(25)..(26)..(27): Xaa is A or G or absent
ASPXXVSQDLEPISILYLXXXXXXXXXKFKYEMIVKSXKXS

SEQ ID NO: 19446 - protein, 39 aa, Artificial Sequence
  Non-cyclic GFR-binding peptide
  MOD_RES (6)..(7)..(38): Xaa is C or S
ASASPXXVSQDLSPISILYIIGKTPKIYKQYEMIVKSXK

SEQ ID NO: 19447 - protein, 41 aa, Artificial Sequence
  Non-cyclic GFR-binding peptide
  MOD_RES (6)..(38)..(40): Xaa is C or S
VTKPTXAPTKLSPISVLYIDDSSNVIYKQYENMVVRSXGXH

SEQ ID NO: 19448 - protein, 39 aa, Artificial Sequence
  Non-cyclic GFR-binding peptide
  MOD_RES (3)..(4)..(37)..(39): Xaa is C or S
  MOD_RES (18)..(19)..(20)..(21)..(22): Xaa is A or G
  MOD_RES (23)..(24)..(25)..(26): Xaa is A or G or absent
SPXXVSQDLEPISILYLXXXXXXXXXKFKYEMIVKSXKX

SEQ ID NO: 19449 - protein, 35 aa, Artificial Sequence
  Non-cyclic GFR-binding peptide
  MOD_RES (1)..(2)..(35): Xaa is C or S
  MOD_RES (16)..(17)..(18)..(19)..(20): Xaa is A or G
  MOD_RES (21)..(22)..(23)..(24): Xaa is A or G or absent
XXVSQDLEPISILYLXXXXXXXXXKFKYEMIVKSX

SEQ ID NO: 19450 - protein, 39 aa, Artificial Sequence
  Non-cyclic GFR-binding peptide
  MOD_RES (6)..(7)..(39): Xaa is C or S
AVPKAXXAPTKLEPISVLYLDSSNNVIKFKYENMVVKAX

SEQ ID NO: 19451 - protein, 34 aa, Artificial Sequence
  Non-cyclic GFR-binding peptide
  MOD_RES (32)..(34): Xaa is C or S
APTKLSPISVLYIDDSSNVIYKQYENMVVRSXGX

SEQ ID NO: 19452 - protein, 42 aa, Artificial Sequence
  Non-cyclic GFR-binding peptide
  MOD_RES (4)..(5)..(39)..(41): Xaa is C or S
  MOD_RES (19)..(20)..(21)..(22)..(23): Xaa is A or G
  MOD_RES (24)..(25)..(26)..(27): Xaa is A or G or absent
PKAXXVPTELEPISMLYLXXXXXXXXXKFKYEEMVVEGXGXR

SEQ ID NO: 19453 - protein, 38 aa, Artificial Sequence
  Non-cyclic GFR-binding peptide
  MOD_RES (4)..(5)..(37): Xaa is C or S
PKAXXVPTELEPISMLYLDENEKVVKFKYEDMVVEGXG

SEQ ID NO: 19454 - protein, 32 aa, Artificial Sequence
  Non-cyclic GFR-binding peptide
  MOD_RES (1)..(2): Xaa is C or S
XXVPTKLNAISILYFDKGVVTYLKKYRGMAVS

SEQ ID NO: 19455 - protein, 33 aa, Artificial Sequence
  Non-cyclic GFR-binding peptide
  MOD_RES (31)..(33): Xaa is C or S
VSQDLSPISILYIIGKTPKIYKQYEMIVKSXKX

SEQ ID NO: 19456 - protein, 40 aa, Artificial Sequence
  Non-cyclic GFR-binding peptide
  MOD_RES (5)..(6)..(40): Xaa is C or S
  MOD_RES (20)..(21)..(22)..(23)..(24): Xaa is A or G
  MOD_RES (25)..(26)..(27)..(28): Xaa is A or G or absent
VPKAXXAPTKLEPISVLYLXXXXXXXXXKFKYENMVVKAX

SEQ ID NO: 19457 - protein, 39 aa, Artificial Sequence
  Non-cyclic GFR-binding peptide
  MOD_RES (5)..(6): Xaa is C or S
  MOD_RES (20)..(21)..(22)..(23)..(24): Xaa is A or G
  MOD_RES (25)..(26)..(27)..(28): Xaa is A or G or absent
VPKPXXAPTKLEPISVLYLXXXXXXXXXKFKYENMVVRS

SEQ ID NO: 19458 - protein, 34 aa, Artificial Sequence
  Non-cyclic GFR-binding peptide
  MOD_RES (1)..(32)..(34): Xaa is C or S
XVPQDLSPISILYIVGRTPKVYKQYEMVVKSXKX

SEQ ID NO: 19459 - protein, 40 aa, Artificial Sequence
  Non-cyclic GFR-binding peptide
  MOD_RES (5)..(6)..(37)..(39): Xaa is C or S
SASPXXVSQDLEPISILYLIGKTPKIKFKYEMIVKSXKXS

SEQ ID NO: 19460 - protein, 40 aa, Artificial Sequence
  Non-cyclic GFR-binding peptide
  MOD_RES (5)..(6)..(39): Xaa is C or S
  MOD_RES (20)..(21)..(22)..(23)..(24): Xaa is A or G
  MOD_RES (25)..(26)..(27)..(28): Xaa is A or G or absent
SASPXXVPQDLSPISILYIXXXXXXXXXYKQYEMVVKSXK

SEQ ID NO: 19461 - protein, 39 aa, Artificial Sequence
  Non-cyclic GFR-binding peptide
  MOD_RES (3)..(4)..(36)..(38): Xaa is C or S
KAXXAPTKLSPISVLYIDSSNNVIYKQYENMVVKAXGXH

SEQ ID NO: 19462 - protein, 41 aa, Artificial Sequence
  Non-cyclic GFR-binding peptide
  MOD_RES (4)..(5)..(38)..(40): Xaa is C or S
  MOD_RES (19)..(20)..(21)..(22)..(23): Xaa is A or G
  MOD_RES (24)..(25)..(26)..(27): Xaa is A or G or absent
AAPXXVPQALSPISILYIXXXXXXXXXYKQYEMIVRSXKXS

SEQ ID NO: 19463 - protein, 40 aa, Artificial Sequence
  Non-cyclic GFR-binding peptide
  MOD_RES (4)..(5)..(39): Xaa is C or S
  MOD_RES (19)..(20)..(21)..(22)..(23): Xaa is A or G
  MOD_RES (24)..(25)..(26)..(27): Xaa is A or G or absent
PASXXVPARLNAISILYFXXXXXXXXXLKKYRDMVVEAXG

SEQ ID NO: 19464 - protein, 35 aa, Artificial Sequence
  Non-cyclic GFR-binding peptide
  MOD_RES (3)..(4): Xaa is C or S
KPXXAPTQLSPISVLYIDDSSNVIYKQYENMVVRA

SEQ ID NO: 19465 - protein, 41 aa, Artificial Sequence
  Non-cyclic GFR-binding peptide
  MOD_RES (5)..(6)..(39)..(41): Xaa is C or S
  MOD_RES (20)..(21)..(22)..(23)..(24): Xaa is A or G
  MOD_RES (25)..(26)..(27)..(28): Xaa is A or G or absent
SASPXXVPQDLEPISILYLXXXXXXXXXKFKYEMVVKSXKX

SEQ ID NO: 19466 - protein, 38 aa, Artificial Sequence
  Non-cyclic GFR-binding peptide
  MOD_RES (2)..(3)..(37): Xaa is C or S
  MOD_RES (17)..(18)..(19)..(20)..(21): Xaa is A or G
  MOD_RES (22)..(23)..(24)..(25): Xaa is A or G or absent
AXXVPTKLNAISILYFXXXXXXXXXLKKYRGMAVSEXG

SEQ ID NO: 19467 - protein, 40 aa, Artificial Sequence
  Non-cyclic GFR-binding peptide
  MOD_RES (5)..(6)..(39): Xaa is C or S
  MOD_RES (20)..(21)..(22)..(23)..(24): Xaa is A or G
  MOD_RES (25)..(26)..(27)..(28): Xaa is A or G or absent
SAAPXXVPQALEPISILYLXXXXXXXXXKFKYEMIVRSXK

SEQ ID NO: 19468 - protein, 36 aa, Artificial Sequence
  Non-cyclic GFR-binding peptide
  MOD_RES (2)..(3): Xaa is C or S
  MOD_RES (17)..(18)..(19)..(20)..(21): Xaa is A or G
  MOD_RES (22)..(23)..(24)..(25): Xaa is A or G or absent
SXXVPARLSPISILYKXXXXXXXXXLKYHYDMVVEA

SEQ ID NO: 19469 - protein, 41 aa, Artificial Sequence
  Non-cyclic GFR-binding peptide
  MOD_RES (6)..(7)..(41): Xaa is C or S
  MOD_RES (21)..(22)..(23)..(24)..(25): Xaa is A or G
  MOD_RES (26)..(27)..(28)..(29): Xaa is A or G or absent
TVPKPXXAPTQLSPISVLYIXXXXXXXXXYKQYENMVVRAX

SEQ ID NO: 19470 - protein, 41 aa, Artificial Sequence
  Non-cyclic GFR-binding peptide
  MOD_RES (6)..(7)..(38)..(40): Xaa is C or S
ASASPXXVPQDLEPISILYLVGRTPKVKFKYEMVVKSXKXS

SEQ ID NO: 19471 - protein, 34 aa, Artificial Sequence
  Non-cyclic GFR-binding peptide
  MOD_RES (2)..(3): Xaa is C or S
PXXAPTKLEPISVLYLDDSSNVIKFKYENMVVRS

SEQ ID NO: 19472 - protein, 37 aa, Artificial Sequence
  Non-cyclic GFR-binding peptide
  MOD_RES (34)..(36): Xaa is C or S
  MOD_RES (14)..(15)..(16)..(17)..(18): Xaa is A or G
  MOD_RES (19)..(20)..(21)..(22): Xaa is A or G or absent
VPTELSPISMLYIXXXXXXXXXYKQYEEMVVEGXGXR

SEQ ID NO: 19473 - protein, 37 aa, Artificial Sequence
  Non-cyclic GFR-binding peptide
  MOD_RES (1)..(2)..(36): Xaa is C or S
  MOD_RES (16)..(17)..(18)..(19)..(20): Xaa is A or G
  MOD_RES (21)..(22)..(23)..(24): Xaa is A or G or absent
XXVPTELSPISMLYIXXXXXXXXXYKQYEEMVVEGXG

SEQ ID NO: 19474 - protein, 38 aa, Artificial Sequence
  Non-cyclic GFR-binding peptide
  MOD_RES (6)..(7)..(38): Xaa is C or S
ASASPXXVPQDLEPISILYLVGRTPKVKFKYEMVVKSX

SEQ ID NO: 19475 - protein, 37 aa, Artificial Sequence
  Non-cyclic GFR-binding peptide
  MOD_RES (5)..(6): Xaa is C or S
ASKAXXVPTKLSPISILYIDKGVVTYYKQYEGMAVSE

SEQ ID NO: 19476 - protein, 40 aa, Artificial Sequence
  Non-cyclic GFR-binding peptide
  MOD_RES (4)..(5)..(37)..(39): Xaa is C or S
PKAXXVPTELEPISMLYLDENEKVVKFKYEDMVVEGXGXR

SEQ ID NO: 19477 - protein, 39 aa, Artificial Sequence
  Non-cyclic GFR-binding peptide
  MOD_RES (5)..(6)..(39): Xaa is C or S
  MOD_RES (20)..(21)..(22)..(23)..(24): Xaa is A or G
  MOD_RES (25)..(26)..(27)..(28): Xaa is A or G or absent
SAAPXXVPQALSPISILYIXXXXXXXXXYKQYEMIVRSX

SEQ ID NO: 19478 - protein, 38 aa, Artificial Sequence
  Non-cyclic GFR-binding peptide
  MOD_RES (1)..(2)..(36)..(38): Xaa is C or S
  MOD_RES (16)..(17)..(18)..(19)..(20): Xaa is A or G
  MOD_RES (21)..(22)..(23)..(24): Xaa is A or G or absent
XXAPTKLSPISVLYIXXXXXXXXXYKQYENMVVRSXGX

SEQ ID NO: 19479 - protein, 35 aa, Artificial Sequence
  Non-cyclic GFR-binding peptide
  MOD_RES (2)..(3)..(34): Xaa is C or S
PXXVPQDLSPISILYIVGRTPKVYKQYEMVVKSXK

SEQ ID NO: 19480 - protein, 41 aa, Artificial Sequence
  Non-cyclic GFR-binding peptide
  MOD_RES (7)..(41): Xaa is C or S
  MOD_RES (21)..(22)..(23)..(24)..(25): Xaa is A or G
  MOD_RES (26)..(27)..(28)..(29): Xaa is A or G or absent
HVTKPTXAPTKLSPISVLYIXXXXXXXXXYKQYENMVVRSX

SEQ ID NO: 19481 - protein, 41 aa, Artificial Sequence
  Non-cyclic GFR-binding peptide
  MOD_RES (4)..(5)..(39)..(41): Xaa is C or S
  MOD_RES (19)..(20)..(21)..(22)..(23): Xaa is A or G
  MOD_RES (24)..(25)..(26)..(27): Xaa is A or G or absent
PKAXXAPTKLEPISVLYLXXXXXXXXXKFKYENMVVKAXGX

SEQ ID NO: 19482 - protein, 38 aa, Artificial Sequence
  Non-cyclic GFR-binding peptide
  MOD_RES (1)..(35)..(37): Xaa is C or S
  MOD_RES (15)..(16)..(17)..(18)..(19): Xaa is A or G
  MOD_RES (20)..(21)..(22)..(23): Xaa is A or G or absent
XVPTELSPISMLYIXXXXXXXXXYKQYEEMVVEGXGXR

SEQ ID NO: 19483 - protein, 37 aa, Artificial Sequence
  Non-cyclic GFR-binding peptide
  MOD_RES (1)..(34)..(36): Xaa is C or S
  MOD_RES (15)..(16)..(17)..(18)..(19): Xaa is A or G
  MOD_RES (20)..(21)..(22)..(23): Xaa is A or G or absent
XVPQALSPISILYIXXXXXXXXXYKQYEMIVRSXKXS

SEQ ID NO: 19484 - protein, 35 aa, Artificial Sequence
  Non-cyclic GFR-binding peptide
  MOD_RES (1)..(2)..(34): Xaa is C or S
XXAPTQLSPISVLYIDDSSNVIYKQYENMVVRAXG

SEQ ID NO: 19485 - protein, 34 aa, Artificial Sequence
  Non-cyclic GFR-binding peptide
  MOD_RES (1)..(2)..(34): Xaa is C or S
XXAPTKLSPISVLYIDSSNNVIYKQYENMVVKAX

SEQ ID NO: 19486 - protein, 36 aa, Artificial Sequence
  Non-cyclic GFR-binding peptide
  MOD_RES (34)..(36): Xaa is C or S
  MOD_RES (14)..(15)..(16)..(17)..(18): Xaa is A or G
  MOD_RES (19)..(20)..(21)..(22): Xaa is A or G or absent
APTKLEPISVLYLXXXXXXXXXKFKYENMVVKAXGX

SEQ ID NO: 19487 - protein, 36 aa, Artificial Sequence
  Non-cyclic GFR-binding peptide
  MOD_RES (1)..(35): Xaa is C or S
  MOD_RES (15)..(16)..(17)..(18)..(19): Xaa is A or G
  MOD_RES (20)..(21)..(22)..(23): Xaa is A or G or absent
XAPTKLSPISVLYIXXXXXXXXXYKQYENMVVKAXG

SEQ ID NO: 19488 - protein, 38 aa, Artificial Sequence
  Non-cyclic GFR-binding peptide
  MOD_RES (4)..(38): Xaa is C or S
  MOD_RES (18)..(19)..(20)..(21)..(22): Xaa is A or G
  MOD_RES (23)..(24)..(25)..(26): Xaa is A or G or absent
KPTXAPTKLSPISVLYIXXXXXXXXXYKQYENMVVRSX

SEQ ID NO: 19489 - protein, 36 aa, Artificial Sequence
  Non-cyclic GFR-binding peptide
  MOD_RES (1)..(35): Xaa is C or S
  MOD_RES (15)..(16)..(17)..(18)..(19): Xaa is A or G
  MOD_RES (20)..(21)..(22)..(23): Xaa is A or G or absent
XVPTELEPISMLYLXXXXXXXXXKFKYEDMVVEGXG

SEQ ID NO: 19490 - protein, 34 aa, Artificial Sequence
  Non-cyclic GFR-binding peptide
  MOD_RES (1)..(1): Xaa is C or S
  MOD_RES (15)..(16)..(17)..(18)..(19): Xaa is A or G
  MOD_RES (20)..(21)..(22)..(23): Xaa is A or G or absent
XAPTQLSPISVLYIXXXXXXXXXYKQYENMVVRA

SEQ ID NO: 19491 - protein, 36 aa, Artificial Sequence
  Non-cyclic GFR-binding peptide
  MOD_RES (5)..(6): Xaa is C or S
VPKPXXAPTQLEPISVLYLDDSSNVIKFKYENMVVR

SEQ ID NO: 19492 - protein, 39 aa, Artificial Sequence
  Non-cyclic GFR-binding peptide
  MOD_RES (6)..(7): Xaa is C or S
  MOD_RES (21)..(22)..(23)..(24)..(25): Xaa is A or G
  MOD_RES (26)..(27)..(28)..(29): Xaa is A or G or absent
AVPKAXXAPTKLSPISVLYIXXXXXXXXXYKQYENMVVK

SEQ ID NO: 19493 - protein, 36 aa, Artificial Sequence
  Non-cyclic GFR-binding peptide
  MOD_RES (4)..(36): Xaa is C or S
KPTXAPTKLEPISVLYLDDSSNVIKFKYENMVVRSX

SEQ ID NO: 19494 - protein, 35 aa, Artificial Sequence
  Non-cyclic GFR-binding peptide
  MOD_RES (1)..(1): Xaa is C or S
  MOD_RES (15)..(16)..(17)..(18)..(19): Xaa is A or G
  MOD_RES (20)..(21)..(22)..(23): Xaa is A or G or absent
XVPTKLEPISVLYLXXXXXXXXXKFKYEEGMSVAE

SEQ ID NO: 19495 - protein, 39 aa, Artificial Sequence
  Non-cyclic GFR-binding peptide
  MOD_RES (2)..(3)..(36)..(38): Xaa is C or S
  MOD_RES (17)..(18)..(19)..(20)..(21): Xaa is A or G
  MOD_RES (22)..(23)..(24)..(25): Xaa is A or G or absent
PXXVPQDLEPISILYLXXXXXXXXXKFKYEMVVKSXKXS

SEQ ID NO: 19496 - protein, 41 aa, Artificial Sequence
  Non-cyclic GFR-binding peptide
  MOD_RES (5)..(39)..(41): Xaa is C or S
  MOD_RES (19)..(20)..(21)..(22)..(23): Xaa is A or G
  MOD_RES (24)..(25)..(26)..(27): Xaa is A or G or absent
TKPTXAPTKLEPISVLYLXXXXXXXXXKFKYENMVVRSXGX

SEQ ID NO: 19497 - protein, 38 aa, Artificial Sequence
  Non-cyclic GFR-binding peptide
  MOD_RES (5)..(6)..(38): Xaa is C or S
APASXXVPARLEPISILYLDAANNVVKFKYEDMVVEAX

SEQ ID NO: 19498 - protein, 39 aa, Artificial Sequence
  Non-cyclic GFR-binding peptide
  MOD_RES (6)..(7): Xaa is C or S
  MOD_RES (21)..(22)..(23)..(24)..(25): Xaa is A or G
  MOD_RES (26)..(27)..(28)..(29): Xaa is A or G or absent
KIPKAXXVPTELSPISMLYIXXXXXXXXXYKQYEDMVVE

SEQ ID NO: 19499 - protein, 38 aa, Artificial Sequence
  Non-cyclic GFR-binding peptide
  MOD_RES (3)..(4)..(36)..(38): Xaa is C or S
KAXXAPTKLEPISVLYLDSSNNVIKFKYENMVVKAXGX

SEQ ID NO: 19500 - protein, 36 aa, Artificial Sequence
  Non-cyclic GFR-binding peptide
  MOD_RES (3)..(4)..(35): Xaa is C or S
SPXXVPQDLSPISILYIVGRTPKVYKQYEMVVKSXK

SEQ ID NO: 19501 - protein, 37 aa, Artificial Sequence
  Non-cyclic GFR-binding peptide
  MOD_RES (1)..(2)..(34)..(36): Xaa is C or S
XXVPARLNAISILYFDAANNVVLKKYRDMVVEAXGXR

SEQ ID NO: 19502 - protein, 38 aa, Artificial Sequence
  Non-cyclic GFR-binding peptide
  MOD_RES (2)..(3)..(35)..(37): Xaa is C or S
AXXAPTKLEPISVLYLDSSNNVIKFKYENMVVKAXGXH

SEQ ID NO: 19503 - protein, 34 aa, Artificial Sequence
  Non-cyclic GFR-binding peptide
  MOD_RES (2)..(3): Xaa is C or S
AXXAPTKLSPISVLYIDSSNNVIYKQYENMVVKA

SEQ ID NO: 19504 - protein, 36 aa, Artificial Sequence
  Non-cyclic GFR-binding peptide
  MOD_RES (4)..(5)..(36): Xaa is C or S
ASPXXVSQDLSPISILYIIGKTPKIYKQYEMIVKSX

SEQ ID NO: 19505 - protein, 33 aa, Artificial Sequence
  Non-cyclic GFR-binding peptide
  MOD_RES (14)..(15)..(16)..(17)..(18): Xaa is A or G
  MOD_RES (19)..(20)..(21)..(22): Xaa is A or G or absent
VPARLSPISILYKXXXXXXXXXLKYHYDMVVEA

SEQ ID NO: 19506 - protein, 37 aa, Artificial Sequence
  Non-cyclic GFR-binding peptide
  MOD_RES (1)..(2)..(34)..(36): Xaa is C or S
XXAPTKLSPISVLYIDDSSNVIYKQYENMVVRSXGXH

SEQ ID NO: 19507 - protein, 39 aa, Artificial Sequence
  Non-cyclic GFR-binding peptide
  MOD_RES (4)..(5)..(37)..(39): Xaa is C or S
PASXXVPARLNAISILYFDAANNVVLKKYRDMVVEAXGX

SEQ ID NO: 19508 - protein, 36 aa, Artificial Sequence
  Non-cyclic GFR-binding peptide
  MOD_RES (2)..(3): Xaa is C or S
  MOD_RES (17)..(18)..(19)..(20)..(21): Xaa is A or G
  MOD_RES (22)..(23)..(24)..(25): Xaa is A or G or absent
AXXVPTKLSPISILYIXXXXXXXXXYKQYEGMAVSE

SEQ ID NO: 19509 - protein, 37 aa, Artificial Sequence
  Non-cyclic GFR-binding peptide
  MOD_RES (4)..(5): Xaa is C or S
GKAXXVPTKLSPISVLYIDDMGVPTYKQYEEGMSVAE

SEQ ID NO: 19510 - protein, 42 aa, Artificial Sequence
  Non-cyclic GFR-binding peptide
  MOD_RES (5)..(6)..(40)..(42): Xaa is C or S
  MOD_RES (20)..(21)..(22)..(23)..(24): Xaa is A or G
  MOD_RES (25)..(26)..(27)..(28): Xaa is A or G or absent
VPKAXXAPTKLSPISVLYIXXXXXXXXXYKQYENMVVKAXGX

SEQ ID NO: 19511 - protein, 41 aa, Artificial Sequence
  Non-cyclic GFR-binding peptide
  MOD_RES (6)..(7)..(41): Xaa is C or S
  MOD_RES (21)..(22)..(23)..(24)..(25): Xaa is A or G
  MOD_RES (26)..(27)..(28)..(29): Xaa is A or G or absent
AVPKAXXAPTKLEPISVLYLXXXXXXXXXKFKYENMVVKAX

SEQ ID NO: 19512 - protein, 40 aa, Artificial Sequence
  Non-cyclic GFR-binding peptide
  MOD_RES (5)..(6)..(40): Xaa is C or S
  MOD_RES (20)..(21)..(22)..(23)..(24): Xaa is A or G
  MOD_RES (25)..(26)..(27)..(28): Xaa is A or G or absent
VPKAXXAPTKLSPISVLYIXXXXXXXXXYKQYENMVVKAX

SEQ ID NO: 19513 - protein, 39 aa, Artificial Sequence
  Non-cyclic GFR-binding peptide
  MOD_RES (4)..(5)..(39): Xaa is C or S
  MOD_RES (19)..(20)..(21)..(22)..(23): Xaa is A or G
  MOD_RES (24)..(25)..(26)..(27): Xaa is A or G or absent
PKPXXAPTKLEPISVLYLXXXXXXXXXKFKYENMVVRSX

SEQ ID NO: 19514 - protein, 34 aa, Artificial Sequence
  Non-cyclic GFR-binding peptide
  MOD_RES (1)..(2): Xaa is C or S
  MOD_RES (16)..(17)..(18)..(19)..(20): Xaa is A or G
  MOD_RES (21)..(22)..(23)..(24): Xaa is A or G or absent
XXAPTQLSPISVLYIXXXXXXXXXYKQYENMVVR

SEQ ID NO: 19515 - protein, 36 aa, Artificial Sequence
  Non-cyclic GFR-binding peptide
  MOD_RES (3)..(4): Xaa is C or S
  MOD_RES (18)..(19)..(20)..(21)..(22): Xaa is A or G
  MOD_RES (23)..(24)..(25)..(26): Xaa is A or G or absent
KAXXAPTKLEPISVLYLXXXXXXXXXKFKYENMVVK

SEQ ID NO: 19516 - protein, 33 aa, Artificial Sequence
  Non-cyclic GFR-binding peptide
  MOD_RES (31)..(33): Xaa is C or S
VPQDLSPISILYIVGRTPKVYKQYEMVVKSXKX

SEQ ID NO: 19517 - protein, 36 aa, Artificial Sequence
  Non-cyclic GFR-binding peptide
  MOD_RES (5)..(6): Xaa is C or S
ASKAXXVPTKLSPISILYKDKGVVTYLKYHYGMAVS

SEQ ID NO: 19518 - protein, 38 aa, Artificial Sequence
  Non-cyclic GFR-binding peptide
  MOD_RES (5)..(6)..(38): Xaa is C or S
VPKPXXAPTQLEPISVLYLDDSSNVIKFKYENMVVRAX

SEQ ID NO: 19519 - protein, 37 aa, Artificial Sequence
  Non-cyclic GFR-binding peptide
  MOD_RES (5)..(6): Xaa is C or S
IPKAXXVPTELEPISMLYLDEYDKVVKFKYEEMVVEG

SEQ ID NO: 19520 - protein, 42 aa, Artificial Sequence
  Non-cyclic GFR-binding peptide
  MOD_RES (4)..(5)..(39)..(41): Xaa is C or S
  MOD_RES (19)..(20)..(21)..(22)..(23): Xaa is A or G
  MOD_RES (24)..(25)..(26)..(27): Xaa is A or G or absent
SKAXXVPTKLNAISILYFXXXXXXXXXLKKYRGMAVSEXGXR

SEQ ID NO: 19521 - protein, 41 aa, Artificial Sequence
  Non-cyclic GFR-binding peptide
  MOD_RES (5)..(6)..(38)..(40): Xaa is C or S
IPKAXXVPTELEPISMLYLDENEKVVKFKYEDMVVEGXGXR

SEQ ID NO: 19522 - protein, 34 aa, Artificial Sequence
  Non-cyclic GFR-binding peptide
  MOD_RES (1)..(1): Xaa is C or S
  MOD_RES (15)..(16)..(17)..(18)..(19): Xaa is A or G
  MOD_RES (20)..(21)..(22)..(23): Xaa is A or G or absent
XVPARLNAISILYFXXXXXXXXXLKKYRDMVVEA

SEQ ID NO: 19523 - protein, 35 aa, Artificial Sequence
  Non-cyclic GFR-binding peptide
  MOD_RES (3)..(4)..(35): Xaa is C or S
SPXXVSQDLSPISILYIIGKTPKIYKQYEMIVKSX

SEQ ID NO: 19524 - protein, 43 aa, Artificial Sequence
  Non-cyclic GFR-binding peptide
  MOD_RES (6)..(7)..(40)..(42): Xaa is C or S
KVGKAXXVPTKLSPISVLYIDDMGVPTYKQYEEGMSVAEXGXR

SEQ ID NO: 19525 - protein, 38 aa, Artificial Sequence
  Non-cyclic GFR-binding peptide
  MOD_RES (35)..(37): Xaa is C or S
  MOD_RES (14)..(15)..(16)..(17)..(18): Xaa is A or G
  MOD_RES (19)..(20)..(21)..(22): Xaa is A or G or absent
VPTKLSPISVLYIXXXXXXXXXYKQYEEGMSVAEXGXR

SEQ ID NO: 19526 - protein, 39 aa, Artificial Sequence
  Non-cyclic GFR-binding peptide
  MOD_RES (2)..(3)..(37)..(39): Xaa is C or S
  MOD_RES (17)..(18)..(19)..(20)..(21): Xaa is A or G
  MOD_RES (22)..(23)..(24)..(25): Xaa is A or G or absent
AXXAPTKLSPISVLYIXXXXXXXXXYKQYENMVVKAXGX

SEQ ID NO: 19527 - protein, 36 aa, Artificial Sequence
  Non-cyclic GFR-binding peptide
  MOD_RES (1)..(2)..(36): Xaa is C or S
  MOD_RES (16)..(17)..(18)..(19)..(20): Xaa is A or G
  MOD_RES (21)..(22)..(23)..(24): Xaa is A or G or absent
XXVPARLSPISILYKXXXXXXXXXLKYHYDMVVEAX

SEQ ID NO: 19528 - protein, 43 aa, Artificial Sequence
  Non-cyclic GFR-binding peptide
  MOD_RES (6)..(40)..(42): Xaa is C or S
  MOD_RES (20)..(21)..(22)..(23)..(24): Xaa is A or G
  MOD_RES (25)..(26)..(27)..(28): Xaa is A or G or absent
VTKPTXAPTKLSPISVLYIXXXXXXXXXYKQYENMVVRSXGXH

SEQ ID NO: 19529 - protein, 32 aa, Artificial Sequence
  Non-cyclic GFR-binding peptide
  MOD_RES (32)..(32): Xaa is C or S
VPARLEPISILYLDAANNVVKFKYEDMVVEAX

SEQ ID NO: 19530 - protein, 39 aa, Artificial Sequence
  Non-cyclic GFR-binding peptide
  MOD_RES (5)..(6)..(38): Xaa is C or S
IPKAXXVPTELSPISMLYIDENEKVVYKQYEDMVVEGXG

SEQ ID NO: 19531 - protein, 40 aa, Artificial Sequence
  Non-cyclic GFR-binding peptide
  MOD_RES (4)..(5)..(38)..(40): Xaa is C or S
  MOD_RES (19)..(20)..(21)..(22)..(23): Xaa is A or G
  MOD_RES (24)..(25)..(26)..(27): Xaa is A or G or absent
AAPXXVPQALEPISILYLXXXXXXXXXKFKYEMIVRSXKX

SEQ ID NO: 19532 - protein, 33 aa, Artificial Sequence
  Non-cyclic GFR-binding peptide
  MOD_RES (14)..(15)..(16)..(17)..(18): Xaa is A or G
  MOD_RES (19)..(20)..(21)..(22): Xaa is A or G or absent
VPTKLSPISILYKXXXXXXXXXLKYHYGMAVSE

SEQ ID NO: 19533 - protein, 38 aa, Artificial Sequence
  Non-cyclic GFR-binding peptide
  MOD_RES (2)..(3)..(37): Xaa is C or S
  MOD_RES (17)..(18)..(19)..(20)..(21): Xaa is A or G
  MOD_RES (22)..(23)..(24)..(25): Xaa is A or G or absent
PXXAPTQLEPISVLYLXXXXXXXXXKFKYENMVVRAXG

SEQ ID NO: 19534 - protein, 40 aa, Artificial Sequence
  Non-cyclic GFR-binding peptide
  MOD_RES (6)..(7)..(40): Xaa is C or S
  MOD_RES (21)..(22)..(23)..(24)..(25): Xaa is A or G
  MOD_RES (26)..(27)..(28)..(29): Xaa is A or G or absent
ASASPXXVSQDLEPISILYLXXXXXXXXXKFKYEMIVKSX

SEQ ID NO: 19535 - protein, 41 aa, Artificial Sequence
  Non-cyclic GFR-binding peptide
  MOD_RES (6)..(7)..(40): Xaa is C or S
  MOD_RES (21)..(22)..(23)..(24)..(25): Xaa is A or G
  MOD_RES (26)..(27)..(28)..(29): Xaa is A or G or absent
ASASPXXVSQDLSPISILYIXXXXXXXXXYKQYEMIVKSXK

SEQ ID NO: 19536 - protein, 40 aa, Artificial Sequence
  Non-cyclic GFR-binding peptide
  MOD_RES (6)..(7)..(39): Xaa is C or S
AAPASXXVPARLSPISILYKDAANNVVLKYHYDMVVEAXG

SEQ ID NO: 19537 - protein, 37 aa, Artificial Sequence
  Non-cyclic GFR-binding peptide
  MOD_RES (1)..(34)..(36): Xaa is C or S
  MOD_RES (15)..(16)..(17)..(18)..(19): Xaa is A or G
  MOD_RES (20)..(21)..(22)..(23): Xaa is A or G or absent
XVPQDLSPISILYIXXXXXXXXXYKQYEMVVKSXKXS

SEQ ID NO: 19538 - protein, 37 aa, Artificial Sequence
  Non-cyclic GFR-binding peptide
  MOD_RES (3)..(4): Xaa is C or S
  MOD_RES (18)..(19)..(20)..(21)..(22): Xaa is A or G
  MOD_RES (23)..(24)..(25)..(26): Xaa is A or G or absent
KAXXVPTELSPISMLYIXXXXXXXXXYKQYEDMVVEG

SEQ ID NO: 19539 - protein, 40 aa, Artificial Sequence
  Non-cyclic GFR-binding peptide
  MOD_RES (3)..(4)..(37)..(39): Xaa is C or S
  MOD_RES (18)..(19)..(20)..(21)..(22): Xaa is A or G
  MOD_RES (23)..(24)..(25)..(26): Xaa is A or G or absent
SPXXVSQDLSPISILYIXXXXXXXXXYKQYEMIVKSXKXS

SEQ ID NO: 19540 - protein, 37 aa, Artificial Sequence
  Non-cyclic GFR-binding peptide
  MOD_RES (2)..(3)..(37): Xaa is C or S
  MOD_RES (17)..(18)..(19)..(20)..(21): Xaa is A or G
  MOD_RES (22)..(23)..(24)..(25): Xaa is A or G or absent
PXXAPTQLSPISVLYIXXXXXXXXXYKQYENMVVRAX

SEQ ID NO: 19541 - protein, 34 aa, Artificial Sequence
  Non-cyclic GFR-binding peptide
  MOD_RES (31)..(33): Xaa is C or S
VSQDLEPISILYLIGKTPKIKFKYEMIVKSXKXS

SEQ ID NO: 19542 - protein, 35 aa, Artificial Sequence
  Non-cyclic GFR-binding peptide
  MOD_RES (1)..(2)..(34): Xaa is C or S
XXAPTKLEPISVLYLDDSSNVIKFKYENMVVRSXG

SEQ ID NO: 19543 - protein, 37 aa, Artificial Sequence
  Non-cyclic GFR-binding peptide
  MOD_RES (3)..(4)..(37): Xaa is C or S
  MOD_RES (18)..(19)..(20)..(21)..(22): Xaa is A or G
  MOD_RES (23)..(24)..(25)..(26): Xaa is A or G or absent
SPXXVPQDLSPISILYIXXXXXXXXXYKQYEMVVKSX

SEQ ID NO: 19544 - protein, 37 aa, Artificial Sequence
  Non-cyclic GFR-binding peptide
  MOD_RES (34)..(36): Xaa is C or S
  MOD_RES (14)..(15)..(16)..(17)..(18): Xaa is A or G
  MOD_RES (19)..(20)..(21)..(22): Xaa is A or G or absent
VPTKLNAISILYFXXXXXXXXXLKKYRGMAVSEXGXR

SEQ ID NO: 19545 - protein, 36 aa, Artificial Sequence
  Non-cyclic GFR-binding peptide
  MOD_RES (1)..(33)..(35): Xaa is C or S
XAPTKLEPISVLYLDDSSNVIKFKYENMVVRSXGXH

SEQ ID NO: 19546 - protein, 35 aa, Artificial Sequence
  Non-cyclic GFR-binding peptide
  MOD_RES (34)..(34): Xaa is C or S
  MOD_RES (14)..(15)..(16)..(17)..(18): Xaa is A or G
  MOD_RES (19)..(20)..(21)..(22): Xaa is A or G or absent
APTKLSPISVLYIXXXXXXXXXYKQYENMVVKAXG

SEQ ID NO: 19547 - protein, 37 aa, Artificial Sequence
  Non-cyclic GFR-binding peptide
  MOD_RES (1)..(35)..(37): Xaa is C or S
  MOD_RES (15)..(16)..(17)..(18)..(19): Xaa is A or G
  MOD_RES (20)..(21)..(22)..(23): Xaa is A or G or absent
XVPTKLSPISILYKXXXXXXXXXLKYHYGMAVSEXGX

SEQ ID NO: 19548 - protein, 31 aa, Artificial Sequence
  Non-cyclic GFR-binding peptide
  MOD_RES (1)..(1): Xaa is C or S
XVPTELSPISMLYIDEYDKVVYKQYEEMVVE

SEQ ID NO: 19549 - protein, 34 aa, Artificial Sequence
  Non-cyclic GFR-binding peptide
  MOD_RES (1)..(34): Xaa is C or S
  MOD_RES (15)..(16)..(17)..(18)..(19): Xaa is A or G
  MOD_RES (20)..(21)..(22)..(23): Xaa is A or G or absent
XVPQALEPISILYLXXXXXXXXXKFKYEMIVRSX

SEQ ID NO: 19550 - protein, 39 aa, Artificial Sequence
  Non-cyclic GFR-binding peptide
  MOD_RES (2)..(3)..(37)..(39): Xaa is C or S
  MOD_RES (17)..(18)..(19)..(20)..(21): Xaa is A or G
  MOD_RES (22)..(23)..(24)..(25): Xaa is A or G or absent
SXXVPARLSPISILYKXXXXXXXXXLKYHYDMVVEAXGX

SEQ ID NO: 19551 - protein, 41 aa, Artificial Sequence
  Non-cyclic GFR-binding peptide
  MOD_RES (5)..(6)..(40): Xaa is C or S
  MOD_RES (20)..(21)..(22)..(23)..(24): Xaa is A or G
  MOD_RES (25)..(26)..(27)..(28): Xaa is A or G or absent
APASXXVPARLNAISILYFXXXXXXXXXLKKYRDMVVEAXG

SEQ ID NO: 19552 - protein, 34 aa, Artificial Sequence
  Non-cyclic GFR-binding peptide
  MOD_RES (1)..(2): Xaa is C or S
  MOD_RES (16)..(17)..(18)..(19)..(20): Xaa is A or G
  MOD_RES (21)..(22)..(23)..(24): Xaa is A or G or absent
XXVPARLNAISILYFXXXXXXXXXLKKYRDMVVE

SEQ ID NO: 19553 - protein, 37 aa, Artificial Sequence
  Non-cyclic GFR-binding peptide
  MOD_RES (5)..(6)..(37): Xaa is C or S
SASPXXVSQDLEPISILYLIGKTPKIKFKYEMIVKSX

SEQ ID NO: 19554 - protein, 39 aa, Artificial Sequence
  Non-cyclic GFR-binding peptide
  MOD_RES (4)..(5)..(39): Xaa is C or S
  MOD_RES (19)..(20)..(21)..(22)..(23): Xaa is A or G
  MOD_RES (24)..(25)..(26)..(27): Xaa is A or G or absent
PKAXXVPTELSPISMLYIXXXXXXXXXYKQYEDMVVEGX

SEQ ID NO: 19555 - protein, 35 aa, Artificial Sequence
  Non-cyclic GFR-binding peptide
  MOD_RES (2)..(3): Xaa is C or S
  MOD_RES (17)..(18)..(19)..(20)..(21): Xaa is A or G
  MOD_RES (22)..(23)..(24)..(25): Xaa is A or G or absent
PXXAPTQLEPISVLYLXXXXXXXXXKFKYENMVVR

SEQ ID NO: 19556 - protein, 39 aa, Artificial Sequence
  Non-cyclic GFR-binding peptide
  MOD_RES (3)..(4)..(38): Xaa is C or S
  MOD_RES (18)..(19)..(20)..(21)..(22): Xaa is A or G
  MOD_RES (23)..(24)..(25)..(26): Xaa is A or G or absent
KAXXAPTKLEPISVLYLXXXXXXXXXKFKYENMVVKAXG

SEQ ID NO: 19557 - protein, 36 aa, Artificial Sequence
  Non-cyclic GFR-binding peptide
  MOD_RES (1)..(33)..(35): Xaa is C or S
XAPTKLSPISVLYIDDSSNVIYKQYENMVVRSXGXH

SEQ ID NO: 19558 - protein, 34 aa, Artificial Sequence
  Non-cyclic GFR-binding peptide
  MOD_RES (3)..(4): Xaa is C or S
ASXXVPARLNAISILYFDAANNVVLKKYRDMVVE

SEQ ID NO: 19559 - protein, 33 aa, Artificial Sequence
  Non-cyclic GFR-binding peptide
  MOD_RES (1)..(32): Xaa is C or S
XVSQDLEPISILYLIGKTPKIKFKYEMIVKSXK

SEQ ID NO: 19560 - protein, 37 aa, Artificial Sequence
  Non-cyclic GFR-binding peptide
  MOD_RES (4)..(5): Xaa is C or S
GKAXXVPTKLEPISVLYLDDMGVPTKFKYEEGMSVAE

SEQ ID NO: 19561 - protein, 33 aa, Artificial Sequence
  Non-cyclic GFR-binding peptide
  MOD_RES (1)..(33): Xaa is C or S
XVPARLNAISILYFDAANNVVLKKYRDMVVEAX

SEQ ID NO: 19562 - protein, 41 aa, Artificial Sequence
  Non-cyclic GFR-binding peptide
  MOD_RES (6)..(7)..(39)..(41): Xaa is C or S
SIPKAXXVPTELEPISMLYLDEYDKVVKFKYEEMVVEGXGX

SEQ ID NO: 19563 - protein, 37 aa, Artificial Sequence
  Non-cyclic GFR-binding peptide
  MOD_RES (3)..(4): Xaa is C or S
  MOD_RES (18)..(19)..(20)..(21)..(22): Xaa is A or G
  MOD_RES (23)..(24)..(25)..(26): Xaa is A or G or absent
KAXXVPTKLSPISILYKXXXXXXXXXLKYHYGMAVSE

SEQ ID NO: 19564 - protein, 31 aa, Artificial Sequence
  Non-cyclic GFR-binding peptide
  MOD_RES (1)..(1): Xaa is C or S
XAPTKLSPISVLYIDSSNNVIYKQYENMVVK

SEQ ID NO: 19565 - protein, 38 aa, Artificial Sequence
  Non-cyclic GFR-binding peptide
  MOD_RES (1)..(2)..(36)..(38): Xaa is C or S
  MOD_RES (16)..(17)..(18)..(19)..(20): Xaa is A or G
  MOD_RES (21)..(22)..(23)..(24): Xaa is A or G or absent
XXAPTQLEPISVLYLXXXXXXXXXKFKYENMVVRAXGX

SEQ ID NO: 19566 - protein, 33 aa, Artificial Sequence
  Non-cyclic GFR-binding peptide
  MOD_RES (1)..(33): Xaa is C or S
XAPTKLSPISVLYIDSSNNVIYKQYENMVVKAX

SEQ ID NO: 19567 - protein, 36 aa, Artificial Sequence
  Non-cyclic GFR-binding peptide
  MOD_RES (1)..(2)..(36): Xaa is C or S
  MOD_RES (16)..(17)..(18)..(19)..(20): Xaa is A or G
  MOD_RES (21)..(22)..(23)..(24): Xaa is A or G or absent
XXVPTKLNAISILYFXXXXXXXXXLKKYRGMAVSEX

SEQ ID NO: 19568 - protein, 37 aa, Artificial Sequence
  Non-cyclic GFR-binding peptide
  MOD_RES (3)..(4): Xaa is C or S
  MOD_RES (18)..(19)..(20)..(21)..(22): Xaa is A or G
  MOD_RES (23)..(24)..(25)..(26): Xaa is A or G or absent
KPXXAPTKLEPISVLYLXXXXXXXXXKFKYENMVVRS

SEQ ID NO: 19569 - protein, 38 aa, Artificial Sequence
  Non-cyclic GFR-binding peptide
  MOD_RES (5)..(6): Xaa is C or S
  MOD_RES (20)..(21)..(22)..(23)..(24): Xaa is A or G
  MOD_RES (25)..(26)..(27)..(28): Xaa is A or G or absent
ASKAXXVPTKLSPISILYKXXXXXXXXXLKYHYGMAVS

SEQ ID NO: 19570 - protein, 41 aa, Artificial Sequence
  Non-cyclic GFR-binding peptide
  MOD_RES (5)..(6)..(40): Xaa is C or S
  MOD_RES (20)..(21)..(22)..(23)..(24): Xaa is A or G
  MOD_RES (25)..(26)..(27)..(28): Xaa is A or G or absent
VPKPXXAPTKLEPISVLYLXXXXXXXXXKFKYENMVVRSXG

SEQ ID NO: 19571 - protein, 41 aa, Artificial Sequence
  Non-cyclic GFR-binding peptide
  MOD_RES (5)..(6)..(39)..(41): Xaa is C or S
VGKAXXVPTKLSPISVLYIDDMGVPTYKQYEEGMSVAEXGX

SEQ ID NO: 19572 - protein, 41 aa, Artificial Sequence
  Non-cyclic GFR-binding peptide
  MOD_RES (3)..(4)..(38)..(40): Xaa is C or S
  MOD_RES (18)..(19)..(20)..(21)..(22): Xaa is A or G
  MOD_RES (23)..(24)..(25)..(26): Xaa is A or G or absent
KPXXAPTKLSPISVLYIXXXXXXXXXYKQYENMVVRSXGXH

SEQ ID NO: 19573 - protein, 34 aa, Artificial Sequence
  Non-cyclic GFR-binding peptide
  MOD_RES (1)..(2)..(33): Xaa is C or S
XXVSQDLEPISILYLIGKTPKIKFKYEMIVKSXK

SEQ ID NO: 19574 - protein, 39 aa, Artificial Sequence
  Non-cyclic GFR-binding peptide
  MOD_RES (5)..(6)..(39): Xaa is C or S
VGKAXXVPTKLEPISVLYLDDMGVPTKFKYEEGMSVAEX

SEQ ID NO: 19575 - protein, 36 aa, Artificial Sequence
  Non-cyclic GFR-binding peptide
  MOD_RES (3)..(4)..(36): Xaa is C or S
KPXXAPTQLEPISVLYLDDSSNVIKFKYENMVVRAX

SEQ ID NO: 19576 - protein, 30 aa, Artificial Sequence; identical to SEQ ID NO: 947
  Non-cyclic GFR-binding peptide

SEQ ID NO: 19577 - protein, 36 aa, Artificial Sequence
  Non-cyclic GFR-binding peptide
  MOD_RES (3)..(4)..(36): Xaa is C or S
KAXXVPTELSPISMLYIDENEKVVYKQYEDMVVEGX

SEQ ID NO: 19578 - protein, 37 aa, Artificial Sequence
  Non-cyclic GFR-binding peptide
  MOD_RES (2)..(3)..(35)..(37): Xaa is C or S
PXXAPTQLEPISVLYLDDSSNVIKFKYENMVVRAXGX

SEQ ID NO: 19579 - protein, 38 aa, Artificial Sequence
  Non-cyclic GFR-binding peptide
  MOD_RES (4)..(5)..(37): Xaa is C or S
SKAXXVPTKLSPISILYIDKGVVTYYKQYEGMAVSEXG

SEQ ID NO: 19580 - protein, 37 aa, Artificial Sequence
  Non-cyclic GFR-binding peptide
  MOD_RES (6)..(6): Xaa is C or S
VTKPTXAPTKLSPISVLYIDDSSNVIYKQYENMVVRS

SEQ ID NO: 19581 - protein, 36 aa, Artificial Sequence
  Non-cyclic GFR-binding peptide
  MOD_RES (1)..(2)..(35): Xaa is C or S
XXVPTKLSPISVLYIDDMGVPTYKQYEEGMSVAEXG

SEQ ID NO: 19582 - protein, 43 aa, Artificial Sequence
  Non-cyclic GFR-binding peptide
  MOD_RES (6)..(7)..(40)..(42): Xaa is C or S
  MOD_RES (21)..(22)..(23)..(24)..(25): Xaa is A or G
  MOD_RES (26)..(27)..(28)..(29): Xaa is A or G or absent
ASASPXXVPQDLEPISILYLXXXXXXXXXKFKYEMVVKSXKXS

SEQ ID NO: 19583 - protein, 40 aa, Artificial Sequence
  Non-cyclic GFR-binding peptide
  MOD_RES (5)..(6)..(39): Xaa is C or S
  MOD_RES (20)..(21)..(22)..(23)..(24): Xaa is A or G
  MOD_RES (25)..(26)..(27)..(28): Xaa is A or G or absent
SASPXXVSQDLSPISILYIXXXXXXXXXYKQYEMIVKSXK

SEQ ID NO: 19584 - protein, 41 aa, Artificial Sequence
  Non-cyclic GFR-binding peptide
  MOD_RES (6)..(7)..(40): Xaa is C or S
  MOD_RES (21)..(22)..(23)..(24)..(25): Xaa is A or G
  MOD_RES (26)..(27)..(28)..(29): Xaa is A or G or absent
ASASPXXVSQDLEPISILYLXXXXXXXXXKFKYEMIVKSXK

SEQ ID NO: 19585 - protein, 32 aa, Artificial Sequence
  Non-cyclic GFR-binding peptide
  MOD_RES (32)..(32): Xaa is C or S
VPTELSPISMLYIDENEKVVYKQYEDMVVEGX

SEQ ID NO: 19586 - protein, 40 aa, Artificial Sequence
  Non-cyclic GFR-binding peptide
  MOD_RES (4)..(5)..(38)..(40): Xaa is C or S
  MOD_RES (19)..(20)..(21)..(22)..(23): Xaa is A or G
  MOD_RES (24)..(25)..(26)..(27): Xaa is A or G or absent
ASPXXVSQDLEPISILYLXXXXXXXXXKFKYEMIVKSXKX

SEQ ID NO: 19587 - protein, 40 aa, Artificial Sequence
  Non-cyclic GFR-binding peptide
  MOD_RES (2)..(3)..(37)..(39): Xaa is C or S
  MOD_RES (17)..(18)..(19)..(20)..(21): Xaa is A or G
  MOD_RES (22)..(23)..(24)..(25): Xaa is A or G or absent
AXXAPTKLSPISVLYIXXXXXXXXXYKQYENMVVKAXGXH

SEQ ID NO: 19588 - protein, 35 aa, Artificial Sequence
  Non-cyclic GFR-binding peptide
  MOD_RES (1)..(35): Xaa is C or S
  MOD_RES (15)..(16)..(17)..(18)..(19): Xaa is A or G
  MOD_RES (20)..(21)..(22)..(23): Xaa is A or G or absent
XVPTELEPISMLYLXXXXXXXXXKFKYEEMVVEGX

SEQ ID NO: 19589 - protein, 38 aa, Artificial Sequence
  Non-cyclic GFR-binding peptide
  MOD_RES (2)..(3)..(37): Xaa is C or S
  MOD_RES (17)..(18)..(19)..(20)..(21): Xaa is A or G
  MOD_RES (22)..(23)..(24)..(25): Xaa is A or G or absent
AXXAPTKLEPISVLYLXXXXXXXXXKFKYENMVVKAXG

SEQ ID NO: 19590 - protein, 39 aa, Artificial Sequence
  Non-cyclic GFR-binding peptide
  MOD_RES (3)..(4)..(38): Xaa is C or S
  MOD_RES (18)..(19)..(20)..(21)..(22): Xaa is A or G
  MOD_RES (23)..(24)..(25)..(26): Xaa is A or G or absent
KPXXAPTKLEPISVLYLXXXXXXXXXKFKYENMVVRSXG

SEQ ID NO: 19591 - protein, 36 aa, Artificial Sequence
  Non-cyclic GFR-binding peptide
  MOD_RES (1)..(33)..(35): Xaa is C or S
XVPTELSPISMLYIDEYDKVVYKQYEEMVVEGXGXR

SEQ ID NO: 19592 - protein, 37 aa, Artificial Sequence
  Non-cyclic GFR-binding peptide
  MOD_RES (5)..(37): Xaa is C or S
TKPTXAPTKLSPISVLYIDDSSNVIYKQYENMVVRSX

SEQ ID NO: 19593 - protein, 42 aa, Artificial Sequence
  Non-cyclic GFR-binding peptide
  MOD_RES (6)..(7)..(40)..(42): Xaa is C or S
  MOD_RES (21)..(22)..(23)..(24)..(25): Xaa is A or G
  MOD_RES (26)..(27)..(28)..(29): Xaa is A or G or absent
ASASPXXVPQDLEPISILYLXXXXXXXXXKFKYEMVVKSXKX

SEQ ID NO: 19594 - protein, 37 aa, Artificial Sequence
  Non-cyclic GFR-binding peptide
  MOD_RES (5)..(6): Xaa is C or S
VPKPXXAPTKLEPISVLYLDDSSNVIKFKYENMVVRS

SEQ ID NO: 19595 - protein, 35 aa, Artificial Sequence
  Non-cyclic GFR-binding peptide
  MOD_RES (32)..(34): Xaa is C or S
VPTKLNAISILYFDKGVVTYLKKYRGMAVSEXGXR

SEQ ID NO: 19596 - protein, 32 aa, Artificial Sequence
  Non-cyclic GFR-binding peptide
  MOD_RES (1)..(2): Xaa is C or S
XXVPARLNAISILYFDAANNVVLKKYRDMVVE

SEQ ID NO: 19597 - protein, 39 aa, Artificial Sequence
  Non-cyclic GFR-binding peptide
  MOD_RES (4)..(5)..(37)..(39): Xaa is C or S
PKAXXAPTKLSPISVLYIDSSNNVIYKQYENMVVKAXGX

SEQ ID NO: 19598 - protein, 37 aa, Artificial Sequence
  Non-cyclic GFR-binding peptide
  MOD_RES (6)..(7): Xaa is C or S
AAPASXXVPARLNAISILYFDAANNVVLKKYRDMVVE

SEQ ID NO: 19599 - protein, 41 aa, Artificial Sequence
  Non-cyclic GFR-binding peptide
  MOD_RES (5)..(6)..(39)..(41): Xaa is C or S
  MOD_RES (20)..(21)..(22)..(23)..(24): Xaa is A or G
  MOD_RES (25)..(26)..(27)..(28): Xaa is A or G or absent
SASPXXVSQDLSPISILYIXXXXXXXXXYKQYEMIVKSXKX

SEQ ID NO: 19600 - protein, 37 aa, Artificial Sequence
  Non-cyclic GFR-binding peptide
  MOD_RES (2)..(3)..(35)..(37): Xaa is C or S
AXXVPTKLNAISILYFDKGVVTYLKKYRGMAVSEXGX

SEQ ID NO: 19601 - protein, 33 aa, Artificial Sequence
  Non-cyclic GFR-binding peptide
  MOD_RES (3)..(3): Xaa is C or S
PTXAPTKLEPISVLYLDDSSNVIKFKYENMVVR

SEQ ID NO: 19602 - protein, 39 aa, Artificial Sequence
  Non-cyclic GFR-binding peptide
  MOD_RES (2)..(3)..(37)..(39): Xaa is C or S
  MOD_RES (17)..(18)..(19)..(20)..(21): Xaa is A or G
  MOD_RES (22)..(23)..(24)..(25): Xaa is A or G or absent
AXXAPTKLEPISVLYLXXXXXXXXXKFKYENMVVKAXGX

SEQ ID NO: 19603 - protein, 36 aa, Artificial Sequence
  Non-cyclic GFR-binding peptide
  MOD_RES (1)..(35): Xaa is C or S
  MOD_RES (15)..(16)..(17)..(18)..(19): Xaa is A or G
  MOD_RES (20)..(21)..(22)..(23): Xaa is A or G or absent
XVPARLNAISILYFXXXXXXXXXLKKYRDMVVEAXG

SEQ ID NO: 19604 - protein, 34 aa, Artificial Sequence
  Non-cyclic GFR-binding peptide
  MOD_RES (32)..(34): Xaa is C or S
VPTELEPISMLYLDENEKVVKFKYEDMVVEGXGX

SEQ ID NO: 19605 - protein, 33 aa, Artificial Sequence
  Non-cyclic GFR-binding peptide
  MOD_RES (1)..(2): Xaa is C or S
XXVPTKLNAISILYFDKGVVTYLKKYRGMAVSE

SEQ ID NO: 19606 - protein, 37 aa, Artificial Sequence
  Non-cyclic GFR-binding peptide
  MOD_RES (1)..(35)..(37): Xaa is C or S
  MOD_RES (15)..(16)..(17)..(18)..(19): Xaa is A or G
  MOD_RES (20)..(21)..(22)..(23): Xaa is A or G or absent
XVPTELEPISMLYLXXXXXXXXXKFKYEEMVVEGXGX

SEQ ID NO: 19607 - protein, 41 aa, Artificial Sequence
  Non-cyclic GFR-binding peptide
  MOD_RES (5)..(6)..(40): Xaa is C or S
  MOD_RES (20)..(21)..(22)..(23)..(24): Xaa is A or G
  MOD_RES (25)..(26)..(27)..(28): Xaa is A or G or absent
VPKAXXAPTKLEPISVLYLXXXXXXXXXKFKYENMVVKAXG

SEQ ID NO: 19608 - protein, 36 aa, Artificial Sequence
  Non-cyclic GFR-binding peptide
  MOD_RES (1)..(2)..(33)..(35): Xaa is C or S
XXVPQALSPISILYIVGRKPKVYKQYEMIVRSXKXS

SEQ ID NO: 19609 - protein, 35 aa, Artificial Sequence
  Non-cyclic GFR-binding peptide
  MOD_RES (1)..(32)..(34): Xaa is C or S
XVSQDLEPISILYLIGKTPKIKFKYEMIVKSXKXS

SEQ ID NO: 19610 - protein, 41 aa, Artificial Sequence
  Non-cyclic GFR-binding peptide
  MOD_RES (5)..(6)..(40): Xaa is C or S
  MOD_RES (20)..(21)..(22)..(23)..(24): Xaa is A or G
  MOD_RES (25)..(26)..(27)..(28): Xaa is A or G or absent
IPKAXXVPTELEPISMLYLXXXXXXXXXKFKYEEMVVEGXG

SEQ ID NO: 19611 - protein, 43 aa, Artificial Sequence
  Non-cyclic GFR-binding peptide
  MOD_RES (6)..(7)..(41)..(43): Xaa is C or S
  MOD_RES (21)..(22)..(23)..(24)..(25): Xaa is A or G
  MOD_RES (26)..(27)..(28)..(29): Xaa is A or G or absent
AVPKAXXAPTKLSPISVLYIXXXXXXXXXYKQYENMVVKAXGX

SEQ ID NO: 19612 - protein, 39 aa, Artificial Sequence
  Non-cyclic GFR-binding peptide
  MOD_RES (1)..(2)..(36)..(38): Xaa is C or S
  MOD_RES (16)..(17)..(18)..(19)..(20): Xaa is A or G
  MOD_RES (21)..(22)..(23)..(24): Xaa is A or G or absent
XXVPTKLNAISILYFXXXXXXXXXLKKYRGMAVSEXGXR

SEQ ID NO: 19613 - protein, 38 aa, Artificial Sequence
  Non-cyclic GFR-binding peptide
  MOD_RES (2)..(3)..(35)..(37): Xaa is C or S
PXXAPTQLEPISVLYLDDSSNVIKFKYENMVVRAXGXH

SEQ ID NO: 19614 - protein, 32 aa, Artificial Sequence
  Non-cyclic GFR-binding peptide
  MOD_RES (14)..(15)..(16)..(17)..(18): Xaa is A or G
  MOD_RES (19)..(20)..(21)..(22): Xaa is A or G or absent
VPARLEPISILYLXXXXXXXXXKFKYEDMVVE

SEQ ID NO: 19615 - protein, 38 aa, Artificial Sequence
  Non-cyclic GFR-binding peptide
  MOD_RES (3)..(4)..(36)..(38): Xaa is C or S
KAXXAPTKLSPISVLYIDSSNNVIYKQYENMVVKAXGX

SEQ ID NO: 19616 - protein, 39 aa, Artificial Sequence
  Non-cyclic GFR-binding peptide
  MOD_RES (6)..(7)..(38): Xaa is C or S
ASAAPXXVPQALEPISILYLVGRKPKVKFKYEMIVRSXK

SEQ ID NO: 19617 - protein, 33 aa, Artificial Sequence
  Non-cyclic GFR-binding peptide
  MOD_RES (2)..(3): Xaa is C or S
AXXVPTELEPISMLYLDEYDKVVKFKYEEMVVE

SEQ ID NO: 19618 - protein, 35 aa, Artificial Sequence
  Non-cyclic GFR-binding peptide
  MOD_RES (1)..(2): Xaa is C or S
  MOD_RES (16)..(17)..(18)..(19)..(20): Xaa is A or G
  MOD_RES (21)..(22)..(23)..(24): Xaa is A or G or absent
XXAPTKLSPISVLYIXXXXXXXXXYKQYENMVVKA

SEQ ID NO: 19619 - protein, 38 aa, Artificial Sequence
  Non-cyclic GFR-binding peptide
  MOD_RES (1)..(2)..(36)..(38): Xaa is C or S
  MOD_RES (16)..(17)..(18)..(19)..(20): Xaa is A or G
  MOD_RES (21)..(22)..(23)..(24): Xaa is A or G or absent
XXAPTQLSPISVLYIXXXXXXXXXYKQYENMVVRAXGX

SEQ ID NO: 19620 - protein, 36 aa, Artificial Sequence
  Non-cyclic GFR-binding peptide
  MOD_RES (1)..(33)..(35): Xaa is C or S
XVPTKLNAISILYFDKGVVTYLKKYRGMAVSEXGXR

SEQ ID NO: 19621 - protein, 38 aa, Artificial Sequence
  Non-cyclic GFR-binding peptide
  MOD_RES (5)..(6): Xaa is C or S
  MOD_RES (20)..(21)..(22)..(23)..(24): Xaa is A or G
  MOD_RES (25)..(26)..(27)..(28): Xaa is A or G or absent
APASXXVPARLNAISILYFXXXXXXXXXLKKYRDMVVE

SEQ ID NO: 19622 - protein, 43 aa, Artificial Sequence
  Non-cyclic GFR-binding peptide
  MOD_RES (4)..(5)..(40)..(42): Xaa is C or S
  MOD_RES (19)..(20)..(21)..(22)..(23): Xaa is A or G
  MOD_RES (24)..(25)..(26)..(27): Xaa is A or G or absent
GKAXXVPTKLEPISVLYLXXXXXXXXXKFKYEEGMSVAEXGXR

SEQ ID NO: 19623 - protein, 38 aa, Artificial Sequence
  Non-cyclic GFR-binding peptide
  MOD_RES (6)..(7): Xaa is C or S
SIPKAXXVPTELEPISMLYLDEYDKVVKFKYEEMVVEG

SEQ ID NO: 19624 - protein, 35 aa, Artificial Sequence
  Non-cyclic GFR-binding peptide
  MOD_RES (1)..(2): Xaa is C or S
  MOD_RES (16)..(17)..(18)..(19)..(20): Xaa is A or G
  MOD_RES (21)..(22)..(23)..(24): Xaa is A or G or absent
XXAPTKLSPISVLYIXXXXXXXXXYKQYENMVVRS

SEQ ID NO: 19625 - protein, 42 aa, Artificial Sequence
  Non-cyclic GFR-binding peptide
  MOD_RES (4)..(5)..(39)..(41): Xaa is C or S
  MOD_RES (19)..(20)..(21)..(22)..(23): Xaa is A or G
  MOD_RES (24)..(25)..(26)..(27): Xaa is A or G or absent
SKAXXVPTKLSPISILYIXXXXXXXXXYKQYEGMAVSEXGXR

SEQ ID NO: 19626 - protein, 38 aa, Artificial Sequence
  Non-cyclic GFR-binding peptide
  MOD_RES (4)..(5)..(37): Xaa is C or S
PKPXXAPTQLEPISVLYLDDSSNVIKFKYENMVVRAXG

SEQ ID NO: 19627 - protein, 40 aa, Artificial Sequence
  Non-cyclic GFR-binding peptide
  MOD_RES (5)..(6)..(39): Xaa is C or S
  MOD_RES (20)..(21)..(22)..(23)..(24): Xaa is A or G
  MOD_RES (25)..(26)..(27)..(28): Xaa is A or G or absent
SASPXXVSQDLEPISILYLXXXXXXXXXKFKYEMIVKSXK

SEQ ID NO: 19628 - protein, 33 aa, Artificial Sequence
  Non-cyclic GFR-binding peptide
  MOD_RES (32)..(32): Xaa is C or S
APTQLEPISVLYLDDSSNVIKFKYENMVVRAXG

SEQ ID NO: 19629 - protein, 36 aa, Artificial Sequence
  Non-cyclic GFR-binding peptide
  MOD_RES (2)..(3)..(36): Xaa is C or S
AXXVPTKLSPISVLYIDDMGVPTYKQYEEGMSVAEX

SEQ ID NO: 19630 - protein, 38 aa, Artificial Sequence
  Non-cyclic GFR-binding peptide
  MOD_RES (5)..(6)..(38): Xaa is C or S
VPKPXXAPTKLSPISVLYIDDSSNVIYKQYENMVVRSX

SEQ ID NO: 19631 - protein, 41 aa, Artificial Sequence
  Non-cyclic GFR-binding peptide
  MOD_RES (3)..(4)..(38)..(40): Xaa is C or S
  MOD_RES (18)..(19)..(20)..(21)..(22): Xaa is A or G
  MOD_RES (23)..(24)..(25)..(26): Xaa is A or G or absent
KAXXAPTKLEPISVLYLXXXXXXXXXKFKYENMVVKAXGXH

SEQ ID NO: 19632 - protein, 40 aa, Artificial Sequence
  Non-cyclic GFR-binding peptide
  MOD_RES (3)..(37)..(39): Xaa is C or S
  MOD_RES (17)..(18)..(19)..(20)..(21): Xaa is A or G
  MOD_RES (22)..(23)..(24)..(25): Xaa is A or G or absent
PTXAPTKLEPISVLYLXXXXXXXXXKFKYENMVVRSXGXH

SEQ ID NO: 19633 - protein, 35 aa, Artificial Sequence
  Non-cyclic GFR-binding peptide
  MOD_RES (2)..(3): Xaa is C or S
  MOD_RES (17)..(18)..(19)..(20)..(21): Xaa is A or G
  MOD_RES (22)..(23)..(24)..(25): Xaa is A or G or absent
PXXAPTKLEPISVLYLXXXXXXXXXKFKYENMVVR

SEQ ID NO: 19634 - protein, 33 aa, Artificial Sequence
  Non-cyclic GFR-binding peptide
  MOD_RES (1)..(2): Xaa is C or S
XXAPTQLSPISVLYIDDSSNVIYKQYENMVVRA

SEQ ID NO: 19635 - protein, 34 aa, Artificial Sequence
  Non-cyclic GFR-binding peptide
  MOD_RES (32)..(34): Xaa is C or S
VPARLEPISILYLDAANNVVKFKYEDMVVEAXGX

SEQ ID NO: 19636 - protein, 32 aa, Artificial Sequence
  Non-cyclic GFR-binding peptide
  MOD_RES (1)..(1): Xaa is C or S
XVPTELEPISMLYLDEYDKVVKFKYEEMVVEG

SEQ ID NO: 19637 - protein, 42 aa, Artificial Sequence
  Non-cyclic GFR-binding peptide
  MOD_RES (6)..(7)..(41): Xaa is C or S
  MOD_RES (21)..(22)..(23)..(24)..(25): Xaa is A or G
  MOD_RES (26)..(27)..(28)..(29): Xaa is A or G or absent
AVPKAXXAPTKLEPISVLYLXXXXXXXXXKFKYENMVVKAXG

SEQ ID NO: 19638 - protein, 42 aa, Artificial Sequence
  Non-cyclic GFR-binding peptide
  MOD_RES (5)..(39)..(41): Xaa is C or S
  MOD_RES (19)..(20)..(21)..(22)..(23): Xaa is A or G
  MOD_RES (24)..(25)..(26)..(27): Xaa is A or G or absent
TKPTXAPTKLSPISVLYIXXXXXXXXXYKQYENMVVRSXGXH

SEQ ID NO: 19639 - protein, 30 aa, Artificial Sequence; identical to SEQ ID NO: 953
  Non-cyclic GFR-binding peptide

SEQ ID NO: 19640 - protein, 38 aa, Artificial Sequence
  Non-cyclic GFR-binding peptide
  MOD_RES (1)..(35)..(37): Xaa is C or S
  MOD_RES (15)..(16)..(17)..(18)..(19): Xaa is A or G
  MOD_RES (20)..(21)..(22)..(23): Xaa is A or G or absent
XVPTELEPISMLYLXXXXXXXXXKFKYEEMVVEGXGXR

SEQ ID NO: 19641 - protein, 39 aa, Artificial Sequence
  Non-cyclic GFR-binding peptide
  MOD_RES (6)..(7): Xaa is C or S
  MOD_RES (21)..(22)..(23)..(24)..(25): Xaa is A or G
  MOD_RES (26)..(27)..(28)..(29): Xaa is A or G or absent
ASASPXXVPQDLSPISILYIXXXXXXXXXYKQYEMVVKS

SEQ ID NO: 19642 - protein, 40 aa, Artificial Sequence
  Non-cyclic GFR-binding peptide
  MOD_RES (4)..(5)..(38)..(40): Xaa is C or S
GKAXXVPTKLSPISVLYIDDMGVPTYKQYEEGMSVAEXGX

SEQ ID NO: 19643 - protein, 38 aa, Artificial Sequence
  Non-cyclic GFR-binding peptide
  MOD_RES (4)..(5)..(36)..(38): Xaa is C or S
ASPXXVSQDLSPISILYIIGKTPKIYKQYEMIVKSXKX

SEQ ID NO: 19644 - protein, 34 aa, Artificial Sequence
  Non-cyclic GFR-binding peptide
  MOD_RES (1)..(34): Xaa is C or S
  MOD_RES (15)..(16)..(17)..(18)..(19): Xaa is A or G
  MOD_RES (20)..(21)..(22)..(23): Xaa is A or G or absent
XVSQDLEPISILYLXXXXXXXXXKFKYEMIVKSX

SEQ ID NO: 19645 - protein, 36 aa, Artificial Sequence
  Non-cyclic GFR-binding peptide
  MOD_RES (2)..(3): Xaa is C or S
  MOD_RES (17)..(18)..(19)..(20)..(21): Xaa is A or G
  MOD_RES (22)..(23)..(24)..(25): Xaa is A or G or absent
PXXAPTKLSPISVLYIXXXXXXXXXYKQYENMVVRS

SEQ ID NO: 19646 - protein, 34 aa, Artificial Sequence
  Non-cyclic GFR-binding peptide
  MOD_RES (31)..(33): Xaa is C or S
VSQDLSPISILYIIGKTPKIYKQYEMIVKSXKXS

SEQ ID NO: 19647 - protein, 39 aa, Artificial Sequence
  Non-cyclic GFR-binding peptide
  MOD_RES (3)..(4)..(38): Xaa is C or S
  MOD_RES (18)..(19)..(20)..(21)..(22): Xaa is A or G
  MOD_RES (23)..(24)..(25)..(26): Xaa is A or G or absent
KAXXVPTKLNAISILYFXXXXXXXXXLKKYRGMAVSEXG

SEQ ID NO: 19648 - protein, 37 aa, Artificial Sequence
  Non-cyclic GFR-binding peptide
  MOD_RES (3)..(4)..(37): Xaa is C or S
  MOD_RES (18)..(19)..(20)..(21)..(22): Xaa is A or G
  MOD_RES (23)..(24)..(25)..(26): Xaa is A or G or absent
SPXXVPQDLEPISILYLXXXXXXXXXKFKYEMVVKSX

SEQ ID NO: 19649 - protein, 37 aa, Artificial Sequence
  Non-cyclic GFR-binding peptide
  MOD_RES (2)..(3): Xaa is C or S
  MOD_RES (17)..(18)..(19)..(20)..(21): Xaa is A or G
  MOD_RES (22)..(23)..(24)..(25): Xaa is A or G or absent
AXXVPTKLSPISVLYIXXXXXXXXXYKQYEEGMSVAE

SEQ ID NO: 19650 - protein, 36 aa, Artificial Sequence
  Non-cyclic GFR-binding peptide
  MOD_RES (1)..(34)..(36): Xaa is C or S
  MOD_RES (15)..(16)..(17)..(18)..(19): Xaa is A or G
  MOD_RES (20)..(21)..(22)..(23): Xaa is A or G or absent
XVPQDLSPISILYIXXXXXXXXXYKQYEMVVKSXKX

SEQ ID NO: 19651 - protein, 40 aa, Artificial Sequence
  Non-cyclic GFR-binding peptide
  MOD_RES (4)..(5)..(39): Xaa is C or S
  MOD_RES (19)..(20)..(21)..(22)..(23): Xaa is A or G
  MOD_RES (24)..(25)..(26)..(27): Xaa is A or G or absent
PKAXXVPTELEPISMLYLXXXXXXXXXKFKYEEMVVEGXG

SEQ ID NO: 19652 - protein, 37 aa, Artificial Sequence
  Non-cyclic GFR-binding peptide
  MOD_RES (34)..(36): Xaa is C or S
  MOD_RES (14)..(15)..(16)..(17)..(18): Xaa is A or G
  MOD_RES (19)..(20)..(21)..(22): Xaa is A or G or absent
VPARLEPISILYLXXXXXXXXXKFKYEDMVVEAXGXR

SEQ ID NO: 19653 - protein, 41 aa, Artificial Sequence
  Non-cyclic GFR-binding peptide
  MOD_RES (6)..(7)..(39)..(41): Xaa is C or S
AAPASXXVPARLEPISILYLDAANNVVKFKYEDMVVEAXGX

SEQ ID NO: 19654 - protein, 40 aa, Artificial Sequence
  Non-cyclic GFR-binding peptide
  MOD_RES (5)..(6)..(40): Xaa is C or S
  MOD_RES (20)..(21)..(22)..(23)..(24): Xaa is A or G
  MOD_RES (25)..(26)..(27)..(28): Xaa is A or G or absent
VPKPXXAPTQLEPISVLYLXXXXXXXXXKFKYENMVVRAX

SEQ ID NO: 19655 - protein, 38 aa, Artificial Sequence
  Non-cyclic GFR-binding peptide
  MOD_RES (5)..(6)..(38): Xaa is C or S
VPKPXXAPTKLEPISVLYLDDSSNVIKFKYENMVVRSX

SEQ ID NO: 19656 - protein, 34 aa, Artificial Sequence
  Non-cyclic GFR-binding peptide
  MOD_RES (32)..(34): Xaa is C or S
APTKLEPISVLYLDDSSNVIKFKYENMVVRSXGX

SEQ ID NO: 19657 - protein, 32 aa, Artificial Sequence
  Non-cyclic GFR-binding peptide
  MOD_RES (1)..(2): Xaa is C or S
XXAPTQLSPISVLYIDDSSNVIYKQYENMVVR

SEQ ID NO: 19658 - protein, 32 aa, Artificial Sequence
  Non-cyclic GFR-binding peptide
  MOD_RES (1)..(1): Xaa is C or S
XAPTQLSPISVLYIDDSSNVIYKQYENMVVRA

SEQ ID NO: 19659 - protein, 38 aa, Artificial Sequence
  Non-cyclic GFR-binding peptide
  MOD_RES (3)..(37): Xaa is C or S
  MOD_RES (17)..(18)..(19)..(20)..(21): Xaa is A or G
  MOD_RES (22)..(23)..(24)..(25): Xaa is A or G or absent
PTXAPTKLEPISVLYLXXXXXXXXXKFKYENMVVRSXG

SEQ ID NO: 19660 - protein, 39 aa, Artificial Sequence
  Non-cyclic GFR-binding peptide
  MOD_RES (5)..(6)..(38): Xaa is C or S
IPKAXXVPTELSPISMLYIDEYDKVVYKQYEEMVVEGXG

SEQ ID NO: 19661 - protein, 31 aa, Artificial Sequence
  Non-cyclic GFR-binding peptide
VPTELSPISMLYIDEYDKVVYKQYEEMVVEG

SEQ ID NO: 19662 - protein, 35 aa, Artificial Sequence
  Non-cyclic GFR-binding peptide
  MOD_RES (32)..(34): Xaa is C or S
APTKLEPISVLYLDSSNNVIKFKYENMVVKAXGXH

SEQ ID NO: 19663 - protein, 36 aa, Artificial Sequence
  Non-cyclic GFR-binding peptide
  MOD_RES (34)..(36): Xaa is C or S
  MOD_RES (14)..(15)..(16)..(17)..(18): Xaa is A or G
  MOD_RES (19)..(20)..(21)..(22): Xaa is A or G or absent
VPARLNAISILYFXXXXXXXXXLKKYRDMVVEAXGX

SEQ ID NO: 19664 - protein, 40 aa, Artificial Sequence
  Non-cyclic GFR-binding peptide
  MOD_RES (2)..(3)..(37)..(39): Xaa is C or S
  MOD_RES (17)..(18)..(19)..(20)..(21): Xaa is A or G
  MOD_RES (22)..(23)..(24)..(25): Xaa is A or G or absent
AXXVPTELEPISMLYLXXXXXXXXXKFKYEEMVVEGXGXR

SEQ ID NO: 19665 - protein, 38 aa, Artificial Sequence
  Non-cyclic GFR-binding peptide
  MOD_RES (5)..(6)..(38): Xaa is C or S
APASXXVPARLNAISILYFDAANNVVLKKYRDMVVEAX

SEQ ID NO: 19666 - protein, 35 aa, Artificial Sequence
  Non-cyclic GFR-binding peptide
  MOD_RES (1)..(2): Xaa is C or S
  MOD_RES (16)..(17)..(18)..(19)..(20): Xaa is A or G
  MOD_RES (21)..(22)..(23)..(24): Xaa is A or G or absent
XXVPARLEPISILYLXXXXXXXXXKFKYEDMVVEA

SEQ ID NO: 19667 - protein, 37 aa, Artificial Sequence
  Non-cyclic GFR-binding peptide
  MOD_RES (3)..(4)..(36): Xaa is C or S
KAXXVPTKLSPISILYIDKGVVTYYKQYEGMAVSEXG

SEQ ID NO: 19668 - protein, 36 aa, Artificial Sequence
  Non-cyclic GFR-binding peptide
  MOD_RES (2)..(34)..(36): Xaa is C or S
TXAPTKLEPISVLYLDDSSNVIKFKYENMVVRSXGX

SEQ ID NO: 19669 - protein, 40 aa, Artificial Sequence
  Non-cyclic GFR-binding peptide
  MOD_RES (5)..(6)..(40): Xaa is C or S
  MOD_RES (20)..(21)..(22)..(23)..(24): Xaa is A or G
  MOD_RES (25)..(26)..(27)..(28): Xaa is A or G or absent
ASKAXXVPTKLSPISILYKXXXXXXXXXLKYHYGMAVSEX

SEQ ID NO: 19670 - protein, 38 aa, Artificial Sequence
  Non-cyclic GFR-binding peptide
  MOD_RES (1)..(2)..(36)..(38): Xaa is C or S
  MOD_RES (16)..(17)..(18)..(19)..(20): Xaa is A or G
  MOD_RES (21)..(22)..(23)..(24): Xaa is A or G or absent
XXVPTELSPISMLYIXXXXXXXXXYKQYEEMVVEGXGX

SEQ ID NO: 19671 - protein, 39 aa, Artificial Sequence
  Non-cyclic GFR-binding peptide
  MOD_RES (6)..(7): Xaa is C or S
  MOD_RES (21)..(22)..(23)..(24)..(25): Xaa is A or G
  MOD_RES (26)..(27)..(28)..(29): Xaa is A or G or absent
YVPKPXXAPTKLEPISVLYLXXXXXXXXXKFKYENMVVR

SEQ ID NO: 19672 - protein, 30 aa, Artificial Sequence
  Non-cyclic GFR-binding peptide
APTQLEPISVLYLDDSSNVIKFKYENMVVR

SEQ ID NO: 19673 - protein, 31 aa, Artificial Sequence
  Non-cyclic GFR-binding peptide
VPTELEPISMLYLDEYDKVVKFKYEEMVVEG

SEQ ID NO: 19674 - protein, 37 aa, Artificial Sequence
  Non-cyclic GFR-binding peptide
  MOD_RES (2)..(3)..(37): Xaa is C or S
  MOD_RES (17)..(18)..(19)..(20)..(21): Xaa is A or G
  MOD_RES (22)..(23)..(24)..(25): Xaa is A or G or absent
AXXAPTKLEPISVLYLXXXXXXXXXKFKYENMVVKAX

SEQ ID NO: 19675 - protein, 35 aa, Artificial Sequence
  Non-cyclic GFR-binding peptide
  MOD_RES (32)..(34): Xaa is C or S
APTQLEPISVLYLDDSSNVIKFKYENMVVRAXGXH

SEQ ID NO: 19676 - protein, 41 aa, Artificial Sequence
  Non-cyclic GFR-binding peptide
  MOD_RES (5)..(6)..(38)..(40): Xaa is C or S
APASXXVPARLNAISILYFDAANNVVLKKYRDMVVEAXGXR

SEQ ID NO: 19677 - protein, 31 aa, Artificial Sequence
  Non-cyclic GFR-binding peptide
  MOD_RES (1)..(1): Xaa is C or S
XVPTKLSPISILYIDKGVVTYYKQYEGMAVS

SEQ ID NO: 19678 - protein, 33 aa, Artificial Sequence
  Non-cyclic GFR-binding peptide
  MOD_RES (1)..(1): Xaa is C or S
  MOD_RES (15)..(16)..(17)..(18)..(19): Xaa is A or G
  MOD_RES (20)..(21)..(22)..(23): Xaa is A or G or absent
XAPTQLEPISVLYLXXXXXXXXXKFKYENMVVR

SEQ ID NO: 19679 - protein, 35 aa, Artificial Sequence
  Non-cyclic GFR-binding peptide
  MOD_RES (1)..(2)..(33)..(35): Xaa is C or S
XXVPQDLSPISILYIVGRTPKVYKQYEMVVKSXKX

SEQ ID NO: 19680 - protein, 36 aa, Artificial Sequence
  Non-cyclic GFR-binding peptide
  MOD_RES (3)..(4)..(35): Xaa is C or S
APXXVPQALEPISILYLVGRKPKVKFKYEMIVRSXK

SEQ ID NO: 19681 - protein, 44 aa, Artificial Sequence
  Non-cyclic GFR-binding peptide
  MOD_RES (6)..(7)..(41)..(43): Xaa is C or S
  MOD_RES (21)..(22)..(23)..(24)..(25): Xaa is A or G
  MOD_RES (26)..(27)..(28)..(29): Xaa is A or G or absent
SIPKAXXVPTELEPISMLYLXXXXXXXXXKFKYEEMVVEGXGXR

SEQ ID NO: 19682 - protein, 39 aa, Artificial Sequence
  Non-cyclic GFR-binding peptide
  MOD_RES (6)..(7)..(39): Xaa is C or S
SIPKAXXVPTELSPISMLYIDEYDKVVYKQYEEMVVEGX

SEQ ID NO: 19683 - protein, 38 aa, Artificial Sequence
  Non-cyclic GFR-binding peptide
  MOD_RES (2)..(3)..(37): Xaa is C or S
  MOD_RES (17)..(18)..(19)..(20)..(21): Xaa is A or G
  MOD_RES (22)..(23)..(24)..(25): Xaa is A or G or absent
SXXVPARLSPISILYKXXXXXXXXXLKYHYDMVVEAXG

SEQ ID NO: 19684 - protein, 37 aa, Artificial Sequence
  Non-cyclic GFR-binding peptide
  MOD_RES (2)..(36): Xaa is C or S
  MOD_RES (16)..(17)..(18)..(19)..(20): Xaa is A or G
  MOD_RES (21)..(22)..(23)..(24): Xaa is A or G or absent
TXAPTKLSPISVLYIXXXXXXXXXYKQYENMVVRSXG

SEQ ID NO: 19685 - protein, 39 aa, Artificial Sequence
  Non-cyclic GFR-binding peptide
  MOD_RES (3)..(37)..(39): Xaa is C or S
  MOD_RES (17)..(18)..(19)..(20)..(21): Xaa is A or G
  MOD_RES (22)..(23)..(24)..(25): Xaa is A or G or absent
PTXAPTKLEPISVLYLXXXXXXXXXKFKYENMVVRSXGX

SEQ ID NO: 19686 - protein, 41 aa, Artificial Sequence
  Non-cyclic GFR-binding peptide
  MOD_RES (4)..(5)..(39)..(41): Xaa is C or S
  MOD_RES (19)..(20)..(21)..(22)..(23): Xaa is A or G
  MOD_RES (24)..(25)..(26)..(27): Xaa is A or G or absent
PKAXXAPTKLSPISVLYIXXXXXXXXXYKQYENMVVKAXGX

SEQ ID NO: 19687 - protein, 35 aa, Artificial Sequence
  Non-cyclic GFR-binding peptide
  MOD_RES (32)..(34): Xaa is C or S
VPTELSPISMLYIDEYDKVVYKQYEEMVVEGXGXR

SEQ ID NO: 19688 - protein, 33 aa, Artificial Sequence
  Non-cyclic GFR-binding peptide
  MOD_RES (1)..(1): Xaa is C or S
XVPTKLSPISVLYIDDMGVPTYKQYEEGMSVAE

SEQ ID NO: 19689 - protein, 34 aa, Artificial Sequence
  Non-cyclic GFR-binding peptide
  MOD_RES (1)..(1): Xaa is C or S
  MOD_RES (15)..(16)..(17)..(18)..(19): Xaa is A or G
  MOD_RES (20)..(21)..(22)..(23): Xaa is A or G or absent
XVPTKLSPISILYKXXXXXXXXXLKYHYGMAVSE

SEQ ID NO: 19690 - protein, 39 aa, Artificial Sequence
  Non-cyclic GFR-binding peptide
  MOD_RES (2)..(36)..(38): Xaa is C or S
  MOD_RES (16)..(17)..(18)..(19)..(20): Xaa is A or G
  MOD_RES (21)..(22)..(23)..(24): Xaa is A or G or absent
TXAPTKLEPISVLYLXXXXXXXXXKFKYENMVVRSXGXH

SEQ ID NO: 19691 - protein, 33 aa, Artificial Sequence
  Non-cyclic GFR-binding peptide
  MOD_RES (1)..(2): Xaa is C or S
XXAPTQLEPISVLYLDDSSNVIKFKYENMVVRA

SEQ ID NO: 19692 - protein, 33 aa, Artificial Sequence
  Non-cyclic GFR-binding peptide
  MOD_RES (2)..(3): Xaa is C or S
PXXAPTQLSPISVLYIDDSSNVIYKQYENMVVR

SEQ ID NO: 19693 - protein, 38 aa, Artificial Sequence
  Non-cyclic GFR-binding peptide
  MOD_RES (6)..(7): Xaa is C or S
AVPKAXXAPTKLEPISVLYLDSSNNVIKFKYENMVVKA

SEQ ID NO: 19694 - protein, 34 aa, Artificial Sequence
  Non-cyclic GFR-binding peptide
  MOD_RES (1)..(34): Xaa is C or S
  MOD_RES (15)..(16)..(17)..(18)..(19): Xaa is A or G
  MOD_RES (20)..(21)..(22)..(23): Xaa is A or G or absent
XVSQDLSPISILYIXXXXXXXXXYKQYEMIVKSX

SEQ ID NO: 19695 - protein, 34 aa, Artificial Sequence
  Non-cyclic GFR-binding peptide
  MOD_RES (34)..(34): Xaa is C or S
  MOD_RES (14)..(15)..(16)..(17)..(18): Xaa is A or G
  MOD_RES (19)..(20)..(21)..(22): Xaa is A or G or absent
VPARLEPISILYLXXXXXXXXXKFKYEDMVVEAX

SEQ ID NO: 19696 - protein, 36 aa, Artificial Sequence
  Non-cyclic GFR-binding peptide
  MOD_RES (5)..(6): Xaa is C or S
SASPXXVSQDLEPISILYLIGKTPKIKFKYEMIVKS

SEQ ID NO: 19697 - protein, 38 aa, Artificial Sequence
  Non-cyclic GFR-binding peptide
  MOD_RES (1)..(2)..(36)..(38): Xaa is C or S
  MOD_RES (16)..(17)..(18)..(19)..(20): Xaa is A or G
  MOD_RES (21)..(22)..(23)..(24): Xaa is A or G or absent
XXVPARLEPISILYLXXXXXXXXXKFKYEDMVVEAXGX

SEQ ID NO: 19698 - protein, 41 aa, Artificial Sequence
  Non-cyclic GFR-binding peptide
  MOD_RES (3)..(4)..(38)..(40): Xaa is C or S
  MOD_RES (18)..(19)..(20)..(21)..(22): Xaa is A or G
  MOD_RES (23)..(24)..(25)..(26): Xaa is A or G or absent
KPXXAPTKLEPISVLYLXXXXXXXXXKFKYENMVVRSXGXH

SEQ ID NO: 19699 - protein, 35 aa, Artificial Sequence
  Non-cyclic GFR-binding peptide
  MOD_RES (1)..(2): Xaa is C or S
  MOD_RES (16)..(17)..(18)..(19)..(20): Xaa is A or G
  MOD_RES (21)..(22)..(23)..(24): Xaa is A or G or absent
XXVPTELSPISMLYIXXXXXXXXXYKQYEDMVVEG

SEQ ID NO: 19700 - protein, 41 aa, Artificial Sequence
  Non-cyclic GFR-binding peptide
  MOD_RES (4)..(5)..(39)..(41): Xaa is C or S
  MOD_RES (19)..(20)..(21)..(22)..(23): Xaa is A or G
  MOD_RES (24)..(25)..(26)..(27): Xaa is A or G or absent
PASXXVPARLSPISILYKXXXXXXXXXLKYHYDMVVEAXGX

SEQ ID NO: 19701 - protein, 35 aa, Artificial Sequence
  Non-cyclic GFR-binding peptide
  MOD_RES (1)..(2)..(35): Xaa is C or S
  MOD_RES (16)..(17)..(18)..(19)..(20): Xaa is A or G
  MOD_RES (21)..(22)..(23)..(24): Xaa is A or G or absent
XXVPQALSPISILYIXXXXXXXXXYKQYEMIVRSX

SEQ ID NO: 19702 - protein, 37 aa, Artificial Sequence
  Non-cyclic GFR-binding peptide
  MOD_RES (4)..(5)..(37): Xaa is C or S
PASXXVPARLNAISILYFDAANNVVLKKYRDMVVEAX

SEQ ID NO: 19703 - protein, 41 aa, Artificial Sequence
  Non-cyclic GFR-binding peptide
  MOD_RES (6)..(7)..(41): Xaa is C or S
  MOD_RES (21)..(22)..(23)..(24)..(25): Xaa is A or G
  MOD_RES (26)..(27)..(28)..(29): Xaa is A or G or absent
AVPKAXXAPTKLSPISVLYIXXXXXXXXXYKQYENMVVKAX

SEQ ID NO: 19704 - protein, 35 aa, Artificial Sequence
  Non-cyclic GFR-binding peptide
  MOD_RES (5)..(5): Xaa is C or S
TKPTXAPTKLEPISVLYLDDSSNVIKFKYENMVVR

SEQ ID NO: 19705 - protein, 37 aa, Artificial Sequence
  Non-cyclic GFR-binding peptide
  MOD_RES (3)..(4)..(36): Xaa is C or S
KAXXVPTELEPISMLYLDENEKVVKFKYEDMVVEGXG

SEQ ID NO: 19706 - protein, 33 aa, Artificial Sequence
  Non-cyclic GFR-binding peptide
  MOD_RES (1)..(2): Xaa is C or S
XXAPTKLSPISVLYIDDSSNVIYKQYENMVVRS

SEQ ID NO: 19707 - protein, 36 aa, Artificial Sequence
  Non-cyclic GFR-binding peptide
  MOD_RES (3)..(3): Xaa is C or S
  MOD_RES (17)..(18)..(19)..(20)..(21): Xaa is A or G
  MOD_RES (22)..(23)..(24)..(25): Xaa is A or G or absent
PTXAPTKLEPISVLYLXXXXXXXXXKFKYENMVVRS

SEQ ID NO: 19708 - protein, 35 aa, Artificial Sequence
  Non-cyclic GFR-binding peptide
  MOD_RES (1)..(35): Xaa is C or S
  MOD_RES (15)..(16)..(17)..(18)..(19): Xaa is A or G
  MOD_RES (20)..(21)..(22)..(23): Xaa is A or G or absent
XVPTKLNAISILYFXXXXXXXXXLKKYRGMAVSEX

SEQ ID NO: 19709 - protein, 36 aa, Artificial Sequence
  Non-cyclic GFR-binding peptide
  MOD_RES (1)..(35): Xaa is C or S
  MOD_RES (15)..(16)..(17)..(18)..(19): Xaa is A or G
  MOD_RES (20)..(21)..(22)..(23): Xaa is A or G or absent
XVPTKLSPISILYKXXXXXXXXXLKYHYGMAVSEXG

SEQ ID NO: 19710 - protein, 32 aa, Artificial Sequence
  Non-cyclic GFR-binding peptide
  MOD_RES (32)..(32): Xaa is C or S
VPTELEPISMLYLDENEKVVKFKYEDMVVEGX

SEQ ID NO: 19711 - protein, 41 aa, Artificial Sequence
  Non-cyclic GFR-binding peptide
  MOD_RES (3)..(4)..(38)..(40): Xaa is C or S
  MOD_RES (18)..(19)..(20)..(21)..(22): Xaa is A or G
  MOD_RES (23)..(24)..(25)..(26): Xaa is A or G or absent
KAXXVPTKLSPISILYKXXXXXXXXXLKYHYGMAVSEXGXR

SEQ ID NO: 19712 - protein, 33 aa, Artificial Sequence
  Non-cyclic GFR-binding peptide
  MOD_RES (33)..(33): Xaa is C or S
  MOD_RES (14)..(15)..(16)..(17)..(18): Xaa is A or G
  MOD_RES (19)..(20)..(21)..(22): Xaa is A or G or absent
VPQDLEPISILYLXXXXXXXXXKFKYEMVVKSX

SEQ ID NO: 19713 - protein, 44 aa, Artificial Sequence
  Non-cyclic GFR-binding peptide
  MOD_RES (6)..(7)..(41)..(43): Xaa is C or S
  MOD_RES (21)..(22)..(23)..(24)..(25): Xaa is A or G
  MOD_RES (26)..(27)..(28)..(29): Xaa is A or G or absent
AAPASXXVPARLNAISILYFXXXXXXXXXLKKYRDMVVEAXGXR

SEQ ID NO: 19714 - protein, 37 aa, Artificial Sequence
  Non-cyclic GFR-binding peptide
  MOD_RES (2)..(3)..(36): Xaa is C or S
  MOD_RES (17)..(18)..(19)..(20)..(21): Xaa is A or G
  MOD_RES (22)..(23)..(24)..(25): Xaa is A or G or absent
PXXVPQALEPISILYLXXXXXXXXXKFKYEMIVRSXK

SEQ ID NO: 19715 - protein, 39 aa, Artificial Sequence
  Non-cyclic GFR-binding peptide
  MOD_RES (3)..(4)..(38): Xaa is C or S
  MOD_RES (18)..(19)..(20)..(21)..(22): Xaa is A or G
  MOD_RES (23)..(24)..(25)..(26): Xaa is A or G or absent
KPXXAPTQLEPISVLYLXXXXXXXXXKFKYENMVVRAXG

SEQ ID NO: 19716 - protein, 35 aa, Artificial Sequence
  Non-cyclic GFR-binding peptide
  MOD_RES (1)..(2): Xaa is C or S
  MOD_RES (16)..(17)..(18)..(19)..(20): Xaa is A or G
  MOD_RES (21)..(22)..(23)..(24): Xaa is A or G or absent
XXVPTKLSPISILYKXXXXXXXXXLKYHYGMAVSE

SEQ ID NO: 19717 - protein, 43 aa, Artificial Sequence
  Non-cyclic GFR-binding peptide
  MOD_RES (6)..(40)..(42): Xaa is C or S
  MOD_RES (20)..(21)..(22)..(23)..(24): Xaa is A or G
  MOD_RES (25)..(26)..(27)..(28): Xaa is A or G or absent
VTKPTXAPTKLEPISVLYLXXXXXXXXXKFKYENMVVRSXGXH

SEQ ID NO: 19718 - protein, 35 aa, Artificial Sequence
  Non-cyclic GFR-binding peptide
  MOD_RES (4)..(5): Xaa is C or S
ASPXXVSQDLSPISILYIIGKTPKIYKQYEMIVKS

SEQ ID NO: 19719 - protein, 38 aa, Artificial Sequence
  Non-cyclic GFR-binding peptide
  MOD_RES (5)..(6)..(38): Xaa is C or S
IPKAXXVPTELEPISMLYLDENEKVVKFKYEDMVVEGX

SEQ ID NO: 19720 - protein, 37 aa, Artificial Sequence
  Non-cyclic GFR-binding peptide
  MOD_RES (4)..(5): Xaa is C or S
  MOD_RES (19)..(20)..(21)..(22)..(23): Xaa is A or G
  MOD_RES (24)..(25)..(26)..(27): Xaa is A or G or absent
SKAXXVPTKLNAISILYFXXXXXXXXXLKKYRGMAVS

SEQ ID NO: 19721 - protein, 32 aa, Artificial Sequence
  Non-cyclic GFR-binding peptide
  MOD_RES (1)..(1): Xaa is C or S
XVPARLEPISILYLDAANNVVKFKYEDMVVEA

SEQ ID NO: 19722 - protein, 35 aa, Artificial Sequence
  Non-cyclic GFR-binding peptide
  MOD_RES (1)..(35): Xaa is C or S
  MOD_RES (15)..(16)..(17)..(18)..(19): Xaa is A or G
  MOD_RES (20)..(21)..(22)..(23): Xaa is A or G or absent
XVPARLEPISILYLXXXXXXXXXKFKYEDMVVEAX

SEQ ID NO: 19723 - protein, 42 aa, Artificial Sequence
  Non-cyclic GFR-binding peptide
  MOD_RES (5)..(6)..(39)..(41): Xaa is C or S
  MOD_RES (20)..(21)..(22)..(23)..(24): Xaa is A or G
  MOD_RES (25)..(26)..(27)..(28): Xaa is A or G or absent
SASPXXVPQDLSPISILYIXXXXXXXXXYKQYEMVVKSXKXS

SEQ ID NO: 19724 - protein, 36 aa, Artificial Sequence
  Non-cyclic GFR-binding peptide
  MOD_RES (3)..(4)..(36): Xaa is C or S
KAXXVPTELEPISMLYLDENEKVVKFKYEDMVVEGX

SEQ ID NO: 19725 - protein, 38 aa, Artificial Sequence
  Non-cyclic GFR-binding peptide
  MOD_RES (1)..(35)..(37): Xaa is C or S
  MOD_RES (15)..(16)..(17)..(18)..(19): Xaa is A or G
  MOD_RES (20)..(21)..(22)..(23): Xaa is A or G or absent
XVPARLNAISILYFXXXXXXXXXLKKYRDMVVEAXGXR

SEQ ID NO: 19726 - protein, 40 aa, Artificial Sequence
  Non-cyclic GFR-binding peptide
  MOD_RES (6)..(7): Xaa is C or S
  MOD_RES (21)..(22)..(23)..(24)..(25): Xaa is A or G
  MOD_RES (26)..(27)..(28)..(29): Xaa is A or G or absent
KIPKAXXVPTELSPISMLYIXXXXXXXXXYKQYEDMVVEG

SEQ ID NO: 19727 - protein, 32 aa, Artificial Sequence
  Non-cyclic GFR-binding peptide
  MOD_RES (32)..(32): Xaa is C or S
VPTELEPISMLYLDEYDKVVKFKYEEMVVEGX

SEQ ID NO: 19728 - protein, 37 aa, Artificial Sequence
  Non-cyclic GFR-binding peptide
  MOD_RES (1)..(35)..(37): Xaa is C or S
  MOD_RES (15)..(16)..(17)..(18)..(19): Xaa is A or G
  MOD_RES (20)..(21)..(22)..(23): Xaa is A or G or absent
XVPTELSPISMLYIXXXXXXXXXYKQYEEMVVEGXGX

SEQ ID NO: 19729 - protein, 32 aa, Artificial Sequence
  Non-cyclic GFR-binding peptide
  MOD_RES (31)..(31): Xaa is C or S
VSQDLEPISILYLIGKTPKIKFKYEMIVKSXK

SEQ ID NO: 19730 - protein, 36 aa, Artificial Sequence
  Non-cyclic GFR-binding peptide
  MOD_RES (3)..(4)..(36): Xaa is C or S
KAXXVPTKLSPISILYKDKGVVTYLKYHYGMAVSEX

SEQ ID NO: 19731 - protein, 34 aa, Artificial Sequence
  Non-cyclic GFR-binding peptide
  MOD_RES (32)..(34): Xaa is C or S
VPTKLSPISILYKDKGVVTYLKYHYGMAVSEXGX

SEQ ID NO: 19732 - protein, 33 aa, Artificial Sequence
  Non-cyclic GFR-binding peptide
  MOD_RES (1)..(2)..(33): Xaa is C or S
XXVPQDLEPISILYLVGRTPKVKFKYEMVVKSX

SEQ ID NO: 19733 - protein, 33 aa, Artificial Sequence
  Non-cyclic GFR-binding peptide
  MOD_RES (1)..(32): Xaa is C or S
XVPQALEPISILYLVGRKPKVKFKYEMIVRSXK

SEQ ID NO: 19734 - protein, 35 aa, Artificial Sequence
  Non-cyclic GFR-binding peptide
  MOD_RES (4)..(5): Xaa is C or S
PKPXXAPTKLEPISVLYLDDSSNVIKFKYENMVVR

SEQ ID NO: 19735 - protein, 37 aa, Artificial Sequence
  Non-cyclic GFR-binding peptide
  MOD_RES (1)..(34)..(36): Xaa is C or S
  MOD_RES (15)..(16)..(17)..(18)..(19): Xaa is A or G
  MOD_RES (20)..(21)..(22)..(23): Xaa is A or G or absent
XVPQDLEPISILYLXXXXXXXXXKFKYEMVVKSXKXS

SEQ ID NO: 19736 - protein, 35 aa, Artificial Sequence
  Non-cyclic GFR-binding peptide
  MOD_RES (2)..(3): Xaa is C or S
  MOD_RES (17)..(18)..(19)..(20)..(21): Xaa is A or G
  MOD_RES (22)..(23)..(24)..(25): Xaa is A or G or absent
PXXVPQALSPISILYIXXXXXXXXXYKQYEMIVRS

SEQ ID NO: 19737 - protein, 39 aa, Artificial Sequence
  Non-cyclic GFR-binding peptide
  MOD_RES (6)..(7)..(39): Xaa is C or S
TVPKPXXAPTQLEPISVLYLDDSSNVIKFKYENMVVRAX

SEQ ID NO: 19738 - protein, 40 aa, Artificial Sequence
  Non-cyclic GFR-binding peptide
  MOD_RES (3)..(4)..(38)..(40): Xaa is C or S
  MOD_RES (18)..(19)..(20)..(21)..(22): Xaa is A or G
  MOD_RES (23)..(24)..(25)..(26): Xaa is A or G or absent
KPXXAPTKLSPISVLYIXXXXXXXXXYKQYENMVVRSXGX

SEQ ID NO: 19739 - protein, 39 aa, Artificial Sequence
  Non-cyclic GFR-binding peptide
  MOD_RES (2)..(3)..(36)..(38): Xaa is C or S
AXXVPTKLEPISVLYLDDMGVPTKFKYEEGMSVAEXGXR

SEQ ID NO: 19740 - protein, 37 aa, Artificial Sequence
  Non-cyclic GFR-binding peptide
  MOD_RES (3)..(4): Xaa is C or S
  MOD_RES (18)..(19)..(20)..(21)..(22): Xaa is A or G
  MOD_RES (23)..(24)..(25)..(26): Xaa is A or G or absent
KAXXVPTELEPISMLYLXXXXXXXXXKFKYEEMVVEG

SEQ ID NO: 19741 - protein, 43 aa, Artificial Sequence
  Non-cyclic GFR-binding peptide
  MOD_RES (6)..(7)..(42): Xaa is C or S
  MOD_RES (21)..(22)..(23)..(24)..(25): Xaa is A or G
  MOD_RES (26)..(27)..(28)..(29): Xaa is A or G or absent
KVGKAXXVPTKLEPISVLYLXXXXXXXXXKFKYEEGMSVAEXG

SEQ ID NO: 19742 - protein, 34 aa, Artificial Sequence
  Non-cyclic GFR-binding peptide
  MOD_RES (1)..(2)..(34): Xaa is C or S
XXAPTKLSPISVLYIDDSSNVIYKQYENMVVRSX

SEQ ID NO: 19743 - protein, 34 aa, Artificial Sequence
  Non-cyclic GFR-binding peptide
  MOD_RES (3)..(4): Xaa is C or S
APXXVPQALSPISILYIVGRKPKVYKQYEMIVRS

SEQ ID NO: 19744 - protein, 33 aa, Artificial Sequence
  Non-cyclic GFR-binding peptide
  MOD_RES (2)..(3): Xaa is C or S
AXXVPTELSPISMLYIDEYDKVVYKQYEEMVVE

SEQ ID NO: 19745 - protein, 39 aa, Artificial Sequence
  Non-cyclic GFR-binding peptide
  MOD_RES (3)..(4)..(38): Xaa is C or S
  MOD_RES (18)..(19)..(20)..(21)..(22): Xaa is A or G
  MOD_RES (23)..(24)..(25)..(26): Xaa is A or G or absent
KAXXVPTELSPISMLYIXXXXXXXXXYKQYEEMVVEGXG

SEQ ID NO: 19746 - protein, 40 aa, Artificial Sequence
  Non-cyclic GFR-binding peptide
  MOD_RES (3)..(4)..(37)..(39): Xaa is C or S
  MOD_RES (18)..(19)..(20)..(21)..(22): Xaa is A or G
  MOD_RES (23)..(24)..(25)..(26): Xaa is A or G or absent
SPXXVSQDLEPISILYLXXXXXXXXXKFKYEMIVKSXKXS

SEQ ID NO: 19747 - protein, 39 aa, Artificial Sequence
  Non-cyclic GFR-binding peptide
  MOD_RES (4)..(5)..(38): Xaa is C or S
  MOD_RES (19)..(20)..(21)..(22)..(23): Xaa is A or G
  MOD_RES (24)..(25)..(26)..(27): Xaa is A or G or absent
ASPXXVPQDLEPISILYLXXXXXXXXXKFKYEMVVKSXK

SEQ ID NO: 19748 - protein, 37 aa, Artificial Sequence
  Non-cyclic GFR-binding peptide
  MOD_RES (2)..(3)..(35)..(37): Xaa is C or S
AXXVPTELSPISMLYIDEYDKVVYKQYEEMVVEGXGX

SEQ ID NO: 19749 - protein, 37 aa, Artificial Sequence
  Non-cyclic GFR-binding peptide
  MOD_RES (3)..(4)..(36): Xaa is C or S
KPXXAPTQLEPISVLYLDDSSNVIKFKYENMVVRAXG

SEQ ID NO: 19750 - protein, 36 aa, Artificial Sequence
  Non-cyclic GFR-binding peptide
  MOD_RES (2)..(3): Xaa is C or S
  MOD_RES (17)..(18)..(19)..(20)..(21): Xaa is A or G
  MOD_RES (22)..(23)..(24)..(25): Xaa is A or G or absent
AXXVPTKLNAISILYFXXXXXXXXXLKKYRGMAVSE

SEQ ID NO: 19751 - protein, 37 aa, Artificial Sequence
  Non-cyclic GFR-binding peptide
  MOD_RES (2)..(3)..(34)..(36): Xaa is C or S
PXXVPQALSPISILYIVGRKPKVYKQYEMIVRSXKXS

SEQ ID NO: 19752 - protein, 40 aa, Artificial Sequence
  Non-cyclic GFR-binding peptide
  MOD_RES (4)..(5)..(39): Xaa is C or S
  MOD_RES (19)..(20)..(21)..(22)..(23): Xaa is A or G
  MOD_RES (24)..(25)..(26)..(27): Xaa is A or G or absent
PKPXXAPTQLEPISVLYLXXXXXXXXXKFKYENMVVRAXG

SEQ ID NO: 19753 - protein, 35 aa, Artificial Sequence
  Non-cyclic GFR-binding peptide
  MOD_RES (2)..(3): Xaa is C or S
  MOD_RES (17)..(18)..(19)..(20)..(21): Xaa is A or G
  MOD_RES (22)..(23)..(24)..(25): Xaa is A or G or absent
AXXVPTELEPISMLYLXXXXXXXXXKFKYEDMVVE

SEQ ID NO: 19754 - protein, 34 aa, Artificial Sequence
  Non-cyclic GFR-binding peptide
  MOD_RES (34)..(34): Xaa is C or S
  MOD_RES (14)..(15)..(16)..(17)..(18): Xaa is A or G
  MOD_RES (19)..(20)..(21)..(22): Xaa is A or G or absent
VPTELEPISMLYLXXXXXXXXXKFKYEDMVVEGX

SEQ ID NO: 19755 - protein, 43 aa, Artificial Sequence
  Non-cyclic GFR-binding peptide
  MOD_RES (5)..(6)..(40)..(42): Xaa is C or S
  MOD_RES (20)..(21)..(22)..(23)..(24): Xaa is A or G
  MOD_RES (25)..(26)..(27)..(28): Xaa is A or G or absent
VPKAXXAPTKLSPISVLYIXXXXXXXXXYKQYENMVVKAXGXH

SEQ ID NO: 19756 - protein, 38 aa, Artificial Sequence
  Non-cyclic GFR-binding peptide
  MOD_RES (4)..(5): Xaa is C or S
  MOD_RES (19)..(20)..(21)..(22)..(23): Xaa is A or G
  MOD_RES (24)..(25)..(26)..(27): Xaa is A or G or absent
PASXXVPARLNAISILYFXXXXXXXXXLKKYRDMVVEA

SEQ ID NO: 19757 - protein, 36 aa, Artificial Sequence
  Non-cyclic GFR-binding peptide
  MOD_RES (4)..(5): Xaa is C or S
PKAXXAPTKLSPISVLYIDSSNNVIYKQYENMVVKA

SEQ ID NO: 19758 - protein, 32 aa, Artificial Sequence
  Non-cyclic GFR-binding peptide
  MOD_RES (14)..(15)..(16)..(17)..(18): Xaa is A or G
  MOD_RES (19)..(20)..(21)..(22): Xaa is A or G or absent
VPQALEPISILYLXXXXXXXXXKFKYEMIVRS

SEQ ID NO: 19759 - protein, 42 aa, Artificial Sequence
  Non-cyclic GFR-binding peptide
  MOD_RES (5)..(6)..(39)..(41): Xaa is C or S
  MOD_RES (20)..(21)..(22)..(23)..(24): Xaa is A or G
  MOD_RES (25)..(26)..(27)..(28): Xaa is A or G or absent
SASPXXVPQDLEPISILYLXXXXXXXXXKFKYEMVVKSXKXS

SEQ ID NO: 19760 - protein, 42 aa, Artificial Sequence
  Non-cyclic GFR-binding peptide
  MOD_RES (6)..(7)..(42): Xaa is C or S
  MOD_RES (21)..(22)..(23)..(24)..(25): Xaa is A or G
  MOD_RES (26)..(27)..(28)..(29): Xaa is A or G or absent
KVGKAXXVPTKLEPISVLYLXXXXXXXXXKFKYEEGMSVAEX

SEQ ID NO: 19761 - protein, 38 aa, Artificial Sequence
  Non-cyclic GFR-binding peptide
  MOD_RES (3)..(4)..(38): Xaa is C or S
  MOD_RES (18)..(19)..(20)..(21)..(22): Xaa is A or G
  MOD_RES (23)..(24)..(25)..(26): Xaa is A or G or absent
KPXXAPTQLEPISVLYLXXXXXXXXXKFKYENMVVRAX

SEQ ID NO: 19762 - protein, 34 aa, Artificial Sequence
  Non-cyclic GFR-binding peptide
  MOD_RES (1)..(2): Xaa is C or S
  MOD_RES (16)..(17)..(18)..(19)..(20): Xaa is A or G
  MOD_RES (21)..(22)..(23)..(24): Xaa is A or G or absent
XXVPTKLSPISILYKXXXXXXXXXLKYHYGMAVS

SEQ ID NO: 19763 - protein, 32 aa, Artificial Sequence
  Non-cyclic GFR-binding peptide
  MOD_RES (1)..(1): Xaa is C or S
XVPTKLSPISILYIDKGVVTYYKQYEGMAVSE

SEQ ID NO: 19764 - protein, 41 aa, Artificial Sequence
  Non-cyclic GFR-binding peptide
  MOD_RES (5)..(39)..(41): Xaa is C or S
  MOD_RES (19)..(20)..(21)..(22)..(23): Xaa is A or G
  MOD_RES (24)..(25)..(26)..(27): Xaa is A or G or absent
TKPTXAPTKLSPISVLYIXXXXXXXXXYKQYENMVVRSXGX

SEQ ID NO: 19765 - protein, 33 aa, Artificial Sequence
  Non-cyclic GFR-binding peptide
  MOD_RES (1)..(33): Xaa is C or S
XVPTKLNAISILYFDKGVVTYLKKYRGMAVSEX

SEQ ID NO: 19766 - protein, 34 aa, Artificial Sequence
  Non-cyclic GFR-binding peptide
  MOD_RES (1)..(1): Xaa is C or S
  MOD_RES (15)..(16)..(17)..(18)..(19): Xaa is A or G
  MOD_RES (20)..(21)..(22)..(23): Xaa is A or G or absent
XVPARLEPISILYLXXXXXXXXXKFKYEDMVVEA

SEQ ID NO: 19767 - protein, 32 aa, Artificial Sequence
  Non-cyclic GFR-binding peptide
  MOD_RES (32)..(32): Xaa is C or S
APTKLSPISVLYIDDSSNVIYKQYENMVVRSX

SEQ ID NO: 19768 - protein, 36 aa, Artificial Sequence
  Non-cyclic GFR-binding peptide
  MOD_RES (3)..(4): Xaa is C or S
  MOD_RES (18)..(19)..(20)..(21)..(22): Xaa is A or G
  MOD_RES (23)..(24)..(25)..(26): Xaa is A or G or absent
ASXXVPARLNAISILYFXXXXXXXXXLKKYRDMVVE

SEQ ID NO: 19769 - protein, 36 aa, Artificial Sequence
  Non-cyclic GFR-binding peptide
  MOD_RES (3)..(35): Xaa is C or S
PTXAPTKLEPISVLYLDDSSNVIKFKYENMVVRSXG

SEQ ID NO: 19770 - protein, 41 aa, Artificial Sequence
  Non-cyclic GFR-binding peptide
  MOD_RES (6)..(7)..(39)..(41): Xaa is C or S
TVPKPXXAPTQLSPISVLYIDDSSNVIYKQYENMVVRAXGX

SEQ ID NO: 19771 - protein, 39 aa, Artificial Sequence
  Non-cyclic GFR-binding peptide
  MOD_RES (7)..(39): Xaa is C or S
HVTKPTXAPTKLEPISVLYLDDSSNVIKFKYENMVVRSX

SEQ ID NO: 19772 - protein, 37 aa, Artificial Sequence
  Non-cyclic GFR-binding peptide
  MOD_RES (1)..(2)..(36): Xaa is C or S
  MOD_RES (16)..(17)..(18)..(19)..(20): Xaa is A or G
  MOD_RES (21)..(22)..(23)..(24): Xaa is A or G or absent
XXAPTQLEPISVLYLXXXXXXXXXKFKYENMVVRAXG

SEQ ID NO: 19773 - protein, 43 aa, Artificial Sequence
  Non-cyclic GFR-binding peptide
  MOD_RES (5)..(6)..(40)..(42): Xaa is C or S
  MOD_RES (20)..(21)..(22)..(23)..(24): Xaa is A or G
  MOD_RES (25)..(26)..(27)..(28): Xaa is A or G or absent
ASKAXXVPTKLNAISILYFXXXXXXXXXLKKYRGMAVSEXGXR

SEQ ID NO: 19774 - protein, 37 aa, Artificial Sequence
  Non-cyclic GFR-binding peptide
  MOD_RES (1)..(2)..(36): Xaa is C or S
  MOD_RES (16)..(17)..(18)..(19)..(20): Xaa is A or G
  MOD_RES (21)..(22)..(23)..(24): Xaa is A or G or absent
XXAPTKLEPISVLYLXXXXXXXXXKFKYENMVVKAXG

SEQ ID NO: 19775 - protein, 40 aa, Artificial Sequence
  Non-cyclic GFR-binding peptide
  MOD_RES (4)..(5)..(37)..(39): Xaa is C or S
SKAXXVPTKLNAISILYFDKGVVTYLKKYRGMAVSEXGXR

SEQ ID NO: 19776 - protein, 34 aa, Artificial Sequence
  Non-cyclic GFR-binding peptide
  MOD_RES (1)..(33): Xaa is C or S
XVPTKLSPISILYIDKGVVTYYKQYEGMAVSEXG

SEQ ID NO: 19777 - protein, 34 aa, Artificial Sequence
  Non-cyclic GFR-binding peptide
  MOD_RES (34)..(34): Xaa is C or S
  MOD_RES (14)..(15)..(16)..(17)..(18): Xaa is A or G
  MOD_RES (19)..(20)..(21)..(22): Xaa is A or G or absent
VPARLSPISILYKXXXXXXXXXLKYHYDMVVEAX

SEQ ID NO: 19778 - protein, 38 aa, Artificial Sequence
  Non-cyclic GFR-binding peptide
  MOD_RES (4)..(5): Xaa is C or S
  MOD_RES (19)..(20)..(21)..(22)..(23): Xaa is A or G
  MOD_RES (24)..(25)..(26)..(27): Xaa is A or G or absent
PKPXXAPTKLSPISVLYIXXXXXXXXXYKQYENMVVRS

SEQ ID NO: 19779 - protein, 32 aa, Artificial Sequence
  Non-cyclic GFR-binding peptide
  MOD_RES (1)..(1): Xaa is C or S
XVPTELEPISMLYLDENEKVVKFKYEDMVVEG

SEQ ID NO: 19780 - protein, 39 aa, Artificial Sequence
  Non-cyclic GFR-binding peptide
  MOD_RES (4)..(5)..(37)..(39): Xaa is C or S
PKPXXAPTQLSPISVLYIDDSSNVIYKQYENMVVRAXGX

SEQ ID NO: 19781 - protein, 38 aa, Artificial Sequence
  Non-cyclic GFR-binding peptide
  MOD_RES (5)..(5): Xaa is C or S
  MOD_RES (19)..(20)..(21)..(22)..(23): Xaa is A or G
  MOD_RES (24)..(25)..(26)..(27): Xaa is A or G or absent
TKPTXAPTKLSPISVLYIXXXXXXXXXYKQYENMVVRS

SEQ ID NO: 19782 - protein, 36 aa, Artificial Sequence
  Non-cyclic GFR-binding peptide
  MOD_RES (1)..(33)..(35): Xaa is C or S
XAPTKLSPISVLYIDSSNNVIYKQYENMVVKAXGXH

SEQ ID NO: 19783 - protein, 34 aa, Artificial Sequence
  Non-cyclic GFR-binding peptide
  MOD_RES (1)..(33): Xaa is C or S
XAPTKLSPISVLYIDDSSNVIYKQYENMVVRSXG

SEQ ID NO: 19784 - protein, 34 aa, Artificial Sequence
  Non-cyclic GFR-binding peptide
  MOD_RES (1)..(33): Xaa is C or S
XVPARLSPISILYKDAANNVVLKYHYDMVVEAXG

SEQ ID NO: 19785 - protein, 30 aa, Artificial Sequence
  Non-cyclic GFR-binding peptide
VPTELSPISMLYIDENEKVVYKQYEDMVVE

SEQ ID NO: 19786 - protein, 36 aa, Artificial Sequence
  Non-cyclic GFR-binding peptide
  MOD_RES (1)..(33)..(35): Xaa is C or S
XAPTKLEPISVLYLDSSNNVIKFKYENMVVKAXGXH

SEQ ID NO: 19787 - protein, 32 aa, Artificial Sequence
  Non-cyclic GFR-binding peptide
  MOD_RES (2)..(2): Xaa is C or S
TXAPTKLSPISVLYIDDSSNVIYKQYENMVVR

SEQ ID NO: 19788 - protein, 42 aa, Artificial Sequence
  Non-cyclic GFR-binding peptide
  MOD_RES (6)..(7)..(41): Xaa is C or S
  MOD_RES (21)..(22)..(23)..(24)..(25): Xaa is A or G
  MOD_RES (26)..(27)..(28)..(29): Xaa is A or G or absent
TVPKPXXAPTQLEPISVLYLXXXXXXXXXKFKYENMVVRAXG

SEQ ID NO: 19789 - protein, 39 aa, Artificial Sequence
  Non-cyclic GFR-binding peptide
  MOD_RES (4)..(5)..(37)..(39): Xaa is C or S
SKAXXVPTKLSPISILYKDKGVVTYLKYHYGMAVSEXGX

SEQ ID NO: 19790 - protein, 37 aa, Artificial Sequence
  Non-cyclic GFR-binding peptide
  MOD_RES (2)..(3)..(37): Xaa is C or S
  MOD_RES (17)..(18)..(19)..(20)..(21): Xaa is A or G
  MOD_RES (22)..(23)..(24)..(25): Xaa is A or G or absent
AXXVPTKLSPISILYKXXXXXXXXXLKYHYGMAVSEX

SEQ ID NO: 19791 - protein, 42 aa, Artificial Sequence
  Non-cyclic GFR-binding peptide
  MOD_RES (5)..(6)..(40)..(42): Xaa is C or S
  MOD_RES (20)..(21)..(22)..(23)..(24): Xaa is A or G
  MOD_RES (25)..(26)..(27)..(28): Xaa is A or G or absent
APASXXVPARLNAISILYFXXXXXXXXXLKKYRDMVVEAXGX

SEQ ID NO: 19792 - protein, 38 aa, Artificial Sequence
  Non-cyclic GFR-binding peptide
  MOD_RES (3)..(4)..(38): Xaa is C or S
  MOD_RES (18)..(19)..(20)..(21)..(22): Xaa is A or G
  MOD_RES (23)..(24)..(25)..(26): Xaa is A or G or absent
KAXXAPTKLSPISVLYIXXXXXXXXXYKQYENMVVKAX

SEQ ID NO: 19793 - protein, 41 aa, Artificial Sequence
  Non-cyclic GFR-binding peptide
  MOD_RES (6)..(7)..(38)..(40): Xaa is C or S
ASASPXXVSQDLEPISILYLIGKTPKIKFKYEMIVKSXKXS

SEQ ID NO: 19794 - protein, 40 aa, Artificial Sequence
  Non-cyclic GFR-binding peptide
  MOD_RES (5)..(6)..(38)..(40): Xaa is C or S
IPKAXXVPTELEPISMLYLDENEKVVKFKYEDMVVEGXGX

SEQ ID NO: 19795 - protein, 39 aa, Artificial Sequence
  Non-cyclic GFR-binding peptide
  MOD_RES (2)..(3)..(36)..(38): Xaa is C or S
  MOD_RES (17)..(18)..(19)..(20)..(21): Xaa is A or G
  MOD_RES (22)..(23)..(24)..(25): Xaa is A or G or absent
PXXVSQDLSPISILYIXXXXXXXXXYKQYEMIVKSXKXS

SEQ ID NO: 19796 - protein, 34 aa, Artificial Sequence
  Non-cyclic GFR-binding peptide
  MOD_RES (3)..(4): Xaa is C or S
KAXXVPTELEPISMLYLDEYDKVVKFKYEEMVVE

SEQ ID NO: 19797 - protein, 41 aa, Artificial Sequence
  Non-cyclic GFR-binding peptide
  MOD_RES (4)..(5)..(38)..(40): Xaa is C or S
  MOD_RES (19)..(20)..(21)..(22)..(23): Xaa is A or G
  MOD_RES (24)..(25)..(26)..(27): Xaa is A or G or absent
AAPXXVPQALEPISILYLXXXXXXXXXKFKYEMIVRSXKXS

SEQ ID NO: 19798 - protein, 36 aa, Artificial Sequence
  Non-cyclic GFR-binding peptide
  MOD_RES (4)..(5): Xaa is C or S
PASXXVPARLSPISILYKDAANNVVLKYHYDMVVEA

SEQ ID NO: 19799 - protein, 32 aa, Artificial Sequence
  Non-cyclic GFR-binding peptide
VPTKLEPISVLYLDDMGVPTKFKYEEGMSVAE

SEQ ID NO: 19800 - protein, 38 aa, Artificial Sequence
  Non-cyclic GFR-binding peptide
  MOD_RES (1)..(2)..(35)..(37): Xaa is C or S
  MOD_RES (16)..(17)..(18)..(19)..(20): Xaa is A or G
  MOD_RES (21)..(22)..(23)..(24): Xaa is A or G or absent
XXVPQDLSPISILYIXXXXXXXXXYKQYEMVVKSXKXS

SEQ ID NO: 19801 - protein, 35 aa, Artificial Sequence
  Non-cyclic GFR-binding peptide
  MOD_RES (2)..(2): Xaa is C or S
  MOD_RES (16)..(17)..(18)..(19)..(20): Xaa is A or G
  MOD_RES (21)..(22)..(23)..(24): Xaa is A or G or absent
TXAPTKLEPISVLYLXXXXXXXXXKFKYENMVVRS

SEQ ID NO: 19802 - protein, 40 aa, Artificial Sequence
  Non-cyclic GFR-binding peptide
  MOD_RES (4)..(5)..(38)..(40): Xaa is C or S
  MOD_RES (19)..(20)..(21)..(22)..(23): Xaa is A or G
  MOD_RES (24)..(25)..(26)..(27): Xaa is A or G or absent
ASPXXVPQDLSPISILYIXXXXXXXXXYKQYEMVVKSXKX

SEQ ID NO: 19803 - protein, 33 aa, Artificial Sequence
  Non-cyclic GFR-binding peptide
  MOD_RES (1)..(1): Xaa is C or S
  MOD_RES (15)..(16)..(17)..(18)..(19): Xaa is A or G
  MOD_RES (20)..(21)..(22)..(23): Xaa is A or G or absent
XVPTKLSPISILYIXXXXXXXXXYKQYEGMAVS

SEQ ID NO: 19804 - protein, 35 aa, Artificial Sequence
  Non-cyclic GFR-binding peptide
  MOD_RES (33)..(35): Xaa is C or S
  MOD_RES (14)..(15)..(16)..(17)..(18): Xaa is A or G
  MOD_RES (19)..(20)..(21)..(22): Xaa is A or G or absent
VPQDLSPISILYIXXXXXXXXXYKQYEMVVKSXKX

SEQ ID NO: 19805 - protein, 36 aa, Artificial Sequence
  Non-cyclic GFR-binding peptide
  MOD_RES (2)..(36): Xaa is C or S
  MOD_RES (16)..(17)..(18)..(19)..(20): Xaa is A or G
  MOD_RES (21)..(22)..(23)..(24): Xaa is A or G or absent
TXAPTKLSPISVLYIXXXXXXXXXYKQYENMVVRSX

SEQ ID NO: 19806 - protein, 33 aa, Artificial Sequence
  Non-cyclic GFR-binding peptide
  MOD_RES (32)..(32): Xaa is C or S
VPARLEPISILYLDAANNVVKFKYEDMVVEAXG

SEQ ID NO: 19807 - protein, 41 aa, Artificial Sequence
  Non-cyclic GFR-binding peptide
  MOD_RES (4)..(5)..(38)..(40): Xaa is C or S
  MOD_RES (19)..(20)..(21)..(22)..(23): Xaa is A or G
  MOD_RES (24)..(25)..(26)..(27): Xaa is A or G or absent
ASPXXVSQDLSPISILYIXXXXXXXXXYKQYEMIVKSXKXS

SEQ ID NO: 19808 - protein, 34 aa, Artificial Sequence
  Non-cyclic GFR-binding peptide
  MOD_RES (1)..(33): Xaa is C or S
XAPTQLSPISVLYIDDSSNVIYKQYENMVVRAXG

SEQ ID NO: 19809 - protein, 43 aa, Artificial Sequence
  Non-cyclic GFR-binding peptide
  MOD_RES (6)..(7)..(41)..(43): Xaa is C or S
  MOD_RES (21)..(22)..(23)..(24)..(25): Xaa is A or G
  MOD_RES (26)..(27)..(28)..(29): Xaa is A or G or absent
AVPKAXXAPTKLEPISVLYLXXXXXXXXXKFKYENMVVKAXGX

SEQ ID NO: 19810 - protein, 35 aa, Artificial Sequence
  Non-cyclic GFR-binding peptide
  MOD_RES (3)..(35): Xaa is C or S
PTXAPTKLEPISVLYLDDSSNVIKFKYENMVVRSX

SEQ ID NO: 19811 - protein, 42 aa, Artificial Sequence
  Non-cyclic GFR-binding peptide
  MOD_RES (6)..(7)..(41): Xaa is C or S
  MOD_RES (21)..(22)..(23)..(24)..(25): Xaa is A or G
  MOD_RES (26)..(27)..(28)..(29): Xaa is A or G or absent
TVPKPXXAPTQLSPISVLYIXXXXXXXXXYKQYENMVVRAXG

SEQ ID NO: 19812 - protein, 38 aa, Artificial Sequence
  Non-cyclic GFR-binding peptide
  MOD_RES (4)..(5): Xaa is C or S
  MOD_RES (19)..(20)..(21)..(22)..(23): Xaa is A or G
  MOD_RES (24)..(25)..(26)..(27): Xaa is A or G or absent
PKAXXAPTKLSPISVLYIXXXXXXXXXYKQYENMVVKA

SEQ ID NO: 19813 - protein, 34 aa, Artificial Sequence
  Non-cyclic GFR-binding peptide
  MOD_RES (1)..(33): Xaa is C or S
XVPTELEPISMLYLDENEKVVKFKYEDMVVEGXG

SEQ ID NO: 19814 - protein, 42 aa, Artificial Sequence
  Non-cyclic GFR-binding peptide
  MOD_RES (6)..(7)..(39)..(41): Xaa is C or S
YVPKPXXAPTKLSPISVLYIDDSSNVIYKQYENMVVRSXGXH

SEQ ID NO: 19815 - protein, 39 aa, Artificial Sequence
  Non-cyclic GFR-binding peptide
  MOD_RES (5)..(6)..(39): Xaa is C or S
  MOD_RES (20)..(21)..(22)..(23)..(24): Xaa is A or G
  MOD_RES (25)..(26)..(27)..(28): Xaa is A or G or absent
SASPXXVPQDLEPISILYLXXXXXXXXXKFKYEMVVKSX

SEQ ID NO: 19816 - protein, 33 aa, Artificial Sequence
  Non-cyclic GFR-binding peptide
  MOD_RES (2)..(3): Xaa is C or S
AXXAPTKLSPISVLYIDSSNNVIYKQYENMVVK

SEQ ID NO: 19817 - protein, 37 aa, Artificial Sequence
  Non-cyclic GFR-binding peptide
  MOD_RES (2)..(3)..(36): Xaa is C or S
AXXVPTKLEPISVLYLDDMGVPTKFKYEEGMSVAEXG

SEQ ID NO: 19818 - protein, 35 aa, Artificial Sequence
  Non-cyclic GFR-binding peptide
  MOD_RES (4)..(5): Xaa is C or S
PKAXXVPTELSPISMLYIDEYDKVVYKQYEEMVVE

SEQ ID NO: 19819 - protein, 35 aa, Artificial Sequence
  Non-cyclic GFR-binding peptide
  MOD_RES (3)..(4): Xaa is C or S
KAXXVPTKLNAISILYFDKGVVTYLKKYRGMAVSE

SEQ ID NO: 19820 - protein, 34 aa, Artificial Sequence
  Non-cyclic GFR-binding peptide
  MOD_RES (1)..(2): Xaa is C or S
  MOD_RES (16)..(17)..(18)..(19)..(20): Xaa is A or G
  MOD_RES (21)..(22)..(23)..(24): Xaa is A or G or absent
XXVPARLSPISILYKXXXXXXXXXLKYHYDMVVE

SEQ ID NO: 19821 - protein, 39 aa, Artificial Sequence
  Non-cyclic GFR-binding peptide
  MOD_RES (1)..(2)..(36)..(38): Xaa is C or S
  MOD_RES (16)..(17)..(18)..(19)..(20): Xaa is A or G
  MOD_RES (21)..(22)..(23)..(24): Xaa is A or G or absent
XXAPTKLSPISVLYIXXXXXXXXXYKQYENMVVKAXGXH

SEQ ID NO: 19822 - protein, 37 aa, Artificial Sequence
  Non-cyclic GFR-binding peptide
  MOD_RES (35)..(37): Xaa is C or S
  MOD_RES (14)..(15)..(16)..(17)..(18): Xaa is A or G
  MOD_RES (19)..(20)..(21)..(22): Xaa is A or G or absent
VPTKLEPISVLYLXXXXXXXXXKFKYEEGMSVAEXGX

SEQ ID NO: 19823 - protein, 37 aa, Artificial Sequence
  Non-cyclic GFR-binding peptide
  MOD_RES (1)..(2)..(36): Xaa is C or S
  MOD_RES (16)..(17)..(18)..(19)..(20): Xaa is A or G
  MOD_RES (21)..(22)..(23)..(24): Xaa is A or G or absent
XXVPTELSPISMLYIXXXXXXXXXYKQYEDMVVEGXG

SEQ ID NO: 19824 - protein, 35 aa, Artificial Sequence
  Non-cyclic GFR-binding peptide
  MOD_RES (32)..(34): Xaa is C or S
APTKLSPISVLYIDSSNNVIYKQYENMVVKAXGXH

SEQ ID NO: 19825 - protein, 38 aa, Artificial Sequence
  Non-cyclic GFR-binding peptide
  MOD_RES (4)..(5)..(38): Xaa is C or S
GKAXXVPTKLEPISVLYLDDMGVPTKFKYEEGMSVAEX

SEQ ID NO: 19826 - protein, 33 aa, Artificial Sequence
  Non-cyclic GFR-binding peptide
  MOD_RES (1)..(2): Xaa is C or S
XXVPTKLSPISILYIDKGVVTYYKQYEGMAVSE

SEQ ID NO: 19827 - protein, 34 aa, Artificial Sequence
  Non-cyclic GFR-binding peptide
  MOD_RES (1)..(2)..(34): Xaa is C or S
XXVPTKLNAISILYFDKGVVTYLKKYRGMAVSEX

SEQ ID NO: 19828 - protein, 35 aa, Artificial Sequence
  Non-cyclic GFR-binding peptide
  MOD_RES (2)..(3)..(34): Xaa is C or S
PXXVSQDLEPISILYLIGKTPKIKFKYEMIVKSXK

SEQ ID NO: 19829 - protein, 42 aa, Artificial Sequence
  Non-cyclic GFR-binding peptide
  MOD_RES (5)..(6)..(39)..(41): Xaa is C or S
  MOD_RES (20)..(21)..(22)..(23)..(24): Xaa is A or G
  MOD_RES (25)..(26)..(27)..(28): Xaa is A or G or absent
SASPXXVSQDLEPISILYLXXXXXXXXXKFKYEMIVKSXKXS

SEQ ID NO: 19830 - protein, 38 aa, Artificial Sequence
  Non-cyclic GFR-binding peptide
  MOD_RES (5)..(6)..(38): Xaa is C or S
ASKAXXVPTKLSPISILYIDKGVVTYYKQYEGMAVSEX

SEQ ID NO: 19831 - protein, 38 aa, Artificial Sequence
  Non-cyclic GFR-binding peptide
  MOD_RES (5)..(6)..(37): Xaa is C or S
SAAPXXVPQALSPISILYIVGRKPKVYKQYEMIVRSXK

SEQ ID NO: 19832 - protein, 31 aa, Artificial Sequence
  Non-cyclic GFR-binding peptide
  MOD_RES (1)..(1): Xaa is C or S
XVPTELEPISMLYLDEYDKVVKFKYEEMVVE

SEQ ID NO: 19833 - protein, 41 aa, Artificial Sequence
  Non-cyclic GFR-binding peptide
  MOD_RES (6)..(7)..(41): Xaa is C or S
  MOD_RES (21)..(22)..(23)..(24)..(25): Xaa is A or G
  MOD_RES (26)..(27)..(28)..(29): Xaa is A or G or absent
KASKAXXVPTKLSPISILYIXXXXXXXXXYKQYEGMAVSEX

SEQ ID NO: 19834 - protein, 39 aa, Artificial Sequence
  Non-cyclic GFR-binding peptide
  MOD_RES (6)..(7): Xaa is C or S
  MOD_RES (21)..(22)..(23)..(24)..(25): Xaa is A or G
  MOD_RES (26)..(27)..(28)..(29): Xaa is A or G or absent
KASKAXXVPTKLSPISILYKXXXXXXXXXLKYHYGMAVS

SEQ ID NO: 19835 - protein, 33 aa, Artificial Sequence
  Non-cyclic GFR-binding peptide
  MOD_RES (2)..(3): Xaa is C or S
PXXAPTKLEPISVLYLDDSSNVIKFKYENMVVR

SEQ ID NO: 19836 - protein, 39 aa, Artificial Sequence
  Non-cyclic GFR-binding peptide
  MOD_RES (4)..(5)..(37)..(39): Xaa is C or S
PKAXXVPTELEPISMLYLDENEKVVKFKYEDMVVEGXGX

SEQ ID NO: 19837 - protein, 36 aa, Artificial Sequence
  Non-cyclic GFR-binding peptide
  MOD_RES (2)..(3)..(35): Xaa is C or S
SXXVPARLNAISILYFDAANNVVLKKYRDMVVEAXG

SEQ ID NO: 19838 - protein, 35 aa, Artificial Sequence
  Non-cyclic GFR-binding peptide
  MOD_RES (1)..(2)..(35): Xaa is C or S
XXVPTKLSPISVLYIDDMGVPTYKQYEEGMSVAEX

SEQ ID NO: 19839 - protein, 34 aa, Artificial Sequence
  Non-cyclic GFR-binding peptide
  MOD_RES (3)..(4): Xaa is C or S
KPXXAPTQLEPISVLYLDDSSNVIKFKYENMVVR

SEQ ID NO: 19840 - protein, 31 aa, Artificial Sequence
  Non-cyclic GFR-binding peptide
  MOD_RES (1)..(1): Xaa is C or S
XAPTKLEPISVLYLDDSSNVIKFKYENMVVR

SEQ ID NO: 19841 - protein, 38 aa, Artificial Sequence
  Non-cyclic GFR-binding peptide
  MOD_RES (2)..(3)..(37): Xaa is C or S
  MOD_RES (17)..(18)..(19)..(20)..(21): Xaa is A or G
  MOD_RES (22)..(23)..(24)..(25): Xaa is A or G or absent
SXXVPARLEPISILYLXXXXXXXXXKFKYEDMVVEAXG

SEQ ID NO: 19842 - protein, 36 aa, Artificial Sequence
  Non-cyclic GFR-binding peptide
  MOD_RES (4)..(4): Xaa is C or S
  MOD_RES (18)..(19)..(20)..(21)..(22): Xaa is A or G
  MOD_RES (23)..(24)..(25)..(26): Xaa is A or G or absent
KPTXAPTKLEPISVLYLXXXXXXXXXKFKYENMVVR

SEQ ID NO: 19843 - protein, 34 aa, Artificial Sequence
  Non-cyclic GFR-binding peptide
  MOD_RES (3)..(4): Xaa is C or S
SPXXVSQDLSPISILYIIGKTPKIYKQYEMIVKS

SEQ ID NO: 19844 - protein, 40 aa, Artificial Sequence
  Non-cyclic GFR-binding peptide
  MOD_RES (6)..(7): Xaa is C or S
  MOD_RES (21)..(22)..(23)..(24)..(25): Xaa is A or G
  MOD_RES (26)..(27)..(28)..(29): Xaa is A or G or absent
TVPKPXXAPTQLEPISVLYLXXXXXXXXXKFKYENMVVRA

SEQ ID NO: 19845 - protein, 39 aa, Artificial Sequence
  Non-cyclic GFR-binding peptide
  MOD_RES (3)..(4)..(36)..(38): Xaa is C or S
ASXXVPARLNAISILYFDAANNVVLKKYRDMVVEAXGXR

SEQ ID NO: 19846 - protein, 36 aa, Artificial Sequence
  Non-cyclic GFR-binding peptide
  MOD_RES (1)..(2)..(36): Xaa is C or S
  MOD_RES (16)..(17)..(18)..(19)..(20): Xaa is A or G
  MOD_RES (21)..(22)..(23)..(24): Xaa is A or G or absent
XXVPTELEPISMLYLXXXXXXXXXKFKYEDMVVEGX

SEQ ID NO: 19847 - protein, 36 aa, Artificial Sequence
  Non-cyclic GFR-binding peptide
  MOD_RES (3)..(4): Xaa is C or S
  MOD_RES (18)..(19)..(20)..(21)..(22): Xaa is A or G
  MOD_RES (23)..(24)..(25)..(26): Xaa is A or G or absent
APXXVPQALEPISILYLXXXXXXXXXKFKYEMIVRS

SEQ ID NO: 19848 - protein, 40 aa, Artificial Sequence
  Non-cyclic GFR-binding peptide
  MOD_RES (6)..(7): Xaa is C or S
  MOD_RES (21)..(22)..(23)..(24)..(25): Xaa is A or G
  MOD_RES (26)..(27)..(28)..(29): Xaa is A or G or absent
SIPKAXXVPTELSPISMLYIXXXXXXXXXYKQYEEMVVEG

SEQ ID NO: 19849 - protein, 37 aa, Artificial Sequence
  Non-cyclic GFR-binding peptide
  MOD_RES (34)..(36): Xaa is C or S
  MOD_RES (14)..(15)..(16)..(17)..(18): Xaa is A or G
  MOD_RES (19)..(20)..(21)..(22): Xaa is A or G or absent
VPTELSPISMLYIXXXXXXXXXYKQYEDMVVEGXGXR

SEQ ID NO: 19850 - protein, 39 aa, Artificial Sequence
  Non-cyclic GFR-binding peptide
  MOD_RES (6)..(7)..(39): Xaa is C or S
TVPKPXXAPTQLSPISVLYIDDSSNVIYKQYENMVVRAX

SEQ ID NO: 19851 - protein, 37 aa, Artificial Sequence
  Non-cyclic GFR-binding peptide
  MOD_RES (6)..(7): Xaa is C or S
KIPKAXXVPTELEPISMLYLDENEKVVKFKYEDMVVE

SEQ ID NO: 19852 - protein, 40 aa, Artificial Sequence
  Non-cyclic GFR-binding peptide
  MOD_RES (2)..(3)..(37)..(39): Xaa is C or S
  MOD_RES (17)..(18)..(19)..(20)..(21): Xaa is A or G
  MOD_RES (22)..(23)..(24)..(25): Xaa is A or G or absent
AXXVPTKLNAISILYFXXXXXXXXXLKKYRGMAVSEXGXR

SEQ ID NO: 19853 - protein, 36 aa, Artificial Sequence
  Non-cyclic GFR-binding peptide
  MOD_RES (3)..(4)..(36): Xaa is C or S
KPXXAPTKLSPISVLYIDDSSNVIYKQYENMVVRSX

SEQ ID NO: 19854 - protein, 36 aa, Artificial Sequence
  Non-cyclic GFR-binding peptide
  MOD_RES (1)..(2)..(35): Xaa is C or S
  MOD_RES (16)..(17)..(18)..(19)..(20): Xaa is A or G
  MOD_RES (21)..(22)..(23)..(24): Xaa is A or G or absent
XXVPQDLSPISILYIXXXXXXXXXYKQYEMVVKSXK

SEQ ID NO: 19855 - protein, 39 aa, Artificial Sequence
  Non-cyclic GFR-binding peptide
  MOD_RES (6)..(7)..(39): Xaa is C or S
KASKAXXVPTKLSPISILYKDKGVVTYLKYHYGMAVSEX

SEQ ID NO: 19856 - protein, 41 aa, Artificial Sequence
  Non-cyclic GFR-binding peptide
  MOD_RES (7)..(39)..(41): Xaa is C or S
HVTKPTXAPTKLSPISVLYIDDSSNVIYKQYENMVVRSXGX

SEQ ID NO: 19857 - protein, 38 aa, Artificial Sequence
  Non-cyclic GFR-binding peptide
  MOD_RES (3)..(4)..(36)..(38): Xaa is C or S
KAXXVPTELEPISMLYLDEYDKVVKFKYEEMVVEGXGX

SEQ ID NO: 19858 - protein, 39 aa, Artificial Sequence
  Non-cyclic GFR-binding peptide
  MOD_RES (3)..(4)..(37)..(39): Xaa is C or S
  MOD_RES (18)..(19)..(20)..(21)..(22): Xaa is A or G
  MOD_RES (23)..(24)..(25)..(26): Xaa is A or G or absent
SPXXVPQDLSPISILYIXXXXXXXXXYKQYEMVVKSXKX

SEQ ID NO: 19859 - protein, 41 aa, Artificial Sequence
  Non-cyclic GFR-binding peptide
  MOD_RES (3)..(4)..(38)..(40): Xaa is C or S
  MOD_RES (18)..(19)..(20)..(21)..(22): Xaa is A or G
  MOD_RES (23)..(24)..(25)..(26): Xaa is A or G or absent
ASXXVPARLSPISILYKXXXXXXXXXLKYHYDMVVEAXGXR

SEQ ID NO: 19860 - protein, 33 aa, Artificial Sequence
  Non-cyclic GFR-binding peptide
  MOD_RES (14)..(15)..(16)..(17)..(18): Xaa is A or G
  MOD_RES (19)..(20)..(21)..(22): Xaa is A or G or absent
VPTELEPISMLYLXXXXXXXXXKFKYEEMVVEG

SEQ ID NO: 19861 - protein, 39 aa, Artificial Sequence
  Non-cyclic GFR-binding peptide
  MOD_RES (2)..(3)..(36)..(38): Xaa is C or S
  MOD_RES (17)..(18)..(19)..(20)..(21): Xaa is A or G
  MOD_RES (22)..(23)..(24)..(25): Xaa is A or G or absent
PXXVPQDLSPISILYIXXXXXXXXXYKQYEMVVKSXKXS

SEQ ID NO: 19862 - protein, 36 aa, Artificial Sequence
  Non-cyclic GFR-binding peptide
  MOD_RES (1)..(2): Xaa is C or S
  MOD_RES (16)..(17)..(18)..(19)..(20): Xaa is A or G
  MOD_RES (21)..(22)..(23)..(24): Xaa is A or G or absent
XXVPTKLSPISVLYIXXXXXXXXXYKQYEEGMSVAE

SEQ ID NO: 19863 - protein, 36 aa, Artificial Sequence
  Non-cyclic GFR-binding peptide
  MOD_RES (1)..(33)..(35): Xaa is C or S
XAPTQLEPISVLYLDDSSNVIKFKYENMVVRAXGXH

SEQ ID NO: 19864 - protein, 37 aa, Artificial Sequence
  Non-cyclic GFR-binding peptide
  MOD_RES (4)..(5): Xaa is C or S
  MOD_RES (19)..(20)..(21)..(22)..(23): Xaa is A or G
  MOD_RES (24)..(25)..(26)..(27): Xaa is A or G or absent
AAPXXVPQALEPISILYLXXXXXXXXXKFKYEMIVRS

SEQ ID NO: 19865 - protein, 34 aa, Artificial Sequence
  Non-cyclic GFR-binding peptide
  MOD_RES (31)..(33): Xaa is C or S
VPQDLEPISILYLVGRTPKVKFKYEMVVKSXKXS

SEQ ID NO: 19866 - protein, 34 aa, Artificial Sequence
  Non-cyclic GFR-binding peptide
  MOD_RES (1)..(2): Xaa is C or S
  MOD_RES (16)..(17)..(18)..(19)..(20): Xaa is A or G
  MOD_RES (21)..(22)..(23)..(24): Xaa is A or G or absent
XXVPTELEPISMLYLXXXXXXXXXKFKYEDMVVE

SEQ ID NO: 19867 - protein, 44 aa, Artificial Sequence
  Non-cyclic GFR-binding peptide
  MOD_RES (6)..(7)..(41)..(43): Xaa is C or S
  MOD_RES (21)..(22)..(23)..(24)..(25): Xaa is A or G
  MOD_RES (26)..(27)..(28)..(29): Xaa is A or G or absent
KASKAXXVPTKLSPISILYKXXXXXXXXXLKYHYGMAVSEXGXR

SEQ ID NO: 19868 - protein, 37 aa, Artificial Sequence
  Non-cyclic GFR-binding peptide
  MOD_RES (34)..(36): Xaa is C or S
  MOD_RES (14)..(15)..(16)..(17)..(18): Xaa is A or G
  MOD_RES (19)..(20)..(21)..(22): Xaa is A or G or absent
APTKLEPISVLYLXXXXXXXXXKFKYENMVVRSXGXH

SEQ ID NO: 19869 - protein, 38 aa, Artificial Sequence
  Non-cyclic GFR-binding peptide
  MOD_RES (3)..(4)..(35)..(37): Xaa is C or S
SPXXVPQDLSPISILYIVGRTPKVYKQYEMVVKSXKXS

SEQ ID NO: 19870 - protein, 40 aa, Artificial Sequence
  Non-cyclic GFR-binding peptide
  MOD_RES (6)..(7): Xaa is C or S
  MOD_RES (21)..(22)..(23)..(24)..(25): Xaa is A or G
  MOD_RES (26)..(27)..(28)..(29): Xaa is A or G or absent
KASKAXXVPTKLSPISILYIXXXXXXXXXYKQYEGMAVSE

SEQ ID NO: 19871 - protein, 39 aa, Artificial Sequence
  Non-cyclic GFR-binding peptide
  MOD_RES (6)..(7)..(39): Xaa is C or S
AAPASXXVPARLSPISILYKDAANNVVLKYHYDMVVEAX

SEQ ID NO: 19872 - protein, 36 aa, Artificial Sequence
  Non-cyclic GFR-binding peptide
  MOD_RES (1)..(2)..(34)..(36): Xaa is C or S
XXVPTKLNAISILYFDKGVVTYLKKYRGMAVSEXGX

SEQ ID NO: 19873 - protein, 39 aa, Artificial Sequence
  Non-cyclic GFR-binding peptide
  MOD_RES (5)..(6)..(38): Xaa is C or S
VPKAXXAPTKLEPISVLYLDSSNNVIKFKYENMVVKAXG

SEQ ID NO: 19874 - protein, 37 aa, Artificial Sequence
  Non-cyclic GFR-binding peptide
  MOD_RES (3)..(4)..(36): Xaa is C or S
KPXXAPTKLEPISVLYLDDSSNVIKFKYENMVVRSXG

SEQ ID NO: 19875 - protein, 38 aa, Artificial Sequence
  Non-cyclic GFR-binding peptide
  MOD_RES (2)..(3)..(37): Xaa is C or S
  MOD_RES (17)..(18)..(19)..(20)..(21): Xaa is A or G
  MOD_RES (22)..(23)..(24)..(25): Xaa is A or G or absent
AXXVPTELSPISMLYIXXXXXXXXXYKQYEDMVVEGXG

SEQ ID NO: 19876 - protein, 42 aa, Artificial Sequence
  Non-cyclic GFR-binding peptide
  MOD_RES (6)..(7)..(39)..(41): Xaa is C or S
YVPKPXXAPTKLEPISVLYLDDSSNVIKFKYENMVVRSXGXH

SEQ ID NO: 19877 - protein, 38 aa, Artificial Sequence
  Non-cyclic GFR-binding peptide
  MOD_RES (1)..(35)..(37): Xaa is C or S
  MOD_RES (15)..(16)..(17)..(18)..(19): Xaa is A or G
  MOD_RES (20)..(21)..(22)..(23): Xaa is A or G or absent
XVPTKLSPISILYKXXXXXXXXXLKYHYGMAVSEXGXR

SEQ ID NO: 19878 - protein, 36 aa, Artificial Sequence
  Non-cyclic GFR-binding peptide
  MOD_RES (1)..(34)..(36): Xaa is C or S
  MOD_RES (15)..(16)..(17)..(18)..(19): Xaa is A or G
  MOD_RES (20)..(21)..(22)..(23): Xaa is A or G or absent
XVSQDLEPISILYLXXXXXXXXXKFKYEMIVKSXKX

SEQ ID NO: 19879 - protein, 34 aa, Artificial Sequence
  Non-cyclic GFR-binding peptide
  MOD_RES (1)..(2): Xaa is C or S
  MOD_RES (16)..(17)..(18)..(19)..(20): Xaa is A or G
  MOD_RES (21)..(22)..(23)..(24): Xaa is A or G or absent
XXAPTKLSPISVLYIXXXXXXXXXYKQYENMVVK

SEQ ID NO: 19880 - protein, 34 aa, Artificial Sequence
  Non-cyclic GFR-binding peptide
  MOD_RES (1)..(2): Xaa is C or S
  MOD_RES (16)..(17)..(18)..(19)..(20): Xaa is A or G
  MOD_RES (21)..(22)..(23)..(24): Xaa is A or G or absent
XXAPTKLSPISVLYIXXXXXXXXXYKQYENMVVR

SEQ ID NO: 19881 - protein, 38 aa, Artificial Sequence
  Non-cyclic GFR-binding peptide
  MOD_RES (2)..(3)..(38): Xaa is C or S
  MOD_RES (17)..(18)..(19)..(20)..(21): Xaa is A or G
  MOD_RES (22)..(23)..(24)..(25): Xaa is A or G or absent
AXXVPTKLEPISVLYLXXXXXXXXXKFKYEEGMSVAEX

SEQ ID NO: 19882 - protein, 38 aa, Artificial Sequence
  Non-cyclic GFR-binding peptide
  MOD_RES (1)..(35)..(37): Xaa is C or S
  MOD_RES (15)..(16)..(17)..(18)..(19): Xaa is A or G
  MOD_RES (20)..(21)..(22)..(23): Xaa is A or G or absent
XVPTELEPISMLYLXXXXXXXXXKFKYEDMVVEGXGXR

SEQ ID NO: 19883 - protein, 37 aa, Artificial Sequence
  Non-cyclic GFR-binding peptide
  MOD_RES (1)..(2)..(37): Xaa is C or S
  MOD_RES (16)..(17)..(18)..(19)..(20): Xaa is A or G
  MOD_RES (21)..(22)..(23)..(24): Xaa is A or G or absent
XXVPTKLSPISVLYIXXXXXXXXXYKQYEEGMSVAEX

SEQ ID NO: 19884 - protein, 35 aa, Artificial Sequence
  Non-cyclic GFR-binding peptide
  MOD_RES (4)..(5): Xaa is C or S
SKAXXVPTKLSPISILYIDKGVVTYYKQYEGMAVS

SEQ ID NO: 19885 - protein, 41 aa, Artificial Sequence
  Non-cyclic GFR-binding peptide
  MOD_RES (5)..(6)..(40): Xaa is C or S
  MOD_RES (20)..(21)..(22)..(23)..(24): Xaa is A or G
  MOD_RES (25)..(26)..(27)..(28): Xaa is A or G or absent
VPKPXXAPTQLEPISVLYLXXXXXXXXXKFKYENMVVRAXG

SEQ ID NO: 19886 - protein, 37 aa, Artificial Sequence
  Non-cyclic GFR-binding peptide
  MOD_RES (1)..(35)..(37): Xaa is C or S
  MOD_RES (15)..(16)..(17)..(18)..(19): Xaa is A or G
  MOD_RES (20)..(21)..(22)..(23): Xaa is A or G or absent
XAPTKLSPISVLYIXXXXXXXXXYKQYENMVVRSXGX

SEQ ID NO: 19887 - protein, 39 aa, Artificial Sequence
  Non-cyclic GFR-binding peptide
  MOD_RES (1)..(36)..(38): Xaa is C or S
  MOD_RES (15)..(16)..(17)..(18)..(19): Xaa is A or G
  MOD_RES (20)..(21)..(22)..(23): Xaa is A or G or absent
XVPTKLSPISVLYIXXXXXXXXXYKQYEEGMSVAEXGXR

SEQ ID NO: 19888 - protein, 38 aa, Artificial Sequence
  Non-cyclic GFR-binding peptide
  MOD_RES (6)..(7): Xaa is C or S
AAPASXXVPARLEPISILYLDAANNVVKFKYEDMVVEA

SEQ ID NO: 19889 - protein, 42 aa, Artificial Sequence
  Non-cyclic GFR-binding peptide
  MOD_RES (5)..(6)..(40)..(42): Xaa is C or S
  MOD_RES (20)..(21)..(22)..(23)..(24): Xaa is A or G
  MOD_RES (25)..(26)..(27)..(28): Xaa is A or G or absent
IPKAXXVPTELSPISMLYIXXXXXXXXXYKQYEEMVVEGXGX

SEQ ID NO: 19890 - protein, 33 aa, Artificial Sequence
  Non-cyclic GFR-binding peptide
  MOD_RES (1)..(1): Xaa is C or S
  MOD_RES (15)..(16)..(17)..(18)..(19): Xaa is A or G
  MOD_RES (20)..(21)..(22)..(23): Xaa is A or G or absent
XVPQDLEPISILYLXXXXXXXXXKFKYEMVVKS

SEQ ID NO: 19891 - protein, 36 aa, Artificial Sequence
  Non-cyclic GFR-binding peptide
  MOD_RES (2)..(3)..(34)..(36): Xaa is C or S
PXXVPQALSPISILYIVGRKPKVYKQYEMIVRSXKX

SEQ ID NO: 19892 - protein, 40 aa, Artificial Sequence
  Non-cyclic GFR-binding peptide
  MOD_RES (4)..(5)..(37)..(39): Xaa is C or S
PKPXXAPTKLEPISVLYLDDSSNVIKFKYENMVVRSXGXH

SEQ ID NO: 19893 - protein, 34 aa, Artificial Sequence
  Non-cyclic GFR-binding peptide
  MOD_RES (1)..(33): Xaa is C or S
XVPTKLNAISILYFDKGVVTYLKKYRGMAVSEXG

SEQ ID NO: 19894 - protein, 33 aa, Artificial Sequence
  Non-cyclic GFR-binding peptide
  MOD_RES (2)..(3): Xaa is C or S
SXXVPARLEPISILYLDAANNVVKFKYEDMVVE

SEQ ID NO: 19895 - protein, 37 aa, Artificial Sequence
  Non-cyclic GFR-binding peptide
  MOD_RES (3)..(4)..(37): Xaa is C or S
KAXXVPTKLEPISVLYLDDMGVPTKFKYEEGMSVAEX

SEQ ID NO: 19896 - protein, 41 aa, Artificial Sequence
  Non-cyclic GFR-binding peptide
  MOD_RES (6)..(7): Xaa is C or S
  MOD_RES (21)..(22)..(23)..(24)..(25): Xaa is A or G
  MOD_RES (26)..(27)..(28)..(29): Xaa is A or G or absent
KVGKAXXVPTKLEPISVLYLXXXXXXXXXKFKYEEGMSVAE

SEQ ID NO: 19897 - protein, 37 aa, Artificial Sequence
  Non-cyclic GFR-binding peptide
  MOD_RES (1)..(2)..(35)..(37): Xaa is C or S
  MOD_RES (16)..(17)..(18)..(19)..(20): Xaa is A or G
  MOD_RES (21)..(22)..(23)..(24): Xaa is A or G or absent
XXVPQALSPISILYIXXXXXXXXXYKQYEMIVRSXKX

SEQ ID NO: 19898 - protein, 39 aa, Artificial Sequence
  Non-cyclic GFR-binding peptide
  MOD_RES (6)..(7)..(39): Xaa is C or S
KIPKAXXVPTELSPISMLYIDENEKVVYKQYEDMVVEGX

SEQ ID NO: 19899 - protein, 41 aa, Artificial Sequence
  Non-cyclic GFR-binding peptide
  MOD_RES (5)..(6)..(40): Xaa is C or S
  MOD_RES (20)..(21)..(22)..(23)..(24): Xaa is A or G
  MOD_RES (25)..(26)..(27)..(28): Xaa is A or G or absent
ASKAXXVPTKLSPISILYIXXXXXXXXXYKQYEGMAVSEXG

SEQ ID NO: 19900 - protein, 33 aa, Artificial Sequence
  Non-cyclic GFR-binding peptide
  MOD_RES (1)..(1): Xaa is C or S
  MOD_RES (15)..(16)..(17)..(18)..(19): Xaa is A or G
  MOD_RES (20)..(21)..(22)..(23): Xaa is A or G or absent
XAPTKLEPISVLYLXXXXXXXXXKFKYENMVVR

SEQ ID NO: 19901 - protein, 31 aa, Artificial Sequence
  Non-cyclic GFR-binding peptide
  MOD_RES (1)..(1): Xaa is C or S
XVSQDLSPISILYIIGKTPKIYKQYEMIVKS

SEQ ID NO: 19902 - protein, 33 aa, Artificial Sequence
  Non-cyclic GFR-binding peptide
  MOD_RES (1)..(1): Xaa is C or S
  MOD_RES (15)..(16)..(17)..(18)..(19): Xaa is A or G
  MOD_RES (20)..(21)..(22)..(23): Xaa is A or G or absent
XAPTKLEPISVLYLXXXXXXXXXKFKYENMVVK

SEQ ID NO: 19903 - protein, 33 aa, Artificial Sequence
  Non-cyclic GFR-binding peptide
  MOD_RES (14)..(15)..(16)..(17)..(18): Xaa is A or G
  MOD_RES (19)..(20)..(21)..(22): Xaa is A or G or absent
APTKLSPISVLYIXXXXXXXXXYKQYENMVVKA

SEQ ID NO: 19904 - protein, 36 aa, Artificial Sequence
  Non-cyclic GFR-binding peptide
  MOD_RES (3)..(4)..(36): Xaa is C or S
ASXXVPARLSPISILYKDAANNVVLKYHYDMVVEAX

SEQ ID NO: 19905 - protein, 36 aa, Artificial Sequence
  Non-cyclic GFR-binding peptide
  MOD_RES (5)..(6): Xaa is C or S
VPKAXXAPTKLSPISVLYIDSSNNVIYKQYENMVVK

SEQ ID NO: 19906 - protein, 42 aa, Artificial Sequence
  Non-cyclic GFR-binding peptide
  MOD_RES (6)..(40)..(42): Xaa is C or S
  MOD_RES (20)..(21)..(22)..(23)..(24): Xaa is A or G
  MOD_RES (25)..(26)..(27)..(28): Xaa is A or G or absent
VTKPTXAPTKLEPISVLYLXXXXXXXXXKFKYENMVVRSXGX

SEQ ID NO: 19907 - protein, 36 aa, Artificial Sequence
  Non-cyclic GFR-binding peptide
  MOD_RES (5)..(6): Xaa is C or S
ASKAXXVPTKLNAISILYFDKGVVTYLKKYRGMAVS

SEQ ID NO: 19908 - protein, 35 aa, Artificial Sequence
  Non-cyclic GFR-binding peptide
  MOD_RES (1)..(34): Xaa is C or S
  MOD_RES (15)..(16)..(17)..(18)..(19): Xaa is A or G
  MOD_RES (20)..(21)..(22)..(23): Xaa is A or G or absent
XVPQDLSPISILYIXXXXXXXXXYKQYEMVVKSXK

SEQ ID NO: 19909 - protein, 36 aa, Artificial Sequence
  Non-cyclic GFR-binding peptide
  MOD_RES (1)..(2)..(34)..(36): Xaa is C or S
XXAPTKLSPISVLYIDSSNNVIYKQYENMVVKAXGX

SEQ ID NO: 19910 - protein, 36 aa, Artificial Sequence
  Non-cyclic GFR-binding peptide
  MOD_RES (2)..(3)..(35): Xaa is C or S
AXXVPTELEPISMLYLDENEKVVKFKYEDMVVEGXG

SEQ ID NO: 19911 - protein, 35 aa, Artificial Sequence
  Non-cyclic GFR-binding peptide
  MOD_RES (1)..(2)..(34): Xaa is C or S
XXVPARLNAISILYFDAANNVVLKKYRDMVVEAXG

SEQ ID NO: 19912 - protein, 39 aa, Artificial Sequence
  Non-cyclic GFR-binding peptide
  MOD_RES (4)..(5)..(37)..(39): Xaa is C or S
PKAXXVPTELEPISMLYLDEYDKVVKFKYEEMVVEGXGX

SEQ ID NO: 19913 - protein, 33 aa, Artificial Sequence
  Non-cyclic GFR-binding peptide
  MOD_RES (1)..(1): Xaa is C or S
  MOD_RES (15)..(16)..(17)..(18)..(19): Xaa is A or G
  MOD_RES (20)..(21)..(22)..(23): Xaa is A or G or absent
XVPQDLSPISILYIXXXXXXXXXYKQYEMVVKS

SEQ ID NO: 19914 - protein, 37 aa, Artificial Sequence
  Non-cyclic GFR-binding peptide
  MOD_RES (1)..(2)..(36): Xaa is C or S
  MOD_RES (16)..(17)..(18)..(19)..(20): Xaa is A or G
  MOD_RES (21)..(22)..(23)..(24): Xaa is A or G or absent
XXAPTKLEPISVLYLXXXXXXXXXKFKYENMVVRSXG

SEQ ID NO: 19915 - protein, 35 aa, Artificial Sequence
  Non-cyclic GFR-binding peptide
  MOD_RES (1)..(2)..(34): Xaa is C or S
XXAPTKLEPISVLYLDSSNNVIKFKYENMVVKAXG

SEQ ID NO: 19916 - protein, 35 aa, Artificial Sequence
  Non-cyclic GFR-binding peptide
  MOD_RES (1)..(2)..(34): Xaa is C or S
XXVPARLEPISILYLDAANNVVKFKYEDMVVEAXG

SEQ ID NO: 19917 - protein, 41 aa, Artificial Sequence
  Non-cyclic GFR-binding peptide
  MOD_RES (3)..(4)..(38)..(40): Xaa is C or S
  MOD_RES (18)..(19)..(20)..(21)..(22): Xaa is A or G
  MOD_RES (23)..(24)..(25)..(26): Xaa is A or G or absent
KAXXVPTELSPISMLYIXXXXXXXXXYKQYEEMVVEGXGXR

SEQ ID NO: 19918 - protein, 35 aa, Artificial Sequence
  Non-cyclic GFR-binding peptide
  MOD_RES (1)..(2)..(34): Xaa is C or S
XXAPTKLSPISVLYIDDSSNVIYKQYENMVVRSXG

SEQ ID NO: 19919 - protein, 39 aa, Artificial Sequence
  Non-cyclic GFR-binding peptide
  MOD_RES (5)..(6)..(38): Xaa is C or S
VPKPXXAPTQLSPISVLYIDDSSNVIYKQYENMVVRAXG

SEQ ID NO: 19920 - protein, 36 aa, Artificial Sequence
  Non-cyclic GFR-binding peptide
  MOD_RES (5)..(6): Xaa is C or S
SAAPXXVPQALEPISILYLVGRKPKVKFKYEMIVRS

SEQ ID NO: 19921 - protein, 31 aa, Artificial Sequence
  Non-cyclic GFR-binding peptide
  MOD_RES (1)..(1): Xaa is C or S
XAPTKLEPISVLYLDSSNNVIKFKYENMVVK

SEQ ID NO: 19922 - protein, 35 aa, Artificial Sequence
  Non-cyclic GFR-binding peptide
  MOD_RES (1)..(33)..(35): Xaa is C or S
XVPARLSPISILYKDAANNVVLKYHYDMVVEAXGX

SEQ ID NO: 19923 - protein, 32 aa, Artificial Sequence
  Non-cyclic GFR-binding peptide
VPTKLSPISVLYIDDMGVPTYKQYEEGMSVAE

SEQ ID NO: 19924 - protein, 42 aa, Artificial Sequence
  Non-cyclic GFR-binding peptide
  MOD_RES (5)..(6)..(40)..(42): Xaa is C or S
  MOD_RES (20)..(21)..(22)..(23)..(24): Xaa is A or G
  MOD_RES (25)..(26)..(27)..(28): Xaa is A or G or absent
IPKAXXVPTELSPISMLYIXXXXXXXXXYKQYEDMVVEGXGX

SEQ ID NO: 19925 - protein, 42 aa, Artificial Sequence
  Non-cyclic GFR-binding peptide
  MOD_RES (3)..(4)..(39)..(41): Xaa is C or S
  MOD_RES (18)..(19)..(20)..(21)..(22): Xaa is A or G
  MOD_RES (23)..(24)..(25)..(26): Xaa is A or G or absent
KAXXVPTKLSPISVLYIXXXXXXXXXYKQYEEGMSVAEXGXR

SEQ ID NO: 19926 - protein, 36 aa, Artificial Sequence
  Non-cyclic GFR-binding peptide
  MOD_RES (1)..(33)..(35): Xaa is C or S
XVPTELEPISMLYLDEYDKVVKFKYEEMVVEGXGXR

SEQ ID NO: 19927 - protein, 43 aa, Artificial Sequence
  Non-cyclic GFR-binding peptide
  MOD_RES (6)..(7)..(41)..(43): Xaa is C or S
  MOD_RES (21)..(22)..(23)..(24)..(25): Xaa is A or G
  MOD_RES (26)..(27)..(28)..(29): Xaa is A or G or absent
AAPASXXVPARLNAISILYFXXXXXXXXXLKKYRDMVVEAXGX

SEQ ID NO: 19928 - protein, 34 aa, Artificial Sequence
  Non-cyclic GFR-binding peptide
  MOD_RES (1)..(2): Xaa is C or S
  MOD_RES (16)..(17)..(18)..(19)..(20): Xaa is A or G
  MOD_RES (21)..(22)..(23)..(24): Xaa is A or G or absent
XXVPQDLSPISILYIXXXXXXXXXYKQYEMVVKS

SEQ ID NO: 19929 - protein, 36 aa, Artificial Sequence
  Non-cyclic GFR-binding peptide
  MOD_RES (3)..(4): Xaa is C or S
  MOD_RES (18)..(19)..(20)..(21)..(22): Xaa is A or G
  MOD_RES (23)..(24)..(25)..(26): Xaa is A or G or absent
KAXXVPTKLSPISILYKXXXXXXXXXLKYHYGMAVS

SEQ ID NO: 19930 - protein, 32 aa, Artificial Sequence
  Non-cyclic GFR-binding peptide
  MOD_RES (1)..(2): Xaa is C or S
XXVPTKLSPISILYIDKGVVTYYKQYEGMAVS

SEQ ID NO: 19931 - protein, 34 aa, Artificial Sequence
  Non-cyclic GFR-binding peptide
  MOD_RES (2)..(3): Xaa is C or S
AXXVPTKLNAISILYFDKGVVTYLKKYRGMAVSE

SEQ ID NO: 19932 - protein, 39 aa, Artificial Sequence
  Non-cyclic GFR-binding peptide
  MOD_RES (5)..(6): Xaa is C or S
  MOD_RES (20)..(21)..(22)..(23)..(24): Xaa is A or G
  MOD_RES (25)..(26)..(27)..(28): Xaa is A or G or absent
IPKAXXVPTELEPISMLYLXXXXXXXXXKFKYEEMVVEG

SEQ ID NO: 19933 - protein, 36 aa, Artificial Sequence
  Non-cyclic GFR-binding peptide
  MOD_RES (2)..(3)..(35): Xaa is C or S
AXXVPTKLSPISILYIDKGVVTYYKQYEGMAVSEXG

SEQ ID NO: 19934 - protein, 41 aa, Artificial Sequence
  Non-cyclic GFR-binding peptide
  MOD_RES (5)..(6)..(40): Xaa is C or S
  MOD_RES (20)..(21)..(22)..(23)..(24): Xaa is A or G
  MOD_RES (25)..(26)..(27)..(28): Xaa is A or G or absent
IPKAXXVPTELSPISMLYIXXXXXXXXXYKQYEEMVVEGXG

SEQ ID NO: 19935 - protein, 39 aa, Artificial Sequence
  Non-cyclic GFR-binding peptide
  MOD_RES (1)..(2)..(36)..(38): Xaa is C or S
  MOD_RES (16)..(17)..(18)..(19)..(20): Xaa is A or G
  MOD_RES (21)..(22)..(23)..(24): Xaa is A or G or absent
XXVPTELSPISMLYIXXXXXXXXXYKQYEDMVVEGXGXR

SEQ ID NO: 19936 - protein, 35 aa, Artificial Sequence
  Non-cyclic GFR-binding peptide
  MOD_RES (4)..(5): Xaa is C or S
AAPXXVPQALSPISILYIVGRKPKVYKQYEMIVRS

SEQ ID NO: 19937 - protein, 34 aa, Artificial Sequence
  Non-cyclic GFR-binding peptide
  MOD_RES (1)..(2): Xaa is C or S
  MOD_RES (16)..(17)..(18)..(19)..(20): Xaa is A or G
  MOD_RES (21)..(22)..(23)..(24): Xaa is A or G or absent
XXAPTKLEPISVLYLXXXXXXXXXKFKYENMVVR

SEQ ID NO: 19938 - protein, 39 aa, Artificial Sequence
  Non-cyclic GFR-binding peptide
  MOD_RES (6)..(7): Xaa is C or S
  MOD_RES (21)..(22)..(23)..(24)..(25): Xaa is A or G
  MOD_RES (26)..(27)..(28)..(29): Xaa is A or G or absent
YVPKPXXAPTKLSPISVLYIXXXXXXXXXYKQYENMVVR

SEQ ID NO: 19939 - protein, 35 aa, Artificial Sequence
  Non-cyclic GFR-binding peptide
  MOD_RES (3)..(35): Xaa is C or S
PTXAPTKLSPISVLYIDDSSNVIYKQYENMVVRSX

SEQ ID NO: 19940 - protein, 39 aa, Artificial Sequence
  Non-cyclic GFR-binding peptide
  MOD_RES (6)..(7)..(39): Xaa is C or S
YVPKPXXAPTKLEPISVLYLDDSSNVIKFKYENMVVRSX

SEQ ID NO: 19941 - protein, 41 aa, Artificial Sequence
  Non-cyclic GFR-binding peptide
  MOD_RES (7)..(39)..(41): Xaa is C or S
HVTKPTXAPTKLEPISVLYLDDSSNVIKFKYENMVVRSXGX

SEQ ID NO: 19942 - protein, 35 aa, Artificial Sequence
  Non-cyclic GFR-binding peptide
  MOD_RES (1)..(35): Xaa is C or S
  MOD_RES (15)..(16)..(17)..(18)..(19): Xaa is A or G
  MOD_RES (20)..(21)..(22)..(23): Xaa is A or G or absent
XVPTELSPISMLYIXXXXXXXXXYKQYEEMVVEGX

SEQ ID NO: 19943 - protein, 41 aa, Artificial Sequence
  Non-cyclic GFR-binding peptide
  MOD_RES (4)..(5)..(39)..(41): Xaa is C or S
  MOD_RES (19)..(20)..(21)..(22)..(23): Xaa is A or G
  MOD_RES (24)..(25)..(26)..(27): Xaa is A or G or absent
PKAXXVPTELSPISMLYIXXXXXXXXXYKQYEDMVVEGXGX

SEQ ID NO: 19944 - protein, 40 aa, Artificial Sequence
  Non-cyclic GFR-binding peptide
  MOD_RES (6)..(7): Xaa is C or S
  MOD_RES (21)..(22)..(23)..(24)..(25): Xaa is A or G
  MOD_RES (26)..(27)..(28)..(29): Xaa is A or G or absent
YVPKPXXAPTKLSPISVLYIXXXXXXXXXYKQYENMVVRS

SEQ ID NO: 19945 - protein, 37 aa, Artificial Sequence
  Non-cyclic GFR-binding peptide
  MOD_RES (5)..(6)..(37): Xaa is C or S
SASPXXVPQDLEPISILYLVGRTPKVKFKYEMVVKSX

SEQ ID NO: 19946 - protein, 39 aa, Artificial Sequence
  Non-cyclic GFR-binding peptide
  MOD_RES (3)..(4)..(39): Xaa is C or S
  MOD_RES (18)..(19)..(20)..(21)..(22): Xaa is A or G
  MOD_RES (23)..(24)..(25)..(26): Xaa is A or G or absent
KAXXVPTKLSPISVLYIXXXXXXXXXYKQYEEGMSVAEX

SEQ ID NO: 19947 - protein, 34 aa, Artificial Sequence
  Non-cyclic GFR-binding peptide
  MOD_RES (2)..(3): Xaa is C or S
AXXVPTELEPISMLYLDENEKVVKFKYEDMVVEG

SEQ ID NO: 19948 - protein, 38 aa, Artificial Sequence
  Non-cyclic GFR-binding peptide
  MOD_RES (5)..(6): Xaa is C or S
  MOD_RES (20)..(21)..(22)..(23)..(24): Xaa is A or G
  MOD_RES (25)..(26)..(27)..(28): Xaa is A or G or absent
IPKAXXVPTELSPISMLYIXXXXXXXXXYKQYEDMVVE

SEQ ID NO: 19949 - protein, 37 aa, Artificial Sequence
  Non-cyclic GFR-binding peptide
  MOD_RES (2)..(3)..(35)..(37): Xaa is C or S
PXXAPTKLEPISVLYLDDSSNVIKFKYENMVVRSXGX

SEQ ID NO: 19950 - protein, 43 aa, Artificial Sequence
  Non-cyclic GFR-binding peptide
  MOD_RES (5)..(6)..(41)..(43): Xaa is C or S
  MOD_RES (20)..(21)..(22)..(23)..(24): Xaa is A or G
  MOD_RES (25)..(26)..(27)..(28): Xaa is A or G or absent
VGKAXXVPTKLSPISVLYIXXXXXXXXXYKQYEEGMSVAEXGX

SEQ ID NO: 19951 - protein, 41 aa, Artificial Sequence
  Non-cyclic GFR-binding peptide
  MOD_RES (5)..(6)..(41): Xaa is C or S
  MOD_RES (20)..(21)..(22)..(23)..(24): Xaa is A or G
  MOD_RES (25)..(26)..(27)..(28): Xaa is A or G or absent
VGKAXXVPTKLEPISVLYLXXXXXXXXXKFKYEEGMSVAEX

SEQ ID NO: 19952 - protein, 33 aa, Artificial Sequence
  Non-cyclic GFR-binding peptide
  MOD_RES (1)..(33): Xaa is C or S
XAPTQLSPISVLYIDDSSNVIYKQYENMVVRAX

SEQ ID NO: 19953 - protein, 34 aa, Artificial Sequence
  Non-cyclic GFR-binding peptide
  MOD_RES (3)..(4): Xaa is C or S
KAXXAPTKLSPISVLYIDSSNNVIYKQYENMVVK

SEQ ID NO: 19954 - protein, 38 aa, Artificial Sequence
  Non-cyclic GFR-binding peptide
  MOD_RES (2)..(3)..(36)..(38): Xaa is C or S
  MOD_RES (17)..(18)..(19)..(20)..(21): Xaa is A or G
  MOD_RES (22)..(23)..(24)..(25): Xaa is A or G or absent
PXXVPQDLEPISILYLXXXXXXXXXKFKYEMVVKSXKX

SEQ ID NO: 19955 - protein, 34 aa, Artificial Sequence
  Non-cyclic GFR-binding peptide
  MOD_RES (2)..(2): Xaa is C or S
  MOD_RES (16)..(17)..(18)..(19)..(20): Xaa is A or G
  MOD_RES (21)..(22)..(23)..(24): Xaa is A or G or absent
TXAPTKLSPISVLYIXXXXXXXXXYKQYENMVVR

SEQ ID NO: 19956 - protein, 34 aa, Artificial Sequence
  Non-cyclic GFR-binding peptide
  MOD_RES (2)..(3): Xaa is C or S
SXXVPARLEPISILYLDAANNVVKFKYEDMVVEA

SEQ ID NO: 19957 - protein, 39 aa, Artificial Sequence
  Non-cyclic GFR-binding peptide
  MOD_RES (5)..(6)..(37)..(39): Xaa is C or S
SASPXXVSQDLEPISILYLIGKTPKIKFKYEMIVKSXKX

SEQ ID NO: 19958 - protein, 40 aa, Artificial Sequence
  Non-cyclic GFR-binding peptide
  MOD_RES (3)..(4)..(38)..(40): Xaa is C or S
  MOD_RES (18)..(19)..(20)..(21)..(22): Xaa is A or G
  MOD_RES (23)..(24)..(25)..(26): Xaa is A or G or absent
KPXXAPTQLEPISVLYLXXXXXXXXXKFKYENMVVRAXGX

SEQ ID NO: 19959 - protein, 42 aa, Artificial Sequence
  Non-cyclic GFR-binding peptide
  MOD_RES (6)..(40)..(42): Xaa is C or S
  MOD_RES (20)..(21)..(22)..(23)..(24): Xaa is A or G
  MOD_RES (25)..(26)..(27)..(28): Xaa is A or G or absent
VTKPTXAPTKLSPISVLYIXXXXXXXXXYKQYENMVVRSXGX

SEQ ID NO: 19960 - protein, 36 aa, Artificial Sequence
  Non-cyclic GFR-binding peptide
  MOD_RES (3)..(4)..(36): Xaa is C or S
ASXXVPARLNAISILYFDAANNVVLKKYRDMVVEAX

SEQ ID NO: 19961 - protein, 35 aa, Artificial Sequence
  Non-cyclic GFR-binding peptide
  MOD_RES (34)..(34): Xaa is C or S
  MOD_RES (14)..(15)..(16)..(17)..(18): Xaa is A or G
  MOD_RES (19)..(20)..(21)..(22): Xaa is A or G or absent
APTKLEPISVLYLXXXXXXXXXKFKYENMVVRSXG

SEQ ID NO: 19962 - protein, 35 aa, Artificial Sequence
  Non-cyclic GFR-binding peptide
  MOD_RES (1)..(32)..(34): Xaa is C or S
XVPQALSPISILYIVGRKPKVYKQYEMIVRSXKXS

SEQ ID NO: 19963 - protein, 32 aa, Artificial Sequence
  Non-cyclic GFR-binding peptide
  MOD_RES (32)..(32): Xaa is C or S
APTQLEPISVLYLDDSSNVIKFKYENMVVRAX

SEQ ID NO: 19964 - protein, 35 aa, Artificial Sequence
  Non-cyclic GFR-binding peptide
  MOD_RES (1)..(33)..(35): Xaa is C or S
XVPARLEPISILYLDAANNVVKFKYEDMVVEAXGX

SEQ ID NO: 19965 - protein, 34 aa, Artificial Sequence
  Non-cyclic GFR-binding peptide
  MOD_RES (3)..(4): Xaa is C or S
APXXVPQALEPISILYLVGRKPKVKFKYEMIVRS

SEQ ID NO: 19966 - protein, 36 aa, Artificial Sequence
  Non-cyclic GFR-binding peptide
  MOD_RES (1)..(2)..(33)..(35): Xaa is C or S
XXVPQALEPISILYLVGRKPKVKFKYEMIVRSXKXS

SEQ ID NO: 19967 - protein, 36 aa, Artificial Sequence
  Non-cyclic GFR-binding peptide
  MOD_RES (34)..(36): Xaa is C or S
  MOD_RES (14)..(15)..(16)..(17)..(18): Xaa is A or G
  MOD_RES (19)..(20)..(21)..(22): Xaa is A or G or absent
VPARLEPISILYLXXXXXXXXXKFKYEDMVVEAXGX

SEQ ID NO: 19968 - protein, 34 aa, Artificial Sequence
  Non-cyclic GFR-binding peptide
  MOD_RES (1)..(2): Xaa is C or S
XXVPTKLEPISVLYLDDMGVPTKFKYEEGMSVAE

SEQ ID NO: 19969 - protein, 39 aa, Artificial Sequence
  Non-cyclic GFR-binding peptide
  MOD_RES (3)..(4)..(38): Xaa is C or S
  MOD_RES (18)..(19)..(20)..(21)..(22): Xaa is A or G
  MOD_RES (23)..(24)..(25)..(26): Xaa is A or G or absent
ASXXVPARLEPISILYLXXXXXXXXXKFKYEDMVVEAXG

SEQ ID NO: 19970 - protein, 39 aa, Artificial Sequence
  Non-cyclic GFR-binding peptide
  MOD_RES (3)..(4)..(36)..(38): Xaa is C or S
KAXXVPTELSPISMLYIDEYDKVVYKQYEEMVVEGXGXR

SEQ ID NO: 19971 - protein, 38 aa, Artificial Sequence
  Non-cyclic GFR-binding peptide
  MOD_RES (4)..(36)..(38): Xaa is C or S
KPTXAPTKLSPISVLYIDDSSNVIYKQYENMVVRSXGX

SEQ ID NO: 19972 - protein, 31 aa, Artificial Sequence
  Non-cyclic GFR-binding peptide
VPTKLSPISILYIDKGVVTYYKQYEGMAVSE

SEQ ID NO: 19973 - protein, 35 aa, Artificial Sequence
  Non-cyclic GFR-binding peptide
  MOD_RES (34)..(34): Xaa is C or S
  MOD_RES (14)..(15)..(16)..(17)..(18): Xaa is A or G
  MOD_RES (19)..(20)..(21)..(22): Xaa is A or G or absent
VPTKLNAISILYFXXXXXXXXXLKKYRGMAVSEXG

SEQ ID NO: 19974 - protein, 33 aa, Artificial Sequence
  Non-cyclic GFR-binding peptide
  MOD_RES (14)..(15)..(16)..(17)..(18): Xaa is A or G
  MOD_RES (19)..(20)..(21)..(22): Xaa is A or G or absent
APTKLSPISVLYIXXXXXXXXXYKQYENMVVRS

SEQ ID NO: 19975 - protein, 40 aa, Artificial Sequence
  Non-cyclic GFR-binding peptide
  MOD_RES (5)..(6)..(40): Xaa is C or S
  MOD_RES (20)..(21)..(22)..(23)..(24): Xaa is A or G
  MOD_RES (25)..(26)..(27)..(28): Xaa is A or G or absent
IPKAXXVPTELSPISMLYIXXXXXXXXXYKQYEEMVVEGX

SEQ ID NO: 19976 - protein, 38 aa, Artificial Sequence
  Non-cyclic GFR-binding peptide
  MOD_RES (6)..(7): Xaa is C or S
TVPKPXXAPTQLSPISVLYIDDSSNVIYKQYENMVVRA

SEQ ID NO: 19977 - protein, 35 aa, Artificial Sequence
  Non-cyclic GFR-binding peptide
  MOD_RES (4)..(5): Xaa is C or S
PKAXXVPTELEPISMLYLDENEKVVKFKYEDMVVE

SEQ ID NO: 19978 - protein, 36 aa, Artificial Sequence
  Non-cyclic GFR-binding peptide
  MOD_RES (34)..(36): Xaa is C or S
  MOD_RES (14)..(15)..(16)..(17)..(18): Xaa is A or G
  MOD_RES (19)..(20)..(21)..(22): Xaa is A or G or absent
VPTELEPISMLYLXXXXXXXXXKFKYEEMVVEGXGX

SEQ ID NO: 19979 - protein, 32 aa, Artificial Sequence
  Non-cyclic GFR-binding peptide
  MOD_RES (1)..(32): Xaa is C or S
XVPQALEPISILYLVGRKPKVKFKYEMIVRSX

SEQ ID NO: 19980 - protein, 39 aa, Artificial Sequence
  Non-cyclic GFR-binding peptide
  MOD_RES (2)..(3)..(38): Xaa is C or S
  MOD_RES (17)..(18)..(19)..(20)..(21): Xaa is A or G
  MOD_RES (22)..(23)..(24)..(25): Xaa is A or G or absent
AXXVPTKLEPISVLYLXXXXXXXXXKFKYEEGMSVAEXG

SEQ ID NO: 19981 - protein, 31 aa, Artificial Sequence
  Non-cyclic GFR-binding peptide
APTKLEPISVLYLDDSSNVIKFKYENMVVRS

SEQ ID NO: 19982 - protein, 37 aa, Artificial Sequence
  Non-cyclic GFR-binding peptide
  MOD_RES (4)..(5)..(37): Xaa is C or S
PKPXXAPTKLSPISVLYIDDSSNVIYKQYENMVVRSX

SEQ ID NO: 19983 - protein, 36 aa, Artificial Sequence
  Non-cyclic GFR-binding peptide
  MOD_RES (2)..(3): Xaa is C or S
  MOD_RES (17)..(18)..(19)..(20)..(21): Xaa is A or G
  MOD_RES (22)..(23)..(24)..(25): Xaa is A or G or absent
AXXVPTELSPISMLYIXXXXXXXXXYKQYEEMVVEG

SEQ ID NO: 19984 - protein, 34 aa, Artificial Sequence
  Non-cyclic GFR-binding peptide
  MOD_RES (1)..(1): Xaa is C or S
  MOD_RES (15)..(16)..(17)..(18)..(19): Xaa is A or G
  MOD_RES (20)..(21)..(22)..(23): Xaa is A or G or absent
XVPTELSPISMLYIXXXXXXXXXYKQYEDMVVEG

SEQ ID NO: 19985 - protein, 42 aa, Artificial Sequence
  Non-cyclic GFR-binding peptide
  MOD_RES (6)..(7)..(41): Xaa is C or S
  MOD_RES (21)..(22)..(23)..(24)..(25): Xaa is A or G
  MOD_RES (26)..(27)..(28)..(29): Xaa is A or G or absent
KASKAXXVPTKLSPISILYIXXXXXXXXXYKQYEGMAVSEXG

SEQ ID NO: 19986 - protein, 38 aa, Artificial Sequence
  Non-cyclic GFR-binding peptide
  MOD_RES (4)..(5)..(37): Xaa is C or S
PKAXXAPTKLSPISVLYIDSSNNVIYKQYENMVVKAXG

SEQ ID NO: 19987 - protein, 40 aa, Artificial Sequence
  Non-cyclic GFR-binding peptide
  MOD_RES (6)..(7)..(39): Xaa is C or S
KASKAXXVPTKLSPISILYKDKGVVTYLKYHYGMAVSEXG

SEQ ID NO: 19988 - protein, 39 aa, Artificial Sequence
  Non-cyclic GFR-binding peptide
  MOD_RES (4)..(5)..(39): Xaa is C or S
  MOD_RES (19)..(20)..(21)..(22)..(23): Xaa is A or G
  MOD_RES (24)..(25)..(26)..(27): Xaa is A or G or absent
PKAXXVPTELEPISMLYLXXXXXXXXXKFKYEDMVVEGX

SEQ ID NO: 19989 - protein, 33 aa, Artificial Sequence
  Non-cyclic GFR-binding peptide
  MOD_RES (14)..(15)..(16)..(17)..(18): Xaa is A or G
  MOD_RES (19)..(20)..(21)..(22): Xaa is A or G or absent
VPTELSPISMLYIXXXXXXXXXYKQYEEMVVEG

SEQ ID NO: 19990 - protein, 37 aa, Artificial Sequence
  Non-cyclic GFR-binding peptide
  MOD_RES (3)..(4)..(36): Xaa is C or S
KAXXVPTKLSPISILYKDKGVVTYLKYHYGMAVSEXG

SEQ ID NO: 19991 - protein, 32 aa, Artificial Sequence
  Non-cyclic GFR-binding peptide
  MOD_RES (1)..(2): Xaa is C or S
XXVPARLSPISILYKDAANNVVLKYHYDMVVE

SEQ ID NO: 19992 - protein, 33 aa, Artificial Sequence
  Non-cyclic GFR-binding peptide
  MOD_RES (1)..(33): Xaa is C or S
XVPTKLSPISILYIDKGVVTYYKQYEGMAVSEX

SEQ ID NO: 19993 - protein, 42 aa, Artificial Sequence
  Non-cyclic GFR-binding peptide
  MOD_RES (6)..(7)..(40)..(42): Xaa is C or S
  MOD_RES (21)..(22)..(23)..(24)..(25): Xaa is A or G
  MOD_RES (26)..(27)..(28)..(29): Xaa is A or G or absent
ASASPXXVPQDLSPISILYIXXXXXXXXXYKQYEMVVKSXKX

SEQ ID NO: 19994 - protein, 40 aa, Artificial Sequence
  Non-cyclic GFR-binding peptide
  MOD_RES (7)..(7): Xaa is C or S
  MOD_RES (21)..(22)..(23)..(24)..(25): Xaa is A or G
  MOD_RES (26)..(27)..(28)..(29): Xaa is A or G or absent
HVTKPTXAPTKLEPISVLYLXXXXXXXXXKFKYENMVVRS

SEQ ID NO: 19995 - protein, 41 aa, Artificial Sequence
  Non-cyclic GFR-binding peptide
  MOD_RES (4)..(5)..(39)..(41): Xaa is C or S
  MOD_RES (19)..(20)..(21)..(22)..(23): Xaa is A or G
  MOD_RES (24)..(25)..(26)..(27): Xaa is A or G or absent
PKAXXVPTELEPISMLYLXXXXXXXXXKFKYEDMVVEGXGX

SEQ ID NO: 19996 - protein, 40 aa, Artificial Sequence
  Non-cyclic GFR-binding peptide
  MOD_RES (3)..(4)..(38)..(40): Xaa is C or S
  MOD_RES (18)..(19)..(20)..(21)..(22): Xaa is A or G
  MOD_RES (23)..(24)..(25)..(26): Xaa is A or G or absent
KAXXVPTKLSPISILYKXXXXXXXXXLKYHYGMAVSEXGX

SEQ ID NO: 19997 - protein, 32 aa, Artificial Sequence
  Non-cyclic GFR-binding peptide
  MOD_RES (14)..(15)..(16)..(17)..(18): Xaa is A or G
  MOD_RES (19)..(20)..(21)..(22): Xaa is A or G or absent
VSQDLEPISILYLXXXXXXXXXKFKYEMIVKS

SEQ ID NO: 19998 - protein, 38 aa, Artificial Sequence
  Non-cyclic GFR-binding peptide
  MOD_RES (4)..(5)..(36)..(38): Xaa is C or S
AAPXXVPQALEPISILYLVGRKPKVKFKYEMIVRSXKX

SEQ ID NO: 19999 - protein, 37 aa, Artificial Sequence
  Non-cyclic GFR-binding peptide
  MOD_RES (6)..(7): Xaa is C or S
AAPASXXVPARLSPISILYKDAANNVVLKYHYDMVVE

SEQ ID NO: 20000 - protein, 37 aa, Artificial Sequence
  Non-cyclic GFR-binding peptide
  MOD_RES (2)..(3)..(37): Xaa is C or S
  MOD_RES (17)..(18)..(19)..(20)..(21): Xaa is A or G
  MOD_RES (22)..(23)..(24)..(25): Xaa is A or G or absent
SXXVPARLSPISILYKXXXXXXXXXLKYHYDMVVEAX

SEQ ID NO: 20001 - protein, 38 aa, Artificial Sequence
  Non-cyclic GFR-binding peptide
  MOD_RES (2)..(3)..(36)..(38): Xaa is C or S
  MOD_RES (17)..(18)..(19)..(20)..(21): Xaa is A or G
  MOD_RES (22)..(23)..(24)..(25): Xaa is A or G or absent
PXXVSQDLSPISILYIXXXXXXXXXYKQYEMIVKSXKX

SEQ ID NO: 20002 - protein, 39 aa, Artificial Sequence
  Non-cyclic GFR-binding peptide
  MOD_RES (4)..(5)..(38): Xaa is C or S
  MOD_RES (19)..(20)..(21)..(22)..(23): Xaa is A or G
  MOD_RES (24)..(25)..(26)..(27): Xaa is A or G or absent
ASPXXVPQDLSPISILYIXXXXXXXXXYKQYEMVVKSXK

SEQ ID NO: 20003 - protein, 37 aa, Artificial Sequence
  Non-cyclic GFR-binding peptide
  MOD_RES (1)..(2)..(36): Xaa is C or S
  MOD_RES (16)..(17)..(18)..(19)..(20): Xaa is A or G
  MOD_RES (21)..(22)..(23)..(24): Xaa is A or G or absent
XXVPTKLNAISILYFXXXXXXXXXLKKYRGMAVSEXG

SEQ ID NO: 20004 - protein, 39 aa, Artificial Sequence
  Non-cyclic GFR-binding peptide
  MOD_RES (5)..(6)..(38): Xaa is C or S
ASKAXXVPTKLSPISILYIDKGVVTYYKQYEGMAVSEXG

SEQ ID NO: 20005 - protein, 33 aa, Artificial Sequence
  Non-cyclic GFR-binding peptide
  MOD_RES (1)..(33): Xaa is C or S
XAPTKLEPISVLYLDSSNNVIKFKYENMVVKAX

SEQ ID NO: 20006 - protein, 42 aa, Artificial Sequence
  Non-cyclic GFR-binding peptide
  MOD_RES (6)..(7)..(41): Xaa is C or S
  MOD_RES (21)..(22)..(23)..(24)..(25): Xaa is A or G
  MOD_RES (26)..(27)..(28)..(29): Xaa is A or G or absent
SIPKAXXVPTELEPISMLYLXXXXXXXXXKFKYEEMVVEGXG

SEQ ID NO: 20007 - protein, 40 aa, Artificial Sequence
  Non-cyclic GFR-binding peptide
  MOD_RES (6)..(7)..(40): Xaa is C or S
  MOD_RES (21)..(22)..(23)..(24)..(25): Xaa is A or G
  MOD_RES (26)..(27)..(28)..(29): Xaa is A or G or absent
ASAAPXXVPQALEPISILYLXXXXXXXXXKFKYEMIVRSX

SEQ ID NO: 20008 - protein, 36 aa, Artificial Sequence
  Non-cyclic GFR-binding peptide
  MOD_RES (3)..(4): Xaa is C or S
  MOD_RES (18)..(19)..(20)..(21)..(22): Xaa is A or G
  MOD_RES (23)..(24)..(25)..(26): Xaa is A or G or absent
SPXXVSQDLSPISILYIXXXXXXXXXYKQYEMIVKS

SEQ ID NO: 20009 - protein, 35 aa, Artificial Sequence
  Non-cyclic GFR-binding peptide
  MOD_RES (4)..(5): Xaa is C or S
SKAXXVPTKLNAISILYFDKGVVTYLKKYRGMAVS

SEQ ID NO: 20010 - protein, 43 aa, Artificial Sequence
  Non-cyclic GFR-binding peptide
  MOD_RES (5)..(6)..(40)..(42): Xaa is C or S
  MOD_RES (20)..(21)..(22)..(23)..(24): Xaa is A or G
  MOD_RES (25)..(26)..(27)..(28): Xaa is A or G or absent
VPKPXXAPTKLEPISVLYLXXXXXXXXXKFKYENMVVRSXGXH

SEQ ID NO: 20011 - protein, 34 aa, Artificial Sequence
  Non-cyclic GFR-binding peptide
  MOD_RES (34)..(34): Xaa is C or S
  MOD_RES (14)..(15)..(16)..(17)..(18): Xaa is A or G
  MOD_RES (19)..(20)..(21)..(22): Xaa is A or G or absent
APTQLSPISVLYIXXXXXXXXXYKQYENMVVRAX

SEQ ID NO: 20012 - protein, 34 aa, Artificial Sequence
  Non-cyclic GFR-binding peptide
  MOD_RES (34)..(34): Xaa is C or S
  MOD_RES (14)..(15)..(16)..(17)..(18): Xaa is A or G
  MOD_RES (19)..(20)..(21)..(22): Xaa is A or G or absent
APTKLEPISVLYLXXXXXXXXXKFKYENMVVRSX

SEQ ID NO: 20013 - protein, 39 aa, Artificial Sequence
  Non-cyclic GFR-binding peptide
  MOD_RES (3)..(4)..(36)..(38): Xaa is C or S
KAXXAPTKLEPISVLYLDSSNNVIKFKYENMVVKAXGXH

SEQ ID NO: 20014 - protein, 33 aa, Artificial Sequence
  Non-cyclic GFR-binding peptide
  MOD_RES (32)..(32): Xaa is C or S
VPTKLNAISILYFDKGVVTYLKKYRGMAVSEXG

SEQ ID NO: 20015 - protein, 39 aa, Artificial Sequence
  Non-cyclic GFR-binding peptide
  MOD_RES (5)..(37)..(39): Xaa is C or S
TKPTXAPTKLSPISVLYIDDSSNVIYKQYENMVVRSXGX

SEQ ID NO: 20016 - protein, 40 aa, Artificial Sequence
  Non-cyclic GFR-binding peptide
  MOD_RES (3)..(4)..(38)..(40): Xaa is C or S
  MOD_RES (18)..(19)..(20)..(21)..(22): Xaa is A or G
  MOD_RES (23)..(24)..(25)..(26): Xaa is A or G or absent
KAXXAPTKLEPISVLYLXXXXXXXXXKFKYENMVVKAXGX

SEQ ID NO: 20017 - protein, 37 aa, Artificial Sequence
  Non-cyclic GFR-binding peptide
  MOD_RES (1)..(2)..(34)..(36): Xaa is C or S
XXVPTELEPISMLYLDEYDKVVKFKYEEMVVEGXGXR

SEQ ID NO: 20018 - protein, 37 aa, Artificial Sequence
  Non-cyclic GFR-binding peptide
  MOD_RES (3)..(4)..(37): Xaa is C or S
  MOD_RES (18)..(19)..(20)..(21)..(22): Xaa is A or G
  MOD_RES (23)..(24)..(25)..(26): Xaa is A or G or absent
APXXVPQALSPISILYIXXXXXXXXXYKQYEMIVRSX

SEQ ID NO: 20019 - protein, 44 aa, Artificial Sequence
  Non-cyclic GFR-binding peptide
  MOD_RES (6)..(7)..(41)..(43): Xaa is C or S
  MOD_RES (21)..(22)..(23)..(24)..(25): Xaa is A or G
  MOD_RES (26)..(27)..(28)..(29): Xaa is A or G or absent
TVPKPXXAPTQLEPISVLYLXXXXXXXXXKFKYENMVVRAXGXH

SEQ ID NO: 20020 - protein, 36 aa, Artificial Sequence
  Non-cyclic GFR-binding peptide
  MOD_RES (1)..(2)..(34)..(36): Xaa is C or S
XXVPTELSPISMLYIDEYDKVVYKQYEEMVVEGXGX

SEQ ID NO: 20021 - protein, 36 aa, Artificial Sequence
  Non-cyclic GFR-binding peptide
  MOD_RES (1)..(34)..(36): Xaa is C or S
  MOD_RES (15)..(16)..(17)..(18)..(19): Xaa is A or G
  MOD_RES (20)..(21)..(22)..(23): Xaa is A or G or absent
XVPQALSPISILYIXXXXXXXXXYKQYEMIVRSXKX

SEQ ID NO: 20022 - protein, 34 aa, Artificial Sequence
  Non-cyclic GFR-binding peptide
  MOD_RES (1)..(2)..(33): Xaa is C or S
XXVPQALEPISILYLVGRKPKVKFKYEMIVRSXK

SEQ ID NO: 20023 - protein, 35 aa, Artificial Sequence
  Non-cyclic GFR-binding peptide
  MOD_RES (1)..(33)..(35): Xaa is C or S
XAPTKLSPISVLYIDDSSNVIYKQYENMVVRSXGX

SEQ ID NO: 20024 - protein, 40 aa, Artificial Sequence
  Non-cyclic GFR-binding peptide
  MOD_RES (2)..(3)..(37)..(39): Xaa is C or S
  MOD_RES (17)..(18)..(19)..(20)..(21): Xaa is A or G
  MOD_RES (22)..(23)..(24)..(25): Xaa is A or G or absent
SXXVPARLSPISILYKXXXXXXXXXLKYHYDMVVEAXGXR

SEQ ID NO: 20025 - protein, 42 aa, Artificial Sequence
  Non-cyclic GFR-binding peptide
  MOD_RES (6)..(7)..(41): Xaa is C or S
  MOD_RES (21)..(22)..(23)..(24)..(25): Xaa is A or G
  MOD_RES (26)..(27)..(28)..(29): Xaa is A or G or absent
KASKAXXVPTKLNAISILYFXXXXXXXXXLKKYRGMAVSEXG

SEQ ID NO: 20026 - protein, 35 aa, Artificial Sequence
  Non-cyclic GFR-binding peptide
  MOD_RES (2)..(3): Xaa is C or S
  MOD_RES (17)..(18)..(19)..(20)..(21): Xaa is A or G
  MOD_RES (22)..(23)..(24)..(25): Xaa is A or G or absent
AXXVPTKLSPISILYKXXXXXXXXXLKYHYGMAVS

SEQ ID NO: 20027 - protein, 37 aa, Artificial Sequence
  Non-cyclic GFR-binding peptide
  MOD_RES (34)..(36): Xaa is C or S
  MOD_RES (14)..(15)..(16)..(17)..(18): Xaa is A or G
  MOD_RES (19)..(20)..(21)..(22): Xaa is A or G or absent
VPTKLSPISILYIXXXXXXXXXYKQYEGMAVSEXGXR

SEQ ID NO: 20028 - protein, 35 aa, Artificial Sequence
  Non-cyclic GFR-binding peptide
  MOD_RES (1)..(2): Xaa is C or S
  MOD_RES (16)..(17)..(18)..(19)..(20): Xaa is A or G
  MOD_RES (21)..(22)..(23)..(24): Xaa is A or G or absent
XXVPTELEPISMLYLXXXXXXXXXKFKYEEMVVEG

SEQ ID NO: 20029 - protein, 35 aa, Artificial Sequence
  Non-cyclic GFR-binding peptide
  MOD_RES (1)..(32)..(34): Xaa is C or S
XVPQDLEPISILYLVGRTPKVKFKYEMVVKSXKXS

SEQ ID NO: 20030 - protein, 32 aa, Artificial Sequence
  Non-cyclic GFR-binding peptide
  MOD_RES (14)..(15)..(16)..(17)..(18): Xaa is A or G
  MOD_RES (19)..(20)..(21)..(22): Xaa is A or G or absent
VPTELSPISMLYIXXXXXXXXXYKQYEDMVVE

SEQ ID NO: 20031 - protein, 40 aa, Artificial Sequence
  Non-cyclic GFR-binding peptide
  MOD_RES (5)..(6)..(39): Xaa is C or S
VGKAXXVPTKLEPISVLYLDDMGVPTKFKYEEGMSVAEXG

SEQ ID NO: 20032 - protein, 43 aa, Artificial Sequence
  Non-cyclic GFR-binding peptide
  MOD_RES (6)..(7)..(41)..(43): Xaa is C or S
  MOD_RES (21)..(22)..(23)..(24)..(25): Xaa is A or G
  MOD_RES (26)..(27)..(28)..(29): Xaa is A or G or absent
KASKAXXVPTKLNAISILYFXXXXXXXXXLKKYRGMAVSEXGX

SEQ ID NO: 20033 - protein, 37 aa, Artificial Sequence
  Non-cyclic GFR-binding peptide
  MOD_RES (4)..(5)..(36): Xaa is C or S
ASPXXVSQDLSPISILYIIGKTPKIYKQYEMIVKSXK

SEQ ID NO: 20034 - protein, 33 aa, Artificial Sequence
  Non-cyclic GFR-binding peptide
  MOD_RES (1)..(1): Xaa is C or S
  MOD_RES (15)..(16)..(17)..(18)..(19): Xaa is A or G
  MOD_RES (20)..(21)..(22)..(23): Xaa is A or G or absent
XVPTELSPISMLYIXXXXXXXXXYKQYEDMVVE

SEQ ID NO: 20035 - protein, 39 aa, Artificial Sequence
  Non-cyclic GFR-binding peptide
  MOD_RES (6)..(7)..(39): Xaa is C or S
KASKAXXVPTKLSPISILYIDKGVVTYYKQYEGMAVSEX

SEQ ID NO: 20036 - protein, 41 aa, Artificial Sequence
  Non-cyclic GFR-binding peptide
  MOD_RES (4)..(5)..(39)..(41): Xaa is C or S
  MOD_RES (19)..(20)..(21)..(22)..(23): Xaa is A or G
  MOD_RES (24)..(25)..(26)..(27): Xaa is A or G or absent
PKAXXVPTELEPISMLYLXXXXXXXXXKFKYEEMVVEGXGX

SEQ ID NO: 20037 - protein, 33 aa, Artificial Sequence
  Non-cyclic GFR-binding peptide
  MOD_RES (3)..(3): Xaa is C or S
PTXAPTKLSPISVLYIDDSSNVIYKQYENMVVR

SEQ ID NO: 20038 - protein, 39 aa, Artificial Sequence
  Non-cyclic GFR-binding peptide
  MOD_RES (6)..(7): Xaa is C or S
  MOD_RES (21)..(22)..(23)..(24)..(25): Xaa is A or G
  MOD_RES (26)..(27)..(28)..(29): Xaa is A or G or absent
SIPKAXXVPTELEPISMLYLXXXXXXXXXKFKYEEMVVE

SEQ ID NO: 20039 - protein, 43 aa, Artificial Sequence
  Non-cyclic GFR-binding peptide
  MOD_RES (6)..(7)..(41)..(43): Xaa is C or S
  MOD_RES (21)..(22)..(23)..(24)..(25): Xaa is A or G
  MOD_RES (26)..(27)..(28)..(29): Xaa is A or G or absent
SIPKAXXVPTELSPISMLYIXXXXXXXXXYKQYEEMVVEGXGX

SEQ ID NO: 20040 - protein, 39 aa, Artificial Sequence
  Non-cyclic GFR-binding peptide
  MOD_RES (5)..(6)..(38): Xaa is C or S
IPKAXXVPTELEPISMLYLDEYDKVVKFKYEEMVVEGXG

SEQ ID NO: 20041 - protein, 37 aa, Artificial Sequence
  Non-cyclic GFR-binding peptide
  MOD_RES (2)..(34)..(36): Xaa is C or S
TXAPTKLEPISVLYLDDSSNVIKFKYENMVVRSXGXH

SEQ ID NO: 20042 - protein, 36 aa, Artificial Sequence
  Non-cyclic GFR-binding peptide
  MOD_RES (1)..(35): Xaa is C or S
  MOD_RES (15)..(16)..(17)..(18)..(19): Xaa is A or G
  MOD_RES (20)..(21)..(22)..(23): Xaa is A or G or absent
XAPTQLEPISVLYLXXXXXXXXXKFKYENMVVRAXG

SEQ ID NO: 20043 - protein, 39 aa, Artificial Sequence
  Non-cyclic GFR-binding peptide
  MOD_RES (3)..(4)..(36)..(38): Xaa is C or S
KAXXVPTELSPISMLYIDENEKVVYKQYEDMVVEGXGXR

SEQ ID NO: 20044 - protein, 38 aa, Artificial Sequence
  Non-cyclic GFR-binding peptide
  MOD_RES (2)..(3)..(35)..(37): Xaa is C or S
AXXAPTKLSPISVLYIDSSNNVIYKQYENMVVKAXGXH

SEQ ID NO: 20045 - protein, 35 aa, Artificial Sequence
  Non-cyclic GFR-binding peptide
  MOD_RES (3)..(4): Xaa is C or S
KPXXAPTQLEPISVLYLDDSSNVIKFKYENMVVRA

SEQ ID NO: 20046 - protein, 36 aa, Artificial Sequence
  Non-cyclic GFR-binding peptide
  MOD_RES (4)..(4): Xaa is C or S
  MOD_RES (18)..(19)..(20)..(21)..(22): Xaa is A or G
  MOD_RES (23)..(24)..(25)..(26): Xaa is A or G or absent
KPTXAPTKLSPISVLYIXXXXXXXXXYKQYENMVVR

SEQ ID NO: 20047 - protein, 33 aa, Artificial Sequence
  Non-cyclic GFR-binding peptide
  MOD_RES (33)..(33): Xaa is C or S
  MOD_RES (14)..(15)..(16)..(17)..(18): Xaa is A or G
  MOD_RES (19)..(20)..(21)..(22): Xaa is A or G or absent
VSQDLSPISILYIXXXXXXXXXYKQYEMIVKSX

SEQ ID NO: 20048 - protein, 34 aa, Artificial Sequence
  Non-cyclic GFR-binding peptide
  MOD_RES (1)..(2)..(34): Xaa is C or S
XXAPTKLEPISVLYLDSSNNVIKFKYENMVVKAX

SEQ ID NO: 20049 - protein, 36 aa, Artificial Sequence
  Non-cyclic GFR-binding peptide
  MOD_RES (1)..(2)..(36): Xaa is C or S
  MOD_RES (16)..(17)..(18)..(19)..(20): Xaa is A or G
  MOD_RES (21)..(22)..(23)..(24): Xaa is A or G or absent
XXVPARLEPISILYLXXXXXXXXXKFKYEDMVVEAX

SEQ ID NO: 20050 - protein, 37 aa, Artificial Sequence
  Non-cyclic GFR-binding peptide
  MOD_RES (6)..(6): Xaa is C or S
VTKPTXAPTKLEPISVLYLDDSSNVIKFKYENMVVRS

SEQ ID NO: 20051 - protein, 34 aa, Artificial Sequence
  Non-cyclic GFR-binding peptide
  MOD_RES (1)..(2): Xaa is C or S
  MOD_RES (16)..(17)..(18)..(19)..(20): Xaa is A or G
  MOD_RES (21)..(22)..(23)..(24): Xaa is A or G or absent
XXVPTKLNAISILYFXXXXXXXXXLKKYRGMAVS

SEQ ID NO: 20052 - protein, 34 aa, Artificial Sequence
  Non-cyclic GFR-binding peptide
  MOD_RES (34)..(34): Xaa is C or S
  MOD_RES (14)..(15)..(16)..(17)..(18): Xaa is A or G
  MOD_RES (19)..(20)..(21)..(22): Xaa is A or G or absent
APTKLSPISVLYIXXXXXXXXXYKQYENMVVKAX

SEQ ID NO: 20053 - protein, 35 aa, Artificial Sequence
  Non-cyclic GFR-binding peptide
  MOD_RES (3)..(4): Xaa is C or S
KAXXAPTKLEPISVLYLDSSNNVIKFKYENMVVKA

SEQ ID NO: 20054 - protein, 39 aa, Artificial Sequence
  Non-cyclic GFR-binding peptide
  MOD_RES (2)..(3)..(37)..(39): Xaa is C or S
  MOD_RES (17)..(18)..(19)..(20)..(21): Xaa is A or G
  MOD_RES (22)..(23)..(24)..(25): Xaa is A or G or absent
SXXVPARLEPISILYLXXXXXXXXXKFKYEDMVVEAXGX

SEQ ID NO: 20055 - protein, 40 aa, Artificial Sequence
  Non-cyclic GFR-binding peptide
  MOD_RES (4)..(5)..(39): Xaa is C or S
  MOD_RES (19)..(20)..(21)..(22)..(23): Xaa is A or G
  MOD_RES (24)..(25)..(26)..(27): Xaa is A or G or absent
PKAXXVPTELEPISMLYLXXXXXXXXXKFKYEDMVVEGXG

SEQ ID NO: 20056 - protein, 36 aa, Artificial Sequence
  Non-cyclic GFR-binding peptide
  MOD_RES (5)..(6): Xaa is C or S
IPKAXXVPTELEPISMLYLDEYDKVVKFKYEEMVVE

SEQ ID NO: 20057 - protein, 36 aa, Artificial Sequence
  Non-cyclic GFR-binding peptide
  MOD_RES (34)..(36): Xaa is C or S
  MOD_RES (14)..(15)..(16)..(17)..(18): Xaa is A or G
  MOD_RES (19)..(20)..(21)..(22): Xaa is A or G or absent
VPTELSPISMLYIXXXXXXXXXYKQYEEMVVEGXGX

SEQ ID NO: 20058 - protein, 38 aa, Artificial Sequence
  Non-cyclic GFR-binding peptide
  MOD_RES (5)..(6)..(38): Xaa is C or S
ASKAXXVPTKLNAISILYFDKGVVTYLKKYRGMAVSEX

SEQ ID NO: 20059 - protein, 37 aa, Artificial Sequence
  Non-cyclic GFR-binding peptide
  MOD_RES (4)..(5)..(37): Xaa is C or S
PKAXXVPTELSPISMLYIDEYDKVVYKQYEEMVVEGX

SEQ ID NO: 20060 - protein, 34 aa, Artificial Sequence
  Non-cyclic GFR-binding peptide
  MOD_RES (32)..(34): Xaa is C or S
VPTKLNAISILYFDKGVVTYLKKYRGMAVSEXGX

SEQ ID NO: 20061 - protein, 41 aa, Artificial Sequence
  Non-cyclic GFR-binding peptide
  MOD_RES (4)..(5)..(39)..(41): Xaa is C or S
  MOD_RES (19)..(20)..(21)..(22)..(23): Xaa is A or G
  MOD_RES (24)..(25)..(26)..(27): Xaa is A or G or absent
PKAXXVPTELSPISMLYIXXXXXXXXXYKQYEEMVVEGXGX

SEQ ID NO: 20062 - protein, 35 aa, Artificial Sequence
  Non-cyclic GFR-binding peptide
  MOD_RES (3)..(4)..(35): Xaa is C or S
APXXVPQALSPISILYIVGRKPKVYKQYEMIVRSX

SEQ ID NO: 20063 - protein, 44 aa, Artificial Sequence
  Non-cyclic GFR-binding peptide
  MOD_RES (5)..(6)..(41)..(43): Xaa is C or S
  MOD_RES (20)..(21)..(22)..(23)..(24): Xaa is A or G
  MOD_RES (25)..(26)..(27)..(28): Xaa is A or G or absent
VGKAXXVPTKLSPISVLYIXXXXXXXXXYKQYEEGMSVAEXGXR

SEQ ID NO: 20064 - protein, 34 aa, Artificial Sequence
  Non-cyclic GFR-binding peptide
  MOD_RES (1)..(33): Xaa is C or S
XAPTKLEPISVLYLDDSSNVIKFKYENMVVRSXG

SEQ ID NO: 20065 - protein, 34 aa, Artificial Sequence
  Non-cyclic GFR-binding peptide
  MOD_RES (2)..(3)..(34): Xaa is C or S
PXXVPQDLEPISILYLVGRTPKVKFKYEMVVKSX

SEQ ID NO: 20066 - protein, 38 aa, Artificial Sequence
  Non-cyclic GFR-binding peptide
  MOD_RES (1)..(2)..(35)..(37): Xaa is C or S
  MOD_RES (16)..(17)..(18)..(19)..(20): Xaa is A or G
  MOD_RES (21)..(22)..(23)..(24): Xaa is A or G or absent
XXVPQDLEPISILYLXXXXXXXXXKFKYEMVVKSXKXS

SEQ ID NO: 20067 - protein, 37 aa, Artificial Sequence
  Non-cyclic GFR-binding peptide
  MOD_RES (4)..(4): Xaa is C or S
  MOD_RES (18)..(19)..(20)..(21)..(22): Xaa is A or G
  MOD_RES (23)..(24)..(25)..(26): Xaa is A or G or absent
KPTXAPTKLEPISVLYLXXXXXXXXXKFKYENMVVRS

SEQ ID NO: 20068 - protein, 42 aa, Artificial Sequence
  Non-cyclic GFR-binding peptide
  MOD_RES (4)..(5)..(39)..(41): Xaa is C or S
  MOD_RES (19)..(20)..(21)..(22)..(23): Xaa is A or G
  MOD_RES (24)..(25)..(26)..(27): Xaa is A or G or absent
PKAXXVPTELSPISMLYIXXXXXXXXXYKQYEDMVVEGXGXR

SEQ ID NO: 20069 - protein, 36 aa, Artificial Sequence
  Non-cyclic GFR-binding peptide
  MOD_RES (3)..(4)..(36): Xaa is C or S
KAXXVPTKLNAISILYFDKGVVTYLKKYRGMAVSEX

SEQ ID NO: 20070 - protein, 38 aa, Artificial Sequence
  Non-cyclic GFR-binding peptide
  MOD_RES (3)..(4): Xaa is C or S
  MOD_RES (18)..(19)..(20)..(21)..(22): Xaa is A or G
  MOD_RES (23)..(24)..(25)..(26): Xaa is A or G or absent
KAXXVPTKLEPISVLYLXXXXXXXXXKFKYEEGMSVAE

SEQ ID NO: 20071 - protein, 38 aa, Artificial Sequence
  Non-cyclic GFR-binding peptide
  MOD_RES (4)..(38): Xaa is C or S
  MOD_RES (18)..(19)..(20)..(21)..(22): Xaa is A or G
  MOD_RES (23)..(24)..(25)..(26): Xaa is A or G or absent
KPTXAPTKLEPISVLYLXXXXXXXXXKFKYENMVVRSX

SEQ ID NO: 20072 - protein, 33 aa, Artificial Sequence
  Non-cyclic GFR-binding peptide
  MOD_RES (2)..(3): Xaa is C or S
AXXVPTKLSPISILYKDKGVVTYLKYHYGMAVS

SEQ ID NO: 20073 - protein, 36 aa, Artificial Sequence
  Non-cyclic GFR-binding peptide
  MOD_RES (1)..(2)..(34)..(36): Xaa is C or S
XXVPTELSPISMLYIDENEKVVYKQYEDMVVEGXGX

SEQ ID NO: 20074 - protein, 33 aa, Artificial Sequence
  Non-cyclic GFR-binding peptide
  MOD_RES (1)..(33): Xaa is C or S
XVPARLEPISILYLDAANNVVKFKYEDMVVEAX

SEQ ID NO: 20075 - protein, 33 aa, Artificial Sequence
  Non-cyclic GFR-binding peptide
  MOD_RES (33)..(33): Xaa is C or S
  MOD_RES (14)..(15)..(16)..(17)..(18): Xaa is A or G
  MOD_RES (19)..(20)..(21)..(22): Xaa is A or G or absent
VPQDLSPISILYIXXXXXXXXXYKQYEMVVKSX

SEQ ID NO: 20076 - protein, 43 aa, Artificial Sequence
  Non-cyclic GFR-binding peptide
  MOD_RES (5)..(6)..(40)..(42): Xaa is C or S
  MOD_RES (20)..(21)..(22)..(23)..(24): Xaa is A or G
  MOD_RES (25)..(26)..(27)..(28): Xaa is A or G or absent
IPKAXXVPTELEPISMLYLXXXXXXXXXKFKYEEMVVEGXGXR

SEQ ID NO: 20077 - protein, 38 aa, Artificial Sequence
  Non-cyclic GFR-binding peptide
  MOD_RES (5)..(6)..(38): Xaa is C or S
VPKPXXAPTQLSPISVLYIDDSSNVIYKQYENMVVRAX

SEQ ID NO: 20078 - protein, 32 aa, Artificial Sequence
  Non-cyclic GFR-binding peptide
  MOD_RES (14)..(15)..(16)..(17)..(18): Xaa is A or G
  MOD_RES (19)..(20)..(21)..(22): Xaa is A or G or absent
APTKLEPISVLYLXXXXXXXXXKFKYENMVVR

SEQ ID NO: 20079 - protein, 38 aa, Artificial Sequence
  Non-cyclic GFR-binding peptide
  MOD_RES (3)..(4)..(37): Xaa is C or S
KAXXVPTKLEPISVLYLDDMGVPTKFKYEEGMSVAEXG

SEQ ID NO: 20080 - protein, 32 aa, Artificial Sequence
  Non-cyclic GFR-binding peptide
  MOD_RES (14)..(15)..(16)..(17)..(18): Xaa is A or G
  MOD_RES (19)..(20)..(21)..(22): Xaa is A or G or absent
APTKLEPISVLYLXXXXXXXXXKFKYENMVVK

SEQ ID NO: 20081 - protein, 34 aa, Artificial Sequence
  Non-cyclic GFR-binding peptide
  MOD_RES (1)..(2)..(34): Xaa is C or S
XXVPTKLSPISILYIDKGVVTYYKQYEGMAVSEX

SEQ ID NO: 20082 - protein, 31 aa, Artificial Sequence
  Non-cyclic GFR-binding peptide
  MOD_RES (1)..(1): Xaa is C or S
XVPQALEPISILYLVGRKPKVKFKYEMIVRS

SEQ ID NO: 20083 - protein, 36 aa, Artificial Sequence
  Non-cyclic GFR-binding peptide
  MOD_RES (2)..(3)..(34)..(36): Xaa is C or S
PXXVPQALEPISILYLVGRKPKVKFKYEMIVRSXKX

SEQ ID NO: 20084 - protein, 38 aa, Artificial Sequence
  Non-cyclic GFR-binding peptide
  MOD_RES (2)..(3)..(37): Xaa is C or S
  MOD_RES (17)..(18)..(19)..(20)..(21): Xaa is A or G
  MOD_RES (22)..(23)..(24)..(25): Xaa is A or G or absent
PXXAPTQLSPISVLYIXXXXXXXXXYKQYENMVVRAXG

SEQ ID NO: 20085 - protein, 42 aa, Artificial Sequence
  Non-cyclic GFR-binding peptide
  MOD_RES (7)..(41): Xaa is C or S
  MOD_RES (21)..(22)..(23)..(24)..(25): Xaa is A or G
  MOD_RES (26)..(27)..(28)..(29): Xaa is A or G or absent
HVTKPTXAPTKLEPISVLYLXXXXXXXXXKFKYENMVVRSXG

SEQ ID NO: 20086 - protein, 31 aa, Artificial Sequence
  Non-cyclic GFR-binding peptide
  MOD_RES (31)..(31): Xaa is C or S
VPQALEPISILYLVGRKPKVKFKYEMIVRSX

SEQ ID NO: 20087 - protein, 33 aa, Artificial Sequence
  Non-cyclic GFR-binding peptide
  MOD_RES (1)..(2)..(33): Xaa is C or S
XXVPQALEPISILYLVGRKPKVKFKYEMIVRSX

SEQ ID NO: 20088 - protein, 37 aa, Artificial Sequence
  Non-cyclic GFR-binding peptide
  MOD_RES (4)..(5): Xaa is C or S
  MOD_RES (19)..(20)..(21)..(22)..(23): Xaa is A or G
  MOD_RES (24)..(25)..(26)..(27): Xaa is A or G or absent
SKAXXVPTKLSPISILYIXXXXXXXXXYKQYEGMAVS

SEQ ID NO: 20089 - protein, 39 aa, Artificial Sequence
  Non-cyclic GFR-binding peptide
  MOD_RES (6)..(7): Xaa is C or S
  MOD_RES (21)..(22)..(23)..(24)..(25): Xaa is A or G
  MOD_RES (26)..(27)..(28)..(29): Xaa is A or G or absent
KASKAXXVPTKLNAISILYFXXXXXXXXXLKKYRGMAVS

SEQ ID NO: 20090 - protein, 38 aa, Artificial Sequence
  Non-cyclic GFR-binding peptide
  MOD_RES (5)..(6): Xaa is C or S
  MOD_RES (20)..(21)..(22)..(23)..(24): Xaa is A or G
  MOD_RES (25)..(26)..(27)..(28): Xaa is A or G or absent
VPKPXXAPTKLEPISVLYLXXXXXXXXXKFKYENMVVR

SEQ ID NO: 20091 - protein, 41 aa, Artificial Sequence
  Non-cyclic GFR-binding peptide
  MOD_RES (4)..(5)..(40): Xaa is C or S
  MOD_RES (19)..(20)..(21)..(22)..(23): Xaa is A or G
  MOD_RES (24)..(25)..(26)..(27): Xaa is A or G or absent
GKAXXVPTKLSPISVLYIXXXXXXXXXYKQYEEGMSVAEXG

SEQ ID NO: 20092 - protein, 43 aa, Artificial Sequence
  Non-cyclic GFR-binding peptide
  MOD_RES (6)..(7)..(40)..(42): Xaa is C or S
  MOD_RES (21)..(22)..(23)..(24)..(25): Xaa is A or G
  MOD_RES (26)..(27)..(28)..(29): Xaa is A or G or absent
ASASPXXVSQDLEPISILYLXXXXXXXXXKFKYEMIVKSXKXS

SEQ ID NO: 20093 - protein, 41 aa, Artificial Sequence
  Non-cyclic GFR-binding peptide
  MOD_RES (4)..(5)..(38)..(40): Xaa is C or S
  MOD_RES (19)..(20)..(21)..(22)..(23): Xaa is A or G
  MOD_RES (24)..(25)..(26)..(27): Xaa is A or G or absent
ASPXXVPQDLEPISILYLXXXXXXXXXKFKYEMVVKSXKXS

SEQ ID NO: 20094 - protein, 38 aa, Artificial Sequence
  Non-cyclic GFR-binding peptide
  MOD_RES (4)..(5): Xaa is C or S
  MOD_RES (19)..(20)..(21)..(22)..(23): Xaa is A or G
  MOD_RES (24)..(25)..(26)..(27): Xaa is A or G or absent
PKPXXAPTKLEPISVLYLXXXXXXXXXKFKYENMVVRS

SEQ ID NO: 20095 - protein, 35 aa, Artificial Sequence
  Non-cyclic GFR-binding peptide
  MOD_RES (2)..(3): Xaa is C or S
  MOD_RES (17)..(18)..(19)..(20)..(21): Xaa is A or G
  MOD_RES (22)..(23)..(24)..(25): Xaa is A or G or absent
PXXVSQDLEPISILYLXXXXXXXXXKFKYEMIVKS

SEQ ID NO: 20096 - protein, 41 aa, Artificial Sequence
  Non-cyclic GFR-binding peptide
  MOD_RES (6)..(7)..(38)..(40): Xaa is C or S
ASAAPXXVPQALSPISILYIVGRKPKVYKQYEMIVRSXKXS

SEQ ID NO: 20097 - protein, 39 aa, Artificial Sequence
  Non-cyclic GFR-binding peptide
  MOD_RES (3)..(4)..(36)..(38): Xaa is C or S
KAXXVPTELEPISMLYLDENEKVVKFKYEDMVVEGXGXR

SEQ ID NO: 20098 - protein, 43 aa, Artificial Sequence
  Non-cyclic GFR-binding peptide
  MOD_RES (5)..(6)..(40)..(42): Xaa is C or S
  MOD_RES (20)..(21)..(22)..(23)..(24): Xaa is A or G
  MOD_RES (25)..(26)..(27)..(28): Xaa is A or G or absent
VPKPXXAPTQLSPISVLYIXXXXXXXXXYKQYENMVVRAXGXH

SEQ ID NO: 20099 - protein, 34 aa, Artificial Sequence
  Non-cyclic GFR-binding peptide
  MOD_RES (1)..(32)..(34): Xaa is C or S
XVSQDLSPISILYIIGKTPKIYKQYEMIVKSXKX

SEQ ID NO: 20100 - protein, 34 aa, Artificial Sequence
  Non-cyclic GFR-binding peptide
  MOD_RES (32)..(34): Xaa is C or S
APTKLEPISVLYLDSSNNVIKFKYENMVVKAXGX

SEQ ID NO: 20101 - protein, 38 aa, Artificial Sequence
  Non-cyclic GFR-binding peptide
  MOD_RES (5)..(6): Xaa is C or S
  MOD_RES (20)..(21)..(22)..(23)..(24): Xaa is A or G
  MOD_RES (25)..(26)..(27)..(28): Xaa is A or G or absent
IPKAXXVPTELEPISMLYLXXXXXXXXXKFKYEDMVVE

SEQ ID NO: 20102 - protein, 41 aa, Artificial Sequence
  Non-cyclic GFR-binding peptide
  MOD_RES (5)..(6)..(38)..(40): Xaa is C or S
IPKAXXVPTELSPISMLYIDEYDKVVYKQYEEMVVEGXGXR

SEQ ID NO: 20103 - protein, 40 aa, Artificial Sequence
  Non-cyclic GFR-binding peptide
  MOD_RES (5)..(6)..(39): Xaa is C or S
  MOD_RES (20)..(21)..(22)..(23)..(24): Xaa is A or G
  MOD_RES (25)..(26)..(27)..(28): Xaa is A or G or absent
SASPXXVPQDLEPISILYLXXXXXXXXXKFKYEMVVKSXK

SEQ ID NO: 20104 - protein, 36 aa, Artificial Sequence
  Non-cyclic GFR-binding peptide
  MOD_RES (4)..(5): Xaa is C or S
PASXXVPARLNAISILYFDAANNVVLKKYRDMVVEA

SEQ ID NO: 20105 - protein, 37 aa, Artificial Sequence
  Non-cyclic GFR-binding peptide
  MOD_RES (34)..(36): Xaa is C or S
  MOD_RES (14)..(15)..(16)..(17)..(18): Xaa is A or G
  MOD_RES (19)..(20)..(21)..(22): Xaa is A or G or absent
VPARLNAISILYFXXXXXXXXXLKKYRDMVVEAXGXR

SEQ ID NO: 20106 - protein, 40 aa, Artificial Sequence
  Non-cyclic GFR-binding peptide
  MOD_RES (4)..(5)..(37)..(39): Xaa is C or S
PKAXXVPTELSPISMLYIDENEKVVYKQYEDMVVEGXGXR

SEQ ID NO: 20107 - protein, 32 aa, Artificial Sequence
  Non-cyclic GFR-binding peptide
  MOD_RES (1)..(1): Xaa is C or S
XVPARLNAISILYFDAANNVVLKKYRDMVVEA

SEQ ID NO: 20108 - protein, 33 aa, Artificial Sequence
  Non-cyclic GFR-binding peptide
  MOD_RES (14)..(15)..(16)..(17)..(18): Xaa is A or G
  MOD_RES (19)..(20)..(21)..(22): Xaa is A or G or absent
APTQLSPISVLYIXXXXXXXXXYKQYENMVVRA

SEQ ID NO: 20109 - protein, 36 aa, Artificial Sequence
  Non-cyclic GFR-binding peptide
  MOD_RES (3)..(4)..(35): Xaa is C or S
SPXXVSQDLEPISILYLIGKTPKIKFKYEMIVKSXK

SEQ ID NO: 20110 - protein, 37 aa, Artificial Sequence
  Non-cyclic GFR-binding peptide
  MOD_RES (4)..(5)..(37): Xaa is C or S
PASXXVPARLEPISILYLDAANNVVKFKYEDMVVEAX

SEQ ID NO: 20111 - protein, 38 aa, Artificial Sequence
  Non-cyclic GFR-binding peptide
  MOD_RES (5)..(6)..(38): Xaa is C or S
ASKAXXVPTKLSPISILYKDKGVVTYLKYHYGMAVSEX

SEQ ID NO: 20112 - protein, 33 aa, Artificial Sequence
  Non-cyclic GFR-binding peptide
  MOD_RES (33)..(33): Xaa is C or S
VPTKLSPISVLYIDDMGVPTYKQYEEGMSVAEX

SEQ ID NO: 20113 - protein, 36 aa, Artificial Sequence
  Non-cyclic GFR-binding peptide
  MOD_RES (1)..(36): Xaa is C or S
  MOD_RES (15)..(16)..(17)..(18)..(19): Xaa is A or G
  MOD_RES (20)..(21)..(22)..(23): Xaa is A or G or absent
XVPTKLSPISVLYIXXXXXXXXXYKQYEEGMSVAEX

SEQ ID NO: 20114 - protein, 33 aa, Artificial Sequence
  Non-cyclic GFR-binding peptide
  MOD_RES (14)..(15)..(16)..(17)..(18): Xaa is A or G
  MOD_RES (19)..(20)..(21)..(22): Xaa is A or G or absent
APTQLEPISVLYLXXXXXXXXXKFKYENMVVRA

SEQ ID NO: 20115 - protein, 35 aa, Artificial Sequence
  Non-cyclic GFR-binding peptide
  MOD_RES (3)..(4): Xaa is C or S
KPXXAPTKLSPISVLYIDDSSNVIYKQYENMVVRS

SEQ ID NO: 20116 - protein, 35 aa, Artificial Sequence
  Non-cyclic GFR-binding peptide
  MOD_RES (2)..(3): Xaa is C or S
AXXVPTKLSPISVLYIDDMGVPTYKQYEEGMSVAE

SEQ ID NO: 20117 - protein, 37 aa, Artificial Sequence
  Non-cyclic GFR-binding peptide
  MOD_RES (2)..(3)..(35)..(37): Xaa is C or S
AXXVPTELEPISMLYLDEYDKVVKFKYEEMVVEGXGX

SEQ ID NO: 20118 - protein, 41 aa, Artificial Sequence
  Non-cyclic GFR-binding peptide
  MOD_RES (5)..(6)..(39)..(41): Xaa is C or S
VGKAXXVPTKLEPISVLYLDDMGVPTKFKYEEGMSVAEXGX

SEQ ID NO: 20119 - protein, 39 aa, Artificial Sequence
  Non-cyclic GFR-binding peptide
  MOD_RES (4)..(5)..(39): Xaa is C or S
  MOD_RES (19)..(20)..(21)..(22)..(23): Xaa is A or G
  MOD_RES (24)..(25)..(26)..(27): Xaa is A or G or absent
PKPXXAPTKLSPISVLYIXXXXXXXXXYKQYENMVVRSX

SEQ ID NO: 20120 - protein, 42 aa, Artificial Sequence
  Non-cyclic GFR-binding peptide
  MOD_RES (7)..(39)..(41): Xaa is C or S
HVTKPTXAPTKLEPISVLYLDDSSNVIKFKYENMVVRSXGXH

SEQ ID NO: 20121 - protein, 42 aa, Artificial Sequence
  Non-cyclic GFR-binding peptide
  MOD_RES (7)..(39)..(41): Xaa is C or S
HVTKPTXAPTKLSPISVLYIDDSSNVIYKQYENMVVRSXGXH

SEQ ID NO: 20122 - protein, 40 aa, Artificial Sequence
  Non-cyclic GFR-binding peptide
  MOD_RES (3)..(4)..(38)..(40): Xaa is C or S
  MOD_RES (18)..(19)..(20)..(21)..(22): Xaa is A or G
  MOD_RES (23)..(24)..(25)..(26): Xaa is A or G or absent
KPXXAPTQLSPISVLYIXXXXXXXXXYKQYENMVVRAXGX

SEQ ID NO: 20123 - protein, 40 aa, Artificial Sequence
  Non-cyclic GFR-binding peptide
  MOD_RES (5)..(6)..(37)..(39): Xaa is C or S
SASPXXVSQDLSPISILYIIGKTPKIYKQYEMIVKSXKXS

SEQ ID NO: 20124 - protein, 42 aa, Artificial Sequence
  Non-cyclic GFR-binding peptide
  MOD_RES (6)..(7)..(41): Xaa is C or S
  MOD_RES (21)..(22)..(23)..(24)..(25): Xaa is A or G
  MOD_RES (26)..(27)..(28)..(29): Xaa is A or G or absent
YVPKPXXAPTKLEPISVLYLXXXXXXXXXKFKYENMVVRSXG

SEQ ID NO: 20125 - protein, 38 aa, Artificial Sequence
  Non-cyclic GFR-binding peptide
  MOD_RES (6)..(38): Xaa is C or S
VTKPTXAPTKLSPISVLYIDDSSNVIYKQYENMVVRSX

SEQ ID NO: 20126 - protein, 30 aa, Artificial Sequence
  Non-cyclic GFR-binding peptide
APTKLSPISVLYIDDSSNVIYKQYENMVVR

SEQ ID NO: 20127 - protein, 39 aa, Artificial Sequence
  Non-cyclic GFR-binding peptide
  MOD_RES (4)..(5)..(36)..(38): Xaa is C or S
ASPXXVPQDLEPISILYLVGRTPKVKFKYEMVVKSXKXS

SEQ ID NO: 20128 - protein, 41 aa, Artificial Sequence
  Non-cyclic GFR-binding peptide
  MOD_RES (6)..(7)..(41): Xaa is C or S
  MOD_RES (21)..(22)..(23)..(24)..(25): Xaa is A or G
  MOD_RES (26)..(27)..(28)..(29): Xaa is A or G or absent
AAPASXXVPARLNAISILYFXXXXXXXXXLKKYRDMVVEAX

SEQ ID NO: 20129 - protein, 38 aa, Artificial Sequence
  Non-cyclic GFR-binding peptide
  MOD_RES (5)..(6): Xaa is C or S
VGKAXXVPTKLEPISVLYLDDMGVPTKFKYEEGMSVAE

SEQ ID NO: 20130 - protein, 40 aa, Artificial Sequence
  Non-cyclic GFR-binding peptide
  MOD_RES (6)..(7)..(39): Xaa is C or S
YVPKPXXAPTKLEPISVLYLDDSSNVIKFKYENMVVRSXG

SEQ ID NO: 20131 - protein, 31 aa, Artificial Sequence
  Non-cyclic GFR-binding peptide
VPARLEPISILYLDAANNVVKFKYEDMVVEA

SEQ ID NO: 20132 - protein, 34 aa, Artificial Sequence
  Non-cyclic GFR-binding peptide
  MOD_RES (32)..(34): Xaa is C or S
APTKLSPISVLYIDSSNNVIYKQYENMVVKAXGX

SEQ ID NO: 20133 - protein, 35 aa, Artificial Sequence
  Non-cyclic GFR-binding peptide
  MOD_RES (1)..(35): Xaa is C or S
  MOD_RES (15)..(16)..(17)..(18)..(19): Xaa is A or G
  MOD_RES (20)..(21)..(22)..(23): Xaa is A or G or absent
XAPTKLSPISVLYIXXXXXXXXXYKQYENMVVKAX

SEQ ID NO: 20134 - protein, 44 aa, Artificial Sequence
  Non-cyclic GFR-binding peptide
  MOD_RES (6)..(7)..(41)..(43): Xaa is C or S
  MOD_RES (21)..(22)..(23)..(24)..(25): Xaa is A or G
  MOD_RES (26)..(27)..(28)..(29): Xaa is A or G or absent
YVPKPXXAPTKLEPISVLYLXXXXXXXXXKFKYENMVVRSXGXH

SEQ ID NO: 20135 - protein, 36 aa, Artificial Sequence
  Non-cyclic GFR-binding peptide
  MOD_RES (33)..(35): Xaa is C or S
  MOD_RES (14)..(15)..(16)..(17)..(18): Xaa is A or G
  MOD_RES (19)..(20)..(21)..(22): Xaa is A or G or absent
VPQDLEPISILYLXXXXXXXXXKFKYEMVVKSXKXS

SEQ ID NO: 20136 - protein, 32 aa, Artificial Sequence
  Non-cyclic GFR-binding peptide
  MOD_RES (14)..(15)..(16)..(17)..(18): Xaa is A or G
  MOD_RES (19)..(20)..(21)..(22): Xaa is A or G or absent
VPQDLSPISILYIXXXXXXXXXYKQYEMVVKS

SEQ ID NO: 20137 - protein, 33 aa, Artificial Sequence
  Non-cyclic GFR-binding peptide
  MOD_RES (32)..(32): Xaa is C or S
VPTELSPISMLYIDENEKVVYKQYEDMVVEGXG

SEQ ID NO: 20138 - protein, 32 aa, Artificial Sequence
  Non-cyclic GFR-binding peptide
  MOD_RES (14)..(15)..(16)..(17)..(18): Xaa is A or G
  MOD_RES (19)..(20)..(21)..(22): Xaa is A or G or absent
VPTKLNAISILYFXXXXXXXXXLKKYRGMAVS

SEQ ID NO: 20139 - protein, 34 aa, Artificial Sequence
  Non-cyclic GFR-binding peptide
  MOD_RES (1)..(2)..(34): Xaa is C or S
XXVPTELEPISMLYLDENEKVVKFKYEDMVVEGX

SEQ ID NO: 20140 - protein, 36 aa, Artificial Sequence
  Non-cyclic GFR-binding peptide
  MOD_RES (4)..(5)..(36): Xaa is C or S
AAPXXVPQALEPISILYLVGRKPKVKFKYEMIVRSX

SEQ ID NO: 20141 - protein, 34 aa, Artificial Sequence
  Non-cyclic GFR-binding peptide
  MOD_RES (3)..(4): Xaa is C or S
KPXXAPTQLSPISVLYIDDSSNVIYKQYENMVVR

SEQ ID NO: 20142 - protein, 34 aa, Artificial Sequence
  Non-cyclic GFR-binding peptide
  MOD_RES (1)..(2): Xaa is C or S
  MOD_RES (16)..(17)..(18)..(19)..(20): Xaa is A or G
  MOD_RES (21)..(22)..(23)..(24): Xaa is A or G or absent
XXVPARLEPISILYLXXXXXXXXXKFKYEDMVVE

SEQ ID NO: 20143 - protein, 36 aa, Artificial Sequence
  Non-cyclic GFR-binding peptide
  MOD_RES (3)..(4)..(36): Xaa is C or S
KAXXVPTELSPISMLYIDEYDKVVYKQYEEMVVEGX

SEQ ID NO: 20144 - protein, 39 aa, Artificial Sequence
  Non-cyclic GFR-binding peptide
  MOD_RES (2)..(3)..(37)..(39): Xaa is C or S
  MOD_RES (17)..(18)..(19)..(20)..(21): Xaa is A or G
  MOD_RES (22)..(23)..(24)..(25): Xaa is A or G or absent
AXXVPTKLSPISILYKXXXXXXXXXLKYHYGMAVSEXGX

SEQ ID NO: 20145 - protein, 33 aa, Artificial Sequence
  Non-cyclic GFR-binding peptide
  MOD_RES (1)..(1): Xaa is C or S
  MOD_RES (15)..(16)..(17)..(18)..(19): Xaa is A or G
  MOD_RES (20)..(21)..(22)..(23): Xaa is A or G or absent
XVPTKLNAISILYFXXXXXXXXXLKKYRGMAVS

SEQ ID NO: 20146 - protein, 34 aa, Artificial Sequence
  Non-cyclic GFR-binding peptide
  MOD_RES (1)..(2): Xaa is C or S
  MOD_RES (16)..(17)..(18)..(19)..(20): Xaa is A or G
  MOD_RES (21)..(22)..(23)..(24): Xaa is A or G or absent
XXAPTKLEPISVLYLXXXXXXXXXKFKYENMVVK

SEQ ID NO: 20147 - protein, 38 aa, Artificial Sequence
  Non-cyclic GFR-binding peptide
  MOD_RES (6)..(7)..(38): Xaa is C or S
ASAAPXXVPQALEPISILYLVGRKPKVKFKYEMIVRSX

SEQ ID NO: 20148 - protein, 36 aa, Artificial Sequence
  Non-cyclic GFR-binding peptide
  MOD_RES (34)..(36): Xaa is C or S
  MOD_RES (14)..(15)..(16)..(17)..(18): Xaa is A or G
  MOD_RES (19)..(20)..(21)..(22): Xaa is A or G or absent
APTKLSPISVLYIXXXXXXXXXYKQYENMVVRSXGX

SEQ ID NO: 20149 - protein, 36 aa, Artificial Sequence
  Non-cyclic GFR-binding peptide
  MOD_RES (1)..(33)..(35): Xaa is C or S
XVPTELEPISMLYLDENEKVVKFKYEDMVVEGXGXR

SEQ ID NO: 20150 - protein, 34 aa, Artificial Sequence
  Non-cyclic GFR-binding peptide
  MOD_RES (2)..(3): Xaa is C or S
AXXAPTKLEPISVLYLDSSNNVIKFKYENMVVKA

SEQ ID NO: 20151 - protein, 40 aa, Artificial Sequence
  Non-cyclic GFR-binding peptide
  MOD_RES (2)..(3)..(37)..(39): Xaa is C or S
  MOD_RES (17)..(18)..(19)..(20)..(21): Xaa is A or G
  MOD_RES (22)..(23)..(24)..(25): Xaa is A or G or absent
AXXVPTELSPISMLYIXXXXXXXXXYKQYEDMVVEGXGXR

SEQ ID NO: 20152 - protein, 40 aa, Artificial Sequence
  Non-cyclic GFR-binding peptide
  MOD_RES (6)..(7)..(38)..(40): Xaa is C or S
ASASPXXVSQDLEPISILYLIGKTPKIKFKYEMIVKSXKX

SEQ ID NO: 20153 - protein, 42 aa, Artificial Sequence
  Non-cyclic GFR-binding peptide
  MOD_RES (5)..(39)..(41): Xaa is C or S
  MOD_RES (19)..(20)..(21)..(22)..(23): Xaa is A or G
  MOD_RES (24)..(25)..(26)..(27): Xaa is A or G or absent
TKPTXAPTKLEPISVLYLXXXXXXXXXKFKYENMVVRSXGXH

SEQ ID NO: 20154 - protein, 41 aa, Artificial Sequence
  Non-cyclic GFR-binding peptide
  MOD_RES (3)..(4)..(39)..(41): Xaa is C or S
  MOD_RES (18)..(19)..(20)..(21)..(22): Xaa is A or G
  MOD_RES (23)..(24)..(25)..(26): Xaa is A or G or absent
KAXXVPTKLEPISVLYLXXXXXXXXXKFKYEEGMSVAEXGX

SEQ ID NO: 20155 - protein, 37 aa, Artificial Sequence
  Non-cyclic GFR-binding peptide
  MOD_RES (1)..(35)..(37): Xaa is C or S
  MOD_RES (15)..(16)..(17)..(18)..(19): Xaa is A or G
  MOD_RES (20)..(21)..(22)..(23): Xaa is A or G or absent
XVPARLSPISILYKXXXXXXXXXLKYHYDMVVEAXGX

SEQ ID NO: 20156 - protein, 41 aa, Artificial Sequence
  Non-cyclic GFR-binding peptide
  MOD_RES (6)..(7)..(39)..(41): Xaa is C or S
AVPKAXXAPTKLSPISVLYIDSSNNVIYKQYENMVVKAXGX

SEQ ID NO: 20157 - protein, 38 aa, Artificial Sequence
  Non-cyclic GFR-binding peptide
  MOD_RES (3)..(4)..(38): Xaa is C or S
  MOD_RES (18)..(19)..(20)..(21)..(22): Xaa is A or G
  MOD_RES (23)..(24)..(25)..(26): Xaa is A or G or absent
KPXXAPTKLEPISVLYLXXXXXXXXXKFKYENMVVRSX

SEQ ID NO: 20158 - protein, 42 aa, Artificial Sequence
  Non-cyclic GFR-binding peptide
  MOD_RES (5)..(6)..(40)..(42): Xaa is C or S
  MOD_RES (20)..(21)..(22)..(23)..(24): Xaa is A or G
  MOD_RES (25)..(26)..(27)..(28): Xaa is A or G or absent
ASKAXXVPTKLSPISILYKXXXXXXXXXLKYHYGMAVSEXGX

SEQ ID NO: 20159 - protein, 35 aa, Artificial Sequence
  Non-cyclic GFR-binding peptide
  MOD_RES (2)..(34): Xaa is C or S
TXAPTKLEPISVLYLDDSSNVIKFKYENMVVRSXG

SEQ ID NO: 20160 - protein, 40 aa, Artificial Sequence
  Non-cyclic GFR-binding peptide
  MOD_RES (4)..(5)..(39): Xaa is C or S
  MOD_RES (19)..(20)..(21)..(22)..(23): Xaa is A or G
  MOD_RES (24)..(25)..(26)..(27): Xaa is A or G or absent
PKAXXAPTKLEPISVLYLXXXXXXXXXKFKYENMVVKAXG

SEQ ID NO: 20161 - protein, 36 aa, Artificial Sequence
  Non-cyclic GFR-binding peptide
  MOD_RES (4)..(5)..(36): Xaa is C or S
ASPXXVPQDLSPISILYIVGRTPKVYKQYEMVVKSX

SEQ ID NO: 20162 - protein, 42 aa, Artificial Sequence
  Non-cyclic GFR-binding peptide
  MOD_RES (5)..(6)..(40)..(42): Xaa is C or S
  MOD_RES (20)..(21)..(22)..(23)..(24): Xaa is A or G
  MOD_RES (25)..(26)..(27)..(28): Xaa is A or G or absent
IPKAXXVPTELEPISMLYLXXXXXXXXXKFKYEDMVVEGXGX

SEQ ID NO: 20163 - protein, 35 aa, Artificial Sequence
  Non-cyclic GFR-binding peptide
  MOD_RES (3)..(4)..(35): Xaa is C or S
SPXXVSQDLEPISILYLIGKTPKIKFKYEMIVKSX

SEQ ID NO: 20164 - protein, 31 aa, Artificial Sequence
  Non-cyclic GFR-binding peptide
  MOD_RES (1)..(1): Xaa is C or S
XVPARLNAISILYFDAANNVVLKKYRDMVVE

SEQ ID NO: 20165 - protein, 40 aa, Artificial Sequence
  Non-cyclic GFR-binding peptide
  MOD_RES (5)..(6)..(40): Xaa is C or S
  MOD_RES (20)..(21)..(22)..(23)..(24): Xaa is A or G
  MOD_RES (25)..(26)..(27)..(28): Xaa is A or G or absent
APASXXVPARLNAISILYFXXXXXXXXXLKKYRDMVVEAX

SEQ ID NO: 20166 - protein, 33 aa, Artificial Sequence
  Non-cyclic GFR-binding peptide
  MOD_RES (2)..(3): Xaa is C or S
PXXVSQDLEPISILYLIGKTPKIKFKYEMIVKS

SEQ ID NO: 20167 - protein, 40 aa, Artificial Sequence
  Non-cyclic GFR-binding peptide
  MOD_RES (5)..(6)..(38)..(40): Xaa is C or S
APASXXVPARLNAISILYFDAANNVVLKKYRDMVVEAXGX

SEQ ID NO: 20168 - protein, 42 aa, Artificial Sequence
  Non-cyclic GFR-binding peptide
  MOD_RES (5)..(6)..(41): Xaa is C or S
  MOD_RES (20)..(21)..(22)..(23)..(24): Xaa is A or G
  MOD_RES (25)..(26)..(27)..(28): Xaa is A or G or absent
VGKAXXVPTKLSPISVLYIXXXXXXXXXYKQYEEGMSVAEXG

SEQ ID NO: 20169 - protein, 37 aa, Artificial Sequence
  Non-cyclic GFR-binding peptide
  MOD_RES (2)..(3)..(37): Xaa is C or S
  MOD_RES (17)..(18)..(19)..(20)..(21): Xaa is A or G
  MOD_RES (22)..(23)..(24)..(25): Xaa is A or G or absent
PXXAPTQLEPISVLYLXXXXXXXXXKFKYENMVVRAX

SEQ ID NO: 20170 - protein, 39 aa, Artificial Sequence
  Non-cyclic GFR-binding peptide
  MOD_RES (3)..(4)..(36)..(38): Xaa is C or S
KAXXVPTKLNAISILYFDKGVVTYLKKYRGMAVSEXGXR

SEQ ID NO: 20171 - protein, 35 aa, Artificial Sequence
  Non-cyclic GFR-binding peptide
  MOD_RES (1)..(33)..(35): Xaa is C or S
XVPTKLSPISILYKDKGVVTYLKYHYGMAVSEXGX

SEQ ID NO: 20172 - protein, 30 aa, Artificial Sequence
  Non-cyclic GFR-binding peptide
VPTELEPISMLYLDENEKVVKFKYEDMVVE

SEQ ID NO: 20173 - protein, 36 aa, Artificial Sequence
  Non-cyclic GFR-binding peptide
  MOD_RES (3)..(4)..(36): Xaa is C or S
ASXXVPARLEPISILYLDAANNVVKFKYEDMVVEAX

SEQ ID NO: 20174 - protein, 38 aa, Artificial Sequence
  Non-cyclic GFR-binding peptide
  MOD_RES (6)..(7): Xaa is C or S
SIPKAXXVPTELSPISMLYIDEYDKVVYKQYEEMVVEG

SEQ ID NO: 20175 - protein, 38 aa, Artificial Sequence
  Non-cyclic GFR-binding peptide
  MOD_RES (3)..(4)..(36)..(38): Xaa is C or S
ASXXVPARLNAISILYFDAANNVVLKKYRDMVVEAXGX

SEQ ID NO: 20176 - protein, 37 aa, Artificial Sequence
  Non-cyclic GFR-binding peptide
  MOD_RES (2)..(3)..(35)..(37): Xaa is C or S
AXXVPTELEPISMLYLDENEKVVKFKYEDMVVEGXGX

SEQ ID NO: 20177 - protein, 39 aa, Artificial Sequence
  Non-cyclic GFR-binding peptide
  MOD_RES (4)..(5)..(39): Xaa is C or S
  MOD_RES (19)..(20)..(21)..(22)..(23): Xaa is A or G
  MOD_RES (24)..(25)..(26)..(27): Xaa is A or G or absent
PASXXVPARLEPISILYLXXXXXXXXXKFKYEDMVVEAX

SEQ ID NO: 20178 - protein, 31 aa, Artificial Sequence
  Non-cyclic GFR-binding peptide
APTQLSPISVLYIDDSSNVIYKQYENMVVRA

SEQ ID NO: 20179 - protein, 40 aa, Artificial Sequence
  Non-cyclic GFR-binding peptide
  MOD_RES (6)..(7): Xaa is C or S
  MOD_RES (21)..(22)..(23)..(24)..(25): Xaa is A or G
  MOD_RES (26)..(27)..(28)..(29): Xaa is A or G or absent
KIPKAXXVPTELEPISMLYLXXXXXXXXXKFKYEDMVVEG

SEQ ID NO: 20180 - protein, 37 aa, Artificial Sequence
  Non-cyclic GFR-binding peptide
  MOD_RES (5)..(6): Xaa is C or S
IPKAXXVPTELEPISMLYLDENEKVVKFKYEDMVVEG

SEQ ID NO: 20181 - protein, 41 aa, Artificial Sequence
  Non-cyclic GFR-binding peptide
  MOD_RES (4)..(5)..(39)..(41): Xaa is C or S
  MOD_RES (19)..(20)..(21)..(22)..(23): Xaa is A or G
  MOD_RES (24)..(25)..(26)..(27): Xaa is A or G or absent
SKAXXVPTKLSPISILYIXXXXXXXXXYKQYEGMAVSEXGX

SEQ ID NO: 20182 - protein, 34 aa, Artificial Sequence
  Non-cyclic GFR-binding peptide
  MOD_RES (1)..(2)..(34): Xaa is C or S
XXAPTQLSPISVLYIDDSSNVIYKQYENMVVRAX

SEQ ID NO: 20183 - protein, 37 aa, Artificial Sequence
  Non-cyclic GFR-binding peptide
  MOD_RES (34)..(36): Xaa is C or S
  MOD_RES (14)..(15)..(16)..(17)..(18): Xaa is A or G
  MOD_RES (19)..(20)..(21)..(22): Xaa is A or G or absent
VPTELEPISMLYLXXXXXXXXXKFKYEEMVVEGXGXR

SEQ ID NO: 20184 - protein, 35 aa, Artificial Sequence
  Non-cyclic GFR-binding peptide
  MOD_RES (34)..(34): Xaa is C or S
  MOD_RES (14)..(15)..(16)..(17)..(18): Xaa is A or G
  MOD_RES (19)..(20)..(21)..(22): Xaa is A or G or absent
APTQLSPISVLYIXXXXXXXXXYKQYENMVVRAXG

SEQ ID NO: 20185 - protein, 31 aa, Artificial Sequence
  Non-cyclic GFR-binding peptide
APTKLEPISVLYLDSSNNVIKFKYENMVVKA

SEQ ID NO: 20186 - protein, 38 aa, Artificial Sequence
  Non-cyclic GFR-binding peptide
  MOD_RES (4)..(5)..(37): Xaa is C or S
PKAXXVPTELEPISMLYLDEYDKVVKFKYEEMVVEGXG

SEQ ID NO: 20187 - protein, 38 aa, Artificial Sequence
  Non-cyclic GFR-binding peptide
  MOD_RES (5)..(6): Xaa is C or S
  MOD_RES (20)..(21)..(22)..(23)..(24): Xaa is A or G
  MOD_RES (25)..(26)..(27)..(28): Xaa is A or G or absent
VPKPXXAPTQLSPISVLYIXXXXXXXXXYKQYENMVVR

SEQ ID NO: 20188 - protein, 41 aa, Artificial Sequence
  Non-cyclic GFR-binding peptide
  MOD_RES (6)..(7)..(41): Xaa is C or S
  MOD_RES (21)..(22)..(23)..(24)..(25): Xaa is A or G
  MOD_RES (26)..(27)..(28)..(29): Xaa is A or G or absent
KASKAXXVPTKLNAISILYFXXXXXXXXXLKKYRGMAVSEX

SEQ ID NO: 20189 - protein, 40 aa, Artificial Sequence
  Non-cyclic GFR-binding peptide
  MOD_RES (6)..(7): Xaa is C or S
  MOD_RES (21)..(22)..(23)..(24)..(25): Xaa is A or G
  MOD_RES (26)..(27)..(28)..(29): Xaa is A or G or absent
YVPKPXXAPTKLEPISVLYLXXXXXXXXXKFKYENMVVRS

SEQ ID NO: 20190 - protein, 35 aa, Artificial Sequence
  Non-cyclic GFR-binding peptide
  MOD_RES (32)..(34): Xaa is C or S
VPARLNAISILYFDAANNVVLKKYRDMVVEAXGXR

SEQ ID NO: 20191 - protein, 38 aa, Artificial Sequence
  Non-cyclic GFR-binding peptide
  MOD_RES (1)..(35)..(37): Xaa is C or S
  MOD_RES (15)..(16)..(17)..(18)..(19): Xaa is A or G
  MOD_RES (20)..(21)..(22)..(23): Xaa is A or G or absent
XVPARLEPISILYLXXXXXXXXXKFKYEDMVVEAXGXR

SEQ ID NO: 20192 - protein, 34 aa, Artificial Sequence
  Non-cyclic GFR-binding peptide
  MOD_RES (1)..(33): Xaa is C or S
XAPTQLEPISVLYLDDSSNVIKFKYENMVVRAXG

SEQ ID NO: 20193 - protein, 37 aa, Artificial Sequence
  Non-cyclic GFR-binding peptide
  MOD_RES (1)..(2)..(35)..(37): Xaa is C or S
  MOD_RES (16)..(17)..(18)..(19)..(20): Xaa is A or G
  MOD_RES (21)..(22)..(23)..(24): Xaa is A or G or absent
XXVPQDLSPISILYIXXXXXXXXXYKQYEMVVKSXKX

SEQ ID NO: 20194 - protein, 38 aa, Artificial Sequence
  Non-cyclic GFR-binding peptide
  MOD_RES (1)..(2)..(36)..(38): Xaa is C or S
  MOD_RES (16)..(17)..(18)..(19)..(20): Xaa is A or G
  MOD_RES (21)..(22)..(23)..(24): Xaa is A or G or absent
XXVPTELEPISMLYLXXXXXXXXXKFKYEEMVVEGXGX

SEQ ID NO: 20195 - protein, 37 aa, Artificial Sequence
  Non-cyclic GFR-binding peptide
  MOD_RES (6)..(7): Xaa is C or S
AVPKAXXAPTKLEPISVLYLDSSNNVIKFKYENMVVK

SEQ ID NO: 20196 - protein, 37 aa, Artificial Sequence
  Non-cyclic GFR-binding peptide
  MOD_RES (1)..(34)..(36): Xaa is C or S
XVPTKLEPISVLYLDDMGVPTKFKYEEGMSVAEXGXR

SEQ ID NO: 20197 - protein, 38 aa, Artificial Sequence
  Non-cyclic GFR-binding peptide
  MOD_RES (6)..(7)..(38): Xaa is C or S
ASASPXXVSQDLEPISILYLIGKTPKIKFKYEMIVKSX

SEQ ID NO: 20198 - protein, 31 aa, Artificial Sequence
  Non-cyclic GFR-binding peptide
  MOD_RES (1)..(1): Xaa is C or S
XVPQDLSPISILYIVGRTPKVYKQYEMVVKS

SEQ ID NO: 20199 - protein, 36 aa, Artificial Sequence
  Non-cyclic GFR-binding peptide
  MOD_RES (33)..(35): Xaa is C or S
VPTKLSPISVLYIDDMGVPTYKQYEEGMSVAEXGXR

SEQ ID NO: 20200 - protein, 44 aa, Artificial Sequence
  Non-cyclic GFR-binding peptide
  MOD_RES (6)..(7)..(41)..(43): Xaa is C or S
  MOD_RES (21)..(22)..(23)..(24)..(25): Xaa is A or G
  MOD_RES (26)..(27)..(28)..(29): Xaa is A or G or absent
AAPASXXVPARLEPISILYLXXXXXXXXXKFKYEDMVVEAXGXR

SEQ ID NO: 20201 - protein, 36 aa, Artificial Sequence
  Non-cyclic GFR-binding peptide
  MOD_RES (4)..(5): Xaa is C or S
SKAXXVPTKLSPISILYKDKGVVTYLKYHYGMAVSE

SEQ ID NO: 20202 - protein, 37 aa, Artificial Sequence
  Non-cyclic GFR-binding peptide
  MOD_RES (2)..(3)..(37): Xaa is C or S
  MOD_RES (17)..(18)..(19)..(20)..(21): Xaa is A or G
  MOD_RES (22)..(23)..(24)..(25): Xaa is A or G or absent
SXXVPARLNAISILYFXXXXXXXXXLKKYRDMVVEAX

SEQ ID NO: 20203 - protein, 32 aa, Artificial Sequence
  Non-cyclic GFR-binding peptide
  MOD_RES (2)..(2): Xaa is C or S
TXAPTKLEPISVLYLDDSSNVIKFKYENMVVR

SEQ ID NO: 20204 - protein, 36 aa, Artificial Sequence
  Non-cyclic GFR-binding peptide
  MOD_RES (2)..(3)..(36): Xaa is C or S
  MOD_RES (17)..(18)..(19)..(20)..(21): Xaa is A or G
  MOD_RES (22)..(23)..(24)..(25): Xaa is A or G or absent
PXXVPQDLSPISILYIXXXXXXXXXYKQYEMVVKSX

SEQ ID NO: 20205 - protein, 40 aa, Artificial Sequence
  Non-cyclic GFR-binding peptide
  MOD_RES (3)..(4)..(38)..(40): Xaa is C or S
  MOD_RES (18)..(19)..(20)..(21)..(22): Xaa is A or G
  MOD_RES (23)..(24)..(25)..(26): Xaa is A or G or absent
KAXXVPTKLNAISILYFXXXXXXXXXLKKYRGMAVSEXGX

SEQ ID NO: 20206 - protein, 34 aa, Artificial Sequence
  Non-cyclic GFR-binding peptide
  MOD_RES (2)..(34): Xaa is C or S
TXAPTKLSPISVLYIDDSSNVIYKQYENMVVRSX

SEQ ID NO: 20207 - protein, 31 aa, Artificial Sequence
  Non-cyclic GFR-binding peptide
  MOD_RES (1)..(1): Xaa is C or S
XVPARLSPISILYKDAANNVVLKYHYDMVVE

SEQ ID NO: 20208 - protein, 36 aa, Artificial Sequence
  Non-cyclic GFR-binding peptide
  MOD_RES (1)..(2)..(35): Xaa is C or S
  MOD_RES (16)..(17)..(18)..(19)..(20): Xaa is A or G
  MOD_RES (21)..(22)..(23)..(24): Xaa is A or G or absent
XXVPQDLEPISILYLXXXXXXXXXKFKYEMVVKSXK

SEQ ID NO: 20209 - protein, 39 aa, Artificial Sequence
  Non-cyclic GFR-binding peptide
  MOD_RES (1)..(36)..(38): Xaa is C or S
  MOD_RES (15)..(16)..(17)..(18)..(19): Xaa is A or G
  MOD_RES (20)..(21)..(22)..(23): Xaa is A or G or absent
XVPTKLEPISVLYLXXXXXXXXXKFKYEEGMSVAEXGXR

SEQ ID NO: 20210 - protein, 37 aa, Artificial Sequence
  Non-cyclic GFR-binding peptide
  MOD_RES (5)..(6): Xaa is C or S
VPKAXXAPTKLSPISVLYIDSSNNVIYKQYENMVVKA

SEQ ID NO: 20211 - protein, 39 aa, Artificial Sequence
  Non-cyclic GFR-binding peptide
  MOD_RES (3)..(4)..(36)..(38): Xaa is C or S
KAXXVPTELEPISMLYLDEYDKVVKFKYEEMVVEGXGXR

SEQ ID NO: 20212 - protein, 36 aa, Artificial Sequence
  Non-cyclic GFR-binding peptide
  MOD_RES (3)..(4): Xaa is C or S
  MOD_RES (18)..(19)..(20)..(21)..(22): Xaa is A or G
  MOD_RES (23)..(24)..(25)..(26): Xaa is A or G or absent
KAXXVPTELSPISMLYIXXXXXXXXXYKQYEEMVVE

SEQ ID NO: 20213 - protein, 35 aa, Artificial Sequence
  Non-cyclic GFR-binding peptide
  MOD_RES (33)..(35): Xaa is C or S
  MOD_RES (14)..(15)..(16)..(17)..(18): Xaa is A or G
  MOD_RES (19)..(20)..(21)..(22): Xaa is A or G or absent
VPQALEPISILYLXXXXXXXXXKFKYEMIVRSXKX

SEQ ID NO: 20214 - protein, 40 aa, Artificial Sequence
  Non-cyclic GFR-binding peptide
  MOD_RES (6)..(7): Xaa is C or S
  MOD_RES (21)..(22)..(23)..(24)..(25): Xaa is A or G
  MOD_RES (26)..(27)..(28)..(29): Xaa is A or G or absent
TVPKPXXAPTQLSPISVLYIXXXXXXXXXYKQYENMVVRA

SEQ ID NO: 20215 - protein, 38 aa, Artificial Sequence
  Non-cyclic GFR-binding peptide
  MOD_RES (1)..(35)..(37): Xaa is C or S
  MOD_RES (15)..(16)..(17)..(18)..(19): Xaa is A or G
  MOD_RES (20)..(21)..(22)..(23): Xaa is A or G or absent
XAPTKLEPISVLYLXXXXXXXXXKFKYENMVVRSXGXH

SEQ ID NO: 20216 - protein, 38 aa, Artificial Sequence
  Non-cyclic GFR-binding peptide
  MOD_RES (1)..(35)..(37): Xaa is C or S
  MOD_RES (15)..(16)..(17)..(18)..(19): Xaa is A or G
  MOD_RES (20)..(21)..(22)..(23): Xaa is A or G or absent
XAPTKLSPISVLYIXXXXXXXXXYKQYENMVVKAXGXH

SEQ ID NO: 20217 - protein, 36 aa, Artificial Sequence
  Non-cyclic GFR-binding peptide
  MOD_RES (2)..(3)..(36): Xaa is C or S
AXXVPTKLEPISVLYLDDMGVPTKFKYEEGMSVAEX

SEQ ID NO: 20218 - protein, 42 aa, Artificial Sequence
  Non-cyclic GFR-binding peptide
  MOD_RES (5)..(6)..(39)..(41): Xaa is C or S
  MOD_RES (20)..(21)..(22)..(23)..(24): Xaa is A or G
  MOD_RES (25)..(26)..(27)..(28): Xaa is A or G or absent
SAAPXXVPQALEPISILYLXXXXXXXXXKFKYEMIVRSXKXS

SEQ ID NO: 20219 - protein, 37 aa, Artificial Sequence
  Non-cyclic GFR-binding peptide
  MOD_RES (5)..(6): Xaa is C or S
APASXXVPARLEPISILYLDAANNVVKFKYEDMVVEA

SEQ ID NO: 20220 - protein, 33 aa, Artificial Sequence
  Non-cyclic GFR-binding peptide
  MOD_RES (14)..(15)..(16)..(17)..(18): Xaa is A or G
  MOD_RES (19)..(20)..(21)..(22): Xaa is A or G or absent
VPTELEPISMLYLXXXXXXXXXKFKYEDMVVEG

SEQ ID NO: 20221 - protein, 36 aa, Artificial Sequence
  Non-cyclic GFR-binding peptide
  MOD_RES (1)..(2): Xaa is C or S
  MOD_RES (16)..(17)..(18)..(19)..(20): Xaa is A or G
  MOD_RES (21)..(22)..(23)..(24): Xaa is A or G or absent
XXVPTKLEPISVLYLXXXXXXXXXKFKYEEGMSVAE

SEQ ID NO: 20222 - protein, 39 aa, Artificial Sequence
  Non-cyclic GFR-binding peptide
  MOD_RES (5)..(6): Xaa is C or S
  MOD_RES (20)..(21)..(22)..(23)..(24): Xaa is A or G
  MOD_RES (25)..(26)..(27)..(28): Xaa is A or G or absent
VPKPXXAPTQLSPISVLYIXXXXXXXXXYKQYENMVVRA

SEQ ID NO: 20223 - protein, 36 aa, Artificial Sequence
  Non-cyclic GFR-binding peptide
  MOD_RES (1)..(2)..(36): Xaa is C or S
  MOD_RES (16)..(17)..(18)..(19)..(20): Xaa is A or G
  MOD_RES (21)..(22)..(23)..(24): Xaa is A or G or absent
XXVPTELEPISMLYLXXXXXXXXXKFKYEEMVVEGX

SEQ ID NO: 20224 - protein, 35 aa, Artificial Sequence
  Non-cyclic GFR-binding peptide
  MOD_RES (2)..(3): Xaa is C or S
  MOD_RES (17)..(18)..(19)..(20)..(21): Xaa is A or G
  MOD_RES (22)..(23)..(24)..(25): Xaa is A or G or absent
AXXVPTELSPISMLYIXXXXXXXXXYKQYEEMVVE

SEQ ID NO: 20225 - protein, 43 aa, Artificial Sequence
  Non-cyclic GFR-binding peptide
  MOD_RES (6)..(7)..(41)..(43): Xaa is C or S
  MOD_RES (21)..(22)..(23)..(24)..(25): Xaa is A or G
  MOD_RES (26)..(27)..(28)..(29): Xaa is A or G or absent
TVPKPXXAPTQLEPISVLYLXXXXXXXXXKFKYENMVVRAXGX

SEQ ID NO: 20226 - protein, 33 aa, Artificial Sequence
  Non-cyclic GFR-binding peptide
  MOD_RES (32)..(32): Xaa is C or S
APTQLSPISVLYIDDSSNVIYKQYENMVVRAXG

SEQ ID NO: 20227 - protein, 37 aa, Artificial Sequence
  Non-cyclic GFR-binding peptide
  MOD_RES (1)..(2)..(34)..(36): Xaa is C or S
XXVPTELSPISMLYIDEYDKVVYKQYEEMVVEGXGXR

SEQ ID NO: 20228 - protein, 40 aa, Artificial Sequence
  Non-cyclic GFR-binding peptide
  MOD_RES (6)..(7)..(39): Xaa is C or S
AVPKAXXAPTKLSPISVLYIDSSNNVIYKQYENMVVKAXG

SEQ ID NO: 20229 - protein, 39 aa, Artificial Sequence
  Non-cyclic GFR-binding peptide
  MOD_RES (6)..(7): Xaa is C or S
  MOD_RES (21)..(22)..(23)..(24)..(25): Xaa is A or G
  MOD_RES (26)..(27)..(28)..(29): Xaa is A or G or absent
ASAAPXXVPQALEPISILYLXXXXXXXXXKFKYEMIVRS

SEQ ID NO: 20230 - protein, 34 aa, Artificial Sequence
  Non-cyclic GFR-binding peptide
  MOD_RES (1)..(2)..(34): Xaa is C or S
XXAPTQLEPISVLYLDDSSNVIKFKYENMVVRAX

SEQ ID NO: 20231 - protein, 39 aa, Artificial Sequence
  Non-cyclic GFR-binding peptide
  MOD_RES (5)..(6)..(38): Xaa is C or S
APASXXVPARLNAISILYFDAANNVVLKKYRDMVVEAXG

SEQ ID NO: 20232 - protein, 35 aa, Artificial Sequence
  Non-cyclic GFR-binding peptide
  MOD_RES (2)..(3)..(35): Xaa is C or S
AXXAPTKLEPISVLYLDSSNNVIKFKYENMVVKAX

SEQ ID NO: 20233 - protein, 37 aa, Artificial Sequence
  Non-cyclic GFR-binding peptide
  MOD_RES (1)..(2)..(36): Xaa is C or S
  MOD_RES (16)..(17)..(18)..(19)..(20): Xaa is A or G
  MOD_RES (21)..(22)..(23)..(24): Xaa is A or G or absent
XXVPTKLSPISILYIXXXXXXXXXYKQYEGMAVSEXG

SEQ ID NO: 20234 - protein, 42 aa, Artificial Sequence
  Non-cyclic GFR-binding peptide
  MOD_RES (6)..(7)..(39)..(41): Xaa is C or S
KIPKAXXVPTELEPISMLYLDENEKVVKFKYEDMVVEGXGXR

SEQ ID NO: 20235 - protein, 30 aa, Artificial Sequence
  Non-cyclic GFR-binding peptide
VPTELEPISMLYLDEYDKVVKFKYEEMVVE

SEQ ID NO: 20236 - protein, 36 aa, Artificial Sequence
  Non-cyclic GFR-binding peptide
  MOD_RES (3)..(4)..(35): Xaa is C or S
SPXXVPQDLEPISILYLVGRTPKVKFKYEMVVKSXK

SEQ ID NO: 20237 - protein, 39 aa, Artificial Sequence
  Non-cyclic GFR-binding peptide
  MOD_RES (3)..(4)..(37)..(39): Xaa is C or S
  MOD_RES (18)..(19)..(20)..(21)..(22): Xaa is A or G
  MOD_RES (23)..(24)..(25)..(26): Xaa is A or G or absent
SPXXVSQDLSPISILYIXXXXXXXXXYKQYEMIVKSXKX

SEQ ID NO: 20238 - protein, 41 aa, Artificial Sequence
  Non-cyclic GFR-binding peptide
  MOD_RES (3)..(4)..(38)..(40): Xaa is C or S
  MOD_RES (18)..(19)..(20)..(21)..(22): Xaa is A or G
  MOD_RES (23)..(24)..(25)..(26): Xaa is A or G or absent
KAXXVPTKLSPISILYIXXXXXXXXXYKQYEGMAVSEXGXR

SEQ ID NO: 20239 - protein, 36 aa, Artificial Sequence
  Non-cyclic GFR-binding peptide
  MOD_RES (34)..(36): Xaa is C or S
  MOD_RES (14)..(15)..(16)..(17)..(18): Xaa is A or G
  MOD_RES (19)..(20)..(21)..(22): Xaa is A or G or absent
VPTKLSPISILYIXXXXXXXXXYKQYEGMAVSEXGX

SEQ ID NO: 20240 - protein, 35 aa, Artificial Sequence
  Non-cyclic GFR-binding peptide
  MOD_RES (34)..(34): Xaa is C or S
  MOD_RES (14)..(15)..(16)..(17)..(18): Xaa is A or G
  MOD_RES (19)..(20)..(21)..(22): Xaa is A or G or absent
VPTELSPISMLYIXXXXXXXXXYKQYEDMVVEGXG

SEQ ID NO: 20241 - protein, 36 aa, Artificial Sequence
  Non-cyclic GFR-binding peptide
  MOD_RES (2)..(3)..(36): Xaa is C or S
  MOD_RES (17)..(18)..(19)..(20)..(21): Xaa is A or G
  MOD_RES (22)..(23)..(24)..(25): Xaa is A or G or absent
PXXVPQALEPISILYLXXXXXXXXXKFKYEMIVRSX

SEQ ID NO: 20242 - protein, 37 aa, Artificial Sequence
  Non-cyclic GFR-binding peptide
  MOD_RES (1)..(2)..(35)..(37): Xaa is C or S
  MOD_RES (16)..(17)..(18)..(19)..(20): Xaa is A or G
  MOD_RES (21)..(22)..(23)..(24): Xaa is A or G or absent
XXVSQDLSPISILYIXXXXXXXXXYKQYEMIVKSXKX

SEQ ID NO: 20243 - protein, 36 aa, Artificial Sequence
  Non-cyclic GFR-binding peptide
  MOD_RES (1)..(2)..(34)..(36): Xaa is C or S
XXVPTELEPISMLYLDEYDKVVKFKYEEMVVEGXGX

SEQ ID NO: 20244 - protein, 38 aa, Artificial Sequence
  Non-cyclic GFR-binding peptide
  MOD_RES (3)..(4)..(36)..(38): Xaa is C or S
KAXXVPTELSPISMLYIDEYDKVVYKQYEEMVVEGXGX

SEQ ID NO: 20245 - protein, 37 aa, Artificial Sequence
  Non-cyclic GFR-binding peptide
  MOD_RES (7)..(7): Xaa is C or S
HVTKPTXAPTKLSPISVLYIDDSSNVIYKQYENMVVR

SEQ ID NO: 20246 - protein, 34 aa, Artificial Sequence
  Non-cyclic GFR-binding peptide
  MOD_RES (33)..(33): Xaa is C or S
VPTKLEPISVLYLDDMGVPTKFKYEEGMSVAEXG

SEQ ID NO: 20247 - protein, 35 aa, Artificial Sequence
  Non-cyclic GFR-binding peptide
  MOD_RES (2)..(3)..(35): Xaa is C or S
AXXAPTKLSPISVLYIDSSNNVIYKQYENMVVKAX

SEQ ID NO: 20248 - protein, 33 aa, Artificial Sequence
  Non-cyclic GFR-binding peptide
  MOD_RES (33)..(33): Xaa is C or S
  MOD_RES (14)..(15)..(16)..(17)..(18): Xaa is A or G
  MOD_RES (19)..(20)..(21)..(22): Xaa is A or G or absent
VSQDLEPISILYLXXXXXXXXXKFKYEMIVKSX

SEQ ID NO: 20249 - protein, 38 aa, Artificial Sequence
  Non-cyclic GFR-binding peptide
  MOD_RES (3)..(4)..(35)..(37): Xaa is C or S
APXXVPQALEPISILYLVGRKPKVKFKYEMIVRSXKXS

SEQ ID NO: 20250 - protein, 35 aa, Artificial Sequence
  Non-cyclic GFR-binding peptide
  MOD_RES (2)..(3)..(35): Xaa is C or S
AXXVPTKLSPISILYIDKGVVTYYKQYEGMAVSEX

SEQ ID NO: 20251 - protein, 35 aa, Artificial Sequence
  Non-cyclic GFR-binding peptide
  MOD_RES (4)..(5): Xaa is C or S
ASPXXVPQDLEPISILYLVGRTPKVKFKYEMVVKS

SEQ ID NO: 20252 - protein, 37 aa, Artificial Sequence
  Non-cyclic GFR-binding peptide
  MOD_RES (3)..(4): Xaa is C or S
  MOD_RES (18)..(19)..(20)..(21)..(22): Xaa is A or G
  MOD_RES (23)..(24)..(25)..(26): Xaa is A or G or absent
KAXXAPTKLEPISVLYLXXXXXXXXXKFKYENMVVKA

SEQ ID NO: 20253 - protein, 42 aa, Artificial Sequence
  Non-cyclic GFR-binding peptide
  MOD_RES (4)..(5)..(39)..(41): Xaa is C or S
  MOD_RES (19)..(20)..(21)..(22)..(23): Xaa is A or G
  MOD_RES (24)..(25)..(26)..(27): Xaa is A or G or absent
PASXXVPARLSPISILYKXXXXXXXXXLKYHYDMVVEAXGXR

SEQ ID NO: 20254 - protein, 41 aa, Artificial Sequence
  Non-cyclic GFR-binding peptide
  MOD_RES (4)..(5)..(39)..(41): Xaa is C or S
  MOD_RES (19)..(20)..(21)..(22)..(23): Xaa is A or G
  MOD_RES (24)..(25)..(26)..(27): Xaa is A or G or absent
PKPXXAPTQLSPISVLYIXXXXXXXXXYKQYENMVVRAXGX

SEQ ID NO: 20255 - protein, 32 aa, Artificial Sequence
  Non-cyclic GFR-binding peptide
  MOD_RES (32)..(32): Xaa is C or S
APTKLSPISVLYIDSSNNVIYKQYENMVVKAX

SEQ ID NO: 20256 - protein, 34 aa, Artificial Sequence
  Non-cyclic GFR-binding peptide
  MOD_RES (3)..(4): Xaa is C or S
KAXXVPTELEPISMLYLDENEKVVKFKYEDMVVE

SEQ ID NO: 20257 - protein, 32 aa, Artificial Sequence
  Non-cyclic GFR-binding peptide
  MOD_RES (1)..(1): Xaa is C or S
XAPTKLSPISVLYIDSSNNVIYKQYENMVVKA

SEQ ID NO: 20258 - protein, 43 aa, Artificial Sequence
  Non-cyclic GFR-binding peptide
  MOD_RES (6)..(7)..(41)..(43): Xaa is C or S
  MOD_RES (21)..(22)..(23)..(24)..(25): Xaa is A or G
  MOD_RES (26)..(27)..(28)..(29): Xaa is A or G or absent
AAPASXXVPARLSPISILYKXXXXXXXXXLKYHYDMVVEAXGX

SEQ ID NO: 20259 - protein, 37 aa, Artificial Sequence
  Non-cyclic GFR-binding peptide
  MOD_RES (1)..(35)..(37): Xaa is C or S
  MOD_RES (15)..(16)..(17)..(18)..(19): Xaa is A or G
  MOD_RES (20)..(21)..(22)..(23): Xaa is A or G or absent
XVPTELSPISMLYIXXXXXXXXXYKQYEDMVVEGXGX

SEQ ID NO: 20260 - protein, 40 aa, Artificial Sequence
  Non-cyclic GFR-binding peptide
  MOD_RES (3)..(4)..(38)..(40): Xaa is C or S
  MOD_RES (18)..(19)..(20)..(21)..(22): Xaa is A or G
  MOD_RES (23)..(24)..(25)..(26): Xaa is A or G or absent
ASXXVPARLEPISILYLXXXXXXXXXKFKYEDMVVEAXGX

SEQ ID NO: 20261 - protein, 37 aa, Artificial Sequence
  Non-cyclic GFR-binding peptide
  MOD_RES (3)..(4)..(35)..(37): Xaa is C or S
SPXXVPQDLSPISILYIVGRTPKVYKQYEMVVKSXKX

SEQ ID NO: 20262 - protein, 38 aa, Artificial Sequence
  Non-cyclic GFR-binding peptide
  MOD_RES (5)..(6): Xaa is C or S
  MOD_RES (20)..(21)..(22)..(23)..(24): Xaa is A or G
  MOD_RES (25)..(26)..(27)..(28): Xaa is A or G or absent
VPKAXXAPTKLSPISVLYIXXXXXXXXXYKQYENMVVK

SEQ ID NO: 20263 - protein, 34 aa, Artificial Sequence
  Non-cyclic GFR-binding peptide
  MOD_RES (34)..(34): Xaa is C or S
  MOD_RES (14)..(15)..(16)..(17)..(18): Xaa is A or G
  MOD_RES (19)..(20)..(21)..(22): Xaa is A or G or absent
VPTELSPISMLYIXXXXXXXXXYKQYEEMVVEGX

SEQ ID NO: 20264 - protein, 36 aa, Artificial Sequence
  Non-cyclic GFR-binding peptide
  MOD_RES (4)..(5): Xaa is C or S
PKAXXVPTELSPISMLYIDENEKVVYKQYEDMVVEG

SEQ ID NO: 20265 - protein, 35 aa, Artificial Sequence
  Non-cyclic GFR-binding peptide
  MOD_RES (1)..(35): Xaa is C or S
  MOD_RES (15)..(16)..(17)..(18)..(19): Xaa is A or G
  MOD_RES (20)..(21)..(22)..(23): Xaa is A or G or absent
XAPTKLEPISVLYLXXXXXXXXXKFKYENMVVRSX

SEQ ID NO: 20266 - protein, 38 aa, Artificial Sequence
  Non-cyclic GFR-binding peptide
  MOD_RES (2)..(3)..(37): Xaa is C or S
  MOD_RES (17)..(18)..(19)..(20)..(21): Xaa is A or G
  MOD_RES (22)..(23)..(24)..(25): Xaa is A or G or absent
AXXVPTKLSPISILYIXXXXXXXXXYKQYEGMAVSEXG

SEQ ID NO: 20267 - protein, 35 aa, Artificial Sequence
  Non-cyclic GFR-binding peptide
  MOD_RES (3)..(4): Xaa is C or S
ASXXVPARLSPISILYKDAANNVVLKYHYDMVVEA

SEQ ID NO: 20268 - protein, 39 aa, Artificial Sequence
  Non-cyclic GFR-binding peptide
  MOD_RES (4)..(5)..(37)..(39): Xaa is C or S
PKAXXVPTELSPISMLYIDEYDKVVYKQYEEMVVEGXGX

SEQ ID NO: 20269 - protein, 41 aa, Artificial Sequence
  Non-cyclic GFR-binding peptide
  MOD_RES (6)..(7)..(39)..(41): Xaa is C or S
AAPASXXVPARLNAISILYFDAANNVVLKKYRDMVVEAXGX

SEQ ID NO: 20270 - protein, 43 aa, Artificial Sequence
  Non-cyclic GFR-binding peptide
  MOD_RES (7)..(41)..(43): Xaa is C or S
  MOD_RES (21)..(22)..(23)..(24)..(25): Xaa is A or G
  MOD_RES (26)..(27)..(28)..(29): Xaa is A or G or absent
HVTKPTXAPTKLEPISVLYLXXXXXXXXXKFKYENMVVRSXGX

SEQ ID NO: 20271 - protein, 38 aa, Artificial Sequence
  Non-cyclic GFR-binding peptide
  MOD_RES (1)..(2)..(36)..(38): Xaa is C or S
  MOD_RES (16)..(17)..(18)..(19)..(20): Xaa is A or G
  MOD_RES (21)..(22)..(23)..(24): Xaa is A or G or absent
XXAPTKLEPISVLYLXXXXXXXXXKFKYENMVVRSXGX

SEQ ID NO: 20272 - protein, 37 aa, Artificial Sequence
  Non-cyclic GFR-binding peptide
  MOD_RES (4)..(4): Xaa is C or S
  MOD_RES (18)..(19)..(20)..(21)..(22): Xaa is A or G
  MOD_RES (23)..(24)..(25)..(26): Xaa is A or G or absent
KPTXAPTKLSPISVLYIXXXXXXXXXYKQYENMVVRS

SEQ ID NO: 20273 - protein, 36 aa, Artificial Sequence
  Non-cyclic GFR-binding peptide
  MOD_RES (1)..(2)..(34)..(36): Xaa is C or S
XXAPTQLEPISVLYLDDSSNVIKFKYENMVVRAXGX

SEQ ID NO: 20274 - protein, 40 aa, Artificial Sequence
  Non-cyclic GFR-binding peptide
  MOD_RES (6)..(7): Xaa is C or S
  MOD_RES (21)..(22)..(23)..(24)..(25): Xaa is A or G
  MOD_RES (26)..(27)..(28)..(29): Xaa is A or G or absent
SIPKAXXVPTELEPISMLYLXXXXXXXXXKFKYEEMVVEG

SEQ ID NO: 20275 - protein, 42 aa, Artificial Sequence
  Non-cyclic GFR-binding peptide
  MOD_RES (4)..(5)..(39)..(41): Xaa is C or S
  MOD_RES (19)..(20)..(21)..(22)..(23): Xaa is A or G
  MOD_RES (24)..(25)..(26)..(27): Xaa is A or G or absent
SKAXXVPTKLSPISILYKXXXXXXXXXLKYHYGMAVSEXGXR

SEQ ID NO: 20276 - protein, 42 aa, Artificial Sequence
  Non-cyclic GFR-binding peptide
  MOD_RES (5)..(6)..(40)..(42): Xaa is C or S
  MOD_RES (20)..(21)..(22)..(23)..(24): Xaa is A or G
  MOD_RES (25)..(26)..(27)..(28): Xaa is A or G or absent
VPKAXXAPTKLEPISVLYLXXXXXXXXXKFKYENMVVKAXGX

SEQ ID NO: 20277 - protein, 35 aa, Artificial Sequence
  Non-cyclic GFR-binding peptide
  MOD_RES (1)..(35): Xaa is C or S
  MOD_RES (15)..(16)..(17)..(18)..(19): Xaa is A or G
  MOD_RES (20)..(21)..(22)..(23): Xaa is A or G or absent
XAPTQLSPISVLYIXXXXXXXXXYKQYENMVVRAX

SEQ ID NO: 20278 - protein, 39 aa, Artificial Sequence
  Non-cyclic GFR-binding peptide
  MOD_RES (3)..(4)..(37)..(39): Xaa is C or S
  MOD_RES (18)..(19)..(20)..(21)..(22): Xaa is A or G
  MOD_RES (23)..(24)..(25)..(26): Xaa is A or G or absent
APXXVPQALSPISILYIXXXXXXXXXYKQYEMIVRSXKX

SEQ ID NO: 20279 - protein, 37 aa, Artificial Sequence
  Non-cyclic GFR-binding peptide
  MOD_RES (5)..(6): Xaa is C or S
ASKAXXVPTKLNAISILYFDKGVVTYLKKYRGMAVSE

SEQ ID NO: 20280 - protein, 35 aa, Artificial Sequence
  Non-cyclic GFR-binding peptide
  MOD_RES (1)..(2)..(33)..(35): Xaa is C or S
XXVPQDLEPISILYLVGRTPKVKFKYEMVVKSXKX

SEQ ID NO: 20281 - protein, 37 aa, Artificial Sequence
  Non-cyclic GFR-binding peptide
  MOD_RES (4)..(5): Xaa is C or S
  MOD_RES (19)..(20)..(21)..(22)..(23): Xaa is A or G
  MOD_RES (24)..(25)..(26)..(27): Xaa is A or G or absent
PASXXVPARLNAISILYFXXXXXXXXXLKKYRDMVVE

SEQ ID NO: 20282 - protein, 40 aa, Artificial Sequence
  Non-cyclic GFR-binding peptide
  MOD_RES (5)..(6)..(40): Xaa is C or S
  MOD_RES (20)..(21)..(22)..(23)..(24): Xaa is A or G
  MOD_RES (25)..(26)..(27)..(28): Xaa is A or G or absent
VPKPXXAPTKLEPISVLYLXXXXXXXXXKFKYENMVVRSX

SEQ ID NO: 20283 - protein, 37 aa, Artificial Sequence
  Non-cyclic GFR-binding peptide
  MOD_RES (1)..(36): Xaa is C or S
  MOD_RES (15)..(16)..(17)..(18)..(19): Xaa is A or G
  MOD_RES (20)..(21)..(22)..(23): Xaa is A or G or absent
XVPTKLEPISVLYLXXXXXXXXXKFKYEEGMSVAEXG

SEQ ID NO: 20284 - protein, 33 aa, Artificial Sequence
  Non-cyclic GFR-binding peptide
  MOD_RES (2)..(3): Xaa is C or S
SXXVPARLSPISILYKDAANNVVLKYHYDMVVE

SEQ ID NO: 20285 - protein, 30 aa, Artificial Sequence
  Non-cyclic GFR-binding peptide
APTKLSPISVLYIDSSNNVIYKQYENMVVK

SEQ ID NO: 20286 - protein, 35 aa, Artificial Sequence
  Non-cyclic GFR-binding peptide
  MOD_RES (2)..(3): Xaa is C or S
  MOD_RES (17)..(18)..(19)..(20)..(21): Xaa is A or G
  MOD_RES (22)..(23)..(24)..(25): Xaa is A or G or absent
AXXVPTKLSPISILYIXXXXXXXXXYKQYEGMAVS

SEQ ID NO: 20287 - protein, 32 aa, Artificial Sequence
  Non-cyclic GFR-binding peptide
  MOD_RES (1)..(1): Xaa is C or S
XVPTKLSPISILYKDKGVVTYLKYHYGMAVSE

SEQ ID NO: 20288 - protein, 37 aa, Artificial Sequence
  Non-cyclic GFR-binding peptide
  MOD_RES (6)..(7): Xaa is C or S
TVPKPXXAPTQLSPISVLYIDDSSNVIYKQYENMVVR

SEQ ID NO: 20289 - protein, 41 aa, Artificial Sequence
  Non-cyclic GFR-binding peptide
  MOD_RES (6)..(7)..(40): Xaa is C or S
  MOD_RES (21)..(22)..(23)..(24)..(25): Xaa is A or G
  MOD_RES (26)..(27)..(28)..(29): Xaa is A or G or absent
ASASPXXVPQDLEPISILYLXXXXXXXXXKFKYEMVVKSXK

SEQ ID NO: 20290 - protein, 39 aa, Artificial Sequence
  Non-cyclic GFR-binding peptide
  MOD_RES (6)..(7): Xaa is C or S
  MOD_RES (21)..(22)..(23)..(24)..(25): Xaa is A or G
  MOD_RES (26)..(27)..(28)..(29): Xaa is A or G or absent
TVPKPXXAPTQLSPISVLYIXXXXXXXXXYKQYENMVVR

SEQ ID NO: 20291 - protein, 36 aa, Artificial Sequence
  Non-cyclic GFR-binding peptide
  MOD_RES (1)..(2)..(36): Xaa is C or S
  MOD_RES (16)..(17)..(18)..(19)..(20): Xaa is A or G
  MOD_RES (21)..(22)..(23)..(24): Xaa is A or G or absent
XXAPTKLEPISVLYLXXXXXXXXXKFKYENMVVKAX

SEQ ID NO: 20292 - protein, 38 aa, Artificial Sequence
  Non-cyclic GFR-binding peptide
  MOD_RES (6)..(38): Xaa is C or S
VTKPTXAPTKLEPISVLYLDDSSNVIKFKYENMVVRSX

SEQ ID NO: 20293 - protein, 32 aa, Artificial Sequence
  Non-cyclic GFR-binding peptide
  MOD_RES (1)..(2): Xaa is C or S
XXVPTELEPISMLYLDENEKVVKFKYEDMVVE

SEQ ID NO: 20294 - protein, 41 aa, Artificial Sequence
  Non-cyclic GFR-binding peptide
  MOD_RES (6)..(7)..(38)..(40): Xaa is C or S
ASASPXXVSQDLSPISILYIIGKTPKIYKQYEMIVKSXKXS

SEQ ID NO: 20295 - protein, 34 aa, Artificial Sequence
  Non-cyclic GFR-binding peptide
  MOD_RES (1)..(2)..(34): Xaa is C or S
XXVPARLEPISILYLDAANNVVKFKYEDMVVEAX

SEQ ID NO: 20296 - protein, 37 aa, Artificial Sequence
  Non-cyclic GFR-binding peptide
  MOD_RES (1)..(2)..(34)..(36): Xaa is C or S
XXVPTKLNAISILYFDKGVVTYLKKYRGMAVSEXGXR

SEQ ID NO: 20297 - protein, 36 aa, Artificial Sequence
  Non-cyclic GFR-binding peptide
  MOD_RES (6)..(6): Xaa is C or S
VTKPTXAPTKLEPISVLYLDDSSNVIKFKYENMVVR

SEQ ID NO: 20298 - protein, 33 aa, Artificial Sequence
  Non-cyclic GFR-binding peptide
  MOD_RES (1)..(33): Xaa is C or S
XVPTELSPISMLYIDENEKVVYKQYEDMVVEGX

SEQ ID NO: 20299 - protein, 33 aa, Artificial Sequence
  Non-cyclic GFR-binding peptide
  MOD_RES (2)..(3): Xaa is C or S
PXXVPQALSPISILYIVGRKPKVYKQYEMIVRS

SEQ ID NO: 20300 - protein, 39 aa, Artificial Sequence
  Non-cyclic GFR-binding peptide
  MOD_RES (5)..(6)..(38): Xaa is C or S
IPKAXXVPTELEPISMLYLDENEKVVKFKYEDMVVEGXG

SEQ ID NO: 20301 - protein, 38 aa, Artificial Sequence
  Non-cyclic GFR-binding peptide
  MOD_RES (4)..(5)..(38): Xaa is C or S
GKAXXVPTKLSPISVLYIDDMGVPTYKQYEEGMSVAEX

SEQ ID NO: 20302 - protein, 42 aa, Artificial Sequence
  Non-cyclic GFR-binding peptide
  MOD_RES (6)..(7)..(41): Xaa is C or S
  MOD_RES (21)..(22)..(23)..(24)..(25): Xaa is A or G
  MOD_RES (26)..(27)..(28)..(29): Xaa is A or G or absent
KIPKAXXVPTELSPISMLYIXXXXXXXXXYKQYEDMVVEGXG

SEQ ID NO: 20303 - protein, 38 aa, Artificial Sequence
  Non-cyclic GFR-binding peptide
  MOD_RES (1)..(36)..(38): Xaa is C or S
  MOD_RES (15)..(16)..(17)..(18)..(19): Xaa is A or G
  MOD_RES (20)..(21)..(22)..(23): Xaa is A or G or absent
XVPTKLEPISVLYLXXXXXXXXXKFKYEEGMSVAEXGX

SEQ ID NO: 20304 - protein, 41 aa, Artificial Sequence
  Non-cyclic GFR-binding peptide
  MOD_RES (6)..(7)..(39)..(41): Xaa is C or S
KIPKAXXVPTELEPISMLYLDENEKVVKFKYEDMVVEGXGX

SEQ ID NO: 20305 - protein, 35 aa, Artificial Sequence
  Non-cyclic GFR-binding peptide
  MOD_RES (1)..(2)..(34): Xaa is C or S
XXVPTKLNAISILYFDKGVVTYLKKYRGMAVSEXG

SEQ ID NO: 20306 - protein, 37 aa, Artificial Sequence
  Non-cyclic GFR-binding peptide
  MOD_RES (1)..(35)..(37): Xaa is C or S
  MOD_RES (15)..(16)..(17)..(18)..(19): Xaa is A or G
  MOD_RES (20)..(21)..(22)..(23): Xaa is A or G or absent
XAPTKLEPISVLYLXXXXXXXXXKFKYENMVVKAXGX

SEQ ID NO: 20307 - protein, 37 aa, Artificial Sequence
  Non-cyclic GFR-binding peptide
  MOD_RES (1)..(2)..(34)..(36): Xaa is C or S
XXAPTKLEPISVLYLDSSNNVIKFKYENMVVKAXGXH

SEQ ID NO: 20308 - protein, 36 aa, Artificial Sequence
  Non-cyclic GFR-binding peptide
  MOD_RES (2)..(3): Xaa is C or S
  MOD_RES (17)..(18)..(19)..(20)..(21): Xaa is A or G
  MOD_RES (22)..(23)..(24)..(25): Xaa is A or G or absent
AXXVPTELSPISMLYIXXXXXXXXXYKQYEDMVVEG

SEQ ID NO: 20309 - protein, 33 aa, Artificial Sequence
  Non-cyclic GFR-binding peptide
  MOD_RES (32)..(32): Xaa is C or S
APTKLSPISVLYIDDSSNVIYKQYENMVVRSXG

SEQ ID NO: 20310 - protein, 32 aa, Artificial Sequence
  Non-cyclic GFR-binding peptide
  MOD_RES (1)..(32): Xaa is C or S
XVSQDLSPISILYIIGKTPKIYKQYEMIVKSX

SEQ ID NO: 20311 - protein, 43 aa, Artificial Sequence
  Non-cyclic GFR-binding peptide
  MOD_RES (6)..(7)..(41)..(43): Xaa is C or S
  MOD_RES (21)..(22)..(23)..(24)..(25): Xaa is A or G
  MOD_RES (26)..(27)..(28)..(29): Xaa is A or G or absent
KIPKAXXVPTELSPISMLYIXXXXXXXXXYKQYEDMVVEGXGX

SEQ ID NO: 20312 - protein, 34 aa, Artificial Sequence
  Non-cyclic GFR-binding peptide
  MOD_RES (33)..(33): Xaa is C or S
  MOD_RES (14)..(15)..(16)..(17)..(18): Xaa is A or G
  MOD_RES (19)..(20)..(21)..(22): Xaa is A or G or absent
VSQDLEPISILYLXXXXXXXXXKFKYEMIVKSXK

SEQ ID NO: 20313 - protein, 34 aa, Artificial Sequence
  Non-cyclic GFR-binding peptide
  MOD_RES (1)..(33): Xaa is C or S
XVPTELSPISMLYIDENEKVVYKQYEDMVVEGXG

SEQ ID NO: 20314 - protein, 36 aa, Artificial Sequence
  Non-cyclic GFR-binding peptide
  MOD_RES (4)..(5): Xaa is C or S
PKPXXAPTQLEPISVLYLDDSSNVIKFKYENMVVRA

SEQ ID NO: 20315 - protein, 36 aa, Artificial Sequence
  Non-cyclic GFR-binding peptide
  MOD_RES (2)..(3): Xaa is C or S
  MOD_RES (17)..(18)..(19)..(20)..(21): Xaa is A or G
  MOD_RES (22)..(23)..(24)..(25): Xaa is A or G or absent
PXXAPTQLSPISVLYIXXXXXXXXXYKQYENMVVRA

SEQ ID NO: 20316 - protein, 39 aa, Artificial Sequence
  Non-cyclic GFR-binding peptide
  MOD_RES (4)..(5)..(36)..(38): Xaa is C or S
ASPXXVSQDLSPISILYIIGKTPKIYKQYEMIVKSXKXS

SEQ ID NO: 20317 - protein, 37 aa, Artificial Sequence
  Non-cyclic GFR-binding peptide
  MOD_RES (1)..(35)..(37): Xaa is C or S
  MOD_RES (15)..(16)..(17)..(18)..(19): Xaa is A or G
  MOD_RES (20)..(21)..(22)..(23): Xaa is A or G or absent
XVPTELEPISMLYLXXXXXXXXXKFKYEDMVVEGXGX

SEQ ID NO: 20318 - protein, 39 aa, Artificial Sequence
  Non-cyclic GFR-binding peptide
  MOD_RES (4)..(5)..(37)..(39): Xaa is C or S
PKPXXAPTKLEPISVLYLDDSSNVIKFKYENMVVRSXGX

SEQ ID NO: 20319 - protein, 38 aa, Artificial Sequence
  Non-cyclic GFR-binding peptide
  MOD_RES (5)..(6)..(38): Xaa is C or S
VPKAXXAPTKLEPISVLYLDSSNNVIKFKYENMVVKAX

SEQ ID NO: 20320 - protein, 41 aa, Artificial Sequence
  Non-cyclic GFR-binding peptide
  MOD_RES (4)..(5)..(39)..(41): Xaa is C or S
  MOD_RES (19)..(20)..(21)..(22)..(23): Xaa is A or G
  MOD_RES (24)..(25)..(26)..(27): Xaa is A or G or absent
PKPXXAPTQLEPISVLYLXXXXXXXXXKFKYENMVVRAXGX

SEQ ID NO: 20321 - protein, 36 aa, Artificial Sequence
  Non-cyclic GFR-binding peptide
  MOD_RES (1)..(2)..(36): Xaa is C or S
  MOD_RES (16)..(17)..(18)..(19)..(20): Xaa is A or G
  MOD_RES (21)..(22)..(23)..(24): Xaa is A or G or absent
XXVPTELSPISMLYIXXXXXXXXXYKQYEDMVVEGX

SEQ ID NO: 20322 - protein, 37 aa, Artificial Sequence
  Non-cyclic GFR-binding peptide
  MOD_RES (4)..(5): Xaa is C or S
  MOD_RES (19)..(20)..(21)..(22)..(23): Xaa is A or G
  MOD_RES (24)..(25)..(26)..(27): Xaa is A or G or absent
PKPXXAPTKLSPISVLYIXXXXXXXXXYKQYENMVVR

SEQ ID NO: 20323 - protein, 41 aa, Artificial Sequence
  Non-cyclic GFR-binding peptide
  MOD_RES (6)..(7)..(41): Xaa is C or S
  MOD_RES (21)..(22)..(23)..(24)..(25): Xaa is A or G
  MOD_RES (26)..(27)..(28)..(29): Xaa is A or G or absent
AAPASXXVPARLSPISILYKXXXXXXXXXLKYHYDMVVEAX

SEQ ID NO: 20324 - protein, 38 aa, Artificial Sequence
  Non-cyclic GFR-binding peptide
  MOD_RES (3)..(4)..(38): Xaa is C or S
  MOD_RES (18)..(19)..(20)..(21)..(22): Xaa is A or G
  MOD_RES (23)..(24)..(25)..(26): Xaa is A or G or absent
ASXXVPARLNAISILYFXXXXXXXXXLKKYRDMVVEAX

SEQ ID NO: 20325 - protein, 42 aa, Artificial Sequence
  Non-cyclic GFR-binding peptide
  MOD_RES (6)..(7)..(40)..(42): Xaa is C or S
  MOD_RES (21)..(22)..(23)..(24)..(25): Xaa is A or G
  MOD_RES (26)..(27)..(28)..(29): Xaa is A or G or absent
ASAAPXXVPQALSPISILYIXXXXXXXXXYKQYEMIVRSXKX

SEQ ID NO: 20326 - protein, 39 aa, Artificial Sequence
  Non-cyclic GFR-binding peptide
  MOD_RES (4)..(36)..(38): Xaa is C or S
KPTXAPTKLEPISVLYLDDSSNVIKFKYENMVVRSXGXH

SEQ ID NO: 20327 - protein, 39 aa, Artificial Sequence
  Non-cyclic GFR-binding peptide
  MOD_RES (5)..(39): Xaa is C or S
  MOD_RES (19)..(20)..(21)..(22)..(23): Xaa is A or G
  MOD_RES (24)..(25)..(26)..(27): Xaa is A or G or absent
TKPTXAPTKLEPISVLYLXXXXXXXXXKFKYENMVVRSX

SEQ ID NO: 20328 - protein, 40 aa, Artificial Sequence
  Non-cyclic GFR-binding peptide
  MOD_RES (2)..(3)..(37)..(39): Xaa is C or S
  MOD_RES (17)..(18)..(19)..(20)..(21): Xaa is A or G
  MOD_RES (22)..(23)..(24)..(25): Xaa is A or G or absent
AXXAPTKLEPISVLYLXXXXXXXXXKFKYENMVVKAXGXH

SEQ ID NO: 20329 - protein, 34 aa, Artificial Sequence
  Non-cyclic GFR-binding peptide
  MOD_RES (1)..(1): Xaa is C or S
  MOD_RES (15)..(16)..(17)..(18)..(19): Xaa is A or G
  MOD_RES (20)..(21)..(22)..(23): Xaa is A or G or absent
XVPTELSPISMLYIXXXXXXXXXYKQYEEMVVEG

SEQ ID NO: 20330 - protein, 35 aa, Artificial Sequence
  Non-cyclic GFR-binding peptide
  MOD_RES (3)..(3): Xaa is C or S
  MOD_RES (17)..(18)..(19)..(20)..(21): Xaa is A or G
  MOD_RES (22)..(23)..(24)..(25): Xaa is A or G or absent
PTXAPTKLEPISVLYLXXXXXXXXXKFKYENMVVR

SEQ ID NO: 20331 - protein, 37 aa, Artificial Sequence
  Non-cyclic GFR-binding peptide
  MOD_RES (2)..(3)..(35)..(37): Xaa is C or S
SXXVPARLNAISILYFDAANNVVLKKYRDMVVEAXGX

SEQ ID NO: 20332 - protein, 40 aa, Artificial Sequence
  Non-cyclic GFR-binding peptide
  MOD_RES (3)..(4)..(38)..(40): Xaa is C or S
  MOD_RES (18)..(19)..(20)..(21)..(22): Xaa is A or G
  MOD_RES (23)..(24)..(25)..(26): Xaa is A or G or absent
KAXXVPTELSPISMLYIXXXXXXXXXYKQYEDMVVEGXGX

SEQ ID NO: 20333 - protein, 34 aa, Artificial Sequence
  Non-cyclic GFR-binding peptide
  MOD_RES (1)..(34): Xaa is C or S
XVPTKLSPISVLYIDDMGVPTYKQYEEGMSVAEX

SEQ ID NO: 20334 - protein, 33 aa, Artificial Sequence
  Non-cyclic GFR-binding peptide
  MOD_RES (32)..(32): Xaa is C or S
VPARLNAISILYFDAANNVVLKKYRDMVVEAXG

SEQ ID NO: 20335 - protein, 33 aa, Artificial Sequence
  Non-cyclic GFR-binding peptide
  MOD_RES (2)..(3): Xaa is C or S
AXXVPTELSPISMLYIDENEKVVYKQYEDMVVE

SEQ ID NO: 20336 - protein, 35 aa, Artificial Sequence
  Non-cyclic GFR-binding peptide
  MOD_RES (33)..(35): Xaa is C or S
VPTKLEPISVLYLDDMGVPTKFKYEEGMSVAEXGX

SEQ ID NO: 20337 - protein, 32 aa, Artificial Sequence
  Non-cyclic GFR-binding peptide
  MOD_RES (32)..(32): Xaa is C or S
VPTKLSPISILYIDKGVVTYYKQYEGMAVSEX

SEQ ID NO: 20338 - protein, 38 aa, Artificial Sequence
  Non-cyclic GFR-binding peptide
  MOD_RES (5)..(6)..(38): Xaa is C or S
VPKAXXAPTKLSPISVLYIDSSNNVIYKQYENMVVKAX

SEQ ID NO: 20339 - protein, 35 aa, Artificial Sequence
  Non-cyclic GFR-binding peptide
  MOD_RES (1)..(34): Xaa is C or S
  MOD_RES (15)..(16)..(17)..(18)..(19): Xaa is A or G
  MOD_RES (20)..(21)..(22)..(23): Xaa is A or G or absent
XVPQALSPISILYIXXXXXXXXXYKQYEMIVRSXK

SEQ ID NO: 20340 - protein, 36 aa, Artificial Sequence
  Non-cyclic GFR-binding peptide
  MOD_RES (2)..(3)..(36): Xaa is C or S
  MOD_RES (17)..(18)..(19)..(20)..(21): Xaa is A or G
  MOD_RES (22)..(23)..(24)..(25): Xaa is A or G or absent
PXXVPQALSPISILYIXXXXXXXXXYKQYEMIVRSX

SEQ ID NO: 20341 - protein, 34 aa, Artificial Sequence
  Non-cyclic GFR-binding peptide
  MOD_RES (1)..(2): Xaa is C or S
  MOD_RES (16)..(17)..(18)..(19)..(20): Xaa is A or G
  MOD_RES (21)..(22)..(23)..(24): Xaa is A or G or absent
XXVSQDLEPISILYLXXXXXXXXXKFKYEMIVKS

SEQ ID NO: 20342 - protein, 38 aa, Artificial Sequence
  Non-cyclic GFR-binding peptide
  MOD_RES (2)..(3)..(37): Xaa is C or S
  MOD_RES (17)..(18)..(19)..(20)..(21): Xaa is A or G
  MOD_RES (22)..(23)..(24)..(25): Xaa is A or G or absent
PXXAPTKLEPISVLYLXXXXXXXXXKFKYENMVVRSXG

SEQ ID NO: 20343 - protein, 40 aa, Artificial Sequence
  Non-cyclic GFR-binding peptide
  MOD_RES (3)..(4)..(38)..(40): Xaa is C or S
  MOD_RES (18)..(19)..(20)..(21)..(22): Xaa is A or G
  MOD_RES (23)..(24)..(25)..(26): Xaa is A or G or absent
KAXXAPTKLSPISVLYIXXXXXXXXXYKQYENMVVKAXGX

SEQ ID NO: 20344 - protein, 39 aa, Artificial Sequence
  Non-cyclic GFR-binding peptide
  MOD_RES (5)..(6)..(37)..(39): Xaa is C or S
SAAPXXVPQALEPISILYLVGRKPKVKFKYEMIVRSXKX

SEQ ID NO: 20345 - protein, 33 aa, Artificial Sequence
  Non-cyclic GFR-binding peptide
  MOD_RES (2)..(2): Xaa is C or S
TXAPTKLSPISVLYIDDSSNVIYKQYENMVVRS

SEQ ID NO: 20346 - protein, 33 aa, Artificial Sequence
  Non-cyclic GFR-binding peptide
  MOD_RES (1)..(1): Xaa is C or S
  MOD_RES (15)..(16)..(17)..(18)..(19): Xaa is A or G
  MOD_RES (20)..(21)..(22)..(23): Xaa is A or G or absent
XAPTQLSPISVLYIXXXXXXXXXYKQYENMVVR

SEQ ID NO: 20347 - protein, 32 aa, Artificial Sequence
  Non-cyclic GFR-binding peptide
  MOD_RES (32)..(32): Xaa is C or S
APTKLEPISVLYLDSSNNVIKFKYENMVVKAX

SEQ ID NO: 20348 - protein, 38 aa, Artificial Sequence
  Non-cyclic GFR-binding peptide
  MOD_RES (1)..(35)..(37): Xaa is C or S
  MOD_RES (15)..(16)..(17)..(18)..(19): Xaa is A or G
  MOD_RES (20)..(21)..(22)..(23): Xaa is A or G or absent
XVPTKLSPISILYIXXXXXXXXXYKQYEGMAVSEXGXR

SEQ ID NO: 20349 - protein, 39 aa, Artificial Sequence
  Non-cyclic GFR-binding peptide
  MOD_RES (4)..(5)..(37)..(39): Xaa is C or S
PKPXXAPTQLEPISVLYLDDSSNVIKFKYENMVVRAXGX

SEQ ID NO: 20350 - protein, 35 aa, Artificial Sequence
  Non-cyclic GFR-binding peptide
  MOD_RES (4)..(5): Xaa is C or S
SKAXXVPTKLSPISILYKDKGVVTYLKYHYGMAVS

SEQ ID NO: 20351 - protein, 37 aa, Artificial Sequence
  Non-cyclic GFR-binding peptide
  MOD_RES (3)..(4)..(36): Xaa is C or S
KAXXAPTKLEPISVLYLDSSNNVIKFKYENMVVKAXG

SEQ ID NO: 20352 - protein, 38 aa, Artificial Sequence
  Non-cyclic GFR-binding peptide
  MOD_RES (3)..(4)..(36)..(38): Xaa is C or S
KPXXAPTQLEPISVLYLDDSSNVIKFKYENMVVRAXGX

SEQ ID NO: 20353 - protein, 40 aa, Artificial Sequence
  Non-cyclic GFR-binding peptide
  MOD_RES (6)..(7)..(39): Xaa is C or S
SIPKAXXVPTELEPISMLYLDEYDKVVKFKYEEMVVEGXG

SEQ ID NO: 20354 - protein, 36 aa, Artificial Sequence
  Non-cyclic GFR-binding peptide
  MOD_RES (2)..(3)..(34)..(36): Xaa is C or S
PXXVSQDLEPISILYLIGKTPKIKFKYEMIVKSXKX

SEQ ID NO: 20355 - protein, 34 aa, Artificial Sequence
  Non-cyclic GFR-binding peptide
  MOD_RES (1)..(1): Xaa is C or S
  MOD_RES (15)..(16)..(17)..(18)..(19): Xaa is A or G
  MOD_RES (20)..(21)..(22)..(23): Xaa is A or G or absent
XAPTQLEPISVLYLXXXXXXXXXKFKYENMVVRA

SEQ ID NO: 20356 - protein, 36 aa, Artificial Sequence
  Non-cyclic GFR-binding peptide
  MOD_RES (2)..(3)..(35): Xaa is C or S
PXXAPTQLEPISVLYLDDSSNVIKFKYENMVVRAXG

SEQ ID NO: 20357 - protein, 33 aa, Artificial Sequence
  Non-cyclic GFR-binding peptide
  MOD_RES (1)..(2): Xaa is C or S
XXAPTKLSPISVLYIDSSNNVIYKQYENMVVKA

SEQ ID NO: 20358 - protein, 39 aa, Artificial Sequence
  Non-cyclic GFR-binding peptide
  MOD_RES (1)..(2)..(36)..(38): Xaa is C or S
  MOD_RES (16)..(17)..(18)..(19)..(20): Xaa is A or G
  MOD_RES (21)..(22)..(23)..(24): Xaa is A or G or absent
XXAPTKLEPISVLYLXXXXXXXXXKFKYENMVVKAXGXH

SEQ ID NO: 20359 - protein, 36 aa, Artificial Sequence
  Non-cyclic GFR-binding peptide
  MOD_RES (3)..(4)..(35): Xaa is C or S
SPXXVSQDLSPISILYIIGKTPKIYKQYEMIVKSXK

SEQ ID NO: 20360 - protein, 37 aa, Artificial Sequence
  Non-cyclic GFR-binding peptide
  MOD_RES (34)..(36): Xaa is C or S
  MOD_RES (14)..(15)..(16)..(17)..(18): Xaa is A or G
  MOD_RES (19)..(20)..(21)..(22): Xaa is A or G or absent
APTQLEPISVLYLXXXXXXXXXKFKYENMVVRAXGXH

SEQ ID NO: 20361 - protein, 37 aa, Artificial Sequence
  Non-cyclic GFR-binding peptide
  MOD_RES (1)..(2)..(36): Xaa is C or S
  MOD_RES (16)..(17)..(18)..(19)..(20): Xaa is A or G
  MOD_RES (21)..(22)..(23)..(24): Xaa is A or G or absent
XXVPARLSPISILYKXXXXXXXXXLKYHYDMVVEAXG

SEQ ID NO: 20362 - protein, 35 aa, Artificial Sequence
  Non-cyclic GFR-binding peptide
  MOD_RES (1)..(34): Xaa is C or S
XVPTKLEPISVLYLDDMGVPTKFKYEEGMSVAEXG

SEQ ID NO: 20363 - protein, 35 aa, Artificial Sequence
  Non-cyclic GFR-binding peptide
  MOD_RES (1)..(32)..(34): Xaa is C or S
XVSQDLSPISILYIIGKTPKIYKQYEMIVKSXKXS

SEQ ID NO: 20364 - protein, 43 aa, Artificial Sequence
  Non-cyclic GFR-binding peptide
  MOD_RES (7)..(41)..(43): Xaa is C or S
  MOD_RES (21)..(22)..(23)..(24)..(25): Xaa is A or G
  MOD_RES (26)..(27)..(28)..(29): Xaa is A or G or absent
HVTKPTXAPTKLSPISVLYIXXXXXXXXXYKQYENMVVRSXGX

SEQ ID NO: 20365 - protein, 36 aa, Artificial Sequence
  Non-cyclic GFR-binding peptide
  MOD_RES (4)..(5): Xaa is C or S
PKAXXVPTELEPISMLYLDEYDKVVKFKYEEMVVEG

SEQ ID NO: 20366 - protein, 37 aa, Artificial Sequence
  Non-cyclic GFR-binding peptide
  MOD_RES (4)..(36): Xaa is C or S
KPTXAPTKLSPISVLYIDDSSNVIYKQYENMVVRSXG

SEQ ID NO: 20367 - protein, 32 aa, Artificial Sequence
  Non-cyclic GFR-binding peptide
  MOD_RES (1)..(2): Xaa is C or S
XXVSQDLSPISILYIIGKTPKIYKQYEMIVKS

SEQ ID NO: 20368 - protein, 36 aa, Artificial Sequence
  Non-cyclic GFR-binding peptide
  MOD_RES (3)..(4): Xaa is C or S
  MOD_RES (18)..(19)..(20)..(21)..(22): Xaa is A or G
  MOD_RES (23)..(24)..(25)..(26): Xaa is A or G or absent
KPXXAPTKLEPISVLYLXXXXXXXXXKFKYENMVVR

SEQ ID NO: 20369 - protein, 36 aa, Artificial Sequence
  Non-cyclic GFR-binding peptide
  MOD_RES (2)..(3)..(35): Xaa is C or S
PXXAPTKLEPISVLYLDDSSNVIKFKYENMVVRSXG

SEQ ID NO: 20370 - protein, 36 aa, Artificial Sequence
  Non-cyclic GFR-binding peptide
  MOD_RES (2)..(3)..(35): Xaa is C or S
AXXVPTELSPISMLYIDEYDKVVYKQYEEMVVEGXG

SEQ ID NO: 20371 - protein, 41 aa, Artificial Sequence
  Non-cyclic GFR-binding peptide
  MOD_RES (6)..(7): Xaa is C or S
  MOD_RES (21)..(22)..(23)..(24)..(25): Xaa is A or G
  MOD_RES (26)..(27)..(28)..(29): Xaa is A or G or absent
KVGKAXXVPTKLSPISVLYIXXXXXXXXXYKQYEEGMSVAE

SEQ ID NO: 20372 - protein, 36 aa, Artificial Sequence
  Non-cyclic GFR-binding peptide
  MOD_RES (35)..(35): Xaa is C or S
  MOD_RES (14)..(15)..(16)..(17)..(18): Xaa is A or G
  MOD_RES (19)..(20)..(21)..(22): Xaa is A or G or absent
VPTKLSPISVLYIXXXXXXXXXYKQYEEGMSVAEXG

SEQ ID NO: 20373 - protein, 36 aa, Artificial Sequence
  Non-cyclic GFR-binding peptide
  MOD_RES (4)..(36): Xaa is C or S
KPTXAPTKLSPISVLYIDDSSNVIYKQYENMVVRSX

SEQ ID NO: 20374 - protein, 39 aa, Artificial Sequence
  Non-cyclic GFR-binding peptide
  MOD_RES (4)..(5)..(37)..(39): Xaa is C or S
PKAXXVPTELSPISMLYIDENEKVVYKQYEDMVVEGXGX

SEQ ID NO: 20375 - protein, 39 aa, Artificial Sequence
  Non-cyclic GFR-binding peptide
  MOD_RES (6)..(7)..(39): Xaa is C or S
AVPKAXXAPTKLSPISVLYIDSSNNVIYKQYENMVVKAX

SEQ ID NO: 20376 - protein, 33 aa, Artificial Sequence
  Non-cyclic GFR-binding peptide
  MOD_RES (1)..(2): Xaa is C or S
XXVPARLNAISILYFDAANNVVLKKYRDMVVEA

SEQ ID NO: 20377 - protein, 35 aa, Artificial Sequence
  Non-cyclic GFR-binding peptide
  MOD_RES (1)..(2): Xaa is C or S
  MOD_RES (16)..(17)..(18)..(19)..(20): Xaa is A or G
  MOD_RES (21)..(22)..(23)..(24): Xaa is A or G or absent
XXAPTQLEPISVLYLXXXXXXXXXKFKYENMVVRA

SEQ ID NO: 20378 - protein, 39 aa, Artificial Sequence
  Non-cyclic GFR-binding peptide
  MOD_RES (5)..(6)..(38): Xaa is C or S
ASKAXXVPTKLSPISILYKDKGVVTYLKYHYGMAVSEXG

SEQ ID NO: 20379 - protein, 42 aa, Artificial Sequence
  Non-cyclic GFR-binding peptide
  MOD_RES (6)..(7)..(40)..(42): Xaa is C or S
  MOD_RES (21)..(22)..(23)..(24)..(25): Xaa is A or G
  MOD_RES (26)..(27)..(28)..(29): Xaa is A or G or absent
ASASPXXVSQDLSPISILYIXXXXXXXXXYKQYEMIVKSXKX

SEQ ID NO: 20380 - protein, 38 aa, Artificial Sequence
  Non-cyclic GFR-binding peptide
  MOD_RES (6)..(6): Xaa is C or S
  MOD_RES (20)..(21)..(22)..(23)..(24): Xaa is A or G
  MOD_RES (25)..(26)..(27)..(28): Xaa is A or G or absent
VTKPTXAPTKLEPISVLYLXXXXXXXXXKFKYENMVVR

SEQ ID NO: 20381 - protein, 37 aa, Artificial Sequence
  Non-cyclic GFR-binding peptide
  MOD_RES (1)..(2)..(34)..(36): Xaa is C or S
XXVPTKLSPISILYKDKGVVTYLKYHYGMAVSEXGXR

SEQ ID NO: 20382 - protein, 40 aa, Artificial Sequence
  Non-cyclic GFR-binding peptide
  MOD_RES (7)..(39): Xaa is C or S
HVTKPTXAPTKLEPISVLYLDDSSNVIKFKYENMVVRSXG

SEQ ID NO: 20383 - protein, 35 aa, Artificial Sequence
  Non-cyclic GFR-binding peptide
  MOD_RES (2)..(2): Xaa is C or S
  MOD_RES (16)..(17)..(18)..(19)..(20): Xaa is A or G
  MOD_RES (21)..(22)..(23)..(24): Xaa is A or G or absent
TXAPTKLSPISVLYIXXXXXXXXXYKQYENMVVRS

SEQ ID NO: 20384 - protein, 35 aa, Artificial Sequence
  Non-cyclic GFR-binding peptide
  MOD_RES (33)..(35): Xaa is C or S
VPTKLSPISVLYIDDMGVPTYKQYEEGMSVAEXGX

SEQ ID NO: 20385 - protein, 38 aa, Artificial Sequence
  Non-cyclic GFR-binding peptide
  MOD_RES (5)..(6): Xaa is C or S
  MOD_RES (20)..(21)..(22)..(23)..(24): Xaa is A or G
  MOD_RES (25)..(26)..(27)..(28): Xaa is A or G or absent
SAAPXXVPQALEPISILYLXXXXXXXXXKFKYEMIVRS

SEQ ID NO: 20386 - protein, 39 aa, Artificial Sequence
  Non-cyclic GFR-binding peptide
  MOD_RES (6)..(7)..(39): Xaa is C or S
YVPKPXXAPTKLSPISVLYIDDSSNVIYKQYENMVVRSX

SEQ ID NO: 20387 - protein, 36 aa, Artificial Sequence
  Non-cyclic GFR-binding peptide
  MOD_RES (2)..(3)..(35): Xaa is C or S
AXXAPTKLSPISVLYIDSSNNVIYKQYENMVVKAXG

SEQ ID NO: 20388 - protein, 31 aa, Artificial Sequence
  Non-cyclic GFR-binding peptide
  MOD_RES (1)..(1): Xaa is C or S
XVPARLEPISILYLDAANNVVKFKYEDMVVE

SEQ ID NO: 20389 - protein, 36 aa, Artificial Sequence
  Non-cyclic GFR-binding peptide
  MOD_RES (2)..(3): Xaa is C or S
  MOD_RES (17)..(18)..(19)..(20)..(21): Xaa is A or G
  MOD_RES (22)..(23)..(24)..(25): Xaa is A or G or absent
SXXVPARLEPISILYLXXXXXXXXXKFKYEDMVVEA

SEQ ID NO: 20390 - protein, 40 aa, Artificial Sequence
  Non-cyclic GFR-binding peptide
  MOD_RES (6)..(7)..(40): Xaa is C or S
  MOD_RES (21)..(22)..(23)..(24)..(25): Xaa is A or G
  MOD_RES (26)..(27)..(28)..(29): Xaa is A or G or absent
ASASPXXVSQDLSPISILYIXXXXXXXXXYKQYEMIVKSX

SEQ ID NO: 20391 - protein, 34 aa, Artificial Sequence
  Non-cyclic GFR-binding peptide
  MOD_RES (1)..(34): Xaa is C or S
  MOD_RES (15)..(16)..(17)..(18)..(19): Xaa is A or G
  MOD_RES (20)..(21)..(22)..(23): Xaa is A or G or absent
XVPQDLSPISILYIXXXXXXXXXYKQYEMVVKSX

SEQ ID NO: 20392 - protein, 41 aa, Artificial Sequence
  Non-cyclic GFR-binding peptide
  MOD_RES (6)..(7)..(41): Xaa is C or S
  MOD_RES (21)..(22)..(23)..(24)..(25): Xaa is A or G
  MOD_RES (26)..(27)..(28)..(29): Xaa is A or G or absent
KASKAXXVPTKLSPISILYKXXXXXXXXXLKYHYGMAVSEX

SEQ ID NO: 20393 - protein, 40 aa, Artificial Sequence
  Non-cyclic GFR-binding peptide
  MOD_RES (5)..(6)..(38)..(40): Xaa is C or S
VPKPXXAPTQLEPISVLYLDDSSNVIKFKYENMVVRAXGX

SEQ ID NO: 20394 - protein, 34 aa, Artificial Sequence
  Non-cyclic GFR-binding peptide
  MOD_RES (1)..(2): Xaa is C or S
  MOD_RES (16)..(17)..(18)..(19)..(20): Xaa is A or G
  MOD_RES (21)..(22)..(23)..(24): Xaa is A or G or absent
XXVPTELEPISMLYLXXXXXXXXXKFKYEEMVVE

SEQ ID NO: 20395 - protein, 35 aa, Artificial Sequence
  Non-cyclic GFR-binding peptide
  MOD_RES (1)..(33)..(35): Xaa is C or S
XAPTQLSPISVLYIDDSSNVIYKQYENMVVRAXGX

SEQ ID NO: 20396 - protein, 34 aa, Artificial Sequence
  Non-cyclic GFR-binding peptide
  MOD_RES (1)..(1): Xaa is C or S
  MOD_RES (15)..(16)..(17)..(18)..(19): Xaa is A or G
  MOD_RES (20)..(21)..(22)..(23): Xaa is A or G or absent
XVPTELEPISMLYLXXXXXXXXXKFKYEDMVVEG

SEQ ID NO: 20397 - protein, 41 aa, Artificial Sequence
  Non-cyclic GFR-binding peptide
  MOD_RES (3)..(4)..(38)..(40): Xaa is C or S
  MOD_RES (18)..(19)..(20)..(21)..(22): Xaa is A or G
  MOD_RES (23)..(24)..(25)..(26): Xaa is A or G or absent
KAXXAPTKLSPISVLYIXXXXXXXXXYKQYENMVVKAXGXH

SEQ ID NO: 20398 - protein, 40 aa, Artificial Sequence
  Non-cyclic GFR-binding peptide
  MOD_RES (4)..(5)..(40): Xaa is C or S
  MOD_RES (19)..(20)..(21)..(22)..(23): Xaa is A or G
  MOD_RES (24)..(25)..(26)..(27): Xaa is A or G or absent
GKAXXVPTKLEPISVLYLXXXXXXXXXKFKYEEGMSVAEX

SEQ ID NO: 20399 - protein, 32 aa, Artificial Sequence
  Non-cyclic GFR-binding peptide
  MOD_RES (1)..(2): Xaa is C or S
XXVPARLEPISILYLDAANNVVKFKYEDMVVE

SEQ ID NO: 20400 - protein, 35 aa, Artificial Sequence
  Non-cyclic GFR-binding peptide
  MOD_RES (32)..(34): Xaa is C or S
VPTKLSPISILYIDKGVVTYYKQYEGMAVSEXGXR

SEQ ID NO: 20401 - protein, 39 aa, Artificial Sequence
  Non-cyclic GFR-binding peptide
  MOD_RES (2)..(3)..(37)..(39): Xaa is C or S
  MOD_RES (17)..(18)..(19)..(20)..(21): Xaa is A or G
  MOD_RES (22)..(23)..(24)..(25): Xaa is A or G or absent
PXXAPTKLEPISVLYLXXXXXXXXXKFKYENMVVRSXGX

SEQ ID NO: 20402 - protein, 38 aa, Artificial Sequence
  Non-cyclic GFR-binding peptide
  MOD_RES (2)..(3)..(36)..(38): Xaa is C or S
  MOD_RES (17)..(18)..(19)..(20)..(21): Xaa is A or G
  MOD_RES (22)..(23)..(24)..(25): Xaa is A or G or absent
PXXVPQALEPISILYLXXXXXXXXXKFKYEMIVRSXKX

SEQ ID NO: 20403 - protein, 36 aa, Artificial Sequence
  Non-cyclic GFR-binding peptide
  MOD_RES (3)..(4): Xaa is C or S
  MOD_RES (18)..(19)..(20)..(21)..(22): Xaa is A or G
  MOD_RES (23)..(24)..(25)..(26): Xaa is A or G or absent
KAXXVPTELEPISMLYLXXXXXXXXXKFKYEDMVVE

SEQ ID NO: 20404 - protein, 38 aa, Artificial Sequence
  Non-cyclic GFR-binding peptide
  MOD_RES (2)..(3)..(35)..(37): Xaa is C or S
AXXVPTKLNAISILYFDKGVVTYLKKYRGMAVSEXGXR

SEQ ID NO: 20405 - protein, 37 aa, Artificial Sequence
  Non-cyclic GFR-binding peptide
  MOD_RES (2)..(3)..(34)..(36): Xaa is C or S
PXXVPQALEPISILYLVGRKPKVKFKYEMIVRSXKXS

SEQ ID NO: 20406 - protein, 39 aa, Artificial Sequence
  Non-cyclic GFR-binding peptide
  MOD_RES (3)..(4)..(36)..(38): Xaa is C or S
ASXXVPARLEPISILYLDAANNVVKFKYEDMVVEAXGXR

SEQ ID NO: 20407 - protein, 34 aa, Artificial Sequence
  Non-cyclic GFR-binding peptide
  MOD_RES (1)..(2): Xaa is C or S
  MOD_RES (16)..(17)..(18)..(19)..(20): Xaa is A or G
  MOD_RES (21)..(22)..(23)..(24): Xaa is A or G or absent
XXVPQALEPISILYLXXXXXXXXXKFKYEMIVRS

SEQ ID NO: 20408 - protein, 35 aa, Artificial Sequence
  Non-cyclic GFR-binding peptide
  MOD_RES (34)..(34): Xaa is C or S
  MOD_RES (14)..(15)..(16)..(17)..(18): Xaa is A or G
  MOD_RES (19)..(20)..(21)..(22): Xaa is A or G or absent
VPTKLSPISILYKXXXXXXXXXLKYHYGMAVSEXG

SEQ ID NO: 20409 - protein, 39 aa, Artificial Sequence
  Non-cyclic GFR-binding peptide
  MOD_RES (6)..(7)..(39): Xaa is C or S
AAPASXXVPARLEPISILYLDAANNVVKFKYEDMVVEAX

SEQ ID NO: 20410 - protein, 31 aa, Artificial Sequence
  Non-cyclic GFR-binding peptide
  MOD_RES (31)..(31): Xaa is C or S
VPQDLSPISILYIVGRTPKVYKQYEMVVKSX

SEQ ID NO: 20411 - protein, 45 aa, Artificial Sequence
  Non-cyclic GFR-binding peptide
  MOD_RES (6)..(7)..(42)..(44): Xaa is C or S
  MOD_RES (21)..(22)..(23)..(24)..(25): Xaa is A or G
  MOD_RES (26)..(27)..(28)..(29): Xaa is A or G or absent
KVGKAXXVPTKLEPISVLYLXXXXXXXXXKFKYEEGMSVAEXGXR

SEQ ID NO: 20412 - protein, 32 aa, Artificial Sequence
  Non-cyclic GFR-binding peptide
  MOD_RES (1)..(2): Xaa is C or S
XXVPQDLSPISILYIVGRTPKVYKQYEMVVKS

SEQ ID NO: 20413 - protein, 35 aa, Artificial Sequence
  Non-cyclic GFR-binding peptide
  MOD_RES (1)..(2): Xaa is C or S
  MOD_RES (16)..(17)..(18)..(19)..(20): Xaa is A or G
  MOD_RES (21)..(22)..(23)..(24): Xaa is A or G or absent
XXVPTELSPISMLYIXXXXXXXXXYKQYEEMVVEG

SEQ ID NO: 20414 - protein, 43 aa, Artificial Sequence
  Non-cyclic GFR-binding peptide
  MOD_RES (6)..(7)..(40)..(42): Xaa is C or S
  MOD_RES (21)..(22)..(23)..(24)..(25): Xaa is A or G
  MOD_RES (26)..(27)..(28)..(29): Xaa is A or G or absent
ASASPXXVSQDLSPISILYIXXXXXXXXXYKQYEMIVKSXKXS

SEQ ID NO: 20415 - protein, 39 aa, Artificial Sequence
  Non-cyclic GFR-binding peptide
  MOD_RES (4)..(36)..(38): Xaa is C or S
KPTXAPTKLSPISVLYIDDSSNVIYKQYENMVVRSXGXH

SEQ ID NO: 20416 - protein, 33 aa, Artificial Sequence
  Non-cyclic GFR-binding peptide
  MOD_RES (2)..(3): Xaa is C or S
SXXVPARLNAISILYFDAANNVVLKKYRDMVVE

SEQ ID NO: 20417 - protein, 38 aa, Artificial Sequence
  Non-cyclic GFR-binding peptide
  MOD_RES (3)..(4): Xaa is C or S
  MOD_RES (18)..(19)..(20)..(21)..(22): Xaa is A or G
  MOD_RES (23)..(24)..(25)..(26): Xaa is A or G or absent
KAXXVPTKLSPISVLYIXXXXXXXXXYKQYEEGMSVAE

SEQ ID NO: 20418 - protein, 34 aa, Artificial Sequence
  Non-cyclic GFR-binding peptide
  MOD_RES (33)..(33): Xaa is C or S
  MOD_RES (14)..(15)..(16)..(17)..(18): Xaa is A or G
  MOD_RES (19)..(20)..(21)..(22): Xaa is A or G or absent
VPQALSPISILYIXXXXXXXXXYKQYEMIVRSXK

SEQ ID NO: 20419 - protein, 39 aa, Artificial Sequence
  Non-cyclic GFR-binding peptide
  MOD_RES (6)..(6): Xaa is C or S
  MOD_RES (20)..(21)..(22)..(23)..(24): Xaa is A or G
  MOD_RES (25)..(26)..(27)..(28): Xaa is A or G or absent
VTKPTXAPTKLEPISVLYLXXXXXXXXXKFKYENMVVRS

SEQ ID NO: 20420 - protein, 31 aa, Artificial Sequence
  Non-cyclic GFR-binding peptide
  MOD_RES (31)..(31): Xaa is C or S
VSQDLSPISILYIIGKTPKIYKQYEMIVKSX

SEQ ID NO: 20421 - protein, 36 aa, Artificial Sequence
  Non-cyclic GFR-binding peptide
  MOD_RES (2)..(3): Xaa is C or S
  MOD_RES (17)..(18)..(19)..(20)..(21): Xaa is A or G
  MOD_RES (22)..(23)..(24)..(25): Xaa is A or G or absent
AXXVPTKLSPISILYKXXXXXXXXXLKYHYGMAVSE

SEQ ID NO: 20422 - protein, 36 aa, Artificial Sequence
  Non-cyclic GFR-binding peptide
  MOD_RES (1)..(2)..(34)..(36): Xaa is C or S
XXAPTKLEPISVLYLDDSSNVIKFKYENMVVRSXGX

SEQ ID NO: 20423 - protein, 41 aa, Artificial Sequence
  Non-cyclic GFR-binding peptide
  MOD_RES (6)..(7)..(40): Xaa is C or S
KVGKAXXVPTKLEPISVLYLDDMGVPTKFKYEEGMSVAEXG

SEQ ID NO: 20424 - protein, 38 aa, Artificial Sequence
  Non-cyclic GFR-binding peptide
  MOD_RES (3)..(4)..(38): Xaa is C or S
  MOD_RES (18)..(19)..(20)..(21)..(22): Xaa is A or G
  MOD_RES (23)..(24)..(25)..(26): Xaa is A or G or absent
KPXXAPTQLSPISVLYIXXXXXXXXXYKQYENMVVRAX

SEQ ID NO: 20425 - protein, 40 aa, Artificial Sequence
  Non-cyclic GFR-binding peptide
  MOD_RES (3)..(4)..(37)..(39): Xaa is C or S
KAXXVPTKLEPISVLYLDDMGVPTKFKYEEGMSVAEXGXR

SEQ ID NO: 20426 - protein, 39 aa, Artificial Sequence
  Non-cyclic GFR-binding peptide
  MOD_RES (4)..(5)..(38): Xaa is C or S
GKAXXVPTKLSPISVLYIDDMGVPTYKQYEEGMSVAEXG

SEQ ID NO: 20427 - protein, 35 aa, Artificial Sequence
  Non-cyclic GFR-binding peptide
  MOD_RES (1)..(34): Xaa is C or S
  MOD_RES (15)..(16)..(17)..(18)..(19): Xaa is A or G
  MOD_RES (20)..(21)..(22)..(23): Xaa is A or G or absent
XVSQDLEPISILYLXXXXXXXXXKFKYEMIVKSXK

SEQ ID NO: 20428 - protein, 35 aa, Artificial Sequence
  Non-cyclic GFR-binding peptide
  MOD_RES (1)..(2)..(35): Xaa is C or S
  MOD_RES (16)..(17)..(18)..(19)..(20): Xaa is A or G
  MOD_RES (21)..(22)..(23)..(24): Xaa is A or G or absent
XXVSQDLSPISILYIXXXXXXXXXYKQYEMIVKSX

SEQ ID NO: 20429 - protein, 37 aa, Artificial Sequence
  Non-cyclic GFR-binding peptide
  MOD_RES (6)..(7): Xaa is C or S
AAPASXXVPARLEPISILYLDAANNVVKFKYEDMVVE

SEQ ID NO: 20430 - protein, 42 aa, Artificial Sequence
  Non-cyclic GFR-binding peptide
  MOD_RES (4)..(5)..(39)..(41): Xaa is C or S
  MOD_RES (19)..(20)..(21)..(22)..(23): Xaa is A or G
  MOD_RES (24)..(25)..(26)..(27): Xaa is A or G or absent
PKAXXAPTKLEPISVLYLXXXXXXXXXKFKYENMVVKAXGXH

SEQ ID NO: 20431 - protein, 41 aa, Artificial Sequence
  Non-cyclic GFR-binding peptide
  MOD_RES (6)..(7)..(39)..(41): Xaa is C or S
YVPKPXXAPTKLEPISVLYLDDSSNVIKFKYENMVVRSXGX

SEQ ID NO: 20432 - protein, 36 aa, Artificial Sequence
  Non-cyclic GFR-binding peptide
  MOD_RES (34)..(36): Xaa is C or S
  MOD_RES (14)..(15)..(16)..(17)..(18): Xaa is A or G
  MOD_RES (19)..(20)..(21)..(22): Xaa is A or G or absent
APTKLEPISVLYLXXXXXXXXXKFKYENMVVRSXGX

SEQ ID NO: 20433 - protein, 38 aa, Artificial Sequence
  Non-cyclic GFR-binding peptide
  MOD_RES (2)..(3)..(35)..(37): Xaa is C or S
AXXVPTELSPISMLYIDEYDKVVYKQYEEMVVEGXGXR

SEQ ID NO: 20434 - protein, 37 aa, Artificial Sequence
  Non-cyclic GFR-binding peptide
  MOD_RES (4)..(5): Xaa is C or S
  MOD_RES (19)..(20)..(21)..(22)..(23): Xaa is A or G
  MOD_RES (24)..(25)..(26)..(27): Xaa is A or G or absent
ASPXXVPQDLSPISILYIXXXXXXXXXYKQYEMVVKS

SEQ ID NO: 20435 - protein, 40 aa, Artificial Sequence
  Non-cyclic GFR-binding peptide
  MOD_RES (5)..(6)..(40): Xaa is C or S
  MOD_RES (20)..(21)..(22)..(23)..(24): Xaa is A or G
  MOD_RES (25)..(26)..(27)..(28): Xaa is A or G or absent
APASXXVPARLSPISILYKXXXXXXXXXLKYHYDMVVEAX

SEQ ID NO: 20436 - protein, 38 aa, Artificial Sequence
  Non-cyclic GFR-binding peptide
  MOD_RES (3)..(4)..(36)..(38): Xaa is C or S
KAXXVPTELSPISMLYIDENEKVVYKQYEDMVVEGXGX

SEQ ID NO: 20437 - protein, 39 aa, Artificial Sequence
  Non-cyclic GFR-binding peptide
  MOD_RES (7)..(7): Xaa is C or S
  MOD_RES (21)..(22)..(23)..(24)..(25): Xaa is A or G
  MOD_RES (26)..(27)..(28)..(29): Xaa is A or G or absent
HVTKPTXAPTKLEPISVLYLXXXXXXXXXKFKYENMVVR

SEQ ID NO: 20438 - protein, 42 aa, Artificial Sequence
  Non-cyclic GFR-binding peptide
  MOD_RES (5)..(6)..(40)..(42): Xaa is C or S
  MOD_RES (20)..(21)..(22)..(23)..(24): Xaa is A or G
  MOD_RES (25)..(26)..(27)..(28): Xaa is A or G or absent
VPKPXXAPTQLSPISVLYIXXXXXXXXXYKQYENMVVRAXGX

SEQ ID NO: 20439 - protein, 40 aa, Artificial Sequence
  Non-cyclic GFR-binding peptide
  MOD_RES (4)..(5)..(37)..(39): Xaa is C or S
PASXXVPARLNAISILYFDAANNVVLKKYRDMVVEAXGXR

SEQ ID NO: 20440 - protein, 33 aa, Artificial Sequence
  Non-cyclic GFR-binding peptide
  MOD_RES (1)..(2): Xaa is C or S
XXVPTKLSPISILYKDKGVVTYLKYHYGMAVSE

SEQ ID NO: 20441 - protein, 38 aa, Artificial Sequence
  Non-cyclic GFR-binding peptide
  MOD_RES (2)..(3)..(35)..(37): Xaa is C or S
AXXVPTELEPISMLYLDEYDKVVKFKYEEMVVEGXGXR

SEQ ID NO: 20442 - protein, 37 aa, Artificial Sequence
  Non-cyclic GFR-binding peptide
  MOD_RES (1)..(2)..(34)..(36): Xaa is C or S
XXAPTKLSPISVLYIDSSNNVIYKQYENMVVKAXGXH

SEQ ID NO: 20443 - protein, 38 aa, Artificial Sequence
  Non-cyclic GFR-binding peptide
  MOD_RES (1)..(2)..(35)..(37): Xaa is C or S
XXVPTKLSPISVLYIDDMGVPTYKQYEEGMSVAEXGXR

SEQ ID NO: 20444 - protein, 36 aa, Artificial Sequence
  Non-cyclic GFR-binding peptide
  MOD_RES (4)..(5): Xaa is C or S
PKPXXAPTKLSPISVLYIDDSSNVIYKQYENMVVRS

SEQ ID NO: 20445 - protein, 39 aa, Artificial Sequence
  Non-cyclic GFR-binding peptide
  MOD_RES (1)..(2)..(36)..(38): Xaa is C or S
  MOD_RES (16)..(17)..(18)..(19)..(20): Xaa is A or G
  MOD_RES (21)..(22)..(23)..(24): Xaa is A or G or absent
XXVPARLNAISILYFXXXXXXXXXLKKYRDMVVEAXGXR

SEQ ID NO: 20446 - protein, 34 aa, Artificial Sequence
  Non-cyclic GFR-binding peptide
  MOD_RES (32)..(34): Xaa is C or S
VPARLNAISILYFDAANNVVLKKYRDMVVEAXGX

SEQ ID NO: 20447 - protein, 34 aa, Artificial Sequence
  Non-cyclic GFR-binding peptide
  MOD_RES (3)..(4): Xaa is C or S
KPXXAPTKLSPISVLYIDDSSNVIYKQYENMVVR

SEQ ID NO: 20448 - protein, 30 aa, Artificial Sequence
  Non-cyclic GFR-binding peptide
APTQLSPISVLYIDDSSNVIYKQYENMVVR

SEQ ID NO: 20449 - protein, 40 aa, Artificial Sequence
  Non-cyclic GFR-binding peptide
  MOD_RES (6)..(7)..(39): Xaa is C or S
TVPKPXXAPTQLEPISVLYLDDSSNVIKFKYENMVVRAXG

SEQ ID NO: 20450 - protein, 42 aa, Artificial Sequence
  Non-cyclic GFR-binding peptide
  MOD_RES (5)..(6)..(39)..(41): Xaa is C or S
  MOD_RES (20)..(21)..(22)..(23)..(24): Xaa is A or G
  MOD_RES (25)..(26)..(27)..(28): Xaa is A or G or absent
SAAPXXVPQALSPISILYIXXXXXXXXXYKQYEMIVRSXKXS

SEQ ID NO: 20451 - protein, 34 aa, Artificial Sequence
  Non-cyclic GFR-binding peptide
  MOD_RES (3)..(3): Xaa is C or S
PTXAPTKLEPISVLYLDDSSNVIKFKYENMVVRS

SEQ ID NO: 20452 - protein, 38 aa, Artificial Sequence
  Non-cyclic GFR-binding peptide
  MOD_RES (5)..(37): Xaa is C or S
TKPTXAPTKLSPISVLYIDDSSNVIYKQYENMVVRSXG

SEQ ID NO: 20453 - protein, 38 aa, Artificial Sequence
  Non-cyclic GFR-binding peptide
  MOD_RES (3)..(4)..(37): Xaa is C or S
  MOD_RES (18)..(19)..(20)..(21)..(22): Xaa is A or G
  MOD_RES (23)..(24)..(25)..(26): Xaa is A or G or absent
SPXXVPQDLSPISILYIXXXXXXXXXYKQYEMVVKSXK

SEQ ID NO: 20454 - protein, 36 aa, Artificial Sequence
  Non-cyclic GFR-binding peptide
  MOD_RES (1)..(35): Xaa is C or S
  MOD_RES (15)..(16)..(17)..(18)..(19): Xaa is A or G
  MOD_RES (20)..(21)..(22)..(23): Xaa is A or G or absent
XVPTELEPISMLYLXXXXXXXXXKFKYEEMVVEGXG

SEQ ID NO: 20455 - protein, 40 aa, Artificial Sequence
  Non-cyclic GFR-binding peptide
  MOD_RES (5)..(6)..(37)..(39): Xaa is C or S
SASPXXVPQDLEPISILYLVGRTPKVKFKYEMVVKSXKXS

SEQ ID NO: 20456 - protein, 37 aa, Artificial Sequence
  Non-cyclic GFR-binding peptide
  MOD_RES (6)..(7): Xaa is C or S
ASASPXXVSQDLSPISILYIIGKTPKIYKQYEMIVKS

SEQ ID NO: 20457 - protein, 37 aa, Artificial Sequence
  Non-cyclic GFR-binding peptide
  MOD_RES (3)..(4)..(36): Xaa is C or S
KAXXVPTELEPISMLYLDEYDKVVKFKYEEMVVEGXG

SEQ ID NO: 20458 - protein, 34 aa, Artificial Sequence
  Non-cyclic GFR-binding peptide
  MOD_RES (1)..(34): Xaa is C or S
  MOD_RES (15)..(16)..(17)..(18)..(19): Xaa is A or G
  MOD_RES (20)..(21)..(22)..(23): Xaa is A or G or absent
XVPQALSPISILYIXXXXXXXXXYKQYEMIVRSX

SEQ ID NO: 20459 - protein, 39 aa, Artificial Sequence
  Non-cyclic GFR-binding peptide
  MOD_RES (1)..(33)..(34): Xaa is C or S
XSEVVMDPIKGYVVNNASDFYLINIPSLRTPVXXTPPTS

SEQ ID NO: 20460 - protein, 40 aa, Artificial Sequence
  Non-cyclic GFR-binding peptide
  MOD_RES (34)..(35): Xaa is C or S
  MOD_RES (12)..(13)..(14)..(15)..(16): Xaa is A or G
  MOD_RES (17)..(18)..(19)..(20): Xaa is A or G or absent
ARVVMNPIKGYXXXXXXXXXFYLVNIPSLQTPAXXPKPVT

SEQ ID NO: 20461 - protein, 37 aa, Artificial Sequence
  Non-cyclic GFR-binding peptide
  MOD_RES (32)..(33): Xaa is C or S
GEVVMDPIKGYVVKENEDFYLMNIPSLETPVXXAKPI

SEQ ID NO: 20462 - protein, 40 aa, Artificial Sequence
  Non-cyclic GFR-binding peptide
  MOD_RES (1)..(3)..(37)..(38): Xaa is C or S
  MOD_RES (15)..(16)..(17)..(18)..(19): Xaa is A or G
  MOD_RES (20)..(21)..(22)..(23): Xaa is A or G or absent
XGXAEVVMDPIKGYXXXXXXXXXFYLINIPSLRAPVXXSA

SEQ ID NO: 20463 - protein, 32 aa, Artificial Sequence
  Non-cyclic GFR-binding peptide
  MOD_RES (2)..(2): Xaa is C or S
GXEEVIMPIKGYLLVRGNDFYLMNIPSTKVPA

SEQ ID NO: 20464 - protein, 35 aa, Artificial Sequence
  Non-cyclic GFR-binding peptide
  MOD_RES (32)..(33): Xaa is C or S
SEVVMDPIKGYVVNNASDFYLINIPSLRTPVXXTP

SEQ ID NO: 20465 - protein, 42 aa, Artificial Sequence
  Non-cyclic GFR-binding peptide
  MOD_RES (1)..(3)..(37)..(38): Xaa is C or S
  MOD_RES (15)..(16)..(17)..(18)..(19): Xaa is A or G
  MOD_RES (20)..(21)..(22)..(23): Xaa is A or G or absent
XGXSEVVMDPIKGYXXXXXXXXXFYLINIPSLRTPVXXTPPT

SEQ ID NO: 20466 - protein, 39 aa, Artificial Sequence
  Non-cyclic GFR-binding peptide
  MOD_RES (2)..(4)..(36)..(37): Xaa is C or S
RXGXESVAMGPIKGYYTVVGKDFYLINIPSLKTPVXXAK

SEQ ID NO: 20467 - protein, 41 aa, Artificial Sequence
  Non-cyclic GFR-binding peptide
  MOD_RES (1)..(3)..(37)..(38): Xaa is C or S
  MOD_RES (15)..(16)..(17)..(18)..(19): Xaa is A or G
  MOD_RES (20)..(21)..(22)..(23): Xaa is A or G or absent
XGXSRVVMNPIKGYXXXXXXXXXFYLVNIPSLKTPAXXPKP

SEQ ID NO: 20468 - protein, 35 aa, Artificial Sequence
  Non-cyclic GFR-binding peptide
  MOD_RES (1)..(33)..(34): Xaa is C or S
XGEVVMDPIKGYVVKENEDFYLMNIPSLETPVXXA

SEQ ID NO: 20469 - protein, 35 aa, Artificial Sequence
  Non-cyclic GFR-binding peptide
  MOD_RES (34)..(35): Xaa is C or S
  MOD_RES (12)..(13)..(14)..(15)..(16): Xaa is A or G
  MOD_RES (17)..(18)..(19)..(20): Xaa is A or G or absent
ESVAMGPIKGYXXXXXXXXXFYLINIPSLKTPVXX

SEQ ID NO: 20470 - protein, 40 aa, Artificial Sequence
  Non-cyclic GFR-binding peptide
  MOD_RES (1)..(3)..(35)..(36): Xaa is C or S
XGXESVAMGPIKGYYTVVGKDFYLINIPSLKTPVXXAKSA

SEQ ID NO: 20471 - protein, 37 aa, Artificial Sequence
  Non-cyclic GFR-binding peptide
  MOD_RES (2)..(34): Xaa is C or S
GXSRVVMNPIKGYIVNSSDDFYLVNIPSLKTPAXTPK

SEQ ID NO: 20472 - protein, 40 aa, Artificial Sequence
  Non-cyclic GFR-binding peptide
  MOD_RES (34)..(34): Xaa is C or S
  MOD_RES (12)..(13)..(14)..(15)..(16): Xaa is A or G
  MOD_RES (17)..(18)..(19)..(20): Xaa is A or G or absent
SRVVMNPIKGYXXXXXXXXXFYLVNIPSLKTPAXTPKTVH

SEQ ID NO: 20473 - protein, 34 aa, Artificial Sequence
  Non-cyclic GFR-binding peptide
  MOD_RES (2)..(34): Xaa is C or S
GXSRVVMNPIKGYIVNSSDDFYLVNIPSLKTPAX

SEQ ID NO: 20474 - protein, 41 aa, Artificial Sequence
  Non-cyclic GFR-binding peptide
  MOD_RES (1)..(3)..(37)..(38): Xaa is C or S
  MOD_RES (15)..(16)..(17)..(18)..(19): Xaa is A or G
  MOD_RES (20)..(21)..(22)..(23): Xaa is A or G or absent
XGXESVAMGPIKGYXXXXXXXXXFYLINIPSLKTPVXXAKS

SEQ ID NO: 20475 - protein, 40 aa, Artificial Sequence
  Non-cyclic GFR-binding peptide
  MOD_RES (1)..(35)..(36): Xaa is C or S
  MOD_RES (13)..(14)..(15)..(16)..(17): Xaa is A or G
  MOD_RES (18)..(19)..(20)..(21): Xaa is A or G or absent
XESVAMGPIKGYXXXXXXXXXFYLINIPSLKTPVXXAKSA

SEQ ID NO: 20476 - protein, 35 aa, Artificial Sequence
  Non-cyclic GFR-binding peptide
  MOD_RES (32)..(33): Xaa is C or S
GEVVMDPIKGYVVKENEDFYLMNIPSLETPVXXAK

SEQ ID NO: 20477 - protein, 36 aa, Artificial Sequence
  Non-cyclic GFR-binding peptide
  MOD_RES (31)..(32): Xaa is C or S
EVVMDPIKGYVVNNASDFYLINIPSLRTPVXXTPPT

SEQ ID NO: 20478 - protein, 39 aa, Artificial Sequence
  Non-cyclic GFR-binding peptide
  MOD_RES (2)..(4)..(38)..(39): Xaa is C or S
  MOD_RES (16)..(17)..(18)..(19)..(20): Xaa is A or G
  MOD_RES (21)..(22)..(23)..(24): Xaa is A or G or absent
RXGXAEVVMDPIKGYXXXXXXXXXFYLINIPSLRAPVXX

SEQ ID NO: 20479 - protein, 35 aa, Artificial Sequence
  Non-cyclic GFR-binding peptide
  MOD_RES (33)..(34): Xaa is C or S
  MOD_RES (11)..(12)..(13)..(14)..(15): Xaa is A or G
  MOD_RES (16)..(17)..(18)..(19): Xaa is A or G or absent
EVVMDPIKGYXXXXXXXXXFYLMNIPSLETPVXXA

SEQ ID NO: 20480 - protein, 39 aa, Artificial Sequence
  Non-cyclic GFR-binding peptide
  MOD_RES (2)..(4)..(37)..(38): Xaa is C or S
RXGXEAVSMGEPIKGYTPVGMDDFYLVNIPSLKTPVXXA

SEQ ID NO: 20481 - protein, 39 aa, Artificial Sequence
  Non-cyclic GFR-binding peptide
  MOD_RES (1)..(3)..(37): Xaa is C or S
  MOD_RES (15)..(16)..(17)..(18)..(19): Xaa is A or G
  MOD_RES (20)..(21)..(22)..(23): Xaa is A or G or absent
XGXSRVVMNPIKGYXXXXXXXXXFYLVNIPSLKTPAXTP

SEQ ID NO: 20482 - protein, 36 aa, Artificial Sequence
  Non-cyclic GFR-binding peptide
  MOD_RES (32)..(33): Xaa is C or S
SEVVMDPIKGYVVNNASDFYLINIPSLRTPVXXTPP

SEQ ID NO: 20483 - protein, 37 aa, Artificial Sequence
  Non-cyclic GFR-binding peptide
  MOD_RES (33)..(34): Xaa is C or S
  MOD_RES (11)..(12)..(13)..(14)..(15): Xaa is A or G
  MOD_RES (16)..(17)..(18)..(19): Xaa is A or G or absent
RVVMNPIKGYXXXXXXXXXFYLVNIPSLQTPAXXPKP

SEQ ID NO: 20484 - protein, 36 aa, Artificial Sequence
  Non-cyclic GFR-binding peptide
  MOD_RES (2)..(34)..(35): Xaa is C or S
GXAEVVMDPIKGYVVNNAADFYLINIPSLRAPVXXS

SEQ ID NO: 20485 - protein, 42 aa, Artificial Sequence
  Non-cyclic GFR-binding peptide
  MOD_RES (2)..(4)..(37)..(38): Xaa is C or S
RXGXEAVSMGEPIKGYTPVGMDDFYLVNIPSLKTPVXXAKGV

SEQ ID NO: 20486 - protein, 33 aa, Artificial Sequence
  Non-cyclic GFR-binding peptide
  MOD_RES (32)..(33): Xaa is C or S
ESVAMGPIKGYYTVVGKDFYLINIPSLKTPVXX

SEQ ID NO: 20487 - protein, 35 aa, Artificial Sequence
  Non-cyclic GFR-binding peptide
  MOD_RES (1)..(3)..(35): Xaa is C or S
XGXGEVVMEPIKGYVVKDYEDFYLMNIPSLETPVX

SEQ ID NO: 20488 - protein, 39 aa, Artificial Sequence
  Non-cyclic GFR-binding peptide
  MOD_RES (2)..(4)..(36)..(37): Xaa is C or S
RXGXAEVVMDPIKGYVVNNAADFYLINIPSLRAPVXXSA

SEQ ID NO: 20489 - protein, 35 aa, Artificial Sequence
  Non-cyclic GFR-binding peptide
  MOD_RES (1)..(34)..(35): Xaa is C or S
XEAVSMGEPIKGYTPVGMDDFYLVNIPSLKTPVXX

SEQ ID NO: 20490 - protein, 38 aa, Artificial Sequence
  Non-cyclic GFR-binding peptide
  MOD_RES (2)..(33)..(34): Xaa is C or S
GXEEVIMPIKGYLLVRGNDFYLMNIPSTKVPAXXTSPV

SEQ ID NO: 20491 - protein, 43 aa, Artificial Sequence
  Non-cyclic GFR-binding peptide
  MOD_RES (2)..(4)..(38)..(39): Xaa is C or S
  MOD_RES (16)..(17)..(18)..(19)..(20): Xaa is A or G
  MOD_RES (21)..(22)..(23)..(24): Xaa is A or G or absent
RXGXESVAMGPIKGYXXXXXXXXXFYLINIPSLKTPVXXAKSA

SEQ ID NO: 20492 - protein, 43 aa, Artificial Sequence
  Non-cyclic GFR-binding peptide
  MOD_RES (1)..(3)..(37)..(38): Xaa is C or S
  MOD_RES (15)..(16)..(17)..(18)..(19): Xaa is A or G
  MOD_RES (20)..(21)..(22)..(23): Xaa is A or G or absent
XGXAKVVMNPIKGYXXXXXXXXXFYLVNIPSLKTPAXXAKPVA

SEQ ID NO: 20493 - protein, 36 aa, Artificial Sequence
  Non-cyclic GFR-binding peptide
  MOD_RES (1)..(3): Xaa is C or S
  MOD_RES (15)..(16)..(17)..(18)..(19): Xaa is A or G
  MOD_RES (20)..(21)..(22)..(23): Xaa is A or G or absent
XGXESVAMGPIKGYXXXXXXXXXFYLINIPSLKTPV

SEQ ID NO: 20494 - protein, 40 aa, Artificial Sequence
  Non-cyclic GFR-binding peptide
  MOD_RES (1)..(3)..(37): Xaa is C or S
  MOD_RES (15)..(16)..(17)..(18)..(19): Xaa is A or G
  MOD_RES (20)..(21)..(22)..(23): Xaa is A or G or absent
XGXSRVVMNPIKGYXXXXXXXXXFYLVNIPSLKTPAXTPK

SEQ ID NO: 20495 - protein, 44 aa, Artificial Sequence
  Non-cyclic GFR-binding peptide
  MOD_RES (2)..(4)..(38)..(39): Xaa is C or S
  MOD_RES (16)..(17)..(18)..(19)..(20): Xaa is A or G
  MOD_RES (21)..(22)..(23)..(24): Xaa is A or G or absent
HXGXAKVVMNPIKGYXXXXXXXXXFYLVNIPSLKTPAXXAKPVA

SEQ ID NO: 20496 - protein, 39 aa, Artificial Sequence
  Non-cyclic GFR-binding peptide
  MOD_RES (1)..(33)..(34): Xaa is C or S
XGEVVMDPIKGYVVKENEDFYLMNIPSLETPVXXAKPIK

SEQ ID NO: 20497 - protein, 43 aa, Artificial Sequence
  Non-cyclic GFR-binding peptide
  MOD_RES (1)..(3)..(37)..(38): Xaa is C or S
  MOD_RES (15)..(16)..(17)..(18)..(19): Xaa is A or G
  MOD_RES (20)..(21)..(22)..(23): Xaa is A or G or absent
XGXESVAMGPIKGYXXXXXXXXXFYLINIPSLKTPVXXAKSAK

SEQ ID NO: 20498 - protein, 34 aa, Artificial Sequence
  Non-cyclic GFR-binding peptide
  MOD_RES (32)..(33): Xaa is C or S
ARVVMNPIKGYIVNSSDDFYLVNIPSLQTPAXXP

SEQ ID NO: 20499 - protein, 37 aa, Artificial Sequence
  Non-cyclic GFR-binding peptide
  MOD_RES (2)..(4)..(36): Xaa is C or S
HXGXSRVVMNPIKGYIVNSSDDFYLVNIPSLKTPAXT

SEQ ID NO: 20500 - protein, 35 aa, Artificial Sequence
  Non-cyclic GFR-binding peptide
  MOD_RES (1)..(1): Xaa is C or S
  MOD_RES (14)..(15)..(16)..(17)..(18): Xaa is A or G
  MOD_RES (19)..(20)..(21)..(22): Xaa is A or G or absent
XEAVSMGEPIKGYXXXXXXXXXFYLVNIPSLKTPV

SEQ ID NO: 20501 - protein, 39 aa, Artificial Sequence
  Non-cyclic GFR-binding peptide
  MOD_RES (2)..(4)..(36)..(37): Xaa is C or S
HXGXAKVVMNPIKGYIVNNSSDFYLVNIPSLKTPAXXAK

SEQ ID NO: 20502 - protein, 37 aa, Artificial Sequence
  Non-cyclic GFR-binding peptide
  MOD_RES (2)..(35)..(36): Xaa is C or S
GXEAVSMGEPIKGYTPVGMDDFYLVNIPSLKTPVXXA

SEQ ID NO: 20503 - protein, 42 aa, Artificial Sequence
  Non-cyclic GFR-binding peptide
  MOD_RES (2)..(4)..(38)..(39): Xaa is C or S
  MOD_RES (16)..(17)..(18)..(19)..(20): Xaa is A or G
  MOD_RES (21)..(22)..(23)..(24): Xaa is A or G or absent
HXGXAKVVMNPIKGYXXXXXXXXXFYLVNIPSLKTPAXXAKP

SEQ ID NO: 20504 - protein, 34 aa, Artificial Sequence
  Non-cyclic GFR-binding peptide
  MOD_RES (1)..(3)..(34): Xaa is C or S
XGXEEVIMPIKGYLLVRGNDFYLMNIPSTKVPAX

SEQ ID NO: 20505 - protein, 42 aa, Artificial Sequence
  Non-cyclic GFR-binding peptide
  MOD_RES (2)..(4)..(38)..(39): Xaa is C or S
  MOD_RES (16)..(17)..(18)..(19)..(20): Xaa is A or G
  MOD_RES (21)..(22)..(23)..(24): Xaa is A or G or absent
RXGXSEVVMDPIKGYXXXXXXXXXFYLINIPSLRTPVXXTPP

SEQ ID NO: 20506 - protein, 36 aa, Artificial Sequence
  Non-cyclic GFR-binding peptide
  MOD_RES (2)..(4)..(36): Xaa is C or S
RXGXGEVVMDPIKGYVVKENEDFYLMNIPSLETPVX

SEQ ID NO: 20507 - protein, 37 aa, Artificial Sequence
  Non-cyclic GFR-binding peptide
  MOD_RES (31)..(32): Xaa is C or S
SVAMGPIKGYYTVVGKDFYLINIPSLKTPVXXAKSAK

SEQ ID NO: 20508 - protein, 40 aa, Artificial Sequence
  Non-cyclic GFR-binding peptide
  MOD_RES (2)..(34)..(35): Xaa is C or S
GXARVVMNPIKGYIVNSSDDFYLVNIPSLQTPAXXPKPVT

SEQ ID NO: 20509 - protein, 40 aa, Artificial Sequence
  Non-cyclic GFR-binding peptide
  MOD_RES (2)..(36)..(37): Xaa is C or S
  MOD_RES (14)..(15)..(16)..(17)..(18): Xaa is A or G
  MOD_RES (19)..(20)..(21)..(22): Xaa is A or G or absent
GXSEVVMDPIKGYXXXXXXXXXFYLINIPSLRTPVXXTPP

SEQ ID NO: 20510 - protein, 35 aa, Artificial Sequence
  Non-cyclic GFR-binding peptide
  MOD_RES (34)..(35): Xaa is C or S
  MOD_RES (12)..(13)..(14)..(15)..(16): Xaa is A or G
  MOD_RES (17)..(18)..(19)..(20): Xaa is A or G or absent
SRVVMNPIKGYXXXXXXXXXFYLVNIPSLKTPAXX

SEQ ID NO: 20511 - protein, 39 aa, Artificial Sequence
  Non-cyclic GFR-binding peptide
  MOD_RES (34)..(35): Xaa is C or S
  MOD_RES (12)..(13)..(14)..(15)..(16): Xaa is A or G
  MOD_RES (17)..(18)..(19)..(20): Xaa is A or G or absent
GEVVMDPIKGYXXXXXXXXXFYLMNIPSLETPVXXAKPI

SEQ ID NO: 20512 - protein, 35 aa, Artificial Sequence
  Non-cyclic GFR-binding peptide
  MOD_RES (1)..(3)..(35): Xaa is C or S
XGXESVAMGPIKGYYTVVGKDFYLINIPSLKTPVX

SEQ ID NO: 20513 - protein, 35 aa, Artificial Sequence
  Non-cyclic GFR-binding peptide
  MOD_RES (2)..(2): Xaa is C or S
  MOD_RES (14)..(15)..(16)..(17)..(18): Xaa is A or G
  MOD_RES (19)..(20)..(21)..(22): Xaa is A or G or absent
GXARVVMNPIKGYXXXXXXXXXFYLVNIPSLQTPA

SEQ ID NO: 20514 - protein, 36 aa, Artificial Sequence
  Non-cyclic GFR-binding peptide
  MOD_RES (31)..(32): Xaa is C or S
EVVMEPIKGYVVKDYEDFYLMNIPSLETPVXXAKPI

SEQ ID NO: 20515 - protein, 38 aa, Artificial Sequence
  Non-cyclic GFR-binding peptide
  MOD_RES (1)..(3)..(35)..(36): Xaa is C or S
XGXGEVVMEPIKGYVVKDYEDFYLMNIPSLETPVXXAK

SEQ ID NO: 20516 - protein, 42 aa, Artificial Sequence
  Non-cyclic GFR-binding peptide
  MOD_RES (2)..(4)..(38)..(39): Xaa is C or S
  MOD_RES (16)..(17)..(18)..(19)..(20): Xaa is A or G
  MOD_RES (21)..(22)..(23)..(24): Xaa is A or G or absent
RXGXGEVVMDPIKGYXXXXXXXXXFYLMNIPSLETPVXXAKP

SEQ ID NO: 20517 - protein, 41 aa, Artificial Sequence
  Non-cyclic GFR-binding peptide
  MOD_RES (1)..(3)..(38)..(39): Xaa is C or S
  MOD_RES (16)..(17)..(18)..(19)..(20): Xaa is A or G
  MOD_RES (21)..(22)..(23)..(24): Xaa is A or G or absent
XGXEAVSMGEPIKGYXXXXXXXXXFYLVNIPSLKTPVXXAK

SEQ ID NO: 20518 - protein, 39 aa, Artificial Sequence
  Non-cyclic GFR-binding peptide
  MOD_RES (2)..(35)..(36): Xaa is C or S
  MOD_RES (13)..(14)..(15)..(16)..(17): Xaa is A or G
  MOD_RES (18)..(19)..(20)..(21): Xaa is A or G or absent
GXEEVIMPIKGYXXXXXXXXXFYLMNIPSTKVPAXXTSP

SEQ ID NO: 20519 - protein, 39 aa, Artificial Sequence
  Non-cyclic GFR-binding peptide
  MOD_RES (2)..(34): Xaa is C or S
GXSRVVMNPIKGYIVNSSDDFYLVNIPSLKTPAXTPKTV

SEQ ID NO: 20520 - protein, 42 aa, Artificial Sequence
  Non-cyclic GFR-binding peptide
  MOD_RES (2)..(37)..(38): Xaa is C or S
  MOD_RES (15)..(16)..(17)..(18)..(19): Xaa is A or G
  MOD_RES (20)..(21)..(22)..(23): Xaa is A or G or absent
GXEAVSMGEPIKGYXXXXXXXXXFYLVNIPSLKTPVXXAKGV

SEQ ID NO: 20521 - protein, 40 aa, Artificial Sequence
  Non-cyclic GFR-binding peptide
  MOD_RES (2)..(34)..(35): Xaa is C or S
GXSEVVMDPIKGYVVNNASDFYLINIPSLRTPVXXTPPTS

SEQ ID NO: 20522 - protein, 38 aa, Artificial Sequence
  Non-cyclic GFR-binding peptide
  MOD_RES (1)..(35)..(36): Xaa is C or S
  MOD_RES (13)..(14)..(15)..(16)..(17): Xaa is A or G
  MOD_RES (18)..(19)..(20)..(21): Xaa is A or G or absent
XSRVVMNPIKGYXXXXXXXXXFYLVNIPSLKTPAXXPK

SEQ ID NO: 20523 - protein, 34 aa, Artificial Sequence
  Non-cyclic GFR-binding peptide
  MOD_RES (13)..(14)..(15)..(16)..(17): Xaa is A or G
  MOD_RES (18)..(19)..(20)..(21): Xaa is A or G or absent
EAVSMGEPIKGYXXXXXXXXXFYLVNIPSLKTPV

SEQ ID NO: 20524 - protein, 32 aa, Artificial Sequence
  Non-cyclic GFR-binding peptide
  MOD_RES (32)..(32): Xaa is C or S
GEVVMDPIKGYVVKENEDFYLMNIPSLETPVX

SEQ ID NO: 20525 - protein, 37 aa, Artificial Sequence
  Non-cyclic GFR-binding peptide
  MOD_RES (2)..(34)..(35): Xaa is C or S
GXGEVVMEPIKGYVVKDYEDFYLMNIPSLETPVXXAK

SEQ ID NO: 20526 - protein, 41 aa, Artificial Sequence
  Non-cyclic GFR-binding peptide
  MOD_RES (1)..(3)..(37)..(38): Xaa is C or S
  MOD_RES (15)..(16)..(17)..(18)..(19): Xaa is A or G
  MOD_RES (20)..(21)..(22)..(23): Xaa is A or G or absent
XGXAKVVMNPIKGYXXXXXXXXXFYLVNIPSLKTPAXXAKP

SEQ ID NO: 20527 - protein, 40 aa, Artificial Sequence
  Non-cyclic GFR-binding peptide
  MOD_RES (1)..(3)..(35)..(36): Xaa is C or S
XGXSRVVMNPIKGYIVNSSDDFYLVNIPSLKTPAXXPKPV

SEQ ID NO: 20528 - protein, 36 aa, Artificial Sequence
  Non-cyclic GFR-binding peptide
  MOD_RES (1)..(3): Xaa is C or S
  MOD_RES (15)..(16)..(17)..(18)..(19): Xaa is A or G
  MOD_RES (20)..(21)..(22)..(23): Xaa is A or G or absent
XGXAKVVMNPIKGYXXXXXXXXXFYLVNIPSLKTPA

SEQ ID NO: 20529 - protein, 34 aa, Artificial Sequence
  Non-cyclic GFR-binding peptide
  MOD_RES (2)..(34): Xaa is C or S
GXSEVVMDPIKGYVVNNASDFYLINIPSLRTPVX

SEQ ID NO: 20530 - protein, 37 aa, Artificial Sequence
  Non-cyclic GFR-binding peptide
  MOD_RES (32)..(33): Xaa is C or S
AEVVMDPIKGYVVNNAADFYLINIPSLRAPVXXSAPA

SEQ ID NO: 20531 - protein, 35 aa, Artificial Sequence
  Non-cyclic GFR-binding peptide
  MOD_RES (2)..(4): Xaa is C or S
RXGXGEVVMDPIKGYVVKENEDFYLMNIPSLETPV

SEQ ID NO: 20532 - protein, 41 aa, Artificial Sequence
  Non-cyclic GFR-binding peptide
  MOD_RES (2)..(4)..(36)..(37): Xaa is C or S
RXGXGEVVMEPIKGYVVKDYEDFYLMNIPSLETPVXXAKPI

SEQ ID NO: 20533 - protein, 34 aa, Artificial Sequence
  Non-cyclic GFR-binding peptide
  MOD_RES (31)..(32): Xaa is C or S
EVVMDPIKGYVVKENEDFYLMNIPSLETPVXXAK

SEQ ID NO: 20534 - protein, 41 aa, Artificial Sequence
  Non-cyclic GFR-binding peptide
  MOD_RES (1)..(3)..(35): Xaa is C or S
XGXSRVVMNPIKGYIVNSSDDFYLVNIPSLKTPAXTPKTVH

SEQ ID NO: 20535 - protein, 35 aa, Artificial Sequence
  Non-cyclic GFR-binding peptide
  MOD_RES (31)..(32): Xaa is C or S
RVVMNPIKGYIVNSSDDFYLVNIPSLKTPAXXPKP

SEQ ID NO: 20536 - protein, 41 aa, Artificial Sequence
  Non-cyclic GFR-binding peptide
  MOD_RES (1)..(3)..(35)..(36): Xaa is C or S
XGXSRVVMNPIKGYIVNSSDDFYLVNIPSLKTPAXXPKPVH

SEQ ID NO: 20537 - protein, 38 aa, Artificial Sequence
  Non-cyclic GFR-binding peptide
  MOD_RES (2)..(36)..(37): Xaa is C or S
  MOD_RES (14)..(15)..(16)..(17)..(18): Xaa is A or G
  MOD_RES (19)..(20)..(21)..(22): Xaa is A or G or absent
GXGEVVMEPIKGYXXXXXXXXXFYLMNIPSLETPVXXA

SEQ ID NO: 20538 - protein, 38 aa, Artificial Sequence
  Non-cyclic GFR-binding peptide
  MOD_RES (1)..(3)..(37)..(38): Xaa is C or S
  MOD_RES (15)..(16)..(17)..(18)..(19): Xaa is A or G
  MOD_RES (20)..(21)..(22)..(23): Xaa is A or G or absent
XGXARVVMNPIKGYXXXXXXXXXFYLVNIPSLQTPAXX

SEQ ID NO: 20539 - protein, 38 aa, Artificial Sequence
  Non-cyclic GFR-binding peptide
  MOD_RES (1)..(33)..(34): Xaa is C or S
XGEVVMEPIKGYVVKDYEDFYLMNIPSLETPVXXAKPI

SEQ ID NO: 20540 - protein, 37 aa, Artificial Sequence
  Non-cyclic GFR-binding peptide
  MOD_RES (1)..(34)..(35): Xaa is C or S
  MOD_RES (12)..(13)..(14)..(15)..(16): Xaa is A or G
  MOD_RES (17)..(18)..(19)..(20): Xaa is A or G or absent
XEEVIMPIKGYXXXXXXXXXFYLMNIPSTKVPAXXTS

SEQ ID NO: 20541 - protein, 35 aa, Artificial Sequence
  Non-cyclic GFR-binding peptide
  MOD_RES (31)..(32): Xaa is C or S
EVVMEPIKGYVVKDYEDFYLMNIPSLETPVXXAKP

SEQ ID NO: 20542 - protein, 41 aa, Artificial Sequence
  Non-cyclic GFR-binding peptide
  MOD_RES (2)..(4)..(38): Xaa is C or S
  MOD_RES (16)..(17)..(18)..(19)..(20): Xaa is A or G
  MOD_RES (21)..(22)..(23)..(24): Xaa is A or G or absent
HXGXSRVVMNPIKGYXXXXXXXXXFYLVNIPSLKTPAXTPK

SEQ ID NO: 20543 - protein, 39 aa, Artificial Sequence
  Non-cyclic GFR-binding peptide
  MOD_RES (33)..(34): Xaa is C or S
EAVSMGEPIKGYTPVGMDDFYLVNIPSLKTPVXXAKGVK

SEQ ID NO: 20544 - protein, 31 aa, Artificial Sequence
  Non-cyclic GFR-binding peptide
AEVVMDPIKGYVVNNAADFYLINIPSLRAPV

SEQ ID NO: 20545 - protein, 32 aa, Artificial Sequence
  Non-cyclic GFR-binding peptide
  MOD_RES (11)..(12)..(13)..(14)..(15): Xaa is A or G
  MOD_RES (16)..(17)..(18)..(19): Xaa is A or G or absent
KVVMNPIKGYXXXXXXXXXFYLVNIPSLKTPA

SEQ ID NO: 20546 - protein, 43 aa, Artificial Sequence
  Non-cyclic GFR-binding peptide
  MOD_RES (2)..(4)..(38)..(39): Xaa is C or S
  MOD_RES (16)..(17)..(18)..(19)..(20): Xaa is A or G
  MOD_RES (21)..(22)..(23)..(24): Xaa is A or G or absent
RXGXGEVVMDPIKGYXXXXXXXXXFYLMNIPSLETPVXXAKPI

SEQ ID NO: 20547 - protein, 42 aa, Artificial Sequence
  Non-cyclic GFR-binding peptide
  MOD_RES (2)..(36)..(37): Xaa is C or S
  MOD_RES (14)..(15)..(16)..(17)..(18): Xaa is A or G
  MOD_RES (19)..(20)..(21)..(22): Xaa is A or G or absent
GXGEVVMDPIKGYXXXXXXXXXFYLMNIPSLETPVXXAKPIK

SEQ ID NO: 20548 - protein, 32 aa, Artificial Sequence
  Non-cyclic GFR-binding peptide
  MOD_RES (11)..(12)..(13)..(14)..(15): Xaa is A or G
  MOD_RES (16)..(17)..(18)..(19): Xaa is A or G or absent
EEVIMPIKGYXXXXXXXXXFYLMNIPSTKVPA

SEQ ID NO: 20549 - protein, 38 aa, Artificial Sequence
  Non-cyclic GFR-binding peptide
  MOD_RES (1)..(3)..(35)..(36): Xaa is C or S
XGXGEVVMDPIKGYVVKENEDFYLMNIPSLETPVXXAK

SEQ ID NO: 20550 - protein, 33 aa, Artificial Sequence
  Non-cyclic GFR-binding peptide
  MOD_RES (33)..(33): Xaa is C or S
  MOD_RES (11)..(12)..(13)..(14)..(15): Xaa is A or G
  MOD_RES (16)..(17)..(18)..(19): Xaa is A or G or absent
EVVMDPIKGYXXXXXXXXXFYLINIPSLRAPVX

SEQ ID NO: 20551 - protein, 34 aa, Artificial Sequence
  Non-cyclic GFR-binding peptide
  MOD_RES (2)..(34): Xaa is C or S
GXGEVVMDPIKGYVVKENEDFYLMNIPSLETPVX

SEQ ID NO: 20552 - protein, 35 aa, Artificial Sequence
  Non-cyclic GFR-binding peptide
  MOD_RES (2)..(34)..(35): Xaa is C or S
GXARVVMNPIKGYIVNSSDDFYLVNIPSLQTPAXX

SEQ ID NO: 20553 - protein, 31 aa, Artificial Sequence
  Non-cyclic GFR-binding peptide
GEVVMEPIKGYVVKDYEDFYLMNIPSLETPV

SEQ ID NO: 20554 - protein, 40 aa, Artificial Sequence
  Non-cyclic GFR-binding peptide
  MOD_RES (2)..(4)..(36)..(37): Xaa is C or S
RXGXGEVVMDPIKGYVVKENEDFYLMNIPSLETPVXXAKP

SEQ ID NO: 20555 - protein, 38 aa, Artificial Sequence
  Non-cyclic GFR-binding peptide
  MOD_RES (2)..(4)..(36)..(37): Xaa is C or S
RXGXESVAMGPIKGYYTVVGKDFYLINIPSLKTPVXXA

SEQ ID NO: 20556 - protein, 37 aa, Artificial Sequence
  Non-cyclic GFR-binding peptide
  MOD_RES (2)..(4): Xaa is C or S
  MOD_RES (16)..(17)..(18)..(19)..(20): Xaa is A or G
  MOD_RES (21)..(22)..(23)..(24): Xaa is A or G or absent
RXGXESVAMGPIKGYXXXXXXXXXFYLINIPSLKTPV

SEQ ID NO: 20557 - protein, 40 aa, Artificial Sequence
  Non-cyclic GFR-binding peptide
  MOD_RES (2)..(34)..(35): Xaa is C or S
GXAKVVMNPIKGYIVNNSSDFYLVNIPSLKTPAXXAKPVA

SEQ ID NO: 20558 - protein, 36 aa, Artificial Sequence
  Non-cyclic GFR-binding peptide
  MOD_RES (2)..(34)..(35): Xaa is C or S
GXAKVVMNPIKGYIVNNSSDFYLVNIPSLKTPAXXA

SEQ ID NO: 20559 - protein, 34 aa, Artificial Sequence
  Non-cyclic GFR-binding peptide
  MOD_RES (1)..(3): Xaa is C or S
XGXSEVVMDPIKGYVVNNASDFYLINIPSLRTPV

SEQ ID NO: 20560 - protein, 37 aa, Artificial Sequence
  Non-cyclic GFR-binding peptide
  MOD_RES (31)..(32): Xaa is C or S
RVVMNPIKGYIVNSSDDFYLVNIPSLKTPAXXPKPVY

SEQ ID NO: 20561 - protein, 39 aa, Artificial Sequence
  Non-cyclic GFR-binding peptide
  MOD_RES (2)..(34)..(35): Xaa is C or S
GXGEVVMEPIKGYVVKDYEDFYLMNIPSLETPVXXAKPI

SEQ ID NO: 20562 - protein, 32 aa, Artificial Sequence
  Non-cyclic GFR-binding peptide
  MOD_RES (32)..(32): Xaa is C or S
SRVVMNPIKGYIVNSSDDFYLVNIPSLKTPAX

SEQ ID NO: 20563 - protein, 35 aa, Artificial Sequence
  Non-cyclic GFR-binding peptide
  MOD_RES (1)..(3)..(35): Xaa is C or S
XGXAKVVMNPIKGYIVNNSSDFYLVNIPSLKTPAX

SEQ ID NO: 20564 - protein, 36 aa, Artificial Sequence
  Non-cyclic GFR-binding peptide
  MOD_RES (32)..(33): Xaa is C or S
GEVVMDPIKGYVVKENEDFYLMNIPSLETPVXXAKP

SEQ ID NO: 20565 - protein, 40 aa, Artificial Sequence
  Non-cyclic GFR-binding peptide
  MOD_RES (2)..(36)..(37): Xaa is C or S
  MOD_RES (14)..(15)..(16)..(17)..(18): Xaa is A or G
  MOD_RES (19)..(20)..(21)..(22): Xaa is A or G or absent
GXAEVVMDPIKGYXXXXXXXXXFYLINIPSLRAPVXXSAP

SEQ ID NO: 20566 - protein, 35 aa, Artificial Sequence
  Non-cyclic GFR-binding peptide
  MOD_RES (1)..(32)..(33): Xaa is C or S
XEEVIMPIKGYLLVRGNDFYLMNIPSTKVPAXXTS

SEQ ID NO: 20567 - protein, 36 aa, Artificial Sequence
  Non-cyclic GFR-binding peptide
  MOD_RES (31)..(31): Xaa is C or S
RVVMNPIKGYIVNSSDDFYLVNIPSLKTPAXTPKTV

SEQ ID NO: 20568 - protein, 39 aa, Artificial Sequence
  Non-cyclic GFR-binding peptide
  MOD_RES (1)..(33)..(34): Xaa is C or S
XSRVVMNPIKGYIVNSSDDFYLVNIPSLKTPAXXPKPVH

SEQ ID NO: 20569 - protein, 40 aa, Artificial Sequence
  Non-cyclic GFR-binding peptide
  MOD_RES (1)..(3)..(34)..(35): Xaa is C or S
XGXEEVIMPIKGYLLVRGNDFYLMNIPSTKVPAXXTSPVR

SEQ ID NO: 20570 - protein, 38 aa, Artificial Sequence
  Non-cyclic GFR-binding peptide
  MOD_RES (2)..(34)..(35): Xaa is C or S
GXSRVVMNPIKGYIVNSSDDFYLVNIPSLKTPAXXPKP

SEQ ID NO: 20571 - protein, 36 aa, Artificial Sequence
  Non-cyclic GFR-binding peptide
  MOD_RES (1)..(33)..(34): Xaa is C or S
XARVVMNPIKGYIVNSSDDFYLVNIPSLQTPAXXPK

SEQ ID NO: 20572 - protein, 36 aa, Artificial Sequence
  Non-cyclic GFR-binding peptide
  MOD_RES (34)..(35): Xaa is C or S
  MOD_RES (12)..(13)..(14)..(15)..(16): Xaa is A or G
  MOD_RES (17)..(18)..(19)..(20): Xaa is A or G or absent
SRVVMNPIKGYXXXXXXXXXFYLVNIPSLKTPAXXP

SEQ ID NO: 20573 - protein, 36 aa, Artificial Sequence
  Non-cyclic GFR-binding peptide
  MOD_RES (2)..(33)..(34): Xaa is C or S
GXEEVIMPIKGYLLVRGNDFYLMNIPSTKVPAXXTS

SEQ ID NO: 20574 - protein, 40 aa, Artificial Sequence
  Non-cyclic GFR-binding peptide
  MOD_RES (34)..(35): Xaa is C or S
  MOD_RES (12)..(13)..(14)..(15)..(16): Xaa is A or G
  MOD_RES (17)..(18)..(19)..(20): Xaa is A or G or absent
AKVVMNPIKGYXXXXXXXXXFYLVNIPSLKTPAXXAKPVA

SEQ ID NO: 20575 - protein, 32 aa, Artificial Sequence
  Non-cyclic GFR-binding peptide
  MOD_RES (31)..(32): Xaa is C or S
EVVMDPIKGYVVKENEDFYLMNIPSLETPVXX

SEQ ID NO: 20576 - protein, 35 aa, Artificial Sequence
  Non-cyclic GFR-binding peptide
  MOD_RES (1)..(35): Xaa is C or S
  MOD_RES (13)..(14)..(15)..(16)..(17): Xaa is A or G
  MOD_RES (18)..(19)..(20)..(21): Xaa is A or G or absent
XARVVMNPIKGYXXXXXXXXXFYLVNIPSLQTPAX

SEQ ID NO: 20577 - protein, 44 aa, Artificial Sequence
  Non-cyclic GFR-binding peptide
  MOD_RES (2)..(4)..(38)..(39): Xaa is C or S
  MOD_RES (16)..(17)..(18)..(19)..(20): Xaa is A or G
  MOD_RES (21)..(22)..(23)..(24): Xaa is A or G or absent
HXGXSRVVMNPIKGYXXXXXXXXXFYLVNIPSLKTPAXXPKPVY

SEQ ID NO: 20578 - protein, 39 aa, Artificial Sequence
  Non-cyclic GFR-binding peptide
  MOD_RES (33)..(34): Xaa is C or S
  MOD_RES (11)..(12)..(13)..(14)..(15): Xaa is A or G
  MOD_RES (16)..(17)..(18)..(19): Xaa is A or G or absent
EEVIMPIKGYXXXXXXXXXFYLMNIPSTKVPAXXTSPVR

SEQ ID NO: 20579 - protein, 34 aa, Artificial Sequence
  Non-cyclic GFR-binding peptide
  MOD_RES (1)..(1): Xaa is C or S
  MOD_RES (13)..(14)..(15)..(16)..(17): Xaa is A or G
  MOD_RES (18)..(19)..(20)..(21): Xaa is A or G or absent
XGEVVMEPIKGYXXXXXXXXXFYLMNIPSLETPV

SEQ ID NO: 20580 - protein, 38 aa, Artificial Sequence
  Non-cyclic GFR-binding peptide
  MOD_RES (34)..(35): Xaa is C or S
  MOD_RES (12)..(13)..(14)..(15)..(16): Xaa is A or G
  MOD_RES (17)..(18)..(19)..(20): Xaa is A or G or absent
SEVVMDPIKGYXXXXXXXXXFYLINIPSLRTPVXXTPP

SEQ ID NO: 20581 - protein, 36 aa, Artificial Sequence
  Non-cyclic GFR-binding peptide
  MOD_RES (2)..(4): Xaa is C or S
  MOD_RES (15)..(16)..(17)..(18)..(19): Xaa is A or G
  MOD_RES (20)..(21)..(22)..(23): Xaa is A or G or absent
LXGXEEVIMPIKGYXXXXXXXXXFYLMNIPSTKVPA

SEQ ID NO: 20582 - protein, 33 aa, Artificial Sequence
  Non-cyclic GFR-binding peptide
  MOD_RES (32)..(33): Xaa is C or S
SRVVMNPIKGYIVNSSDDFYLVNIPSLKTPAXX

SEQ ID NO: 20583 - protein, 35 aa, Artificial Sequence
  Non-cyclic GFR-binding peptide
  MOD_RES (1)..(3)..(35): Xaa is C or S
XGXAEVVMDPIKGYVVNNAADFYLINIPSLRAPVX

SEQ ID NO: 20584 - protein, 37 aa, Artificial Sequence
  Non-cyclic GFR-binding peptide
  MOD_RES (2)..(34)..(35): Xaa is C or S
GXARVVMNPIKGYIVNSSDDFYLVNIPSLQTPAXXPK

SEQ ID NO: 20585 - protein, 37 aa, Artificial Sequence
  Non-cyclic GFR-binding peptide
  MOD_RES (1)..(36)..(37): Xaa is C or S
  MOD_RES (14)..(15)..(16)..(17)..(18): Xaa is A or G
  MOD_RES (19)..(20)..(21)..(22): Xaa is A or G or absent
XEAVSMGEPIKGYXXXXXXXXXFYLVNIPSLKTPVXX

SEQ ID NO: 20586 - protein, 33 aa, Artificial Sequence
  Non-cyclic GFR-binding peptide
  MOD_RES (33)..(33): Xaa is C or S
  MOD_RES (11)..(12)..(13)..(14)..(15): Xaa is A or G
  MOD_RES (16)..(17)..(18)..(19): Xaa is A or G or absent
EVVMDPIKGYXXXXXXXXXFYLINIPSLRTPVX

SEQ ID NO: 20587 - protein, 39 aa, Artificial Sequence
  Non-cyclic GFR-binding peptide
  MOD_RES (1)..(3)..(34)..(35): Xaa is C or S
XGXEEVIMPIKGYLLVRGNDFYLMNIPSTKVPAXXTSPV

SEQ ID NO: 20588 - protein, 34 aa, Artificial Sequence
  Non-cyclic GFR-binding peptide
  MOD_RES (31)..(32): Xaa is C or S
KVVMNPIKGYIVNNSSDFYLVNIPSLKTPAXXAK

SEQ ID NO: 20589 - protein, 37 aa, Artificial Sequence
  Non-cyclic GFR-binding peptide
  MOD_RES (1)..(3)..(37): Xaa is C or S
  MOD_RES (15)..(16)..(17)..(18)..(19): Xaa is A or G
  MOD_RES (20)..(21)..(22)..(23): Xaa is A or G or absent
XGXAEVVMDPIKGYXXXXXXXXXFYLINIPSLRAPVX

SEQ ID NO: 20590 - protein, 42 aa, Artificial Sequence
  Non-cyclic GFR-binding peptide
  MOD_RES (2)..(4)..(36)..(37): Xaa is C or S
HXGXSRVVMNPIKGYIVNSSDDFYLVNIPSLKTPAXXPKPVY

SEQ ID NO: 20591 - protein, 35 aa, Artificial Sequence
  Non-cyclic GFR-binding peptide
  MOD_RES (35)..(35): Xaa is C or S
  MOD_RES (13)..(14)..(15)..(16)..(17): Xaa is A or G
  MOD_RES (18)..(19)..(20)..(21): Xaa is A or G or absent
EAVSMGEPIKGYXXXXXXXXXFYLVNIPSLKTPVX

SEQ ID NO: 20592 - protein, 36 aa, Artificial Sequence
  Non-cyclic GFR-binding peptide
  MOD_RES (2)..(34)..(35): Xaa is C or S
GXSEVVMDPIKGYVVNNASDFYLINIPSLRTPVXXT

SEQ ID NO: 20593 - protein, 38 aa, Artificial Sequence
  Non-cyclic GFR-binding peptide
  MOD_RES (32)..(33): Xaa is C or S
GEVVMEPIKGYVVKDYEDFYLMNIPSLETPVXXAKPIS

SEQ ID NO: 20594 - protein, 38 aa, Artificial Sequence
  Non-cyclic GFR-binding peptide
  MOD_RES (1)..(3)..(37)..(38): Xaa is C or S
  MOD_RES (15)..(16)..(17)..(18)..(19): Xaa is A or G
  MOD_RES (20)..(21)..(22)..(23): Xaa is A or G or absent
XGXGEVVMEPIKGYXXXXXXXXXFYLMNIPSLETPVXX

SEQ ID NO: 20595 - protein, 36 aa, Artificial Sequence
  Non-cyclic GFR-binding peptide
  MOD_RES (1)..(35)..(36): Xaa is C or S
  MOD_RES (13)..(14)..(15)..(16)..(17): Xaa is A or G
  MOD_RES (18)..(19)..(20)..(21): Xaa is A or G or absent
XARVVMNPIKGYXXXXXXXXXFYLVNIPSLQTPAXX

SEQ ID NO: 20596 - protein, 36 aa, Artificial Sequence
  Non-cyclic GFR-binding peptide
  MOD_RES (31)..(32): Xaa is C or S
KVVMNPIKGYIVNNSSDFYLVNIPSLKTPAXXAKPV

SEQ ID NO: 20597 - protein, 43 aa, Artificial Sequence
  Non-cyclic GFR-binding peptide
  MOD_RES (1)..(3)..(37)..(38): Xaa is C or S
  MOD_RES (15)..(16)..(17)..(18)..(19): Xaa is A or G
  MOD_RES (20)..(21)..(22)..(23): Xaa is A or G or absent
XGXARVVMNPIKGYXXXXXXXXXFYLVNIPSLQTPAXXPKPVT

SEQ ID NO: 20598 - protein, 37 aa, Artificial Sequence
  Non-cyclic GFR-binding peptide
  MOD_RES (33)..(34): Xaa is C or S
  MOD_RES (11)..(12)..(13)..(14)..(15): Xaa is A or G
  MOD_RES (16)..(17)..(18)..(19): Xaa is A or G or absent
KVVMNPIKGYXXXXXXXXXFYLVNIPSLKTPAXXAKP

SEQ ID NO: 20599 - protein, 35 aa, Artificial Sequence
  Non-cyclic GFR-binding peptide
  MOD_RES (34)..(35): Xaa is C or S
  MOD_RES (12)..(13)..(14)..(15)..(16): Xaa is A or G
  MOD_RES (17)..(18)..(19)..(20): Xaa is A or G or absent
AKVVMNPIKGYXXXXXXXXXFYLVNIPSLKTPAXX

SEQ ID NO: 20600 - protein, 31 aa, Artificial Sequence
  Non-cyclic GFR-binding peptide
AKVVMNPIKGYIVNNSSDFYLVNIPSLKTPA

SEQ ID NO: 20601 - protein, 41 aa, Artificial Sequence
  Non-cyclic GFR-binding peptide
  MOD_RES (2)..(4)..(38)..(39): Xaa is C or S
  MOD_RES (16)..(17)..(18)..(19)..(20): Xaa is A or G
  MOD_RES (21)..(22)..(23)..(24): Xaa is A or G or absent
RXGXGEVVMEPIKGYXXXXXXXXXFYLMNIPSLETPVXXAK

SEQ ID NO: 20602 - protein, 40 aa, Artificial Sequence
  Non-cyclic GFR-binding peptide
  MOD_RES (1)..(3)..(35)..(36): Xaa is C or S
XGXARVVMNPIKGYIVNSSDDFYLVNIPSLQTPAXXPKPV

SEQ ID NO: 20603 - protein, 37 aa, Artificial Sequence
  Non-cyclic GFR-binding peptide
  MOD_RES (1)..(33)..(34): Xaa is C or S
XSRVVMNPIKGYIVNSSDDFYLVNIPSLKTPAXXPKP

SEQ ID NO: 20604 - protein, 37 aa, Artificial Sequence
  Non-cyclic GFR-binding peptide
  MOD_RES (31)..(32): Xaa is C or S
EVVMDPIKGYVVNNAADFYLINIPSLRAPVXXSAPAA

SEQ ID NO: 20605 - protein, 34 aa, Artificial Sequence
  Non-cyclic GFR-binding peptide
  MOD_RES (1)..(32)..(33): Xaa is C or S
XEEVIMPIKGYLLVRGNDFYLMNIPSTKVPAXXT

SEQ ID NO: 20606 - protein, 36 aa, Artificial Sequence
  Non-cyclic GFR-binding peptide
  MOD_RES (34)..(35): Xaa is C or S
  MOD_RES (12)..(13)..(14)..(15)..(16): Xaa is A or G
  MOD_RES (17)..(18)..(19)..(20): Xaa is A or G or absent
SEVVMDPIKGYXXXXXXXXXFYLINIPSLRTPVXXT

SEQ ID NO: 20607 - protein, 31 aa, Artificial Sequence
  Non-cyclic GFR-binding peptide
  MOD_RES (31)..(31): Xaa is C or S
RVVMNPIKGYIVNSSDDFYLVNIPSLKTPAX

SEQ ID NO: 20608 - protein, 41 aa, Artificial Sequence
  Non-cyclic GFR-binding peptide
  MOD_RES (2)..(35)..(36): Xaa is C or S
GXEAVSMGEPIKGYTPVGMDDFYLVNIPSLKTPVXXAKGVK

SEQ ID NO: 20609 - protein, 37 aa, Artificial Sequence
  Non-cyclic GFR-binding peptide
  MOD_RES (35)..(36): Xaa is C or S
  MOD_RES (13)..(14)..(15)..(16)..(17): Xaa is A or G
  MOD_RES (18)..(19)..(20)..(21): Xaa is A or G or absent
EAVSMGEPIKGYXXXXXXXXXFYLVNIPSLKTPVXXA

SEQ ID NO: 20610 - protein, 37 aa, Artificial Sequence
  Non-cyclic GFR-binding peptide
  MOD_RES (2)..(36)..(37): Xaa is C or S
  MOD_RES (14)..(15)..(16)..(17)..(18): Xaa is A or G
  MOD_RES (19)..(20)..(21)..(22): Xaa is A or G or absent
GXSRVVMNPIKGYXXXXXXXXXFYLVNIPSLKTPAXX

SEQ ID NO: 20611 - protein, 32 aa, Artificial Sequence
  Non-cyclic GFR-binding peptide
  MOD_RES (31)..(32): Xaa is C or S
EVVMDPIKGYVVNNASDFYLINIPSLRTPVXX

SEQ ID NO: 20612 - protein, 34 aa, Artificial Sequence
  Non-cyclic GFR-binding peptide
  MOD_RES (33)..(34): Xaa is C or S
  MOD_RES (11)..(12)..(13)..(14)..(15): Xaa is A or G
  MOD_RES (16)..(17)..(18)..(19): Xaa is A or G or absent
EVVMDPIKGYXXXXXXXXXFYLINIPSLRAPVXX

SEQ ID NO: 20613 - protein, 38 aa, Artificial Sequence
  Non-cyclic GFR-binding peptide
  MOD_RES (1)..(3)..(36)..(37): Xaa is C or S
XGXEAVSMGEPIKGYTPVGMDDFYLVNIPSLKTPVXXA

SEQ ID NO: 20614 - protein, 36 aa, Artificial Sequence
  Non-cyclic GFR-binding peptide
  MOD_RES (2)..(34)..(35): Xaa is C or S
GXSRVVMNPIKGYIVNSSDDFYLVNIPSLKTPAXXP

SEQ ID NO: 20615 - protein, 34 aa, Artificial Sequence
  Non-cyclic GFR-binding peptide
  MOD_RES (31)..(32): Xaa is C or S
SVAMGPIKGYYTVVGKDFYLINIPSLKTPVXXAK

SEQ ID NO: 20616 - protein, 43 aa, Artificial Sequence
  Non-cyclic GFR-binding peptide
  MOD_RES (2)..(4)..(38)..(39): Xaa is C or S
  MOD_RES (16)..(17)..(18)..(19)..(20): Xaa is A or G
  MOD_RES (21)..(22)..(23)..(24): Xaa is A or G or absent
RXGXSEVVMDPIKGYXXXXXXXXXFYLINIPSLRTPVXXTPPT

SEQ ID NO: 20617 - protein, 32 aa, Artificial Sequence
  Non-cyclic GFR-binding peptide
  MOD_RES (31)..(32): Xaa is C or S
EVVMDPIKGYVVNNAADFYLINIPSLRAPVXX

SEQ ID NO: 20618 - protein, 36 aa, Artificial Sequence
  Non-cyclic GFR-binding peptide
  MOD_RES (1)..(3)..(35)..(36): Xaa is C or S
XGXSEVVMDPIKGYVVNNASDFYLINIPSLRTPVXX

SEQ ID NO: 20619 - protein, 37 aa, Artificial Sequence
  Non-cyclic GFR-binding peptide
  MOD_RES (34)..(34): Xaa is C or S
  MOD_RES (12)..(13)..(14)..(15)..(16): Xaa is A or G
  MOD_RES (17)..(18)..(19)..(20): Xaa is A or G or absent
SRVVMNPIKGYXXXXXXXXXFYLVNIPSLKTPAXTPK

SEQ ID NO: 20620 - protein, 38 aa, Artificial Sequence
  Non-cyclic GFR-binding peptide
  MOD_RES (1)..(33)..(34): Xaa is C or S
XESVAMGPIKGYYTVVGKDFYLINIPSLKTPVXXAKSA

SEQ ID NO: 20621 - protein, 38 aa, Artificial Sequence
  Non-cyclic GFR-binding peptide
  MOD_RES (1)..(35)..(36): Xaa is C or S
  MOD_RES (13)..(14)..(15)..(16)..(17): Xaa is A or G
  MOD_RES (18)..(19)..(20)..(21): Xaa is A or G or absent
XGEVVMDPIKGYXXXXXXXXXFYLMNIPSLETPVXXAK

SEQ ID NO: 20622 - protein, 37 aa, Artificial Sequence
  Non-cyclic GFR-binding peptide
  MOD_RES (1)..(3)..(35)..(36): Xaa is C or S
XGXARVVMNPIKGYIVNSSDDFYLVNIPSLQTPAXXP

SEQ ID NO: 20623 - protein, 38 aa, Artificial Sequence
  Non-cyclic GFR-binding peptide
  MOD_RES (33)..(34): Xaa is C or S
  MOD_RES (11)..(12)..(13)..(14)..(15): Xaa is A or G
  MOD_RES (16)..(17)..(18)..(19): Xaa is A or G or absent
RVVMNPIKGYXXXXXXXXXFYLVNIPSLQTPAXXPKPV

SEQ ID NO: 20624 - protein, 35 aa, Artificial Sequence
  Non-cyclic GFR-binding peptide
  MOD_RES (34)..(35): Xaa is C or S
  MOD_RES (12)..(13)..(14)..(15)..(16): Xaa is A or G
  MOD_RES (17)..(18)..(19)..(20): Xaa is A or G or absent
GEVVMDPIKGYXXXXXXXXXFYLMNIPSLETPVXX

SEQ ID NO: 20625 - protein, 33 aa, Artificial Sequence
  Non-cyclic GFR-binding peptide
  MOD_RES (12)..(13)..(14)..(15)..(16): Xaa is A or G
  MOD_RES (17)..(18)..(19)..(20): Xaa is A or G or absent
AEVVMDPIKGYXXXXXXXXXFYLINIPSLRAPV

SEQ ID NO: 20626 - protein, 34 aa, Artificial Sequence
  Non-cyclic GFR-binding peptide
  MOD_RES (31)..(32): Xaa is C or S
EVVMDPIKGYVVNNASDFYLINIPSLRTPVXXTP

SEQ ID NO: 20627 - protein, 36 aa, Artificial Sequence
  Non-cyclic GFR-binding peptide
  MOD_RES (33)..(34): Xaa is C or S
  MOD_RES (11)..(12)..(13)..(14)..(15): Xaa is A or G
  MOD_RES (16)..(17)..(18)..(19): Xaa is A or G or absent
EVVMDPIKGYXXXXXXXXXFYLINIPSLRAPVXXSA

SEQ ID NO: 20628 - protein, 40 aa, Artificial Sequence
  Non-cyclic GFR-binding peptide
  MOD_RES (2)..(4)..(36): Xaa is C or S
HXGXSRVVMNPIKGYIVNSSDDFYLVNIPSLKTPAXTPKT

SEQ ID NO: 20629 - protein, 39 aa, Artificial Sequence
  Non-cyclic GFR-binding peptide
  MOD_RES (1)..(3)..(35)..(36): Xaa is C or S
XGXAKVVMNPIKGYIVNNSSDFYLVNIPSLKTPAXXAKP

SEQ ID NO: 20630 - protein, 42 aa, Artificial Sequence
  Non-cyclic GFR-binding peptide
  MOD_RES (1)..(3)..(38)..(39): Xaa is C or S
  MOD_RES (16)..(17)..(18)..(19)..(20): Xaa is A or G
  MOD_RES (21)..(22)..(23)..(24): Xaa is A or G or absent
XGXEAVSMGEPIKGYXXXXXXXXXFYLVNIPSLKTPVXXAKG

SEQ ID NO: 20631 - protein, 39 aa, Artificial Sequence
  Non-cyclic GFR-binding peptide
  MOD_RES (34)..(35): Xaa is C or S
  MOD_RES (12)..(13)..(14)..(15)..(16): Xaa is A or G
  MOD_RES (17)..(18)..(19)..(20): Xaa is A or G or absent
GEVVMEPIKGYXXXXXXXXXFYLMNIPSLETPVXXAKPI

SEQ ID NO: 20632 - protein, 34 aa, Artificial Sequence
  Non-cyclic GFR-binding peptide
  MOD_RES (33)..(34): Xaa is C or S
  MOD_RES (11)..(12)..(13)..(14)..(15): Xaa is A or G
  MOD_RES (16)..(17)..(18)..(19): Xaa is A or G or absent
EVVMDPIKGYXXXXXXXXXFYLINIPSLRTPVXX

SEQ ID NO: 20633 - protein, 37 aa, Artificial Sequence
  Non-cyclic GFR-binding peptide
  MOD_RES (34)..(35): Xaa is C or S
  MOD_RES (12)..(13)..(14)..(15)..(16): Xaa is A or G
  MOD_RES (17)..(18)..(19)..(20): Xaa is A or G or absent
GEVVMEPIKGYXXXXXXXXXFYLMNIPSLETPVXXAK

SEQ ID NO: 20634 - protein, 34 aa, Artificial Sequence
  Non-cyclic GFR-binding peptide
  MOD_RES (32)..(33): Xaa is C or S
GEVVMEPIKGYVVKDYEDFYLMNIPSLETPVXXA

SEQ ID NO: 20635 - protein, 38 aa, Artificial Sequence
  Non-cyclic GFR-binding peptide
  MOD_RES (2)..(4)..(36)..(37): Xaa is C or S
RXGXSEVVMDPIKGYVVNNASDFYLINIPSLRTPVXXT

SEQ ID NO: 20636 - protein, 33 aa, Artificial Sequence
  Non-cyclic GFR-binding peptide
  MOD_RES (31)..(32): Xaa is C or S
RVVMNPIKGYIVNSSDDFYLVNIPSLKTPAXXP

SEQ ID NO: 20637 - protein, 38 aa, Artificial Sequence
  Non-cyclic GFR-binding peptide
  MOD_RES (2)..(4)..(38): Xaa is C or S
  MOD_RES (16)..(17)..(18)..(19)..(20): Xaa is A or G
  MOD_RES (21)..(22)..(23)..(24): Xaa is A or G or absent
RXGXESVAMGPIKGYXXXXXXXXXFYLINIPSLKTPVX

SEQ ID NO: 20638 - protein, 37 aa, Artificial Sequence
  Non-cyclic GFR-binding peptide
  MOD_RES (1)..(35)..(36): Xaa is C or S
  MOD_RES (13)..(14)..(15)..(16)..(17): Xaa is A or G
  MOD_RES (18)..(19)..(20)..(21): Xaa is A or G or absent
XSRVVMNPIKGYXXXXXXXXXFYLVNIPSLKTPAXXP

SEQ ID NO: 20639 - protein, 39 aa, Artificial Sequence
  Non-cyclic GFR-binding peptide
  MOD_RES (2)..(4)..(38)..(39): Xaa is C or S
  MOD_RES (16)..(17)..(18)..(19)..(20): Xaa is A or G
  MOD_RES (21)..(22)..(23)..(24): Xaa is A or G or absent
RXGXGEVVMEPIKGYXXXXXXXXXFYLMNIPSLETPVXX

SEQ ID NO: 20640 - protein, 41 aa, Artificial Sequence
  Non-cyclic GFR-binding peptide
  MOD_RES (2)..(4)..(38)..(39): Xaa is C or S
  MOD_RES (16)..(17)..(18)..(19)..(20): Xaa is A or G
  MOD_RES (21)..(22)..(23)..(24): Xaa is A or G or absent
RXGXAEVVMDPIKGYXXXXXXXXXFYLINIPSLRAPVXXSA

SEQ ID NO: 20641 - protein, 40 aa, Artificial Sequence
  Non-cyclic GFR-binding peptide
  MOD_RES (1)..(3)..(38)..(39): Xaa is C or S
  MOD_RES (16)..(17)..(18)..(19)..(20): Xaa is A or G
  MOD_RES (21)..(22)..(23)..(24): Xaa is A or G or absent
XGXEAVSMGEPIKGYXXXXXXXXXFYLVNIPSLKTPVXXA

SEQ ID NO: 20642 - protein, 39 aa, Artificial Sequence
  Non-cyclic GFR-binding peptide
  MOD_RES (1)..(3)..(35)..(36): Xaa is C or S
XGXGEVVMDPIKGYVVKENEDFYLMNIPSLETPVXXAKP

SEQ ID NO: 20643 - protein, 33 aa, Artificial Sequence
  Non-cyclic GFR-binding peptide
  MOD_RES (2)..(2): Xaa is C or S
GXAEVVMDPIKGYVVNNAADFYLINIPSLRAPV

SEQ ID NO: 20644 - protein, 35 aa, Artificial Sequence
  Non-cyclic GFR-binding peptide
  MOD_RES (2)..(2): Xaa is C or S
  MOD_RES (14)..(15)..(16)..(17)..(18): Xaa is A or G
  MOD_RES (19)..(20)..(21)..(22): Xaa is A or G or absent
GXESVAMGPIKGYXXXXXXXXXFYLINIPSLKTPV

SEQ ID NO: 20645 - protein, 33 aa, Artificial Sequence
  Non-cyclic GFR-binding peptide
  MOD_RES (2)..(2): Xaa is C or S
GXSRVVMNPIKGYIVNSSDDFYLVNIPSLKTPA

SEQ ID NO: 20646 - protein, 39 aa, Artificial Sequence
  Non-cyclic GFR-binding peptide
  MOD_RES (1)..(3)..(37)..(38): Xaa is C or S
  MOD_RES (15)..(16)..(17)..(18)..(19): Xaa is A or G
  MOD_RES (20)..(21)..(22)..(23): Xaa is A or G or absent
XGXSEVVMDPIKGYXXXXXXXXXFYLINIPSLRTPVXXT

SEQ ID NO: 20647 - protein, 37 aa, Artificial Sequence
  Non-cyclic GFR-binding peptide
  MOD_RES (1)..(35)..(36): Xaa is C or S
  MOD_RES (13)..(14)..(15)..(16)..(17): Xaa is A or G
  MOD_RES (18)..(19)..(20)..(21): Xaa is A or G or absent
XGEVVMDPIKGYXXXXXXXXXFYLMNIPSLETPVXXA

SEQ ID NO: 20648 - protein, 33 aa, Artificial Sequence
  Non-cyclic GFR-binding peptide
  MOD_RES (1)..(33): Xaa is C or S
XESVAMGPIKGYYTVVGKDFYLINIPSLKTPVX

SEQ ID NO: 20649 - protein, 36 aa, Artificial Sequence
  Non-cyclic GFR-binding peptide
  MOD_RES (1)..(35)..(36): Xaa is C or S
  MOD_RES (13)..(14)..(15)..(16)..(17): Xaa is A or G
  MOD_RES (18)..(19)..(20)..(21): Xaa is A or G or absent
XGEVVMDPIKGYXXXXXXXXXFYLMNIPSLETPVXX

SEQ ID NO: 20650 - protein, 35 aa, Artificial Sequence
  Non-cyclic GFR-binding peptide
  MOD_RES (33)..(34): Xaa is C or S
EAVSMGEPIKGYTPVGMDDFYLVNIPSLKTPVXXA

SEQ ID NO: 20651 - protein, 42 aa, Artificial Sequence
  Non-cyclic GFR-binding peptide
  MOD_RES (1)..(36)..(37): Xaa is C or S
  MOD_RES (14)..(15)..(16)..(17)..(18): Xaa is A or G
  MOD_RES (19)..(20)..(21)..(22): Xaa is A or G or absent
XEAVSMGEPIKGYXXXXXXXXXFYLVNIPSLKTPVXXAKGVK

SEQ ID NO: 20652 - protein, 39 aa, Artificial Sequence
  Non-cyclic GFR-binding peptide
  MOD_RES (1)..(3)..(35)..(36): Xaa is C or S
XGXSEVVMDPIKGYVVNNASDFYLINIPSLRTPVXXTPP

SEQ ID NO: 20653 - protein, 38 aa, Artificial Sequence
  Non-cyclic GFR-binding peptide
  MOD_RES (33)..(34): Xaa is C or S
  MOD_RES (11)..(12)..(13)..(14)..(15): Xaa is A or G
  MOD_RES (16)..(17)..(18)..(19): Xaa is A or G or absent
EVVMDPIKGYXXXXXXXXXFYLINIPSLRAPVXXSAPA

SEQ ID NO: 20654 - protein, 37 aa, Artificial Sequence
  Non-cyclic GFR-binding peptide
  MOD_RES (2)..(36)..(37): Xaa is C or S
  MOD_RES (14)..(15)..(16)..(17)..(18): Xaa is A or G
  MOD_RES (19)..(20)..(21)..(22): Xaa is A or G or absent
GXGEVVMDPIKGYXXXXXXXXXFYLMNIPSLETPVXX

SEQ ID NO: 20655 - protein, 38 aa, Artificial Sequence
  Non-cyclic GFR-binding peptide
  MOD_RES (34)..(35): Xaa is C or S
  MOD_RES (12)..(13)..(14)..(15)..(16): Xaa is A or G
  MOD_RES (17)..(18)..(19)..(20): Xaa is A or G or absent
SRVVMNPIKGYXXXXXXXXXFYLVNIPSLKTPAXXPKP

SEQ ID NO: 20656 - protein, 33 aa, Artificial Sequence
  Non-cyclic GFR-binding peptide
  MOD_RES (2)..(2): Xaa is C or S
GXSEVVMDPIKGYVVNNASDFYLINIPSLRTPV

SEQ ID NO: 20657 - protein, 35 aa, Artificial Sequence
  Non-cyclic GFR-binding peptide
  MOD_RES (32)..(33): Xaa is C or S
AEVVMDPIKGYVVNNAADFYLINIPSLRAPVXXSA

SEQ ID NO: 20658 - protein, 35 aa, Artificial Sequence
  Non-cyclic GFR-binding peptide
  MOD_RES (1)..(3)..(34)..(35): Xaa is C or S
XGXEEVIMPIKGYLLVRGNDFYLMNIPSTKVPAXX

SEQ ID NO: 20659 - protein, 42 aa, Artificial Sequence
  Non-cyclic GFR-binding peptide
  MOD_RES (2)..(4)..(36)..(37): Xaa is C or S
RXGXESVAMGPIKGYYTVVGKDFYLINIPSLKTPVXXAKSAK

SEQ ID NO: 20660 - protein, 35 aa, Artificial Sequence
  Non-cyclic GFR-binding peptide
  MOD_RES (33)..(34): Xaa is C or S
  MOD_RES (11)..(12)..(13)..(14)..(15): Xaa is A or G
  MOD_RES (16)..(17)..(18)..(19): Xaa is A or G or absent
EEVIMPIKGYXXXXXXXXXFYLMNIPSTKVPAXXT

SEQ ID NO: 20661 - protein, 39 aa, Artificial Sequence
  Non-cyclic GFR-binding peptide
  MOD_RES (1)..(3)..(37)..(38): Xaa is C or S
  MOD_RES (15)..(16)..(17)..(18)..(19): Xaa is A or G
  MOD_RES (20)..(21)..(22)..(23): Xaa is A or G or absent
XGXAKVVMNPIKGYXXXXXXXXXFYLVNIPSLKTPAXXA

SEQ ID NO: 20662 - protein, 33 aa, Artificial Sequence
  Non-cyclic GFR-binding peptide
  MOD_RES (32)..(33): Xaa is C or S
GEVVMDPIKGYVVKENEDFYLMNIPSLETPVXX

SEQ ID NO: 20663 - protein, 38 aa, Artificial Sequence
  Non-cyclic GFR-binding peptide
  MOD_RES (34)..(35): Xaa is C or S
  MOD_RES (12)..(13)..(14)..(15)..(16): Xaa is A or G
  MOD_RES (17)..(18)..(19)..(20): Xaa is A or G or absent
GEVVMDPIKGYXXXXXXXXXFYLMNIPSLETPVXXAKP

SEQ ID NO: 20664 - protein, 35 aa, Artificial Sequence
  Non-cyclic GFR-binding peptide
  MOD_RES (1)..(3)..(35): Xaa is C or S
XGXGEVVMDPIKGYVVKENEDFYLMNIPSLETPVX

SEQ ID NO: 20665 - protein, 40 aa, Artificial Sequence
  Non-cyclic GFR-binding peptide
  MOD_RES (2)..(4)..(36)..(37): Xaa is C or S
HXGXARVVMNPIKGYIVNSSDDFYLVNIPSLQTPAXXPKP

SEQ ID NO: 20666 - protein, 41 aa, Artificial Sequence
  Non-cyclic GFR-binding peptide
  MOD_RES (1)..(3)..(35)..(36): Xaa is C or S
XGXESVAMGPIKGYYTVVGKDFYLINIPSLKTPVXXAKSAK

SEQ ID NO: 20667 - protein, 32 aa, Artificial Sequence
  Non-cyclic GFR-binding peptide
  MOD_RES (31)..(32): Xaa is C or S
RVVMNPIKGYIVNSSDDFYLVNIPSLKTPAXX

SEQ ID NO: 20668 - protein, 43 aa, Artificial Sequence
  Non-cyclic GFR-binding peptide
  MOD_RES (1)..(3)..(37)..(38): Xaa is C or S
  MOD_RES (15)..(16)..(17)..(18)..(19): Xaa is A or G
  MOD_RES (20)..(21)..(22)..(23): Xaa is A or G or absent
XGXSEVVMDPIKGYXXXXXXXXXFYLINIPSLRTPVXXTPPTS

SEQ ID NO: 20669 - protein, 38 aa, Artificial Sequence
  Non-cyclic GFR-binding peptide
  MOD_RES (1)..(3)..(35)..(36): Xaa is C or S
XGXESVAMGPIKGYYTVVGKDFYLINIPSLKTPVXXAK

SEQ ID NO: 20670 - protein, 38 aa, Artificial Sequence
  Non-cyclic GFR-binding peptide
  MOD_RES (32)..(33): Xaa is C or S
AEVVMDPIKGYVVNNAADFYLINIPSLRAPVXXSAPAA

SEQ ID NO: 20671 - protein, 44 aa, Artificial Sequence
  Non-cyclic GFR-binding peptide
  MOD_RES (2)..(4)..(38)..(39): Xaa is C or S
  MOD_RES (16)..(17)..(18)..(19)..(20): Xaa is A or G
  MOD_RES (21)..(22)..(23)..(24): Xaa is A or G or absent
RXGXSEVVMDPIKGYXXXXXXXXXFYLINIPSLRTPVXXTPPTS

SEQ ID NO: 20672 - protein, 41 aa, Artificial Sequence
  Non-cyclic GFR-binding peptide
  MOD_RES (2)..(4)..(36)..(37): Xaa is C or S
RXGXSEVVMDPIKGYVVNNASDFYLINIPSLRTPVXXTPPT

SEQ ID NO: 20673 - protein, 36 aa, Artificial Sequence
  Non-cyclic GFR-binding peptide
  MOD_RES (2)..(4): Xaa is C or S
RXGXEAVSMGEPIKGYTPVGMDDFYLVNIPSLKTPV

SEQ ID NO: 20674 - protein, 41 aa, Artificial Sequence
  Non-cyclic GFR-binding peptide
  MOD_RES (1)..(3)..(35)..(36): Xaa is C or S
XGXARVVMNPIKGYIVNSSDDFYLVNIPSLQTPAXXPKPVT

SEQ ID NO: 20675 - protein, 33 aa, Artificial Sequence
  Non-cyclic GFR-binding peptide
  MOD_RES (33)..(33): Xaa is C or S
  MOD_RES (11)..(12)..(13)..(14)..(15): Xaa is A or G
  MOD_RES (16)..(17)..(18)..(19): Xaa is A or G or absent
RVVMNPIKGYXXXXXXXXXFYLVNIPSLQTPAX

SEQ ID NO: 20676 - protein, 35 aa, Artificial Sequence
  Non-cyclic GFR-binding peptide
  MOD_RES (2)..(33)..(34): Xaa is C or S
GXEEVIMPIKGYLLVRGNDFYLMNIPSTKVPAXXT

SEQ ID NO: 20677 - protein, 34 aa, Artificial Sequence
  Non-cyclic GFR-binding peptide
  MOD_RES (1)..(33)..(34): Xaa is C or S
XSEVVMDPIKGYVVNNASDFYLINIPSLRTPVXX

SEQ ID NO: 20678 - protein, 35 aa, Artificial Sequence
  Non-cyclic GFR-binding peptide
  MOD_RES (32)..(33): Xaa is C or S
ESVAMGPIKGYYTVVGKDFYLINIPSLKTPVXXAK
